United States Patent Application Publication US 2005/0255487 A1 - sequence listing, part 28

SEQ ID NO: 755866 - RNA, 19 nt, Homo sapiens
  misc_RNA (1)...(19): siRNA sense strand
cagaacaagcucauaguau

SEQ ID NO: 755867 - RNA, 19 nt, Homo sapiens
  misc_RNA (1)...(19): siRNA sense strand
cagaggcuuccacuuaaua

SEQ ID NO: 755868 - RNA, 19 nt, Homo sapiens
  misc_RNA (1)...(19): siRNA sense strand
agacaaaucugggcuucug

SEQ ID NO: 755869 - RNA, 19 nt, Homo sapiens
  misc_RNA (1)...(19): siRNA sense strand
cuacguaucauucuacaau

SEQ ID NO: 755870 - RNA, 19 nt, Homo sapiens
  misc_RNA (1)...(19): siRNA sense strand
uaauggguccuaaauaugu

SEQ ID NO: 755871 - RNA, 19 nt, Homo sapiens
  misc_RNA (1)...(19): siRNA sense strand
gcauuccuguugucucuuc

SEQ ID NO: 755872 - RNA, 19 nt, Homo sapiens
  misc_RNA (1)...(19): siRNA sense strand
ucuacuacaugaaggauau

SEQ ID NO: 755873 - RNA, 19 nt, Homo sapiens
  misc_RNA (1)...(19): siRNA sense strand
cagaagcuguuagagauca

SEQ ID NO: 755874 - RNA, 19 nt, Homo sapiens
  misc_RNA (1)...(19): siRNA sense strand
ccagaggcuuccacuuaau

SEQ ID NO: 755875 - RNA, 19 nt, Homo sapiens
  misc_RNA (1)...(19): siRNA sense strand
caaggaagaagcuggugaa

SEQ ID NO: 755876 - RNA, 19 nt, Homo sapiens
  misc_RNA (1)...(19): siRNA sense strand
cgaaauuguuugcuucaac

SEQ ID NO: 755877 - RNA, 19 nt, Homo sapiens
  misc_RNA (1)...(19): siRNA sense strand
cagcagaagcucuccaaau

SEQ ID NO: 755878 - RNA, 19 nt, Homo sapiens
  misc_RNA (1)...(19): siRNA sense strand
ggcuuccacuuaauauuga

SEQ ID NO: 755879 - RNA, 19 nt, Homo sapiens
  misc_RNA (1)...(19): siRNA sense strand
caaaagcucgaaauuguuu

SEQ ID NO: 755880 - RNA, 19 nt, Homo sapiens
  misc_RNA (1)...(19): siRNA sense strand
guggauaaucuugguauuu

SEQ ID NO: 755881 - RNA, 19 nt, Homo sapiens
  misc_RNA (1)...(19): siRNA sense strand
guugaaagcuuuugacagu

SEQ ID NO: 755882 - RNA, 19 nt, Homo sapiens
  misc_RNA (1)...(19): siRNA sense strand
cacagaccuucuacacaaa

SEQ ID NO: 755883 - RNA, 19 nt, Homo sapiens
  misc_RNA (1)...(19): siRNA sense strand
uugcugcccuucuccauga

SEQ ID NO: 755884 - RNA, 19 nt, Homo sapiens
  misc_RNA (1)...(19): siRNA sense strand
caguaauggguccuaaaua

SEQ ID NO: 755885 - RNA, 19 nt, Homo sapiens
  misc_RNA (1)...(19): siRNA sense strand
gggagugcauuggguuuca

SEQ ID NO: 755886 - RNA, 19 nt, Homo sapiens
  misc_RNA (1)...(19): siRNA sense strand
aacaauaucagaagaggaa

SEQ ID NO: 755887 - RNA, 19 nt, Homo sapiens
  misc_RNA (1)...(19): siRNA sense strand
caacagcaaagagcagcua

SEQ ID NO: 755888 - RNA, 19 nt, Homo sapiens
  misc_RNA (1)...(19): siRNA sense strand
gaagcuggugaaugcaauu

SEQ ID NO: 755889 - RNA, 19 nt, Homo sapiens
  misc_RNA (1)...(19): siRNA sense strand
aauggguccuaaauaugua

SEQ ID NO: 755890 - RNA, 19 nt, Homo sapiens
  misc_RNA (1)...(19): siRNA sense strand
caucaagacauccuacauc

SEQ ID NO: 755891 - RNA, 19 nt, Homo sapiens
  misc_RNA (1)...(19): siRNA sense strand
auucuacaaugcucuacua

SEQ ID NO: 755892 - RNA, 19 nt, Homo sapiens
  misc_RNA (1)...(19): siRNA sense strand
ugaaacugcagaaucuuug

SEQ ID NO: 755893 - RNA, 19 nt, Homo sapiens
  misc_RNA (1)...(19): siRNA sense strand
gcaaacacccaaggucucu

SEQ ID NO: 755894 - RNA, 19 nt, Homo sapiens
  misc_RNA (1)...(19): siRNA sense strand
ucaguaauggguccuaaau

SEQ ID NO: 755895 - RNA, 19 nt, Homo sapiens
  misc_RNA (1)...(19): siRNA sense strand
cuacaugaaggauauaaag

SEQ ID NO: 755896 - RNA, 19 nt, Homo sapiens
  misc_RNA (1)...(19): siRNA sense strand
gaguguuacagauucagua

SEQ ID NO: 755897 - RNA, 19 nt, Homo sapiens
  misc_RNA (1)...(19): siRNA sense strand
ugcaaaagcucgaaauugu

SEQ ID NO: 755898 - RNA, 19 nt, Homo sapiens
  misc_RNA (1)...(19): siRNA sense strand
cagugucagauucuucuua

SEQ ID NO: 755899 - RNA, 19 nt, Homo sapiens
  misc_RNA (1)...(19): siRNA sense strand
aaaaggacaucaagacauc

SEQ ID NO: 755900 - RNA, 19 nt, Homo sapiens
  misc_RNA (1)...(19): siRNA sense strand
ugucagauucuucuuacaa

SEQ ID NO: 755901 - RNA, 19 nt, Homo sapiens
  misc_RNA (1)...(19): siRNA sense strand
uagagaucauucccuuuua

SEQ ID NO: 755902 - RNA, 19 nt, Homo sapiens
  misc_RNA (1)...(19): siRNA sense strand
gaaaaggacaucaagacau

SEQ ID NO: 755903 - RNA, 19 nt, Homo sapiens
  misc_RNA (1)...(19): siRNA sense strand
gcagaagcuguuagagauc

SEQ ID NO: 755904 - RNA, 19 nt, Homo sapiens
  misc_RNA (1)...(19): siRNA sense strand
uggaucaggaugagaguuu

SEQ ID NO: 755905 - RNA, 19 nt, Homo sapiens
  misc_RNA (1)...(19): siRNA sense strand
caaauugaaaggugaacca

SEQ ID NO: 755906 - RNA, 19 nt, Homo sapiens
  misc_RNA (1)...(19): siRNA sense strand
auaugaagaaggcagauuu

SEQ ID NO: 755907 - RNA, 19 nt, Homo sapiens
  misc_RNA (1)...(19): siRNA sense strand
aucaagacauccuacauca

SEQ ID NO: 755908 - RNA, 19 nt, Homo sapiens
  misc_RNA (1)...(19): siRNA sense strand
gaugauguuugggacucuu

SEQ ID NO: 755909 - RNA, 19 nt, Homo sapiens
  misc_RNA (1)...(19): siRNA sense strand
gugcauuggguuucaguug

SEQ ID NO: 755910 - RNA, 19 nt, Homo sapiens
  misc_RNA (1)...(19): siRNA sense strand
cugcagaagcuguuagaga

SEQ ID NO: 755911 - RNA, 19 nt, Homo sapiens
  misc_RNA (1)...(19): siRNA sense strand
uggcauuccuguugucucu

SEQ ID NO: 755912 - RNA, 19 nt, Homo sapiens
  misc_RNA (1)...(19): siRNA sense strand
gcaaaagcucgaaauuguu

SEQ ID NO: 755913 - RNA, 19 nt, Homo sapiens
  misc_RNA (1)...(19): siRNA sense strand
ugggaagucuguauuagcu

SEQ ID NO: 755914 - RNA, 19 nt, Homo sapiens
  misc_RNA (1)...(19): siRNA sense strand
gugugaagguggaguacca

SEQ ID NO: 755915 - RNA, 19 nt, Homo sapiens
  misc_RNA (1)...(19): siRNA sense strand
aggcuuccacuuaauauug

SEQ ID NO: 755916 - RNA, 19 nt, Homo sapiens
  misc_RNA (1)...(19): siRNA sense strand
gaggcuuccacuuaauauu

SEQ ID NO: 755917 - RNA, 19 nt, Homo sapiens
  misc_RNA (1)...(19): siRNA sense strand
gcugugggaagucuguauu

SEQ ID NO: 755918 - RNA, 19 nt, Homo sapiens
  misc_RNA (1)...(19): siRNA sense strand
caaaucugggcuucugaug

SEQ ID NO: 755919 - RNA, 19 nt, Homo sapiens
  misc_RNA (1)...(19): siRNA sense strand
aauggaaccaaucuuaaga

SEQ ID NO: 755920 - RNA, 19 nt, Homo sapiens
  misc_RNA (1)...(19): siRNA sense strand
acacaaauggaaccaaucu

SEQ ID NO: 755921 - RNA, 19 nt, Homo sapiens
  misc_RNA (1)...(19): siRNA sense strand
cagaccuucuacacaaaug

SEQ ID NO: 755922 - RNA, 19 nt, Homo sapiens
  misc_RNA (1)...(19): siRNA sense strand
uaugaagaaggcagauuug

SEQ ID NO: 755923 - RNA, 19 nt, Homo sapiens
  misc_RNA (1)...(19): siRNA sense strand
ggaaaaggacaucaagaca

SEQ ID NO: 755924 - RNA, 19 nt, Homo sapiens
  misc_RNA (1)...(19): siRNA sense strand
aaaucugggcuucugauga

SEQ ID NO: 755925 - RNA, 19 nt, Homo sapiens
  misc_RNA (1)...(19): siRNA sense strand
agaagcuggugaaugcaau

SEQ ID NO: 755926 - RNA, 19 nt, Homo sapiens
  misc_RNA (1)...(19): siRNA sense strand
aaauggaaccaaucuuaag

SEQ ID NO: 755927 - RNA, 19 nt, Homo sapiens
  misc_RNA (1)...(19): siRNA sense strand
caaccagagacaagagugu

SEQ ID NO: 755928 - RNA, 19 nt, Homo sapiens
  misc_RNA (1)...(19): siRNA sense strand
ggaagaagcuggugaaugc

SEQ ID NO: 755929 - RNA, 19 nt, Homo sapiens
  misc_RNA (1)...(19): siRNA sense strand
gaacaagcucauaguauua

SEQ ID NO: 755930 - RNA, 19 nt, Homo sapiens
  misc_RNA (1)...(19): siRNA sense strand
cagaagcucuccaaauuga

SEQ ID NO: 755931 - RNA, 19 nt, Homo sapiens
  misc_RNA (1)...(19): siRNA sense strand
ucacagaccuucuacacaa

SEQ ID NO: 755932 - RNA, 19 nt, Homo sapiens
  misc_RNA (1)...(19): siRNA sense strand
agaacaagcucauaguauu

SEQ ID NO: 755933 - RNA, 19 nt, Homo sapiens
  misc_RNA (1)...(19): siRNA sense strand
gauaaugauuccuacguau

SEQ ID NO: 755934 - RNA, 19 nt, Homo sapiens
  misc_RNA (1)...(19): siRNA sense strand
acaaauggaaccaaucuua

SEQ ID NO: 755935 - RNA, 19 nt, Homo sapiens
  misc_RNA (1)...(19): siRNA sense strand
gaucuuggaugauguuugg

SEQ ID NO: 755936 - RNA, 19 nt, Homo sapiens
  misc_RNA (1)...(19): siRNA sense strand
caaauggaaccaaucuuaa

SEQ ID NO: 755937 - RNA, 19 nt, Homo sapiens
  misc_RNA (1)...(19): siRNA sense strand
ccacagaggccaguuguuu

SEQ ID NO: 755938 - RNA, 19 nt, Homo sapiens
  misc_RNA (1)...(19): siRNA sense strand
aguaauggguccuaaauau

SEQ ID NO: 755939 - RNA, 19 nt, Homo sapiens
  misc_RNA (1)...(19): siRNA sense strand
agcagaagcucuccaaauu

SEQ ID NO: 755940 - RNA, 19 nt, Homo sapiens
  misc_RNA (1)...(19): siRNA sense strand
caagacauccuacaucaug

SEQ ID NO: 755941 - RNA, 19 nt, Homo sapiens
  misc_RNA (1)...(19): siRNA sense strand
acaaugcucuacuacauga

SEQ ID NO: 755942 - RNA, 19 nt, Homo sapiens
  misc_RNA (1)...(19): siRNA sense strand
caugauuagugauggauuu

SEQ ID NO: 755943 - RNA, 19 nt, Homo sapiens
  misc_RNA (1)...(19): siRNA sense strand
aaucugggcuucugaugaa

SEQ ID NO: 755944 - RNA, 19 nt, Homo sapiens
  misc_RNA (1)...(19): siRNA sense strand
gaagcucuccaaauugaaa

SEQ ID NO: 755945 - RNA, 19 nt, Homo sapiens
  misc_RNA (1)...(19): siRNA sense strand
gcagaagcucuccaaauug

SEQ ID NO: 755946 - RNA, 19 nt, Homo sapiens
  misc_RNA (1)...(19): siRNA sense strand
cuacaaugcucuacuacau

SEQ ID NO: 755947 - RNA, 19 nt, Homo sapiens
  misc_RNA (1)...(19): siRNA sense strand
gacaagaguguuacagauu

SEQ ID NO: 755948 - RNA, 19 nt, Homo sapiens
  misc_RNA (1)...(19): siRNA sense strand
ugaugaaacugcagaaucu

SEQ ID NO: 755949 - RNA, 19 nt, Homo sapiens
  misc_RNA (1)...(19): siRNA sense strand
cccagaggcuuccacuuaa

SEQ ID NO: 755950 - RNA, 19 nt, Homo sapiens
  misc_RNA (1)...(19): siRNA sense strand
gagaagcucuggaaaagga

SEQ ID NO: 755951 - RNA, 19 nt, Homo sapiens
  misc_RNA (1)...(19): siRNA sense strand
agauaaugauuccuacgua

SEQ ID NO: 755952 - RNA, 19 nt, Homo sapiens
  misc_RNA (1)...(19): siRNA sense strand
ucccagaggcuuccacuua

SEQ ID NO: 755953 - RNA, 19 nt, Homo sapiens
  misc_RNA (1)...(19): siRNA sense strand
acaagaguguuacagauuc

SEQ ID NO: 755954 - RNA, 19 nt, Homo sapiens
  misc_RNA (1)...(19): siRNA sense strand
cuacacaaauggaaccaau

SEQ ID NO: 755955 - RNA, 19 nt, Homo sapiens
  misc_RNA (1)...(19): siRNA sense strand
ccagaacaagcucauagua

SEQ ID NO: 755956 - RNA, 19 nt, Homo sapiens
  misc_RNA (1)...(19): siRNA sense strand
caugaaggauauaaagauc

SEQ ID NO: 755957 - RNA, 19 nt, Homo sapiens
  misc_RNA (1)...(19): siRNA sense strand
agacaagaguguuacagau

SEQ ID NO: 755958 - RNA, 19 nt, Homo sapiens
  misc_RNA (1)...(19): siRNA sense strand
gagacaagaguguuacaga

SEQ ID NO: 755959 - RNA, 19 nt, Homo sapiens
  misc_RNA (1)...(19): siRNA sense strand
caagaguguuacagauuca

SEQ ID NO: 755960 - RNA, 19 nt, Homo sapiens
  misc_RNA (1)...(19): siRNA sense strand
guaauggguccuaaauaug

SEQ ID NO: 755961 - RNA, 19 nt, Homo sapiens
  misc_RNA (1)...(19): siRNA sense strand
caugauggcauuccuguug

SEQ ID NO: 755962 - RNA, 19 nt, Homo sapiens
  misc_RNA (1)...(19): siRNA sense strand
uggaaccaaucuuaagaaa

SEQ ID NO: 755963 - RNA, 19 nt, Homo sapiens
  misc_RNA (1)...(19): siRNA sense strand
gaccgucuccgcauucuga

SEQ ID NO: 755964 - RNA, 19 nt, Homo sapiens
  misc_RNA (1)...(19): siRNA sense strand
ugcagaagcuguuagagau

SEQ ID NO: 755965 - RNA, 19 nt, Homo sapiens
  misc_RNA (1)...(19): siRNA sense strand
cauaugugacuguggauaa

SEQ ID NO: 755966 - RNA, 19 nt, Homo sapiens
  misc_RNA (1)...(19): siRNA sense strand
cagaacaagcucauaguau

SEQ ID NO: 755967 - RNA, 19 nt, Homo sapiens
  misc_RNA (1)...(19): siRNA sense strand
cagaggcuuccacuuaaua

SEQ ID NO: 755968 - RNA, 19 nt, Homo sapiens
  misc_RNA (1)...(19): siRNA sense strand
agacaaaucugggcuucug

SEQ ID NO: 755969 - RNA, 19 nt, Homo sapiens
  misc_RNA (1)...(19): siRNA sense strand
cuacguaucauucuacaau

SEQ ID NO: 755970 - RNA, 19 nt, Homo sapiens
  misc_RNA (1)...(19): siRNA sense strand
uaauggguccuaaauaugu

SEQ ID NO: 755971 - RNA, 19 nt, Homo sapiens
  misc_RNA (1)...(19): siRNA sense strand
gcauuccuguugucucuuc

SEQ ID NO: 755972 - RNA, 19 nt, Homo sapiens
  misc_RNA (1)...(19): siRNA sense strand
ucuacuacaugaaggauau

SEQ ID NO: 755973 - RNA, 19 nt, Homo sapiens
  misc_RNA (1)...(19): siRNA sense strand
cagaagcuguuagagauca

SEQ ID NO: 755974 - RNA, 19 nt, Homo sapiens
  misc_RNA (1)...(19): siRNA sense strand
ccagaggcuuccacuuaau

SEQ ID NO: 755975 - RNA, 19 nt, Homo sapiens
  misc_RNA (1)...(19): siRNA sense strand
caaggaagaagcuggugaa

SEQ ID NO: 755976 - RNA, 19 nt, Homo sapiens
  misc_RNA (1)...(19): siRNA sense strand
cgaaauuguuugcuucaac

SEQ ID NO: 755977 - RNA, 19 nt, Homo sapiens
  misc_RNA (1)...(19): siRNA sense strand
cagcagaagcucuccaaau

SEQ ID NO: 755978 - RNA, 19 nt, Homo sapiens
  misc_RNA (1)...(19): siRNA sense strand
ggcuuccacuuaauauuga

SEQ ID NO: 755979 - RNA, 19 nt, Homo sapiens
  misc_RNA (1)...(19): siRNA sense strand
caaaagcucgaaauuguuu

SEQ ID NO: 755980 - RNA, 19 nt, Homo sapiens
  misc_RNA (1)...(19): siRNA sense strand
guggauaaucuugguauuu

SEQ ID NO: 755981 - RNA, 19 nt, Homo sapiens
  misc_RNA (1)...(19): siRNA sense strand
guugaaagcuuuugacagu

SEQ ID NO: 755982 - RNA, 19 nt, Homo sapiens
  misc_RNA (1)...(19): siRNA sense strand
cacagaccuucuacacaaa

SEQ ID NO: 755983 - RNA, 19 nt, Homo sapiens
  misc_RNA (1)...(19): siRNA sense strand
uugcugcccuucuccauga

SEQ ID NO: 755984 - RNA, 19 nt, Homo sapiens
  misc_RNA (1)...(19): siRNA sense strand
caguaauggguccuaaaua

SEQ ID NO: 755985 - RNA, 19 nt, Homo sapiens
  misc_RNA (1)...(19): siRNA sense strand
gggagugcauuggguuuca

SEQ ID NO: 755986 - RNA, 19 nt, Homo sapiens
  misc_RNA (1)...(19): siRNA sense strand
aacaauaucagaagaggaa

SEQ ID NO: 755987 - RNA, 19 nt, Homo sapiens
  misc_RNA (1)...(19): siRNA sense strand
caacagcaaagagcagcua

SEQ ID NO: 755988 - RNA, 19 nt, Homo sapiens
  misc_RNA (1)...(19): siRNA sense strand
gaagcuggugaaugcaauu

SEQ ID NO: 755989 - RNA, 19 nt, Homo sapiens
  misc_RNA (1)...(19): siRNA sense strand
aauggguccuaaauaugua

SEQ ID NO: 755990 - RNA, 19 nt, Homo sapiens
  misc_RNA (1)...(19): siRNA sense strand
caucaagacauccuacauc

SEQ ID NO: 755991 - RNA, 19 nt, Homo sapiens
  misc_RNA (1)...(19): siRNA sense strand
auucuacaaugcucuacua

SEQ ID NO: 755992 - RNA, 19 nt, Homo sapiens
  misc_RNA (1)...(19): siRNA sense strand
ugaaacugcagaaucuuug

SEQ ID NO: 755993 - RNA, 19 nt, Homo sapiens
  misc_RNA (1)...(19): siRNA sense strand
gcaaacacccaaggucucu

SEQ ID NO: 755994 - RNA, 19 nt, Homo sapiens
  misc_RNA (1)...(19): siRNA sense strand
ucaguaauggguccuaaau

SEQ ID NO: 755995 - RNA, 19 nt, Homo sapiens
  misc_RNA (1)...(19): siRNA sense strand
cuacaugaaggauauaaag

SEQ ID NO: 755996 - RNA, 19 nt, Homo sapiens
  misc_RNA (1)...(19): siRNA sense strand
gaguguuacagauucagua

SEQ ID NO: 755997 - RNA, 19 nt, Homo sapiens
  misc_RNA (1)...(19): siRNA sense strand
ugcaaaagcucgaaauugu

SEQ ID NO: 755998 - RNA, 19 nt, Homo sapiens
  misc_RNA (1)...(19): siRNA sense strand
cagugucagauucuucuua

SEQ ID NO: 755999 - RNA, 19 nt, Homo sapiens
  misc_RNA (1)...(19): siRNA sense strand
aaaaggacaucaagacauc

SEQ ID NO: 756000 - RNA, 19 nt, Homo sapiens
  misc_RNA (1)...(19): siRNA sense strand
ugucagauucuucuuacaa

SEQ ID NO: 756001 - RNA, 19 nt, Homo sapiens
  misc_RNA (1)...(19): siRNA sense strand
uagagaucauucccuuuua

SEQ ID NO: 756002 - RNA, 19 nt, Homo sapiens
  misc_RNA (1)...(19): siRNA sense strand
gaaaaggacaucaagacau

SEQ ID NO: 756003 - RNA, 19 nt, Homo sapiens
  misc_RNA (1)...(19): siRNA sense strand
gcagaagcuguuagagauc

SEQ ID NO: 756004 - RNA, 19 nt, Homo sapiens
  misc_RNA (1)...(19): siRNA sense strand
uggaucaggaugagaguuu

SEQ ID NO: 756005 - RNA, 19 nt, Homo sapiens
  misc_RNA (1)...(19): siRNA sense strand
caaauugaaaggugaacca

SEQ ID NO: 756006 - RNA, 19 nt, Homo sapiens
  misc_RNA (1)...(19): siRNA sense strand
auaugaagaaggcagauuu

SEQ ID NO: 756007 - RNA, 19 nt, Homo sapiens
  misc_RNA (1)...(19): siRNA sense strand
aucaagacauccuacauca

SEQ ID NO: 756008 - RNA, 19 nt, Homo sapiens
  misc_RNA (1)...(19): siRNA sense strand
gaugauguuugggacucuu

SEQ ID NO: 756009 - RNA, 19 nt, Homo sapiens
  misc_RNA (1)...(19): siRNA sense strand
gugcauuggguuucaguug

SEQ ID NO: 756010 - RNA, 19 nt, Homo sapiens
  misc_RNA (1)...(19): siRNA sense strand
cugcagaagcuguuagaga

SEQ ID NO: 756011 - RNA, 19 nt, Homo sapiens
  misc_RNA (1)...(19): siRNA sense strand
uggcauuccuguugucucu

SEQ ID NO: 756012 - RNA, 19 nt, Homo sapiens
  misc_RNA (1)...(19): siRNA sense strand
gcaaaagcucgaaauuguu

SEQ ID NO: 756013 - RNA, 19 nt, Homo sapiens
  misc_RNA (1)...(19): siRNA sense strand
ugggaagucuguauuagcu

SEQ ID NO: 756014 - RNA, 19 nt, Homo sapiens
  misc_RNA (1)...(19): siRNA sense strand
gugugaagguggaguacca

SEQ ID NO: 756015 - RNA, 19 nt, Homo sapiens
  misc_RNA (1)...(19): siRNA sense strand
aggcuuccacuuaauauug

SEQ ID NO: 756016 - RNA, 19 nt, Homo sapiens
  misc_RNA (1)...(19): siRNA sense strand
gaggcuuccacuuaauauu

SEQ ID NO: 756017 - RNA, 19 nt, Homo sapiens
  misc_RNA (1)...(19): siRNA sense strand
gcugugggaagucuguauu

SEQ ID NO: 756018 - RNA, 19 nt, Homo sapiens
  misc_RNA (1)...(19): siRNA sense strand
caaaucugggcuucugaug

SEQ ID NO: 756019 - RNA, 19 nt, Homo sapiens
  misc_RNA (1)...(19): siRNA sense strand
aauggaaccaaucuuaaga

SEQ ID NO: 756020 - RNA, 19 nt, Homo sapiens
  misc_RNA (1)...(19): siRNA sense strand
acacaaauggaaccaaucu

SEQ ID NO: 756021 - RNA, 19 nt, Homo sapiens
  misc_RNA (1)...(19): siRNA sense strand
cagaccuucuacacaaaug

SEQ ID NO: 756022 - RNA, 19 nt, Homo sapiens
  misc_RNA (1)...(19): siRNA sense strand
uaugaagaaggcagauuug

SEQ ID NO: 756023 - RNA, 19 nt, Homo sapiens
  misc_RNA (1)...(19): siRNA sense strand
ggaaaaggacaucaagaca

SEQ ID NO: 756024 - RNA, 19 nt, Homo sapiens
  misc_RNA (1)...(19): siRNA sense strand
aaaucugggcuucugauga

SEQ ID NO: 756025 - RNA, 19 nt, Homo sapiens
  misc_RNA (1)...(19): siRNA sense strand
agaagcuggugaaugcaau

SEQ ID NO: 756026 - RNA, 19 nt, Homo sapiens
  misc_RNA (1)...(19): siRNA sense strand
aaauggaaccaaucuuaag

SEQ ID NO: 756027 - RNA, 19 nt, Homo sapiens
  misc_RNA (1)...(19): siRNA sense strand
caaccagagacaagagugu

SEQ ID NO: 756028 - RNA, 19 nt, Homo sapiens
  misc_RNA (1)...(19): siRNA sense strand
ggaagaagcuggugaaugc

SEQ ID NO: 756029 - RNA, 19 nt, Homo sapiens
  misc_RNA (1)...(19): siRNA sense strand
gaacaagcucauaguauua

SEQ ID NO: 756030 - RNA, 19 nt, Homo sapiens
  misc_RNA (1)...(19): siRNA sense strand
cagaagcucuccaaauuga

SEQ ID NO: 756031 - RNA, 19 nt, Homo sapiens
  misc_RNA (1)...(19): siRNA sense strand
ucacagaccuucuacacaa

SEQ ID NO: 756032 - RNA, 19 nt, Homo sapiens
  misc_RNA (1)...(19): siRNA sense strand
agaacaagcucauaguauu

SEQ ID NO: 756033 - RNA, 19 nt, Homo sapiens
  misc_RNA (1)...(19): siRNA sense strand
gauaaugauuccuacguau

SEQ ID NO: 756034 - RNA, 19 nt, Homo sapiens
  misc_RNA (1)...(19): siRNA sense strand
acaaauggaaccaaucuua

SEQ ID NO: 756035 - RNA, 19 nt, Homo sapiens
  misc_RNA (1)...(19): siRNA sense strand
gaucuuggaugauguuugg

SEQ ID NO: 756036 - RNA, 19 nt, Homo sapiens
  misc_RNA (1)...(19): siRNA sense strand
caaauggaaccaaucuuaa

SEQ ID NO: 756037 - RNA, 19 nt, Homo sapiens
  misc_RNA (1)...(19): siRNA sense strand
ccacagaggccaguuguuu

SEQ ID NO: 756038 - RNA, 19 nt, Homo sapiens
  misc_RNA (1)...(19): siRNA sense strand
aguaauggguccuaaauau

SEQ ID NO: 756039 - RNA, 19 nt, Homo sapiens
  misc_RNA (1)...(19): siRNA sense strand
agcagaagcucuccaaauu

SEQ ID NO: 756040 - RNA, 19 nt, Homo sapiens
  misc_RNA (1)...(19): siRNA sense strand
caagacauccuacaucaug

SEQ ID NO: 756041 - RNA, 19 nt, Homo sapiens
  misc_RNA (1)...(19): siRNA sense strand
acaaugcucuacuacauga

SEQ ID NO: 756042 - RNA, 19 nt, Homo sapiens
  misc_RNA (1)...(19): siRNA sense strand
caugauuagugauggauuu

SEQ ID NO: 756043 - RNA, 19 nt, Homo sapiens
  misc_RNA (1)...(19): siRNA sense strand
aaucugggcuucugaugaa

SEQ ID NO: 756044 - RNA, 19 nt, Homo sapiens
  misc_RNA (1)...(19): siRNA sense strand
gaagcucuccaaauugaaa

SEQ ID NO: 756045 - RNA, 19 nt, Homo sapiens
  misc_RNA (1)...(19): siRNA sense strand
gcagaagcucuccaaauug

SEQ ID NO: 756046 - RNA, 19 nt, Homo sapiens
  misc_RNA (1)...(19): siRNA sense strand
cuacaaugcucuacuacau

SEQ ID NO: 756047 - RNA, 19 nt, Homo sapiens
  misc_RNA (1)...(19): siRNA sense strand
gacaagaguguuacagauu

SEQ ID NO: 756048 - RNA, 19 nt, Homo sapiens
  misc_RNA (1)...(19): siRNA sense strand
ugaugaaacugcagaaucu

SEQ ID NO: 756049 - RNA, 19 nt, Homo sapiens
  misc_RNA (1)...(19): siRNA sense strand
cccagaggcuuccacuuaa

SEQ ID NO: 756050 - RNA, 19 nt, Homo sapiens
  misc_RNA (1)...(19): siRNA sense strand
gagaagcucuggaaaagga

SEQ ID NO: 756051 - RNA, 19 nt, Homo sapiens
  misc_RNA (1)...(19): siRNA sense strand
agauaaugauuccuacgua

SEQ ID NO: 756052 - RNA, 19 nt, Homo sapiens
  misc_RNA (1)...(19): siRNA sense strand
ucccagaggcuuccacuua

SEQ ID NO: 756053 - RNA, 19 nt, Homo sapiens
  misc_RNA (1)...(19): siRNA sense strand
acaagaguguuacagauuc

SEQ ID NO: 756054 - RNA, 19 nt, Homo sapiens
  misc_RNA (1)...(19): siRNA sense strand
cuacacaaauggaaccaau

SEQ ID NO: 756055 - RNA, 19 nt, Homo sapiens
  misc_RNA (1)...(19): siRNA sense strand
ccagaacaagcucauagua

SEQ ID NO: 756056 - RNA, 19 nt, Homo sapiens
  misc_RNA (1)...(19): siRNA sense strand
caugaaggauauaaagauc

SEQ ID NO: 756057 - RNA, 19 nt, Homo sapiens
  misc_RNA (1)...(19): siRNA sense strand
agacaagaguguuacagau

SEQ ID NO: 756058 - RNA, 19 nt, Homo sapiens
  misc_RNA (1)...(19): siRNA sense strand
gagacaagaguguuacaga

SEQ ID NO: 756059 - RNA, 19 nt, Homo sapiens
  misc_RNA (1)...(19): siRNA sense strand
caagaguguuacagauuca

SEQ ID NO: 756060 - RNA, 19 nt, Homo sapiens
  misc_RNA (1)...(19): siRNA sense strand
guaauggguccuaaauaug

SEQ ID NO: 756061 - RNA, 19 nt, Homo sapiens
  misc_RNA (1)...(19): siRNA sense strand
caugauggcauuccuguug

SEQ ID NO: 756062 - RNA, 19 nt, Homo sapiens
  misc_RNA (1)...(19): siRNA sense strand
gaccgucuccgcauucuga

SEQ ID NO: 756063 - RNA, 19 nt, Homo sapiens
  misc_RNA (1)...(19): siRNA sense strand
ugcagaagcuguuagagau

SEQ ID NO: 756064 - RNA, 19 nt, Homo sapiens
  misc_RNA (1)...(19): siRNA sense strand
cagaacaagcucauaguau

SEQ ID NO: 756065 - RNA, 19 nt, Homo sapiens
  misc_RNA (1)...(19): siRNA sense strand
cagaggcuuccacuuaaua

SEQ ID NO: 756066 - RNA, 19 nt, Homo sapiens
  misc_RNA (1)...(19): siRNA sense strand
agacaaaucugggcuucug

SEQ ID NO: 756067 - RNA, 19 nt, Homo sapiens
  misc_RNA (1)...(19): siRNA sense strand
cuacguaucauucuacaau

SEQ ID NO: 756068 - RNA, 19 nt, Homo sapiens
  misc_RNA (1)...(19): siRNA sense strand
uaauggguccuaaauaugu

SEQ ID NO: 756069 - RNA, 19 nt, Homo sapiens
  misc_RNA (1)...(19): siRNA sense strand
gcauuccuguugucucuuc

SEQ ID NO: 756070 - RNA, 19 nt, Homo sapiens
  misc_RNA (1)...(19): siRNA sense strand
ucuacuacaugaaggauau

SEQ ID NO: 756071 - RNA, 19 nt, Homo sapiens
  misc_RNA (1)...(19): siRNA sense strand
cagaagcuguuagagauca

SEQ ID NO: 756072 - RNA, 19 nt, Homo sapiens
  misc_RNA (1)...(19): siRNA sense strand
ccagaggcuuccacuuaau

SEQ ID NO: 756073 - RNA, 19 nt, Homo sapiens
  misc_RNA (1)...(19): siRNA sense strand
caaggaagaagcuggugaa

SEQ ID NO: 756074 - RNA, 19 nt, Homo sapiens
  misc_RNA (1)...(19): siRNA sense strand
cgaaauuguuugcuucaac

SEQ ID NO: 756075 - RNA, 19 nt, Homo sapiens
  misc_RNA (1)...(19): siRNA sense strand
cagcagaagcucuccaaau

SEQ ID NO: 756076 - RNA, 19 nt, Homo sapiens
  misc_RNA (1)...(19): siRNA sense strand
ggcuuccacuuaauauuga

SEQ ID NO: 756077 - RNA, 19 nt, Homo sapiens
  misc_RNA (1)...(19): siRNA sense strand
caaaagcucgaaauuguuu

SEQ ID NO: 756078 - RNA, 19 nt, Homo sapiens
  misc_RNA (1)...(19): siRNA sense strand
guugaaagcuuuugacagu

SEQ ID NO: 756079 - RNA, 19 nt, Homo sapiens
  misc_RNA (1)...(19): siRNA sense strand
cacagaccuucuacacaaa

SEQ ID NO: 756080 - RNA, 19 nt, Homo sapiens
  misc_RNA (1)...(19): siRNA sense strand
uugcugcccuucuccauga

SEQ ID NO: 756081 - RNA, 19 nt, Homo sapiens
  misc_RNA (1)...(19): siRNA sense strand
caguaauggguccuaaaua

SEQ ID NO: 756082 - RNA, 19 nt, Homo sapiens
  misc_RNA (1)...(19): siRNA sense strand
aacaauaucagaagaggaa

SEQ ID NO: 756083 - RNA, 19 nt, Homo sapiens
  misc_RNA (1)...(19): siRNA sense strand
caacagcaaagagcagcua

SEQ ID NO: 756084 - RNA, 19 nt, Homo sapiens
  misc_RNA (1)...(19): siRNA sense strand
gggagugcauuggguuuca

SEQ ID NO: 756085 - RNA, 19 nt, Homo sapiens
  misc_RNA (1)...(19): siRNA sense strand
auucuacaaugcucuacua

SEQ ID NO: 756086 - RNA, 19 nt, Homo sapiens
  misc_RNA (1)...(19): siRNA sense strand
aauggguccuaaauaugua

SEQ ID NO: 756087 - RNA, 19 nt, Homo sapiens
  misc_RNA (1)...(19): siRNA sense strand
caucaagacauccuacauc

SEQ ID NO: 756088 - RNA, 19 nt, Homo sapiens
  misc_RNA (1)...(19): siRNA sense strand
ugaaacugcagaaucuuug

SEQ ID NO: 756089 - RNA, 19 nt, Homo sapiens
  misc_RNA (1)...(19): siRNA sense strand
gaagcuggugaaugcaauu

SEQ ID NO: 756090 - RNA, 19 nt, Homo sapiens
  misc_RNA (1)...(19): siRNA sense strand
gcaaacacccaaggucucu

SEQ ID NO: 756091 - RNA, 19 nt, Homo sapiens
  misc_RNA (1)...(19): siRNA sense strand
ucaguaauggguccuaaau

SEQ ID NO: 756092 - RNA, 19 nt, Homo sapiens
  misc_RNA (1)...(19): siRNA sense strand
cuacaugaaggauauaaag

SEQ ID NO: 756093 - RNA, 19 nt, Homo sapiens
  misc_RNA (1)...(19): siRNA sense strand
gaguguuacagauucagua

SEQ ID NO: 756094 - RNA, 19 nt, Homo sapiens
  misc_RNA (1)...(19): siRNA sense strand
ugcaaaagcucgaaauugu

SEQ ID NO: 756095 - RNA, 19 nt, Homo sapiens
  misc_RNA (1)...(19): siRNA sense strand
cagugucagauucuucuua

SEQ ID NO: 756096 - RNA, 19 nt, Homo sapiens
  misc_RNA (1)...(19): siRNA sense strand
aaaaggacaucaagacauc

SEQ ID NO: 756097 - RNA, 19 nt, Homo sapiens
  misc_RNA (1)...(19): siRNA sense strand
ugucagauucuucuuacaa

SEQ ID NO: 756098 - RNA, 19 nt, Homo sapiens
  misc_RNA (1)...(19): siRNA sense strand
gaaaaggacaucaagacau

SEQ ID NO: 756099 - RNA, 19 nt, Homo sapiens
  misc_RNA (1)...(19): siRNA sense strand
uagagaucauucccuuuua

SEQ ID NO: 756100 - RNA, 19 nt, Homo sapiens
  misc_RNA (1)...(19): siRNA sense strand
gcagaagcuguuagagauc

SEQ ID NO: 756101 - RNA, 19 nt, Homo sapiens
  misc_RNA (1)...(19): siRNA sense strand
uggaucaggaugagaguuu

SEQ ID NO: 756102 - RNA, 19 nt, Homo sapiens
  misc_RNA (1)...(19): siRNA sense strand
caaauugaaaggugaacca

SEQ ID NO: 756103 - RNA, 19 nt, Homo sapiens
  misc_RNA (1)...(19): siRNA sense strand
auaugaagaaggcagauuu

SEQ ID NO: 756104 - RNA, 19 nt, Homo sapiens
  misc_RNA (1)...(19): siRNA sense strand
aucaagacauccuacauca

SEQ ID NO: 756105 - RNA, 19 nt, Homo sapiens
  misc_RNA (1)...(19): siRNA sense strand
gaugauguuugggacucuu

SEQ ID NO: 756106 - RNA, 19 nt, Homo sapiens
  misc_RNA (1)...(19): siRNA sense strand
gugcauuggguuucaguug

SEQ ID NO: 756107 - RNA, 19 nt, Homo sapiens
  misc_RNA (1)...(19): siRNA sense strand
cugcagaagcuguuagaga

SEQ ID NO: 756108 - RNA, 19 nt, Homo sapiens
  misc_RNA (1)...(19): siRNA sense strand
uggcauuccuguugucucu

SEQ ID NO: 756109 - RNA, 19 nt, Homo sapiens
  misc_RNA (1)...(19): siRNA sense strand
gcaaaagcucgaaauuguu

SEQ ID NO: 756110 - RNA, 19 nt, Homo sapiens
  misc_RNA (1)...(19): siRNA sense strand
ugggaagucuguauuagcu

SEQ ID NO: 756111 - RNA, 19 nt, Homo sapiens
  misc_RNA (1)...(19): siRNA sense strand
gugugaagguggaguacca

SEQ ID NO: 756112 - RNA, 19 nt, Homo sapiens
  misc_RNA (1)...(19): siRNA sense strand
aggcuuccacuuaauauug

SEQ ID NO: 756113 - RNA, 19 nt, Homo sapiens
  misc_RNA (1)...(19): siRNA sense strand
gaggcuuccacuuaauauu

SEQ ID NO: 756114 - RNA, 19 nt, Homo sapiens
  misc_RNA (1)...(19): siRNA sense strand
gcugugggaagucuguauu

SEQ ID NO: 756115 - RNA, 19 nt, Homo sapiens
  misc_RNA (1)...(19): siRNA sense strand
caaaucugggcuucugaug

SEQ ID NO: 756116 - RNA, 19 nt, Homo sapiens
  misc_RNA (1)...(19): siRNA sense strand
acacaaauggaaccaaucu

SEQ ID NO: 756117 - RNA, 19 nt, Homo sapiens
  misc_RNA (1)...(19): siRNA sense strand
cagaccuucuacacaaaug

SEQ ID NO: 756118 - RNA, 19 nt, Homo sapiens
  misc_RNA (1)...(19): siRNA sense strand
uaugaagaaggcagauuug

SEQ ID NO: 756119 - RNA, 19 nt, Homo sapiens
  misc_RNA (1)...(19): siRNA sense strand
ggaaaaggacaucaagaca

SEQ ID NO: 756120 - RNA, 19 nt, Homo sapiens
  misc_RNA (1)...(19): siRNA sense strand
aaaucugggcuucugauga

SEQ ID NO: 756121 - RNA, 19 nt, Homo sapiens
  misc_RNA (1)...(19): siRNA sense strand
guaccacagaggccaguug

SEQ ID NO: 756122 - RNA, 19 nt, Homo sapiens
  misc_RNA (1)...(19): siRNA sense strand
caaccagagacaagagugu

SEQ ID NO: 756123 - RNA, 19 nt, Homo sapiens
  misc_RNA (1)...(19): siRNA sense strand
agaagcuggugaaugcaau

SEQ ID NO: 756124 - RNA, 19 nt, Homo sapiens
  misc_RNA (1)...(19): siRNA sense strand
gaagcuguuagagaucauu

SEQ ID NO: 756125 - RNA, 19 nt, Homo sapiens
  misc_RNA (1)...(19): siRNA sense strand
gucagauucuucuuacaac

SEQ ID NO: 756126 - RNA, 19 nt, Homo sapiens
  misc_RNA (1)...(19): siRNA sense strand
gauaugagguucuuacauu

SEQ ID NO: 756127 - RNA, 19 nt, Homo sapiens
  misc_RNA (1)...(19): siRNA sense strand
ccaaggagaucaucacuuu

SEQ ID NO: 756128 - RNA, 19 nt, Homo sapiens
  misc_RNA (1)...(19): siRNA sense strand
caucaauacuggcaauuua

SEQ ID NO: 756129 - RNA, 19 nt, Homo sapiens
  misc_RNA (1)...(19): siRNA sense strand
gaacauucauauuccagaa

SEQ ID NO: 756130 - RNA, 19 nt, Homo sapiens
  misc_RNA (1)...(19): siRNA sense strand
ccaaggaucuaugaaauga

SEQ ID NO: 756131 - RNA, 19 nt, Homo sapiens
  misc_RNA (1)...(19): siRNA sense strand
gaaaugaugggucacguaa

SEQ ID NO: 756132 - RNA, 19 nt, Homo sapiens
  misc_RNA (1)...(19): siRNA sense strand
ucaaacugcucucaucaaa

SEQ ID NO: 756133 - RNA, 19 nt, Homo sapiens
  misc_RNA (1)...(19): siRNA sense strand
gaacaccacaugccauuau

SEQ ID NO: 756134 - RNA, 19 nt, Homo sapiens
  misc_RNA (1)...(19): siRNA sense strand
auaauaaccugaccuugaa

SEQ ID NO: 756135 - RNA, 19 nt, Homo sapiens
  misc_RNA (1)...(19): siRNA sense strand
gcaauuuagugaaguaucu

SEQ ID NO: 756136 - RNA, 19 nt, Homo sapiens
  misc_RNA (1)...(19): siRNA sense strand
gaagacagacacugauguu

SEQ ID NO: 756137 - RNA, 19 nt, Homo sapiens
  misc_RNA (1)...(19): siRNA sense strand
agacaagacuuucacuuca

SEQ ID NO: 756138 - RNA, 19 nt, Homo sapiens
  misc_RNA (1)...(19): siRNA sense strand
uauaauaaccugaccuuga

SEQ ID NO: 756139 - RNA, 19 nt, Homo sapiens
  misc_RNA (1)...(19): siRNA sense strand
gaugaacaccuucuuuaug

SEQ ID NO: 756140 - RNA, 19 nt, Homo sapiens
  misc_RNA (1)...(19): siRNA sense strand
gcaguggguuggguuauau

SEQ ID NO: 756141 - RNA, 19 nt, Homo sapiens
  misc_RNA (1)...(19): siRNA sense strand
ugaacuggauguacuucua

SEQ ID NO: 756142 - RNA, 19 nt, Homo sapiens
  misc_RNA (1)...(19): siRNA sense strand
caacugagacgugugauug

SEQ ID NO: 756143 - RNA, 19 nt, Homo sapiens
  misc_RNA (1)...(19): siRNA sense strand
ccacuacaaugugauagaa

SEQ ID NO: 756144 - RNA, 19 nt, Homo sapiens
  misc_RNA (1)...(19): siRNA sense strand
gucgggaucuguuugaauu

SEQ ID NO: 756145 - RNA, 19 nt, Homo sapiens
  misc_RNA (1)...(19): siRNA sense strand
ggaugucugucaacugaga

SEQ ID NO: 756146 - RNA, 19 nt, Homo sapiens
  misc_RNA (1)...(19): siRNA sense strand
cagguuauccucuaauuga

SEQ ID NO: 756147 - RNA, 19 nt, Homo sapiens
  misc_RNA (1)...(19): siRNA sense strand
cgggaucuguuugaauuua

SEQ ID NO: 756148 - RNA, 19 nt, Homo sapiens
  misc_RNA (1)...(19): siRNA sense strand
gaacuggauguacuucuau

SEQ ID NO: 756149 - RNA, 19 nt, Homo sapiens
  misc_RNA (1)...(19): siRNA sense strand
ggaugaacaccuucuuuau

SEQ ID NO: 756150 - RNA, 19 nt, Homo sapiens
  misc_RNA (1)...(19): siRNA sense strand
gaggaugaacaccuucuuu

SEQ ID NO: 756151 - RNA, 19 nt, Homo sapiens
  misc_RNA (1)...(19): siRNA sense strand
ucaagguguucccuccaua

SEQ ID NO: 756152 - RNA, 19 nt, Homo sapiens
  misc_RNA (1)...(19): siRNA sense strand
gacuuucacuucacacuuc

SEQ ID NO: 756153 - RNA, 19 nt, Homo sapiens
  misc_RNA (1)...(19): siRNA sense strand
ccaagaggcugaaaaggaa

SEQ ID NO: 756154 - RNA, 19 nt, Homo sapiens
  misc_RNA (1)...(19): siRNA sense strand
uggguuggguuauauaaug

SEQ ID NO: 756155 - RNA, 19 nt, Homo sapiens
  misc_RNA (1)...(19): siRNA sense strand
caccacaugccauuauuaa

SEQ ID NO: 756156 - RNA, 19 nt, Homo sapiens
  misc_RNA (1)...(19): siRNA sense strand
uauaauguccagagauuug

SEQ ID NO: 756157 - RNA, 19 nt, Homo sapiens
  misc_RNA (1)...(19): siRNA sense strand
aaacugcucucaucaaaau

SEQ ID NO: 756158 - RNA, 19 nt, Homo sapiens
  misc_RNA (1)...(19): siRNA sense strand
uaaugaagacagacacuga

SEQ ID NO: 756159 - RNA, 19 nt, Homo sapiens
  misc_RNA (1)...(19): siRNA sense strand
ccaaguacguaaugaagac

SEQ ID NO: 756160 - RNA, 19 nt, Homo sapiens
  misc_RNA (1)...(19): siRNA sense strand
ggaacaccacaugccauua

SEQ ID NO: 756161 - RNA, 19 nt, Homo sapiens
  misc_RNA (1)...(19): siRNA sense strand
uuggaugucugucaacuga

SEQ ID NO: 756162 - RNA, 19 nt, Homo sapiens
  misc_RNA (1)...(19): siRNA sense strand
gggaucuguuugaauuuau

SEQ ID NO: 756163 - RNA, 19 nt, Homo sapiens
  misc_RNA (1)...(19): siRNA sense strand
aaggaucuaugaaaugaug

SEQ ID NO: 756164 - RNA, 19 nt, Homo sapiens
  misc_RNA (1)...(19): siRNA sense strand
cacagguuauccucuaauu

SEQ ID NO: 756165 - RNA, 19 nt, Homo sapiens
  misc_RNA (1)...(19): siRNA sense strand
aggaugaacaccuucuuua

SEQ ID NO: 756166 - RNA, 19 nt, Homo sapiens
  misc_RNA (1)...(19): siRNA sense strand
ugacauaauccgacaagau

SEQ ID NO: 756167 - RNA, 19 nt, Homo sapiens
  misc_RNA (1)...(19): siRNA sense strand
aggcaggccauuagaguua

SEQ ID NO: 756168 - RNA, 19 nt, Homo sapiens
  misc_RNA (1)...(19): siRNA sense strand
ugccaaggaucuaugaaau

SEQ ID NO: 756169 - RNA, 19 nt, Homo sapiens
  misc_RNA (1)...(19): siRNA sense strand
guuauauaauguccagaga

SEQ ID NO: 756170 - RNA, 19 nt, Homo sapiens
  misc_RNA (1)...(19): siRNA sense strand
uuucacagguuauccucua

SEQ ID NO: 756171 - RNA, 19 nt, Homo sapiens
  misc_RNA (1)...(19): siRNA sense strand
cagacaagacuuucacuuc

SEQ ID NO: 756172 - RNA, 19 nt, Homo sapiens
  misc_RNA (1)...(19): siRNA sense strand
cuccugaguuucuuuguga

SEQ ID NO: 756173 - RNA, 19 nt, Homo sapiens
  misc_RNA (1)...(19): siRNA sense strand
guuugaagauguuuauguc

SEQ ID NO: 756174 - RNA, 19 nt, Homo sapiens
  misc_RNA (1)...(19): siRNA sense strand
gcauucagguggguaacug

SEQ ID NO: 756175 - RNA, 19 nt, Homo sapiens
  misc_RNA (1)...(19): siRNA sense strand
gauuuacagacaagacuuu

SEQ ID NO: 756176 - RNA, 19 nt, Homo sapiens
  misc_RNA (1)...(19): siRNA sense strand
ccauuuggaugucugucaa

SEQ ID NO: 756177 - RNA, 19 nt, Homo sapiens
  misc_RNA (1)...(19): siRNA sense strand
augaacaccuucuuuaugg

SEQ ID NO: 756178 - RNA, 19 nt, Homo sapiens
  misc_RNA (1)...(19): siRNA sense strand
cauucaaacugcucucauc

SEQ ID NO: 756179 - RNA, 19 nt, Homo sapiens
  misc_RNA (1)...(19): siRNA sense strand
acauucauauuccagaaga

SEQ ID NO: 756180 - RNA, 19 nt, Homo sapiens
  misc_RNA (1)...(19): siRNA sense strand
ugaaaugaugggucacgua

SEQ ID NO: 756181 - RNA, 19 nt, Homo sapiens
  misc_RNA (1)...(19): siRNA sense strand
aaacccauauuucuuacca

SEQ ID NO: 756182 - RNA, 19 nt, Homo sapiens
  misc_RNA (1)...(19): siRNA sense strand
gacagacacugauguuuuc

SEQ ID NO: 756183 - RNA, 19 nt, Homo sapiens
  misc_RNA (1)...(19): siRNA sense strand
ccgaguaggaugucacuga

SEQ ID NO: 756184 - RNA, 19 nt, Homo sapiens
  misc_RNA (1)...(19): siRNA sense strand
ggguuggguuauauaaugu

SEQ ID NO: 756185 - RNA, 19 nt, Homo sapiens
  misc_RNA (1)...(19): siRNA sense strand
cuaaaccacucagagaagu

SEQ ID NO: 756186 - RNA, 19 nt, Homo sapiens
  misc_RNA (1)...(19): siRNA sense strand
acaccacaugccauuauua

SEQ ID NO: 756187 - RNA, 19 nt, Homo sapiens
  misc_RNA (1)...(19): siRNA sense strand
gugccaaggaucuaugaaa

SEQ ID NO: 756188 - RNA, 19 nt, Homo sapiens
  misc_RNA (1)...(19): siRNA sense strand
gacaagacuuucacuucac

SEQ ID NO: 756189 - RNA, 19 nt, Homo sapiens
  misc_RNA (1)...(19): siRNA sense strand
gccaaggaucuaugaaaug

SEQ ID NO: 756190 - RNA, 19 nt, Homo sapiens
  misc_RNA (1)...(19): siRNA sense strand
ugcaguggguuggguuaua

SEQ ID NO: 756191 - RNA, 19 nt, Homo sapiens
  misc_RNA (1)...(19): siRNA sense strand
gagccgauuuacagacaag

SEQ ID NO: 756192 - RNA, 19 nt, Homo sapiens
  misc_RNA (1)...(19): siRNA sense strand
cuuagaggaugaacaccuu

SEQ ID NO: 756193 - RNA, 19 nt, Homo sapiens
  misc_RNA (1)...(19): siRNA sense strand
acaagacuuucacuucaca

SEQ ID NO: 756194 - RNA, 19 nt, Homo sapiens
  misc_RNA (1)...(19): siRNA sense strand
aaugaugggucacguaaaa

SEQ ID NO: 756195 - RNA, 19 nt, Homo sapiens
  misc_RNA (1)...(19): siRNA sense strand
cauauaauaaccugaccuu

SEQ ID NO: 756196 - RNA, 19 nt, Homo sapiens
  misc_RNA (1)...(19): siRNA sense strand
ggauaugagguucuuacau

SEQ ID NO: 756197 - RNA, 19 nt, Homo sapiens
  misc_RNA (1)...(19): siRNA sense strand
ggcaggucaugcuaaggaa

SEQ ID NO: 756198 - RNA, 19 nt, Homo sapiens
  misc_RNA (1)...(19): siRNA sense strand
aguaggaugucacugagau

SEQ ID NO: 756199 - RNA, 19 nt, Homo sapiens
  misc_RNA (1)...(19): siRNA sense strand
gccaaguacguaaugaaga

SEQ ID NO: 756200 - RNA, 19 nt, Homo sapiens
  misc_RNA (1)...(19): siRNA sense strand
uagaacgcgugaacuggau

SEQ ID NO: 756201 - RNA, 19 nt, Homo sapiens
  misc_RNA (1)...(19): siRNA sense strand
uggauguacuucuaugagu

SEQ ID NO: 756202 - RNA, 19 nt, Homo sapiens
  misc_RNA (1)...(19): siRNA sense strand
ugauagaacgcgugaacug

SEQ ID NO: 756203 - RNA, 19 nt, Homo sapiens
  misc_RNA (1)...(19): siRNA sense strand
gaguaugagccgauuuaca

SEQ ID NO: 756204 - RNA, 19 nt, Homo sapiens
  misc_RNA (1)...(19): siRNA sense strand
ucaucaauacuggcaauuu

SEQ ID NO: 756205 - RNA, 19 nt, Homo sapiens
  misc_RNA (1)...(19): siRNA sense strand
augaguaugagccgauuua

SEQ ID NO: 756206 - RNA, 19 nt, Homo sapiens
  misc_RNA (1)...(19): siRNA sense strand
cuauauagaauccauuugg

SEQ ID NO: 756207 - RNA, 19 nt, Homo sapiens
  misc_RNA (1)...(19): siRNA sense strand
gaacgcgugaacuggaugu

SEQ ID NO: 756208 - RNA, 19 nt, Homo sapiens
  misc_RNA (1)...(19): siRNA sense strand
agacagacacugauguuuu

SEQ ID NO: 756209 - RNA, 19 nt, Homo sapiens
  misc_RNA (1)...(19): siRNA sense strand
aacaccacaugccauuauu

SEQ ID NO: 756210 - RNA, 19 nt, Homo sapiens
  misc_RNA (1)...(19): siRNA sense strand
ccucggcucucuggacugu

SEQ ID NO: 756211 - RNA, 19 nt, Homo sapiens
  misc_RNA (1)...(19): siRNA sense strand
cuggcaauuuagugaagua

SEQ ID NO: 756212 - RNA, 19 nt, Homo sapiens
  misc_RNA (1)...(19): siRNA sense strand
gaaagccaggcaggccauu

SEQ ID NO: 756213 - RNA, 19 nt, Homo sapiens
  misc_RNA (1)...(19): siRNA sense strand
aguaugagccgauuuacag

SEQ ID NO: 756214 - RNA, 19 nt, Homo sapiens
  misc_RNA (1)...(19): siRNA sense strand
aauacuggcaauuuaguga

SEQ ID NO: 756215 - RNA, 19 nt, Homo sapiens
  misc_RNA (1)...(19): siRNA sense strand
ccaggcaggccauuagagu

SEQ ID NO: 756216 - RNA, 19 nt, Homo sapiens
  misc_RNA (1)...(19): siRNA sense strand
ugaagacagacacugaugu

SEQ ID NO: 756217 - RNA, 19 nt, Homo sapiens
  misc_RNA (1)...(19): siRNA sense strand
uaaaccacucagagaaguu

SEQ ID NO: 756218 - RNA, 19 nt, Homo sapiens
  misc_RNA (1)...(19): siRNA sense strand
aaagccaggcaggccauua

SEQ ID NO: 756219 - RNA, 19 nt, Homo sapiens
  misc_RNA (1)...(19): siRNA sense strand
uggcaggucaugcuaagga

SEQ ID NO: 756220 - RNA, 19 nt, Homo sapiens
  misc_RNA (1)...(19): siRNA sense strand
ucaacugagacgugugauu

SEQ ID NO: 756221 - RNA, 19 nt, Homo sapiens
  misc_RNA (1)...(19): siRNA sense strand
guaugagccgauuuacaga

SEQ ID NO: 756222 - RNA, 19 nt, Homo sapiens
  misc_RNA (1)...(19): siRNA sense strand
ucaauacuggcaauuuagu

SEQ ID NO: 756223 - RNA, 19 nt, Homo sapiens
  misc_RNA (1)...(19): siRNA sense strand
ccaaugccaaguacguaau

SEQ ID NO: 756224 - RNA, 19 nt, Homo sapiens
  misc_RNA (1)...(19): siRNA sense strand
gauaugagguucuuacauu

SEQ ID NO: 756225 - RNA, 19 nt, Homo sapiens
  misc_RNA (1)...(19): siRNA sense strand
ccaaggagaucaucacuuu

SEQ ID NO: 756226 - RNA, 19 nt, Homo sapiens
  misc_RNA (1)...(19): siRNA sense strand
caucaauacuggcaauuua

SEQ ID NO: 756227 - RNA, 19 nt, Homo sapiens
  misc_RNA (1)...(19): siRNA sense strand
gaacauucauauuccagaa

SEQ ID NO: 756228 - RNA, 19 nt, Homo sapiens
  misc_RNA (1)...(19): siRNA sense strand
ccaaggaucuaugaaauga

SEQ ID NO: 756229 - RNA, 19 nt, Homo sapiens
  misc_RNA (1)...(19): siRNA sense strand
gaaaugaugggucacguaa

SEQ ID NO: 756230 - RNA, 19 nt, Homo sapiens
  misc_RNA (1)...(19): siRNA sense strand
ucaaacugcucucaucaaa

SEQ ID NO: 756231 - RNA, 19 nt, Homo sapiens
  misc_RNA (1)...(19): siRNA sense strand
gaacaccacaugccauuau

SEQ ID NO: 756232 - RNA, 19 nt, Homo sapiens
  misc_RNA (1)...(19): siRNA sense strand
auaauaaccugaccuugaa

SEQ ID NO: 756233 - RNA, 19 nt, Homo sapiens
  misc_RNA (1)...(19): siRNA sense strand
gcaauuuagugaaguaucu

SEQ ID NO: 756234 - RNA, 19 nt, Homo sapiens
  misc_RNA (1)...(19): siRNA sense strand
gaagacagacacugauguu

SEQ ID NO: 756235 - RNA, 19 nt, Homo sapiens
  misc_RNA (1)...(19): siRNA sense strand
agacaagacuuucacuuca

SEQ ID NO: 756236 - RNA, 19 nt, Homo sapiens
  misc_RNA (1)...(19): siRNA sense strand
uauaauaaccugaccuuga

SEQ ID NO: 756237 - RNA, 19 nt, Homo sapiens
  misc_RNA (1)...(19): siRNA sense strand
gaugaacaccuucuuuaug

SEQ ID NO: 756238 - RNA, 19 nt, Homo sapiens
  misc_RNA (1)...(19): siRNA sense strand
gcaguggguuggguuauau

SEQ ID NO: 756239 - RNA, 19 nt, Homo sapiens
  misc_RNA (1)...(19): siRNA sense strand
ugaacuggauguacuucua

SEQ ID NO: 756240 - RNA, 19 nt, Homo sapiens
  misc_RNA (1)...(19): siRNA sense strand
caacugagacgugugauug

SEQ ID NO: 756241 - RNA, 19 nt, Homo sapiens
  misc_RNA (1)...(19): siRNA sense strand
ccacuacaaugugauagaa

SEQ ID NO: 756242 - RNA, 19 nt, Homo sapiens
  misc_RNA (1)...(19): siRNA sense strand
gucgggaucuguuugaauu

SEQ ID NO: 756243 - RNA, 19 nt, Homo sapiens
  misc_RNA (1)...(19): siRNA sense strand
ggaugucugucaacugaga

SEQ ID NO: 756244 - RNA, 19 nt, Homo sapiens
  misc_RNA (1)...(19): siRNA sense strand
cagguuauccucuaauuga

SEQ ID NO: 756245 - RNA, 19 nt, Homo sapiens
  misc_RNA (1)...(19): siRNA sense strand
cgggaucuguuugaauuua

SEQ ID NO: 756246 - RNA, 19 nt, Homo sapiens
  misc_RNA (1)...(19): siRNA sense strand
gaacuggauguacuucuau

SEQ ID NO: 756247 - RNA, 19 nt, Homo sapiens
  misc_RNA (1)...(19): siRNA sense strand
ggaugaacaccuucuuuau

SEQ ID NO: 756248 - RNA, 19 nt, Homo sapiens
  misc_RNA (1)...(19): siRNA sense strand
gaggaugaacaccuucuuu

SEQ ID NO: 756249 - RNA, 19 nt, Homo sapiens
  misc_RNA (1)...(19): siRNA sense strand
ucaagguguucccuccaua

SEQ ID NO: 756250 - RNA, 19 nt, Homo sapiens
  misc_RNA (1)...(19): siRNA sense strand
gacuuucacuucacacuuc

SEQ ID NO: 756251 - RNA, 19 nt, Homo sapiens
  misc_RNA (1)...(19): siRNA sense strand
ccaagaggcugaaaaggaa

SEQ ID NO: 756252 - RNA, 19 nt, Homo sapiens
  misc_RNA (1)...(19): siRNA sense strand
uggguuggguuauauaaug

SEQ ID NO: 756253 - RNA, 19 nt, Homo sapiens
  misc_RNA (1)...(19): siRNA sense strand
caccacaugccauuauuaa

SEQ ID NO: 756254 - RNA, 19 nt, Homo sapiens
  misc_RNA (1)...(19): siRNA sense strand
uauaauguccagagauuug

SEQ ID NO: 756255 - RNA, 19 nt, Homo sapiens
  misc_RNA (1)...(19): siRNA sense strand
aaacugcucucaucaaaau

SEQ ID NO: 756256 - RNA, 19 nt, Homo sapiens
  misc_RNA (1)...(19): siRNA sense strand
uaaugaagacagacacuga

SEQ ID NO: 756257 - RNA, 19 nt, Homo sapiens
  misc_RNA (1)...(19): siRNA sense strand
ccaaguacguaaugaagac

SEQ ID NO: 756258 - RNA, 19 nt, Homo sapiens
  misc_RNA (1)...(19): siRNA sense strand
ggaacaccacaugccauua

SEQ ID NO: 756259 - RNA, 19 nt, Homo sapiens
  misc_RNA (1)...(19): siRNA sense strand
uuggaugucugucaacuga

SEQ ID NO: 756260 - RNA, 19 nt, Homo sapiens
  misc_RNA (1)...(19): siRNA sense strand
gggaucuguuugaauuuau

SEQ ID NO: 756261 - RNA, 19 nt, Homo sapiens
  misc_RNA (1)...(19): siRNA sense strand
aaggaucuaugaaaugaug

SEQ ID NO: 756262 - RNA, 19 nt, Homo sapiens
  misc_RNA (1)...(19): siRNA sense strand
cacagguuauccucuaauu

SEQ ID NO: 756263 - RNA, 19 nt, Homo sapiens
  misc_RNA (1)...(19): siRNA sense strand
aggaugaacaccuucuuua

SEQ ID NO: 756264 - RNA, 19 nt, Homo sapiens
  misc_RNA (1)...(19): siRNA sense strand
ugacauaauccgacaagau

SEQ ID NO: 756265 - RNA, 19 nt, Homo sapiens
  misc_RNA (1)...(19): siRNA sense strand
aggcaggccauuagaguua

SEQ ID NO: 756266 - RNA, 19 nt, Homo sapiens
  misc_RNA (1)...(19): siRNA sense strand
ugccaaggaucuaugaaau

SEQ ID NO: 756267 - RNA, 19 nt, Homo sapiens
  misc_RNA (1)...(19): siRNA sense strand
guuauauaauguccagaga

SEQ ID NO: 756268 - RNA, 19 nt, Homo sapiens
  misc_RNA (1)...(19): siRNA sense strand
uuucacagguuauccucua

SEQ ID NO: 756269 - RNA, 19 nt, Homo sapiens
  misc_RNA (1)...(19): siRNA sense strand
cagacaagacuuucacuuc

SEQ ID NO: 756270 - RNA, 19 nt, Homo sapiens
  misc_RNA (1)...(19): siRNA sense strand
cuccugaguuucuuuguga

SEQ ID NO: 756271 - RNA, 19 nt, Homo sapiens
  misc_RNA (1)...(19): siRNA sense strand
guuugaagauguuuauguc

SEQ ID NO: 756272 - RNA, 19 nt, Homo sapiens
  misc_RNA (1)...(19): siRNA sense strand
gcauucagguggguaacug

SEQ ID NO: 756273 - RNA, 19 nt, Homo sapiens
  misc_RNA (1)...(19): siRNA sense strand
gauuuacagacaagacuuu

SEQ ID NO: 756274 - RNA, 19 nt, Homo sapiens
  misc_RNA (1)...(19): siRNA sense strand
ccauuuggaugucugucaa

SEQ ID NO: 756275 - RNA, 19 nt, Homo sapiens
  misc_RNA (1)...(19): siRNA sense strand
augaacaccuucuuuaugg

SEQ ID NO: 756276 - RNA, 19 nt, Homo sapiens
  misc_RNA (1)...(19): siRNA sense strand
cauucaaacugcucucauc

SEQ ID NO: 756277 - RNA, 19 nt, Homo sapiens
  misc_RNA (1)...(19): siRNA sense strand
acauucauauuccagaaga

SEQ ID NO: 756278 - RNA, 19 nt, Homo sapiens
  misc_RNA (1)...(19): siRNA sense strand
ugaaaugaugggucacgua

SEQ ID NO: 756279 - RNA, 19 nt, Homo sapiens
  misc_RNA (1)...(19): siRNA sense strand
aaacccauauuucuuacca

SEQ ID NO: 756280 - RNA, 19 nt, Homo sapiens
  misc_RNA (1)...(19): siRNA sense strand
gacagacacugauguuuuc

SEQ ID NO: 756281 - RNA, 19 nt, Homo sapiens
  misc_RNA (1)...(19): siRNA sense strand
ccgaguaggaugucacuga

SEQ ID NO: 756282 - RNA, 19 nt, Homo sapiens
  misc_RNA (1)...(19): siRNA sense strand
ggguuggguuauauaaugu

SEQ ID NO: 756283 - RNA, 19 nt, Homo sapiens
  misc_RNA (1)...(19): siRNA sense strand
cuaaaccacucagagaagu

SEQ ID NO: 756284 - RNA, 19 nt, Homo sapiens
  misc_RNA (1)...(19): siRNA sense strand
acaccacaugccauuauua

SEQ ID NO: 756285 - RNA, 19 nt, Homo sapiens
  misc_RNA (1)...(19): siRNA sense strand
gugccaaggaucuaugaaa

SEQ ID NO: 756286 - RNA, 19 nt, Homo sapiens
  misc_RNA (1)...(19): siRNA sense strand
gacaagacuuucacuucac

SEQ ID NO: 756287 - RNA, 19 nt, Homo sapiens
  misc_RNA (1)...(19): siRNA sense strand
gccaaggaucuaugaaaug

SEQ ID NO: 756288 - RNA, 19 nt, Homo sapiens
  misc_RNA (1)...(19): siRNA sense strand
ugcaguggguuggguuaua

SEQ ID NO: 756289 - RNA, 19 nt, Homo sapiens
  misc_RNA (1)...(19): siRNA sense strand
gagccgauuuacagacaag

SEQ ID NO: 756290 - RNA, 19 nt, Homo sapiens
  misc_RNA (1)...(19): siRNA sense strand
cuuagaggaugaacaccuu

SEQ ID NO: 756291 - RNA, 19 nt, Homo sapiens
  misc_RNA (1)...(19): siRNA sense strand
acaagacuuucacuucaca

SEQ ID NO: 756292 - RNA, 19 nt, Homo sapiens
  misc_RNA (1)...(19): siRNA sense strand
aaugaugggucacguaaaa

SEQ ID NO: 756293 - RNA, 19 nt, Homo sapiens
  misc_RNA (1)...(19): siRNA sense strand
cauauaauaaccugaccuu

SEQ ID NO: 756294 - RNA, 19 nt, Homo sapiens
  misc_RNA (1)...(19): siRNA sense strand
ggauaugagguucuuacau

SEQ ID NO: 756295 - RNA, 19 nt, Homo sapiens
  misc_RNA (1)...(19): siRNA sense strand
ggcaggucaugcuaaggaa

SEQ ID NO: 756296 - RNA, 19 nt, Homo sapiens
  misc_RNA (1)...(19): siRNA sense strand
aguaggaugucacugagau

SEQ ID NO: 756297 - RNA, 19 nt, Homo sapiens
  misc_RNA (1)...(19): siRNA sense strand
gccaaguacguaaugaaga

SEQ ID NO: 756298 - RNA, 19 nt, Homo sapiens
  misc_RNA (1)...(19): siRNA sense strand
uagaacgcgugaacuggau

SEQ ID NO: 756299 - RNA, 19 nt, Homo sapiens
  misc_RNA (1)...(19): siRNA sense strand
uggauguacuucuaugagu

SEQ ID NO: 756300 - RNA, 19 nt, Homo sapiens
  misc_RNA (1)...(19): siRNA sense strand
ugauagaacgcgugaacug

SEQ ID NO: 756301 - RNA, 19 nt, Homo sapiens
  misc_RNA (1)...(19): siRNA sense strand
gaguaugagccgauuuaca

SEQ ID NO: 756302 - RNA, 19 nt, Homo sapiens
  misc_RNA (1)...(19): siRNA sense strand
ucaucaauacuggcaauuu

SEQ ID NO: 756303 - RNA, 19 nt, Homo sapiens
  misc_RNA (1)...(19): siRNA sense strand
augaguaugagccgauuua

SEQ ID NO: 756304 - RNA, 19 nt, Homo sapiens
  misc_RNA (1)...(19): siRNA sense strand
cuauauagaauccauuugg

SEQ ID NO: 756305 - RNA, 19 nt, Homo sapiens
  misc_RNA (1)...(19): siRNA sense strand
gaacgcgugaacuggaugu

SEQ ID NO: 756306 - RNA, 19 nt, Homo sapiens
  misc_RNA (1)...(19): siRNA sense strand
agacagacacugauguuuu

SEQ ID NO: 756307 - RNA, 19 nt, Homo sapiens
  misc_RNA (1)...(19): siRNA sense strand
aacaccacaugccauuauu

SEQ ID NO: 756308 - RNA, 19 nt, Homo sapiens
  misc_RNA (1)...(19): siRNA sense strand
ccucggcucucuggacugu

SEQ ID NO: 756309 - RNA, 19 nt, Homo sapiens
  misc_RNA (1)...(19): siRNA sense strand
cuggcaauuuagugaagua

SEQ ID NO: 756310 - RNA, 19 nt, Homo sapiens
  misc_RNA (1)...(19): siRNA sense strand
gaaagccaggcaggccauu

SEQ ID NO: 756311 - RNA, 19 nt, Homo sapiens
  misc_RNA (1)...(19): siRNA sense strand
aguaugagccgauuuacag

SEQ ID NO: 756312 - RNA, 19 nt, Homo sapiens
  misc_RNA (1)...(19): siRNA sense strand
aauacuggcaauuuaguga

SEQ ID NO: 756313 - RNA, 19 nt, Homo sapiens
  misc_RNA (1)...(19): siRNA sense strand
ccaggcaggccauuagagu

SEQ ID NO: 756314 - RNA, 19 nt, Homo sapiens
  misc_RNA (1)...(19): siRNA sense strand
ugaagacagacacugaugu

SEQ ID NO: 756315 - RNA, 19 nt, Homo sapiens
  misc_RNA (1)...(19): siRNA sense strand
uaaaccacucagagaaguu

SEQ ID NO: 756316 - RNA, 19 nt, Homo sapiens
  misc_RNA (1)...(19): siRNA sense strand
aaagccaggcaggccauua

SEQ ID NO: 756317 - RNA, 19 nt, Homo sapiens
  misc_RNA (1)...(19): siRNA sense strand
uggcaggucaugcuaagga

SEQ ID NO: 756318 - RNA, 19 nt, Homo sapiens
  misc_RNA (1)...(19): siRNA sense strand
ucaacugagacgugugauu

SEQ ID NO: 756319 - RNA, 19 nt, Homo sapiens
  misc_RNA (1)...(19): siRNA sense strand
guaugagccgauuuacaga

SEQ ID NO: 756320 - RNA, 19 nt, Homo sapiens
  misc_RNA (1)...(19): siRNA sense strand
ucaauacuggcaauuuagu

SEQ ID NO: 756321 - RNA, 19 nt, Homo sapiens
  misc_RNA (1)...(19): siRNA sense strand
ccaaugccaaguacguaau

SEQ ID NO: 756322 - RNA, 19 nt, Homo sapiens
  misc_RNA (1)...(19): siRNA sense strand
gauaugagguucuuacauu

SEQ ID NO: 756323 - RNA, 19 nt, Homo sapiens
  misc_RNA (1)...(19): siRNA sense strand
ccaaggagaucaucacuuu

SEQ ID NO: 756324 - RNA, 19 nt, Homo sapiens
  misc_RNA (1)...(19): siRNA sense strand
caucaauacuggcaauuua

SEQ ID NO: 756325 - RNA, 19 nt, Homo sapiens
  misc_RNA (1)...(19): siRNA sense strand
gaacauucauauuccagaa

SEQ ID NO: 756326 - RNA, 19 nt, Homo sapiens
  misc_RNA (1)...(19): siRNA sense strand
ccaaggaucuaugaaauga

SEQ ID NO: 756327 - RNA, 19 nt, Homo sapiens
  misc_RNA (1)...(19): siRNA sense strand
gaaaugaugggucacguaa

SEQ ID NO: 756328 - RNA, 19 nt, Homo sapiens
  misc_RNA (1)...(19): siRNA sense strand
ucaaacugcucucaucaaa

SEQ ID NO: 756329 - RNA, 19 nt, Homo sapiens
  misc_RNA (1)...(19): siRNA sense strand
gaacaccacaugccauuau

SEQ ID NO: 756330 - RNA, 19 nt, Homo sapiens
  misc_RNA (1)...(19): siRNA sense strand
auaauaaccugaccuugaa

SEQ ID NO: 756331 - RNA, 19 nt, Homo sapiens
  misc_RNA (1)...(19): siRNA sense strand
gcaauuuagugaaguaucu

SEQ ID NO: 756332 - RNA, 19 nt, Homo sapiens
  misc_RNA (1)...(19): siRNA sense strand
gaagacagacacugauguu

SEQ ID NO: 756333 - RNA, 19 nt, Homo sapiens
  misc_RNA (1)...(19): siRNA sense strand
agacaagacuuucacuuca

SEQ ID NO: 756334 - RNA, 19 nt, Homo sapiens
  misc_RNA (1)...(19): siRNA sense strand
uauaauaaccugaccuuga

SEQ ID NO: 756335 - RNA, 19 nt, Homo sapiens
  misc_RNA (1)...(19): siRNA sense strand
gaugaacaccuucuuuaug

SEQ ID NO: 756336 - RNA, 19 nt, Homo sapiens
  misc_RNA (1)...(19): siRNA sense strand
gcaguggguuggguuauau

SEQ ID NO: 756337 - RNA, 19 nt, Homo sapiens
  misc_RNA (1)...(19): siRNA sense strand
ugaacuggauguacuucua

SEQ ID NO: 756338 - RNA, 19 nt, Homo sapiens
  misc_RNA (1)...(19): siRNA sense strand
caacugagacgugugauug

SEQ ID NO: 756339 - RNA, 19 nt, Homo sapiens
  misc_RNA (1)...(19): siRNA sense strand
ccacuacaaugugauagaa

SEQ ID NO: 756340 - RNA, 19 nt, Homo sapiens
  misc_RNA (1)...(19): siRNA sense strand
gucgggaucuguuugaauu

SEQ ID NO: 756341 - RNA, 19 nt, Homo sapiens
  misc_RNA (1)...(19): siRNA sense strand
ggaugucugucaacugaga

SEQ ID NO: 756342 - RNA, 19 nt, Homo sapiens
  misc_RNA (1)...(19): siRNA sense strand
cagguuauccucuaauuga

SEQ ID NO: 756343 - RNA, 19 nt, Homo sapiens
  misc_RNA (1)...(19): siRNA sense strand
cgggaucuguuugaauuua

SEQ ID NO: 756344 - RNA, 19 nt, Homo sapiens
  misc_RNA (1)...(19): siRNA sense strand
gaacuggauguacuucuau

SEQ ID NO: 756345 - RNA, 19 nt, Homo sapiens
  misc_RNA (1)...(19): siRNA sense strand
ggaugaacaccuucuuuau

SEQ ID NO: 756346 - RNA, 19 nt, Homo sapiens
  misc_RNA (1)...(19): siRNA sense strand
gaggaugaacaccuucuuu

SEQ ID NO: 756347 - RNA, 19 nt, Homo sapiens
  misc_RNA (1)...(19): siRNA sense strand
ucaagguguucccuccaua

SEQ ID NO: 756348 - RNA, 19 nt, Homo sapiens
  misc_RNA (1)...(19): siRNA sense strand
gacuuucacuucacacuuc

SEQ ID NO: 756349 - RNA, 19 nt, Homo sapiens
  misc_RNA (1)...(19): siRNA sense strand
ccaagaggcugaaaaggaa

SEQ ID NO: 756350 - RNA, 19 nt, Homo sapiens
  misc_RNA (1)...(19): siRNA sense strand
uggguuggguuauauaaug

SEQ ID NO: 756351 - RNA, 19 nt, Homo sapiens
  misc_RNA (1)...(19): siRNA sense strand
caccacaugccauuauuaa

SEQ ID NO: 756352 - RNA, 19 nt, Homo sapiens
  misc_RNA (1)...(19): siRNA sense strand
uauaauguccagagauuug

SEQ ID NO: 756353 - RNA, 19 nt, Homo sapiens
  misc_RNA (1)...(19): siRNA sense strand
aaacugcucucaucaaaau

SEQ ID NO: 756354 - RNA, 19 nt, Homo sapiens
  misc_RNA (1)...(19): siRNA sense strand
uaaugaagacagacacuga

SEQ ID NO: 756355 - RNA, 19 nt, Homo sapiens
  misc_RNA (1)...(19): siRNA sense strand
ccaaguacguaaugaagac

SEQ ID NO: 756356 - RNA, 19 nt, Homo sapiens
  misc_RNA (1)...(19): siRNA sense strand
ggaacaccacaugccauua

SEQ ID NO: 756357 - RNA, 19 nt, Homo sapiens
  misc_RNA (1)...(19): siRNA sense strand
uuggaugucugucaacuga

SEQ ID NO: 756358 - RNA, 19 nt, Homo sapiens
  misc_RNA (1)...(19): siRNA sense strand
gggaucuguuugaauuuau

SEQ ID NO: 756359 - RNA, 19 nt, Homo sapiens
  misc_RNA (1)...(19): siRNA sense strand
aaggaucuaugaaaugaug

SEQ ID NO: 756360 - RNA, 19 nt, Homo sapiens
  misc_RNA (1)...(19): siRNA sense strand
cacagguuauccucuaauu

SEQ ID NO: 756361 - RNA, 19 nt, Homo sapiens
  misc_RNA (1)...(19): siRNA sense strand
aggaugaacaccuucuuua

SEQ ID NO: 756362 - RNA, 19 nt, Homo sapiens
  misc_RNA (1)...(19): siRNA sense strand
ugacauaauccgacaagau

SEQ ID NO: 756363 - RNA, 19 nt, Homo sapiens
  misc_RNA (1)...(19): siRNA sense strand
aggcaggccauuagaguua

SEQ ID NO: 756364 - RNA, 19 nt, Homo sapiens
  misc_RNA (1)...(19): siRNA sense strand
ugccaaggaucuaugaaau

SEQ ID NO: 756365 - RNA, 19 nt, Homo sapiens
  misc_RNA (1)...(19): siRNA sense strand
guuauauaauguccagaga

SEQ ID NO: 756366 - RNA, 19 nt, Homo sapiens
  misc_RNA (1)...(19): siRNA sense strand
uuucacagguuauccucua

SEQ ID NO: 756367 - RNA, 19 nt, Homo sapiens
  misc_RNA (1)...(19): siRNA sense strand
cagacaagacuuucacuuc

SEQ ID NO: 756368 - RNA, 19 nt, Homo sapiens
  misc_RNA (1)...(19): siRNA sense strand
cuccugaguuucuuuguga

SEQ ID NO: 756369 - RNA, 19 nt, Homo sapiens
  misc_RNA (1)...(19): siRNA sense strand
guuugaagauguuuauguc

SEQ ID NO: 756370 - RNA, 19 nt, Homo sapiens
  misc_RNA (1)...(19): siRNA sense strand
gcauucagguggguaacug

SEQ ID NO: 756371 - RNA, 19 nt, Homo sapiens
  misc_RNA (1)...(19): siRNA sense strand
gauuuacagacaagacuuu

SEQ ID NO: 756372 - RNA, 19 nt, Homo sapiens
  misc_RNA (1)...(19): siRNA sense strand
ccauuuggaugucugucaa

SEQ ID NO: 756373 - RNA, 19 nt, Homo sapiens
  misc_RNA (1)...(19): siRNA sense strand
augaacaccuucuuuaugg

SEQ ID NO: 756374 - RNA, 19 nt, Homo sapiens
  misc_RNA (1)...(19): siRNA sense strand
cauucaaacugcucucauc

SEQ ID NO: 756375 - RNA, 19 nt, Homo sapiens
  misc_RNA (1)...(19): siRNA sense strand
acauucauauuccagaaga

SEQ ID NO: 756376 - RNA, 19 nt, Homo sapiens
  misc_RNA (1)...(19): siRNA sense strand
ugaaaugaugggucacgua

SEQ ID NO: 756377 - RNA, 19 nt, Homo sapiens
  misc_RNA (1)...(19): siRNA sense strand
aaacccauauuucuuacca

SEQ ID NO: 756378 - RNA, 19 nt, Homo sapiens
  misc_RNA (1)...(19): siRNA sense strand
gacagacacugauguuuuc

SEQ ID NO: 756379 - RNA, 19 nt, Homo sapiens
  misc_RNA (1)...(19): siRNA sense strand
ccgaguaggaugucacuga

SEQ ID NO: 756380 - RNA, 19 nt, Homo sapiens
  misc_RNA (1)...(19): siRNA sense strand
ggguuggguuauauaaugu

SEQ ID NO: 756381 - RNA, 19 nt, Homo sapiens
  misc_RNA (1)...(19): siRNA sense strand
cuaaaccacucagagaagu

SEQ ID NO: 756382 - RNA, 19 nt, Homo sapiens
  misc_RNA (1)...(19): siRNA sense strand
acaccacaugccauuauua

SEQ ID NO: 756383 - RNA, 19 nt, Homo sapiens
  misc_RNA (1)...(19): siRNA sense strand
gugccaaggaucuaugaaa

SEQ ID NO: 756384 - RNA, 19 nt, Homo sapiens
  misc_RNA (1)...(19): siRNA sense strand
gacaagacuuucacuucac

SEQ ID NO: 756385 - RNA, 19 nt, Homo sapiens
  misc_RNA (1)...(19): siRNA sense strand
gccaaggaucuaugaaaug

SEQ ID NO: 756386 - RNA, 19 nt, Homo sapiens
  misc_RNA (1)...(19): siRNA sense strand
ugcaguggguuggguuaua

SEQ ID NO: 756387 - RNA, 19 nt, Homo sapiens
  misc_RNA (1)...(19): siRNA sense strand
gagccgauuuacagacaag

SEQ ID NO: 756388 - RNA, 19 nt, Homo sapiens
  misc_RNA (1)...(19): siRNA sense strand
cuuagaggaugaacaccuu

SEQ ID NO: 756389 - RNA, 19 nt, Homo sapiens
  misc_RNA (1)...(19): siRNA sense strand
acaagacuuucacuucaca

SEQ ID NO: 756390 - RNA, 19 nt, Homo sapiens
  misc_RNA (1)...(19): siRNA sense strand
aaugaugggucacguaaaa

SEQ ID NO: 756391 - RNA, 19 nt, Homo sapiens
  misc_RNA (1)...(19): siRNA sense strand
cauauaauaaccugaccuu

SEQ ID NO: 756392 - RNA, 19 nt, Homo sapiens
  misc_RNA (1)...(19): siRNA sense strand
ggauaugagguucuuacau

SEQ ID NO: 756393 - RNA, 19 nt, Homo sapiens
  misc_RNA (1)...(19): siRNA sense strand
ggcaggucaugcuaaggaa

SEQ ID NO: 756394 - RNA, 19 nt, Homo sapiens
  misc_RNA (1)...(19): siRNA sense strand
aguaggaugucacugagau

SEQ ID NO: 756395 - RNA, 19 nt, Homo sapiens
  misc_RNA (1)...(19): siRNA sense strand
gccaaguacguaaugaaga

SEQ ID NO: 756396 - RNA, 19 nt, Homo sapiens
  misc_RNA (1)...(19): siRNA sense strand
uagaacgcgugaacuggau

SEQ ID NO: 756397 - RNA, 19 nt, Homo sapiens
  misc_RNA (1)...(19): siRNA sense strand
uggauguacuucuaugagu

SEQ ID NO: 756398 - RNA, 19 nt, Homo sapiens
  misc_RNA (1)...(19): siRNA sense strand
ugauagaacgcgugaacug

SEQ ID NO: 756399 - RNA, 19 nt, Homo sapiens
  misc_RNA (1)...(19): siRNA sense strand
gaguaugagccgauuuaca

SEQ ID NO: 756400 - RNA, 19 nt, Homo sapiens
  misc_RNA (1)...(19): siRNA sense strand
ucaucaauacuggcaauuu

SEQ ID NO: 756401 - RNA, 19 nt, Homo sapiens
  misc_RNA (1)...(19): siRNA sense strand
augaguaugagccgauuua

SEQ ID NO: 756402 - RNA, 19 nt, Homo sapiens
  misc_RNA (1)...(19): siRNA sense strand
cuauauagaauccauuugg

SEQ ID NO: 756403 - RNA, 19 nt, Homo sapiens
  misc_RNA (1)...(19): siRNA sense strand
gaacgcgugaacuggaugu

SEQ ID NO: 756404 - RNA, 19 nt, Homo sapiens
  misc_RNA (1)...(19): siRNA sense strand
agacagacacugauguuuu

SEQ ID NO: 756405 - RNA, 19 nt, Homo sapiens
  misc_RNA (1)...(19): siRNA sense strand
aacaccacaugccauuauu

SEQ ID NO: 756406 - RNA, 19 nt, Homo sapiens
  misc_RNA (1)...(19): siRNA sense strand
ccucggcucucuggacugu

SEQ ID NO: 756407 - RNA, 19 nt, Homo sapiens
  misc_RNA (1)...(19): siRNA sense strand
cuggcaauuuagugaagua

SEQ ID NO: 756408 - RNA, 19 nt, Homo sapiens
  misc_RNA (1)...(19): siRNA sense strand
gaaagccaggcaggccauu

SEQ ID NO: 756409 - RNA, 19 nt, Homo sapiens
  misc_RNA (1)...(19): siRNA sense strand
aguaugagccgauuuacag

SEQ ID NO: 756410 - RNA, 19 nt, Homo sapiens
  misc_RNA (1)...(19): siRNA sense strand
aauacuggcaauuuaguga

SEQ ID NO: 756411 - RNA, 19 nt, Homo sapiens
  misc_RNA (1)...(19): siRNA sense strand
ccaggcaggccauuagagu

SEQ ID NO: 756412 - RNA, 19 nt, Homo sapiens
  misc_RNA (1)...(19): siRNA sense strand
ugaagacagacacugaugu

SEQ ID NO: 756413 - RNA, 19 nt, Homo sapiens
  misc_RNA (1)...(19): siRNA sense strand
uaaaccacucagagaaguu

SEQ ID NO: 756414 - RNA, 19 nt, Homo sapiens
  misc_RNA (1)...(19): siRNA sense strand
aaagccaggcaggccauua

SEQ ID NO: 756415 - RNA, 19 nt, Homo sapiens
  misc_RNA (1)...(19): siRNA sense strand
uggcaggucaugcuaagga

SEQ ID NO: 756416 - RNA, 19 nt, Homo sapiens
  misc_RNA (1)...(19): siRNA sense strand
ucaacugagacgugugauu

SEQ ID NO: 756417 - RNA, 19 nt, Homo sapiens
  misc_RNA (1)...(19): siRNA sense strand
guaugagccgauuuacaga

SEQ ID NO: 756418 - RNA, 19 nt, Homo sapiens
  misc_RNA (1)...(19): siRNA sense strand
ucaauacuggcaauuuagu

SEQ ID NO: 756419 - RNA, 19 nt, Homo sapiens
  misc_RNA (1)...(19): siRNA sense strand
ccaaugccaaguacguaau

SEQ ID NO: 756420 - RNA, 19 nt, Homo sapiens
  misc_RNA (1)...(19): siRNA sense strand
gauaugagguucuuacauu

SEQ ID NO: 756421 - RNA, 19 nt, Homo sapiens
  misc_RNA (1)...(19): siRNA sense strand
ccaaggagaucaucacuuu

SEQ ID NO: 756422 - RNA, 19 nt, Homo sapiens
  misc_RNA (1)...(19): siRNA sense strand
caucaauacuggcaauuua

SEQ ID NO: 756423 - RNA, 19 nt, Homo sapiens
  misc_RNA (1)...(19): siRNA sense strand
gaacauucauauuccagaa

SEQ ID NO: 756424 - RNA, 19 nt, Homo sapiens
  misc_RNA (1)...(19): siRNA sense strand
ccaaggaucuaugaaauga

SEQ ID NO: 756425 - RNA, 19 nt, Homo sapiens
  misc_RNA (1)...(19): siRNA sense strand
gaaaugaugggucacguaa

SEQ ID NO: 756426 - RNA, 19 nt, Homo sapiens
  misc_RNA (1)...(19): siRNA sense strand
ucaaacugcucucaucaaa

SEQ ID NO: 756427 - RNA, 19 nt, Homo sapiens
  misc_RNA (1)...(19): siRNA sense strand
gaacaccacaugccauuau

SEQ ID NO: 756428 - RNA, 19 nt, Homo sapiens
  misc_RNA (1)...(19): siRNA sense strand
auaauaaccugaccuugaa

SEQ ID NO: 756429 - RNA, 19 nt, Homo sapiens
  misc_RNA (1)...(19): siRNA sense strand
gcaauuuagugaaguaucu

SEQ ID NO: 756430 - RNA, 19 nt, Homo sapiens
  misc_RNA (1)...(19): siRNA sense strand
gaagacagacacugauguu

SEQ ID NO: 756431 - RNA, 19 nt, Homo sapiens
  misc_RNA (1)...(19): siRNA sense strand
agacaagacuuucacuuca

SEQ ID NO: 756432 - RNA, 19 nt, Homo sapiens
  misc_RNA (1)...(19): siRNA sense strand
uauaauaaccugaccuuga

SEQ ID NO: 756433 - RNA, 19 nt, Homo sapiens
  misc_RNA (1)...(19): siRNA sense strand
gaugaacaccuucuuuaug

SEQ ID NO: 756434 - RNA, 19 nt, Homo sapiens
  misc_RNA (1)...(19): siRNA sense strand
gcaguggguuggguuauau

SEQ ID NO: 756435 - RNA, 19 nt, Homo sapiens
  misc_RNA (1)...(19): siRNA sense strand
ugaacuggauguacuucua

SEQ ID NO: 756436 - RNA, 19 nt, Homo sapiens
  misc_RNA (1)...(19): siRNA sense strand
caacugagacgugugauug

SEQ ID NO: 756437 - RNA, 19 nt, Homo sapiens
  misc_RNA (1)...(19): siRNA sense strand
ccacuacaaugugauagaa

SEQ ID NO: 756438 - RNA, 19 nt, Homo sapiens
  misc_RNA (1)...(19): siRNA sense strand
gucgggaucuguuugaauu

SEQ ID NO: 756439 - RNA, 19 nt, Homo sapiens
  misc_RNA (1)...(19): siRNA sense strand
ggaugucugucaacugaga

SEQ ID NO: 756440 - RNA, 19 nt, Homo sapiens
  misc_RNA (1)...(19): siRNA sense strand
cagguuauccucuaauuga

SEQ ID NO: 756441 - RNA, 19 nt, Homo sapiens
  misc_RNA (1)...(19): siRNA sense strand
cgggaucuguuugaauuua

SEQ ID NO: 756442 - RNA, 19 nt, Homo sapiens
  misc_RNA (1)...(19): siRNA sense strand
gaacuggauguacuucuau

SEQ ID NO: 756443 - RNA, 19 nt, Homo sapiens
  misc_RNA (1)...(19): siRNA sense strand
ggaugaacaccuucuuuau

SEQ ID NO: 756444 - RNA, 19 nt, Homo sapiens
  misc_RNA (1)...(19): siRNA sense strand
gaggaugaacaccuucuuu

SEQ ID NO: 756445 - RNA, 19 nt, Homo sapiens
  misc_RNA (1)...(19): siRNA sense strand
ucaagguguucccuccaua

SEQ ID NO: 756446 - RNA, 19 nt, Homo sapiens
  misc_RNA (1)...(19): siRNA sense strand
gacuuucacuucacacuuc

SEQ ID NO: 756447 - RNA, 19 nt, Homo sapiens
  misc_RNA (1)...(19): siRNA sense strand
ccaagaggcugaaaaggaa

SEQ ID NO: 756448 - RNA, 19 nt, Homo sapiens
  misc_RNA (1)...(19): siRNA sense strand
uggguuggguuauauaaug

SEQ ID NO: 756449 - RNA, 19 nt, Homo sapiens
  misc_RNA (1)...(19): siRNA sense strand
caccacaugccauuauuaa

SEQ ID NO: 756450 - RNA, 19 nt, Homo sapiens
  misc_RNA (1)...(19): siRNA sense strand
uauaauguccagagauuug

SEQ ID NO: 756451 - RNA, 19 nt, Homo sapiens
  misc_RNA (1)...(19): siRNA sense strand
aaacugcucucaucaaaau

SEQ ID NO: 756452 - RNA, 19 nt, Homo sapiens
  misc_RNA (1)...(19): siRNA sense strand
uaaugaagacagacacuga

SEQ ID NO: 756453 - RNA, 19 nt, Homo sapiens
  misc_RNA (1)...(19): siRNA sense strand
ccaaguacguaaugaagac

SEQ ID NO: 756454 - RNA, 19 nt, Homo sapiens
  misc_RNA (1)...(19): siRNA sense strand
ggaacaccacaugccauua

SEQ ID NO: 756455 - RNA, 19 nt, Homo sapiens
  misc_RNA (1)...(19): siRNA sense strand
uuggaugucugucaacuga

SEQ ID NO: 756456 - RNA, 19 nt, Homo sapiens
  misc_RNA (1)...(19): siRNA sense strand
gggaucuguuugaauuuau

SEQ ID NO: 756457 - RNA, 19 nt, Homo sapiens
  misc_RNA (1)...(19): siRNA sense strand
aaggaucuaugaaaugaug

SEQ ID NO: 756458 - RNA, 19 nt, Homo sapiens
  misc_RNA (1)...(19): siRNA sense strand
cacagguuauccucuaauu

SEQ ID NO: 756459 - RNA, 19 nt, Homo sapiens
  misc_RNA (1)...(19): siRNA sense strand
aggaugaacaccuucuuua

SEQ ID NO: 756460 - RNA, 19 nt, Homo sapiens
  misc_RNA (1)...(19): siRNA sense strand
ugacauaauccgacaagau

SEQ ID NO: 756461 - RNA, 19 nt, Homo sapiens
  misc_RNA (1)...(19): siRNA sense strand
aggcaggccauuagaguua

SEQ ID NO: 756462 - RNA, 19 nt, Homo sapiens
  misc_RNA (1)...(19): siRNA sense strand
ugccaaggaucuaugaaau

SEQ ID NO: 756463 - RNA, 19 nt, Homo sapiens
  misc_RNA (1)...(19): siRNA sense strand
guuauauaauguccagaga

SEQ ID NO: 756464 - RNA, 19 nt, Homo sapiens
  misc_RNA (1)...(19): siRNA sense strand
uuucacagguuauccucua

SEQ ID NO: 756465 - RNA, 19 nt, Homo sapiens
  misc_RNA (1)...(19): siRNA sense strand
cagacaagacuuucacuuc

SEQ ID NO: 756466 - RNA, 19 nt, Homo sapiens
  misc_RNA (1)...(19): siRNA sense strand
cuccugaguuucuuuguga

SEQ ID NO: 756467 - RNA, 19 nt, Homo sapiens
  misc_RNA (1)...(19): siRNA sense strand
guuugaagauguuuauguc

SEQ ID NO: 756468 - RNA, 19 nt, Homo sapiens
  misc_RNA (1)...(19): siRNA sense strand
gcauucagguggguaacug

SEQ ID NO: 756469 - RNA, 19 nt, Homo sapiens
  misc_RNA (1)...(19): siRNA sense strand
gauuuacagacaagacuuu

SEQ ID NO: 756470 - RNA, 19 nt, Homo sapiens
  misc_RNA (1)...(19): siRNA sense strand
ccauuuggaugucugucaa

SEQ ID NO: 756471 - RNA, 19 nt, Homo sapiens
  misc_RNA (1)...(19): siRNA sense strand
augaacaccuucuuuaugg

SEQ ID NO: 756472 - RNA, 19 nt, Homo sapiens
  misc_RNA (1)...(19): siRNA sense strand
cauucaaacugcucucauc

SEQ ID NO: 756473 - RNA, 19 nt, Homo sapiens
  misc_RNA (1)...(19): siRNA sense strand
acauucauauuccagaaga

SEQ ID NO: 756474 - RNA, 19 nt, Homo sapiens
  misc_RNA (1)...(19): siRNA sense strand
ugaaaugaugggucacgua

SEQ ID NO: 756475 - RNA, 19 nt, Homo sapiens
  misc_RNA (1)...(19): siRNA sense strand
aaacccauauuucuuacca

SEQ ID NO: 756476 - RNA, 19 nt, Homo sapiens
  misc_RNA (1)...(19): siRNA sense strand
gacagacacugauguuuuc

SEQ ID NO: 756477 - RNA, 19 nt, Homo sapiens
  misc_RNA (1)...(19): siRNA sense strand
ccgaguaggaugucacuga

SEQ ID NO: 756478 - RNA, 19 nt, Homo sapiens
  misc_RNA (1)...(19): siRNA sense strand
ggguuggguuauauaaugu

SEQ ID NO: 756479 - RNA, 19 nt, Homo sapiens
  misc_RNA (1)...(19): siRNA sense strand
cuaaaccacucagagaagu

SEQ ID NO: 756480 - RNA, 19 nt, Homo sapiens
  misc_RNA (1)...(19): siRNA sense strand
acaccacaugccauuauua

SEQ ID NO: 756481 - RNA, 19 nt, Homo sapiens
  misc_RNA (1)...(19): siRNA sense strand
gugccaaggaucuaugaaa

SEQ ID NO: 756482 - RNA, 19 nt, Homo sapiens
  misc_RNA (1)...(19): siRNA sense strand
gacaagacuuucacuucac

SEQ ID NO: 756483 - RNA, 19 nt, Homo sapiens
  misc_RNA (1)...(19): siRNA sense strand
gccaaggaucuaugaaaug

SEQ ID NO: 756484 - RNA, 19 nt, Homo sapiens
  misc_RNA (1)...(19): siRNA sense strand
ugcaguggguuggguuaua

SEQ ID NO: 756485 - RNA, 19 nt, Homo sapiens
  misc_RNA (1)...(19): siRNA sense strand
gagccgauuuacagacaag

SEQ ID NO: 756486 - RNA, 19 nt, Homo sapiens
  misc_RNA (1)...(19): siRNA sense strand
cuuagaggaugaacaccuu

SEQ ID NO: 756487 - RNA, 19 nt, Homo sapiens
  misc_RNA (1)...(19): siRNA sense strand
acaagacuuucacuucaca

SEQ ID NO: 756488 - RNA, 19 nt, Homo sapiens
  misc_RNA (1)...(19): siRNA sense strand
aaugaugggucacguaaaa

SEQ ID NO: 756489 - RNA, 19 nt, Homo sapiens
  misc_RNA (1)...(19): siRNA sense strand
cauauaauaaccugaccuu

SEQ ID NO: 756490 - RNA, 19 nt, Homo sapiens
  misc_RNA (1)...(19): siRNA sense strand
ggauaugagguucuuacau

SEQ ID NO: 756491 - RNA, 19 nt, Homo sapiens
  misc_RNA (1)...(19): siRNA sense strand
ggcaggucaugcuaaggaa

SEQ ID NO: 756492 - RNA, 19 nt, Homo sapiens
  misc_RNA (1)...(19): siRNA sense strand
aguaggaugucacugagau

SEQ ID NO: 756493 - RNA, 19 nt, Homo sapiens
  misc_RNA (1)...(19): siRNA sense strand
gccaaguacguaaugaaga

SEQ ID NO: 756494 - RNA, 19 nt, Homo sapiens
  misc_RNA (1)...(19): siRNA sense strand
uagaacgcgugaacuggau

SEQ ID NO: 756495 - RNA, 19 nt, Homo sapiens
  misc_RNA (1)...(19): siRNA sense strand
uggauguacuucuaugagu

SEQ ID NO: 756496 - RNA, 19 nt, Homo sapiens
  misc_RNA (1)...(19): siRNA sense strand
ugauagaacgcgugaacug

SEQ ID NO: 756497 - RNA, 19 nt, Homo sapiens
  misc_RNA (1)...(19): siRNA sense strand
gaguaugagccgauuuaca

SEQ ID NO: 756498 - RNA, 19 nt, Homo sapiens
  misc_RNA (1)...(19): siRNA sense strand
ucaucaauacuggcaauuu

SEQ ID NO: 756499 - RNA, 19 nt, Homo sapiens
  misc_RNA (1)...(19): siRNA sense strand
augaguaugagccgauuua

SEQ ID NO: 756500 - RNA, 19 nt, Homo sapiens
  misc_RNA (1)...(19): siRNA sense strand
cuauauagaauccauuugg

SEQ ID NO: 756501 - RNA, 19 nt, Homo sapiens
  misc_RNA (1)...(19): siRNA sense strand
gaacgcgugaacuggaugu

SEQ ID NO: 756502 - RNA, 19 nt, Homo sapiens
  misc_RNA (1)...(19): siRNA sense strand
agacagacacugauguuuu

SEQ ID NO: 756503 - RNA, 19 nt, Homo sapiens
  misc_RNA (1)...(19): siRNA sense strand
aacaccacaugccauuauu

SEQ ID NO: 756504 - RNA, 19 nt, Homo sapiens
  misc_RNA (1)...(19): siRNA sense strand
ccucggcucucuggacugu

SEQ ID NO: 756505 - RNA, 19 nt, Homo sapiens
  misc_RNA (1)...(19): siRNA sense strand
cuggcaauuuagugaagua

SEQ ID NO: 756506 - RNA, 19 nt, Homo sapiens
  misc_RNA (1)...(19): siRNA sense strand
gaaagccaggcaggccauu

SEQ ID NO: 756507 - RNA, 19 nt, Homo sapiens
  misc_RNA (1)...(19): siRNA sense strand
aguaugagccgauuuacag

SEQ ID NO: 756508 - RNA, 19 nt, Homo sapiens
  misc_RNA (1)...(19): siRNA sense strand
aauacuggcaauuuaguga

SEQ ID NO: 756509 - RNA, 19 nt, Homo sapiens
  misc_RNA (1)...(19): siRNA sense strand
ccaggcaggccauuagagu

SEQ ID NO: 756510 - RNA, 19 nt, Homo sapiens
  misc_RNA (1)...(19): siRNA sense strand
ugaagacagacacugaugu

SEQ ID NO: 756511 - RNA, 19 nt, Homo sapiens
  misc_RNA (1)...(19): siRNA sense strand
uaaaccacucagagaaguu

SEQ ID NO: 756512 - RNA, 19 nt, Homo sapiens
  misc_RNA (1)...(19): siRNA sense strand
aaagccaggcaggccauua

SEQ ID NO: 756513 - RNA, 19 nt, Homo sapiens
  misc_RNA (1)...(19): siRNA sense strand
uggcaggucaugcuaagga

SEQ ID NO: 756514 - RNA, 19 nt, Homo sapiens
  misc_RNA (1)...(19): siRNA sense strand
ucaacugagacgugugauu

SEQ ID NO: 756515 - RNA, 19 nt, Homo sapiens
  misc_RNA (1)...(19): siRNA sense strand
guaugagccgauuuacaga

SEQ ID NO: 756516 - RNA, 19 nt, Homo sapiens
  misc_RNA (1)...(19): siRNA sense strand
ucaauacuggcaauuuagu

SEQ ID NO: 756517 - RNA, 19 nt, Homo sapiens
  misc_RNA (1)...(19): siRNA sense strand
ccaaugccaaguacguaau

SEQ ID NO: 756518 - RNA, 19 nt, Homo sapiens
  misc_RNA (1)...(19): siRNA sense strand
caacgucccugaacuggua

SEQ ID NO: 756519 - RNA, 19 nt, Homo sapiens
  misc_RNA (1)...(19): siRNA sense strand
gagagaggcugagcaggaa

SEQ ID NO: 756520 - RNA, 19 nt, Homo sapiens
  misc_RNA (1)...(19): siRNA sense strand
gaacugggcugagaaacac

SEQ ID NO: 756521 - RNA, 19 nt, Homo sapiens
  misc_RNA (1)...(19): siRNA sense strand
gacggacgaugauguguau

SEQ ID NO: 756522 - RNA, 19 nt, Homo sapiens
  misc_RNA (1)...(19): siRNA sense strand
gggcugaacugggcugaga

SEQ ID NO: 756523 - RNA, 19 nt, Homo sapiens
  misc_RNA (1)...(19): siRNA sense strand
gcaggaaggaggccagguu

SEQ ID NO: 756524 - RNA, 19 nt, Homo sapiens
  misc_RNA (1)...(19): siRNA sense strand
ggacgaugauguguauguc

SEQ ID NO: 756525 - RNA, 19 nt, Homo sapiens
  misc_RNA (1)...(19): siRNA sense strand
gcaggcaccgcguaucaga

SEQ ID NO: 756526 - RNA, 19 nt, Homo sapiens
  misc_RNA (1)...(19): siRNA sense strand
cccauuagaggaugucuuu

SEQ ID NO: 756527 - RNA, 19 nt, Homo sapiens
  misc_RNA (1)...(19): siRNA sense strand
gcacggaaccccagagaga

SEQ ID NO: 756528 - RNA, 19 nt, Homo sapiens
  misc_RNA (1)...(19): siRNA sense strand
gguacagacgcuauucuug

SEQ ID NO: 756529 - RNA, 19 nt, Homo sapiens
  misc_RNA (1)...(19): siRNA sense strand
gugcugcuaugggaaauuc

SEQ ID NO: 756530 - RNA, 19 nt, Homo sapiens
  misc_RNA (1)...(19): siRNA sense strand
caagacggacgaugaugug

SEQ ID NO: 756531 - RNA, 19 nt, Homo sapiens
  misc_RNA (1)...(19): siRNA sense strand
gaaccagagaaacgccauu

SEQ ID NO: 756532 - RNA, 19 nt, Homo sapiens
  misc_RNA (1)...(19): siRNA sense strand
ccugcggugucgagcaaua

SEQ ID NO: 756533 - RNA, 19 nt, Homo sapiens
  misc_RNA (1)...(19): siRNA sense strand
cuagaccggugcugcuaug

SEQ ID NO: 756534 - RNA, 19 nt, Homo sapiens
  misc_RNA (1)...(19): siRNA sense strand
gcugaacugggcugagaaa

SEQ ID NO: 756535 - RNA, 19 nt, Homo sapiens
  misc_RNA (1)...(19): siRNA sense strand
agacggacgaugaugugua

SEQ ID NO: 756536 - RNA, 19 nt, Homo sapiens
  misc_RNA (1)...(19): siRNA sense strand
cauuagaggaugucuuugu

SEQ ID NO: 756537 - RNA, 19 nt, Homo sapiens
  misc_RNA (1)...(19): siRNA sense strand
caggaaggaggccagguuu

SEQ ID NO: 756538 - RNA, 19 nt, Homo sapiens
  misc_RNA (1)...(19): siRNA sense strand
acgaugauguguaugucaa

SEQ ID NO: 756539 - RNA, 19 nt, Homo sapiens
  misc_RNA (1)...(19): siRNA sense strand
ugaacugggcugagaaaca

SEQ ID NO: 756540 - RNA, 19 nt, Homo sapiens
  misc_RNA (1)...(19): siRNA sense strand
ggaaggaggccagguuuug

SEQ ID NO: 756541 - RNA, 19 nt, Homo sapiens
  misc_RNA (1)...(19): siRNA sense strand
ucaagacggacgaugaugu

SEQ ID NO: 756542 - RNA, 19 nt, Homo sapiens
  misc_RNA (1)...(19): siRNA sense strand
uaccgcaaccucacccuaa

SEQ ID NO: 756543 - RNA, 19 nt, Homo sapiens
  misc_RNA (1)...(19): siRNA sense strand
ggguacagacgcuauucuu

SEQ ID NO: 756544 - RNA, 19 nt, Homo sapiens
  misc_RNA (1)...(19): siRNA sense strand
gguaucagagcuggucuug

SEQ ID NO: 756545 - RNA, 19 nt, Homo sapiens
  misc_RNA (1)...(19): siRNA sense strand
ccgcuuugcugcuggugau

SEQ ID NO: 756546 - RNA, 19 nt, Homo sapiens
  misc_RNA (1)...(19): siRNA sense strand
gggcaccccuucucccauu

SEQ ID NO: 756547 - RNA, 19 nt, Homo sapiens
  misc_RNA (1)...(19): siRNA sense strand
ggagaaccugaaccagaga

SEQ ID NO: 756548 - RNA, 19 nt, Homo sapiens
  misc_RNA (1)...(19): siRNA sense strand
gagaaccugaaccagagaa

SEQ ID NO: 756549 - RNA, 19 nt, Homo sapiens
  misc_RNA (1)...(19): siRNA sense strand
auuagaggaugucuuugug

SEQ ID NO: 756550 - RNA, 19 nt, Homo sapiens
  misc_RNA (1)...(19): siRNA sense strand
gggcugcgauguacucaaa

SEQ ID NO: 756551 - RNA, 19 nt, Homo sapiens
  misc_RNA (1)...(19): siRNA sense strand
gaaaggagcacggccugaa

SEQ ID NO: 756552 - RNA, 19 nt, Homo sapiens
  misc_RNA (1)...(19): siRNA sense strand
ggagagauacuacgacuac

SEQ ID NO: 756553 - RNA, 19 nt, Homo sapiens
  misc_RNA (1)...(19): siRNA sense strand
gggcaggagagaccaguua

SEQ ID NO: 756554 - RNA, 19 nt, Homo sapiens
  misc_RNA (1)...(19): siRNA sense strand
ggacguggcuuuugugaag

SEQ ID NO: 756555 - RNA, 19 nt, Homo sapiens
  misc_RNA (1)...(19): siRNA sense strand
gcucccaugugaccauuga

SEQ ID NO: 756556 - RNA, 19 nt, Homo sapiens
  misc_RNA (1)...(19): siRNA sense strand
ggugaugggcugcgaugua

SEQ ID NO: 756557 - RNA, 19 nt, Homo sapiens
  misc_RNA (1)...(19): siRNA sense strand
gcacgguacuggagaacac

SEQ ID NO: 756558 - RNA, 19 nt, Homo sapiens
  misc_RNA (1)...(19): siRNA sense strand
gagcucccaugugaccauu

SEQ ID NO: 756559 - RNA, 19 nt, Homo sapiens
  misc_RNA (1)...(19): siRNA sense strand
gaccauugacacccugaaa

SEQ ID NO: 756560 - RNA, 19 nt, Homo sapiens
  misc_RNA (1)...(19): siRNA sense strand
gugaugggcugcgauguac

SEQ ID NO: 756561 - RNA, 19 nt, Homo sapiens
  misc_RNA (1)...(19): siRNA sense strand
cacaagugcggcaacauga

SEQ ID NO: 756562 - RNA, 19 nt, Homo sapiens
  misc_RNA (1)...(19): siRNA sense strand
cgaaguguacgaucaagag

SEQ ID NO: 756563 - RNA, 19 nt, Homo sapiens
  misc_RNA (1)...(19): siRNA sense strand
gggcgaaguguacgaucaa

SEQ ID NO: 756564 - RNA, 19 nt, Homo sapiens
  misc_RNA (1)...(19): siRNA sense strand
gaaggggugugugacaaga

SEQ ID NO: 756565 - RNA, 19 nt, Homo sapiens
  misc_RNA (1)...(19): siRNA sense strand
gagagauacuacgacuaca

SEQ ID NO: 756566 - RNA, 19 nt, Homo sapiens
  misc_RNA (1)...(19): siRNA sense strand
gcgaaguguacgaucaaga

SEQ ID NO: 756567 - RNA, 19 nt, Homo sapiens
  misc_RNA (1)...(19): siRNA sense strand
acagcacgguacuggagaa

SEQ ID NO: 756568 - RNA, 19 nt, Homo sapiens
  misc_RNA (1)...(19): siRNA sense strand
gggcugcgauguacucaaa

SEQ ID NO: 756569 - RNA, 19 nt, Homo sapiens
  misc_RNA (1)...(19): siRNA sense strand
gaaaggagcacggccugaa

SEQ ID NO: 756570 - RNA, 19 nt, Homo sapiens
  misc_RNA (1)...(19): siRNA sense strand
ggagagauacuacgacuac

SEQ ID NO: 756571 - RNA, 19 nt, Homo sapiens
  misc_RNA (1)...(19): siRNA sense strand
gggcaggagagaccaguua

SEQ ID NO: 756572 - RNA, 19 nt, Homo sapiens
  misc_RNA (1)...(19): siRNA sense strand
ggacguggcuuuugugaag

SEQ ID NO: 756573 - RNA, 19 nt, Homo sapiens
  misc_RNA (1)...(19): siRNA sense strand
gcucccaugugaccauuga

SEQ ID NO: 756574 - RNA, 19 nt, Homo sapiens
  misc_RNA (1)...(19): siRNA sense strand
ggugaugggcugcgaugua

SEQ ID NO: 756575 - RNA, 19 nt, Homo sapiens
  misc_RNA (1)...(19): siRNA sense strand
gcacgguacuggagaacac

SEQ ID NO: 756576 - RNA, 19 nt, Homo sapiens
  misc_RNA (1)...(19): siRNA sense strand
gagcucccaugugaccauu

SEQ ID NO: 756577 - RNA, 19 nt, Homo sapiens
  misc_RNA (1)...(19): siRNA sense strand
gaccauugacacccugaaa

SEQ ID NO: 756578 - RNA, 19 nt, Homo sapiens
  misc_RNA (1)...(19): siRNA sense strand
gugaugggcugcgauguac

SEQ ID NO: 756579 - RNA, 19 nt, Homo sapiens
  misc_RNA (1)...(19): siRNA sense strand
cacaagugcggcaacauga

SEQ ID NO: 756580 - RNA, 19 nt, Homo sapiens
  misc_RNA (1)...(19): siRNA sense strand
cgaaguguacgaucaagag

SEQ ID NO: 756581 - RNA, 19 nt, Homo sapiens
  misc_RNA (1)...(19): siRNA sense strand
gggcgaaguguacgaucaa

SEQ ID NO: 756582 - RNA, 19 nt, Homo sapiens
  misc_RNA (1)...(19): siRNA sense strand
gaaggggugugugacaaga

SEQ ID NO: 756583 - RNA, 19 nt, Homo sapiens
  misc_RNA (1)...(19): siRNA sense strand
gagagauacuacgacuaca

SEQ ID NO: 756584 - RNA, 19 nt, Homo sapiens
  misc_RNA (1)...(19): siRNA sense strand
gcgaaguguacgaucaaga

SEQ ID NO: 756585 - RNA, 19 nt, Homo sapiens
  misc_RNA (1)...(19): siRNA sense strand
acagcacgguacuggagaa

SEQ ID NO: 756586 - RNA, 19 nt, Homo sapiens
  misc_RNA (1)...(19): siRNA sense strand
gauaugagguucuuacauu

SEQ ID NO: 756587 - RNA, 19 nt, Homo sapiens
  misc_RNA (1)...(19): siRNA sense strand
ccaaggagaucaucacuuu

SEQ ID NO: 756588 - RNA, 19 nt, Homo sapiens
  misc_RNA (1)...(19): siRNA sense strand
caucaauacuggcaauuua

SEQ ID NO: 756589 - RNA, 19 nt, Homo sapiens
  misc_RNA (1)...(19): siRNA sense strand
gaacauucauauuccagaa

SEQ ID NO: 756590 - RNA, 19 nt, Homo sapiens
  misc_RNA (1)...(19): siRNA sense strand
ccaaggaucuaugaaauga

SEQ ID NO: 756591 - RNA, 19 nt, Homo sapiens
  misc_RNA (1)...(19): siRNA sense strand
gaaaugaugggucacguaa

SEQ ID NO: 756592 - RNA, 19 nt, Homo sapiens
  misc_RNA (1)...(19): siRNA sense strand
ucaaacugcucucaucaaa

SEQ ID NO: 756593 - RNA, 19 nt, Homo sapiens
  misc_RNA (1)...(19): siRNA sense strand
gaacaccacaugccauuau

SEQ ID NO: 756594 - RNA, 19 nt, Homo sapiens
  misc_RNA (1)...(19): siRNA sense strand
auaauaaccugaccuugaa

SEQ ID NO: 756595 - RNA, 19 nt, Homo sapiens
  misc_RNA (1)...(19): siRNA sense strand
gcaauuuagugaaguaucu

SEQ ID NO: 756596 - RNA, 19 nt, Homo sapiens
  misc_RNA (1)...(19): siRNA sense strand
gaagacagacacugauguu

SEQ ID NO: 756597 - RNA, 19 nt, Homo sapiens
  misc_RNA (1)...(19): siRNA sense strand
agacaagacuuucacuuca

SEQ ID NO: 756598 - RNA, 19 nt, Homo sapiens
  misc_RNA (1)...(19): siRNA sense strand
uauaauaaccugaccuuga

SEQ ID NO: 756599 - RNA, 19 nt, Homo sapiens
  misc_RNA (1)...(19): siRNA sense strand
gaugaacaccuucuuuaug

SEQ ID NO: 756600 - RNA, 19 nt, Homo sapiens
  misc_RNA (1)...(19): siRNA sense strand
gcaguggguuggguuauau

SEQ ID NO: 756601 - RNA, 19 nt, Homo sapiens
  misc_RNA (1)...(19): siRNA sense strand
ugaacuggauguacuucua

SEQ ID NO: 756602 - RNA, 19 nt, Homo sapiens
  misc_RNA (1)...(19): siRNA sense strand
caacugagacgugugauug

SEQ ID NO: 756603 - RNA, 19 nt, Homo sapiens
  misc_RNA (1)...(19): siRNA sense strand
ccacuacaaugugauagaa

SEQ ID NO: 756604 - RNA, 19 nt, Homo sapiens
  misc_RNA (1)...(19): siRNA sense strand
gucgggaucuguuugaauu

SEQ ID NO: 756605 - RNA, 19 nt, Homo sapiens
  misc_RNA (1)...(19): siRNA sense strand
ggaugucugucaacugaga

SEQ ID NO: 756606 - RNA, 19 nt, Homo sapiens
  misc_RNA (1)...(19): siRNA sense strand
cagguuauccucuaauuga

SEQ ID NO: 756607 - RNA, 19 nt, Homo sapiens
  misc_RNA (1)...(19): siRNA sense strand
cgggaucuguuugaauuua

SEQ ID NO: 756608 - RNA, 19 nt, Homo sapiens
  misc_RNA (1)...(19): siRNA sense strand
gaacuggauguacuucuau

SEQ ID NO: 756609 - RNA, 19 nt, Homo sapiens
  misc_RNA (1)...(19): siRNA sense strand
ggaugaacaccuucuuuau

SEQ ID NO: 756610 - RNA, 19 nt, Homo sapiens
  misc_RNA (1)...(19): siRNA sense strand
gaggaugaacaccuucuuu

SEQ ID NO: 756611 - RNA, 19 nt, Homo sapiens
  misc_RNA (1)...(19): siRNA sense strand
ucaagguguucccuccaua

SEQ ID NO: 756612 - RNA, 19 nt, Homo sapiens
  misc_RNA (1)...(19): siRNA sense strand
gacuuucacuucacacuuc

SEQ ID NO: 756613 - RNA, 19 nt, Homo sapiens
  misc_RNA (1)...(19): siRNA sense strand
ccaagaggcugaaaaggaa

SEQ ID NO: 756614 - RNA, 19 nt, Homo sapiens
  misc_RNA (1)...(19): siRNA sense strand
uggguuggguuauauaaug

SEQ ID NO: 756615 - RNA, 19 nt, Homo sapiens
  misc_RNA (1)...(19): siRNA sense strand
caccacaugccauuauuaa

SEQ ID NO: 756616 - RNA, 19 nt, Homo sapiens
  misc_RNA (1)...(19): siRNA sense strand
uauaauguccagagauuug

SEQ ID NO: 756617 - RNA, 19 nt, Homo sapiens
  misc_RNA (1)...(19): siRNA sense strand
aaacugcucucaucaaaau

SEQ ID NO: 756618 - RNA, 19 nt, Homo sapiens
  misc_RNA (1)...(19): siRNA sense strand
uaaugaagacagacacuga

SEQ ID NO: 756619 - RNA, 19 nt, Homo sapiens
  misc_RNA (1)...(19): siRNA sense strand
ccaaguacguaaugaagac

SEQ ID NO: 756620 - RNA, 19 nt, Homo sapiens
  misc_RNA (1)...(19): siRNA sense strand
ggaacaccacaugccauua

SEQ ID NO: 756621 - RNA, 19 nt, Homo sapiens
  misc_RNA (1)...(19): siRNA sense strand
uuggaugucugucaacuga

SEQ ID NO: 756622 - RNA, 19 nt, Homo sapiens
  misc_RNA (1)...(19): siRNA sense strand
gggaucuguuugaauuuau

SEQ ID NO: 756623 - RNA, 19 nt, Homo sapiens
  misc_RNA (1)...(19): siRNA sense strand
aaggaucuaugaaaugaug

SEQ ID NO: 756624 - RNA, 19 nt, Homo sapiens
  misc_RNA (1)...(19): siRNA sense strand
cacagguuauccucuaauu

SEQ ID NO: 756625 - RNA, 19 nt, Homo sapiens
  misc_RNA (1)...(19): siRNA sense strand
aggaugaacaccuucuuua

SEQ ID NO: 756626 - RNA, 19 nt, Homo sapiens
  misc_RNA (1)...(19): siRNA sense strand
ugacauaauccgacaagau

SEQ ID NO: 756627 - RNA, 19 nt, Homo sapiens
  misc_RNA (1)...(19): siRNA sense strand
aggcaggccauuagaguua

SEQ ID NO: 756628 - RNA, 19 nt, Homo sapiens
  misc_RNA (1)...(19): siRNA sense strand
ugccaaggaucuaugaaau

SEQ ID NO: 756629 - RNA, 19 nt, Homo sapiens
  misc_RNA (1)...(19): siRNA sense strand
guuauauaauguccagaga

SEQ ID NO: 756630 - RNA, 19 nt, Homo sapiens
  misc_RNA (1)...(19): siRNA sense strand
uuucacagguuauccucua

SEQ ID NO: 756631 - RNA, 19 nt, Homo sapiens
  misc_RNA (1)...(19): siRNA sense strand
cagacaagacuuucacuuc

SEQ ID NO: 756632 - RNA, 19 nt, Homo sapiens
  misc_RNA (1)...(19): siRNA sense strand
cuccugaguuucuuuguga

SEQ ID NO: 756633 - RNA, 19 nt, Homo sapiens
  misc_RNA (1)...(19): siRNA sense strand
guuugaagauguuuauguc

SEQ ID NO: 756634 - RNA, 19 nt, Homo sapiens
  misc_RNA (1)...(19): siRNA sense strand
gcauucagguggguaacug

SEQ ID NO: 756635 - RNA, 19 nt, Homo sapiens
  misc_RNA (1)...(19): siRNA sense strand
gauuuacagacaagacuuu

SEQ ID NO: 756636 - RNA, 19 nt, Homo sapiens
  misc_RNA (1)...(19): siRNA sense strand
ccauuuggaugucugucaa

SEQ ID NO: 756637 - RNA, 19 nt, Homo sapiens
  misc_RNA (1)...(19): siRNA sense strand
augaacaccuucuuuaugg

SEQ ID NO: 756638 - RNA, 19 nt, Homo sapiens
  misc_RNA (1)...(19): siRNA sense strand
cauucaaacugcucucauc

SEQ ID NO: 756639 - RNA, 19 nt, Homo sapiens
  misc_RNA (1)...(19): siRNA sense strand
acauucauauuccagaaga

SEQ ID NO: 756640 - RNA, 19 nt, Homo sapiens
  misc_RNA (1)...(19): siRNA sense strand
ugaaaugaugggucacgua

SEQ ID NO: 756641 - RNA, 19 nt, Homo sapiens
  misc_RNA (1)...(19): siRNA sense strand
aaacccauauuucuuacca

SEQ ID NO: 756642 - RNA, 19 nt, Homo sapiens
  misc_RNA (1)...(19): siRNA sense strand
gacagacacugauguuuuc

SEQ ID NO: 756643 - RNA, 19 nt, Homo sapiens
  misc_RNA (1)...(19): siRNA sense strand
ccgaguaggaugucacuga

SEQ ID NO: 756644 - RNA, 19 nt, Homo sapiens
  misc_RNA (1)...(19): siRNA sense strand
ggguuggguuauauaaugu

SEQ ID NO: 756645 - RNA, 19 nt, Homo sapiens
  misc_RNA (1)...(19): siRNA sense strand
cuaaaccacucagagaagu

SEQ ID NO: 756646 - RNA, 19 nt, Homo sapiens
  misc_RNA (1)...(19): siRNA sense strand
acaccacaugccauuauua

SEQ ID NO: 756647 - RNA, 19 nt, Homo sapiens
  misc_RNA (1)...(19): siRNA sense strand
gugccaaggaucuaugaaa

SEQ ID NO: 756648 - RNA, 19 nt, Homo sapiens
  misc_RNA (1)...(19): siRNA sense strand
gacaagacuuucacuucac

SEQ ID NO: 756649 - RNA, 19 nt, Homo sapiens
  misc_RNA (1)...(19): siRNA sense strand
gccaaggaucuaugaaaug

SEQ ID NO: 756650 - RNA, 19 nt, Homo sapiens
  misc_RNA (1)...(19): siRNA sense strand
ugcaguggguuggguuaua

SEQ ID NO: 756651 - RNA, 19 nt, Homo sapiens
  misc_RNA (1)...(19): siRNA sense strand
gagccgauuuacagacaag

SEQ ID NO: 756652 - RNA, 19 nt, Homo sapiens
  misc_RNA (1)...(19): siRNA sense strand
cuuagaggaugaacaccuu

SEQ ID NO: 756653 - RNA, 19 nt, Homo sapiens
  misc_RNA (1)...(19): siRNA sense strand
acaagacuuucacuucaca

SEQ ID NO: 756654 - RNA, 19 nt, Homo sapiens
  misc_RNA (1)...(19): siRNA sense strand
aaugaugggucacguaaaa

SEQ ID NO: 756655 - RNA, 19 nt, Homo sapiens
  misc_RNA (1)...(19): siRNA sense strand
cauauaauaaccugaccuu

SEQ ID NO: 756656 - RNA, 19 nt, Homo sapiens
  misc_RNA (1)...(19): siRNA sense strand
ggauaugagguucuuacau

SEQ ID NO: 756657 - RNA, 19 nt, Homo sapiens
  misc_RNA (1)...(19): siRNA sense strand
ggcaggucaugcuaaggaa

SEQ ID NO: 756658 - RNA, 19 nt, Homo sapiens
  misc_RNA (1)...(19): siRNA sense strand
aguaggaugucacugagau

SEQ ID NO: 756659 - RNA, 19 nt, Homo sapiens
  misc_RNA (1)...(19): siRNA sense strand
gccaaguacguaaugaaga

SEQ ID NO: 756660 - RNA, 19 nt, Homo sapiens
  misc_RNA (1)...(19): siRNA sense strand
uagaacgcgugaacuggau

SEQ ID NO: 756661 - RNA, 19 nt, Homo sapiens
  misc_RNA (1)...(19): siRNA sense strand
uggauguacuucuaugagu

SEQ ID NO: 756662 - RNA, 19 nt, Homo sapiens
  misc_RNA (1)...(19): siRNA sense strand
ugauagaacgcgugaacug

SEQ ID NO: 756663 - RNA, 19 nt, Homo sapiens
  misc_RNA (1)...(19): siRNA sense strand
gaguaugagccgauuuaca

SEQ ID NO: 756664 - RNA, 19 nt, Homo sapiens
  misc_RNA (1)...(19): siRNA sense strand
ucaucaauacuggcaauuu

SEQ ID NO: 756665 - RNA, 19 nt, Homo sapiens
  misc_RNA (1)...(19): siRNA sense strand
augaguaugagccgauuua

SEQ ID NO: 756666 - RNA, 19 nt, Homo sapiens
  misc_RNA (1)...(19): siRNA sense strand
cuauauagaauccauuugg

SEQ ID NO: 756667 - RNA, 19 nt, Homo sapiens
  misc_RNA (1)...(19): siRNA sense strand
gaacgcgugaacuggaugu

SEQ ID NO: 756668 - RNA, 19 nt, Homo sapiens
  misc_RNA (1)...(19): siRNA sense strand
agacagacacugauguuuu

SEQ ID NO: 756669 - RNA, 19 nt, Homo sapiens
  misc_RNA (1)...(19): siRNA sense strand
aacaccacaugccauuauu

SEQ ID NO: 756670 - RNA, 19 nt, Homo sapiens
  misc_RNA (1)...(19): siRNA sense strand
ccucggcucucuggacugu

SEQ ID NO: 756671 - RNA, 19 nt, Homo sapiens
  misc_RNA (1)...(19): siRNA sense strand
cuggcaauuuagugaagua

SEQ ID NO: 756672 - RNA, 19 nt, Homo sapiens
  misc_RNA (1)...(19): siRNA sense strand
gaaagccaggcaggccauu

SEQ ID NO: 756673 - RNA, 19 nt, Homo sapiens
  misc_RNA (1)...(19): siRNA sense strand
aguaugagccgauuuacag

SEQ ID NO: 756674 - RNA, 19 nt, Homo sapiens
  misc_RNA (1)...(19): siRNA sense strand
aauacuggcaauuuaguga

SEQ ID NO: 756675 - RNA, 19 nt, Homo sapiens
  misc_RNA (1)...(19): siRNA sense strand
ccaggcaggccauuagagu

SEQ ID NO: 756676 - RNA, 19 nt, Homo sapiens
  misc_RNA (1)...(19): siRNA sense strand
ugaagacagacacugaugu

SEQ ID NO: 756677 - RNA, 19 nt, Homo sapiens
  misc_RNA (1)...(19): siRNA sense strand
uaaaccacucagagaaguu

SEQ ID NO: 756678 - RNA, 19 nt, Homo sapiens
  misc_RNA (1)...(19): siRNA sense strand
aaagccaggcaggccauua

SEQ ID NO: 756679 - RNA, 19 nt, Homo sapiens
  misc_RNA (1)...(19): siRNA sense strand
uggcaggucaugcuaagga

SEQ ID NO: 756680 - RNA, 19 nt, Homo sapiens
  misc_RNA (1)...(19): siRNA sense strand
ucaacugagacgugugauu

SEQ ID NO: 756681 - RNA, 19 nt, Homo sapiens
  misc_RNA (1)...(19): siRNA sense strand
guaugagccgauuuacaga

SEQ ID NO: 756682 - RNA, 19 nt, Homo sapiens
  misc_RNA (1)...(19): siRNA sense strand
ucaauacuggcaauuuagu

SEQ ID NO: 756683 - RNA, 19 nt, Homo sapiens
  misc_RNA (1)...(19): siRNA sense strand
ccaaugccaaguacguaau

SEQ ID NO: 756684 - RNA, 19 nt, Homo sapiens
  misc_RNA (1)...(19): siRNA sense strand
gauaugagguucuuacauu

SEQ ID NO: 756685 - RNA, 19 nt, Homo sapiens
  misc_RNA (1)...(19): siRNA sense strand
ccaaggagaucaucacuuu

SEQ ID NO: 756686 - RNA, 19 nt, Homo sapiens
  misc_RNA (1)...(19): siRNA sense strand
caucaauacuggcaauuua

SEQ ID NO: 756687 - RNA, 19 nt, Homo sapiens
  misc_RNA (1)...(19): siRNA sense strand
gaacauucauauuccagaa

SEQ ID NO: 756688 - RNA, 19 nt, Homo sapiens
  misc_RNA (1)...(19): siRNA sense strand
ccaaggaucuaugaaauga

SEQ ID NO: 756689 - RNA, 19 nt, Homo sapiens
  misc_RNA (1)...(19): siRNA sense strand
gaaaugaugggucacguaa

SEQ ID NO: 756690 - RNA, 19 nt, Homo sapiens
  misc_RNA (1)...(19): siRNA sense strand
ucaaacugcucucaucaaa

SEQ ID NO: 756691 - RNA, 19 nt, Homo sapiens
  misc_RNA (1)...(19): siRNA sense strand
gaacaccacaugccauuau

SEQ ID NO: 756692 - RNA, 19 nt, Homo sapiens
  misc_RNA (1)...(19): siRNA sense strand
auaauaaccugaccuugaa

SEQ ID NO: 756693 - RNA, 19 nt, Homo sapiens
  misc_RNA (1)...(19): siRNA sense strand
gcaauuuagugaaguaucu

SEQ ID NO: 756694 - RNA, 19 nt, Homo sapiens
  misc_RNA (1)...(19): siRNA sense strand
gaagacagacacugauguu

SEQ ID NO: 756695 - RNA, 19 nt, Homo sapiens
  misc_RNA (1)...(19): siRNA sense strand
agacaagacuuucacuuca

SEQ ID NO: 756696 - RNA, 19 nt, Homo sapiens
  misc_RNA (1)...(19): siRNA sense strand
uauaauaaccugaccuuga

SEQ ID NO: 756697 - RNA, 19 nt, Homo sapiens
  misc_RNA (1)...(19): siRNA sense strand
gaugaacaccuucuuuaug

SEQ ID NO: 756698 - RNA, 19 nt, Homo sapiens
  misc_RNA (1)...(19): siRNA sense strand
gcaguggguuggguuauau

SEQ ID NO: 756699 - RNA, 19 nt, Homo sapiens
  misc_RNA (1)...(19): siRNA sense strand
ugaacuggauguacuucua

SEQ ID NO: 756700 - RNA, 19 nt, Homo sapiens
  misc_RNA (1)...(19): siRNA sense strand
caacugagacgugugauug

SEQ ID NO: 756701 - RNA, 19 nt, Homo sapiens
  misc_RNA (1)...(19): siRNA sense strand
ccacuacaaugugauagaa

SEQ ID NO: 756702 - RNA, 19 nt, Homo sapiens
  misc_RNA (1)...(19): siRNA sense strand
gucgggaucuguuugaauu

SEQ ID NO: 756703 - RNA, 19 nt, Homo sapiens
  misc_RNA (1)...(19): siRNA sense strand
ggaugucugucaacugaga

SEQ ID NO: 756704 - RNA, 19 nt, Homo sapiens
  misc_RNA (1)...(19): siRNA sense strand
cagguuauccucuaauuga

SEQ ID NO: 756705 - RNA, 19 nt, Homo sapiens
  misc_RNA (1)...(19): siRNA sense strand
cgggaucuguuugaauuua

SEQ ID NO: 756706 - RNA, 19 nt, Homo sapiens
  misc_RNA (1)...(19): siRNA sense strand
gaacuggauguacuucuau

SEQ ID NO: 756707 - RNA, 19 nt, Homo sapiens
  misc_RNA (1)...(19): siRNA sense strand
ggaugaacaccuucuuuau

SEQ ID NO: 756708 - RNA, 19 nt, Homo sapiens
  misc_RNA (1)...(19): siRNA sense strand
gaggaugaacaccuucuuu

SEQ ID NO: 756709 - RNA, 19 nt, Homo sapiens
  misc_RNA (1)...(19): siRNA sense strand
ucaagguguucccuccaua

SEQ ID NO: 756710 - RNA, 19 nt, Homo sapiens
  misc_RNA (1)...(19): siRNA sense strand
gacuuucacuucacacuuc

SEQ ID NO: 756711 - RNA, 19 nt, Homo sapiens
  misc_RNA (1)...(19): siRNA sense strand
ccaagaggcugaaaaggaa

SEQ ID NO: 756712 - RNA, 19 nt, Homo sapiens
  misc_RNA (1)...(19): siRNA sense strand
uggguuggguuauauaaug

SEQ ID NO: 756713 - RNA, 19 nt, Homo sapiens
  misc_RNA (1)...(19): siRNA sense strand
caccacaugccauuauuaa

SEQ ID NO: 756714 - RNA, 19 nt, Homo sapiens
  misc_RNA (1)...(19): siRNA sense strand
uauaauguccagagauuug

SEQ ID NO: 756715 - RNA, 19 nt, Homo sapiens
  misc_RNA (1)...(19): siRNA sense strand
aaacugcucucaucaaaau

SEQ ID NO: 756716 - RNA, 19 nt, Homo sapiens
  misc_RNA (1)...(19): siRNA sense strand
uaaugaagacagacacuga

SEQ ID NO: 756717 - RNA, 19 nt, Homo sapiens
  misc_RNA (1)...(19): siRNA sense strand
ccaaguacguaaugaagac

SEQ ID NO: 756718 - RNA, 19 nt, Homo sapiens
  misc_RNA (1)...(19): siRNA sense strand
ggaacaccacaugccauua

SEQ ID NO: 756719 - RNA, 19 nt, Homo sapiens
  misc_RNA (1)...(19): siRNA sense strand
uuggaugucugucaacuga

SEQ ID NO: 756720 - RNA, 19 nt, Homo sapiens
  misc_RNA (1)...(19): siRNA sense strand
gggaucuguuugaauuuau

SEQ ID NO: 756721 - RNA, 19 nt, Homo sapiens
  misc_RNA (1)...(19): siRNA sense strand
aaggaucuaugaaaugaug

SEQ ID NO: 756722 - RNA, 19 nt, Homo sapiens
  misc_RNA (1)...(19): siRNA sense strand
cacagguuauccucuaauu

SEQ ID NO: 756723 - RNA, 19 nt, Homo sapiens
  misc_RNA (1)...(19): siRNA sense strand
aggaugaacaccuucuuua

SEQ ID NO: 756724 - RNA, 19 nt, Homo sapiens
  misc_RNA (1)...(19): siRNA sense strand
ugacauaauccgacaagau

SEQ ID NO: 756725 - RNA, 19 nt, Homo sapiens
  misc_RNA (1)...(19): siRNA sense strand
aggcaggccauuagaguua

SEQ ID NO: 756726 - RNA, 19 nt, Homo sapiens
  misc_RNA (1)...(19): siRNA sense strand
ugccaaggaucuaugaaau

SEQ ID NO: 756727 - RNA, 19 nt, Homo sapiens
  misc_RNA (1)...(19): siRNA sense strand
guuauauaauguccagaga

SEQ ID NO: 756728 - RNA, 19 nt, Homo sapiens
  misc_RNA (1)...(19): siRNA sense strand
uuucacagguuauccucua

SEQ ID NO: 756729 - RNA, 19 nt, Homo sapiens
  misc_RNA (1)...(19): siRNA sense strand
cagacaagacuuucacuuc

SEQ ID NO: 756730 - RNA, 19 nt, Homo sapiens
  misc_RNA (1)...(19): siRNA sense strand
cuccugaguuucuuuguga

SEQ ID NO: 756731 - RNA, 19 nt, Homo sapiens
  misc_RNA (1)...(19): siRNA sense strand
guuugaagauguuuauguc

SEQ ID NO: 756732 - RNA, 19 nt, Homo sapiens
  misc_RNA (1)...(19): siRNA sense strand
gcauucagguggguaacug

SEQ ID NO: 756733 - RNA, 19 nt, Homo sapiens
  misc_RNA (1)...(19): siRNA sense strand
gauuuacagacaagacuuu

SEQ ID NO: 756734 - RNA, 19 nt, Homo sapiens
  misc_RNA (1)...(19): siRNA sense strand
ccauuuggaugucugucaa

SEQ ID NO: 756735 - RNA, 19 nt, Homo sapiens
  misc_RNA (1)...(19): siRNA sense strand
augaacaccuucuuuaugg

SEQ ID NO: 756736 - RNA, 19 nt, Homo sapiens
  misc_RNA (1)...(19): siRNA sense strand
cauucaaacugcucucauc

SEQ ID NO: 756737 - RNA, 19 nt, Homo sapiens
  misc_RNA (1)...(19): siRNA sense strand
acauucauauuccagaaga

SEQ ID NO: 756738 - RNA, 19 nt, Homo sapiens
  misc_RNA (1)...(19): siRNA sense strand
ugaaaugaugggucacgua

SEQ ID NO: 756739 - RNA, 19 nt, Homo sapiens
  misc_RNA (1)...(19): siRNA sense strand
aaacccauauuucuuacca

SEQ ID NO: 756740 - RNA, 19 nt, Homo sapiens
  misc_RNA (1)...(19): siRNA sense strand
gacagacacugauguuuuc

SEQ ID NO: 756741 - RNA, 19 nt, Homo sapiens
  misc_RNA (1)...(19): siRNA sense strand
ccgaguaggaugucacuga

SEQ ID NO: 756742 - RNA, 19 nt, Homo sapiens
  misc_RNA (1)...(19): siRNA sense strand
ggguuggguuauauaaugu

SEQ ID NO: 756743 - RNA, 19 nt, Homo sapiens
  misc_RNA (1)...(19): siRNA sense strand
cuaaaccacucagagaagu

SEQ ID NO: 756744 - RNA, 19 nt, Homo sapiens
  misc_RNA (1)...(19): siRNA sense strand
acaccacaugccauuauua

SEQ ID NO: 756745 - RNA, 19 nt, Homo sapiens
  misc_RNA (1)...(19): siRNA sense strand
gugccaaggaucuaugaaa

SEQ ID NO: 756746 - RNA, 19 nt, Homo sapiens
  misc_RNA (1)...(19): siRNA sense strand
gacaagacuuucacuucac

SEQ ID NO: 756747 - RNA, 19 nt, Homo sapiens
  misc_RNA (1)...(19): siRNA sense strand
gccaaggaucuaugaaaug

SEQ ID NO: 756748 - RNA, 19 nt, Homo sapiens
  misc_RNA (1)...(19): siRNA sense strand
ugcaguggguuggguuaua

SEQ ID NO: 756749 - RNA, 19 nt, Homo sapiens
  misc_RNA (1)...(19): siRNA sense strand
gagccgauuuacagacaag

SEQ ID NO: 756750 - RNA, 19 nt, Homo sapiens
  misc_RNA (1)...(19): siRNA sense strand
cuuagaggaugaacaccuu

SEQ ID NO: 756751 - RNA, 19 nt, Homo sapiens
  misc_RNA (1)...(19): siRNA sense strand
acaagacuuucacuucaca

SEQ ID NO: 756752 - RNA, 19 nt, Homo sapiens
  misc_RNA (1)...(19): siRNA sense strand
aaugaugggucacguaaaa

SEQ ID NO: 756753 - RNA, 19 nt, Homo sapiens
  misc_RNA (1)...(19): siRNA sense strand
cauauaauaaccugaccuu

SEQ ID NO: 756754 - RNA, 19 nt, Homo sapiens
  misc_RNA (1)...(19): siRNA sense strand
ggauaugagguucuuacau

SEQ ID NO: 756755 - RNA, 19 nt, Homo sapiens
  misc_RNA (1)...(19): siRNA sense strand
ggcaggucaugcuaaggaa

SEQ ID NO: 756756 - RNA, 19 nt, Homo sapiens
  misc_RNA (1)...(19): siRNA sense strand
aguaggaugucacugagau

SEQ ID NO: 756757 - RNA, 19 nt, Homo sapiens
  misc_RNA (1)...(19): siRNA sense strand
gccaaguacguaaugaaga

SEQ ID NO: 756758 - RNA, 19 nt, Homo sapiens
  misc_RNA (1)...(19): siRNA sense strand
uagaacgcgugaacuggau

SEQ ID NO: 756759 - RNA, 19 nt, Homo sapiens
  misc_RNA (1)...(19): siRNA sense strand
uggauguacuucuaugagu

SEQ ID NO: 756760 - RNA, 19 nt, Homo sapiens
  misc_RNA (1)...(19): siRNA sense strand
ugauagaacgcgugaacug

SEQ ID NO: 756761 - RNA, 19 nt, Homo sapiens
  misc_RNA (1)...(19): siRNA sense strand
gaguaugagccgauuuaca

SEQ ID NO: 756762 - RNA, 19 nt, Homo sapiens
  misc_RNA (1)...(19): siRNA sense strand
ucaucaauacuggcaauuu

SEQ ID NO: 756763 - RNA, 19 nt, Homo sapiens
  misc_RNA (1)...(19): siRNA sense strand
augaguaugagccgauuua

SEQ ID NO: 756764 - RNA, 19 nt, Homo sapiens
  misc_RNA (1)...(19): siRNA sense strand
cuauauagaauccauuugg

SEQ ID NO: 756765 - RNA, 19 nt, Homo sapiens
  misc_RNA (1)...(19): siRNA sense strand
gaacgcgugaacuggaugu

SEQ ID NO: 756766 - RNA, 19 nt, Homo sapiens
  misc_RNA (1)...(19): siRNA sense strand
agacagacacugauguuuu

SEQ ID NO: 756767 - RNA, 19 nt, Homo sapiens
  misc_RNA (1)...(19): siRNA sense strand
aacaccacaugccauuauu

SEQ ID NO: 756768 - RNA, 19 nt, Homo sapiens
  misc_RNA (1)...(19): siRNA sense strand
ccucggcucucuggacugu

SEQ ID NO: 756769 - RNA, 19 nt, Homo sapiens
  misc_RNA (1)...(19): siRNA sense strand
cuggcaauuuagugaagua

SEQ ID NO: 756770 - RNA, 19 nt, Homo sapiens
  misc_RNA (1)...(19): siRNA sense strand
gaaagccaggcaggccauu

SEQ ID NO: 756771 - RNA, 19 nt, Homo sapiens
  misc_RNA (1)...(19): siRNA sense strand
aguaugagccgauuuacag

SEQ ID NO: 756772 - RNA, 19 nt, Homo sapiens
  misc_RNA (1)...(19): siRNA sense strand
aauacuggcaauuuaguga

SEQ ID NO: 756773 - RNA, 19 nt, Homo sapiens
  misc_RNA (1)...(19): siRNA sense strand
ccaggcaggccauuagagu

SEQ ID NO: 756774 - RNA, 19 nt, Homo sapiens
  misc_RNA (1)...(19): siRNA sense strand
ugaagacagacacugaugu

SEQ ID NO: 756775 - RNA, 19 nt, Homo sapiens
  misc_RNA (1)...(19): siRNA sense strand
uaaaccacucagagaaguu

SEQ ID NO: 756776 - RNA, 19 nt, Homo sapiens
  misc_RNA (1)...(19): siRNA sense strand
aaagccaggcaggccauua

SEQ ID NO: 756777 - RNA, 19 nt, Homo sapiens
  misc_RNA (1)...(19): siRNA sense strand
uggcaggucaugcuaagga

SEQ ID NO: 756778 - RNA, 19 nt, Homo sapiens
  misc_RNA (1)...(19): siRNA sense strand
ucaacugagacgugugauu

SEQ ID NO: 756779 - RNA, 19 nt, Homo sapiens
  misc_RNA (1)...(19): siRNA sense strand
guaugagccgauuuacaga

SEQ ID NO: 756780 - RNA, 19 nt, Homo sapiens
  misc_RNA (1)...(19): siRNA sense strand
ucaauacuggcaauuuagu

SEQ ID NO: 756781 - RNA, 19 nt, Homo sapiens
  misc_RNA (1)...(19): siRNA sense strand
ccaaugccaaguacguaau

SEQ ID NO: 756782 - RNA, 19 nt, Homo sapiens
  misc_RNA (1)...(19): siRNA sense strand
gauaugagguucuuacauu

SEQ ID NO: 756783 - RNA, 19 nt, Homo sapiens
  misc_RNA (1)...(19): siRNA sense strand
ccaaggagaucaucacuuu

SEQ ID NO: 756784 - RNA, 19 nt, Homo sapiens
  misc_RNA (1)...(19): siRNA sense strand
caucaauacuggcaauuua

SEQ ID NO: 756785 - RNA, 19 nt, Homo sapiens
  misc_RNA (1)...(19): siRNA sense strand
gaacauucauauuccagaa

SEQ ID NO: 756786 - RNA, 19 nt, Homo sapiens
  misc_RNA (1)...(19): siRNA sense strand
ccaaggaucuaugaaauga

SEQ ID NO: 756787 - RNA, 19 nt, Homo sapiens
  misc_RNA (1)...(19): siRNA sense strand
gaaaugaugggucacguaa

SEQ ID NO: 756788 - RNA, 19 nt, Homo sapiens
  misc_RNA (1)...(19): siRNA sense strand
ucaaacugcucucaucaaa

SEQ ID NO: 756789 - RNA, 19 nt, Homo sapiens
  misc_RNA (1)...(19): siRNA sense strand
gaacaccacaugccauuau

SEQ ID NO: 756790 - RNA, 19 nt, Homo sapiens
  misc_RNA (1)...(19): siRNA sense strand
auaauaaccugaccuugaa

SEQ ID NO: 756791 - RNA, 19 nt, Homo sapiens
  misc_RNA (1)...(19): siRNA sense strand
gcaauuuagugaaguaucu

SEQ ID NO: 756792 - RNA, 19 nt, Homo sapiens
  misc_RNA (1)...(19): siRNA sense strand
gaagacagacacugauguu

SEQ ID NO: 756793 - RNA, 19 nt, Homo sapiens
  misc_RNA (1)...(19): siRNA sense strand
agacaagacuuucacuuca

SEQ ID NO: 756794 - RNA, 19 nt, Homo sapiens
  misc_RNA (1)...(19): siRNA sense strand
uauaauaaccugaccuuga

SEQ ID NO: 756795 - RNA, 19 nt, Homo sapiens
  misc_RNA (1)...(19): siRNA sense strand
gaugaacaccuucuuuaug

SEQ ID NO: 756796 - RNA, 19 nt, Homo sapiens
  misc_RNA (1)...(19): siRNA sense strand
gcaguggguuggguuauau

SEQ ID NO: 756797 - RNA, 19 nt, Homo sapiens
  misc_RNA (1)...(19): siRNA sense strand
ugaacuggauguacuucua

SEQ ID NO: 756798 - RNA, 19 nt, Homo sapiens
  misc_RNA (1)...(19): siRNA sense strand
caacugagacgugugauug

SEQ ID NO: 756799 - RNA, 19 nt, Homo sapiens
  misc_RNA (1)...(19): siRNA sense strand
ccacuacaaugugauagaa

SEQ ID NO: 756800 - RNA, 19 nt, Homo sapiens
  misc_RNA (1)...(19): siRNA sense strand
gucgggaucuguuugaauu

SEQ ID NO: 756801 - RNA, 19 nt, Homo sapiens
  misc_RNA (1)...(19): siRNA sense strand
ggaugucugucaacugaga

SEQ ID NO: 756802 - RNA, 19 nt, Homo sapiens
  misc_RNA (1)...(19): siRNA sense strand
cagguuauccucuaauuga

SEQ ID NO: 756803 - RNA, 19 nt, Homo sapiens
  misc_RNA (1)...(19): siRNA sense strand
cgggaucuguuugaauuua

SEQ ID NO: 756804 - RNA, 19 nt, Homo sapiens
  misc_RNA (1)...(19): siRNA sense strand
gaacuggauguacuucuau

SEQ ID NO: 756805 - RNA, 19 nt, Homo sapiens
  misc_RNA (1)...(19): siRNA sense strand
ggaugaacaccuucuuuau

SEQ ID NO: 756806 - RNA, 19 nt, Homo sapiens
  misc_RNA (1)...(19): siRNA sense strand
gaggaugaacaccuucuuu

SEQ ID NO: 756807 - RNA, 19 nt, Homo sapiens
  misc_RNA (1)...(19): siRNA sense strand
ucaagguguucccuccaua

SEQ ID NO: 756808 - RNA, 19 nt, Homo sapiens
  misc_RNA (1)...(19): siRNA sense strand
gacuuucacuucacacuuc

SEQ ID NO: 756809 - RNA, 19 nt, Homo sapiens
  misc_RNA (1)...(19): siRNA sense strand
ccaagaggcugaaaaggaa

SEQ ID NO: 756810 - RNA, 19 nt, Homo sapiens
  misc_RNA (1)...(19): siRNA sense strand
uggguuggguuauauaaug

SEQ ID NO: 756811 - RNA, 19 nt, Homo sapiens
  misc_RNA (1)...(19): siRNA sense strand
caccacaugccauuauuaa

SEQ ID NO: 756812 - RNA, 19 nt, Homo sapiens
  misc_RNA (1)...(19): siRNA sense strand
uauaauguccagagauuug

SEQ ID NO: 756813 - RNA, 19 nt, Homo sapiens
  misc_RNA (1)...(19): siRNA sense strand
aaacugcucucaucaaaau

SEQ ID NO: 756814 - RNA, 19 nt, Homo sapiens
  misc_RNA (1)...(19): siRNA sense strand
uaaugaagacagacacuga

SEQ ID NO: 756815 - RNA, 19 nt, Homo sapiens
  misc_RNA (1)...(19): siRNA sense strand
ccaaguacguaaugaagac

SEQ ID NO: 756816 - RNA, 19 nt, Homo sapiens
  misc_RNA (1)...(19): siRNA sense strand
ggaacaccacaugccauua

SEQ ID NO: 756817 - RNA, 19 nt, Homo sapiens
  misc_RNA (1)...(19): siRNA sense strand
uuggaugucugucaacuga

SEQ ID NO: 756818 - RNA, 19 nt, Homo sapiens
  misc_RNA (1)...(19): siRNA sense strand
gggaucuguuugaauuuau

SEQ ID NO: 756819 - RNA, 19 nt, Homo sapiens
  misc_RNA (1)...(19): siRNA sense strand
aaggaucuaugaaaugaug

SEQ ID NO: 756820 - RNA, 19 nt, Homo sapiens
  misc_RNA (1)...(19): siRNA sense strand
cacagguuauccucuaauu

SEQ ID NO: 756821 - RNA, 19 nt, Homo sapiens
  misc_RNA (1)...(19): siRNA sense strand
aggaugaacaccuucuuua

SEQ ID NO: 756822 - RNA, 19 nt, Homo sapiens
  misc_RNA (1)...(19): siRNA sense strand
ugacauaauccgacaagau

SEQ ID NO: 756823 - RNA, 19 nt, Homo sapiens
  misc_RNA (1)...(19): siRNA sense strand
aggcaggccauuagaguua

SEQ ID NO: 756824 - RNA, 19 nt, Homo sapiens
  misc_RNA (1)...(19): siRNA sense strand
ugccaaggaucuaugaaau

SEQ ID NO: 756825 - RNA, 19 nt, Homo sapiens
  misc_RNA (1)...(19): siRNA sense strand
guuauauaauguccagaga

SEQ ID NO: 756826 - RNA, 19 nt, Homo sapiens
  misc_RNA (1)...(19): siRNA sense strand
uuucacagguuauccucua

SEQ ID NO: 756827 - RNA, 19 nt, Homo sapiens
  misc_RNA (1)...(19): siRNA sense strand
cagacaagacuuucacuuc

SEQ ID NO: 756828 - RNA, 19 nt, Homo sapiens
  misc_RNA (1)...(19): siRNA sense strand
cuccugaguuucuuuguga

SEQ ID NO: 756829 - RNA, 19 nt, Homo sapiens
  misc_RNA (1)...(19): siRNA sense strand
guuugaagauguuuauguc

SEQ ID NO: 756830 - RNA, 19 nt, Homo sapiens
  misc_RNA (1)...(19): siRNA sense strand
gcauucagguggguaacug

SEQ ID NO: 756831 - RNA, 19 nt, Homo sapiens
  misc_RNA (1)...(19): siRNA sense strand
gauuuacagacaagacuuu

SEQ ID NO: 756832 - RNA, 19 nt, Homo sapiens
  misc_RNA (1)...(19): siRNA sense strand
ccauuuggaugucugucaa

SEQ ID NO: 756833 - RNA, 19 nt, Homo sapiens
  misc_RNA (1)...(19): siRNA sense strand
augaacaccuucuuuaugg

SEQ ID NO: 756834 - RNA, 19 nt, Homo sapiens
  misc_RNA (1)...(19): siRNA sense strand
cauucaaacugcucucauc

SEQ ID NO: 756835 - RNA, 19 nt, Homo sapiens
  misc_RNA (1)...(19): siRNA sense strand
acauucauauuccagaaga

SEQ ID NO: 756836 - RNA, 19 nt, Homo sapiens
  misc_RNA (1)...(19): siRNA sense strand
ugaaaugaugggucacgua

SEQ ID NO: 756837 - RNA, 19 nt, Homo sapiens
  misc_RNA (1)...(19): siRNA sense strand
aaacccauauuucuuacca

SEQ ID NO: 756838 - RNA, 19 nt, Homo sapiens
  misc_RNA (1)...(19): siRNA sense strand
gacagacacugauguuuuc

SEQ ID NO: 756839 - RNA, 19 nt, Homo sapiens
  misc_RNA (1)...(19): siRNA sense strand
ccgaguaggaugucacuga

SEQ ID NO: 756840 - RNA, 19 nt, Homo sapiens
  misc_RNA (1)...(19): siRNA sense strand
ggguuggguuauauaaugu

SEQ ID NO: 756841 - RNA, 19 nt, Homo sapiens
  misc_RNA (1)...(19): siRNA sense strand
cuaaaccacucagagaagu

SEQ ID NO: 756842 - RNA, 19 nt, Homo sapiens
  misc_RNA (1)...(19): siRNA sense strand
acaccacaugccauuauua

SEQ ID NO: 756843 - RNA, 19 nt, Homo sapiens
  misc_RNA (1)...(19): siRNA sense strand
gugccaaggaucuaugaaa

SEQ ID NO: 756844 - RNA, 19 nt, Homo sapiens
  misc_RNA (1)...(19): siRNA sense strand
gacaagacuuucacuucac

SEQ ID NO: 756845 - RNA, 19 nt, Homo sapiens
  misc_RNA (1)...(19): siRNA sense strand
gccaaggaucuaugaaaug

SEQ ID NO: 756846 - RNA, 19 nt, Homo sapiens
  misc_RNA (1)...(19): siRNA sense strand
ugcaguggguuggguuaua

SEQ ID NO: 756847 - RNA, 19 nt, Homo sapiens
  misc_RNA (1)...(19): siRNA sense strand
gagccgauuuacagacaag

SEQ ID NO: 756848 - RNA, 19 nt, Homo sapiens
  misc_RNA (1)...(19): siRNA sense strand
cuuagaggaugaacaccuu

SEQ ID NO: 756849 - RNA, 19 nt, Homo sapiens
  misc_RNA (1)...(19): siRNA sense strand
acaagacuuucacuucaca

SEQ ID NO: 756850 - RNA, 19 nt, Homo sapiens
  misc_RNA (1)...(19): siRNA sense strand
aaugaugggucacguaaaa

SEQ ID NO: 756851 - RNA, 19 nt, Homo sapiens
  misc_RNA (1)...(19): siRNA sense strand
cauauaauaaccugaccuu

SEQ ID NO: 756852 - RNA, 19 nt, Homo sapiens
  misc_RNA (1)...(19): siRNA sense strand
ggauaugagguucuuacau

SEQ ID NO: 756853 - RNA, 19 nt, Homo sapiens
  misc_RNA (1)...(19): siRNA sense strand
ggcaggucaugcuaaggaa

SEQ ID NO: 756854 - RNA, 19 nt, Homo sapiens
  misc_RNA (1)...(19): siRNA sense strand
aguaggaugucacugagau

SEQ ID NO: 756855 - RNA, 19 nt, Homo sapiens
  misc_RNA (1)...(19): siRNA sense strand
gccaaguacguaaugaaga

SEQ ID NO: 756856 - RNA, 19 nt, Homo sapiens
  misc_RNA (1)...(19): siRNA sense strand
uagaacgcgugaacuggau

SEQ ID NO: 756857 - RNA, 19 nt, Homo sapiens
  misc_RNA (1)...(19): siRNA sense strand
uggauguacuucuaugagu

SEQ ID NO: 756858 - RNA, 19 nt, Homo sapiens
  misc_RNA (1)...(19): siRNA sense strand
ugauagaacgcgugaacug

SEQ ID NO: 756859 - RNA, 19 nt, Homo sapiens
  misc_RNA (1)...(19): siRNA sense strand
gaguaugagccgauuuaca

SEQ ID NO: 756860 - RNA, 19 nt, Homo sapiens
  misc_RNA (1)...(19): siRNA sense strand
ucaucaauacuggcaauuu

SEQ ID NO: 756861 - RNA, 19 nt, Homo sapiens
  misc_RNA (1)...(19): siRNA sense strand
augaguaugagccgauuua

SEQ ID NO: 756862 - RNA, 19 nt, Homo sapiens
  misc_RNA (1)...(19): siRNA sense strand
cuauauagaauccauuugg

SEQ ID NO: 756863 - RNA, 19 nt, Homo sapiens
  misc_RNA (1)...(19): siRNA sense strand
gaacgcgugaacuggaugu

SEQ ID NO: 756864 - RNA, 19 nt, Homo sapiens
  misc_RNA (1)...(19): siRNA sense strand
agacagacacugauguuuu

SEQ ID NO: 756865 - RNA, 19 nt, Homo sapiens
  misc_RNA (1)...(19): siRNA sense strand
aacaccacaugccauuauu

SEQ ID NO: 756866 - RNA, 19 nt, Homo sapiens
  misc_RNA (1)...(19): siRNA sense strand
ccucggcucucuggacugu

SEQ ID NO: 756867 - RNA, 19 nt, Homo sapiens
  misc_RNA (1)...(19): siRNA sense strand
cuggcaauuuagugaagua

SEQ ID NO: 756868 - RNA, 19 nt, Homo sapiens
  misc_RNA (1)...(19): siRNA sense strand
gaaagccaggcaggccauu

SEQ ID NO: 756869 - RNA, 19 nt, Homo sapiens
  misc_RNA (1)...(19): siRNA sense strand
aguaugagccgauuuacag

SEQ ID NO: 756870 - RNA, 19 nt, Homo sapiens
  misc_RNA (1)...(19): siRNA sense strand
aauacuggcaauuuaguga

SEQ ID NO: 756871 - RNA, 19 nt, Homo sapiens
  misc_RNA (1)...(19): siRNA sense strand
ccaggcaggccauuagagu

SEQ ID NO: 756872 - RNA, 19 nt, Homo sapiens
  misc_RNA (1)...(19): siRNA sense strand
ugaagacagacacugaugu

SEQ ID NO: 756873 - RNA, 19 nt, Homo sapiens
  misc_RNA (1)...(19): siRNA sense strand
uaaaccacucagagaaguu

SEQ ID NO: 756874 - RNA, 19 nt, Homo sapiens
  misc_RNA (1)...(19): siRNA sense strand
aaagccaggcaggccauua

SEQ ID NO: 756875 - RNA, 19 nt, Homo sapiens
  misc_RNA (1)...(19): siRNA sense strand
uggcaggucaugcuaagga

SEQ ID NO: 756876 - RNA, 19 nt, Homo sapiens
  misc_RNA (1)...(19): siRNA sense strand
ucaacugagacgugugauu

SEQ ID NO: 756877 - RNA, 19 nt, Homo sapiens
  misc_RNA (1)...(19): siRNA sense strand
guaugagccgauuuacaga

SEQ ID NO: 756878 - RNA, 19 nt, Homo sapiens
  misc_RNA (1)...(19): siRNA sense strand
ucaauacuggcaauuuagu

SEQ ID NO: 756879 - RNA, 19 nt, Homo sapiens
  misc_RNA (1)...(19): siRNA sense strand
ccaaugccaaguacguaau

SEQ ID NO: 756880 - RNA, 19 nt, Homo sapiens
  misc_RNA (1)...(19): siRNA sense strand
gauaugagguucuuacauu

SEQ ID NO: 756881 - RNA, 19 nt, Homo sapiens
  misc_RNA (1)...(19): siRNA sense strand
ccaaggagaucaucacuuu

SEQ ID NO: 756882 - RNA, 19 nt, Homo sapiens
  misc_RNA (1)...(19): siRNA sense strand
caucaauacuggcaauuua

SEQ ID NO: 756883 - RNA, 19 nt, Homo sapiens
  misc_RNA (1)...(19): siRNA sense strand
gaacauucauauuccagaa

SEQ ID NO: 756884 - RNA, 19 nt, Homo sapiens
  misc_RNA (1)...(19): siRNA sense strand
ccaaggaucuaugaaauga

SEQ ID NO: 756885 - RNA, 19 nt, Homo sapiens
  misc_RNA (1)...(19): siRNA sense strand
gaaaugaugggucacguaa

SEQ ID NO: 756886 - RNA, 19 nt, Homo sapiens
  misc_RNA (1)...(19): siRNA sense strand
ucaaacugcucucaucaaa

SEQ ID NO: 756887 - RNA, 19 nt, Homo sapiens
  misc_RNA (1)...(19): siRNA sense strand
gaacaccacaugccauuau

SEQ ID NO: 756888 - RNA, 19 nt, Homo sapiens
  misc_RNA (1)...(19): siRNA sense strand
auaauaaccugaccuugaa

SEQ ID NO: 756889 - RNA, 19 nt, Homo sapiens
  misc_RNA (1)...(19): siRNA sense strand
gcaauuuagugaaguaucu

SEQ ID NO: 756890 - RNA, 19 nt, Homo sapiens
  misc_RNA (1)...(19): siRNA sense strand
gaagacagacacugauguu

SEQ ID NO: 756891 - RNA, 19 nt, Homo sapiens
  misc_RNA (1)...(19): siRNA sense strand
agacaagacuuucacuuca

SEQ ID NO: 756892 - RNA, 19 nt, Homo sapiens
  misc_RNA (1)...(19): siRNA sense strand
uauaauaaccugaccuuga

SEQ ID NO: 756893 - RNA, 19 nt, Homo sapiens
  misc_RNA (1)...(19): siRNA sense strand
gaugaacaccuucuuuaug

SEQ ID NO: 756894 - RNA, 19 nt, Homo sapiens
  misc_RNA (1)...(19): siRNA sense strand
gcaguggguuggguuauau

SEQ ID NO: 756895 - RNA, 19 nt, Homo sapiens
  misc_RNA (1)...(19): siRNA sense strand
ugaacuggauguacuucua

SEQ ID NO: 756896 - RNA, 19 nt, Homo sapiens
  misc_RNA (1)...(19): siRNA sense strand
caacugagacgugugauug

SEQ ID NO: 756897 - RNA, 19 nt, Homo sapiens
  misc_RNA (1)...(19): siRNA sense strand
ccacuacaaugugauagaa

SEQ ID NO: 756898 - RNA, 19 nt, Homo sapiens
  misc_RNA (1)...(19): siRNA sense strand
gucgggaucuguuugaauu

SEQ ID NO: 756899 - RNA, 19 nt, Homo sapiens
  misc_RNA (1)...(19): siRNA sense strand
ggaugucugucaacugaga

SEQ ID NO: 756900 - RNA, 19 nt, Homo sapiens
  misc_RNA (1)...(19): siRNA sense strand
cagguuauccucuaauuga

SEQ ID NO: 756901 - RNA, 19 nt, Homo sapiens
  misc_RNA (1)...(19): siRNA sense strand
cgggaucuguuugaauuua

SEQ ID NO: 756902 - RNA, 19 nt, Homo sapiens
  misc_RNA (1)...(19): siRNA sense strand
gaacuggauguacuucuau

SEQ ID NO: 756903 - RNA, 19 nt, Homo sapiens
  misc_RNA (1)...(19): siRNA sense strand
ggaugaacaccuucuuuau

SEQ ID NO: 756904 - RNA, 19 nt, Homo sapiens
  misc_RNA (1)...(19): siRNA sense strand
gaggaugaacaccuucuuu

SEQ ID NO: 756905 - RNA, 19 nt, Homo sapiens
  misc_RNA (1)...(19): siRNA sense strand
ucaagguguucccuccaua

SEQ ID NO: 756906 - RNA, 19 nt, Homo sapiens
  misc_RNA (1)...(19): siRNA sense strand
gacuuucacuucacacuuc

SEQ ID NO: 756907 - RNA, 19 nt, Homo sapiens
  misc_RNA (1)...(19): siRNA sense strand
ccaagaggcugaaaaggaa

SEQ ID NO: 756908 - RNA, 19 nt, Homo sapiens
  misc_RNA (1)...(19): siRNA sense strand
uggguuggguuauauaaug

SEQ ID NO: 756909 - RNA, 19 nt, Homo sapiens
  misc_RNA (1)...(19): siRNA sense strand
caccacaugccauuauuaa

SEQ ID NO: 756910 - RNA, 19 nt, Homo sapiens
  misc_RNA (1)...(19): siRNA sense strand
uauaauguccagagauuug

SEQ ID NO: 756911 - RNA, 19 nt, Homo sapiens
  misc_RNA (1)...(19): siRNA sense strand
aaacugcucucaucaaaau

SEQ ID NO: 756912 - RNA, 19 nt, Homo sapiens
  misc_RNA (1)...(19): siRNA sense strand
uaaugaagacagacacuga

SEQ ID NO: 756913 - RNA, 19 nt, Homo sapiens
  misc_RNA (1)...(19): siRNA sense strand
ccaaguacguaaugaagac

SEQ ID NO: 756914 - RNA, 19 nt, Homo sapiens
  misc_RNA (1)...(19): siRNA sense strand
ggaacaccacaugccauua

SEQ ID NO: 756915 - RNA, 19 nt, Homo sapiens
  misc_RNA (1)...(19): siRNA sense strand
uuggaugucugucaacuga

SEQ ID NO: 756916 - RNA, 19 nt, Homo sapiens
  misc_RNA (1)...(19): siRNA sense strand
gggaucuguuugaauuuau

SEQ ID NO: 756917 - RNA, 19 nt, Homo sapiens
  misc_RNA (1)...(19): siRNA sense strand
aaggaucuaugaaaugaug

SEQ ID NO: 756918 - RNA, 19 nt, Homo sapiens
  misc_RNA (1)...(19): siRNA sense strand
cacagguuauccucuaauu

SEQ ID NO: 756919 - RNA, 19 nt, Homo sapiens
  misc_RNA (1)...(19): siRNA sense strand
aggaugaacaccuucuuua

SEQ ID NO: 756920 - RNA, 19 nt, Homo sapiens
  misc_RNA (1)...(19): siRNA sense strand
ugacauaauccgacaagau

SEQ ID NO: 756921 - RNA, 19 nt, Homo sapiens
  misc_RNA (1)...(19): siRNA sense strand
aggcaggccauuagaguua

SEQ ID NO: 756922 - RNA, 19 nt, Homo sapiens
  misc_RNA (1)...(19): siRNA sense strand
ugccaaggaucuaugaaau

SEQ ID NO: 756923 - RNA, 19 nt, Homo sapiens
  misc_RNA (1)...(19): siRNA sense strand
guuauauaauguccagaga

SEQ ID NO: 756924 - RNA, 19 nt, Homo sapiens
  misc_RNA (1)...(19): siRNA sense strand
uuucacagguuauccucua

SEQ ID NO: 756925 - RNA, 19 nt, Homo sapiens
  misc_RNA (1)...(19): siRNA sense strand
cagacaagacuuucacuuc

SEQ ID NO: 756926 - RNA, 19 nt, Homo sapiens
  misc_RNA (1)...(19): siRNA sense strand
cuccugaguuucuuuguga

SEQ ID NO: 756927 - RNA, 19 nt, Homo sapiens
  misc_RNA (1)...(19): siRNA sense strand
guuugaagauguuuauguc

SEQ ID NO: 756928 - RNA, 19 nt, Homo sapiens
  misc_RNA (1)...(19): siRNA sense strand
gcauucagguggguaacug

SEQ ID NO: 756929 - RNA, 19 nt, Homo sapiens
  misc_RNA (1)...(19): siRNA sense strand
gauuuacagacaagacuuu

SEQ ID NO: 756930 - RNA, 19 nt, Homo sapiens
  misc_RNA (1)...(19): siRNA sense strand
ccauuuggaugucugucaa

SEQ ID NO: 756931 - RNA, 19 nt, Homo sapiens
  misc_RNA (1)...(19): siRNA sense strand
augaacaccuucuuuaugg

SEQ ID NO: 756932 - RNA, 19 nt, Homo sapiens
  misc_RNA (1)...(19): siRNA sense strand
cauucaaacugcucucauc

SEQ ID NO: 756933 - RNA, 19 nt, Homo sapiens
  misc_RNA (1)...(19): siRNA sense strand
acauucauauuccagaaga

SEQ ID NO: 756934 - RNA, 19 nt, Homo sapiens
  misc_RNA (1)...(19): siRNA sense strand
ugaaaugaugggucacgua

SEQ ID NO: 756935 - RNA, 19 nt, Homo sapiens
  misc_RNA (1)...(19): siRNA sense strand
aaacccauauuucuuacca

SEQ ID NO: 756936 - RNA, 19 nt, Homo sapiens
  misc_RNA (1)...(19): siRNA sense strand
gacagacacugauguuuuc

SEQ ID NO: 756937 - RNA, 19 nt, Homo sapiens
  misc_RNA (1)...(19): siRNA sense strand
ccgaguaggaugucacuga

SEQ ID NO: 756938 - RNA, 19 nt, Homo sapiens
  misc_RNA (1)...(19): siRNA sense strand
ggguuggguuauauaaugu

SEQ ID NO: 756939 - RNA, 19 nt, Homo sapiens
  misc_RNA (1)...(19): siRNA sense strand
cuaaaccacucagagaagu

SEQ ID NO: 756940 - RNA, 19 nt, Homo sapiens
  misc_RNA (1)...(19): siRNA sense strand
acaccacaugccauuauua

SEQ ID NO: 756941 - RNA, 19 nt, Homo sapiens
  misc_RNA (1)...(19): siRNA sense strand
gugccaaggaucuaugaaa

SEQ ID NO: 756942 - RNA, 19 nt, Homo sapiens
  misc_RNA (1)...(19): siRNA sense strand
gacaagacuuucacuucac

SEQ ID NO: 756943 - RNA, 19 nt, Homo sapiens
  misc_RNA (1)...(19): siRNA sense strand
gccaaggaucuaugaaaug

SEQ ID NO: 756944 - RNA, 19 nt, Homo sapiens
  misc_RNA (1)...(19): siRNA sense strand
ugcaguggguuggguuaua

SEQ ID NO: 756945 - RNA, 19 nt, Homo sapiens
  misc_RNA (1)...(19): siRNA sense strand
gagccgauuuacagacaag

SEQ ID NO: 756946 - RNA, 19 nt, Homo sapiens
  misc_RNA (1)...(19): siRNA sense strand
cuuagaggaugaacaccuu

SEQ ID NO: 756947 - RNA, 19 nt, Homo sapiens
  misc_RNA (1)...(19): siRNA sense strand
acaagacuuucacuucaca

SEQ ID NO: 756948 - RNA, 19 nt, Homo sapiens
  misc_RNA (1)...(19): siRNA sense strand
aaugaugggucacguaaaa

SEQ ID NO: 756949 - RNA, 19 nt, Homo sapiens
  misc_RNA (1)...(19): siRNA sense strand
cauauaauaaccugaccuu

SEQ ID NO: 756950 - RNA, 19 nt, Homo sapiens
  misc_RNA (1)...(19): siRNA sense strand
ggauaugagguucuuacau

SEQ ID NO: 756951 - RNA, 19 nt, Homo sapiens
  misc_RNA (1)...(19): siRNA sense strand
ggcaggucaugcuaaggaa

SEQ ID NO: 756952 - RNA, 19 nt, Homo sapiens
  misc_RNA (1)...(19): siRNA sense strand
aguaggaugucacugagau

SEQ ID NO: 756953 - RNA, 19 nt, Homo sapiens
  misc_RNA (1)...(19): siRNA sense strand
gccaaguacguaaugaaga

SEQ ID NO: 756954 - RNA, 19 nt, Homo sapiens
  misc_RNA (1)...(19): siRNA sense strand
uagaacgcgugaacuggau

SEQ ID NO: 756955 - RNA, 19 nt, Homo sapiens
  misc_RNA (1)...(19): siRNA sense strand
uggauguacuucuaugagu

SEQ ID NO: 756956 - RNA, 19 nt, Homo sapiens
  misc_RNA (1)...(19): siRNA sense strand
ugauagaacgcgugaacug

SEQ ID NO: 756957 - RNA, 19 nt, Homo sapiens
  misc_RNA (1)...(19): siRNA sense strand
gaguaugagccgauuuaca

SEQ ID NO: 756958 - RNA, 19 nt, Homo sapiens
  misc_RNA (1)...(19): siRNA sense strand
ucaucaauacuggcaauuu

SEQ ID NO: 756959 - RNA, 19 nt, Homo sapiens
  misc_RNA (1)...(19): siRNA sense strand
augaguaugagccgauuua

SEQ ID NO: 756960 - RNA, 19 nt, Homo sapiens
  misc_RNA (1)...(19): siRNA sense strand
cuauauagaauccauuugg

SEQ ID NO: 756961 - RNA, 19 nt, Homo sapiens
  misc_RNA (1)...(19): siRNA sense strand
gaacgcgugaacuggaugu

SEQ ID NO: 756962 - RNA, 19 nt, Homo sapiens
  misc_RNA (1)...(19): siRNA sense strand
agacagacacugauguuuu

SEQ ID NO: 756963 - RNA, 19 nt, Homo sapiens
  misc_RNA (1)...(19): siRNA sense strand
aacaccacaugccauuauu

SEQ ID NO: 756964 - RNA, 19 nt, Homo sapiens
  misc_RNA (1)...(19): siRNA sense strand
ccucggcucucuggacugu

SEQ ID NO: 756965 - RNA, 19 nt, Homo sapiens
  misc_RNA (1)...(19): siRNA sense strand
cuggcaauuuagugaagua

SEQ ID NO: 756966 - RNA, 19 nt, Homo sapiens
  misc_RNA (1)...(19): siRNA sense strand
gaaagccaggcaggccauu

SEQ ID NO: 756967 - RNA, 19 nt, Homo sapiens
  misc_RNA (1)...(19): siRNA sense strand
aguaugagccgauuuacag

SEQ ID NO: 756968 - RNA, 19 nt, Homo sapiens
  misc_RNA (1)...(19): siRNA sense strand
aauacuggcaauuuaguga

SEQ ID NO: 756969 - RNA, 19 nt, Homo sapiens
  misc_RNA (1)...(19): siRNA sense strand
ccaggcaggccauuagagu

SEQ ID NO: 756970 - RNA, 19 nt, Homo sapiens
  misc_RNA (1)...(19): siRNA sense strand
ugaagacagacacugaugu

SEQ ID NO: 756971 - RNA, 19 nt, Homo sapiens
  misc_RNA (1)...(19): siRNA sense strand
uaaaccacucagagaaguu

SEQ ID NO: 756972 - RNA, 19 nt, Homo sapiens
  misc_RNA (1)...(19): siRNA sense strand
aaagccaggcaggccauua

SEQ ID NO: 756973 - RNA, 19 nt, Homo sapiens
  misc_RNA (1)...(19): siRNA sense strand
uggcaggucaugcuaagga

SEQ ID NO: 756974 - RNA, 19 nt, Homo sapiens
  misc_RNA (1)...(19): siRNA sense strand
ucaacugagacgugugauu

SEQ ID NO: 756975 - RNA, 19 nt, Homo sapiens
  misc_RNA (1)...(19): siRNA sense strand
guaugagccgauuuacaga

SEQ ID NO: 756976 - RNA, 19 nt, Homo sapiens
  misc_RNA (1)...(19): siRNA sense strand
ucaauacuggcaauuuagu

SEQ ID NO: 756977 - RNA, 19 nt, Homo sapiens
  misc_RNA (1)...(19): siRNA sense strand
ccaaugccaaguacguaau

SEQ ID NO: 756978 - RNA, 19 nt, Homo sapiens
  misc_RNA (1)...(19): siRNA sense strand
gauaugagguucuuacauu

SEQ ID NO: 756979 - RNA, 19 nt, Homo sapiens
  misc_RNA (1)...(19): siRNA sense strand
ccaaggagaucaucacuuu

SEQ ID NO: 756980 - RNA, 19 nt, Homo sapiens
  misc_RNA (1)...(19): siRNA sense strand
caucaauacuggcaauuua

SEQ ID NO: 756981 - RNA, 19 nt, Homo sapiens
  misc_RNA (1)...(19): siRNA sense strand
gaacauucauauuccagaa

SEQ ID NO: 756982 - RNA, 19 nt, Homo sapiens
  misc_RNA (1)...(19): siRNA sense strand
ccaaggaucuaugaaauga

SEQ ID NO: 756983 - RNA, 19 nt, Homo sapiens
  misc_RNA (1)...(19): siRNA sense strand
gaaaugaugggucacguaa

SEQ ID NO: 756984 - RNA, 19 nt, Homo sapiens
  misc_RNA (1)...(19): siRNA sense strand
ucaaacugcucucaucaaa

SEQ ID NO: 756985 - RNA, 19 nt, Homo sapiens
  misc_RNA (1)...(19): siRNA sense strand
gaacaccacaugccauuau

SEQ ID NO: 756986 - RNA, 19 nt, Homo sapiens
  misc_RNA (1)...(19): siRNA sense strand
auaauaaccugaccuugaa

SEQ ID NO: 756987 - RNA, 19 nt, Homo sapiens
  misc_RNA (1)...(19): siRNA sense strand
gcaauuuagugaaguaucu

SEQ ID NO: 756988 - RNA, 19 nt, Homo sapiens
  misc_RNA (1)...(19): siRNA sense strand
gaagacagacacugauguu

SEQ ID NO: 756989 - RNA, 19 nt, Homo sapiens
  misc_RNA (1)...(19): siRNA sense strand
agacaagacuuucacuuca

SEQ ID NO: 756990 - RNA, 19 nt, Homo sapiens
  misc_RNA (1)...(19): siRNA sense strand
uauaauaaccugaccuuga

SEQ ID NO: 756991 - RNA, 19 nt, Homo sapiens
  misc_RNA (1)...(19): siRNA sense strand
gaugaacaccuucuuuaug

SEQ ID NO: 756992 - RNA, 19 nt, Homo sapiens
  misc_RNA (1)...(19): siRNA sense strand
gcaguggguuggguuauau

SEQ ID NO: 756993 - RNA, 19 nt, Homo sapiens
  misc_RNA (1)...(19): siRNA sense strand
ugaacuggauguacuucua

SEQ ID NO: 756994 - RNA, 19 nt, Homo sapiens
  misc_RNA (1)...(19): siRNA sense strand
caacugagacgugugauug

SEQ ID NO: 756995 - RNA, 19 nt, Homo sapiens
  misc_RNA (1)...(19): siRNA sense strand
ccacuacaaugugauagaa

SEQ ID NO: 756996 - RNA, 19 nt, Homo sapiens
  misc_RNA (1)...(19): siRNA sense strand
gucgggaucuguuugaauu

SEQ ID NO: 756997 - RNA, 19 nt, Homo sapiens
  misc_RNA (1)...(19): siRNA sense strand
ggaugucugucaacugaga

SEQ ID NO: 756998 - RNA, 19 nt, Homo sapiens
  misc_RNA (1)...(19): siRNA sense strand
cagguuauccucuaauuga

SEQ ID NO: 756999 - RNA, 19 nt, Homo sapiens
  misc_RNA (1)...(19): siRNA sense strand
cgggaucuguuugaauuua

SEQ ID NO: 757000 - RNA, 19 nt, Homo sapiens
  misc_RNA (1)...(19): siRNA sense strand
gaacuggauguacuucuau

SEQ ID NO: 757001 - RNA, 19 nt, Homo sapiens
  misc_RNA (1)...(19): siRNA sense strand
ggaugaacaccuucuuuau

SEQ ID NO: 757002 - RNA, 19 nt, Homo sapiens
  misc_RNA (1)...(19): siRNA sense strand
gaggaugaacaccuucuuu

SEQ ID NO: 757003 - RNA, 19 nt, Homo sapiens
  misc_RNA (1)...(19): siRNA sense strand
ucaagguguucccuccaua

SEQ ID NO: 757004 - RNA, 19 nt, Homo sapiens
  misc_RNA (1)...(19): siRNA sense strand
gacuuucacuucacacuuc

SEQ ID NO: 757005 - RNA, 19 nt, Homo sapiens
  misc_RNA (1)...(19): siRNA sense strand
ccaagaggcugaaaaggaa

SEQ ID NO: 757006 - RNA, 19 nt, Homo sapiens
  misc_RNA (1)...(19): siRNA sense strand
uggguuggguuauauaaug

SEQ ID NO: 757007 - RNA, 19 nt, Homo sapiens
  misc_RNA (1)...(19): siRNA sense strand
caccacaugccauuauuaa

SEQ ID NO: 757008 - RNA, 19 nt, Homo sapiens
  misc_RNA (1)...(19): siRNA sense strand
uauaauguccagagauuug

SEQ ID NO: 757009 - RNA, 19 nt, Homo sapiens
  misc_RNA (1)...(19): siRNA sense strand
aaacugcucucaucaaaau

SEQ ID NO: 757010 - RNA, 19 nt, Homo sapiens
  misc_RNA (1)...(19): siRNA sense strand
uaaugaagacagacacuga

SEQ ID NO: 757011 - RNA, 19 nt, Homo sapiens
  misc_RNA (1)...(19): siRNA sense strand
ccaaguacguaaugaagac

SEQ ID NO: 757012 - RNA, 19 nt, Homo sapiens
  misc_RNA (1)...(19): siRNA sense strand
ggaacaccacaugccauua

SEQ ID NO: 757013 - RNA, 19 nt, Homo sapiens
  misc_RNA (1)...(19): siRNA sense strand
uuggaugucugucaacuga

SEQ ID NO: 757014 - RNA, 19 nt, Homo sapiens
  misc_RNA (1)...(19): siRNA sense strand
gggaucuguuugaauuuau

SEQ ID NO: 757015 - RNA, 19 nt, Homo sapiens
  misc_RNA (1)...(19): siRNA sense strand
aaggaucuaugaaaugaug

SEQ ID NO: 757016 - RNA, 19 nt, Homo sapiens
  misc_RNA (1)...(19): siRNA sense strand
cacagguuauccucuaauu

SEQ ID NO: 757017 - RNA, 19 nt, Homo sapiens
  misc_RNA (1)...(19): siRNA sense strand
aggaugaacaccuucuuua

SEQ ID NO: 757018 - RNA, 19 nt, Homo sapiens
  misc_RNA (1)...(19): siRNA sense strand
ugacauaauccgacaagau

SEQ ID NO: 757019 - RNA, 19 nt, Homo sapiens
  misc_RNA (1)...(19): siRNA sense strand
aggcaggccauuagaguua

SEQ ID NO: 757020 - RNA, 19 nt, Homo sapiens
  misc_RNA (1)...(19): siRNA sense strand
ugccaaggaucuaugaaau

SEQ ID NO: 757021 - RNA, 19 nt, Homo sapiens
  misc_RNA (1)...(19): siRNA sense strand
guuauauaauguccagaga

SEQ ID NO: 757022 - RNA, 19 nt, Homo sapiens
  misc_RNA (1)...(19): siRNA sense strand
uuucacagguuauccucua

SEQ ID NO: 757023 - RNA, 19 nt, Homo sapiens
  misc_RNA (1)...(19): siRNA sense strand
cagacaagacuuucacuuc

SEQ ID NO: 757024 - RNA, 19 nt, Homo sapiens
  misc_RNA (1)...(19): siRNA sense strand
cuccugaguuucuuuguga

SEQ ID NO: 757025 - RNA, 19 nt, Homo sapiens
  misc_RNA (1)...(19): siRNA sense strand
guuugaagauguuuauguc

SEQ ID NO: 757026 - RNA, 19 nt, Homo sapiens
  misc_RNA (1)...(19): siRNA sense strand
gcauucagguggguaacug

SEQ ID NO: 757027 - RNA, 19 nt, Homo sapiens
  misc_RNA (1)...(19): siRNA sense strand
gauuuacagacaagacuuu

SEQ ID NO: 757028 - RNA, 19 nt, Homo sapiens
  misc_RNA (1)...(19): siRNA sense strand
ccauuuggaugucugucaa

SEQ ID NO: 757029 - RNA, 19 nt, Homo sapiens
  misc_RNA (1)...(19): siRNA sense strand
augaacaccuucuuuaugg

SEQ ID NO: 757030 - RNA, 19 nt, Homo sapiens
  misc_RNA (1)...(19): siRNA sense strand
cauucaaacugcucucauc

SEQ ID NO: 757031 - RNA, 19 nt, Homo sapiens
  misc_RNA (1)...(19): siRNA sense strand
acauucauauuccagaaga

SEQ ID NO: 757032 - RNA, 19 nt, Homo sapiens
  misc_RNA (1)...(19): siRNA sense strand
ugaaaugaugggucacgua

SEQ ID NO: 757033 - RNA, 19 nt, Homo sapiens
  misc_RNA (1)...(19): siRNA sense strand
aaacccauauuucuuacca

SEQ ID NO: 757034 - RNA, 19 nt, Homo sapiens
  misc_RNA (1)...(19): siRNA sense strand
gacagacacugauguuuuc

SEQ ID NO: 757035 - RNA, 19 nt, Homo sapiens
  misc_RNA (1)...(19): siRNA sense strand
ccgaguaggaugucacuga

SEQ ID NO: 757036 - RNA, 19 nt, Homo sapiens
  misc_RNA (1)...(19): siRNA sense strand
ggguuggguuauauaaugu

SEQ ID NO: 757037 - RNA, 19 nt, Homo sapiens
  misc_RNA (1)...(19): siRNA sense strand
cuaaaccacucagagaagu

SEQ ID NO: 757038 - RNA, 19 nt, Homo sapiens
  misc_RNA (1)...(19): siRNA sense strand
acaccacaugccauuauua

SEQ ID NO: 757039 - RNA, 19 nt, Homo sapiens
  misc_RNA (1)...(19): siRNA sense strand
gugccaaggaucuaugaaa

SEQ ID NO: 757040 - RNA, 19 nt, Homo sapiens
  misc_RNA (1)...(19): siRNA sense strand
gacaagacuuucacuucac

SEQ ID NO: 757041 - RNA, 19 nt, Homo sapiens
  misc_RNA (1)...(19): siRNA sense strand
gccaaggaucuaugaaaug

SEQ ID NO: 757042 - RNA, 19 nt, Homo sapiens
  misc_RNA (1)...(19): siRNA sense strand
ugcaguggguuggguuaua

SEQ ID NO: 757043 - RNA, 19 nt, Homo sapiens
  misc_RNA (1)...(19): siRNA sense strand
gagccgauuuacagacaag

SEQ ID NO: 757044 - RNA, 19 nt, Homo sapiens
  misc_RNA (1)...(19): siRNA sense strand
cuuagaggaugaacaccuu

SEQ ID NO: 757045 - RNA, 19 nt, Homo sapiens
  misc_RNA (1)...(19): siRNA sense strand
acaagacuuucacuucaca

SEQ ID NO: 757046 - RNA, 19 nt, Homo sapiens
  misc_RNA (1)...(19): siRNA sense strand
aaugaugggucacguaaaa

SEQ ID NO: 757047 - RNA, 19 nt, Homo sapiens
  misc_RNA (1)...(19): siRNA sense strand
cauauaauaaccugaccuu

SEQ ID NO: 757048 - RNA, 19 nt, Homo sapiens
  misc_RNA (1)...(19): siRNA sense strand
ggauaugagguucuuacau

SEQ ID NO: 757049 - RNA, 19 nt, Homo sapiens
  misc_RNA (1)...(19): siRNA sense strand
ggcaggucaugcuaaggaa

SEQ ID NO: 757050 - RNA, 19 nt, Homo sapiens
  misc_RNA (1)...(19): siRNA sense strand
aguaggaugucacugagau

SEQ ID NO: 757051 - RNA, 19 nt, Homo sapiens
  misc_RNA (1)...(19): siRNA sense strand
gccaaguacguaaugaaga

SEQ ID NO: 757052 - RNA, 19 nt, Homo sapiens
  misc_RNA (1)...(19): siRNA sense strand
uagaacgcgugaacuggau

SEQ ID NO: 757053 - RNA, 19 nt, Homo sapiens
  misc_RNA (1)...(19): siRNA sense strand
uggauguacuucuaugagu

SEQ ID NO: 757054 - RNA, 19 nt, Homo sapiens
  misc_RNA (1)...(19): siRNA sense strand
ugauagaacgcgugaacug

SEQ ID NO: 757055 - RNA, 19 nt, Homo sapiens
  misc_RNA (1)...(19): siRNA sense strand
gaguaugagccgauuuaca

SEQ ID NO: 757056 - RNA, 19 nt, Homo sapiens
  misc_RNA (1)...(19): siRNA sense strand
ucaucaauacuggcaauuu

SEQ ID NO: 757057 - RNA, 19 nt, Homo sapiens
  misc_RNA (1)...(19): siRNA sense strand
augaguaugagccgauuua

SEQ ID NO: 757058 - RNA, 19 nt, Homo sapiens
  misc_RNA (1)...(19): siRNA sense strand
cuauauagaauccauuugg

SEQ ID NO: 757059 - RNA, 19 nt, Homo sapiens
  misc_RNA (1)...(19): siRNA sense strand
gaacgcgugaacuggaugu

SEQ ID NO: 757060 - RNA, 19 nt, Homo sapiens
  misc_RNA (1)...(19): siRNA sense strand
agacagacacugauguuuu

SEQ ID NO: 757061 - RNA, 19 nt, Homo sapiens
  misc_RNA (1)...(19): siRNA sense strand
aacaccacaugccauuauu

SEQ ID NO: 757062 - RNA, 19 nt, Homo sapiens
  misc_RNA (1)...(19): siRNA sense strand
ccucggcucucuggacugu

SEQ ID NO: 757063 - RNA, 19 nt, Homo sapiens
  misc_RNA (1)...(19): siRNA sense strand
cuggcaauuuagugaagua

SEQ ID NO: 757064 - RNA, 19 nt, Homo sapiens
  misc_RNA (1)...(19): siRNA sense strand
gaaagccaggcaggccauu

SEQ ID NO: 757065 - RNA, 19 nt, Homo sapiens
  misc_RNA (1)...(19): siRNA sense strand
aguaugagccgauuuacag

SEQ ID NO: 757066 - RNA, 19 nt, Homo sapiens
  misc_RNA (1)...(19): siRNA sense strand
aauacuggcaauuuaguga

SEQ ID NO: 757067 - RNA, 19 nt, Homo sapiens
  misc_RNA (1)...(19): siRNA sense strand
ccaggcaggccauuagagu

SEQ ID NO: 757068 - RNA, 19 nt, Homo sapiens
  misc_RNA (1)...(19): siRNA sense strand
ugaagacagacacugaugu

SEQ ID NO: 757069 - RNA, 19 nt, Homo sapiens
  misc_RNA (1)...(19): siRNA sense strand
uaaaccacucagagaaguu

SEQ ID NO: 757070 - RNA, 19 nt, Homo sapiens
  misc_RNA (1)...(19): siRNA sense strand
aaagccaggcaggccauua

SEQ ID NO: 757071 - RNA, 19 nt, Homo sapiens
  misc_RNA (1)...(19): siRNA sense strand
uggcaggucaugcuaagga

SEQ ID NO: 757072 - RNA, 19 nt, Homo sapiens
  misc_RNA (1)...(19): siRNA sense strand
ucaacugagacgugugauu

SEQ ID NO: 757073 - RNA, 19 nt, Homo sapiens
  misc_RNA (1)...(19): siRNA sense strand
guaugagccgauuuacaga

SEQ ID NO: 757074 - RNA, 19 nt, Homo sapiens
  misc_RNA (1)...(19): siRNA sense strand
ucaauacuggcaauuuagu

SEQ ID NO: 757075 - RNA, 19 nt, Homo sapiens
  misc_RNA (1)...(19): siRNA sense strand
ccaaugccaaguacguaau

SEQ ID NO: 757076 - RNA, 19 nt, Homo sapiens
  misc_RNA (1)...(19): siRNA sense strand
gauaugagguucuuacauu

SEQ ID NO: 757077 - RNA, 19 nt, Homo sapiens
  misc_RNA (1)...(19): siRNA sense strand
ccaaggagaucaucacuuu

SEQ ID NO: 757078 - RNA, 19 nt, Homo sapiens
  misc_RNA (1)...(19): siRNA sense strand
caucaauacuggcaauuua

SEQ ID NO: 757079 - RNA, 19 nt, Homo sapiens
  misc_RNA (1)...(19): siRNA sense strand
gaacauucauauuccagaa

SEQ ID NO: 757080 - RNA, 19 nt, Homo sapiens
  misc_RNA (1)...(19): siRNA sense strand
ccaaggaucuaugaaauga

SEQ ID NO: 757081 - RNA, 19 nt, Homo sapiens
  misc_RNA (1)...(19): siRNA sense strand
gaaaugaugggucacguaa

SEQ ID NO: 757082 - RNA, 19 nt, Homo sapiens
  misc_RNA (1)...(19): siRNA sense strand
ucaaacugcucucaucaaa

SEQ ID NO: 757083 - RNA, 19 nt, Homo sapiens
  misc_RNA (1)...(19): siRNA sense strand
gaacaccacaugccauuau

SEQ ID NO: 757084 - RNA, 19 nt, Homo sapiens
  misc_RNA (1)...(19): siRNA sense strand
auaauaaccugaccuugaa

SEQ ID NO: 757085 - RNA, 19 nt, Homo sapiens
  misc_RNA (1)...(19): siRNA sense strand
gcaauuuagugaaguaucu

SEQ ID NO: 757086 - RNA, 19 nt, Homo sapiens
  misc_RNA (1)...(19): siRNA sense strand
gaagacagacacugauguu

SEQ ID NO: 757087 - RNA, 19 nt, Homo sapiens
  misc_RNA (1)...(19): siRNA sense strand
agacaagacuuucacuuca

SEQ ID NO: 757088 - RNA, 19 nt, Homo sapiens
  misc_RNA (1)...(19): siRNA sense strand
uauaauaaccugaccuuga

SEQ ID NO: 757089 - RNA, 19 nt, Homo sapiens
  misc_RNA (1)...(19): siRNA sense strand
gaugaacaccuucuuuaug

SEQ ID NO: 757090 - RNA, 19 nt, Homo sapiens
  misc_RNA (1)...(19): siRNA sense strand
gcaguggguuggguuauau

SEQ ID NO: 757091 - RNA, 19 nt, Homo sapiens
  misc_RNA (1)...(19): siRNA sense strand
ugaacuggauguacuucua

SEQ ID NO: 757092 - RNA, 19 nt, Homo sapiens
  misc_RNA (1)...(19): siRNA sense strand
caacugagacgugugauug

SEQ ID NO: 757093 - RNA, 19 nt, Homo sapiens
  misc_RNA (1)...(19): siRNA sense strand
ccacuacaaugugauagaa

SEQ ID NO: 757094 - RNA, 19 nt, Homo sapiens
  misc_RNA (1)...(19): siRNA sense strand
gucgggaucuguuugaauu

SEQ ID NO: 757095 - RNA, 19 nt, Homo sapiens
  misc_RNA (1)...(19): siRNA sense strand
ggaugucugucaacugaga

SEQ ID NO: 757096 - RNA, 19 nt, Homo sapiens
  misc_RNA (1)...(19): siRNA sense strand
cagguuauccucuaauuga

SEQ ID NO: 757097 - RNA, 19 nt, Homo sapiens
  misc_RNA (1)...(19): siRNA sense strand
cgggaucuguuugaauuua

SEQ ID NO: 757098 - RNA, 19 nt, Homo sapiens
  misc_RNA (1)...(19): siRNA sense strand
gaacuggauguacuucuau

SEQ ID NO: 757099 - RNA, 19 nt, Homo sapiens
  misc_RNA (1)...(19): siRNA sense strand
ggaugaacaccuucuuuau

SEQ ID NO: 757100 - RNA, 19 nt, Homo sapiens
  misc_RNA (1)...(19): siRNA sense strand
gaggaugaacaccuucuuu

SEQ ID NO: 757101 - RNA, 19 nt, Homo sapiens
  misc_RNA (1)...(19): siRNA sense strand
ucaagguguucccuccaua

SEQ ID NO: 757102 - RNA, 19 nt, Homo sapiens
  misc_RNA (1)...(19): siRNA sense strand
gacuuucacuucacacuuc

SEQ ID NO: 757103 - RNA, 19 nt, Homo sapiens
  misc_RNA (1)...(19): siRNA sense strand
ccaagaggcugaaaaggaa

SEQ ID NO: 757104 - RNA, 19 nt, Homo sapiens
  misc_RNA (1)...(19): siRNA sense strand
uggguuggguuauauaaug

SEQ ID NO: 757105 - RNA, 19 nt, Homo sapiens
  misc_RNA (1)...(19): siRNA sense strand
caccacaugccauuauuaa

SEQ ID NO: 757106 - RNA, 19 nt, Homo sapiens
  misc_RNA (1)...(19): siRNA sense strand
uauaauguccagagauuug

SEQ ID NO: 757107 - RNA, 19 nt, Homo sapiens
  misc_RNA (1)...(19): siRNA sense strand
aaacugcucucaucaaaau

SEQ ID NO: 757108 - RNA, 19 nt, Homo sapiens
  misc_RNA (1)...(19): siRNA sense strand
uaaugaagacagacacuga

SEQ ID NO: 757109 - RNA, 19 nt, Homo sapiens
  misc_RNA (1)...(19): siRNA sense strand
ccaaguacguaaugaagac

SEQ ID NO: 757110 - RNA, 19 nt, Homo sapiens
  misc_RNA (1)...(19): siRNA sense strand
ggaacaccacaugccauua

SEQ ID NO: 757111 - RNA, 19 nt, Homo sapiens
  misc_RNA (1)...(19): siRNA sense strand
uuggaugucugucaacuga

SEQ ID NO: 757112 - RNA, 19 nt, Homo sapiens
  misc_RNA (1)...(19): siRNA sense strand
gggaucuguuugaauuuau

SEQ ID NO: 757113 - RNA, 19 nt, Homo sapiens
  misc_RNA (1)...(19): siRNA sense strand
aaggaucuaugaaaugaug

SEQ ID NO: 757114 - RNA, 19 nt, Homo sapiens
  misc_RNA (1)...(19): siRNA sense strand
cacagguuauccucuaauu

SEQ ID NO: 757115 - RNA, 19 nt, Homo sapiens
  misc_RNA (1)...(19): siRNA sense strand
aggaugaacaccuucuuua

SEQ ID NO: 757116 - RNA, 19 nt, Homo sapiens
  misc_RNA (1)...(19): siRNA sense strand
ugacauaauccgacaagau

SEQ ID NO: 757117 - RNA, 19 nt, Homo sapiens
  misc_RNA (1)...(19): siRNA sense strand
aggcaggccauuagaguua

SEQ ID NO: 757118 - RNA, 19 nt, Homo sapiens
  misc_RNA (1)...(19): siRNA sense strand
ugccaaggaucuaugaaau

SEQ ID NO: 757119 - RNA, 19 nt, Homo sapiens
  misc_RNA (1)...(19): siRNA sense strand
guuauauaauguccagaga

SEQ ID NO: 757120 - RNA, 19 nt, Homo sapiens
  misc_RNA (1)...(19): siRNA sense strand
uuucacagguuauccucua

SEQ ID NO: 757121 - RNA, 19 nt, Homo sapiens
  misc_RNA (1)...(19): siRNA sense strand
cagacaagacuuucacuuc

SEQ ID NO: 757122 - RNA, 19 nt, Homo sapiens
  misc_RNA (1)...(19): siRNA sense strand
cuccugaguuucuuuguga

SEQ ID NO: 757123 - RNA, 19 nt, Homo sapiens
  misc_RNA (1)...(19): siRNA sense strand
guuugaagauguuuauguc

SEQ ID NO: 757124 - RNA, 19 nt, Homo sapiens
  misc_RNA (1)...(19): siRNA sense strand
gcauucagguggguaacug

SEQ ID NO: 757125 - RNA, 19 nt, Homo sapiens
  misc_RNA (1)...(19): siRNA sense strand
gauuuacagacaagacuuu

SEQ ID NO: 757126 - RNA, 19 nt, Homo sapiens
  misc_RNA (1)...(19): siRNA sense strand
ccauuuggaugucugucaa

SEQ ID NO: 757127 - RNA, 19 nt, Homo sapiens
  misc_RNA (1)...(19): siRNA sense strand
augaacaccuucuuuaugg

SEQ ID NO: 757128 - RNA, 19 nt, Homo sapiens
  misc_RNA (1)...(19): siRNA sense strand
cauucaaacugcucucauc

SEQ ID NO: 757129 - RNA, 19 nt, Homo sapiens
  misc_RNA (1)...(19): siRNA sense strand
acauucauauuccagaaga

SEQ ID NO: 757130 - RNA, 19 nt, Homo sapiens
  misc_RNA (1)...(19): siRNA sense strand
ugaaaugaugggucacgua

SEQ ID NO: 757131 - RNA, 19 nt, Homo sapiens
  misc_RNA (1)...(19): siRNA sense strand
aaacccauauuucuuacca

SEQ ID NO: 757132 - RNA, 19 nt, Homo sapiens
  misc_RNA (1)...(19): siRNA sense strand
gacagacacugauguuuuc

SEQ ID NO: 757133 - RNA, 19 nt, Homo sapiens
  misc_RNA (1)...(19): siRNA sense strand
ccgaguaggaugucacuga

SEQ ID NO: 757134 - RNA, 19 nt, Homo sapiens
  misc_RNA (1)...(19): siRNA sense strand
ggguuggguuauauaaugu

SEQ ID NO: 757135 - RNA, 19 nt, Homo sapiens
  misc_RNA (1)...(19): siRNA sense strand
cuaaaccacucagagaagu

SEQ ID NO: 757136 - RNA, 19 nt, Homo sapiens
  misc_RNA (1)...(19): siRNA sense strand
acaccacaugccauuauua

SEQ ID NO: 757137 - RNA, 19 nt, Homo sapiens
  misc_RNA (1)...(19): siRNA sense strand
gugccaaggaucuaugaaa

SEQ ID NO: 757138 - RNA, 19 nt, Homo sapiens
  misc_RNA (1)...(19): siRNA sense strand
gacaagacuuucacuucac

SEQ ID NO: 757139 - RNA, 19 nt, Homo sapiens
  misc_RNA (1)...(19): siRNA sense strand
gccaaggaucuaugaaaug

SEQ ID NO: 757140 - RNA, 19 nt, Homo sapiens
  misc_RNA (1)...(19): siRNA sense strand
ugcaguggguuggguuaua

SEQ ID NO: 757141 - RNA, 19 nt, Homo sapiens
  misc_RNA (1)...(19): siRNA sense strand
gagccgauuuacagacaag

SEQ ID NO: 757142 - RNA, 19 nt, Homo sapiens
  misc_RNA (1)...(19): siRNA sense strand
cuuagaggaugaacaccuu

SEQ ID NO: 757143 - RNA, 19 nt, Homo sapiens
  misc_RNA (1)...(19): siRNA sense strand
acaagacuuucacuucaca

SEQ ID NO: 757144 - RNA, 19 nt, Homo sapiens
  misc_RNA (1)...(19): siRNA sense strand
aaugaugggucacguaaaa

SEQ ID NO: 757145 - RNA, 19 nt, Homo sapiens
  misc_RNA (1)...(19): siRNA sense strand
cauauaauaaccugaccuu

SEQ ID NO: 757146 - RNA, 19 nt, Homo sapiens
  misc_RNA (1)...(19): siRNA sense strand
ggauaugagguucuuacau

SEQ ID NO: 757147 - RNA, 19 nt, Homo sapiens
  misc_RNA (1)...(19): siRNA sense strand
ggcaggucaugcuaaggaa

SEQ ID NO: 757148 - RNA, 19 nt, Homo sapiens
  misc_RNA (1)...(19): siRNA sense strand
aguaggaugucacugagau

SEQ ID NO: 757149 - RNA, 19 nt, Homo sapiens
  misc_RNA (1)...(19): siRNA sense strand
gccaaguacguaaugaaga

SEQ ID NO: 757150 - RNA, 19 nt, Homo sapiens
  misc_RNA (1)...(19): siRNA sense strand
uagaacgcgugaacuggau

SEQ ID NO: 757151 - RNA, 19 nt, Homo sapiens
  misc_RNA (1)...(19): siRNA sense strand
uggauguacuucuaugagu

SEQ ID NO: 757152 - RNA, 19 nt, Homo sapiens
  misc_RNA (1)...(19): siRNA sense strand
ugauagaacgcgugaacug

SEQ ID NO: 757153 - RNA, 19 nt, Homo sapiens
  misc_RNA (1)...(19): siRNA sense strand
gaguaugagccgauuuaca

SEQ ID NO: 757154 - RNA, 19 nt, Homo sapiens
  misc_RNA (1)...(19): siRNA sense strand
ucaucaauacuggcaauuu

SEQ ID NO: 757155 - RNA, 19 nt, Homo sapiens
  misc_RNA (1)...(19): siRNA sense strand
augaguaugagccgauuua

SEQ ID NO: 757156 - RNA, 19 nt, Homo sapiens
  misc_RNA (1)...(19): siRNA sense strand
cuauauagaauccauuugg

SEQ ID NO: 757157 - RNA, 19 nt, Homo sapiens
  misc_RNA (1)...(19): siRNA sense strand
gaacgcgugaacuggaugu

SEQ ID NO: 757158 - RNA, 19 nt, Homo sapiens
  misc_RNA (1)...(19): siRNA sense strand
agacagacacugauguuuu

SEQ ID NO: 757159 - RNA, 19 nt, Homo sapiens
  misc_RNA (1)...(19): siRNA sense strand
aacaccacaugccauuauu

SEQ ID NO: 757160 - RNA, 19 nt, Homo sapiens
  misc_RNA (1)...(19): siRNA sense strand
ccucggcucucuggacugu

SEQ ID NO: 757161 - RNA, 19 nt, Homo sapiens
  misc_RNA (1)...(19): siRNA sense strand
cuggcaauuuagugaagua

SEQ ID NO: 757162 - RNA, 19 nt, Homo sapiens
  misc_RNA (1)...(19): siRNA sense strand
gaaagccaggcaggccauu

SEQ ID NO: 757163 - RNA, 19 nt, Homo sapiens
  misc_RNA (1)...(19): siRNA sense strand
aguaugagccgauuuacag

SEQ ID NO: 757164 - RNA, 19 nt, Homo sapiens
  misc_RNA (1)...(19): siRNA sense strand
aauacuggcaauuuaguga

SEQ ID NO: 757165 - RNA, 19 nt, Homo sapiens
  misc_RNA (1)...(19): siRNA sense strand
ccaggcaggccauuagagu

SEQ ID NO: 757166 - RNA, 19 nt, Homo sapiens
  misc_RNA (1)...(19): siRNA sense strand
ugaagacagacacugaugu

SEQ ID NO: 757167 - RNA, 19 nt, Homo sapiens
  misc_RNA (1)...(19): siRNA sense strand
uaaaccacucagagaaguu

SEQ ID NO: 757168 - RNA, 19 nt, Homo sapiens
  misc_RNA (1)...(19): siRNA sense strand
aaagccaggcaggccauua

SEQ ID NO: 757169 - RNA, 19 nt, Homo sapiens
  misc_RNA (1)...(19): siRNA sense strand
uggcaggucaugcuaagga

SEQ ID NO: 757170 - RNA, 19 nt, Homo sapiens
  misc_RNA (1)...(19): siRNA sense strand
ucaacugagacgugugauu

SEQ ID NO: 757171 - RNA, 19 nt, Homo sapiens
  misc_RNA (1)...(19): siRNA sense strand
guaugagccgauuuacaga

SEQ ID NO: 757172 - RNA, 19 nt, Homo sapiens
  misc_RNA (1)...(19): siRNA sense strand
ucaauacuggcaauuuagu

SEQ ID NO: 757173 - RNA, 19 nt, Homo sapiens
  misc_RNA (1)...(19): siRNA sense strand
ccaaugccaaguacguaau

SEQ ID NO: 757174 - RNA, 19 nt, Homo sapiens
  misc_RNA (1)...(19): siRNA sense strand
gauaugagguucuuacauu

SEQ ID NO: 757175 - RNA, 19 nt, Homo sapiens
  misc_RNA (1)...(19): siRNA sense strand
ccaaggagaucaucacuuu

SEQ ID NO: 757176 - RNA, 19 nt, Homo sapiens
  misc_RNA (1)...(19): siRNA sense strand
caucaauacuggcaauuua

SEQ ID NO: 757177 - RNA, 19 nt, Homo sapiens
  misc_RNA (1)...(19): siRNA sense strand
gaacauucauauuccagaa

SEQ ID NO: 757178 - RNA, 19 nt, Homo sapiens
  misc_RNA (1)...(19): siRNA sense strand
ccaaggaucuaugaaauga

SEQ ID NO: 757179 - RNA, 19 nt, Homo sapiens
  misc_RNA (1)...(19): siRNA sense strand
gaaaugaugggucacguaa

SEQ ID NO: 757180 - RNA, 19 nt, Homo sapiens
  misc_RNA (1)...(19): siRNA sense strand
ucaaacugcucucaucaaa

SEQ ID NO: 757181 - RNA, 19 nt, Homo sapiens
  misc_RNA (1)...(19): siRNA sense strand
gaacaccacaugccauuau

SEQ ID NO: 757182 - RNA, 19 nt, Homo sapiens
  misc_RNA (1)...(19): siRNA sense strand
auaauaaccugaccuugaa

SEQ ID NO: 757183 - RNA, 19 nt, Homo sapiens
  misc_RNA (1)...(19): siRNA sense strand
gcaauuuagugaaguaucu

SEQ ID NO: 757184 - RNA, 19 nt, Homo sapiens
  misc_RNA (1)...(19): siRNA sense strand
gaagacagacacugauguu

SEQ ID NO: 757185 - RNA, 19 nt, Homo sapiens
  misc_RNA (1)...(19): siRNA sense strand
agacaagacuuucacuuca

SEQ ID NO: 757186 - RNA, 19 nt, Homo sapiens
  misc_RNA (1)...(19): siRNA sense strand
uauaauaaccugaccuuga

SEQ ID NO: 757187 - RNA, 19 nt, Homo sapiens
  misc_RNA (1)...(19): siRNA sense strand
gaugaacaccuucuuuaug

SEQ ID NO: 757188 - RNA, 19 nt, Homo sapiens
  misc_RNA (1)...(19): siRNA sense strand
gcaguggguuggguuauau

SEQ ID NO: 757189 - RNA, 19 nt, Homo sapiens
  misc_RNA (1)...(19): siRNA sense strand
ugaacuggauguacuucua

SEQ ID NO: 757190 - RNA, 19 nt, Homo sapiens
  misc_RNA (1)...(19): siRNA sense strand
caacugagacgugugauug

SEQ ID NO: 757191 - RNA, 19 nt, Homo sapiens
  misc_RNA (1)...(19): siRNA sense strand
ccacuacaaugugauagaa

SEQ ID NO: 757192 - RNA, 19 nt, Homo sapiens
  misc_RNA (1)...(19): siRNA sense strand
gucgggaucuguuugaauu

SEQ ID NO: 757193 - RNA, 19 nt, Homo sapiens
  misc_RNA (1)...(19): siRNA sense strand
ggaugucugucaacugaga

SEQ ID NO: 757194 - RNA, 19 nt, Homo sapiens
  misc_RNA (1)...(19): siRNA sense strand
cagguuauccucuaauuga

SEQ ID NO: 757195 - RNA, 19 nt, Homo sapiens
  misc_RNA (1)...(19): siRNA sense strand
cgggaucuguuugaauuua

SEQ ID NO: 757196 - RNA, 19 nt, Homo sapiens
  misc_RNA (1)...(19): siRNA sense strand
gaacuggauguacuucuau

SEQ ID NO: 757197 - RNA, 19 nt, Homo sapiens
  misc_RNA (1)...(19): siRNA sense strand
ggaugaacaccuucuuuau

SEQ ID NO: 757198 - RNA, 19 nt, Homo sapiens
  misc_RNA (1)...(19): siRNA sense strand
gaggaugaacaccuucuuu

SEQ ID NO: 757199 - RNA, 19 nt, Homo sapiens
  misc_RNA (1)...(19): siRNA sense strand
ucaagguguucccuccaua

SEQ ID NO: 757200 - RNA, 19 nt, Homo sapiens
  misc_RNA (1)...(19): siRNA sense strand
gacuuucacuucacacuuc

SEQ ID NO: 757201 - RNA, 19 nt, Homo sapiens
  misc_RNA (1)...(19): siRNA sense strand
ccaagaggcugaaaaggaa

SEQ ID NO: 757202 - RNA, 19 nt, Homo sapiens
  misc_RNA (1)...(19): siRNA sense strand
uggguuggguuauauaaug

SEQ ID NO: 757203 - RNA, 19 nt, Homo sapiens
  misc_RNA (1)...(19): siRNA sense strand
caccacaugccauuauuaa

SEQ ID NO: 757204 - RNA, 19 nt, Homo sapiens
  misc_RNA (1)...(19): siRNA sense strand
uauaauguccagagauuug

SEQ ID NO: 757205 - RNA, 19 nt, Homo sapiens
  misc_RNA (1)...(19): siRNA sense strand
aaacugcucucaucaaaau

SEQ ID NO: 757206 - RNA, 19 nt, Homo sapiens
  misc_RNA (1)...(19): siRNA sense strand
uaaugaagacagacacuga

SEQ ID NO: 757207 - RNA, 19 nt, Homo sapiens
  misc_RNA (1)...(19): siRNA sense strand
ccaaguacguaaugaagac

SEQ ID NO: 757208 - RNA, 19 nt, Homo sapiens
  misc_RNA (1)...(19): siRNA sense strand
ggaacaccacaugccauua

SEQ ID NO: 757209 - RNA, 19 nt, Homo sapiens
  misc_RNA (1)...(19): siRNA sense strand
uuggaugucugucaacuga

SEQ ID NO: 757210 - RNA, 19 nt, Homo sapiens
  misc_RNA (1)...(19): siRNA sense strand
gggaucuguuugaauuuau

SEQ ID NO: 757211 - RNA, 19 nt, Homo sapiens
  misc_RNA (1)...(19): siRNA sense strand
aaggaucuaugaaaugaug

SEQ ID NO: 757212 - RNA, 19 nt, Homo sapiens
  misc_RNA (1)...(19): siRNA sense strand
cacagguuauccucuaauu

SEQ ID NO: 757213 - RNA, 19 nt, Homo sapiens
  misc_RNA (1)...(19): siRNA sense strand
aggaugaacaccuucuuua

SEQ ID NO: 757214 - RNA, 19 nt, Homo sapiens
  misc_RNA (1)...(19): siRNA sense strand
ugacauaauccgacaagau

SEQ ID NO: 757215 - RNA, 19 nt, Homo sapiens
  misc_RNA (1)...(19): siRNA sense strand
aggcaggccauuagaguua

SEQ ID NO: 757216 - RNA, 19 nt, Homo sapiens
  misc_RNA (1)...(19): siRNA sense strand
ugccaaggaucuaugaaau

SEQ ID NO: 757217 - RNA, 19 nt, Homo sapiens
  misc_RNA (1)...(19): siRNA sense strand
guuauauaauguccagaga

SEQ ID NO: 757218 - RNA, 19 nt, Homo sapiens
  misc_RNA (1)...(19): siRNA sense strand
uuucacagguuauccucua

SEQ ID NO: 757219 - RNA, 19 nt, Homo sapiens
  misc_RNA (1)...(19): siRNA sense strand
cagacaagacuuucacuuc

SEQ ID NO: 757220 - RNA, 19 nt, Homo sapiens
  misc_RNA (1)...(19): siRNA sense strand
cuccugaguuucuuuguga

SEQ ID NO: 757221 - RNA, 19 nt, Homo sapiens
  misc_RNA (1)...(19): siRNA sense strand
guuugaagauguuuauguc

SEQ ID NO: 757222 - RNA, 19 nt, Homo sapiens
  misc_RNA (1)...(19): siRNA sense strand
gcauucagguggguaacug

SEQ ID NO: 757223 - RNA, 19 nt, Homo sapiens
  misc_RNA (1)...(19): siRNA sense strand
gauuuacagacaagacuuu

SEQ ID NO: 757224 - RNA, 19 nt, Homo sapiens
  misc_RNA (1)...(19): siRNA sense strand
ccauuuggaugucugucaa

SEQ ID NO: 757225 - RNA, 19 nt, Homo sapiens
  misc_RNA (1)...(19): siRNA sense strand
augaacaccuucuuuaugg

SEQ ID NO: 757226 - RNA, 19 nt, Homo sapiens
  misc_RNA (1)...(19): siRNA sense strand
cauucaaacugcucucauc

SEQ ID NO: 757227 - RNA, 19 nt, Homo sapiens
  misc_RNA (1)...(19): siRNA sense strand
acauucauauuccagaaga

SEQ ID NO: 757228 - RNA, 19 nt, Homo sapiens
  misc_RNA (1)...(19): siRNA sense strand
ugaaaugaugggucacgua

SEQ ID NO: 757229 - RNA, 19 nt, Homo sapiens
  misc_RNA (1)...(19): siRNA sense strand
aaacccauauuucuuacca

SEQ ID NO: 757230 - RNA, 19 nt, Homo sapiens
  misc_RNA (1)...(19): siRNA sense strand
gacagacacugauguuuuc

SEQ ID NO: 757231 - RNA, 19 nt, Homo sapiens
  misc_RNA (1)...(19): siRNA sense strand
ccgaguaggaugucacuga

SEQ ID NO: 757232 - RNA, 19 nt, Homo sapiens
  misc_RNA (1)...(19): siRNA sense strand
ggguuggguuauauaaugu

SEQ ID NO: 757233 - RNA, 19 nt, Homo sapiens
  misc_RNA (1)...(19): siRNA sense strand
cuaaaccacucagagaagu

SEQ ID NO: 757234 - RNA, 19 nt, Homo sapiens
  misc_RNA (1)...(19): siRNA sense strand
acaccacaugccauuauua

SEQ ID NO: 757235 - RNA, 19 nt, Homo sapiens
  misc_RNA (1)...(19): siRNA sense strand
gugccaaggaucuaugaaa

SEQ ID NO: 757236 - RNA, 19 nt, Homo sapiens
  misc_RNA (1)...(19): siRNA sense strand
gacaagacuuucacuucac

SEQ ID NO: 757237 - RNA, 19 nt, Homo sapiens
  misc_RNA (1)...(19): siRNA sense strand
gccaaggaucuaugaaaug

SEQ ID NO: 757238 - RNA, 19 nt, Homo sapiens
  misc_RNA (1)...(19): siRNA sense strand
ugcaguggguuggguuaua

SEQ ID NO: 757239 - RNA, 19 nt, Homo sapiens
  misc_RNA (1)...(19): siRNA sense strand
gagccgauuuacagacaag

SEQ ID NO: 757240 - RNA, 19 nt, Homo sapiens
  misc_RNA (1)...(19): siRNA sense strand
cuuagaggaugaacaccuu

SEQ ID NO: 757241 - RNA, 19 nt, Homo sapiens
  misc_RNA (1)...(19): siRNA sense strand
acaagacuuucacuucaca

SEQ ID NO: 757242 - RNA, 19 nt, Homo sapiens
  misc_RNA (1)...(19): siRNA sense strand
aaugaugggucacguaaaa

SEQ ID NO: 757243 - RNA, 19 nt, Homo sapiens
  misc_RNA (1)...(19): siRNA sense strand
cauauaauaaccugaccuu

SEQ ID NO: 757244 - RNA, 19 nt, Homo sapiens
  misc_RNA (1)...(19): siRNA sense strand
ggauaugagguucuuacau

SEQ ID NO: 757245 - RNA, 19 nt, Homo sapiens
  misc_RNA (1)...(19): siRNA sense strand
ggcaggucaugcuaaggaa

SEQ ID NO: 757246 - RNA, 19 nt, Homo sapiens
  misc_RNA (1)...(19): siRNA sense strand
aguaggaugucacugagau

SEQ ID NO: 757247 - RNA, 19 nt, Homo sapiens
  misc_RNA (1)...(19): siRNA sense strand
gccaaguacguaaugaaga

SEQ ID NO: 757248 - RNA, 19 nt, Homo sapiens
  misc_RNA (1)...(19): siRNA sense strand
uagaacgcgugaacuggau

SEQ ID NO: 757249 - RNA, 19 nt, Homo sapiens
  misc_RNA (1)...(19): siRNA sense strand
uggauguacuucuaugagu

SEQ ID NO: 757250 - RNA, 19 nt, Homo sapiens
  misc_RNA (1)...(19): siRNA sense strand
ugauagaacgcgugaacug

SEQ ID NO: 757251 - RNA, 19 nt, Homo sapiens
  misc_RNA (1)...(19): siRNA sense strand
gaguaugagccgauuuaca

SEQ ID NO: 757252 - RNA, 19 nt, Homo sapiens
  misc_RNA (1)...(19): siRNA sense strand
ucaucaauacuggcaauuu

SEQ ID NO: 757253 - RNA, 19 nt, Homo sapiens
  misc_RNA (1)...(19): siRNA sense strand
augaguaugagccgauuua

SEQ ID NO: 757254 - RNA, 19 nt, Homo sapiens
  misc_RNA (1)...(19): siRNA sense strand
cuauauagaauccauuugg

SEQ ID NO: 757255 - RNA, 19 nt, Homo sapiens
  misc_RNA (1)...(19): siRNA sense strand
gaacgcgugaacuggaugu

SEQ ID NO: 757256 - RNA, 19 nt, Homo sapiens
  misc_RNA (1)...(19): siRNA sense strand
agacagacacugauguuuu

SEQ ID NO: 757257 - RNA, 19 nt, Homo sapiens
  misc_RNA (1)...(19): siRNA sense strand
aacaccacaugccauuauu

SEQ ID NO: 757258 - RNA, 19 nt, Homo sapiens
  misc_RNA (1)...(19): siRNA sense strand
ccucggcucucuggacugu

SEQ ID NO: 757259 - RNA, 19 nt, Homo sapiens
  misc_RNA (1)...(19): siRNA sense strand
cuggcaauuuagugaagua

SEQ ID NO: 757260 - RNA, 19 nt, Homo sapiens
  misc_RNA (1)...(19): siRNA sense strand
gaaagccaggcaggccauu

SEQ ID NO: 757261 - RNA, 19 nt, Homo sapiens
  misc_RNA (1)...(19): siRNA sense strand
aguaugagccgauuuacag

SEQ ID NO: 757262 - RNA, 19 nt, Homo sapiens
  misc_RNA (1)...(19): siRNA sense strand
aauacuggcaauuuaguga

SEQ ID NO: 757263 - RNA, 19 nt, Homo sapiens
  misc_RNA (1)...(19): siRNA sense strand
ccaggcaggccauuagagu

SEQ ID NO: 757264 - RNA, 19 nt, Homo sapiens
  misc_RNA (1)...(19): siRNA sense strand
ugaagacagacacugaugu

SEQ ID NO: 757265 - RNA, 19 nt, Homo sapiens
  misc_RNA (1)...(19): siRNA sense strand
uaaaccacucagagaaguu

SEQ ID NO: 757266 - RNA, 19 nt, Homo sapiens
  misc_RNA (1)...(19): siRNA sense strand
aaagccaggcaggccauua

SEQ ID NO: 757267 - RNA, 19 nt, Homo sapiens
  misc_RNA (1)...(19): siRNA sense strand
uggcaggucaugcuaagga

SEQ ID NO: 757268 - RNA, 19 nt, Homo sapiens
  misc_RNA (1)...(19): siRNA sense strand
ucaacugagacgugugauu

SEQ ID NO: 757269 - RNA, 19 nt, Homo sapiens
  misc_RNA (1)...(19): siRNA sense strand
guaugagccgauuuacaga

SEQ ID NO: 757270 - RNA, 19 nt, Homo sapiens
  misc_RNA (1)...(19): siRNA sense strand
ucaauacuggcaauuuagu

SEQ ID NO: 757271 - RNA, 19 nt, Homo sapiens
  misc_RNA (1)...(19): siRNA sense strand
ccaaugccaaguacguaau

SEQ ID NO: 757272 - RNA, 19 nt, Homo sapiens
  misc_RNA (1)...(19): siRNA sense strand
gauaugagguucuuacauu

SEQ ID NO: 757273 - RNA, 19 nt, Homo sapiens
  misc_RNA (1)...(19): siRNA sense strand
ccaaggagaucaucacuuu

SEQ ID NO: 757274 - RNA, 19 nt, Homo sapiens
  misc_RNA (1)...(19): siRNA sense strand
caucaauacuggcaauuua

SEQ ID NO: 757275 - RNA, 19 nt, Homo sapiens
  misc_RNA (1)...(19): siRNA sense strand
gaacauucauauuccagaa

SEQ ID NO: 757276 - RNA, 19 nt, Homo sapiens
  misc_RNA (1)...(19): siRNA sense strand
ccaaggaucuaugaaauga

SEQ ID NO: 757277 - RNA, 19 nt, Homo sapiens
  misc_RNA (1)...(19): siRNA sense strand
gaaaugaugggucacguaa

SEQ ID NO: 757278 - RNA, 19 nt, Homo sapiens
  misc_RNA (1)...(19): siRNA sense strand
ucaaacugcucucaucaaa

SEQ ID NO: 757279 - RNA, 19 nt, Homo sapiens
  misc_RNA (1)...(19): siRNA sense strand
gaacaccacaugccauuau

SEQ ID NO: 757280 - RNA, 19 nt, Homo sapiens
  misc_RNA (1)...(19): siRNA sense strand
auaauaaccugaccuugaa

SEQ ID NO: 757281 - RNA, 19 nt, Homo sapiens
  misc_RNA (1)...(19): siRNA sense strand
gcaauuuagugaaguaucu

SEQ ID NO: 757282 - RNA, 19 nt, Homo sapiens
  misc_RNA (1)...(19): siRNA sense strand
gaagacagacacugauguu

SEQ ID NO: 757283 - RNA, 19 nt, Homo sapiens
  misc_RNA (1)...(19): siRNA sense strand
agacaagacuuucacuuca

SEQ ID NO: 757284 - RNA, 19 nt, Homo sapiens
  misc_RNA (1)...(19): siRNA sense strand
uauaauaaccugaccuuga

SEQ ID NO: 757285 - RNA, 19 nt, Homo sapiens
  misc_RNA (1)...(19): siRNA sense strand
gaugaacaccuucuuuaug

SEQ ID NO: 757286 - RNA, 19 nt, Homo sapiens
  misc_RNA (1)...(19): siRNA sense strand
gcaguggguuggguuauau

SEQ ID NO: 757287 - RNA, 19 nt, Homo sapiens
  misc_RNA (1)...(19): siRNA sense strand
ugaacuggauguacuucua

SEQ ID NO: 757288 - RNA, 19 nt, Homo sapiens
  misc_RNA (1)...(19): siRNA sense strand
caacugagacgugugauug

SEQ ID NO: 757289 - RNA, 19 nt, Homo sapiens
  misc_RNA (1)...(19): siRNA sense strand
ccacuacaaugugauagaa

SEQ ID NO: 757290 - RNA, 19 nt, Homo sapiens
  misc_RNA (1)...(19): siRNA sense strand
gucgggaucuguuugaauu

SEQ ID NO: 757291 - RNA, 19 nt, Homo sapiens
  misc_RNA (1)...(19): siRNA sense strand
ggaugucugucaacugaga

SEQ ID NO: 757292 - RNA, 19 nt, Homo sapiens
  misc_RNA (1)...(19): siRNA sense strand
cagguuauccucuaauuga

SEQ ID NO: 757293 - RNA, 19 nt, Homo sapiens
  misc_RNA (1)...(19): siRNA sense strand
cgggaucuguuugaauuua

SEQ ID NO: 757294 - RNA, 19 nt, Homo sapiens
  misc_RNA (1)...(19): siRNA sense strand
gaacuggauguacuucuau

SEQ ID NO: 757295 - RNA, 19 nt, Homo sapiens
  misc_RNA (1)...(19): siRNA sense strand
ggaugaacaccuucuuuau

SEQ ID NO: 757296 - RNA, 19 nt, Homo sapiens
  misc_RNA (1)...(19): siRNA sense strand
gaggaugaacaccuucuuu

SEQ ID NO: 757297 - RNA, 19 nt, Homo sapiens
  misc_RNA (1)...(19): siRNA sense strand
ucaagguguucccuccaua

SEQ ID NO: 757298 - RNA, 19 nt, Homo sapiens
  misc_RNA (1)...(19): siRNA sense strand
gacuuucacuucacacuuc

SEQ ID NO: 757299 - RNA, 19 nt, Homo sapiens
  misc_RNA (1)...(19): siRNA sense strand
ccaagaggcugaaaaggaa

SEQ ID NO: 757300 - RNA, 19 nt, Homo sapiens
  misc_RNA (1)...(19): siRNA sense strand
uggguuggguuauauaaug

SEQ ID NO: 757301 - RNA, 19 nt, Homo sapiens
  misc_RNA (1)...(19): siRNA sense strand
caccacaugccauuauuaa

SEQ ID NO: 757302 - RNA, 19 nt, Homo sapiens
  misc_RNA (1)...(19): siRNA sense strand
uauaauguccagagauuug

SEQ ID NO: 757303 - RNA, 19 nt, Homo sapiens
  misc_RNA (1)...(19): siRNA sense strand
aaacugcucucaucaaaau

SEQ ID NO: 757304 - RNA, 19 nt, Homo sapiens
  misc_RNA (1)...(19): siRNA sense strand
uaaugaagacagacacuga

SEQ ID NO: 757305 - RNA, 19 nt, Homo sapiens
  misc_RNA (1)...(19): siRNA sense strand
ccaaguacguaaugaagac

SEQ ID NO: 757306 - RNA, 19 nt, Homo sapiens
  misc_RNA (1)...(19): siRNA sense strand
ggaacaccacaugccauua

SEQ ID NO: 757307 - RNA, 19 nt, Homo sapiens
  misc_RNA (1)...(19): siRNA sense strand
uuggaugucugucaacuga

SEQ ID NO: 757308 - RNA, 19 nt, Homo sapiens
  misc_RNA (1)...(19): siRNA sense strand
gggaucuguuugaauuuau

SEQ ID NO: 757309 - RNA, 19 nt, Homo sapiens
  misc_RNA (1)...(19): siRNA sense strand
aaggaucuaugaaaugaug

SEQ ID NO: 757310 - RNA, 19 nt, Homo sapiens
  misc_RNA (1)...(19): siRNA sense strand
cacagguuauccucuaauu

SEQ ID NO: 757311 - RNA, 19 nt, Homo sapiens
  misc_RNA (1)...(19): siRNA sense strand
aggaugaacaccuucuuua

SEQ ID NO: 757312 - RNA, 19 nt, Homo sapiens
  misc_RNA (1)...(19): siRNA sense strand
ugacauaauccgacaagau

SEQ ID NO: 757313 - RNA, 19 nt, Homo sapiens
  misc_RNA (1)...(19): siRNA sense strand
aggcaggccauuagaguua

SEQ ID NO: 757314 - RNA, 19 nt, Homo sapiens
  misc_RNA (1)...(19): siRNA sense strand
ugccaaggaucuaugaaau

SEQ ID NO: 757315 - RNA, 19 nt, Homo sapiens
  misc_RNA (1)...(19): siRNA sense strand
guuauauaauguccagaga

SEQ ID NO: 757316 - RNA, 19 nt, Homo sapiens
  misc_RNA (1)...(19): siRNA sense strand
uuucacagguuauccucua

SEQ ID NO: 757317 - RNA, 19 nt, Homo sapiens
  misc_RNA (1)...(19): siRNA sense strand
cagacaagacuuucacuuc

SEQ ID NO: 757318 - RNA, 19 nt, Homo sapiens
  misc_RNA (1)...(19): siRNA sense strand
cuccugaguuucuuuguga

SEQ ID NO: 757319 - RNA, 19 nt, Homo sapiens
  misc_RNA (1)...(19): siRNA sense strand
guuugaagauguuuauguc

SEQ ID NO: 757320 - RNA, 19 nt, Homo sapiens
  misc_RNA (1)...(19): siRNA sense strand
gcauucagguggguaacug

SEQ ID NO: 757321 - RNA, 19 nt, Homo sapiens
  misc_RNA (1)...(19): siRNA sense strand
gauuuacagacaagacuuu

SEQ ID NO: 757322 - RNA, 19 nt, Homo sapiens
  misc_RNA (1)...(19): siRNA sense strand
ccauuuggaugucugucaa

SEQ ID NO: 757323 - RNA, 19 nt, Homo sapiens
  misc_RNA (1)...(19): siRNA sense strand
augaacaccuucuuuaugg

SEQ ID NO: 757324 - RNA, 19 nt, Homo sapiens
  misc_RNA (1)...(19): siRNA sense strand
cauucaaacugcucucauc

SEQ ID NO: 757325 - RNA, 19 nt, Homo sapiens
  misc_RNA (1)...(19): siRNA sense strand
acauucauauuccagaaga

SEQ ID NO: 757326 - RNA, 19 nt, Homo sapiens
  misc_RNA (1)...(19): siRNA sense strand
ugaaaugaugggucacgua

SEQ ID NO: 757327 - RNA, 19 nt, Homo sapiens
  misc_RNA (1)...(19): siRNA sense strand
aaacccauauuucuuacca

SEQ ID NO: 757328 - RNA, 19 nt, Homo sapiens
  misc_RNA (1)...(19): siRNA sense strand
gacagacacugauguuuuc

SEQ ID NO: 757329 - RNA, 19 nt, Homo sapiens
  misc_RNA (1)...(19): siRNA sense strand
ccgaguaggaugucacuga

SEQ ID NO: 757330 - RNA, 19 nt, Homo sapiens
  misc_RNA (1)...(19): siRNA sense strand
ggguuggguuauauaaugu

SEQ ID NO: 757331 - RNA, 19 nt, Homo sapiens
  misc_RNA (1)...(19): siRNA sense strand
cuaaaccacucagagaagu

SEQ ID NO: 757332 - RNA, 19 nt, Homo sapiens
  misc_RNA (1)...(19): siRNA sense strand
acaccacaugccauuauua

SEQ ID NO: 757333 - RNA, 19 nt, Homo sapiens
  misc_RNA (1)...(19): siRNA sense strand
gugccaaggaucuaugaaa

SEQ ID NO: 757334 - RNA, 19 nt, Homo sapiens
  misc_RNA (1)...(19): siRNA sense strand
gacaagacuuucacuucac

SEQ ID NO: 757335 - RNA, 19 nt, Homo sapiens
  misc_RNA (1)...(19): siRNA sense strand
gccaaggaucuaugaaaug

SEQ ID NO: 757336 - RNA, 19 nt, Homo sapiens
  misc_RNA (1)...(19): siRNA sense strand
ugcaguggguuggguuaua

SEQ ID NO: 757337 - RNA, 19 nt, Homo sapiens
  misc_RNA (1)...(19): siRNA sense strand
gagccgauuuacagacaag

SEQ ID NO: 757338 - RNA, 19 nt, Homo sapiens
  misc_RNA (1)...(19): siRNA sense strand
cuuagaggaugaacaccuu

SEQ ID NO: 757339 - RNA, 19 nt, Homo sapiens
  misc_RNA (1)...(19): siRNA sense strand
acaagacuuucacuucaca

SEQ ID NO: 757340 - RNA, 19 nt, Homo sapiens
  misc_RNA (1)...(19): siRNA sense strand
aaugaugggucacguaaaa

SEQ ID NO: 757341 - RNA, 19 nt, Homo sapiens
  misc_RNA (1)...(19): siRNA sense strand
cauauaauaaccugaccuu

SEQ ID NO: 757342 - RNA, 19 nt, Homo sapiens
  misc_RNA (1)...(19): siRNA sense strand
ggauaugagguucuuacau

SEQ ID NO: 757343 - RNA, 19 nt, Homo sapiens
  misc_RNA (1)...(19): siRNA sense strand
ggcaggucaugcuaaggaa

SEQ ID NO: 757344 - RNA, 19 nt, Homo sapiens
  misc_RNA (1)...(19): siRNA sense strand
aguaggaugucacugagau

SEQ ID NO: 757345 - RNA, 19 nt, Homo sapiens
  misc_RNA (1)...(19): siRNA sense strand
gccaaguacguaaugaaga

SEQ ID NO: 757346 - RNA, 19 nt, Homo sapiens
  misc_RNA (1)...(19): siRNA sense strand
uagaacgcgugaacuggau

SEQ ID NO: 757347 - RNA, 19 nt, Homo sapiens
  misc_RNA (1)...(19): siRNA sense strand
uggauguacuucuaugagu

SEQ ID NO: 757348 - RNA, 19 nt, Homo sapiens
  misc_RNA (1)...(19): siRNA sense strand
ugauagaacgcgugaacug

SEQ ID NO: 757349 - RNA, 19 nt, Homo sapiens
  misc_RNA (1)...(19): siRNA sense strand
gaguaugagccgauuuaca

SEQ ID NO: 757350 - RNA, 19 nt, Homo sapiens
  misc_RNA (1)...(19): siRNA sense strand
ucaucaauacuggcaauuu

SEQ ID NO: 757351 - RNA, 19 nt, Homo sapiens
  misc_RNA (1)...(19): siRNA sense strand
augaguaugagccgauuua

SEQ ID NO: 757352 - RNA, 19 nt, Homo sapiens
  misc_RNA (1)...(19): siRNA sense strand
cuauauagaauccauuugg

SEQ ID NO: 757353 - RNA, 19 nt, Homo sapiens
  misc_RNA (1)...(19): siRNA sense strand
gaacgcgugaacuggaugu

SEQ ID NO: 757354 - RNA, 19 nt, Homo sapiens
  misc_RNA (1)...(19): siRNA sense strand
agacagacacugauguuuu

SEQ ID NO: 757355 - RNA, 19 nt, Homo sapiens
  misc_RNA (1)...(19): siRNA sense strand
aacaccacaugccauuauu

SEQ ID NO: 757356 - RNA, 19 nt, Homo sapiens
  misc_RNA (1)...(19): siRNA sense strand
ccucggcucucuggacugu

SEQ ID NO: 757357 - RNA, 19 nt, Homo sapiens
  misc_RNA (1)...(19): siRNA sense strand
cuggcaauuuagugaagua

SEQ ID NO: 757358 - RNA, 19 nt, Homo sapiens
  misc_RNA (1)...(19): siRNA sense strand
gaaagccaggcaggccauu

SEQ ID NO: 757359 - RNA, 19 nt, Homo sapiens
  misc_RNA (1)...(19): siRNA sense strand
aguaugagccgauuuacag

SEQ ID NO: 757360 - RNA, 19 nt, Homo sapiens
  misc_RNA (1)...(19): siRNA sense strand
aauacuggcaauuuaguga

SEQ ID NO: 757361 - RNA, 19 nt, Homo sapiens
  misc_RNA (1)...(19): siRNA sense strand
ccaggcaggccauuagagu

SEQ ID NO: 757362 - RNA, 19 nt, Homo sapiens
  misc_RNA (1)...(19): siRNA sense strand
ugaagacagacacugaugu

SEQ ID NO: 757363 - RNA, 19 nt, Homo sapiens
  misc_RNA (1)...(19): siRNA sense strand
uaaaccacucagagaaguu

SEQ ID NO: 757364 - RNA, 19 nt, Homo sapiens
  misc_RNA (1)...(19): siRNA sense strand
aaagccaggcaggccauua

SEQ ID NO: 757365 - RNA, 19 nt, Homo sapiens
  misc_RNA (1)...(19): siRNA sense strand
uggcaggucaugcuaagga

SEQ ID NO: 757366 - RNA, 19 nt, Homo sapiens
  misc_RNA (1)...(19): siRNA sense strand
ucaacugagacgugugauu

SEQ ID NO: 757367 - RNA, 19 nt, Homo sapiens
  misc_RNA (1)...(19): siRNA sense strand
guaugagccgauuuacaga

SEQ ID NO: 757368 - RNA, 19 nt, Homo sapiens
  misc_RNA (1)...(19): siRNA sense strand
ucaauacuggcaauuuagu

SEQ ID NO: 757369 - RNA, 19 nt, Homo sapiens
  misc_RNA (1)...(19): siRNA sense strand
ccaaugccaaguacguaau

SEQ ID NO: 757370 - RNA, 19 nt, Homo sapiens
  misc_RNA (1)...(19): siRNA sense strand
gauaugagguucuuacauu

SEQ ID NO: 757371 - RNA, 19 nt, Homo sapiens
  misc_RNA (1)...(19): siRNA sense strand
ccaaggagaucaucacuuu

SEQ ID NO: 757372 - RNA, 19 nt, Homo sapiens
  misc_RNA (1)...(19): siRNA sense strand
caucaauacuggcaauuua

SEQ ID NO: 757373 - RNA, 19 nt, Homo sapiens
  misc_RNA (1)...(19): siRNA sense strand
gaacauucauauuccagaa

SEQ ID NO: 757374 - RNA, 19 nt, Homo sapiens
  misc_RNA (1)...(19): siRNA sense strand
ccaaggaucuaugaaauga

SEQ ID NO: 757375 - RNA, 19 nt, Homo sapiens
  misc_RNA (1)...(19): siRNA sense strand
gaaaugaugggucacguaa

SEQ ID NO: 757376 - RNA, 19 nt, Homo sapiens
  misc_RNA (1)...(19): siRNA sense strand
ucaaacugcucucaucaaa

SEQ ID NO: 757377 - RNA, 19 nt, Homo sapiens
  misc_RNA (1)...(19): siRNA sense strand
gaacaccacaugccauuau

SEQ ID NO: 757378 - RNA, 19 nt, Homo sapiens
  misc_RNA (1)...(19): siRNA sense strand
auaauaaccugaccuugaa

SEQ ID NO: 757379 - RNA, 19 nt, Homo sapiens
  misc_RNA (1)...(19): siRNA sense strand
gcaauuuagugaaguaucu

SEQ ID NO: 757380 - RNA, 19 nt, Homo sapiens
  misc_RNA (1)...(19): siRNA sense strand
gaagacagacacugauguu

SEQ ID NO: 757381 - RNA, 19 nt, Homo sapiens
  misc_RNA (1)...(19): siRNA sense strand
agacaagacuuucacuuca

SEQ ID NO: 757382 - RNA, 19 nt, Homo sapiens
  misc_RNA (1)...(19): siRNA sense strand
uauaauaaccugaccuuga

SEQ ID NO: 757383 - RNA, 19 nt, Homo sapiens
  misc_RNA (1)...(19): siRNA sense strand
gaugaacaccuucuuuaug

SEQ ID NO: 757384 - RNA, 19 nt, Homo sapiens
  misc_RNA (1)...(19): siRNA sense strand
gcaguggguuggguuauau

SEQ ID NO: 757385 - RNA, 19 nt, Homo sapiens
  misc_RNA (1)...(19): siRNA sense strand
ugaacuggauguacuucua

SEQ ID NO: 757386 - RNA, 19 nt, Homo sapiens
  misc_RNA (1)...(19): siRNA sense strand
caacugagacgugugauug

SEQ ID NO: 757387 - RNA, 19 nt, Homo sapiens
  misc_RNA (1)...(19): siRNA sense strand
ccacuacaaugugauagaa

SEQ ID NO: 757388 - RNA, 19 nt, Homo sapiens
  misc_RNA (1)...(19): siRNA sense strand
gucgggaucuguuugaauu

SEQ ID NO: 757389 - RNA, 19 nt, Homo sapiens
  misc_RNA (1)...(19): siRNA sense strand
ggaugucugucaacugaga

SEQ ID NO: 757390 - RNA, 19 nt, Homo sapiens
  misc_RNA (1)...(19): siRNA sense strand
cagguuauccucuaauuga

SEQ ID NO: 757391 - RNA, 19 nt, Homo sapiens
  misc_RNA (1)...(19): siRNA sense strand
cgggaucuguuugaauuua

SEQ ID NO: 757392 - RNA, 19 nt, Homo sapiens
  misc_RNA (1)...(19): siRNA sense strand
gaacuggauguacuucuau

SEQ ID NO: 757393 - RNA, 19 nt, Homo sapiens
  misc_RNA (1)...(19): siRNA sense strand
ggaugaacaccuucuuuau

SEQ ID NO: 757394 - RNA, 19 nt, Homo sapiens
  misc_RNA (1)...(19): siRNA sense strand
gaggaugaacaccuucuuu

SEQ ID NO: 757395 - RNA, 19 nt, Homo sapiens
  misc_RNA (1)...(19): siRNA sense strand
ucaagguguucccuccaua

SEQ ID NO: 757396 - RNA, 19 nt, Homo sapiens
  misc_RNA (1)...(19): siRNA sense strand
gacuuucacuucacacuuc

SEQ ID NO: 757397 - RNA, 19 nt, Homo sapiens
  misc_RNA (1)...(19): siRNA sense strand
ccaagaggcugaaaaggaa

SEQ ID NO: 757398 - RNA, 19 nt, Homo sapiens
  misc_RNA (1)...(19): siRNA sense strand
uggguuggguuauauaaug

SEQ ID NO: 757399 - RNA, 19 nt, Homo sapiens
  misc_RNA (1)...(19): siRNA sense strand
caccacaugccauuauuaa

SEQ ID NO: 757400 - RNA, 19 nt, Homo sapiens
  misc_RNA (1)...(19): siRNA sense strand
uauaauguccagagauuug

SEQ ID NO: 757401 - RNA, 19 nt, Homo sapiens
  misc_RNA (1)...(19): siRNA sense strand
aaacugcucucaucaaaau

SEQ ID NO: 757402 - RNA, 19 nt, Homo sapiens
  misc_RNA (1)...(19): siRNA sense strand
uaaugaagacagacacuga

SEQ ID NO: 757403 - RNA, 19 nt, Homo sapiens
  misc_RNA (1)...(19): siRNA sense strand
ccaaguacguaaugaagac

SEQ ID NO: 757404 - RNA, 19 nt, Homo sapiens
  misc_RNA (1)...(19): siRNA sense strand
ggaacaccacaugccauua

SEQ ID NO: 757405 - RNA, 19 nt, Homo sapiens
  misc_RNA (1)...(19): siRNA sense strand
uuggaugucugucaacuga

SEQ ID NO: 757406 - RNA, 19 nt, Homo sapiens
  misc_RNA (1)...(19): siRNA sense strand
gggaucuguuugaauuuau

SEQ ID NO: 757407 - RNA, 19 nt, Homo sapiens
  misc_RNA (1)...(19): siRNA sense strand
aaggaucuaugaaaugaug

SEQ ID NO: 757408 - RNA, 19 nt, Homo sapiens
  misc_RNA (1)...(19): siRNA sense strand
cacagguuauccucuaauu

SEQ ID NO: 757409 - RNA, 19 nt, Homo sapiens
  misc_RNA (1)...(19): siRNA sense strand
aggaugaacaccuucuuua

SEQ ID NO: 757410 - RNA, 19 nt, Homo sapiens
  misc_RNA (1)...(19): siRNA sense strand
ugacauaauccgacaagau

SEQ ID NO: 757411 - RNA, 19 nt, Homo sapiens
  misc_RNA (1)...(19): siRNA sense strand
aggcaggccauuagaguua

SEQ ID NO: 757412 - RNA, 19 nt, Homo sapiens
  misc_RNA (1)...(19): siRNA sense strand
ugccaaggaucuaugaaau

SEQ ID NO: 757413 - RNA, 19 nt, Homo sapiens
  misc_RNA (1)...(19): siRNA sense strand
guuauauaauguccagaga

SEQ ID NO: 757414 - RNA, 19 nt, Homo sapiens
  misc_RNA (1)...(19): siRNA sense strand
uuucacagguuauccucua

SEQ ID NO: 757415 - RNA, 19 nt, Homo sapiens
  misc_RNA (1)...(19): siRNA sense strand
cagacaagacuuucacuuc

SEQ ID NO: 757416 - RNA, 19 nt, Homo sapiens
  misc_RNA (1)...(19): siRNA sense strand
cuccugaguuucuuuguga

SEQ ID NO: 757417 - RNA, 19 nt, Homo sapiens
  misc_RNA (1)...(19): siRNA sense strand
guuugaagauguuuauguc

SEQ ID NO: 757418 - RNA, 19 nt, Homo sapiens
  misc_RNA (1)...(19): siRNA sense strand
gcauucagguggguaacug

SEQ ID NO: 757419 - RNA, 19 nt, Homo sapiens
  misc_RNA (1)...(19): siRNA sense strand
gauuuacagacaagacuuu

SEQ ID NO: 757420 - RNA, 19 nt, Homo sapiens
  misc_RNA (1)...(19): siRNA sense strand
ccauuuggaugucugucaa

SEQ ID NO: 757421 - RNA, 19 nt, Homo sapiens
  misc_RNA (1)...(19): siRNA sense strand
augaacaccuucuuuaugg

SEQ ID NO: 757422 - RNA, 19 nt, Homo sapiens
  misc_RNA (1)...(19): siRNA sense strand
cauucaaacugcucucauc

SEQ ID NO: 757423 - RNA, 19 nt, Homo sapiens
  misc_RNA (1)...(19): siRNA sense strand
acauucauauuccagaaga

SEQ ID NO: 757424 - RNA, 19 nt, Homo sapiens
  misc_RNA (1)...(19): siRNA sense strand
ugaaaugaugggucacgua

SEQ ID NO: 757425 - RNA, 19 nt, Homo sapiens
  misc_RNA (1)...(19): siRNA sense strand
aaacccauauuucuuacca

SEQ ID NO: 757426 - RNA, 19 nt, Homo sapiens
  misc_RNA (1)...(19): siRNA sense strand
gacagacacugauguuuuc

SEQ ID NO: 757427 - RNA, 19 nt, Homo sapiens
  misc_RNA (1)...(19): siRNA sense strand
ccgaguaggaugucacuga

SEQ ID NO: 757428 - RNA, 19 nt, Homo sapiens
  misc_RNA (1)...(19): siRNA sense strand
ggguuggguuauauaaugu

SEQ ID NO: 757429 - RNA, 19 nt, Homo sapiens
  misc_RNA (1)...(19): siRNA sense strand
cuaaaccacucagagaagu

SEQ ID NO: 757430 - RNA, 19 nt, Homo sapiens
  misc_RNA (1)...(19): siRNA sense strand
acaccacaugccauuauua

SEQ ID NO: 757431 - RNA, 19 nt, Homo sapiens
  misc_RNA (1)...(19): siRNA sense strand
gugccaaggaucuaugaaa

SEQ ID NO: 757432 - RNA, 19 nt, Homo sapiens
  misc_RNA (1)...(19): siRNA sense strand
gacaagacuuucacuucac

SEQ ID NO: 757433 - RNA, 19 nt, Homo sapiens
  misc_RNA (1)...(19): siRNA sense strand
gccaaggaucuaugaaaug

SEQ ID NO: 757434 - RNA, 19 nt, Homo sapiens
  misc_RNA (1)...(19): siRNA sense strand
ugcaguggguuggguuaua

SEQ ID NO: 757435 - RNA, 19 nt, Homo sapiens
  misc_RNA (1)...(19): siRNA sense strand
gagccgauuuacagacaag

SEQ ID NO: 757436 - RNA, 19 nt, Homo sapiens
  misc_RNA (1)...(19): siRNA sense strand
cuuagaggaugaacaccuu

SEQ ID NO: 757437 - RNA, 19 nt, Homo sapiens
  misc_RNA (1)...(19): siRNA sense strand
acaagacuuucacuucaca

SEQ ID NO: 757438 - RNA, 19 nt, Homo sapiens
  misc_RNA (1)...(19): siRNA sense strand
aaugaugggucacguaaaa

SEQ ID NO: 757439 - RNA, 19 nt, Homo sapiens
  misc_RNA (1)...(19): siRNA sense strand
cauauaauaaccugaccuu

SEQ ID NO: 757440 - RNA, 19 nt, Homo sapiens
  misc_RNA (1)...(19): siRNA sense strand
ggauaugagguucuuacau

SEQ ID NO: 757441 - RNA, 19 nt, Homo sapiens
  misc_RNA (1)...(19): siRNA sense strand
ggcaggucaugcuaaggaa

SEQ ID NO: 757442 - RNA, 19 nt, Homo sapiens
  misc_RNA (1)...(19): siRNA sense strand
aguaggaugucacugagau

SEQ ID NO: 757443 - RNA, 19 nt, Homo sapiens
  misc_RNA (1)...(19): siRNA sense strand
gccaaguacguaaugaaga

SEQ ID NO: 757444 - RNA, 19 nt, Homo sapiens
  misc_RNA (1)...(19): siRNA sense strand
uagaacgcgugaacuggau

SEQ ID NO: 757445 - RNA, 19 nt, Homo sapiens
  misc_RNA (1)...(19): siRNA sense strand
uggauguacuucuaugagu

SEQ ID NO: 757446 - RNA, 19 nt, Homo sapiens
  misc_RNA (1)...(19): siRNA sense strand
ugauagaacgcgugaacug

SEQ ID NO: 757447 - RNA, 19 nt, Homo sapiens
  misc_RNA (1)...(19): siRNA sense strand
gaguaugagccgauuuaca

SEQ ID NO: 757448 - RNA, 19 nt, Homo sapiens
  misc_RNA (1)...(19): siRNA sense strand
ucaucaauacuggcaauuu

SEQ ID NO: 757449 - RNA, 19 nt, Homo sapiens
  misc_RNA (1)...(19): siRNA sense strand
augaguaugagccgauuua

SEQ ID NO: 757450 - RNA, 19 nt, Homo sapiens
  misc_RNA (1)...(19): siRNA sense strand
cuauauagaauccauuugg

SEQ ID NO: 757451 - RNA, 19 nt, Homo sapiens
  misc_RNA (1)...(19): siRNA sense strand
gaacgcgugaacuggaugu

SEQ ID NO: 757452 - RNA, 19 nt, Homo sapiens
  misc_RNA (1)...(19): siRNA sense strand
agacagacacugauguuuu

SEQ ID NO: 757453 - RNA, 19 nt, Homo sapiens
  misc_RNA (1)...(19): siRNA sense strand
aacaccacaugccauuauu

SEQ ID NO: 757454 - RNA, 19 nt, Homo sapiens
  misc_RNA (1)...(19): siRNA sense strand
ccucggcucucuggacugu

SEQ ID NO: 757455 - RNA, 19 nt, Homo sapiens
  misc_RNA (1)...(19): siRNA sense strand
cuggcaauuuagugaagua

SEQ ID NO: 757456 - RNA, 19 nt, Homo sapiens
  misc_RNA (1)...(19): siRNA sense strand
gaaagccaggcaggccauu

SEQ ID NO: 757457 - RNA, 19 nt, Homo sapiens
  misc_RNA (1)...(19): siRNA sense strand
aguaugagccgauuuacag

SEQ ID NO: 757458 - RNA, 19 nt, Homo sapiens
  misc_RNA (1)...(19): siRNA sense strand
aauacuggcaauuuaguga

SEQ ID NO: 757459 - RNA, 19 nt, Homo sapiens
  misc_RNA (1)...(19): siRNA sense strand
ccaggcaggccauuagagu

SEQ ID NO: 757460 - RNA, 19 nt, Homo sapiens
  misc_RNA (1)...(19): siRNA sense strand
ugaagacagacacugaugu

SEQ ID NO: 757461 - RNA, 19 nt, Homo sapiens
  misc_RNA (1)...(19): siRNA sense strand
uaaaccacucagagaaguu

SEQ ID NO: 757462 - RNA, 19 nt, Homo sapiens
  misc_RNA (1)...(19): siRNA sense strand
aaagccaggcaggccauua

SEQ ID NO: 757463 - RNA, 19 nt, Homo sapiens
  misc_RNA (1)...(19): siRNA sense strand
uggcaggucaugcuaagga

SEQ ID NO: 757464 - RNA, 19 nt, Homo sapiens
  misc_RNA (1)...(19): siRNA sense strand
ucaacugagacgugugauu

SEQ ID NO: 757465 - RNA, 19 nt, Homo sapiens
  misc_RNA (1)...(19): siRNA sense strand
guaugagccgauuuacaga

SEQ ID NO: 757466 - RNA, 19 nt, Homo sapiens
  misc_RNA (1)...(19): siRNA sense strand
ucaauacuggcaauuuagu

SEQ ID NO: 757467 - RNA, 19 nt, Homo sapiens
  misc_RNA (1)...(19): siRNA sense strand
ccaaugccaaguacguaau

SEQ ID NO: 757468 - RNA, 19 nt, Homo sapiens
  misc_RNA (1)...(19): siRNA sense strand
gauaugagguucuuacauu

SEQ ID NO: 757469 - RNA, 19 nt, Homo sapiens
  misc_RNA (1)...(19): siRNA sense strand
ccaaggagaucaucacuuu

SEQ ID NO: 757470 - RNA, 19 nt, Homo sapiens
  misc_RNA (1)...(19): siRNA sense strand
caucaauacuggcaauuua

SEQ ID NO: 757471 - RNA, 19 nt, Homo sapiens
  misc_RNA (1)...(19): siRNA sense strand
gaacauucauauuccagaa

SEQ ID NO: 757472 - RNA, 19 nt, Homo sapiens
  misc_RNA (1)...(19): siRNA sense strand
ccaaggaucuaugaaauga

SEQ ID NO: 757473 - RNA, 19 nt, Homo sapiens
  misc_RNA (1)...(19): siRNA sense strand
gaaaugaugggucacguaa

SEQ ID NO: 757474 - RNA, 19 nt, Homo sapiens
  misc_RNA (1)...(19): siRNA sense strand
ucaaacugcucucaucaaa

SEQ ID NO: 757475 - RNA, 19 nt, Homo sapiens
  misc_RNA (1)...(19): siRNA sense strand
gaacaccacaugccauuau

SEQ ID NO: 757476 - RNA, 19 nt, Homo sapiens
  misc_RNA (1)...(19): siRNA sense strand
auaauaaccugaccuugaa

SEQ ID NO: 757477 - RNA, 19 nt, Homo sapiens
  misc_RNA (1)...(19): siRNA sense strand
gcaauuuagugaaguaucu

SEQ ID NO: 757478 - RNA, 19 nt, Homo sapiens
  misc_RNA (1)...(19): siRNA sense strand
gaagacagacacugauguu

SEQ ID NO: 757479 - RNA, 19 nt, Homo sapiens
  misc_RNA (1)...(19): siRNA sense strand
agacaagacuuucacuuca

SEQ ID NO: 757480 - RNA, 19 nt, Homo sapiens
  misc_RNA (1)...(19): siRNA sense strand
uauaauaaccugaccuuga

SEQ ID NO: 757481 - RNA, 19 nt, Homo sapiens
  misc_RNA (1)...(19): siRNA sense strand
gaugaacaccuucuuuaug

SEQ ID NO: 757482 - RNA, 19 nt, Homo sapiens
  misc_RNA (1)...(19): siRNA sense strand
gcaguggguuggguuauau

SEQ ID NO: 757483 - RNA, 19 nt, Homo sapiens
  misc_RNA (1)...(19): siRNA sense strand
ugaacuggauguacuucua

SEQ ID NO: 757484 - RNA, 19 nt, Homo sapiens
  misc_RNA (1)...(19): siRNA sense strand
caacugagacgugugauug

SEQ ID NO: 757485 - RNA, 19 nt, Homo sapiens
  misc_RNA (1)...(19): siRNA sense strand
ccacuacaaugugauagaa

SEQ ID NO: 757486 - RNA, 19 nt, Homo sapiens
  misc_RNA (1)...(19): siRNA sense strand
gucgggaucuguuugaauu

SEQ ID NO: 757487 - RNA, 19 nt, Homo sapiens
  misc_RNA (1)...(19): siRNA sense strand
ggaugucugucaacugaga

SEQ ID NO: 757488 - RNA, 19 nt, Homo sapiens
  misc_RNA (1)...(19): siRNA sense strand
cagguuauccucuaauuga

SEQ ID NO: 757489 - RNA, 19 nt, Homo sapiens
  misc_RNA (1)...(19): siRNA sense strand
cgggaucuguuugaauuua

SEQ ID NO: 757490 - RNA, 19 nt, Homo sapiens
  misc_RNA (1)...(19): siRNA sense strand
gaacuggauguacuucuau

SEQ ID NO: 757491 - RNA, 19 nt, Homo sapiens
  misc_RNA (1)...(19): siRNA sense strand
ggaugaacaccuucuuuau

SEQ ID NO: 757492 - RNA, 19 nt, Homo sapiens
  misc_RNA (1)...(19): siRNA sense strand
gaggaugaacaccuucuuu

SEQ ID NO: 757493 - RNA, 19 nt, Homo sapiens
  misc_RNA (1)...(19): siRNA sense strand
ucaagguguucccuccaua

SEQ ID NO: 757494 - RNA, 19 nt, Homo sapiens
  misc_RNA (1)...(19): siRNA sense strand
gacuuucacuucacacuuc

SEQ ID NO: 757495 - RNA, 19 nt, Homo sapiens
  misc_RNA (1)...(19): siRNA sense strand
ccaagaggcugaaaaggaa

SEQ ID NO: 757496 - RNA, 19 nt, Homo sapiens
  misc_RNA (1)...(19): siRNA sense strand
uggguuggguuauauaaug

SEQ ID NO: 757497 - RNA, 19 nt, Homo sapiens
  misc_RNA (1)...(19): siRNA sense strand
caccacaugccauuauuaa

SEQ ID NO: 757498 - RNA, 19 nt, Homo sapiens
  misc_RNA (1)...(19): siRNA sense strand
uauaauguccagagauuug

SEQ ID NO: 757499 - RNA, 19 nt, Homo sapiens
  misc_RNA (1)...(19): siRNA sense strand
aaacugcucucaucaaaau

SEQ ID NO: 757500 - RNA, 19 nt, Homo sapiens
  misc_RNA (1)...(19): siRNA sense strand
uaaugaagacagacacuga

SEQ ID NO: 757501 - RNA, 19 nt, Homo sapiens
  misc_RNA (1)...(19): siRNA sense strand
ccaaguacguaaugaagac

SEQ ID NO: 757502 - RNA, 19 nt, Homo sapiens
  misc_RNA (1)...(19): siRNA sense strand
ggaacaccacaugccauua

SEQ ID NO: 757503 - RNA, 19 nt, Homo sapiens
  misc_RNA (1)...(19): siRNA sense strand
uuggaugucugucaacuga

SEQ ID NO: 757504 - RNA, 19 nt, Homo sapiens
  misc_RNA (1)...(19): siRNA sense strand
gggaucuguuugaauuuau

SEQ ID NO: 757505 - RNA, 19 nt, Homo sapiens
  misc_RNA (1)...(19): siRNA sense strand
aaggaucuaugaaaugaug

SEQ ID NO: 757506 - RNA, 19 nt, Homo sapiens
  misc_RNA (1)...(19): siRNA sense strand
cacagguuauccucuaauu

SEQ ID NO: 757507 - RNA, 19 nt, Homo sapiens
  misc_RNA (1)...(19): siRNA sense strand
aggaugaacaccuucuuua

SEQ ID NO: 757508 - RNA, 19 nt, Homo sapiens
  misc_RNA (1)...(19): siRNA sense strand
ugacauaauccgacaagau

SEQ ID NO: 757509 - RNA, 19 nt, Homo sapiens
  misc_RNA (1)...(19): siRNA sense strand
aggcaggccauuagaguua

SEQ ID NO: 757510 - RNA, 19 nt, Homo sapiens
  misc_RNA (1)...(19): siRNA sense strand
ugccaaggaucuaugaaau

SEQ ID NO: 757511 - RNA, 19 nt, Homo sapiens
  misc_RNA (1)...(19): siRNA sense strand
guuauauaauguccagaga

SEQ ID NO: 757512 - RNA, 19 nt, Homo sapiens
  misc_RNA (1)...(19): siRNA sense strand
uuucacagguuauccucua

SEQ ID NO: 757513 - RNA, 19 nt, Homo sapiens
  misc_RNA (1)...(19): siRNA sense strand
cagacaagacuuucacuuc

SEQ ID NO: 757514 - RNA, 19 nt, Homo sapiens
  misc_RNA (1)...(19): siRNA sense strand
cuccugaguuucuuuguga

SEQ ID NO: 757515 - RNA, 19 nt, Homo sapiens
  misc_RNA (1)...(19): siRNA sense strand
guuugaagauguuuauguc

SEQ ID NO: 757516 - RNA, 19 nt, Homo sapiens
  misc_RNA (1)...(19): siRNA sense strand
gcauucagguggguaacug

SEQ ID NO: 757517 - RNA, 19 nt, Homo sapiens
  misc_RNA (1)...(19): siRNA sense strand
gauuuacagacaagacuuu

SEQ ID NO: 757518 - RNA, 19 nt, Homo sapiens
  misc_RNA (1)...(19): siRNA sense strand
ccauuuggaugucugucaa

SEQ ID NO: 757519 - RNA, 19 nt, Homo sapiens
  misc_RNA (1)...(19): siRNA sense strand
augaacaccuucuuuaugg

SEQ ID NO: 757520 - RNA, 19 nt, Homo sapiens
  misc_RNA (1)...(19): siRNA sense strand
cauucaaacugcucucauc

SEQ ID NO: 757521 - RNA, 19 nt, Homo sapiens
  misc_RNA (1)...(19): siRNA sense strand
acauucauauuccagaaga

SEQ ID NO: 757522 - RNA, 19 nt, Homo sapiens
  misc_RNA (1)...(19): siRNA sense strand
ugaaaugaugggucacgua

SEQ ID NO: 757523 - RNA, 19 nt, Homo sapiens
  misc_RNA (1)...(19): siRNA sense strand
aaacccauauuucuuacca

SEQ ID NO: 757524 - RNA, 19 nt, Homo sapiens
  misc_RNA (1)...(19): siRNA sense strand
gacagacacugauguuuuc

SEQ ID NO: 757525 - RNA, 19 nt, Homo sapiens
  misc_RNA (1)...(19): siRNA sense strand
ccgaguaggaugucacuga

SEQ ID NO: 757526 - RNA, 19 nt, Homo sapiens
  misc_RNA (1)...(19): siRNA sense strand
ggguuggguuauauaaugu

SEQ ID NO: 757527 - RNA, 19 nt, Homo sapiens
  misc_RNA (1)...(19): siRNA sense strand
cuaaaccacucagagaagu

SEQ ID NO: 757528 - RNA, 19 nt, Homo sapiens
  misc_RNA (1)...(19): siRNA sense strand
acaccacaugccauuauua

SEQ ID NO: 757529 - RNA, 19 nt, Homo sapiens
  misc_RNA (1)...(19): siRNA sense strand
gugccaaggaucuaugaaa

SEQ ID NO: 757530 - RNA, 19 nt, Homo sapiens
  misc_RNA (1)...(19): siRNA sense strand
gacaagacuuucacuucac

SEQ ID NO: 757531 - RNA, 19 nt, Homo sapiens
  misc_RNA (1)...(19): siRNA sense strand
gccaaggaucuaugaaaug

SEQ ID NO: 757532 - RNA, 19 nt, Homo sapiens
  misc_RNA (1)...(19): siRNA sense strand
ugcaguggguuggguuaua

SEQ ID NO: 757533 - RNA, 19 nt, Homo sapiens
  misc_RNA (1)...(19): siRNA sense strand
gagccgauuuacagacaag

SEQ ID NO: 757534 - RNA, 19 nt, Homo sapiens
  misc_RNA (1)...(19): siRNA sense strand
cuuagaggaugaacaccuu

SEQ ID NO: 757535 - RNA, 19 nt, Homo sapiens
  misc_RNA (1)...(19): siRNA sense strand
acaagacuuucacuucaca

SEQ ID NO: 757536 - RNA, 19 nt, Homo sapiens
  misc_RNA (1)...(19): siRNA sense strand
aaugaugggucacguaaaa

SEQ ID NO: 757537 - RNA, 19 nt, Homo sapiens
  misc_RNA (1)...(19): siRNA sense strand
cauauaauaaccugaccuu

SEQ ID NO: 757538 - RNA, 19 nt, Homo sapiens
  misc_RNA (1)...(19): siRNA sense strand
ggauaugagguucuuacau

SEQ ID NO: 757539 - RNA, 19 nt, Homo sapiens
  misc_RNA (1)...(19): siRNA sense strand
ggcaggucaugcuaaggaa

SEQ ID NO: 757540 - RNA, 19 nt, Homo sapiens
  misc_RNA (1)...(19): siRNA sense strand
aguaggaugucacugagau

SEQ ID NO: 757541 - RNA, 19 nt, Homo sapiens
  misc_RNA (1)...(19): siRNA sense strand
gccaaguacguaaugaaga

SEQ ID NO: 757542 - RNA, 19 nt, Homo sapiens
  misc_RNA (1)...(19): siRNA sense strand
uagaacgcgugaacuggau

SEQ ID NO: 757543 - RNA, 19 nt, Homo sapiens
  misc_RNA (1)...(19): siRNA sense strand
uggauguacuucuaugagu

SEQ ID NO: 757544 - RNA, 19 nt, Homo sapiens
  misc_RNA (1)...(19): siRNA sense strand
ugauagaacgcgugaacug

SEQ ID NO: 757545 - RNA, 19 nt, Homo sapiens
  misc_RNA (1)...(19): siRNA sense strand
gaguaugagccgauuuaca

SEQ ID NO: 757546 - RNA, 19 nt, Homo sapiens
  misc_RNA (1)...(19): siRNA sense strand
ucaucaauacuggcaauuu

SEQ ID NO: 757547 - RNA, 19 nt, Homo sapiens
  misc_RNA (1)...(19): siRNA sense strand
augaguaugagccgauuua

SEQ ID NO: 757548 - RNA, 19 nt, Homo sapiens
  misc_RNA (1)...(19): siRNA sense strand
cuauauagaauccauuugg

SEQ ID NO: 757549 - RNA, 19 nt, Homo sapiens
  misc_RNA (1)...(19): siRNA sense strand
gaacgcgugaacuggaugu

SEQ ID NO: 757550 - RNA, 19 nt, Homo sapiens
  misc_RNA (1)...(19): siRNA sense strand
agacagacacugauguuuu

SEQ ID NO: 757551 - RNA, 19 nt, Homo sapiens
  misc_RNA (1)...(19): siRNA sense strand
aacaccacaugccauuauu

SEQ ID NO: 757552 - RNA, 19 nt, Homo sapiens
  misc_RNA (1)...(19): siRNA sense strand
ccucggcucucuggacugu

SEQ ID NO: 757553 - RNA, 19 nt, Homo sapiens
  misc_RNA (1)...(19): siRNA sense strand
cuggcaauuuagugaagua

SEQ ID NO: 757554 - RNA, 19 nt, Homo sapiens
  misc_RNA (1)...(19): siRNA sense strand
gaaagccaggcaggccauu

SEQ ID NO: 757555 - RNA, 19 nt, Homo sapiens
  misc_RNA (1)...(19): siRNA sense strand
aguaugagccgauuuacag

SEQ ID NO: 757556 - RNA, 19 nt, Homo sapiens
  misc_RNA (1)...(19): siRNA sense strand
aauacuggcaauuuaguga

SEQ ID NO: 757557 - RNA, 19 nt, Homo sapiens
  misc_RNA (1)...(19): siRNA sense strand
ccaggcaggccauuagagu

SEQ ID NO: 757558 - RNA, 19 nt, Homo sapiens
  misc_RNA (1)...(19): siRNA sense strand
ugaagacagacacugaugu

SEQ ID NO: 757559 - RNA, 19 nt, Homo sapiens
  misc_RNA (1)...(19): siRNA sense strand
uaaaccacucagagaaguu

SEQ ID NO: 757560 - RNA, 19 nt, Homo sapiens
  misc_RNA (1)...(19): siRNA sense strand
aaagccaggcaggccauua

SEQ ID NO: 757561 - RNA, 19 nt, Homo sapiens
  misc_RNA (1)...(19): siRNA sense strand
uggcaggucaugcuaagga

SEQ ID NO: 757562 - RNA, 19 nt, Homo sapiens
  misc_RNA (1)...(19): siRNA sense strand
ucaacugagacgugugauu

SEQ ID NO: 757563 - RNA, 19 nt, Homo sapiens
  misc_RNA (1)...(19): siRNA sense strand
guaugagccgauuuacaga

SEQ ID NO: 757564 - RNA, 19 nt, Homo sapiens
  misc_RNA (1)...(19): siRNA sense strand
ucaauacuggcaauuuagu

SEQ ID NO: 757565 - RNA, 19 nt, Homo sapiens
  misc_RNA (1)...(19): siRNA sense strand
ccaaugccaaguacguaau

SEQ ID NO: 757566 - RNA, 19 nt, Homo sapiens
  misc_RNA (1)...(19): siRNA sense strand
gauaugagguucuuacauu

SEQ ID NO: 757567 - RNA, 19 nt, Homo sapiens
  misc_RNA (1)...(19): siRNA sense strand
ccaaggagaucaucacuuu

SEQ ID NO: 757568 - RNA, 19 nt, Homo sapiens
  misc_RNA (1)...(19): siRNA sense strand
caucaauacuggcaauuua

SEQ ID NO: 757569 - RNA, 19 nt, Homo sapiens
  misc_RNA (1)...(19): siRNA sense strand
gaacauucauauuccagaa

SEQ ID NO: 757570 - RNA, 19 nt, Homo sapiens
  misc_RNA (1)...(19): siRNA sense strand
ccaaggaucuaugaaauga

SEQ ID NO: 757571 - RNA, 19 nt, Homo sapiens
  misc_RNA (1)...(19): siRNA sense strand
gaaaugaugggucacguaa

SEQ ID NO: 757572 - RNA, 19 nt, Homo sapiens
  misc_RNA (1)...(19): siRNA sense strand
ucaaacugcucucaucaaa

SEQ ID NO: 757573 - RNA, 19 nt, Homo sapiens
  misc_RNA (1)...(19): siRNA sense strand
gaacaccacaugccauuau

SEQ ID NO: 757574 - RNA, 19 nt, Homo sapiens
  misc_RNA (1)...(19): siRNA sense strand
auaauaaccugaccuugaa

SEQ ID NO: 757575 - RNA, 19 nt, Homo sapiens
  misc_RNA (1)...(19): siRNA sense strand
gcaauuuagugaaguaucu

SEQ ID NO: 757576 - RNA, 19 nt, Homo sapiens
  misc_RNA (1)...(19): siRNA sense strand
gaagacagacacugauguu

SEQ ID NO: 757577 - RNA, 19 nt, Homo sapiens
  misc_RNA (1)...(19): siRNA sense strand
agacaagacuuucacuuca

SEQ ID NO: 757578 - RNA, 19 nt, Homo sapiens
  misc_RNA (1)...(19): siRNA sense strand
uauaauaaccugaccuuga

SEQ ID NO: 757579 - RNA, 19 nt, Homo sapiens
  misc_RNA (1)...(19): siRNA sense strand
gaugaacaccuucuuuaug

SEQ ID NO: 757580 - RNA, 19 nt, Homo sapiens
  misc_RNA (1)...(19): siRNA sense strand
gcaguggguuggguuauau

SEQ ID NO: 757581 - RNA, 19 nt, Homo sapiens
  misc_RNA (1)...(19): siRNA sense strand
ugaacuggauguacuucua

SEQ ID NO: 757582 - RNA, 19 nt, Homo sapiens
  misc_RNA (1)...(19): siRNA sense strand
caacugagacgugugauug

SEQ ID NO: 757583 - RNA, 19 nt, Homo sapiens
  misc_RNA (1)...(19): siRNA sense strand
ccacuacaaugugauagaa

SEQ ID NO: 757584 - RNA, 19 nt, Homo sapiens
  misc_RNA (1)...(19): siRNA sense strand
gucgggaucuguuugaauu

SEQ ID NO: 757585 - RNA, 19 nt, Homo sapiens
  misc_RNA (1)...(19): siRNA sense strand
ggaugucugucaacugaga

SEQ ID NO: 757586 - RNA, 19 nt, Homo sapiens
  misc_RNA (1)...(19): siRNA sense strand
cagguuauccucuaauuga

SEQ ID NO: 757587 - RNA, 19 nt, Homo sapiens
  misc_RNA (1)...(19): siRNA sense strand
cgggaucuguuugaauuua

SEQ ID NO: 757588 - RNA, 19 nt, Homo sapiens
  misc_RNA (1)...(19): siRNA sense strand
gaacuggauguacuucuau

SEQ ID NO: 757589 - RNA, 19 nt, Homo sapiens
  misc_RNA (1)...(19): siRNA sense strand
ggaugaacaccuucuuuau

SEQ ID NO: 757590 - RNA, 19 nt, Homo sapiens
  misc_RNA (1)...(19): siRNA sense strand
gaggaugaacaccuucuuu

SEQ ID NO: 757591 - RNA, 19 nt, Homo sapiens
  misc_RNA (1)...(19): siRNA sense strand
ucaagguguucccuccaua

SEQ ID NO: 757592 - RNA, 19 nt, Homo sapiens
  misc_RNA (1)...(19): siRNA sense strand
gacuuucacuucacacuuc

SEQ ID NO: 757593 - RNA, 19 nt, Homo sapiens
  misc_RNA (1)...(19): siRNA sense strand
ccaagaggcugaaaaggaa

SEQ ID NO: 757594 - RNA, 19 nt, Homo sapiens
  misc_RNA (1)...(19): siRNA sense strand
uggguuggguuauauaaug

SEQ ID NO: 757595 - RNA, 19 nt, Homo sapiens
  misc_RNA (1)...(19): siRNA sense strand
caccacaugccauuauuaa

SEQ ID NO: 757596 - RNA, 19 nt, Homo sapiens
  misc_RNA (1)...(19): siRNA sense strand
uauaauguccagagauuug

SEQ ID NO: 757597 - RNA, 19 nt, Homo sapiens
  misc_RNA (1)...(19): siRNA sense strand
aaacugcucucaucaaaau

SEQ ID NO: 757598 - RNA, 19 nt, Homo sapiens
  misc_RNA (1)...(19): siRNA sense strand
uaaugaagacagacacuga

SEQ ID NO: 757599 - RNA, 19 nt, Homo sapiens
  misc_RNA (1)...(19): siRNA sense strand
ccaaguacguaaugaagac

SEQ ID NO: 757600 - RNA, 19 nt, Homo sapiens
  misc_RNA (1)...(19): siRNA sense strand
ggaacaccacaugccauua

SEQ ID NO: 757601 - RNA, 19 nt, Homo sapiens
  misc_RNA (1)...(19): siRNA sense strand
uuggaugucugucaacuga

SEQ ID NO: 757602 - RNA, 19 nt, Homo sapiens
  misc_RNA (1)...(19): siRNA sense strand
gggaucuguuugaauuuau

SEQ ID NO: 757603 - RNA, 19 nt, Homo sapiens
  misc_RNA (1)...(19): siRNA sense strand
aaggaucuaugaaaugaug

SEQ ID NO: 757604 - RNA, 19 nt, Homo sapiens
  misc_RNA (1)...(19): siRNA sense strand
cacagguuauccucuaauu

SEQ ID NO: 757605 - RNA, 19 nt, Homo sapiens
  misc_RNA (1)...(19): siRNA sense strand
aggaugaacaccuucuuua

SEQ ID NO: 757606 - RNA, 19 nt, Homo sapiens
  misc_RNA (1)...(19): siRNA sense strand
ugacauaauccgacaagau

SEQ ID NO: 757607 - RNA, 19 nt, Homo sapiens
  misc_RNA (1)...(19): siRNA sense strand
aggcaggccauuagaguua

SEQ ID NO: 757608 - RNA, 19 nt, Homo sapiens
  misc_RNA (1)...(19): siRNA sense strand
ugccaaggaucuaugaaau

SEQ ID NO: 757609 - RNA, 19 nt, Homo sapiens
  misc_RNA (1)...(19): siRNA sense strand
guuauauaauguccagaga

SEQ ID NO: 757610 - RNA, 19 nt, Homo sapiens
  misc_RNA (1)...(19): siRNA sense strand
uuucacagguuauccucua

SEQ ID NO: 757611 - RNA, 19 nt, Homo sapiens
  misc_RNA (1)...(19): siRNA sense strand
cagacaagacuuucacuuc

SEQ ID NO: 757612 - RNA, 19 nt, Homo sapiens
  misc_RNA (1)...(19): siRNA sense strand
cuccugaguuucuuuguga

SEQ ID NO: 757613 - RNA, 19 nt, Homo sapiens
  misc_RNA (1)...(19): siRNA sense strand
guuugaagauguuuauguc

SEQ ID NO: 757614 - RNA, 19 nt, Homo sapiens
  misc_RNA (1)...(19): siRNA sense strand
gcauucagguggguaacug

SEQ ID NO: 757615 - RNA, 19 nt, Homo sapiens
  misc_RNA (1)...(19): siRNA sense strand
gauuuacagacaagacuuu

SEQ ID NO: 757616 - RNA, 19 nt, Homo sapiens
  misc_RNA (1)...(19): siRNA sense strand
ccauuuggaugucugucaa

SEQ ID NO: 757617 - RNA, 19 nt, Homo sapiens
  misc_RNA (1)...(19): siRNA sense strand
augaacaccuucuuuaugg

SEQ ID NO: 757618 - RNA, 19 nt, Homo sapiens
  misc_RNA (1)...(19): siRNA sense strand
cauucaaacugcucucauc

SEQ ID NO: 757619 - RNA, 19 nt, Homo sapiens
  misc_RNA (1)...(19): siRNA sense strand
acauucauauuccagaaga

SEQ ID NO: 757620 - RNA, 19 nt, Homo sapiens
  misc_RNA (1)...(19): siRNA sense strand
ugaaaugaugggucacgua

SEQ ID NO: 757621 - RNA, 19 nt, Homo sapiens
  misc_RNA (1)...(19): siRNA sense strand
aaacccauauuucuuacca

SEQ ID NO: 757622 - RNA, 19 nt, Homo sapiens
  misc_RNA (1)...(19): siRNA sense strand
gacagacacugauguuuuc

SEQ ID NO: 757623 - RNA, 19 nt, Homo sapiens
  misc_RNA (1)...(19): siRNA sense strand
ccgaguaggaugucacuga

SEQ ID NO: 757624 - RNA, 19 nt, Homo sapiens
  misc_RNA (1)...(19): siRNA sense strand
ggguuggguuauauaaugu

SEQ ID NO: 757625 - RNA, 19 nt, Homo sapiens
  misc_RNA (1)...(19): siRNA sense strand
cuaaaccacucagagaagu

SEQ ID NO: 757626 - RNA, 19 nt, Homo sapiens
  misc_RNA (1)...(19): siRNA sense strand
acaccacaugccauuauua

SEQ ID NO: 757627 - RNA, 19 nt, Homo sapiens
  misc_RNA (1)...(19): siRNA sense strand
gugccaaggaucuaugaaa

SEQ ID NO: 757628 - RNA, 19 nt, Homo sapiens
  misc_RNA (1)...(19): siRNA sense strand
gacaagacuuucacuucac

SEQ ID NO: 757629 - RNA, 19 nt, Homo sapiens
  misc_RNA (1)...(19): siRNA sense strand
gccaaggaucuaugaaaug

SEQ ID NO: 757630 - RNA, 19 nt, Homo sapiens
  misc_RNA (1)...(19): siRNA sense strand
ugcaguggguuggguuaua

SEQ ID NO: 757631 - RNA, 19 nt, Homo sapiens
  misc_RNA (1)...(19): siRNA sense strand
gagccgauuuacagacaag

SEQ ID NO: 757632 - RNA, 19 nt, Homo sapiens
  misc_RNA (1)...(19): siRNA sense strand
cuuagaggaugaacaccuu

SEQ ID NO: 757633 - RNA, 19 nt, Homo sapiens
  misc_RNA (1)...(19): siRNA sense strand
acaagacuuucacuucaca

SEQ ID NO: 757634 - RNA, 19 nt, Homo sapiens
  misc_RNA (1)...(19): siRNA sense strand
aaugaugggucacguaaaa

SEQ ID NO: 757635 - RNA, 19 nt, Homo sapiens
  misc_RNA (1)...(19): siRNA sense strand
cauauaauaaccugaccuu

SEQ ID NO: 757636 - RNA, 19 nt, Homo sapiens
  misc_RNA (1)...(19): siRNA sense strand
ggauaugagguucuuacau

SEQ ID NO: 757637 - RNA, 19 nt, Homo sapiens
  misc_RNA (1)...(19): siRNA sense strand
ggcaggucaugcuaaggaa

SEQ ID NO: 757638 - RNA, 19 nt, Homo sapiens
  misc_RNA (1)...(19): siRNA sense strand
aguaggaugucacugagau

SEQ ID NO: 757639 - RNA, 19 nt, Homo sapiens
  misc_RNA (1)...(19): siRNA sense strand
gccaaguacguaaugaaga

SEQ ID NO: 757640 - RNA, 19 nt, Homo sapiens
  misc_RNA (1)...(19): siRNA sense strand
uagaacgcgugaacuggau

SEQ ID NO: 757641 - RNA, 19 nt, Homo sapiens
  misc_RNA (1)...(19): siRNA sense strand
uggauguacuucuaugagu

SEQ ID NO: 757642 - RNA, 19 nt, Homo sapiens
  misc_RNA (1)...(19): siRNA sense strand
ugauagaacgcgugaacug

SEQ ID NO: 757643 - RNA, 19 nt, Homo sapiens
  misc_RNA (1)...(19): siRNA sense strand
gaguaugagccgauuuaca

SEQ ID NO: 757644 - RNA, 19 nt, Homo sapiens
  misc_RNA (1)...(19): siRNA sense strand
ucaucaauacuggcaauuu

SEQ ID NO: 757645 - RNA, 19 nt, Homo sapiens
  misc_RNA (1)...(19): siRNA sense strand
augaguaugagccgauuua

SEQ ID NO: 757646 - RNA, 19 nt, Homo sapiens
  misc_RNA (1)...(19): siRNA sense strand
cuauauagaauccauuugg

SEQ ID NO: 757647 - RNA, 19 nt, Homo sapiens
  misc_RNA (1)...(19): siRNA sense strand
gaacgcgugaacuggaugu

SEQ ID NO: 757648 - RNA, 19 nt, Homo sapiens
  misc_RNA (1)...(19): siRNA sense strand
agacagacacugauguuuu

SEQ ID NO: 757649 - RNA, 19 nt, Homo sapiens
  misc_RNA (1)...(19): siRNA sense strand
aacaccacaugccauuauu

SEQ ID NO: 757650 - RNA, 19 nt, Homo sapiens
  misc_RNA (1)...(19): siRNA sense strand
ccucggcucucuggacugu

SEQ ID NO: 757651 - RNA, 19 nt, Homo sapiens
  misc_RNA (1)...(19): siRNA sense strand
cuggcaauuuagugaagua

SEQ ID NO: 757652 - RNA, 19 nt, Homo sapiens
  misc_RNA (1)...(19): siRNA sense strand
gaaagccaggcaggccauu

SEQ ID NO: 757653 - RNA, 19 nt, Homo sapiens
  misc_RNA (1)...(19): siRNA sense strand
aguaugagccgauuuacag

SEQ ID NO: 757654 - RNA, 19 nt, Homo sapiens
  misc_RNA (1)...(19): siRNA sense strand
aauacuggcaauuuaguga

SEQ ID NO: 757655 - RNA, 19 nt, Homo sapiens
  misc_RNA (1)...(19): siRNA sense strand
ccaggcaggccauuagagu

SEQ ID NO: 757656 - RNA, 19 nt, Homo sapiens
  misc_RNA (1)...(19): siRNA sense strand
ugaagacagacacugaugu

SEQ ID NO: 757657 - RNA, 19 nt, Homo sapiens
  misc_RNA (1)...(19): siRNA sense strand
uaaaccacucagagaaguu

SEQ ID NO: 757658 - RNA, 19 nt, Homo sapiens
  misc_RNA (1)...(19): siRNA sense strand
aaagccaggcaggccauua

SEQ ID NO: 757659 - RNA, 19 nt, Homo sapiens
  misc_RNA (1)...(19): siRNA sense strand
uggcaggucaugcuaagga

SEQ ID NO: 757660 - RNA, 19 nt, Homo sapiens
  misc_RNA (1)...(19): siRNA sense strand
ucaacugagacgugugauu

SEQ ID NO: 757661 - RNA, 19 nt, Homo sapiens
  misc_RNA (1)...(19): siRNA sense strand
guaugagccgauuuacaga

SEQ ID NO: 757662 - RNA, 19 nt, Homo sapiens
  misc_RNA (1)...(19): siRNA sense strand
ucaauacuggcaauuuagu

SEQ ID NO: 757663 - RNA, 19 nt, Homo sapiens
  misc_RNA (1)...(19): siRNA sense strand
ccaaugccaaguacguaau

SEQ ID NO: 757664 - RNA, 19 nt, Homo sapiens
  misc_RNA (1)...(19): siRNA sense strand
gauaugagguucuuacauu

SEQ ID NO: 757665 - RNA, 19 nt, Homo sapiens
  misc_RNA (1)...(19): siRNA sense strand
ccaaggagaucaucacuuu

SEQ ID NO: 757666 - RNA, 19 nt, Homo sapiens
  misc_RNA (1)...(19): siRNA sense strand
caucaauacuggcaauuua

SEQ ID NO: 757667 - RNA, 19 nt, Homo sapiens
  misc_RNA (1)...(19): siRNA sense strand
gaacauucauauuccagaa

SEQ ID NO: 757668 - RNA, 19 nt, Homo sapiens
  misc_RNA (1)...(19): siRNA sense strand
ccaaggaucuaugaaauga

SEQ ID NO: 757669 - RNA, 19 nt, Homo sapiens
  misc_RNA (1)...(19): siRNA sense strand
gaaaugaugggucacguaa

SEQ ID NO: 757670 - RNA, 19 nt, Homo sapiens
  misc_RNA (1)...(19): siRNA sense strand
ucaaacugcucucaucaaa

SEQ ID NO: 757671 - RNA, 19 nt, Homo sapiens
  misc_RNA (1)...(19): siRNA sense strand
gaacaccacaugccauuau

SEQ ID NO: 757672 - RNA, 19 nt, Homo sapiens
  misc_RNA (1)...(19): siRNA sense strand
auaauaaccugaccuugaa

SEQ ID NO: 757673 - RNA, 19 nt, Homo sapiens
  misc_RNA (1)...(19): siRNA sense strand
gcaauuuagugaaguaucu

SEQ ID NO: 757674 - RNA, 19 nt, Homo sapiens
  misc_RNA (1)...(19): siRNA sense strand
gaagacagacacugauguu

SEQ ID NO: 757675 - RNA, 19 nt, Homo sapiens
  misc_RNA (1)...(19): siRNA sense strand
agacaagacuuucacuuca

SEQ ID NO: 757676 - RNA, 19 nt, Homo sapiens
  misc_RNA (1)...(19): siRNA sense strand
uauaauaaccugaccuuga

SEQ ID NO: 757677 - RNA, 19 nt, Homo sapiens
  misc_RNA (1)...(19): siRNA sense strand
gaugaacaccuucuuuaug

SEQ ID NO: 757678 - RNA, 19 nt, Homo sapiens
  misc_RNA (1)...(19): siRNA sense strand
gcaguggguuggguuauau

SEQ ID NO: 757679 - RNA, 19 nt, Homo sapiens
  misc_RNA (1)...(19): siRNA sense strand
ugaacuggauguacuucua

SEQ ID NO: 757680 - RNA, 19 nt, Homo sapiens
  misc_RNA (1)...(19): siRNA sense strand
caacugagacgugugauug

SEQ ID NO: 757681 - RNA, 19 nt, Homo sapiens
  misc_RNA (1)...(19): siRNA sense strand
ccacuacaaugugauagaa

SEQ ID NO: 757682 - RNA, 19 nt, Homo sapiens
  misc_RNA (1)...(19): siRNA sense strand
gucgggaucuguuugaauu

SEQ ID NO: 757683 - RNA, 19 nt, Homo sapiens
  misc_RNA (1)...(19): siRNA sense strand
ggaugucugucaacugaga

SEQ ID NO: 757684 - RNA, 19 nt, Homo sapiens
  misc_RNA (1)...(19): siRNA sense strand
cagguuauccucuaauuga

SEQ ID NO: 757685 - RNA, 19 nt, Homo sapiens
  misc_RNA (1)...(19): siRNA sense strand
cgggaucuguuugaauuua

SEQ ID NO: 757686 - RNA, 19 nt, Homo sapiens
  misc_RNA (1)...(19): siRNA sense strand
gaacuggauguacuucuau

SEQ ID NO: 757687 - RNA, 19 nt, Homo sapiens
  misc_RNA (1)...(19): siRNA sense strand
ggaugaacaccuucuuuau

SEQ ID NO: 757688 - RNA, 19 nt, Homo sapiens
  misc_RNA (1)...(19): siRNA sense strand
gaggaugaacaccuucuuu

SEQ ID NO: 757689 - RNA, 19 nt, Homo sapiens
  misc_RNA (1)...(19): siRNA sense strand
ucaagguguucccuccaua

SEQ ID NO: 757690 - RNA, 19 nt, Homo sapiens
  misc_RNA (1)...(19): siRNA sense strand
gacuuucacuucacacuuc

SEQ ID NO: 757691 - RNA, 19 nt, Homo sapiens
  misc_RNA (1)...(19): siRNA sense strand
ccaagaggcugaaaaggaa

SEQ ID NO: 757692 - RNA, 19 nt, Homo sapiens
  misc_RNA (1)...(19): siRNA sense strand
uggguuggguuauauaaug

SEQ ID NO: 757693 - RNA, 19 nt, Homo sapiens
  misc_RNA (1)...(19): siRNA sense strand
caccacaugccauuauuaa

SEQ ID NO: 757694 - RNA, 19 nt, Homo sapiens
  misc_RNA (1)...(19): siRNA sense strand
uauaauguccagagauuug

SEQ ID NO: 757695 - RNA, 19 nt, Homo sapiens
  misc_RNA (1)...(19): siRNA sense strand
aaacugcucucaucaaaau

SEQ ID NO: 757696 - RNA, 19 nt, Homo sapiens
  misc_RNA (1)...(19): siRNA sense strand
uaaugaagacagacacuga

SEQ ID NO: 757697 - RNA, 19 nt, Homo sapiens
  misc_RNA (1)...(19): siRNA sense strand
ccaaguacguaaugaagac

SEQ ID NO: 757698 - RNA, 19 nt, Homo sapiens
  misc_RNA (1)...(19): siRNA sense strand
ggaacaccacaugccauua

SEQ ID NO: 757699 - RNA, 19 nt, Homo sapiens
  misc_RNA (1)...(19): siRNA sense strand
uuggaugucugucaacuga

SEQ ID NO: 757700 - RNA, 19 nt, Homo sapiens
  misc_RNA (1)...(19): siRNA sense strand
gggaucuguuugaauuuau

SEQ ID NO: 757701 - RNA, 19 nt, Homo sapiens
  misc_RNA (1)...(19): siRNA sense strand
aaggaucuaugaaaugaug

SEQ ID NO: 757702 - RNA, 19 nt, Homo sapiens
  misc_RNA (1)...(19): siRNA sense strand
cacagguuauccucuaauu

SEQ ID NO: 757703 - RNA, 19 nt, Homo sapiens
  misc_RNA (1)...(19): siRNA sense strand
aggaugaacaccuucuuua

SEQ ID NO: 757704 - RNA, 19 nt, Homo sapiens
  misc_RNA (1)...(19): siRNA sense strand
ugacauaauccgacaagau

SEQ ID NO: 757705 - RNA, 19 nt, Homo sapiens
  misc_RNA (1)...(19): siRNA sense strand
aggcaggccauuagaguua

SEQ ID NO: 757706 - RNA, 19 nt, Homo sapiens
  misc_RNA (1)...(19): siRNA sense strand
ugccaaggaucuaugaaau

SEQ ID NO: 757707 - RNA, 19 nt, Homo sapiens
  misc_RNA (1)...(19): siRNA sense strand
guuauauaauguccagaga

SEQ ID NO: 757708 - RNA, 19 nt, Homo sapiens
  misc_RNA (1)...(19): siRNA sense strand
uuucacagguuauccucua

SEQ ID NO: 757709 - RNA, 19 nt, Homo sapiens
  misc_RNA (1)...(19): siRNA sense strand
cagacaagacuuucacuuc

SEQ ID NO: 757710 - RNA, 19 nt, Homo sapiens
  misc_RNA (1)...(19): siRNA sense strand
cuccugaguuucuuuguga

SEQ ID NO: 757711 - RNA, 19 nt, Homo sapiens
  misc_RNA (1)...(19): siRNA sense strand
guuugaagauguuuauguc

SEQ ID NO: 757712 - RNA, 19 nt, Homo sapiens
  misc_RNA (1)...(19): siRNA sense strand
gcauucagguggguaacug

SEQ ID NO: 757713 - RNA, 19 nt, Homo sapiens
  misc_RNA (1)...(19): siRNA sense strand
gauuuacagacaagacuuu

SEQ ID NO: 757714 - RNA, 19 nt, Homo sapiens
  misc_RNA (1)...(19): siRNA sense strand
ccauuuggaugucugucaa

SEQ ID NO: 757715 - RNA, 19 nt, Homo sapiens
  misc_RNA (1)...(19): siRNA sense strand
augaacaccuucuuuaugg

SEQ ID NO: 757716 - RNA, 19 nt, Homo sapiens
  misc_RNA (1)...(19): siRNA sense strand
cauucaaacugcucucauc

SEQ ID NO: 757717 - RNA, 19 nt, Homo sapiens
  misc_RNA (1)...(19): siRNA sense strand
acauucauauuccagaaga

SEQ ID NO: 757718 - RNA, 19 nt, Homo sapiens
  misc_RNA (1)...(19): siRNA sense strand
ugaaaugaugggucacgua

SEQ ID NO: 757719 - RNA, 19 nt, Homo sapiens
  misc_RNA (1)...(19): siRNA sense strand
aaacccauauuucuuacca

SEQ ID NO: 757720 - RNA, 19 nt, Homo sapiens
  misc_RNA (1)...(19): siRNA sense strand
gacagacacugauguuuuc

SEQ ID NO: 757721 - RNA, 19 nt, Homo sapiens
  misc_RNA (1)...(19): siRNA sense strand
ccgaguaggaugucacuga

SEQ ID NO: 757722 - RNA, 19 nt, Homo sapiens
  misc_RNA (1)...(19): siRNA sense strand
ggguuggguuauauaaugu

SEQ ID NO: 757723 - RNA, 19 nt, Homo sapiens
  misc_RNA (1)...(19): siRNA sense strand
cuaaaccacucagagaagu

SEQ ID NO: 757724 - RNA, 19 nt, Homo sapiens
  misc_RNA (1)...(19): siRNA sense strand
acaccacaugccauuauua

SEQ ID NO: 757725 - RNA, 19 nt, Homo sapiens
  misc_RNA (1)...(19): siRNA sense strand
gugccaaggaucuaugaaa

SEQ ID NO: 757726 - RNA, 19 nt, Homo sapiens
  misc_RNA (1)...(19): siRNA sense strand
gacaagacuuucacuucac

SEQ ID NO: 757727 - RNA, 19 nt, Homo sapiens
  misc_RNA (1)...(19): siRNA sense strand
gccaaggaucuaugaaaug

SEQ ID NO: 757728 - RNA, 19 nt, Homo sapiens
  misc_RNA (1)...(19): siRNA sense strand
ugcaguggguuggguuaua

SEQ ID NO: 757729 - RNA, 19 nt, Homo sapiens
  misc_RNA (1)...(19): siRNA sense strand
gagccgauuuacagacaag

SEQ ID NO: 757730 - RNA, 19 nt, Homo sapiens
  misc_RNA (1)...(19): siRNA sense strand
cuuagaggaugaacaccuu

SEQ ID NO: 757731 - RNA, 19 nt, Homo sapiens
  misc_RNA (1)...(19): siRNA sense strand
acaagacuuucacuucaca

SEQ ID NO: 757732 - RNA, 19 nt, Homo sapiens
  misc_RNA (1)...(19): siRNA sense strand
aaugaugggucacguaaaa

SEQ ID NO: 757733 - RNA, 19 nt, Homo sapiens
  misc_RNA (1)...(19): siRNA sense strand
cauauaauaaccugaccuu

SEQ ID NO: 757734 - RNA, 19 nt, Homo sapiens
  misc_RNA (1)...(19): siRNA sense strand
ggauaugagguucuuacau

SEQ ID NO: 757735 - RNA, 19 nt, Homo sapiens
  misc_RNA (1)...(19): siRNA sense strand
ggcaggucaugcuaaggaa

SEQ ID NO: 757736 - RNA, 19 nt, Homo sapiens
  misc_RNA (1)...(19): siRNA sense strand
aguaggaugucacugagau

SEQ ID NO: 757737 - RNA, 19 nt, Homo sapiens
  misc_RNA (1)...(19): siRNA sense strand
gccaaguacguaaugaaga

SEQ ID NO: 757738 - RNA, 19 nt, Homo sapiens
  misc_RNA (1)...(19): siRNA sense strand
uagaacgcgugaacuggau

SEQ ID NO: 757739 - RNA, 19 nt, Homo sapiens
  misc_RNA (1)...(19): siRNA sense strand
uggauguacuucuaugagu

SEQ ID NO: 757740 - RNA, 19 nt, Homo sapiens
  misc_RNA (1)...(19): siRNA sense strand
ugauagaacgcgugaacug

SEQ ID NO: 757741 - RNA, 19 nt, Homo sapiens
  misc_RNA (1)...(19): siRNA sense strand
gaguaugagccgauuuaca

SEQ ID NO: 757742 - RNA, 19 nt, Homo sapiens
  misc_RNA (1)...(19): siRNA sense strand
ucaucaauacuggcaauuu

SEQ ID NO: 757743 - RNA, 19 nt, Homo sapiens
  misc_RNA (1)...(19): siRNA sense strand
augaguaugagccgauuua

SEQ ID NO: 757744 - RNA, 19 nt, Homo sapiens
  misc_RNA (1)...(19): siRNA sense strand
cuauauagaauccauuugg

SEQ ID NO: 757745 - RNA, 19 nt, Homo sapiens
  misc_RNA (1)...(19): siRNA sense strand
gaacgcgugaacuggaugu

SEQ ID NO: 757746 - RNA, 19 nt, Homo sapiens
  misc_RNA (1)...(19): siRNA sense strand
agacagacacugauguuuu

SEQ ID NO: 757747 - RNA, 19 nt, Homo sapiens
  misc_RNA (1)...(19): siRNA sense strand
aacaccacaugccauuauu

SEQ ID NO: 757748 - RNA, 19 nt, Homo sapiens
  misc_RNA (1)...(19): siRNA sense strand
ccucggcucucuggacugu

SEQ ID NO: 757749 - RNA, 19 nt, Homo sapiens
  misc_RNA (1)...(19): siRNA sense strand
cuggcaauuuagugaagua

SEQ ID NO: 757750 - RNA, 19 nt, Homo sapiens
  misc_RNA (1)...(19): siRNA sense strand
gaaagccaggcaggccauu

SEQ ID NO: 757751 - RNA, 19 nt, Homo sapiens
  misc_RNA (1)...(19): siRNA sense strand
aguaugagccgauuuacag

SEQ ID NO: 757752 - RNA, 19 nt, Homo sapiens
  misc_RNA (1)...(19): siRNA sense strand
aauacuggcaauuuaguga

SEQ ID NO: 757753 - RNA, 19 nt, Homo sapiens
  misc_RNA (1)...(19): siRNA sense strand
ccaggcaggccauuagagu

SEQ ID NO: 757754 - RNA, 19 nt, Homo sapiens
  misc_RNA (1)...(19): siRNA sense strand
ugaagacagacacugaugu

SEQ ID NO: 757755 - RNA, 19 nt, Homo sapiens
  misc_RNA (1)...(19): siRNA sense strand
uaaaccacucagagaaguu

SEQ ID NO: 757756 - RNA, 19 nt, Homo sapiens
  misc_RNA (1)...(19): siRNA sense strand
aaagccaggcaggccauua

SEQ ID NO: 757757 - RNA, 19 nt, Homo sapiens
  misc_RNA (1)...(19): siRNA sense strand
uggcaggucaugcuaagga

SEQ ID NO: 757758 - RNA, 19 nt, Homo sapiens
  misc_RNA (1)...(19): siRNA sense strand
ucaacugagacgugugauu

SEQ ID NO: 757759 - RNA, 19 nt, Homo sapiens
  misc_RNA (1)...(19): siRNA sense strand
guaugagccgauuuacaga

SEQ ID NO: 757760 - RNA, 19 nt, Homo sapiens
  misc_RNA (1)...(19): siRNA sense strand
ucaauacuggcaauuuagu

SEQ ID NO: 757761 - RNA, 19 nt, Homo sapiens
  misc_RNA (1)...(19): siRNA sense strand
ccaaugccaaguacguaau

SEQ ID NO: 757762 - RNA, 19 nt, Homo sapiens
  misc_RNA (1)...(19): siRNA sense strand
gaaagcagcugaagacauu

SEQ ID NO: 757763 - RNA, 19 nt, Homo sapiens
  misc_RNA (1)...(19): siRNA sense strand
gcaagugguuugucaguaa

SEQ ID NO: 757764 - RNA, 19 nt, Homo sapiens
  misc_RNA (1)...(19): siRNA sense strand
ugacugaacugcuucugaa

SEQ ID NO: 757765 - RNA, 19 nt, Homo sapiens
  misc_RNA (1)...(19): siRNA sense strand
cgagucagguguacaaugu

SEQ ID NO: 757766 - RNA, 19 nt, Homo sapiens
  misc_RNA (1)...(19): siRNA sense strand
ucagacauguucaucaaug

SEQ ID NO: 757767 - RNA, 19 nt, Homo sapiens
  misc_RNA (1)...(19): siRNA sense strand
ggacagguacccaccauuc

SEQ ID NO: 757768 - RNA, 19 nt, Homo sapiens
  misc_RNA (1)...(19): siRNA sense strand
caagugguuugucaguaaa

SEQ ID NO: 757769 - RNA, 19 nt, Homo sapiens
  misc_RNA (1)...(19): siRNA sense strand
gagcgucccauacauuaaa

SEQ ID NO: 757770 - RNA, 19 nt, Homo sapiens
  misc_RNA (1)...(19): siRNA sense strand
caagagcgucccauacauu

SEQ ID NO: 757771 - RNA, 19 nt, Homo sapiens
  misc_RNA (1)...(19): siRNA sense strand
caagaaagacgggaacuuc

SEQ ID NO: 757772 - RNA, 19 nt, Homo sapiens
  misc_RNA (1)...(19): siRNA sense strand
gaaaacagacucagacaug

SEQ ID NO: 757773 - RNA, 19 nt, Homo sapiens
  misc_RNA (1)...(19): siRNA sense strand
gaagaugagauugauguau

SEQ ID NO: 757774 - RNA, 19 nt, Homo sapiens
  misc_RNA (1)...(19): siRNA sense strand
ggcaggcucuagagaauuc

SEQ ID NO: 757775 - RNA, 19 nt, Homo sapiens
  misc_RNA (1)...(19): siRNA sense strand
cagucuaaauccuuucaaa

SEQ ID NO: 757776 - RNA, 19 nt, Homo sapiens
  misc_RNA (1)...(19): siRNA sense strand
ggaaagcagcugaagacau

SEQ ID NO: 757777 - RNA, 19 nt, Homo sapiens
  misc_RNA (1)...(19): siRNA sense strand
acucagacauguucaucaa

SEQ ID NO: 757778 - RNA, 19 nt, Homo sapiens
  misc_RNA (1)...(19): siRNA sense strand
aagagcgucccauacauua

SEQ ID NO: 757779 - RNA, 19 nt, Homo sapiens
  misc_RNA (1)...(19): siRNA sense strand
ccaagagcgucccauacau

SEQ ID NO: 757780 - RNA, 19 nt, Homo sapiens
  misc_RNA (1)...(19): siRNA sense strand
uguacagucuaaauccuuu

SEQ ID NO: 757781 - RNA, 19 nt, Homo sapiens
  misc_RNA (1)...(19): siRNA sense strand
ucaaugaguuucccaucag

SEQ ID NO: 757782 - RNA, 19 nt, Homo sapiens
  misc_RNA (1)...(19): siRNA sense strand
agacgucuauuacaaucug

SEQ ID NO: 757783 - RNA, 19 nt, Homo sapiens
  misc_RNA (1)...(19): siRNA sense strand
gaagauuguccgccugucu

SEQ ID NO: 757784 - RNA, 19 nt, Homo sapiens
  misc_RNA (1)...(19): siRNA sense strand
gggacauuauccagaagga

SEQ ID NO: 757785 - RNA, 19 nt, Homo sapiens
  misc_RNA (1)...(19): siRNA sense strand
cgaagaugagauugaugua

SEQ ID NO: 757786 - RNA, 19 nt, Homo sapiens
  misc_RNA (1)...(19): siRNA sense strand
ggugaccucaucccacaaa

SEQ ID NO: 757787 - RNA, 19 nt, Homo sapiens
  misc_RNA (1)...(19): siRNA sense strand
ggacucucuuggacuacug

SEQ ID NO: 757788 - RNA, 19 nt, Homo sapiens
  misc_RNA (1)...(19): siRNA sense strand
cggcaccggcuacguguuu

SEQ ID NO: 757789 - RNA, 19 nt, Homo sapiens
  misc_RNA (1)...(19): siRNA sense strand
ucacuggcuucuugaaacu

SEQ ID NO: 757790 - RNA, 19 nt, Homo sapiens
  misc_RNA (1)...(19): siRNA sense strand
ccucaucccacaaacaguu

SEQ ID NO: 757791 - RNA, 19 nt, Homo sapiens
  misc_RNA (1)...(19): siRNA sense strand
uagcauguacagucuaaau

SEQ ID NO: 757792 - RNA, 19 nt, Homo sapiens
  misc_RNA (1)...(19): siRNA sense strand
ccgaagaugagauugaugu

SEQ ID NO: 757793 - RNA, 19 nt, Homo sapiens
  misc_RNA (1)...(19): siRNA sense strand
gaagggaaagcagcugaag

SEQ ID NO: 757794 - RNA, 19 nt, Homo sapiens
  misc_RNA (1)...(19): siRNA sense strand
guauauuugccuucugguu

SEQ ID NO: 757795 - RNA, 19 nt, Homo sapiens
  misc_RNA (1)...(19): siRNA sense strand
auuacaaucugacccugaa

SEQ ID NO: 757796 - RNA, 19 nt, Homo sapiens
  misc_RNA (1)...(19): siRNA sense strand
cuaucugacugaacugcuu

SEQ ID NO: 757797 - RNA, 19 nt, Homo sapiens
  misc_RNA (1)...(19): siRNA sense strand
gauguauauuugccuucug

SEQ ID NO: 757798 - RNA, 19 nt, Homo sapiens
  misc_RNA (1)...(19): siRNA sense strand
uguacaaugucuccaagag

SEQ ID NO: 757799 - RNA, 19 nt, Homo sapiens
  misc_RNA (1)...(19): siRNA sense strand
gaccucaucccacaaacag

SEQ ID NO: 757800 - RNA, 19 nt, Homo sapiens
  misc_RNA (1)...(19): siRNA sense strand
gcgagucagguguacaaug

SEQ ID NO: 757801 - RNA, 19 nt, Homo sapiens
  misc_RNA (1)...(19): siRNA sense strand
uccuuaagcucccagauac

SEQ ID NO: 757802 - RNA, 19 nt, Homo sapiens
  misc_RNA (1)...(19): siRNA sense strand
caugaugggcauagaaugg

SEQ ID NO: 757803 - RNA, 19 nt, Homo sapiens
  misc_RNA (1)...(19): siRNA sense strand
cuggcaggcucuagagaau

SEQ ID NO: 757804 - RNA, 19 nt, Homo sapiens
  misc_RNA (1)...(19): siRNA sense strand
uuccuuaagcucccagaua

SEQ ID NO: 757805 - RNA, 19 nt, Homo sapiens
  misc_RNA (1)...(19): siRNA sense strand
ggacuacuggcaggcucua

SEQ ID NO: 757806 - RNA, 19 nt, Homo sapiens
  misc_RNA (1)...(19): siRNA sense strand
cucggacucucuuggacua

SEQ ID NO: 757807 - RNA, 19 nt, Homo sapiens
  misc_RNA (1)...(19): siRNA sense strand
ucuccaagagcgucccaua

SEQ ID NO: 757808 - RNA, 19 nt, Homo sapiens
  misc_RNA (1)...(19): siRNA sense strand
gggcucuuuguuuguauuu

SEQ ID NO: 757809 - RNA, 19 nt, Homo sapiens
  misc_RNA (1)...(19): siRNA sense strand
gcauguacagucuaaaucc

SEQ ID NO: 757810 - RNA, 19 nt, Homo sapiens
  misc_RNA (1)...(19): siRNA sense strand
uccaagagcgucccauaca

SEQ ID NO: 757811 - RNA, 19 nt, Homo sapiens
  misc_RNA (1)...(19): siRNA sense strand
agcaagugguuugucagua

SEQ ID NO: 757812 - RNA, 19 nt, Homo sapiens
  misc_RNA (1)...(19): siRNA sense strand
ccauucagcaagugguuug

SEQ ID NO: 757813 - RNA, 19 nt, Homo sapiens
  misc_RNA (1)...(19): siRNA sense strand
gaaagcagcugaagacauu

SEQ ID NO: 757814 - RNA, 19 nt, Homo sapiens
  misc_RNA (1)...(19): siRNA sense strand
gcaagugguuugucaguaa

SEQ ID NO: 757815 - RNA, 19 nt, Homo sapiens
  misc_RNA (1)...(19): siRNA sense strand
ugacugaacugcuucugaa

SEQ ID NO: 757816 - RNA, 19 nt, Homo sapiens
  misc_RNA (1)...(19): siRNA sense strand
cgagucagguguacaaugu

SEQ ID NO: 757817 - RNA, 19 nt, Homo sapiens
  misc_RNA (1)...(19): siRNA sense strand
ucagacauguucaucaaug

SEQ ID NO: 757818 - RNA, 19 nt, Homo sapiens
  misc_RNA (1)...(19): siRNA sense strand
ggacagguacccaccauuc

SEQ ID NO: 757819 - RNA, 19 nt, Homo sapiens
  misc_RNA (1)...(19): siRNA sense strand
caagugguuugucaguaaa

SEQ ID NO: 757820 - RNA, 19 nt, Homo sapiens
  misc_RNA (1)...(19): siRNA sense strand
gagcgucccauacauuaaa

SEQ ID NO: 757821 - RNA, 19 nt, Homo sapiens
  misc_RNA (1)...(19): siRNA sense strand
caagagcgucccauacauu

SEQ ID NO: 757822 - RNA, 19 nt, Homo sapiens
  misc_RNA (1)...(19): siRNA sense strand
caagaaagacgggaacuuc

SEQ ID NO: 757823 - RNA, 19 nt, Homo sapiens
  misc_RNA (1)...(19): siRNA sense strand
gaaaacagacucagacaug

SEQ ID NO: 757824 - RNA, 19 nt, Homo sapiens
  misc_RNA (1)...(19): siRNA sense strand
gaagaugagauugauguau

SEQ ID NO: 757825 - RNA, 19 nt, Homo sapiens
  misc_RNA (1)...(19): siRNA sense strand
ggcaggcucuagagaauuc

SEQ ID NO: 757826 - RNA, 19 nt, Homo sapiens
  misc_RNA (1)...(19): siRNA sense strand
cagucuaaauccuuucaaa

SEQ ID NO: 757827 - RNA, 19 nt, Homo sapiens
  misc_RNA (1)...(19): siRNA sense strand
ggaaagcagcugaagacau

SEQ ID NO: 757828 - RNA, 19 nt, Homo sapiens
  misc_RNA (1)...(19): siRNA sense strand
acucagacauguucaucaa

SEQ ID NO: 757829 - RNA, 19 nt, Homo sapiens
  misc_RNA (1)...(19): siRNA sense strand
aagagcgucccauacauua

SEQ ID NO: 757830 - RNA, 19 nt, Homo sapiens
  misc_RNA (1)...(19): siRNA sense strand
ccaagagcgucccauacau

SEQ ID NO: 757831 - RNA, 19 nt, Homo sapiens
  misc_RNA (1)...(19): siRNA sense strand
uguacagucuaaauccuuu

SEQ ID NO: 757832 - RNA, 19 nt, Homo sapiens
  misc_RNA (1)...(19): siRNA sense strand
ucaaugaguuucccaucag

SEQ ID NO: 757833 - RNA, 19 nt, Homo sapiens
  misc_RNA (1)...(19): siRNA sense strand
agacgucuauuacaaucug

SEQ ID NO: 757834 - RNA, 19 nt, Homo sapiens
  misc_RNA (1)...(19): siRNA sense strand
gaagauuguccgccugucu

SEQ ID NO: 757835 - RNA, 19 nt, Homo sapiens
  misc_RNA (1)...(19): siRNA sense strand
gggacauuauccagaagga

SEQ ID NO: 757836 - RNA, 19 nt, Homo sapiens
  misc_RNA (1)...(19): siRNA sense strand
cgaagaugagauugaugua

SEQ ID NO: 757837 - RNA, 19 nt, Homo sapiens
  misc_RNA (1)...(19): siRNA sense strand
ggugaccucaucccacaaa

SEQ ID NO: 757838 - RNA, 19 nt, Homo sapiens
  misc_RNA (1)...(19): siRNA sense strand
ggacucucuuggacuacug

SEQ ID NO: 757839 - RNA, 19 nt, Homo sapiens
  misc_RNA (1)...(19): siRNA sense strand
cggcaccggcuacguguuu

SEQ ID NO: 757840 - RNA, 19 nt, Homo sapiens
  misc_RNA (1)...(19): siRNA sense strand
ucacuggcuucuugaaacu

SEQ ID NO: 757841 - RNA, 19 nt, Homo sapiens
  misc_RNA (1)...(19): siRNA sense strand
ccucaucccacaaacaguu

SEQ ID NO: 757842 - RNA, 19 nt, Homo sapiens
  misc_RNA (1)...(19): siRNA sense strand
uagcauguacagucuaaau

SEQ ID NO: 757843 - RNA, 19 nt, Homo sapiens
  misc_RNA (1)...(19): siRNA sense strand
ccgaagaugagauugaugu

SEQ ID NO: 757844 - RNA, 19 nt, Homo sapiens
  misc_RNA (1)...(19): siRNA sense strand
gaagggaaagcagcugaag

SEQ ID NO: 757845 - RNA, 19 nt, Homo sapiens
  misc_RNA (1)...(19): siRNA sense strand
guauauuugccuucugguu

SEQ ID NO: 757846 - RNA, 19 nt, Homo sapiens
  misc_RNA (1)...(19): siRNA sense strand
auuacaaucugacccugaa

SEQ ID NO: 757847 - RNA, 19 nt, Homo sapiens
  misc_RNA (1)...(19): siRNA sense strand
cuaucugacugaacugcuu

SEQ ID NO: 757848 - RNA, 19 nt, Homo sapiens
  misc_RNA (1)...(19): siRNA sense strand
gauguauauuugccuucug

SEQ ID NO: 757849 - RNA, 19 nt, Homo sapiens
  misc_RNA (1)...(19): siRNA sense strand
uguacaaugucuccaagag

SEQ ID NO: 757850 - RNA, 19 nt, Homo sapiens
  misc_RNA (1)...(19): siRNA sense strand
gaccucaucccacaaacag

SEQ ID NO: 757851 - RNA, 19 nt, Homo sapiens
  misc_RNA (1)...(19): siRNA sense strand
gcgagucagguguacaaug

SEQ ID NO: 757852 - RNA, 19 nt, Homo sapiens
  misc_RNA (1)...(19): siRNA sense strand
uccuuaagcucccagauac

SEQ ID NO: 757853 - RNA, 19 nt, Homo sapiens
  misc_RNA (1)...(19): siRNA sense strand
caugaugggcauagaaugg

SEQ ID NO: 757854 - RNA, 19 nt, Homo sapiens
  misc_RNA (1)...(19): siRNA sense strand
cuggcaggcucuagagaau

SEQ ID NO: 757855 - RNA, 19 nt, Homo sapiens
  misc_RNA (1)...(19): siRNA sense strand
uuccuuaagcucccagaua

SEQ ID NO: 757856 - RNA, 19 nt, Homo sapiens
  misc_RNA (1)...(19): siRNA sense strand
ggacuacuggcaggcucua

SEQ ID NO: 757857 - RNA, 19 nt, Homo sapiens
  misc_RNA (1)...(19): siRNA sense strand
cucggacucucuuggacua

SEQ ID NO: 757858 - RNA, 19 nt, Homo sapiens
  misc_RNA (1)...(19): siRNA sense strand
ucuccaagagcgucccaua

SEQ ID NO: 757859 - RNA, 19 nt, Homo sapiens
  misc_RNA (1)...(19): siRNA sense strand
gggcucuuuguuuguauuu

SEQ ID NO: 757860 - RNA, 19 nt, Homo sapiens
  misc_RNA (1)...(19): siRNA sense strand
gcauguacagucuaaaucc

SEQ ID NO: 757861 - RNA, 19 nt, Homo sapiens
  misc_RNA (1)...(19): siRNA sense strand
uccaagagcgucccauaca

SEQ ID NO: 757862 - RNA, 19 nt, Homo sapiens
  misc_RNA (1)...(19): siRNA sense strand
agcaagugguuugucagua

SEQ ID NO: 757863 - RNA, 19 nt, Homo sapiens
  misc_RNA (1)...(19): siRNA sense strand
ccauucagcaagugguuug

SEQ ID NO: 757864 - RNA, 19 nt, Homo sapiens
  misc_RNA (1)...(19): siRNA sense strand
gaaagcagcugaagacauu

SEQ ID NO: 757865 - RNA, 19 nt, Homo sapiens
  misc_RNA (1)...(19): siRNA sense strand
gcaagugguuugucaguaa

SEQ ID NO: 757866 - RNA, 19 nt, Homo sapiens
  misc_RNA (1)...(19): siRNA sense strand
ugacugaacugcuucugaa

SEQ ID NO: 757867 - RNA, 19 nt, Homo sapiens
  misc_RNA (1)...(19): siRNA sense strand
cgagucagguguacaaugu

SEQ ID NO: 757868 - RNA, 19 nt, Homo sapiens
  misc_RNA (1)...(19): siRNA sense strand
ucagacauguucaucaaug

SEQ ID NO: 757869 - RNA, 19 nt, Homo sapiens
  misc_RNA (1)...(19): siRNA sense strand
ggacagguacccaccauuc

SEQ ID NO: 757870 - RNA, 19 nt, Homo sapiens
  misc_RNA (1)...(19): siRNA sense strand
caagugguuugucaguaaa

SEQ ID NO: 757871 - RNA, 19 nt, Homo sapiens
  misc_RNA (1)...(19): siRNA sense strand
gagcgucccauacauuaaa

SEQ ID NO: 757872 - RNA, 19 nt, Homo sapiens
  misc_RNA (1)...(19): siRNA sense strand
caagagcgucccauacauu

SEQ ID NO: 757873 - RNA, 19 nt, Homo sapiens
  misc_RNA (1)...(19): siRNA sense strand
caagaaagacgggaacuuc

SEQ ID NO: 757874 - RNA, 19 nt, Homo sapiens
  misc_RNA (1)...(19): siRNA sense strand
gaaaacagacucagacaug

SEQ ID NO: 757875 - RNA, 19 nt, Homo sapiens
  misc_RNA (1)...(19): siRNA sense strand
gaagaugagauugauguau

SEQ ID NO: 757876 - RNA, 19 nt, Homo sapiens
  misc_RNA (1)...(19): siRNA sense strand
ggcaggcucuagagaauuc

SEQ ID NO: 757877 - RNA, 19 nt, Homo sapiens
  misc_RNA (1)...(19): siRNA sense strand
cagucuaaauccuuucaaa

SEQ ID NO: 757878 - RNA, 19 nt, Homo sapiens
  misc_RNA (1)...(19): siRNA sense strand
ggaaagcagcugaagacau

SEQ ID NO: 757879 - RNA, 19 nt, Homo sapiens
  misc_RNA (1)...(19): siRNA sense strand
acucagacauguucaucaa

SEQ ID NO: 757880 - RNA, 19 nt, Homo sapiens
  misc_RNA (1)...(19): siRNA sense strand
aagagcgucccauacauua

SEQ ID NO: 757881 - RNA, 19 nt, Homo sapiens
  misc_RNA (1)...(19): siRNA sense strand
ccaagagcgucccauacau

SEQ ID NO: 757882 - RNA, 19 nt, Homo sapiens
  misc_RNA (1)...(19): siRNA sense strand
uguacagucuaaauccuuu

SEQ ID NO: 757883 - RNA, 19 nt, Homo sapiens
  misc_RNA (1)...(19): siRNA sense strand
ucaaugaguuucccaucag

SEQ ID NO: 757884 - RNA, 19 nt, Homo sapiens
  misc_RNA (1)...(19): siRNA sense strand
agacgucuauuacaaucug

SEQ ID NO: 757885 - RNA, 19 nt, Homo sapiens
  misc_RNA (1)...(19): siRNA sense strand
gaagauuguccgccugucu

SEQ ID NO: 757886 - RNA, 19 nt, Homo sapiens
  misc_RNA (1)...(19): siRNA sense strand
gggacauuauccagaagga

SEQ ID NO: 757887 - RNA, 19 nt, Homo sapiens
  misc_RNA (1)...(19): siRNA sense strand
cgaagaugagauugaugua

SEQ ID NO: 757888 - RNA, 19 nt, Homo sapiens
  misc_RNA (1)...(19): siRNA sense strand
ggugaccucaucccacaaa

SEQ ID NO: 757889 - RNA, 19 nt, Homo sapiens
  misc_RNA (1)...(19): siRNA sense strand
ggacucucuuggacuacug

SEQ ID NO: 757890 - RNA, 19 nt, Homo sapiens
  misc_RNA (1)...(19): siRNA sense strand
cggcaccggcuacguguuu

SEQ ID NO: 757891 - RNA, 19 nt, Homo sapiens
  misc_RNA (1)...(19): siRNA sense strand
ucacuggcuucuugaaacu

SEQ ID NO: 757892 - RNA, 19 nt, Homo sapiens
  misc_RNA (1)...(19): siRNA sense strand
ccucaucccacaaacaguu

SEQ ID NO: 757893 - RNA, 19 nt, Homo sapiens
  misc_RNA (1)...(19): siRNA sense strand
uagcauguacagucuaaau

SEQ ID NO: 757894 - RNA, 19 nt, Homo sapiens
  misc_RNA (1)...(19): siRNA sense strand
ccgaagaugagauugaugu

SEQ ID NO: 757895 - RNA, 19 nt, Homo sapiens
  misc_RNA (1)...(19): siRNA sense strand
gaagggaaagcagcugaag

SEQ ID NO: 757896 - RNA, 19 nt, Homo sapiens
  misc_RNA (1)...(19): siRNA sense strand
guauauuugccuucugguu

SEQ ID NO: 757897 - RNA, 19 nt, Homo sapiens
  misc_RNA (1)...(19): siRNA sense strand
auuacaaucugacccugaa

SEQ ID NO: 757898 - RNA, 19 nt, Homo sapiens
  misc_RNA (1)...(19): siRNA sense strand
cuaucugacugaacugcuu

SEQ ID NO: 757899 - RNA, 19 nt, Homo sapiens
  misc_RNA (1)...(19): siRNA sense strand
gauguauauuugccuucug

SEQ ID NO: 757900 - RNA, 19 nt, Homo sapiens
  misc_RNA (1)...(19): siRNA sense strand
uguacaaugucuccaagag

SEQ ID NO: 757901 - RNA, 19 nt, Homo sapiens
  misc_RNA (1)...(19): siRNA sense strand
gaccucaucccacaaacag

SEQ ID NO: 757902 - RNA, 19 nt, Homo sapiens
  misc_RNA (1)...(19): siRNA sense strand
gcgagucagguguacaaug

SEQ ID NO: 757903 - RNA, 19 nt, Homo sapiens
  misc_RNA (1)...(19): siRNA sense strand
uccuuaagcucccagauac

SEQ ID NO: 757904 - RNA, 19 nt, Homo sapiens
  misc_RNA (1)...(19): siRNA sense strand
caugaugggcauagaaugg

SEQ ID NO: 757905 - RNA, 19 nt, Homo sapiens
  misc_RNA (1)...(19): siRNA sense strand
cuggcaggcucuagagaau

SEQ ID NO: 757906 - RNA, 19 nt, Homo sapiens
  misc_RNA (1)...(19): siRNA sense strand
uuccuuaagcucccagaua

SEQ ID NO: 757907 - RNA, 19 nt, Homo sapiens
  misc_RNA (1)...(19): siRNA sense strand
ggacuacuggcaggcucua

SEQ ID NO: 757908 - RNA, 19 nt, Homo sapiens
  misc_RNA (1)...(19): siRNA sense strand
cucggacucucuuggacua

SEQ ID NO: 757909 - RNA, 19 nt, Homo sapiens
  misc_RNA (1)...(19): siRNA sense strand
ucuccaagagcgucccaua

SEQ ID NO: 757910 - RNA, 19 nt, Homo sapiens
  misc_RNA (1)...(19): siRNA sense strand
gggcucuuuguuuguauuu

SEQ ID NO: 757911 - RNA, 19 nt, Homo sapiens
  misc_RNA (1)...(19): siRNA sense strand
gcauguacagucuaaaucc

SEQ ID NO: 757912 - RNA, 19 nt, Homo sapiens
  misc_RNA (1)...(19): siRNA sense strand
uccaagagcgucccauaca

SEQ ID NO: 757913 - RNA, 19 nt, Homo sapiens
  misc_RNA (1)...(19): siRNA sense strand
agcaagugguuugucagua

SEQ ID NO: 757914 - RNA, 19 nt, Homo sapiens
  misc_RNA (1)...(19): siRNA sense strand
ccauucagcaagugguuug

SEQ ID NO: 757915 - RNA, 19 nt, Homo sapiens
  misc_RNA (1)...(19): siRNA sense strand
gaaagcagcugaagacauu

SEQ ID NO: 757916 - RNA, 19 nt, Homo sapiens
  misc_RNA (1)...(19): siRNA sense strand
gcaagugguuugucaguaa

SEQ ID NO: 757917 - RNA, 19 nt, Homo sapiens
  misc_RNA (1)...(19): siRNA sense strand
ugacugaacugcuucugaa

SEQ ID NO: 757918 - RNA, 19 nt, Homo sapiens
  misc_RNA (1)...(19): siRNA sense strand
cgagucagguguacaaugu

SEQ ID NO: 757919 - RNA, 19 nt, Homo sapiens
  misc_RNA (1)...(19): siRNA sense strand
ucagacauguucaucaaug

SEQ ID NO: 757920 - RNA, 19 nt, Homo sapiens
  misc_RNA (1)...(19): siRNA sense strand
ggacagguacccaccauuc

SEQ ID NO: 757921 - RNA, 19 nt, Homo sapiens
  misc_RNA (1)...(19): siRNA sense strand
caagugguuugucaguaaa

SEQ ID NO: 757922 - RNA, 19 nt, Homo sapiens
  misc_RNA (1)...(19): siRNA sense strand
gagcgucccauacauuaaa

SEQ ID NO: 757923 - RNA, 19 nt, Homo sapiens
  misc_RNA (1)...(19): siRNA sense strand
caagagcgucccauacauu

SEQ ID NO: 757924 - RNA, 19 nt, Homo sapiens
  misc_RNA (1)...(19): siRNA sense strand
caagaaagacgggaacuuc

SEQ ID NO: 757925 - RNA, 19 nt, Homo sapiens
  misc_RNA (1)...(19): siRNA sense strand
gaaaacagacucagacaug

SEQ ID NO: 757926 - RNA, 19 nt, Homo sapiens
  misc_RNA (1)...(19): siRNA sense strand
gaagaugagauugauguau

SEQ ID NO: 757927 - RNA, 19 nt, Homo sapiens
  misc_RNA (1)...(19): siRNA sense strand
ggcaggcucuagagaauuc

SEQ ID NO: 757928 - RNA, 19 nt, Homo sapiens
  misc_RNA (1)...(19): siRNA sense strand
cagucuaaauccuuucaaa

SEQ ID NO: 757929 - RNA, 19 nt, Homo sapiens
  misc_RNA (1)...(19): siRNA sense strand
ggaaagcagcugaagacau

SEQ ID NO: 757930 - RNA, 19 nt, Homo sapiens
  misc_RNA (1)...(19): siRNA sense strand
acucagacauguucaucaa

SEQ ID NO: 757931 - RNA, 19 nt, Homo sapiens
  misc_RNA (1)...(19): siRNA sense strand
aagagcgucccauacauua

SEQ ID NO: 757932 - RNA, 19 nt, Homo sapiens
  misc_RNA (1)...(19): siRNA sense strand
ccaagagcgucccauacau

SEQ ID NO: 757933 - RNA, 19 nt, Homo sapiens
  misc_RNA (1)...(19): siRNA sense strand
uguacagucuaaauccuuu

SEQ ID NO: 757934 - RNA, 19 nt, Homo sapiens
  misc_RNA (1)...(19): siRNA sense strand
ucaaugaguuucccaucag

SEQ ID NO: 757935 - RNA, 19 nt, Homo sapiens
  misc_RNA (1)...(19): siRNA sense strand
agacgucuauuacaaucug

SEQ ID NO: 757936 - RNA, 19 nt, Homo sapiens
  misc_RNA (1)...(19): siRNA sense strand
gaagauuguccgccugucu

SEQ ID NO: 757937 - RNA, 19 nt, Homo sapiens
  misc_RNA (1)...(19): siRNA sense strand
gggacauuauccagaagga

SEQ ID NO: 757938 - RNA, 19 nt, Homo sapiens
  misc_RNA (1)...(19): siRNA sense strand
cgaagaugagauugaugua

SEQ ID NO: 757939 - RNA, 19 nt, Homo sapiens
  misc_RNA (1)...(19): siRNA sense strand
ggugaccucaucccacaaa

SEQ ID NO: 757940 - RNA, 19 nt, Homo sapiens
  misc_RNA (1)...(19): siRNA sense strand
ggacucucuuggacuacug

SEQ ID NO: 757941 - RNA, 19 nt, Homo sapiens
  misc_RNA (1)...(19): siRNA sense strand
cggcaccggcuacguguuu

SEQ ID NO: 757942 - RNA, 19 nt, Homo sapiens
  misc_RNA (1)...(19): siRNA sense strand
ucacuggcuucuugaaacu

SEQ ID NO: 757943 - RNA, 19 nt, Homo sapiens
  misc_RNA (1)...(19): siRNA sense strand
ccucaucccacaaacaguu

SEQ ID NO: 757944 - RNA, 19 nt, Homo sapiens
  misc_RNA (1)...(19): siRNA sense strand
uagcauguacagucuaaau

SEQ ID NO: 757945 - RNA, 19 nt, Homo sapiens
  misc_RNA (1)...(19): siRNA sense strand
ccgaagaugagauugaugu

SEQ ID NO: 757946 - RNA, 19 nt, Homo sapiens
  misc_RNA (1)...(19): siRNA sense strand
gaagggaaagcagcugaag

SEQ ID NO: 757947 - RNA, 19 nt, Homo sapiens
  misc_RNA (1)...(19): siRNA sense strand
guauauuugccuucugguu

SEQ ID NO: 757948 - RNA, 19 nt, Homo sapiens
  misc_RNA (1)...(19): siRNA sense strand
auuacaaucugacccugaa

SEQ ID NO: 757949 - RNA, 19 nt, Homo sapiens
  misc_RNA (1)...(19): siRNA sense strand
cuaucugacugaacugcuu

SEQ ID NO: 757950 - RNA, 19 nt, Homo sapiens
  misc_RNA (1)...(19): siRNA sense strand
gauguauauuugccuucug

SEQ ID NO: 757951 - RNA, 19 nt, Homo sapiens
  misc_RNA (1)...(19): siRNA sense strand
uguacaaugucuccaagag

SEQ ID NO: 757952 - RNA, 19 nt, Homo sapiens
  misc_RNA (1)...(19): siRNA sense strand
gaccucaucccacaaacag

SEQ ID NO: 757953 - RNA, 19 nt, Homo sapiens
  misc_RNA (1)...(19): siRNA sense strand
gcgagucagguguacaaug

SEQ ID NO: 757954 - RNA, 19 nt, Homo sapiens
  misc_RNA (1)...(19): siRNA sense strand
uccuuaagcucccagauac

SEQ ID NO: 757955 - RNA, 19 nt, Homo sapiens
  misc_RNA (1)...(19): siRNA sense strand
caugaugggcauagaaugg

SEQ ID NO: 757956 - RNA, 19 nt, Homo sapiens
  misc_RNA (1)...(19): siRNA sense strand
cuggcaggcucuagagaau

SEQ ID NO: 757957 - RNA, 19 nt, Homo sapiens
  misc_RNA (1)...(19): siRNA sense strand
uuccuuaagcucccagaua

SEQ ID NO: 757958 - RNA, 19 nt, Homo sapiens
  misc_RNA (1)...(19): siRNA sense strand
ggacuacuggcaggcucua

SEQ ID NO: 757959 - RNA, 19 nt, Homo sapiens
  misc_RNA (1)...(19): siRNA sense strand
cucggacucucuuggacua

SEQ ID NO: 757960 - RNA, 19 nt, Homo sapiens
  misc_RNA (1)...(19): siRNA sense strand
ucuccaagagcgucccaua

SEQ ID NO: 757961 - RNA, 19 nt, Homo sapiens
  misc_RNA (1)...(19): siRNA sense strand
gggcucuuuguuuguauuu

SEQ ID NO: 757962 - RNA, 19 nt, Homo sapiens
  misc_RNA (1)...(19): siRNA sense strand
gcauguacagucuaaaucc

SEQ ID NO: 757963 - RNA, 19 nt, Homo sapiens
  misc_RNA (1)...(19): siRNA sense strand
uccaagagcgucccauaca

SEQ ID NO: 757964 - RNA, 19 nt, Homo sapiens
  misc_RNA (1)...(19): siRNA sense strand
agcaagugguuugucagua

SEQ ID NO: 757965 - RNA, 19 nt, Homo sapiens
  misc_RNA (1)...(19): siRNA sense strand
ccauucagcaagugguuug

SEQ ID NO: 757966 - RNA, 19 nt, Homo sapiens
  misc_RNA (1)...(19): siRNA sense strand
gaaagcagcugaagacauu

SEQ ID NO: 757967 - RNA, 19 nt, Homo sapiens
  misc_RNA (1)...(19): siRNA sense strand
gcaagugguuugucaguaa

SEQ ID NO: 757968 - RNA, 19 nt, Homo sapiens
  misc_RNA (1)...(19): siRNA sense strand
ugacugaacugcuucugaa

SEQ ID NO: 757969 - RNA, 19 nt, Homo sapiens
  misc_RNA (1)...(19): siRNA sense strand
cgagucagguguacaaugu

SEQ ID NO: 757970 - RNA, 19 nt, Homo sapiens
  misc_RNA (1)...(19): siRNA sense strand
ucagacauguucaucaaug

SEQ ID NO: 757971 - RNA, 19 nt, Homo sapiens
  misc_RNA (1)...(19): siRNA sense strand
ggacagguacccaccauuc

SEQ ID NO: 757972 - RNA, 19 nt, Homo sapiens
  misc_RNA (1)...(19): siRNA sense strand
caagugguuugucaguaaa

SEQ ID NO: 757973 - RNA, 19 nt, Homo sapiens
  misc_RNA (1)...(19): siRNA sense strand
gagcgucccauacauuaaa

SEQ ID NO: 757974 - RNA, 19 nt, Homo sapiens
  misc_RNA (1)...(19): siRNA sense strand
caagagcgucccauacauu

SEQ ID NO: 757975 - RNA, 19 nt, Homo sapiens
  misc_RNA (1)...(19): siRNA sense strand
caagaaagacgggaacuuc

SEQ ID NO: 757976 - RNA, 19 nt, Homo sapiens
  misc_RNA (1)...(19): siRNA sense strand
gaaaacagacucagacaug

SEQ ID NO: 757977 - RNA, 19 nt, Homo sapiens
  misc_RNA (1)...(19): siRNA sense strand
gaagaugagauugauguau

SEQ ID NO: 757978 - RNA, 19 nt, Homo sapiens
  misc_RNA (1)...(19): siRNA sense strand
ggcaggcucuagagaauuc

SEQ ID NO: 757979 - RNA, 19 nt, Homo sapiens
  misc_RNA (1)...(19): siRNA sense strand
cagucuaaauccuuucaaa

SEQ ID NO: 757980 - RNA, 19 nt, Homo sapiens
  misc_RNA (1)...(19): siRNA sense strand
ggaaagcagcugaagacau

SEQ ID NO: 757981 - RNA, 19 nt, Homo sapiens
  misc_RNA (1)...(19): siRNA sense strand
acucagacauguucaucaa

SEQ ID NO: 757982 - RNA, 19 nt, Homo sapiens
  misc_RNA (1)...(19): siRNA sense strand
aagagcgucccauacauua

SEQ ID NO: 757983 - RNA, 19 nt, Homo sapiens
  misc_RNA (1)...(19): siRNA sense strand
ccaagagcgucccauacau

SEQ ID NO: 757984 - RNA, 19 nt, Homo sapiens
  misc_RNA (1)...(19): siRNA sense strand
uguacagucuaaauccuuu

SEQ ID NO: 757985 - RNA, 19 nt, Homo sapiens
  misc_RNA (1)...(19): siRNA sense strand
ucaaugaguuucccaucag

SEQ ID NO: 757986 - RNA, 19 nt, Homo sapiens
  misc_RNA (1)...(19): siRNA sense strand
agacgucuauuacaaucug

SEQ ID NO: 757987 - RNA, 19 nt, Homo sapiens
  misc_RNA (1)...(19): siRNA sense strand
gaagauuguccgccugucu

SEQ ID NO: 757988 - RNA, 19 nt, Homo sapiens
  misc_RNA (1)...(19): siRNA sense strand
gggacauuauccagaagga

SEQ ID NO: 757989 - RNA, 19 nt, Homo sapiens
  misc_RNA (1)...(19): siRNA sense strand
cgaagaugagauugaugua

SEQ ID NO: 757990 - RNA, 19 nt, Homo sapiens
  misc_RNA (1)...(19): siRNA sense strand
ggugaccucaucccacaaa

SEQ ID NO: 757991 - RNA, 19 nt, Homo sapiens
  misc_RNA (1)...(19): siRNA sense strand
ggacucucuuggacuacug

SEQ ID NO: 757992 - RNA, 19 nt, Homo sapiens
  misc_RNA (1)...(19): siRNA sense strand
cggcaccggcuacguguuu

SEQ ID NO: 757993 - RNA, 19 nt, Homo sapiens
  misc_RNA (1)...(19): siRNA sense strand
ucacuggcuucuugaaacu

SEQ ID NO: 757994 - RNA, 19 nt, Homo sapiens
  misc_RNA (1)...(19): siRNA sense strand
ccucaucccacaaacaguu

SEQ ID NO: 757995 - RNA, 19 nt, Homo sapiens
  misc_RNA (1)...(19): siRNA sense strand
uagcauguacagucuaaau

SEQ ID NO: 757996 - RNA, 19 nt, Homo sapiens
  misc_RNA (1)...(19): siRNA sense strand
ccgaagaugagauugaugu

SEQ ID NO: 757997 - RNA, 19 nt, Homo sapiens
  misc_RNA (1)...(19): siRNA sense strand
gaagggaaagcagcugaag

SEQ ID NO: 757998 - RNA, 19 nt, Homo sapiens
  misc_RNA (1)...(19): siRNA sense strand
guauauuugccuucugguu

SEQ ID NO: 757999 - RNA, 19 nt, Homo sapiens
  misc_RNA (1)...(19): siRNA sense strand
auuacaaucugacccugaa

SEQ ID NO: 758000 - RNA, 19 nt, Homo sapiens
  misc_RNA (1)...(19): siRNA sense strand
cuaucugacugaacugcuu

SEQ ID NO: 758001 - RNA, 19 nt, Homo sapiens
  misc_RNA (1)...(19): siRNA sense strand
gauguauauuugccuucug

SEQ ID NO: 758002 - RNA, 19 nt, Homo sapiens
  misc_RNA (1)...(19): siRNA sense strand
uguacaaugucuccaagag

SEQ ID NO: 758003 - RNA, 19 nt, Homo sapiens
  misc_RNA (1)...(19): siRNA sense strand
gaccucaucccacaaacag

SEQ ID NO: 758004 - RNA, 19 nt, Homo sapiens
  misc_RNA (1)...(19): siRNA sense strand
gcgagucagguguacaaug

SEQ ID NO: 758005 - RNA, 19 nt, Homo sapiens
  misc_RNA (1)...(19): siRNA sense strand
uccuuaagcucccagauac

SEQ ID NO: 758006 - RNA, 19 nt, Homo sapiens
  misc_RNA (1)...(19): siRNA sense strand
caugaugggcauagaaugg

SEQ ID NO: 758007 - RNA, 19 nt, Homo sapiens
  misc_RNA (1)...(19): siRNA sense strand
cuggcaggcucuagagaau

SEQ ID NO: 758008 - RNA, 19 nt, Homo sapiens
  misc_RNA (1)...(19): siRNA sense strand
uuccuuaagcucccagaua

SEQ ID NO: 758009 - RNA, 19 nt, Homo sapiens
  misc_RNA (1)...(19): siRNA sense strand
ggacuacuggcaggcucua

SEQ ID NO: 758010 - RNA, 19 nt, Homo sapiens
  misc_RNA (1)...(19): siRNA sense strand
cucggacucucuuggacua

SEQ ID NO: 758011 - RNA, 19 nt, Homo sapiens
  misc_RNA (1)...(19): siRNA sense strand
ucuccaagagcgucccaua

SEQ ID NO: 758012 - RNA, 19 nt, Homo sapiens
  misc_RNA (1)...(19): siRNA sense strand
gggcucuuuguuuguauuu

SEQ ID NO: 758013 - RNA, 19 nt, Homo sapiens
  misc_RNA (1)...(19): siRNA sense strand
gcauguacagucuaaaucc

SEQ ID NO: 758014 - RNA, 19 nt, Homo sapiens
  misc_RNA (1)...(19): siRNA sense strand
uccaagagcgucccauaca

SEQ ID NO: 758015 - RNA, 19 nt, Homo sapiens
  misc_RNA (1)...(19): siRNA sense strand
agcaagugguuugucagua

SEQ ID NO: 758016 - RNA, 19 nt, Homo sapiens
  misc_RNA (1)...(19): siRNA sense strand
ccauucagcaagugguuug

SEQ ID NO: 758017 - RNA, 19 nt, Homo sapiens
  misc_RNA (1)...(19): siRNA sense strand
gaaagcagcugaagacauu

SEQ ID NO: 758018 - RNA, 19 nt, Homo sapiens
  misc_RNA (1)...(19): siRNA sense strand
gcaagugguuugucaguaa

SEQ ID NO: 758019 - RNA, 19 nt, Homo sapiens
  misc_RNA (1)...(19): siRNA sense strand
ugacugaacugcuucugaa

SEQ ID NO: 758020 - RNA, 19 nt, Homo sapiens
  misc_RNA (1)...(19): siRNA sense strand
cgagucagguguacaaugu

SEQ ID NO: 758021 - RNA, 19 nt, Homo sapiens
  misc_RNA (1)...(19): siRNA sense strand
ucagacauguucaucaaug

SEQ ID NO: 758022 - RNA, 19 nt, Homo sapiens
  misc_RNA (1)...(19): siRNA sense strand
ggacagguacccaccauuc

SEQ ID NO: 758023 - RNA, 19 nt, Homo sapiens
  misc_RNA (1)...(19): siRNA sense strand
caagugguuugucaguaaa

SEQ ID NO: 758024 - RNA, 19 nt, Homo sapiens
  misc_RNA (1)...(19): siRNA sense strand
gagcgucccauacauuaaa

SEQ ID NO: 758025 - RNA, 19 nt, Homo sapiens
  misc_RNA (1)...(19): siRNA sense strand
caagagcgucccauacauu

SEQ ID NO: 758026 - RNA, 19 nt, Homo sapiens
  misc_RNA (1)...(19): siRNA sense strand
caagaaagacgggaacuuc

SEQ ID NO: 758027 - RNA, 19 nt, Homo sapiens
  misc_RNA (1)...(19): siRNA sense strand
gaaaacagacucagacaug

SEQ ID NO: 758028 - RNA, 19 nt, Homo sapiens
  misc_RNA (1)...(19): siRNA sense strand
gaagaugagauugauguau

SEQ ID NO: 758029 - RNA, 19 nt, Homo sapiens
  misc_RNA (1)...(19): siRNA sense strand
ggcaggcucuagagaauuc

SEQ ID NO: 758030 - RNA, 19 nt, Homo sapiens
  misc_RNA (1)...(19): siRNA sense strand
cagucuaaauccuuucaaa

SEQ ID NO: 758031 - RNA, 19 nt, Homo sapiens
  misc_RNA (1)...(19): siRNA sense strand
ggaaagcagcugaagacau

SEQ ID NO: 758032 - RNA, 19 nt, Homo sapiens
  misc_RNA (1)...(19): siRNA sense strand
acucagacauguucaucaa

SEQ ID NO: 758033 - RNA, 19 nt, Homo sapiens
  misc_RNA (1)...(19): siRNA sense strand
aagagcgucccauacauua

SEQ ID NO: 758034 - RNA, 19 nt, Homo sapiens
  misc_RNA (1)...(19): siRNA sense strand
ccaagagcgucccauacau

SEQ ID NO: 758035 - RNA, 19 nt, Homo sapiens
  misc_RNA (1)...(19): siRNA sense strand
uguacagucuaaauccuuu

SEQ ID NO: 758036 - RNA, 19 nt, Homo sapiens
  misc_RNA (1)...(19): siRNA sense strand
ucaaugaguuucccaucag

SEQ ID NO: 758037 - RNA, 19 nt, Homo sapiens
  misc_RNA (1)...(19): siRNA sense strand
agacgucuauuacaaucug

SEQ ID NO: 758038 - RNA, 19 nt, Homo sapiens
  misc_RNA (1)...(19): siRNA sense strand
gaagauuguccgccugucu

SEQ ID NO: 758039 - RNA, 19 nt, Homo sapiens
  misc_RNA (1)...(19): siRNA sense strand
gggacauuauccagaagga

SEQ ID NO: 758040 - RNA, 19 nt, Homo sapiens
  misc_RNA (1)...(19): siRNA sense strand
cgaagaugagauugaugua

SEQ ID NO: 758041 - RNA, 19 nt, Homo sapiens
  misc_RNA (1)...(19): siRNA sense strand
ggugaccucaucccacaaa

SEQ ID NO: 758042 - RNA, 19 nt, Homo sapiens
  misc_RNA (1)...(19): siRNA sense strand
ggacucucuuggacuacug

SEQ ID NO: 758043 - RNA, 19 nt, Homo sapiens
  misc_RNA (1)...(19): siRNA sense strand
cggcaccggcuacguguuu

SEQ ID NO: 758044 - RNA, 19 nt, Homo sapiens
  misc_RNA (1)...(19): siRNA sense strand
ucacuggcuucuugaaacu

SEQ ID NO: 758045 - RNA, 19 nt, Homo sapiens
  misc_RNA (1)...(19): siRNA sense strand
ccucaucccacaaacaguu

SEQ ID NO: 758046 - RNA, 19 nt, Homo sapiens
  misc_RNA (1)...(19): siRNA sense strand
uagcauguacagucuaaau

SEQ ID NO: 758047 - RNA, 19 nt, Homo sapiens
  misc_RNA (1)...(19): siRNA sense strand
ccgaagaugagauugaugu

SEQ ID NO: 758048 - RNA, 19 nt, Homo sapiens
  misc_RNA (1)...(19): siRNA sense strand
gaagggaaagcagcugaag

SEQ ID NO: 758049 - RNA, 19 nt, Homo sapiens
  misc_RNA (1)...(19): siRNA sense strand
guauauuugccuucugguu

SEQ ID NO: 758050 - RNA, 19 nt, Homo sapiens
  misc_RNA (1)...(19): siRNA sense strand
auuacaaucugacccugaa

SEQ ID NO: 758051 - RNA, 19 nt, Homo sapiens
  misc_RNA (1)...(19): siRNA sense strand
cuaucugacugaacugcuu

SEQ ID NO: 758052 - RNA, 19 nt, Homo sapiens
  misc_RNA (1)...(19): siRNA sense strand
gauguauauuugccuucug

SEQ ID NO: 758053 - RNA, 19 nt, Homo sapiens
  misc_RNA (1)...(19): siRNA sense strand
uguacaaugucuccaagag

SEQ ID NO: 758054 - RNA, 19 nt, Homo sapiens
  misc_RNA (1)...(19): siRNA sense strand
gaccucaucccacaaacag

SEQ ID NO: 758055 - RNA, 19 nt, Homo sapiens
  misc_RNA (1)...(19): siRNA sense strand
gcgagucagguguacaaug

SEQ ID NO: 758056 - RNA, 19 nt, Homo sapiens
  misc_RNA (1)...(19): siRNA sense strand
uccuuaagcucccagauac

SEQ ID NO: 758057 - RNA, 19 nt, Homo sapiens
  misc_RNA (1)...(19): siRNA sense strand
caugaugggcauagaaugg

SEQ ID NO: 758058 - RNA, 19 nt, Homo sapiens
  misc_RNA (1)...(19): siRNA sense strand
cuggcaggcucuagagaau

SEQ ID NO: 758059 - RNA, 19 nt, Homo sapiens
  misc_RNA (1)...(19): siRNA sense strand
uuccuuaagcucccagaua

SEQ ID NO: 758060 - RNA, 19 nt, Homo sapiens
  misc_RNA (1)...(19): siRNA sense strand
ggacuacuggcaggcucua

SEQ ID NO: 758061 - RNA, 19 nt, Homo sapiens
  misc_RNA (1)...(19): siRNA sense strand
cucggacucucuuggacua

SEQ ID NO: 758062 - RNA, 19 nt, Homo sapiens
  misc_RNA (1)...(19): siRNA sense strand
ucuccaagagcgucccaua

SEQ ID NO: 758063 - RNA, 19 nt, Homo sapiens
  misc_RNA (1)...(19): siRNA sense strand
gggcucuuuguuuguauuu

SEQ ID NO: 758064 - RNA, 19 nt, Homo sapiens
  misc_RNA (1)...(19): siRNA sense strand
gcauguacagucuaaaucc

SEQ ID NO: 758065 - RNA, 19 nt, Homo sapiens
  misc_RNA (1)...(19): siRNA sense strand
uccaagagcgucccauaca

SEQ ID NO: 758066 - RNA, 19 nt, Homo sapiens
  misc_RNA (1)...(19): siRNA sense strand
agcaagugguuugucagua

SEQ ID NO: 758067 - RNA, 19 nt, Homo sapiens
  misc_RNA (1)...(19): siRNA sense strand
ccauucagcaagugguuug

SEQ ID NO: 758068 - RNA, 19 nt, Homo sapiens
  misc_RNA (1)...(19): siRNA sense strand
gaaagcagcugaagacauu

SEQ ID NO: 758069 - RNA, 19 nt, Homo sapiens
  misc_RNA (1)...(19): siRNA sense strand
gcaagugguuugucaguaa

SEQ ID NO: 758070 - RNA, 19 nt, Homo sapiens
  misc_RNA (1)...(19): siRNA sense strand
ugacugaacugcuucugaa

SEQ ID NO: 758071 - RNA, 19 nt, Homo sapiens
  misc_RNA (1)...(19): siRNA sense strand
cgagucagguguacaaugu

SEQ ID NO: 758072 - RNA, 19 nt, Homo sapiens
  misc_RNA (1)...(19): siRNA sense strand
ucagacauguucaucaaug

SEQ ID NO: 758073 - RNA, 19 nt, Homo sapiens
  misc_RNA (1)...(19): siRNA sense strand
ggacagguacccaccauuc

SEQ ID NO: 758074 - RNA, 19 nt, Homo sapiens
  misc_RNA (1)...(19): siRNA sense strand
caagugguuugucaguaaa

SEQ ID NO: 758075 - RNA, 19 nt, Homo sapiens
  misc_RNA (1)...(19): siRNA sense strand
gagcgucccauacauuaaa

SEQ ID NO: 758076 - RNA, 19 nt, Homo sapiens
  misc_RNA (1)...(19): siRNA sense strand
caagagcgucccauacauu

SEQ ID NO: 758077 - RNA, 19 nt, Homo sapiens
  misc_RNA (1)...(19): siRNA sense strand
caagaaagacgggaacuuc

SEQ ID NO: 758078 - RNA, 19 nt, Homo sapiens
  misc_RNA (1)...(19): siRNA sense strand
gaaaacagacucagacaug

SEQ ID NO: 758079 - RNA, 19 nt, Homo sapiens
  misc_RNA (1)...(19): siRNA sense strand
gaagaugagauugauguau

SEQ ID NO: 758080 - RNA, 19 nt, Homo sapiens
  misc_RNA (1)...(19): siRNA sense strand
ggcaggcucuagagaauuc

SEQ ID NO: 758081 - RNA, 19 nt, Homo sapiens
  misc_RNA (1)...(19): siRNA sense strand
cagucuaaauccuuucaaa

SEQ ID NO: 758082 - RNA, 19 nt, Homo sapiens
  misc_RNA (1)...(19): siRNA sense strand
ggaaagcagcugaagacau

SEQ ID NO: 758083 - RNA, 19 nt, Homo sapiens
  misc_RNA (1)...(19): siRNA sense strand
acucagacauguucaucaa

SEQ ID NO: 758084 - RNA, 19 nt, Homo sapiens
  misc_RNA (1)...(19): siRNA sense strand
aagagcgucccauacauua

SEQ ID NO: 758085 - RNA, 19 nt, Homo sapiens
  misc_RNA (1)...(19): siRNA sense strand
ccaagagcgucccauacau

SEQ ID NO: 758086 - RNA, 19 nt, Homo sapiens
  misc_RNA (1)...(19): siRNA sense strand
uguacagucuaaauccuuu

SEQ ID NO: 758087 - RNA, 19 nt, Homo sapiens
  misc_RNA (1)...(19): siRNA sense strand
ucaaugaguuucccaucag

SEQ ID NO: 758088 - RNA, 19 nt, Homo sapiens
  misc_RNA (1)...(19): siRNA sense strand
agacgucuauuacaaucug

SEQ ID NO: 758089 - RNA, 19 nt, Homo sapiens
  misc_RNA (1)...(19): siRNA sense strand
gaagauuguccgccugucu

SEQ ID NO: 758090 - RNA, 19 nt, Homo sapiens
  misc_RNA (1)...(19): siRNA sense strand
gggacauuauccagaagga

SEQ ID NO: 758091 - RNA, 19 nt, Homo sapiens
  misc_RNA (1)...(19): siRNA sense strand
cgaagaugagauugaugua

SEQ ID NO: 758092 - RNA, 19 nt, Homo sapiens
  misc_RNA (1)...(19): siRNA sense strand
ggugaccucaucccacaaa

SEQ ID NO: 758093 - RNA, 19 nt, Homo sapiens
  misc_RNA (1)...(19): siRNA sense strand
ggacucucuuggacuacug

SEQ ID NO: 758094 - RNA, 19 nt, Homo sapiens
  misc_RNA (1)...(19): siRNA sense strand
cggcaccggcuacguguuu

SEQ ID NO: 758095 - RNA, 19 nt, Homo sapiens
  misc_RNA (1)...(19): siRNA sense strand
ucacuggcuucuugaaacu

SEQ ID NO: 758096 - RNA, 19 nt, Homo sapiens
  misc_RNA (1)...(19): siRNA sense strand
ccucaucccacaaacaguu

SEQ ID NO: 758097 - RNA, 19 nt, Homo sapiens
  misc_RNA (1)...(19): siRNA sense strand
uagcauguacagucuaaau

SEQ ID NO: 758098 - RNA, 19 nt, Homo sapiens
  misc_RNA (1)...(19): siRNA sense strand
ccgaagaugagauugaugu

SEQ ID NO: 758099 - RNA, 19 nt, Homo sapiens
  misc_RNA (1)...(19): siRNA sense strand
gaagggaaagcagcugaag

SEQ ID NO: 758100 - RNA, 19 nt, Homo sapiens
  misc_RNA (1)...(19): siRNA sense strand
guauauuugccuucugguu

SEQ ID NO: 758101 - RNA, 19 nt, Homo sapiens
  misc_RNA (1)...(19): siRNA sense strand
auuacaaucugacccugaa

SEQ ID NO: 758102 - RNA, 19 nt, Homo sapiens
  misc_RNA (1)...(19): siRNA sense strand
cuaucugacugaacugcuu

SEQ ID NO: 758103 - RNA, 19 nt, Homo sapiens
  misc_RNA (1)...(19): siRNA sense strand
gauguauauuugccuucug

SEQ ID NO: 758104 - RNA, 19 nt, Homo sapiens
  misc_RNA (1)...(19): siRNA sense strand
uguacaaugucuccaagag

SEQ ID NO: 758105 - RNA, 19 nt, Homo sapiens
  misc_RNA (1)...(19): siRNA sense strand
gaccucaucccacaaacag

SEQ ID NO: 758106 - RNA, 19 nt, Homo sapiens
  misc_RNA (1)...(19): siRNA sense strand
gcgagucagguguacaaug

SEQ ID NO: 758107 - RNA, 19 nt, Homo sapiens
  misc_RNA (1)...(19): siRNA sense strand
uccuuaagcucccagauac

SEQ ID NO: 758108 - RNA, 19 nt, Homo sapiens
  misc_RNA (1)...(19): siRNA sense strand
caugaugggcauagaaugg

SEQ ID NO: 758109 - RNA, 19 nt, Homo sapiens
  misc_RNA (1)...(19): siRNA sense strand
cuggcaggcucuagagaau

SEQ ID NO: 758110 - RNA, 19 nt, Homo sapiens
  misc_RNA (1)...(19): siRNA sense strand
uuccuuaagcucccagaua

SEQ ID NO: 758111 - RNA, 19 nt, Homo sapiens
  misc_RNA (1)...(19): siRNA sense strand
ggacuacuggcaggcucua

SEQ ID NO: 758112 - RNA, 19 nt, Homo sapiens
  misc_RNA (1)...(19): siRNA sense strand
cucggacucucuuggacua

SEQ ID NO: 758113 - RNA, 19 nt, Homo sapiens
  misc_RNA (1)...(19): siRNA sense strand
ucuccaagagcgucccaua

SEQ ID NO: 758114 - RNA, 19 nt, Homo sapiens
  misc_RNA (1)...(19): siRNA sense strand
gggcucuuuguuuguauuu

SEQ ID NO: 758115 - RNA, 19 nt, Homo sapiens
  misc_RNA (1)...(19): siRNA sense strand
gcauguacagucuaaaucc

SEQ ID NO: 758116 - RNA, 19 nt, Homo sapiens
  misc_RNA (1)...(19): siRNA sense strand
uccaagagcgucccauaca

SEQ ID NO: 758117 - RNA, 19 nt, Homo sapiens
  misc_RNA (1)...(19): siRNA sense strand
agcaagugguuugucagua

SEQ ID NO: 758118 - RNA, 19 nt, Homo sapiens
  misc_RNA (1)...(19): siRNA sense strand
ccauucagcaagugguuug

SEQ ID NO: 758119 - RNA, 19 nt, Homo sapiens
  misc_RNA (1)...(19): siRNA sense strand
gaaagcagcugaagacauu

SEQ ID NO: 758120 - RNA, 19 nt, Homo sapiens
  misc_RNA (1)...(19): siRNA sense strand
gcaagugguuugucaguaa

SEQ ID NO: 758121 - RNA, 19 nt, Homo sapiens
  misc_RNA (1)...(19): siRNA sense strand
ugacugaacugcuucugaa

SEQ ID NO: 758122 - RNA, 19 nt, Homo sapiens
  misc_RNA (1)...(19): siRNA sense strand
cgagucagguguacaaugu

SEQ ID NO: 758123 - RNA, 19 nt, Homo sapiens
  misc_RNA (1)...(19): siRNA sense strand
ucagacauguucaucaaug

SEQ ID NO: 758124 - RNA, 19 nt, Homo sapiens
  misc_RNA (1)...(19): siRNA sense strand
ggacagguacccaccauuc

SEQ ID NO: 758125 - RNA, 19 nt, Homo sapiens
  misc_RNA (1)...(19): siRNA sense strand
caagugguuugucaguaaa

SEQ ID NO: 758126 - RNA, 19 nt, Homo sapiens
  misc_RNA (1)...(19): siRNA sense strand
gagcgucccauacauuaaa

SEQ ID NO: 758127 - RNA, 19 nt, Homo sapiens
  misc_RNA (1)...(19): siRNA sense strand
caagagcgucccauacauu

SEQ ID NO: 758128 - RNA, 19 nt, Homo sapiens
  misc_RNA (1)...(19): siRNA sense strand
caagaaagacgggaacuuc

SEQ ID NO: 758129 - RNA, 19 nt, Homo sapiens
  misc_RNA (1)...(19): siRNA sense strand
gaaaacagacucagacaug

SEQ ID NO: 758130 - RNA, 19 nt, Homo sapiens
  misc_RNA (1)...(19): siRNA sense strand
gaagaugagauugauguau

SEQ ID NO: 758131 - RNA, 19 nt, Homo sapiens
  misc_RNA (1)...(19): siRNA sense strand
ggcaggcucuagagaauuc

SEQ ID NO: 758132 - RNA, 19 nt, Homo sapiens
  misc_RNA (1)...(19): siRNA sense strand
cagucuaaauccuuucaaa

SEQ ID NO: 758133 - RNA, 19 nt, Homo sapiens
  misc_RNA (1)...(19): siRNA sense strand
ggaaagcagcugaagacau

SEQ ID NO: 758134 - RNA, 19 nt, Homo sapiens
  misc_RNA (1)...(19): siRNA sense strand
acucagacauguucaucaa

SEQ ID NO: 758135 - RNA, 19 nt, Homo sapiens
  misc_RNA (1)...(19): siRNA sense strand
aagagcgucccauacauua

SEQ ID NO: 758136 - RNA, 19 nt, Homo sapiens
  misc_RNA (1)...(19): siRNA sense strand
ccaagagcgucccauacau

SEQ ID NO: 758137 - RNA, 19 nt, Homo sapiens
  misc_RNA (1)...(19): siRNA sense strand
uguacagucuaaauccuuu

SEQ ID NO: 758138 - RNA, 19 nt, Homo sapiens
  misc_RNA (1)...(19): siRNA sense strand
ucaaugaguuucccaucag

SEQ ID NO: 758139 - RNA, 19 nt, Homo sapiens
  misc_RNA (1)...(19): siRNA sense strand
agacgucuauuacaaucug

SEQ ID NO: 758140 - RNA, 19 nt, Homo sapiens
  misc_RNA (1)...(19): siRNA sense strand
gaagauuguccgccugucu

SEQ ID NO: 758141 - RNA, 19 nt, Homo sapiens
  misc_RNA (1)...(19): siRNA sense strand
gggacauuauccagaagga

SEQ ID NO: 758142 - RNA, 19 nt, Homo sapiens
  misc_RNA (1)...(19): siRNA sense strand
cgaagaugagauugaugua

SEQ ID NO: 758143 - RNA, 19 nt, Homo sapiens
  misc_RNA (1)...(19): siRNA sense strand
ggugaccucaucccacaaa

SEQ ID NO: 758144 - RNA, 19 nt, Homo sapiens
  misc_RNA (1)...(19): siRNA sense strand
ggacucucuuggacuacug

SEQ ID NO: 758145 - RNA, 19 nt, Homo sapiens
  misc_RNA (1)...(19): siRNA sense strand
cggcaccggcuacguguuu

SEQ ID NO: 758146 - RNA, 19 nt, Homo sapiens
  misc_RNA (1)...(19): siRNA sense strand
ucacuggcuucuugaaacu

SEQ ID NO: 758147 - RNA, 19 nt, Homo sapiens
  misc_RNA (1)...(19): siRNA sense strand
ccucaucccacaaacaguu

SEQ ID NO: 758148 - RNA, 19 nt, Homo sapiens
  misc_RNA (1)...(19): siRNA sense strand
uagcauguacagucuaaau

SEQ ID NO: 758149 - RNA, 19 nt, Homo sapiens
  misc_RNA (1)...(19): siRNA sense strand
ccgaagaugagauugaugu

SEQ ID NO: 758150 - RNA, 19 nt, Homo sapiens
  misc_RNA (1)...(19): siRNA sense strand
gaagggaaagcagcugaag

SEQ ID NO: 758151 - RNA, 19 nt, Homo sapiens
  misc_RNA (1)...(19): siRNA sense strand
guauauuugccuucugguu

SEQ ID NO: 758152 - RNA, 19 nt, Homo sapiens
  misc_RNA (1)...(19): siRNA sense strand
auuacaaucugacccugaa

SEQ ID NO: 758153 - RNA, 19 nt, Homo sapiens
  misc_RNA (1)...(19): siRNA sense strand
cuaucugacugaacugcuu

SEQ ID NO: 758154 - RNA, 19 nt, Homo sapiens
  misc_RNA (1)...(19): siRNA sense strand
gauguauauuugccuucug

SEQ ID NO: 758155 - RNA, 19 nt, Homo sapiens
  misc_RNA (1)...(19): siRNA sense strand
uguacaaugucuccaagag

SEQ ID NO: 758156 - RNA, 19 nt, Homo sapiens
  misc_RNA (1)...(19): siRNA sense strand
gaccucaucccacaaacag

SEQ ID NO: 758157 - RNA, 19 nt, Homo sapiens
  misc_RNA (1)...(19): siRNA sense strand
gcgagucagguguacaaug

SEQ ID NO: 758158 - RNA, 19 nt, Homo sapiens
  misc_RNA (1)...(19): siRNA sense strand
uccuuaagcucccagauac

SEQ ID NO: 758159 - RNA, 19 nt, Homo sapiens
  misc_RNA (1)...(19): siRNA sense strand
caugaugggcauagaaugg

SEQ ID NO: 758160 - RNA, 19 nt, Homo sapiens
  misc_RNA (1)...(19): siRNA sense strand
cuggcaggcucuagagaau

SEQ ID NO: 758161 - RNA, 19 nt, Homo sapiens
  misc_RNA (1)...(19): siRNA sense strand
uuccuuaagcucccagaua

SEQ ID NO: 758162 - RNA, 19 nt, Homo sapiens
  misc_RNA (1)...(19): siRNA sense strand
ggacuacuggcaggcucua

SEQ ID NO: 758163 - RNA, 19 nt, Homo sapiens
  misc_RNA (1)...(19): siRNA sense strand
cucggacucucuuggacua

SEQ ID NO: 758164 - RNA, 19 nt, Homo sapiens
  misc_RNA (1)...(19): siRNA sense strand
ucuccaagagcgucccaua

SEQ ID NO: 758165 - RNA, 19 nt, Homo sapiens
  misc_RNA (1)...(19): siRNA sense strand
gggcucuuuguuuguauuu

SEQ ID NO: 758166 - RNA, 19 nt, Homo sapiens
  misc_RNA (1)...(19): siRNA sense strand
gcauguacagucuaaaucc

SEQ ID NO: 758167 - RNA, 19 nt, Homo sapiens
  misc_RNA (1)...(19): siRNA sense strand
uccaagagcgucccauaca

SEQ ID NO: 758168 - RNA, 19 nt, Homo sapiens
  misc_RNA (1)...(19): siRNA sense strand
agcaagugguuugucagua

SEQ ID NO: 758169 - RNA, 19 nt, Homo sapiens
  misc_RNA (1)...(19): siRNA sense strand
ccauucagcaagugguuug

SEQ ID NO: 758170 - RNA, 19 nt, Homo sapiens
  misc_RNA (1)...(19): siRNA sense strand
gaaagcagcugaagacauu

SEQ ID NO: 758171 - RNA, 19 nt, Homo sapiens
  misc_RNA (1)...(19): siRNA sense strand
gcaagugguuugucaguaa

SEQ ID NO: 758172 - RNA, 19 nt, Homo sapiens
  misc_RNA (1)...(19): siRNA sense strand
ugacugaacugcuucugaa

SEQ ID NO: 758173 - RNA, 19 nt, Homo sapiens
  misc_RNA (1)...(19): siRNA sense strand
cgagucagguguacaaugu

SEQ ID NO: 758174 - RNA, 19 nt, Homo sapiens
  misc_RNA (1)...(19): siRNA sense strand
ucagacauguucaucaaug

SEQ ID NO: 758175 - RNA, 19 nt, Homo sapiens
  misc_RNA (1)...(19): siRNA sense strand
ggacagguacccaccauuc

SEQ ID NO: 758176 - RNA, 19 nt, Homo sapiens
  misc_RNA (1)...(19): siRNA sense strand
caagugguuugucaguaaa

SEQ ID NO: 758177 - RNA, 19 nt, Homo sapiens
  misc_RNA (1)...(19): siRNA sense strand
gagcgucccauacauuaaa

SEQ ID NO: 758178 - RNA, 19 nt, Homo sapiens
  misc_RNA (1)...(19): siRNA sense strand
caagagcgucccauacauu

SEQ ID NO: 758179 - RNA, 19 nt, Homo sapiens
  misc_RNA (1)...(19): siRNA sense strand
caagaaagacgggaacuuc

SEQ ID NO: 758180 - RNA, 19 nt, Homo sapiens
  misc_RNA (1)...(19): siRNA sense strand
gaaaacagacucagacaug

SEQ ID NO: 758181 - RNA, 19 nt, Homo sapiens
  misc_RNA (1)...(19): siRNA sense strand
gaagaugagauugauguau

SEQ ID NO: 758182 - RNA, 19 nt, Homo sapiens
  misc_RNA (1)...(19): siRNA sense strand
ggcaggcucuagagaauuc

SEQ ID NO: 758183 - RNA, 19 nt, Homo sapiens
  misc_RNA (1)...(19): siRNA sense strand
cagucuaaauccuuucaaa

SEQ ID NO: 758184 - RNA, 19 nt, Homo sapiens
  misc_RNA (1)...(19): siRNA sense strand
ggaaagcagcugaagacau

SEQ ID NO: 758185 - RNA, 19 nt, Homo sapiens
  misc_RNA (1)...(19): siRNA sense strand
acucagacauguucaucaa

SEQ ID NO: 758186 - RNA, 19 nt, Homo sapiens
  misc_RNA (1)...(19): siRNA sense strand
aagagcgucccauacauua

SEQ ID NO: 758187 - RNA, 19 nt, Homo sapiens
  misc_RNA (1)...(19): siRNA sense strand
ccaagagcgucccauacau

SEQ ID NO: 758188 - RNA, 19 nt, Homo sapiens
  misc_RNA (1)...(19): siRNA sense strand
uguacagucuaaauccuuu

SEQ ID NO: 758189 - RNA, 19 nt, Homo sapiens
  misc_RNA (1)...(19): siRNA sense strand
ucaaugaguuucccaucag

SEQ ID NO: 758190 - RNA, 19 nt, Homo sapiens
  misc_RNA (1)...(19): siRNA sense strand
agacgucuauuacaaucug

SEQ ID NO: 758191 - RNA, 19 nt, Homo sapiens
  misc_RNA (1)...(19): siRNA sense strand
gaagauuguccgccugucu

SEQ ID NO: 758192 - RNA, 19 nt, Homo sapiens
  misc_RNA (1)...(19): siRNA sense strand
gggacauuauccagaagga

SEQ ID NO: 758193 - RNA, 19 nt, Homo sapiens
  misc_RNA (1)...(19): siRNA sense strand
cgaagaugagauugaugua

SEQ ID NO: 758194 - RNA, 19 nt, Homo sapiens
  misc_RNA (1)...(19): siRNA sense strand
ggugaccucaucccacaaa

SEQ ID NO: 758195 - RNA, 19 nt, Homo sapiens
  misc_RNA (1)...(19): siRNA sense strand
ggacucucuuggacuacug

SEQ ID NO: 758196 - RNA, 19 nt, Homo sapiens
  misc_RNA (1)...(19): siRNA sense strand
cggcaccggcuacguguuu

SEQ ID NO: 758197 - RNA, 19 nt, Homo sapiens
  misc_RNA (1)...(19): siRNA sense strand
ucacuggcuucuugaaacu

SEQ ID NO: 758198 - RNA, 19 nt, Homo sapiens
  misc_RNA (1)...(19): siRNA sense strand
ccucaucccacaaacaguu

SEQ ID NO: 758199 - RNA, 19 nt, Homo sapiens
  misc_RNA (1)...(19): siRNA sense strand
uagcauguacagucuaaau

SEQ ID NO: 758200 - RNA, 19 nt, Homo sapiens
  misc_RNA (1)...(19): siRNA sense strand
ccgaagaugagauugaugu

SEQ ID NO: 758201 - RNA, 19 nt, Homo sapiens
  misc_RNA (1)...(19): siRNA sense strand
gaagggaaagcagcugaag

SEQ ID NO: 758202 - RNA, 19 nt, Homo sapiens
  misc_RNA (1)...(19): siRNA sense strand
guauauuugccuucugguu

SEQ ID NO: 758203 - RNA, 19 nt, Homo sapiens
  misc_RNA (1)...(19): siRNA sense strand
auuacaaucugacccugaa

SEQ ID NO: 758204 - RNA, 19 nt, Homo sapiens
  misc_RNA (1)...(19): siRNA sense strand
cuaucugacugaacugcuu

SEQ ID NO: 758205 - RNA, 19 nt, Homo sapiens
  misc_RNA (1)...(19): siRNA sense strand
gauguauauuugccuucug

SEQ ID NO: 758206 - RNA, 19 nt, Homo sapiens
  misc_RNA (1)...(19): siRNA sense strand
uguacaaugucuccaagag

SEQ ID NO: 758207 - RNA, 19 nt, Homo sapiens
  misc_RNA (1)...(19): siRNA sense strand
gaccucaucccacaaacag

SEQ ID NO: 758208 - RNA, 19 nt, Homo sapiens
  misc_RNA (1)...(19): siRNA sense strand
gcgagucagguguacaaug

SEQ ID NO: 758209 - RNA, 19 nt, Homo sapiens
  misc_RNA (1)...(19): siRNA sense strand
uccuuaagcucccagauac

SEQ ID NO: 758210 - RNA, 19 nt, Homo sapiens
  misc_RNA (1)...(19): siRNA sense strand
caugaugggcauagaaugg

SEQ ID NO: 758211 - RNA, 19 nt, Homo sapiens
  misc_RNA (1)...(19): siRNA sense strand
cuggcaggcucuagagaau

SEQ ID NO: 758212 - RNA, 19 nt, Homo sapiens
  misc_RNA (1)...(19): siRNA sense strand
uuccuuaagcucccagaua

SEQ ID NO: 758213 - RNA, 19 nt, Homo sapiens
  misc_RNA (1)...(19): siRNA sense strand
ggacuacuggcaggcucua

SEQ ID NO: 758214 - RNA, 19 nt, Homo sapiens
  misc_RNA (1)...(19): siRNA sense strand
cucggacucucuuggacua

SEQ ID NO: 758215 - RNA, 19 nt, Homo sapiens
  misc_RNA (1)...(19): siRNA sense strand
ucuccaagagcgucccaua

SEQ ID NO: 758216 - RNA, 19 nt, Homo sapiens
  misc_RNA (1)...(19): siRNA sense strand
gggcucuuuguuuguauuu

SEQ ID NO: 758217 - RNA, 19 nt, Homo sapiens
  misc_RNA (1)...(19): siRNA sense strand
gcauguacagucuaaaucc

SEQ ID NO: 758218 - RNA, 19 nt, Homo sapiens
  misc_RNA (1)...(19): siRNA sense strand
uccaagagcgucccauaca

SEQ ID NO: 758219 - RNA, 19 nt, Homo sapiens
  misc_RNA (1)...(19): siRNA sense strand
agcaagugguuugucagua

SEQ ID NO: 758220 - RNA, 19 nt, Homo sapiens
  misc_RNA (1)...(19): siRNA sense strand
ccauucagcaagugguuug

SEQ ID NO: 758221 - RNA, 19 nt, Homo sapiens
  misc_RNA (1)...(19): siRNA sense strand
gaaagcagcugaagacauu

SEQ ID NO: 758222 - RNA, 19 nt, Homo sapiens
  misc_RNA (1)...(19): siRNA sense strand
gcaagugguuugucaguaa

SEQ ID NO: 758223 - RNA, 19 nt, Homo sapiens
  misc_RNA (1)...(19): siRNA sense strand
ugacugaacugcuucugaa

SEQ ID NO: 758224 - RNA, 19 nt, Homo sapiens
  misc_RNA (1)...(19): siRNA sense strand
cgagucagguguacaaugu

SEQ ID NO: 758225 - RNA, 19 nt, Homo sapiens
  misc_RNA (1)...(19): siRNA sense strand
ucagacauguucaucaaug

SEQ ID NO: 758226 - RNA, 19 nt, Homo sapiens
  misc_RNA (1)...(19): siRNA sense strand
ggacagguacccaccauuc

SEQ ID NO: 758227 - RNA, 19 nt, Homo sapiens
  misc_RNA (1)...(19): siRNA sense strand
caagugguuugucaguaaa

SEQ ID NO: 758228 - RNA, 19 nt, Homo sapiens
  misc_RNA (1)...(19): siRNA sense strand
gagcgucccauacauuaaa

SEQ ID NO: 758229 - RNA, 19 nt, Homo sapiens
  misc_RNA (1)...(19): siRNA sense strand
caagagcgucccauacauu

SEQ ID NO: 758230 - RNA, 19 nt, Homo sapiens
  misc_RNA (1)...(19): siRNA sense strand
caagaaagacgggaacuuc

SEQ ID NO: 758231 - RNA, 19 nt, Homo sapiens
  misc_RNA (1)...(19): siRNA sense strand
gaaaacagacucagacaug

SEQ ID NO: 758232 - RNA, 19 nt, Homo sapiens
  misc_RNA (1)...(19): siRNA sense strand
gaagaugagauugauguau

SEQ ID NO: 758233 - RNA, 19 nt, Homo sapiens
  misc_RNA (1)...(19): siRNA sense strand
ggcaggcucuagagaauuc

SEQ ID NO: 758234 - RNA, 19 nt, Homo sapiens
  misc_RNA (1)...(19): siRNA sense strand
cagucuaaauccuuucaaa

SEQ ID NO: 758235 - RNA, 19 nt, Homo sapiens
  misc_RNA (1)...(19): siRNA sense strand
ggaaagcagcugaagacau

SEQ ID NO: 758236 - RNA, 19 nt, Homo sapiens
  misc_RNA (1)...(19): siRNA sense strand
acucagacauguucaucaa

SEQ ID NO: 758237 - RNA, 19 nt, Homo sapiens
  misc_RNA (1)...(19): siRNA sense strand
aagagcgucccauacauua

SEQ ID NO: 758238 - RNA, 19 nt, Homo sapiens
  misc_RNA (1)...(19): siRNA sense strand
ccaagagcgucccauacau

SEQ ID NO: 758239 - RNA, 19 nt, Homo sapiens
  misc_RNA (1)...(19): siRNA sense strand
uguacagucuaaauccuuu

SEQ ID NO: 758240 - RNA, 19 nt, Homo sapiens
  misc_RNA (1)...(19): siRNA sense strand
ucaaugaguuucccaucag

SEQ ID NO: 758241 - RNA, 19 nt, Homo sapiens
  misc_RNA (1)...(19): siRNA sense strand
agacgucuauuacaaucug

SEQ ID NO: 758242 - RNA, 19 nt, Homo sapiens
  misc_RNA (1)...(19): siRNA sense strand
gaagauuguccgccugucu

SEQ ID NO: 758243 - RNA, 19 nt, Homo sapiens
  misc_RNA (1)...(19): siRNA sense strand
gggacauuauccagaagga

SEQ ID NO: 758244 - RNA, 19 nt, Homo sapiens
  misc_RNA (1)...(19): siRNA sense strand
cgaagaugagauugaugua

SEQ ID NO: 758245 - RNA, 19 nt, Homo sapiens
  misc_RNA (1)...(19): siRNA sense strand
ggugaccucaucccacaaa

SEQ ID NO: 758246 - RNA, 19 nt, Homo sapiens
  misc_RNA (1)...(19): siRNA sense strand
ggacucucuuggacuacug

SEQ ID NO: 758247 - RNA, 19 nt, Homo sapiens
  misc_RNA (1)...(19): siRNA sense strand
cggcaccggcuacguguuu

SEQ ID NO: 758248 - RNA, 19 nt, Homo sapiens
  misc_RNA (1)...(19): siRNA sense strand
ucacuggcuucuugaaacu

SEQ ID NO: 758249 - RNA, 19 nt, Homo sapiens
  misc_RNA (1)...(19): siRNA sense strand
ccucaucccacaaacaguu

SEQ ID NO: 758250 - RNA, 19 nt, Homo sapiens
  misc_RNA (1)...(19): siRNA sense strand
uagcauguacagucuaaau

SEQ ID NO: 758251 - RNA, 19 nt, Homo sapiens
  misc_RNA (1)...(19): siRNA sense strand
ccgaagaugagauugaugu

SEQ ID NO: 758252 - RNA, 19 nt, Homo sapiens
  misc_RNA (1)...(19): siRNA sense strand
gaagggaaagcagcugaag

SEQ ID NO: 758253 - RNA, 19 nt, Homo sapiens
  misc_RNA (1)...(19): siRNA sense strand
guauauuugccuucugguu

SEQ ID NO: 758254 - RNA, 19 nt, Homo sapiens
  misc_RNA (1)...(19): siRNA sense strand
auuacaaucugacccugaa

SEQ ID NO: 758255 - RNA, 19 nt, Homo sapiens
  misc_RNA (1)...(19): siRNA sense strand
cuaucugacugaacugcuu

SEQ ID NO: 758256 - RNA, 19 nt, Homo sapiens
  misc_RNA (1)...(19): siRNA sense strand
gauguauauuugccuucug

SEQ ID NO: 758257 - RNA, 19 nt, Homo sapiens
  misc_RNA (1)...(19): siRNA sense strand
uguacaaugucuccaagag

SEQ ID NO: 758258 - RNA, 19 nt, Homo sapiens
  misc_RNA (1)...(19): siRNA sense strand
gaccucaucccacaaacag

SEQ ID NO: 758259 - RNA, 19 nt, Homo sapiens
  misc_RNA (1)...(19): siRNA sense strand
gcgagucagguguacaaug

SEQ ID NO: 758260 - RNA, 19 nt, Homo sapiens
  misc_RNA (1)...(19): siRNA sense strand
uccuuaagcucccagauac

SEQ ID NO: 758261 - RNA, 19 nt, Homo sapiens
  misc_RNA (1)...(19): siRNA sense strand
caugaugggcauagaaugg

SEQ ID NO: 758262 - RNA, 19 nt, Homo sapiens
  misc_RNA (1)...(19): siRNA sense strand
cuggcaggcucuagagaau

SEQ ID NO: 758263 - RNA, 19 nt, Homo sapiens
  misc_RNA (1)...(19): siRNA sense strand
uuccuuaagcucccagaua

SEQ ID NO: 758264 - RNA, 19 nt, Homo sapiens
  misc_RNA (1)...(19): siRNA sense strand
ggacuacuggcaggcucua

SEQ ID NO: 758265 - RNA, 19 nt, Homo sapiens
  misc_RNA (1)...(19): siRNA sense strand
cucggacucucuuggacua

SEQ ID NO: 758266 - RNA, 19 nt, Homo sapiens
  misc_RNA (1)...(19): siRNA sense strand
ucuccaagagcgucccaua

SEQ ID NO: 758267 - RNA, 19 nt, Homo sapiens
  misc_RNA (1)...(19): siRNA sense strand
gggcucuuuguuuguauuu

SEQ ID NO: 758268 - RNA, 19 nt, Homo sapiens
  misc_RNA (1)...(19): siRNA sense strand
gcauguacagucuaaaucc

SEQ ID NO: 758269 - RNA, 19 nt, Homo sapiens
  misc_RNA (1)...(19): siRNA sense strand
uccaagagcgucccauaca

SEQ ID NO: 758270 - RNA, 19 nt, Homo sapiens
  misc_RNA (1)...(19): siRNA sense strand
agcaagugguuugucagua

SEQ ID NO: 758271 - RNA, 19 nt, Homo sapiens
  misc_RNA (1)...(19): siRNA sense strand
ccauucagcaagugguuug

SEQ ID NO: 758272 - RNA, 19 nt, Homo sapiens
  misc_RNA (1)...(19): siRNA sense strand
gaaagcagcugaagacauu

SEQ ID NO: 758273 - RNA, 19 nt, Homo sapiens
  misc_RNA (1)...(19): siRNA sense strand
gcaagugguuugucaguaa

SEQ ID NO: 758274 - RNA, 19 nt, Homo sapiens
  misc_RNA (1)...(19): siRNA sense strand
ugacugaacugcuucugaa

SEQ ID NO: 758275 - RNA, 19 nt, Homo sapiens
  misc_RNA (1)...(19): siRNA sense strand
cgagucagguguacaaugu

SEQ ID NO: 758276 - RNA, 19 nt, Homo sapiens
  misc_RNA (1)...(19): siRNA sense strand
ucagacauguucaucaaug

SEQ ID NO: 758277 - RNA, 19 nt, Homo sapiens
  misc_RNA (1)...(19): siRNA sense strand
ggacagguacccaccauuc

SEQ ID NO: 758278 - RNA, 19 nt, Homo sapiens
  misc_RNA (1)...(19): siRNA sense strand
caagugguuugucaguaaa

SEQ ID NO: 758279 - RNA, 19 nt, Homo sapiens
  misc_RNA (1)...(19): siRNA sense strand
gagcgucccauacauuaaa

SEQ ID NO: 758280 - RNA, 19 nt, Homo sapiens
  misc_RNA (1)...(19): siRNA sense strand
caagagcgucccauacauu

SEQ ID NO: 758281 - RNA, 19 nt, Homo sapiens
  misc_RNA (1)...(19): siRNA sense strand
caagaaagacgggaacuuc

SEQ ID NO: 758282 - RNA, 19 nt, Homo sapiens
  misc_RNA (1)...(19): siRNA sense strand
gaaaacagacucagacaug

SEQ ID NO: 758283 - RNA, 19 nt, Homo sapiens
  misc_RNA (1)...(19): siRNA sense strand
gaagaugagauugauguau

SEQ ID NO: 758284 - RNA, 19 nt, Homo sapiens
  misc_RNA (1)...(19): siRNA sense strand
ggcaggcucuagagaauuc

SEQ ID NO: 758285 - RNA, 19 nt, Homo sapiens
  misc_RNA (1)...(19): siRNA sense strand
cagucuaaauccuuucaaa

SEQ ID NO: 758286 - RNA, 19 nt, Homo sapiens
  misc_RNA (1)...(19): siRNA sense strand
ggaaagcagcugaagacau

SEQ ID NO: 758287 - RNA, 19 nt, Homo sapiens
  misc_RNA (1)...(19): siRNA sense strand
acucagacauguucaucaa

SEQ ID NO: 758288 - RNA, 19 nt, Homo sapiens
  misc_RNA (1)...(19): siRNA sense strand
aagagcgucccauacauua

SEQ ID NO: 758289 - RNA, 19 nt, Homo sapiens
  misc_RNA (1)...(19): siRNA sense strand
ccaagagcgucccauacau

SEQ ID NO: 758290 - RNA, 19 nt, Homo sapiens
  misc_RNA (1)...(19): siRNA sense strand
uguacagucuaaauccuuu

SEQ ID NO: 758291 - RNA, 19 nt, Homo sapiens
  misc_RNA (1)...(19): siRNA sense strand
ucaaugaguuucccaucag

SEQ ID NO: 758292 - RNA, 19 nt, Homo sapiens
  misc_RNA (1)...(19): siRNA sense strand
agacgucuauuacaaucug

SEQ ID NO: 758293 - RNA, 19 nt, Homo sapiens
  misc_RNA (1)...(19): siRNA sense strand
gaagauuguccgccugucu

SEQ ID NO: 758294 - RNA, 19 nt, Homo sapiens
  misc_RNA (1)...(19): siRNA sense strand
gggacauuauccagaagga

SEQ ID NO: 758295 - RNA, 19 nt, Homo sapiens
  misc_RNA (1)...(19): siRNA sense strand
cgaagaugagauugaugua

SEQ ID NO: 758296 - RNA, 19 nt, Homo sapiens
  misc_RNA (1)...(19): siRNA sense strand
ggugaccucaucccacaaa

SEQ ID NO: 758297 - RNA, 19 nt, Homo sapiens
  misc_RNA (1)...(19): siRNA sense strand
ggacucucuuggacuacug

SEQ ID NO: 758298 - RNA, 19 nt, Homo sapiens
  misc_RNA (1)...(19): siRNA sense strand
cggcaccggcuacguguuu

SEQ ID NO: 758299 - RNA, 19 nt, Homo sapiens
  misc_RNA (1)...(19): siRNA sense strand
ucacuggcuucuugaaacu

SEQ ID NO: 758300 - RNA, 19 nt, Homo sapiens
  misc_RNA (1)...(19): siRNA sense strand
ccucaucccacaaacaguu

SEQ ID NO: 758301 - RNA, 19 nt, Homo sapiens
  misc_RNA (1)...(19): siRNA sense strand
uagcauguacagucuaaau

SEQ ID NO: 758302 - RNA, 19 nt, Homo sapiens
  misc_RNA (1)...(19): siRNA sense strand
ccgaagaugagauugaugu

SEQ ID NO: 758303 - RNA, 19 nt, Homo sapiens
  misc_RNA (1)...(19): siRNA sense strand
gaagggaaagcagcugaag

SEQ ID NO: 758304 - RNA, 19 nt, Homo sapiens
  misc_RNA (1)...(19): siRNA sense strand
guauauuugccuucugguu

SEQ ID NO: 758305 - RNA, 19 nt, Homo sapiens
  misc_RNA (1)...(19): siRNA sense strand
auuacaaucugacccugaa

SEQ ID NO: 758306 - RNA, 19 nt, Homo sapiens
  misc_RNA (1)...(19): siRNA sense strand
cuaucugacugaacugcuu

SEQ ID NO: 758307 - RNA, 19 nt, Homo sapiens
  misc_RNA (1)...(19): siRNA sense strand
gauguauauuugccuucug

SEQ ID NO: 758308 - RNA, 19 nt, Homo sapiens
  misc_RNA (1)...(19): siRNA sense strand
uguacaaugucuccaagag

SEQ ID NO: 758309 - RNA, 19 nt, Homo sapiens
  misc_RNA (1)...(19): siRNA sense strand
gaccucaucccacaaacag

SEQ ID NO: 758310 - RNA, 19 nt, Homo sapiens
  misc_RNA (1)...(19): siRNA sense strand
gcgagucagguguacaaug

SEQ ID NO: 758311 - RNA, 19 nt, Homo sapiens
  misc_RNA (1)...(19): siRNA sense strand
uccuuaagcucccagauac

SEQ ID NO: 758312 - RNA, 19 nt, Homo sapiens
  misc_RNA (1)...(19): siRNA sense strand
caugaugggcauagaaugg

SEQ ID NO: 758313 - RNA, 19 nt, Homo sapiens
  misc_RNA (1)...(19): siRNA sense strand
cuggcaggcucuagagaau

SEQ ID NO: 758314 - RNA, 19 nt, Homo sapiens
  misc_RNA (1)...(19): siRNA sense strand
uuccuuaagcucccagaua

SEQ ID NO: 758315 - RNA, 19 nt, Homo sapiens
  misc_RNA (1)...(19): siRNA sense strand
ggacuacuggcaggcucua

SEQ ID NO: 758316 - RNA, 19 nt, Homo sapiens
  misc_RNA (1)...(19): siRNA sense strand
cucggacucucuuggacua

SEQ ID NO: 758317 - RNA, 19 nt, Homo sapiens
  misc_RNA (1)...(19): siRNA sense strand
ucuccaagagcgucccaua

SEQ ID NO: 758318 - RNA, 19 nt, Homo sapiens
  misc_RNA (1)...(19): siRNA sense strand
gggcucuuuguuuguauuu

SEQ ID NO: 758319 - RNA, 19 nt, Homo sapiens
  misc_RNA (1)...(19): siRNA sense strand
gcauguacagucuaaaucc

SEQ ID NO: 758320 - RNA, 19 nt, Homo sapiens
  misc_RNA (1)...(19): siRNA sense strand
uccaagagcgucccauaca

SEQ ID NO: 758321 - RNA, 19 nt, Homo sapiens
  misc_RNA (1)...(19): siRNA sense strand
agcaagugguuugucagua

SEQ ID NO: 758322 - RNA, 19 nt, Homo sapiens
  misc_RNA (1)...(19): siRNA sense strand
ccauucagcaagugguuug

SEQ ID NO: 758323 - RNA, 19 nt, Homo sapiens
  misc_RNA (1)...(19): siRNA sense strand
gaaagcagcugaagacauu

SEQ ID NO: 758324 - RNA, 19 nt, Homo sapiens
  misc_RNA (1)...(19): siRNA sense strand
gcaagugguuugucaguaa

SEQ ID NO: 758325 - RNA, 19 nt, Homo sapiens
  misc_RNA (1)...(19): siRNA sense strand
ugacugaacugcuucugaa

SEQ ID NO: 758326 - RNA, 19 nt, Homo sapiens
  misc_RNA (1)...(19): siRNA sense strand
cgagucagguguacaaugu

SEQ ID NO: 758327 - RNA, 19 nt, Homo sapiens
  misc_RNA (1)...(19): siRNA sense strand
ucagacauguucaucaaug

SEQ ID NO: 758328 - RNA, 19 nt, Homo sapiens
  misc_RNA (1)...(19): siRNA sense strand
ggacagguacccaccauuc

SEQ ID NO: 758329 - RNA, 19 nt, Homo sapiens
  misc_RNA (1)...(19): siRNA sense strand
caagugguuugucaguaaa

SEQ ID NO: 758330 - RNA, 19 nt, Homo sapiens
  misc_RNA (1)...(19): siRNA sense strand
gagcgucccauacauuaaa

SEQ ID NO: 758331 - RNA, 19 nt, Homo sapiens
  misc_RNA (1)...(19): siRNA sense strand
caagagcgucccauacauu

SEQ ID NO: 758332 - RNA, 19 nt, Homo sapiens
  misc_RNA (1)...(19): siRNA sense strand
caagaaagacgggaacuuc

SEQ ID NO: 758333 - RNA, 19 nt, Homo sapiens
  misc_RNA (1)...(19): siRNA sense strand
gaaaacagacucagacaug

SEQ ID NO: 758334 - RNA, 19 nt, Homo sapiens
  misc_RNA (1)...(19): siRNA sense strand
gaagaugagauugauguau

SEQ ID NO: 758335 - RNA, 19 nt, Homo sapiens
  misc_RNA (1)...(19): siRNA sense strand
ggcaggcucuagagaauuc

SEQ ID NO: 758336 - RNA, 19 nt, Homo sapiens
  misc_RNA (1)...(19): siRNA sense strand
cagucuaaauccuuucaaa

SEQ ID NO: 758337 - RNA, 19 nt, Homo sapiens
  misc_RNA (1)...(19): siRNA sense strand
ggaaagcagcugaagacau

SEQ ID NO: 758338 - RNA, 19 nt, Homo sapiens
  misc_RNA (1)...(19): siRNA sense strand
acucagacauguucaucaa

SEQ ID NO: 758339 - RNA, 19 nt, Homo sapiens
  misc_RNA (1)...(19): siRNA sense strand
aagagcgucccauacauua

SEQ ID NO: 758340 - RNA, 19 nt, Homo sapiens
  misc_RNA (1)...(19): siRNA sense strand
ccaagagcgucccauacau

SEQ ID NO: 758341 - RNA, 19 nt, Homo sapiens
  misc_RNA (1)...(19): siRNA sense strand
uguacagucuaaauccuuu

SEQ ID NO: 758342 - RNA, 19 nt, Homo sapiens
  misc_RNA (1)...(19): siRNA sense strand
ucaaugaguuucccaucag

SEQ ID NO: 758343 - RNA, 19 nt, Homo sapiens
  misc_RNA (1)...(19): siRNA sense strand
agacgucuauuacaaucug

SEQ ID NO: 758344 - RNA, 19 nt, Homo sapiens
  misc_RNA (1)...(19): siRNA sense strand
gaagauuguccgccugucu

SEQ ID NO: 758345 - RNA, 19 nt, Homo sapiens
  misc_RNA (1)...(19): siRNA sense strand
gggacauuauccagaagga

SEQ ID NO: 758346 - RNA, 19 nt, Homo sapiens
  misc_RNA (1)...(19): siRNA sense strand
cgaagaugagauugaugua

SEQ ID NO: 758347 - RNA, 19 nt, Homo sapiens
  misc_RNA (1)...(19): siRNA sense strand
ggugaccucaucccacaaa

SEQ ID NO: 758348 - RNA, 19 nt, Homo sapiens
  misc_RNA (1)...(19): siRNA sense strand
ggacucucuuggacuacug

SEQ ID NO: 758349 - RNA, 19 nt, Homo sapiens
  misc_RNA (1)...(19): siRNA sense strand
cggcaccggcuacguguuu

SEQ ID NO: 758350 - RNA, 19 nt, Homo sapiens
  misc_RNA (1)...(19): siRNA sense strand
ucacuggcuucuugaaacu

SEQ ID NO: 758351 - RNA, 19 nt, Homo sapiens
  misc_RNA (1)...(19): siRNA sense strand
ccucaucccacaaacaguu

SEQ ID NO: 758352 - RNA, 19 nt, Homo sapiens
  misc_RNA (1)...(19): siRNA sense strand
uagcauguacagucuaaau

SEQ ID NO: 758353 - RNA, 19 nt, Homo sapiens
  misc_RNA (1)...(19): siRNA sense strand
ccgaagaugagauugaugu

SEQ ID NO: 758354 - RNA, 19 nt, Homo sapiens
  misc_RNA (1)...(19): siRNA sense strand
gaagggaaagcagcugaag

SEQ ID NO: 758355 - RNA, 19 nt, Homo sapiens
  misc_RNA (1)...(19): siRNA sense strand
guauauuugccuucugguu

SEQ ID NO: 758356 - RNA, 19 nt, Homo sapiens
  misc_RNA (1)...(19): siRNA sense strand
auuacaaucugacccugaa

SEQ ID NO: 758357 - RNA, 19 nt, Homo sapiens
  misc_RNA (1)...(19): siRNA sense strand
cuaucugacugaacugcuu

SEQ ID NO: 758358 - RNA, 19 nt, Homo sapiens
  misc_RNA (1)...(19): siRNA sense strand
gauguauauuugccuucug

SEQ ID NO: 758359 - RNA, 19 nt, Homo sapiens
  misc_RNA (1)...(19): siRNA sense strand
uguacaaugucuccaagag

SEQ ID NO: 758360 - RNA, 19 nt, Homo sapiens
  misc_RNA (1)...(19): siRNA sense strand
gaccucaucccacaaacag

SEQ ID NO: 758361 - RNA, 19 nt, Homo sapiens
  misc_RNA (1)...(19): siRNA sense strand
gcgagucagguguacaaug

SEQ ID NO: 758362 - RNA, 19 nt, Homo sapiens
  misc_RNA (1)...(19): siRNA sense strand
uccuuaagcucccagauac

SEQ ID NO: 758363 - RNA, 19 nt, Homo sapiens
  misc_RNA (1)...(19): siRNA sense strand
caugaugggcauagaaugg

SEQ ID NO: 758364 - RNA, 19 nt, Homo sapiens
  misc_RNA (1)...(19): siRNA sense strand
cuggcaggcucuagagaau

SEQ ID NO: 758365 - RNA, 19 nt, Homo sapiens
  misc_RNA (1)...(19): siRNA sense strand
uuccuuaagcucccagaua

SEQ ID NO: 758366 - RNA, 19 nt, Homo sapiens
  misc_RNA (1)...(19): siRNA sense strand
ggacuacuggcaggcucua

SEQ ID NO: 758367 - RNA, 19 nt, Homo sapiens
  misc_RNA (1)...(19): siRNA sense strand
cucggacucucuuggacua

SEQ ID NO: 758368 - RNA, 19 nt, Homo sapiens
  misc_RNA (1)...(19): siRNA sense strand
ucuccaagagcgucccaua

SEQ ID NO: 758369 - RNA, 19 nt, Homo sapiens
  misc_RNA (1)...(19): siRNA sense strand
gggcucuuuguuuguauuu

SEQ ID NO: 758370 - RNA, 19 nt, Homo sapiens
  misc_RNA (1)...(19): siRNA sense strand
gcauguacagucuaaaucc

SEQ ID NO: 758371 - RNA, 19 nt, Homo sapiens
  misc_RNA (1)...(19): siRNA sense strand
uccaagagcgucccauaca

SEQ ID NO: 758372 - RNA, 19 nt, Homo sapiens
  misc_RNA (1)...(19): siRNA sense strand
agcaagugguuugucagua

SEQ ID NO: 758373 - RNA, 19 nt, Homo sapiens
  misc_RNA (1)...(19): siRNA sense strand
ccauucagcaagugguuug

SEQ ID NO: 758374 - RNA, 19 nt, Homo sapiens
  misc_RNA (1)...(19): siRNA sense strand
gaaagcagcugaagacauu

SEQ ID NO: 758375 - RNA, 19 nt, Homo sapiens
  misc_RNA (1)...(19): siRNA sense strand
gcaagugguuugucaguaa

SEQ ID NO: 758376 - RNA, 19 nt, Homo sapiens
  misc_RNA (1)...(19): siRNA sense strand
ugacugaacugcuucugaa

SEQ ID NO: 758377 - RNA, 19 nt, Homo sapiens
  misc_RNA (1)...(19): siRNA sense strand
cgagucagguguacaaugu

SEQ ID NO: 758378 - RNA, 19 nt, Homo sapiens
  misc_RNA (1)...(19): siRNA sense strand
ucagacauguucaucaaug

SEQ ID NO: 758379 - RNA, 19 nt, Homo sapiens
  misc_RNA (1)...(19): siRNA sense strand
ggacagguacccaccauuc

SEQ ID NO: 758380 - RNA, 19 nt, Homo sapiens
  misc_RNA (1)...(19): siRNA sense strand
caagugguuugucaguaaa

SEQ ID NO: 758381 - RNA, 19 nt, Homo sapiens
  misc_RNA (1)...(19): siRNA sense strand
gagcgucccauacauuaaa

SEQ ID NO: 758382 - RNA, 19 nt, Homo sapiens
  misc_RNA (1)...(19): siRNA sense strand
caagagcgucccauacauu

SEQ ID NO: 758383 - RNA, 19 nt, Homo sapiens
  misc_RNA (1)...(19): siRNA sense strand
caagaaagacgggaacuuc

SEQ ID NO: 758384 - RNA, 19 nt, Homo sapiens
  misc_RNA (1)...(19): siRNA sense strand
gaaaacagacucagacaug

SEQ ID NO: 758385 - RNA, 19 nt, Homo sapiens
  misc_RNA (1)...(19): siRNA sense strand
gaagaugagauugauguau

SEQ ID NO: 758386 - RNA, 19 nt, Homo sapiens
  misc_RNA (1)...(19): siRNA sense strand
ggcaggcucuagagaauuc

SEQ ID NO: 758387 - RNA, 19 nt, Homo sapiens
  misc_RNA (1)...(19): siRNA sense strand
cagucuaaauccuuucaaa

SEQ ID NO: 758388 - RNA, 19 nt, Homo sapiens
  misc_RNA (1)...(19): siRNA sense strand
ggaaagcagcugaagacau

SEQ ID NO: 758389 - RNA, 19 nt, Homo sapiens
  misc_RNA (1)...(19): siRNA sense strand
acucagacauguucaucaa

SEQ ID NO: 758390 - RNA, 19 nt, Homo sapiens
  misc_RNA (1)...(19): siRNA sense strand
aagagcgucccauacauua

SEQ ID NO: 758391 - RNA, 19 nt, Homo sapiens
  misc_RNA (1)...(19): siRNA sense strand
ccaagagcgucccauacau

SEQ ID NO: 758392 - RNA, 19 nt, Homo sapiens
  misc_RNA (1)...(19): siRNA sense strand
uguacagucuaaauccuuu

SEQ ID NO: 758393 - RNA, 19 nt, Homo sapiens
  misc_RNA (1)...(19): siRNA sense strand
ucaaugaguuucccaucag

SEQ ID NO: 758394 - RNA, 19 nt, Homo sapiens
  misc_RNA (1)...(19): siRNA sense strand
agacgucuauuacaaucug

SEQ ID NO: 758395 - RNA, 19 nt, Homo sapiens
  misc_RNA (1)...(19): siRNA sense strand
gaagauuguccgccugucu

SEQ ID NO: 758396 - RNA, 19 nt, Homo sapiens
  misc_RNA (1)...(19): siRNA sense strand
gggacauuauccagaagga

SEQ ID NO: 758397 - RNA, 19 nt, Homo sapiens
  misc_RNA (1)...(19): siRNA sense strand
cgaagaugagauugaugua

SEQ ID NO: 758398 - RNA, 19 nt, Homo sapiens
  misc_RNA (1)...(19): siRNA sense strand
ggugaccucaucccacaaa

SEQ ID NO: 758399 - RNA, 19 nt, Homo sapiens
  misc_RNA (1)...(19): siRNA sense strand
ggacucucuuggacuacug

SEQ ID NO: 758400 - RNA, 19 nt, Homo sapiens
  misc_RNA (1)...(19): siRNA sense strand
cggcaccggcuacguguuu

SEQ ID NO: 758401 - RNA, 19 nt, Homo sapiens
  misc_RNA (1)...(19): siRNA sense strand
ucacuggcuucuugaaacu

SEQ ID NO: 758402 - RNA, 19 nt, Homo sapiens
  misc_RNA (1)...(19): siRNA sense strand
ccucaucccacaaacaguu

SEQ ID NO: 758403 - RNA, 19 nt, Homo sapiens
  misc_RNA (1)...(19): siRNA sense strand
uagcauguacagucuaaau

SEQ ID NO: 758404 - RNA, 19 nt, Homo sapiens
  misc_RNA (1)...(19): siRNA sense strand
ccgaagaugagauugaugu

SEQ ID NO: 758405 - RNA, 19 nt, Homo sapiens
  misc_RNA (1)...(19): siRNA sense strand
gaagggaaagcagcugaag

SEQ ID NO: 758406 - RNA, 19 nt, Homo sapiens
  misc_RNA (1)...(19): siRNA sense strand
guauauuugccuucugguu

SEQ ID NO: 758407 - RNA, 19 nt, Homo sapiens
  misc_RNA (1)...(19): siRNA sense strand
auuacaaucugacccugaa

SEQ ID NO: 758408 - RNA, 19 nt, Homo sapiens
  misc_RNA (1)...(19): siRNA sense strand
cuaucugacugaacugcuu

SEQ ID NO: 758409 - RNA, 19 nt, Homo sapiens
  misc_RNA (1)...(19): siRNA sense strand
gauguauauuugccuucug

SEQ ID NO: 758410 - RNA, 19 nt, Homo sapiens
  misc_RNA (1)...(19): siRNA sense strand
uguacaaugucuccaagag

SEQ ID NO: 758411 - RNA, 19 nt, Homo sapiens
  misc_RNA (1)...(19): siRNA sense strand
gaccucaucccacaaacag

SEQ ID NO: 758412 - RNA, 19 nt, Homo sapiens
  misc_RNA (1)...(19): siRNA sense strand
gcgagucagguguacaaug

SEQ ID NO: 758413 - RNA, 19 nt, Homo sapiens
  misc_RNA (1)...(19): siRNA sense strand
uccuuaagcucccagauac

SEQ ID NO: 758414 - RNA, 19 nt, Homo sapiens
  misc_RNA (1)...(19): siRNA sense strand
caugaugggcauagaaugg

SEQ ID NO: 758415 - RNA, 19 nt, Homo sapiens
  misc_RNA (1)...(19): siRNA sense strand
cuggcaggcucuagagaau

SEQ ID NO: 758416 - RNA, 19 nt, Homo sapiens
  misc_RNA (1)...(19): siRNA sense strand
uuccuuaagcucccagaua

SEQ ID NO: 758417 - RNA, 19 nt, Homo sapiens
  misc_RNA (1)...(19): siRNA sense strand
ggacuacuggcaggcucua

SEQ ID NO: 758418 - RNA, 19 nt, Homo sapiens
  misc_RNA (1)...(19): siRNA sense strand
cucggacucucuuggacua

SEQ ID NO: 758419 - RNA, 19 nt, Homo sapiens
  misc_RNA (1)...(19): siRNA sense strand
ucuccaagagcgucccaua

SEQ ID NO: 758420 - RNA, 19 nt, Homo sapiens
  misc_RNA (1)...(19): siRNA sense strand
gggcucuuuguuuguauuu

SEQ ID NO: 758421 - RNA, 19 nt, Homo sapiens
  misc_RNA (1)...(19): siRNA sense strand
gcauguacagucuaaaucc

SEQ ID NO: 758422 - RNA, 19 nt, Homo sapiens
  misc_RNA (1)...(19): siRNA sense strand
uccaagagcgucccauaca

SEQ ID NO: 758423 - RNA, 19 nt, Homo sapiens
  misc_RNA (1)...(19): siRNA sense strand
agcaagugguuugucagua

SEQ ID NO: 758424 - RNA, 19 nt, Homo sapiens
  misc_RNA (1)...(19): siRNA sense strand
ccauucagcaagugguuug

SEQ ID NO: 758425 - RNA, 19 nt, Homo sapiens
  misc_RNA (1)...(19): siRNA sense strand
gaaagcagcugaagacauu

SEQ ID NO: 758426 - RNA, 19 nt, Homo sapiens
  misc_RNA (1)...(19): siRNA sense strand
gcaagugguuugucaguaa

SEQ ID NO: 758427 - RNA, 19 nt, Homo sapiens
  misc_RNA (1)...(19): siRNA sense strand
ugacugaacugcuucugaa

SEQ ID NO: 758428 - RNA, 19 nt, Homo sapiens
  misc_RNA (1)...(19): siRNA sense strand
cgagucagguguacaaugu

SEQ ID NO: 758429 - RNA, 19 nt, Homo sapiens
  misc_RNA (1)...(19): siRNA sense strand
ucagacauguucaucaaug

SEQ ID NO: 758430 - RNA, 19 nt, Homo sapiens
  misc_RNA (1)...(19): siRNA sense strand
ggacagguacccaccauuc

SEQ ID NO: 758431 - RNA, 19 nt, Homo sapiens
  misc_RNA (1)...(19): siRNA sense strand
caagugguuugucaguaaa

SEQ ID NO: 758432 - RNA, 19 nt, Homo sapiens
  misc_RNA (1)...(19): siRNA sense strand
gagcgucccauacauuaaa

SEQ ID NO: 758433 - RNA, 19 nt, Homo sapiens
  misc_RNA (1)...(19): siRNA sense strand
caagagcgucccauacauu

SEQ ID NO: 758434 - RNA, 19 nt, Homo sapiens
  misc_RNA (1)...(19): siRNA sense strand
caagaaagacgggaacuuc

SEQ ID NO: 758435 - RNA, 19 nt, Homo sapiens
  misc_RNA (1)...(19): siRNA sense strand
gaaaacagacucagacaug

SEQ ID NO: 758436 - RNA, 19 nt, Homo sapiens
  misc_RNA (1)...(19): siRNA sense strand
gaagaugagauugauguau

SEQ ID NO: 758437 - RNA, 19 nt, Homo sapiens
  misc_RNA (1)...(19): siRNA sense strand
ggcaggcucuagagaauuc

SEQ ID NO: 758438 - RNA, 19 nt, Homo sapiens
  misc_RNA (1)...(19): siRNA sense strand
cagucuaaauccuuucaaa

SEQ ID NO: 758439 - RNA, 19 nt, Homo sapiens
  misc_RNA (1)...(19): siRNA sense strand
ggaaagcagcugaagacau

SEQ ID NO: 758440 - RNA, 19 nt, Homo sapiens
  misc_RNA (1)...(19): siRNA sense strand
acucagacauguucaucaa

SEQ ID NO: 758441 - RNA, 19 nt, Homo sapiens
  misc_RNA (1)...(19): siRNA sense strand
aagagcgucccauacauua

SEQ ID NO: 758442 - RNA, 19 nt, Homo sapiens
  misc_RNA (1)...(19): siRNA sense strand
ccaagagcgucccauacau

SEQ ID NO: 758443 - RNA, 19 nt, Homo sapiens
  misc_RNA (1)...(19): siRNA sense strand
uguacagucuaaauccuuu

SEQ ID NO: 758444 - RNA, 19 nt, Homo sapiens
  misc_RNA (1)...(19): siRNA sense strand
ucaaugaguuucccaucag

SEQ ID NO: 758445 - RNA, 19 nt, Homo sapiens
  misc_RNA (1)...(19): siRNA sense strand
agacgucuauuacaaucug

SEQ ID NO: 758446 - RNA, 19 nt, Homo sapiens
  misc_RNA (1)...(19): siRNA sense strand
gaagauuguccgccugucu

SEQ ID NO: 758447 - RNA, 19 nt, Homo sapiens
  misc_RNA (1)...(19): siRNA sense strand
gggacauuauccagaagga

SEQ ID NO: 758448 - RNA, 19 nt, Homo sapiens
  misc_RNA (1)...(19): siRNA sense strand
cgaagaugagauugaugua

SEQ ID NO: 758449 - RNA, 19 nt, Homo sapiens
  misc_RNA (1)...(19): siRNA sense strand
ggugaccucaucccacaaa

SEQ ID NO: 758450 - RNA, 19 nt, Homo sapiens
  misc_RNA (1)...(19): siRNA sense strand
ggacucucuuggacuacug

SEQ ID NO: 758451 - RNA, 19 nt, Homo sapiens
  misc_RNA (1)...(19): siRNA sense strand
cggcaccggcuacguguuu

SEQ ID NO: 758452 - RNA, 19 nt, Homo sapiens
  misc_RNA (1)...(19): siRNA sense strand
ucacuggcuucuugaaacu

SEQ ID NO: 758453 - RNA, 19 nt, Homo sapiens
  misc_RNA (1)...(19): siRNA sense strand
ccucaucccacaaacaguu

SEQ ID NO: 758454 - RNA, 19 nt, Homo sapiens
  misc_RNA (1)...(19): siRNA sense strand
uagcauguacagucuaaau

SEQ ID NO: 758455 - RNA, 19 nt, Homo sapiens
  misc_RNA (1)...(19): siRNA sense strand
ccgaagaugagauugaugu

SEQ ID NO: 758456 - RNA, 19 nt, Homo sapiens
  misc_RNA (1)...(19): siRNA sense strand
gaagggaaagcagcugaag

SEQ ID NO: 758457 - RNA, 19 nt, Homo sapiens
  misc_RNA (1)...(19): siRNA sense strand
guauauuugccuucugguu

SEQ ID NO: 758458 - RNA, 19 nt, Homo sapiens
  misc_RNA (1)...(19): siRNA sense strand
auuacaaucugacccugaa

SEQ ID NO: 758459 - RNA, 19 nt, Homo sapiens
  misc_RNA (1)...(19): siRNA sense strand
cuaucugacugaacugcuu

SEQ ID NO: 758460 - RNA, 19 nt, Homo sapiens
  misc_RNA (1)...(19): siRNA sense strand
gauguauauuugccuucug

SEQ ID NO: 758461 - RNA, 19 nt, Homo sapiens
  misc_RNA (1)...(19): siRNA sense strand
uguacaaugucuccaagag

SEQ ID NO: 758462 - RNA, 19 nt, Homo sapiens
  misc_RNA (1)...(19): siRNA sense strand
gaccucaucccacaaacag

SEQ ID NO: 758463 - RNA, 19 nt, Homo sapiens
  misc_RNA (1)...(19): siRNA sense strand
gcgagucagguguacaaug

SEQ ID NO: 758464 - RNA, 19 nt, Homo sapiens
  misc_RNA (1)...(19): siRNA sense strand
uccuuaagcucccagauac

SEQ ID NO: 758465 - RNA, 19 nt, Homo sapiens
  misc_RNA (1)...(19): siRNA sense strand
caugaugggcauagaaugg

SEQ ID NO: 758466 - RNA, 19 nt, Homo sapiens
  misc_RNA (1)...(19): siRNA sense strand
cuggcaggcucuagagaau

SEQ ID NO: 758467 - RNA, 19 nt, Homo sapiens
  misc_RNA (1)...(19): siRNA sense strand
uuccuuaagcucccagaua

SEQ ID NO: 758468 - RNA, 19 nt, Homo sapiens
  misc_RNA (1)...(19): siRNA sense strand
ggacuacuggcaggcucua

SEQ ID NO: 758469 - RNA, 19 nt, Homo sapiens
  misc_RNA (1)...(19): siRNA sense strand
cucggacucucuuggacua

SEQ ID NO: 758470 - RNA, 19 nt, Homo sapiens
  misc_RNA (1)...(19): siRNA sense strand
ucuccaagagcgucccaua

SEQ ID NO: 758471 - RNA, 19 nt, Homo sapiens
  misc_RNA (1)...(19): siRNA sense strand
gggcucuuuguuuguauuu

SEQ ID NO: 758472 - RNA, 19 nt, Homo sapiens
  misc_RNA (1)...(19): siRNA sense strand
gcauguacagucuaaaucc

SEQ ID NO: 758473 - RNA, 19 nt, Homo sapiens
  misc_RNA (1)...(19): siRNA sense strand
uccaagagcgucccauaca

SEQ ID NO: 758474 - RNA, 19 nt, Homo sapiens
  misc_RNA (1)...(19): siRNA sense strand
agcaagugguuugucagua

SEQ ID NO: 758475 - RNA, 19 nt, Homo sapiens
  misc_RNA (1)...(19): siRNA sense strand
ccauucagcaagugguuug

SEQ ID NO: 758476 - RNA, 19 nt, Homo sapiens
  misc_RNA (1)...(19): siRNA sense strand
gaaagcagcugaagacauu

SEQ ID NO: 758477 - RNA, 19 nt, Homo sapiens
  misc_RNA (1)...(19): siRNA sense strand
gcaagugguuugucaguaa

SEQ ID NO: 758478 - RNA, 19 nt, Homo sapiens
  misc_RNA (1)...(19): siRNA sense strand
ugacugaacugcuucugaa

SEQ ID NO: 758479 - RNA, 19 nt, Homo sapiens
  misc_RNA (1)...(19): siRNA sense strand
cgagucagguguacaaugu

SEQ ID NO: 758480 - RNA, 19 nt, Homo sapiens
  misc_RNA (1)...(19): siRNA sense strand
ucagacauguucaucaaug

SEQ ID NO: 758481 - RNA, 19 nt, Homo sapiens
  misc_RNA (1)...(19): siRNA sense strand
ggacagguacccaccauuc

SEQ ID NO: 758482 - RNA, 19 nt, Homo sapiens
  misc_RNA (1)...(19): siRNA sense strand
caagugguuugucaguaaa

SEQ ID NO: 758483 - RNA, 19 nt, Homo sapiens
  misc_RNA (1)...(19): siRNA sense strand
gagcgucccauacauuaaa

SEQ ID NO: 758484 - RNA, 19 nt, Homo sapiens
  misc_RNA (1)...(19): siRNA sense strand
caagagcgucccauacauu

SEQ ID NO: 758485 - RNA, 19 nt, Homo sapiens
  misc_RNA (1)...(19): siRNA sense strand
caagaaagacgggaacuuc

SEQ ID NO: 758486 - RNA, 19 nt, Homo sapiens
  misc_RNA (1)...(19): siRNA sense strand
gaaaacagacucagacaug

SEQ ID NO: 758487 - RNA, 19 nt, Homo sapiens
  misc_RNA (1)...(19): siRNA sense strand
gaagaugagauugauguau

SEQ ID NO: 758488 - RNA, 19 nt, Homo sapiens
  misc_RNA (1)...(19): siRNA sense strand
ggcaggcucuagagaauuc

SEQ ID NO: 758489 - RNA, 19 nt, Homo sapiens
  misc_RNA (1)...(19): siRNA sense strand
cagucuaaauccuuucaaa

SEQ ID NO: 758490 - RNA, 19 nt, Homo sapiens
  misc_RNA (1)...(19): siRNA sense strand
ggaaagcagcugaagacau

SEQ ID NO: 758491 - RNA, 19 nt, Homo sapiens
  misc_RNA (1)...(19): siRNA sense strand
acucagacauguucaucaa

SEQ ID NO: 758492 - RNA, 19 nt, Homo sapiens
  misc_RNA (1)...(19): siRNA sense strand
aagagcgucccauacauua

SEQ ID NO: 758493 - RNA, 19 nt, Homo sapiens
  misc_RNA (1)...(19): siRNA sense strand
ccaagagcgucccauacau

SEQ ID NO: 758494 - RNA, 19 nt, Homo sapiens
  misc_RNA (1)...(19): siRNA sense strand
uguacagucuaaauccuuu

SEQ ID NO: 758495 - RNA, 19 nt, Homo sapiens
  misc_RNA (1)...(19): siRNA sense strand
ucaaugaguuucccaucag

SEQ ID NO: 758496 - RNA, 19 nt, Homo sapiens
  misc_RNA (1)...(19): siRNA sense strand
agacgucuauuacaaucug

SEQ ID NO: 758497 - RNA, 19 nt, Homo sapiens
  misc_RNA (1)...(19): siRNA sense strand
gaagauuguccgccugucu

SEQ ID NO: 758498 - RNA, 19 nt, Homo sapiens
  misc_RNA (1)...(19): siRNA sense strand
gggacauuauccagaagga

SEQ ID NO: 758499 - RNA, 19 nt, Homo sapiens
  misc_RNA (1)...(19): siRNA sense strand
cgaagaugagauugaugua

SEQ ID NO: 758500 - RNA, 19 nt, Homo sapiens
  misc_RNA (1)...(19): siRNA sense strand
ggugaccucaucccacaaa

SEQ ID NO: 758501 - RNA, 19 nt, Homo sapiens
  misc_RNA (1)...(19): siRNA sense strand
ggacucucuuggacuacug

SEQ ID NO: 758502 - RNA, 19 nt, Homo sapiens
  misc_RNA (1)...(19): siRNA sense strand
cggcaccggcuacguguuu

SEQ ID NO: 758503 - RNA, 19 nt, Homo sapiens
  misc_RNA (1)...(19): siRNA sense strand
ucacuggcuucuugaaacu

SEQ ID NO: 758504 - RNA, 19 nt, Homo sapiens
  misc_RNA (1)...(19): siRNA sense strand
ccucaucccacaaacaguu

SEQ ID NO: 758505 - RNA, 19 nt, Homo sapiens
  misc_RNA (1)...(19): siRNA sense strand
uagcauguacagucuaaau

SEQ ID NO: 758506 - RNA, 19 nt, Homo sapiens
  misc_RNA (1)...(19): siRNA sense strand
ccgaagaugagauugaugu

SEQ ID NO: 758507 - RNA, 19 nt, Homo sapiens
  misc_RNA (1)...(19): siRNA sense strand
gaagggaaagcagcugaag

SEQ ID NO: 758508 - RNA, 19 nt, Homo sapiens
  misc_RNA (1)...(19): siRNA sense strand
guauauuugccuucugguu

SEQ ID NO: 758509 - RNA, 19 nt, Homo sapiens
  misc_RNA (1)...(19): siRNA sense strand
auuacaaucugacccugaa

SEQ ID NO: 758510 - RNA, 19 nt, Homo sapiens
  misc_RNA (1)...(19): siRNA sense strand
cuaucugacugaacugcuu

SEQ ID NO: 758511 - RNA, 19 nt, Homo sapiens
  misc_RNA (1)...(19): siRNA sense strand
gauguauauuugccuucug

SEQ ID NO: 758512 - RNA, 19 nt, Homo sapiens
  misc_RNA (1)...(19): siRNA sense strand
uguacaaugucuccaagag

SEQ ID NO: 758513 - RNA, 19 nt, Homo sapiens
  misc_RNA (1)...(19): siRNA sense strand
gaccucaucccacaaacag

SEQ ID NO: 758514 - RNA, 19 nt, Homo sapiens
  misc_RNA (1)...(19): siRNA sense strand
gcgagucagguguacaaug

SEQ ID NO: 758515 - RNA, 19 nt, Homo sapiens
  misc_RNA (1)...(19): siRNA sense strand
uccuuaagcucccagauac

SEQ ID NO: 758516 - RNA, 19 nt, Homo sapiens
  misc_RNA (1)...(19): siRNA sense strand
caugaugggcauagaaugg

SEQ ID NO: 758517 - RNA, 19 nt, Homo sapiens
  misc_RNA (1)...(19): siRNA sense strand
cuggcaggcucuagagaau

SEQ ID NO: 758518 - RNA, 19 nt, Homo sapiens
  misc_RNA (1)...(19): siRNA sense strand
uuccuuaagcucccagaua

SEQ ID NO: 758519 - RNA, 19 nt, Homo sapiens
  misc_RNA (1)...(19): siRNA sense strand
ggacuacuggcaggcucua

SEQ ID NO: 758520 - RNA, 19 nt, Homo sapiens
  misc_RNA (1)...(19): siRNA sense strand
cucggacucucuuggacua

SEQ ID NO: 758521 - RNA, 19 nt, Homo sapiens
  misc_RNA (1)...(19): siRNA sense strand
ucuccaagagcgucccaua

SEQ ID NO: 758522 - RNA, 19 nt, Homo sapiens
  misc_RNA (1)...(19): siRNA sense strand
gggcucuuuguuuguauuu

SEQ ID NO: 758523 - RNA, 19 nt, Homo sapiens
  misc_RNA (1)...(19): siRNA sense strand
gcauguacagucuaaaucc

SEQ ID NO: 758524 - RNA, 19 nt, Homo sapiens
  misc_RNA (1)...(19): siRNA sense strand
uccaagagcgucccauaca

SEQ ID NO: 758525 - RNA, 19 nt, Homo sapiens
  misc_RNA (1)...(19): siRNA sense strand
agcaagugguuugucagua

SEQ ID NO: 758526 - RNA, 19 nt, Homo sapiens
  misc_RNA (1)...(19): siRNA sense strand
ccauucagcaagugguuug

SEQ ID NO: 758527 - RNA, 19 nt, Homo sapiens
  misc_RNA (1)...(19): siRNA sense strand
gaaagcagcugaagacauu

SEQ ID NO: 758528 - RNA, 19 nt, Homo sapiens
  misc_RNA (1)...(19): siRNA sense strand
gcaagugguuugucaguaa

SEQ ID NO: 758529 - RNA, 19 nt, Homo sapiens
  misc_RNA (1)...(19): siRNA sense strand
ugacugaacugcuucugaa

SEQ ID NO: 758530 - RNA, 19 nt, Homo sapiens
  misc_RNA (1)...(19): siRNA sense strand
cgagucagguguacaaugu

SEQ ID NO: 758531 - RNA, 19 nt, Homo sapiens
  misc_RNA (1)...(19): siRNA sense strand
ucagacauguucaucaaug

SEQ ID NO: 758532 - RNA, 19 nt, Homo sapiens
  misc_RNA (1)...(19): siRNA sense strand
ggacagguacccaccauuc

SEQ ID NO: 758533 - RNA, 19 nt, Homo sapiens
  misc_RNA (1)...(19): siRNA sense strand
caagugguuugucaguaaa

SEQ ID NO: 758534 - RNA, 19 nt, Homo sapiens
  misc_RNA (1)...(19): siRNA sense strand
gagcgucccauacauuaaa

SEQ ID NO: 758535 - RNA, 19 nt, Homo sapiens
  misc_RNA (1)...(19): siRNA sense strand
caagagcgucccauacauu

SEQ ID NO: 758536 - RNA, 19 nt, Homo sapiens
  misc_RNA (1)...(19): siRNA sense strand
caagaaagacgggaacuuc

SEQ ID NO: 758537 - RNA, 19 nt, Homo sapiens
  misc_RNA (1)...(19): siRNA sense strand
gaaaacagacucagacaug

SEQ ID NO: 758538 - RNA, 19 nt, Homo sapiens
  misc_RNA (1)...(19): siRNA sense strand
gaagaugagauugauguau

SEQ ID NO: 758539 - RNA, 19 nt, Homo sapiens
  misc_RNA (1)...(19): siRNA sense strand
ggcaggcucuagagaauuc

SEQ ID NO: 758540 - RNA, 19 nt, Homo sapiens
  misc_RNA (1)...(19): siRNA sense strand
cagucuaaauccuuucaaa

SEQ ID NO: 758541 - RNA, 19 nt, Homo sapiens
  misc_RNA (1)...(19): siRNA sense strand
ggaaagcagcugaagacau

SEQ ID NO: 758542 - RNA, 19 nt, Homo sapiens
  misc_RNA (1)...(19): siRNA sense strand
acucagacauguucaucaa

SEQ ID NO: 758543 - RNA, 19 nt, Homo sapiens
  misc_RNA (1)...(19): siRNA sense strand
aagagcgucccauacauua

SEQ ID NO: 758544 - RNA, 19 nt, Homo sapiens
  misc_RNA (1)...(19): siRNA sense strand
ccaagagcgucccauacau

SEQ ID NO: 758545 - RNA, 19 nt, Homo sapiens
  misc_RNA (1)...(19): siRNA sense strand
uguacagucuaaauccuuu

SEQ ID NO: 758546 - RNA, 19 nt, Homo sapiens
  misc_RNA (1)...(19): siRNA sense strand
ucaaugaguuucccaucag

SEQ ID NO: 758547 - RNA, 19 nt, Homo sapiens
  misc_RNA (1)...(19): siRNA sense strand
agacgucuauuacaaucug

SEQ ID NO: 758548 - RNA, 19 nt, Homo sapiens
  misc_RNA (1)...(19): siRNA sense strand
gaagauuguccgccugucu

SEQ ID NO: 758549 - RNA, 19 nt, Homo sapiens
  misc_RNA (1)...(19): siRNA sense strand
gggacauuauccagaagga

SEQ ID NO: 758550 - RNA, 19 nt, Homo sapiens
  misc_RNA (1)...(19): siRNA sense strand
cgaagaugagauugaugua

SEQ ID NO: 758551 - RNA, 19 nt, Homo sapiens
  misc_RNA (1)...(19): siRNA sense strand
ggugaccucaucccacaaa

SEQ ID NO: 758552 - RNA, 19 nt, Homo sapiens
  misc_RNA (1)...(19): siRNA sense strand
ggacucucuuggacuacug

SEQ ID NO: 758553 - RNA, 19 nt, Homo sapiens
  misc_RNA (1)...(19): siRNA sense strand
cggcaccggcuacguguuu

SEQ ID NO: 758554 - RNA, 19 nt, Homo sapiens
  misc_RNA (1)...(19): siRNA sense strand
ucacuggcuucuugaaacu

SEQ ID NO: 758555 - RNA, 19 nt, Homo sapiens
  misc_RNA (1)...(19): siRNA sense strand
ccucaucccacaaacaguu

SEQ ID NO: 758556 - RNA, 19 nt, Homo sapiens
  misc_RNA (1)...(19): siRNA sense strand
uagcauguacagucuaaau

SEQ ID NO: 758557 - RNA, 19 nt, Homo sapiens
  misc_RNA (1)...(19): siRNA sense strand
ccgaagaugagauugaugu

SEQ ID NO: 758558 - RNA, 19 nt, Homo sapiens
  misc_RNA (1)...(19): siRNA sense strand
gaagggaaagcagcugaag

SEQ ID NO: 758559 - RNA, 19 nt, Homo sapiens
  misc_RNA (1)...(19): siRNA sense strand
guauauuugccuucugguu

SEQ ID NO: 758560 - RNA, 19 nt, Homo sapiens
  misc_RNA (1)...(19): siRNA sense strand
auuacaaucugacccugaa

SEQ ID NO: 758561 - RNA, 19 nt, Homo sapiens
  misc_RNA (1)...(19): siRNA sense strand
cuaucugacugaacugcuu

SEQ ID NO: 758562 - RNA, 19 nt, Homo sapiens
  misc_RNA (1)...(19): siRNA sense strand
gauguauauuugccuucug

SEQ ID NO: 758563 - RNA, 19 nt, Homo sapiens
  misc_RNA (1)...(19): siRNA sense strand
uguacaaugucuccaagag

SEQ ID NO: 758564 - RNA, 19 nt, Homo sapiens
  misc_RNA (1)...(19): siRNA sense strand
gaccucaucccacaaacag

SEQ ID NO: 758565 - RNA, 19 nt, Homo sapiens
  misc_RNA (1)...(19): siRNA sense strand
gcgagucagguguacaaug

SEQ ID NO: 758566 - RNA, 19 nt, Homo sapiens
  misc_RNA (1)...(19): siRNA sense strand
uccuuaagcucccagauac

SEQ ID NO: 758567 - RNA, 19 nt, Homo sapiens
  misc_RNA (1)...(19): siRNA sense strand
caugaugggcauagaaugg

SEQ ID NO: 758568 - RNA, 19 nt, Homo sapiens
  misc_RNA (1)...(19): siRNA sense strand
cuggcaggcucuagagaau

SEQ ID NO: 758569 - RNA, 19 nt, Homo sapiens
  misc_RNA (1)...(19): siRNA sense strand
uuccuuaagcucccagaua

SEQ ID NO: 758570 - RNA, 19 nt, Homo sapiens
  misc_RNA (1)...(19): siRNA sense strand
ggacuacuggcaggcucua

SEQ ID NO: 758571 - RNA, 19 nt, Homo sapiens
  misc_RNA (1)...(19): siRNA sense strand
cucggacucucuuggacua

SEQ ID NO: 758572 - RNA, 19 nt, Homo sapiens
  misc_RNA (1)...(19): siRNA sense strand
ucuccaagagcgucccaua

SEQ ID NO: 758573 - RNA, 19 nt, Homo sapiens
  misc_RNA (1)...(19): siRNA sense strand
gggcucuuuguuuguauuu

SEQ ID NO: 758574 - RNA, 19 nt, Homo sapiens
  misc_RNA (1)...(19): siRNA sense strand
gcauguacagucuaaaucc

SEQ ID NO: 758575 - RNA, 19 nt, Homo sapiens
  misc_RNA (1)...(19): siRNA sense strand
uccaagagcgucccauaca

SEQ ID NO: 758576 - RNA, 19 nt, Homo sapiens
  misc_RNA (1)...(19): siRNA sense strand
agcaagugguuugucagua

SEQ ID NO: 758577 - RNA, 19 nt, Homo sapiens
  misc_RNA (1)...(19): siRNA sense strand
ccauucagcaagugguuug

SEQ ID NO: 758578 - RNA, 19 nt, Homo sapiens
  misc_RNA (1)...(19): siRNA sense strand
gaaagcagcugaagacauu

SEQ ID NO: 758579 - RNA, 19 nt, Homo sapiens
  misc_RNA (1)...(19): siRNA sense strand
gcaagugguuugucaguaa

SEQ ID NO: 758580 - RNA, 19 nt, Homo sapiens
  misc_RNA (1)...(19): siRNA sense strand
ugacugaacugcuucugaa

SEQ ID NO: 758581 - RNA, 19 nt, Homo sapiens
  misc_RNA (1)...(19): siRNA sense strand
cgagucagguguacaaugu

SEQ ID NO: 758582 - RNA, 19 nt, Homo sapiens
  misc_RNA (1)...(19): siRNA sense strand
ucagacauguucaucaaug

SEQ ID NO: 758583 - RNA, 19 nt, Homo sapiens
  misc_RNA (1)...(19): siRNA sense strand
ggacagguacccaccauuc

SEQ ID NO: 758584 - RNA, 19 nt, Homo sapiens
  misc_RNA (1)...(19): siRNA sense strand
caagugguuugucaguaaa

SEQ ID NO: 758585 - RNA, 19 nt, Homo sapiens
  misc_RNA (1)...(19): siRNA sense strand
gagcgucccauacauuaaa

SEQ ID NO: 758586 - RNA, 19 nt, Homo sapiens
  misc_RNA (1)...(19): siRNA sense strand
caagagcgucccauacauu

SEQ ID NO: 758587 - RNA, 19 nt, Homo sapiens
  misc_RNA (1)...(19): siRNA sense strand
caagaaagacgggaacuuc

SEQ ID NO: 758588 - RNA, 19 nt, Homo sapiens
  misc_RNA (1)...(19): siRNA sense strand
gaaaacagacucagacaug

SEQ ID NO: 758589 - RNA, 19 nt, Homo sapiens
  misc_RNA (1)...(19): siRNA sense strand
gaagaugagauugauguau

SEQ ID NO: 758590 - RNA, 19 nt, Homo sapiens
  misc_RNA (1)...(19): siRNA sense strand
ggcaggcucuagagaauuc

SEQ ID NO: 758591 - RNA, 19 nt, Homo sapiens
  misc_RNA (1)...(19): siRNA sense strand
cagucuaaauccuuucaaa

SEQ ID NO: 758592 - RNA, 19 nt, Homo sapiens
  misc_RNA (1)...(19): siRNA sense strand
ggaaagcagcugaagacau

SEQ ID NO: 758593 - RNA, 19 nt, Homo sapiens
  misc_RNA (1)...(19): siRNA sense strand
acucagacauguucaucaa

SEQ ID NO: 758594 - RNA, 19 nt, Homo sapiens
  misc_RNA (1)...(19): siRNA sense strand
aagagcgucccauacauua

SEQ ID NO: 758595 - RNA, 19 nt, Homo sapiens
  misc_RNA (1)...(19): siRNA sense strand
ccaagagcgucccauacau

SEQ ID NO: 758596 - RNA, 19 nt, Homo sapiens
  misc_RNA (1)...(19): siRNA sense strand
uguacagucuaaauccuuu

SEQ ID NO: 758597 - RNA, 19 nt, Homo sapiens
  misc_RNA (1)...(19): siRNA sense strand
ucaaugaguuucccaucag

SEQ ID NO: 758598 - RNA, 19 nt, Homo sapiens
  misc_RNA (1)...(19): siRNA sense strand
agacgucuauuacaaucug

SEQ ID NO: 758599 - RNA, 19 nt, Homo sapiens
  misc_RNA (1)...(19): siRNA sense strand
gaagauuguccgccugucu

SEQ ID NO: 758600 - RNA, 19 nt, Homo sapiens
  misc_RNA (1)...(19): siRNA sense strand
gggacauuauccagaagga

SEQ ID NO: 758601 - RNA, 19 nt, Homo sapiens
  misc_RNA (1)...(19): siRNA sense strand
cgaagaugagauugaugua

SEQ ID NO: 758602 - RNA, 19 nt, Homo sapiens
  misc_RNA (1)...(19): siRNA sense strand
ggugaccucaucccacaaa

SEQ ID NO: 758603 - RNA, 19 nt, Homo sapiens
  misc_RNA (1)...(19): siRNA sense strand
ggacucucuuggacuacug

SEQ ID NO: 758604 - RNA, 19 nt, Homo sapiens
  misc_RNA (1)...(19): siRNA sense strand
cggcaccggcuacguguuu

SEQ ID NO: 758605 - RNA, 19 nt, Homo sapiens
  misc_RNA (1)...(19): siRNA sense strand
ucacuggcuucuugaaacu

SEQ ID NO: 758606 - RNA, 19 nt, Homo sapiens
  misc_RNA (1)...(19): siRNA sense strand
ccucaucccacaaacaguu

SEQ ID NO: 758607 - RNA, 19 nt, Homo sapiens
  misc_RNA (1)...(19): siRNA sense strand
uagcauguacagucuaaau

SEQ ID NO: 758608 - RNA, 19 nt, Homo sapiens
  misc_RNA (1)...(19): siRNA sense strand
ccgaagaugagauugaugu

SEQ ID NO: 758609 - RNA, 19 nt, Homo sapiens
  misc_RNA (1)...(19): siRNA sense strand
gaagggaaagcagcugaag

SEQ ID NO: 758610 - RNA, 19 nt, Homo sapiens
  misc_RNA (1)...(19): siRNA sense strand
guauauuugccuucugguu

SEQ ID NO: 758611 - RNA, 19 nt, Homo sapiens
  misc_RNA (1)...(19): siRNA sense strand
auuacaaucugacccugaa

SEQ ID NO: 758612 - RNA, 19 nt, Homo sapiens
  misc_RNA (1)...(19): siRNA sense strand
cuaucugacugaacugcuu

SEQ ID NO: 758613 - RNA, 19 nt, Homo sapiens
  misc_RNA (1)...(19): siRNA sense strand
gauguauauuugccuucug

SEQ ID NO: 758614 - RNA, 19 nt, Homo sapiens
  misc_RNA (1)...(19): siRNA sense strand
uguacaaugucuccaagag

SEQ ID NO: 758615 - RNA, 19 nt, Homo sapiens
  misc_RNA (1)...(19): siRNA sense strand
gaccucaucccacaaacag

SEQ ID NO: 758616 - RNA, 19 nt, Homo sapiens
  misc_RNA (1)...(19): siRNA sense strand
gcgagucagguguacaaug

SEQ ID NO: 758617 - RNA, 19 nt, Homo sapiens
  misc_RNA (1)...(19): siRNA sense strand
uccuuaagcucccagauac

SEQ ID NO: 758618 - RNA, 19 nt, Homo sapiens
  misc_RNA (1)...(19): siRNA sense strand
caugaugggcauagaaugg

SEQ ID NO: 758619 - RNA, 19 nt, Homo sapiens
  misc_RNA (1)...(19): siRNA sense strand
cuggcaggcucuagagaau

SEQ ID NO: 758620 - RNA, 19 nt, Homo sapiens
  misc_RNA (1)...(19): siRNA sense strand
uuccuuaagcucccagaua

SEQ ID NO: 758621 - RNA, 19 nt, Homo sapiens
  misc_RNA (1)...(19): siRNA sense strand
ggacuacuggcaggcucua

SEQ ID NO: 758622 - RNA, 19 nt, Homo sapiens
  misc_RNA (1)...(19): siRNA sense strand
cucggacucucuuggacua

SEQ ID NO: 758623 - RNA, 19 nt, Homo sapiens
  misc_RNA (1)...(19): siRNA sense strand
ucuccaagagcgucccaua

SEQ ID NO: 758624 - RNA, 19 nt, Homo sapiens
  misc_RNA (1)...(19): siRNA sense strand
gggcucuuuguuuguauuu

SEQ ID NO: 758625 - RNA, 19 nt, Homo sapiens
  misc_RNA (1)...(19): siRNA sense strand
gcauguacagucuaaaucc

SEQ ID NO: 758626 - RNA, 19 nt, Homo sapiens
  misc_RNA (1)...(19): siRNA sense strand
uccaagagcgucccauaca

SEQ ID NO: 758627 - RNA, 19 nt, Homo sapiens
  misc_RNA (1)...(19): siRNA sense strand
agcaagugguuugucagua

SEQ ID NO: 758628 - RNA, 19 nt, Homo sapiens
  misc_RNA (1)...(19): siRNA sense strand
ccauucagcaagugguuug

SEQ ID NO: 758629 - RNA, 19 nt, Homo sapiens
  misc_RNA (1)...(19): siRNA sense strand
gaaagcagcugaagacauu

SEQ ID NO: 758630 - RNA, 19 nt, Homo sapiens
  misc_RNA (1)...(19): siRNA sense strand
gcaagugguuugucaguaa

SEQ ID NO: 758631 - RNA, 19 nt, Homo sapiens
  misc_RNA (1)...(19): siRNA sense strand
ugacugaacugcuucugaa

SEQ ID NO: 758632 - RNA, 19 nt, Homo sapiens
  misc_RNA (1)...(19): siRNA sense strand
cgagucagguguacaaugu

SEQ ID NO: 758633 - RNA, 19 nt, Homo sapiens
  misc_RNA (1)...(19): siRNA sense strand
ucagacauguucaucaaug

SEQ ID NO: 758634 - RNA, 19 nt, Homo sapiens
  misc_RNA (1)...(19): siRNA sense strand
ggacagguacccaccauuc

SEQ ID NO: 758635 - RNA, 19 nt, Homo sapiens
  misc_RNA (1)...(19): siRNA sense strand
caagugguuugucaguaaa

SEQ ID NO: 758636 - RNA, 19 nt, Homo sapiens
  misc_RNA (1)...(19): siRNA sense strand
gagcgucccauacauuaaa

SEQ ID NO: 758637 - RNA, 19 nt, Homo sapiens
  misc_RNA (1)...(19): siRNA sense strand
caagagcgucccauacauu

SEQ ID NO: 758638 - RNA, 19 nt, Homo sapiens
  misc_RNA (1)...(19): siRNA sense strand
caagaaagacgggaacuuc

SEQ ID NO: 758639 - RNA, 19 nt, Homo sapiens
  misc_RNA (1)...(19): siRNA sense strand
gaaaacagacucagacaug

SEQ ID NO: 758640 - RNA, 19 nt, Homo sapiens
  misc_RNA (1)...(19): siRNA sense strand
gaagaugagauugauguau

SEQ ID NO: 758641 - RNA, 19 nt, Homo sapiens
  misc_RNA (1)...(19): siRNA sense strand
ggcaggcucuagagaauuc

SEQ ID NO: 758642 - RNA, 19 nt, Homo sapiens
  misc_RNA (1)...(19): siRNA sense strand
cagucuaaauccuuucaaa

SEQ ID NO: 758643 - RNA, 19 nt, Homo sapiens
  misc_RNA (1)...(19): siRNA sense strand
ggaaagcagcugaagacau

SEQ ID NO: 758644 - RNA, 19 nt, Homo sapiens
  misc_RNA (1)...(19): siRNA sense strand
acucagacauguucaucaa

SEQ ID NO: 758645 - RNA, 19 nt, Homo sapiens
  misc_RNA (1)...(19): siRNA sense strand
aagagcgucccauacauua

SEQ ID NO: 758646 - RNA, 19 nt, Homo sapiens
  misc_RNA (1)...(19): siRNA sense strand
ccaagagcgucccauacau

SEQ ID NO: 758647 - RNA, 19 nt, Homo sapiens
  misc_RNA (1)...(19): siRNA sense strand
uguacagucuaaauccuuu

SEQ ID NO: 758648 - RNA, 19 nt, Homo sapiens
  misc_RNA (1)...(19): siRNA sense strand
ucaaugaguuucccaucag

SEQ ID NO: 758649 - RNA, 19 nt, Homo sapiens
  misc_RNA (1)...(19): siRNA sense strand
agacgucuauuacaaucug

SEQ ID NO: 758650 - RNA, 19 nt, Homo sapiens
  misc_RNA (1)...(19): siRNA sense strand
gaagauuguccgccugucu

SEQ ID NO: 758651 - RNA, 19 nt, Homo sapiens
  misc_RNA (1)...(19): siRNA sense strand
gggacauuauccagaagga

SEQ ID NO: 758652 - RNA, 19 nt, Homo sapiens
  misc_RNA (1)...(19): siRNA sense strand
cgaagaugagauugaugua

SEQ ID NO: 758653 - RNA, 19 nt, Homo sapiens
  misc_RNA (1)...(19): siRNA sense strand
ggugaccucaucccacaaa

SEQ ID NO: 758654 - RNA, 19 nt, Homo sapiens
  misc_RNA (1)...(19): siRNA sense strand
ggacucucuuggacuacug

SEQ ID NO: 758655 - RNA, 19 nt, Homo sapiens
  misc_RNA (1)...(19): siRNA sense strand
cggcaccggcuacguguuu

SEQ ID NO: 758656 - RNA, 19 nt, Homo sapiens
  misc_RNA (1)...(19): siRNA sense strand
ucacuggcuucuugaaacu

SEQ ID NO: 758657 - RNA, 19 nt, Homo sapiens
  misc_RNA (1)...(19): siRNA sense strand
ccucaucccacaaacaguu

SEQ ID NO: 758658 - RNA, 19 nt, Homo sapiens
  misc_RNA (1)...(19): siRNA sense strand
uagcauguacagucuaaau

SEQ ID NO: 758659 - RNA, 19 nt, Homo sapiens
  misc_RNA (1)...(19): siRNA sense strand
ccgaagaugagauugaugu

SEQ ID NO: 758660 - RNA, 19 nt, Homo sapiens
  misc_RNA (1)...(19): siRNA sense strand
gaagggaaagcagcugaag

SEQ ID NO: 758661 - RNA, 19 nt, Homo sapiens
  misc_RNA (1)...(19): siRNA sense strand
guauauuugccuucugguu

SEQ ID NO: 758662 - RNA, 19 nt, Homo sapiens
  misc_RNA (1)...(19): siRNA sense strand
auuacaaucugacccugaa

SEQ ID NO: 758663 - RNA, 19 nt, Homo sapiens
  misc_RNA (1)...(19): siRNA sense strand
cuaucugacugaacugcuu

SEQ ID NO: 758664 - RNA, 19 nt, Homo sapiens
  misc_RNA (1)...(19): siRNA sense strand
gauguauauuugccuucug

SEQ ID NO: 758665 - RNA, 19 nt, Homo sapiens
  misc_RNA (1)...(19): siRNA sense strand
uguacaaugucuccaagag

SEQ ID NO: 758666 - RNA, 19 nt, Homo sapiens
  misc_RNA (1)...(19): siRNA sense strand
gaccucaucccacaaacag

SEQ ID NO: 758667 - RNA, 19 nt, Homo sapiens
  misc_RNA (1)...(19): siRNA sense strand
gcgagucagguguacaaug

SEQ ID NO: 758668 - RNA, 19 nt, Homo sapiens
  misc_RNA (1)...(19): siRNA sense strand
uccuuaagcucccagauac

SEQ ID NO: 758669 - RNA, 19 nt, Homo sapiens
  misc_RNA (1)...(19): siRNA sense strand
caugaugggcauagaaugg

SEQ ID NO: 758670 - RNA, 19 nt, Homo sapiens
  misc_RNA (1)...(19): siRNA sense strand
cuggcaggcucuagagaau

SEQ ID NO: 758671 - RNA, 19 nt, Homo sapiens
  misc_RNA (1)...(19): siRNA sense strand
uuccuuaagcucccagaua

SEQ ID NO: 758672 - RNA, 19 nt, Homo sapiens
  misc_RNA (1)...(19): siRNA sense strand
ggacuacuggcaggcucua

SEQ ID NO: 758673 - RNA, 19 nt, Homo sapiens
  misc_RNA (1)...(19): siRNA sense strand
cucggacucucuuggacua

SEQ ID NO: 758674 - RNA, 19 nt, Homo sapiens
  misc_RNA (1)...(19): siRNA sense strand
ucuccaagagcgucccaua

SEQ ID NO: 758675 - RNA, 19 nt, Homo sapiens
  misc_RNA (1)...(19): siRNA sense strand
gggcucuuuguuuguauuu

SEQ ID NO: 758676 - RNA, 19 nt, Homo sapiens
  misc_RNA (1)...(19): siRNA sense strand
gcauguacagucuaaaucc

SEQ ID NO: 758677 - RNA, 19 nt, Homo sapiens
  misc_RNA (1)...(19): siRNA sense strand
uccaagagcgucccauaca

SEQ ID NO: 758678 - RNA, 19 nt, Homo sapiens
  misc_RNA (1)...(19): siRNA sense strand
agcaagugguuugucagua

SEQ ID NO: 758679 - RNA, 19 nt, Homo sapiens
  misc_RNA (1)...(19): siRNA sense strand
ccauucagcaagugguuug

SEQ ID NO: 758680 - RNA, 19 nt, Homo sapiens
  misc_RNA (1)...(19): siRNA sense strand
gaaagcagcugaagacauu

SEQ ID NO: 758681 - RNA, 19 nt, Homo sapiens
  misc_RNA (1)...(19): siRNA sense strand
gcaagugguuugucaguaa

SEQ ID NO: 758682 - RNA, 19 nt, Homo sapiens
  misc_RNA (1)...(19): siRNA sense strand
ugacugaacugcuucugaa

SEQ ID NO: 758683 - RNA, 19 nt, Homo sapiens
  misc_RNA (1)...(19): siRNA sense strand
cgagucagguguacaaugu

SEQ ID NO: 758684 - RNA, 19 nt, Homo sapiens
  misc_RNA (1)...(19): siRNA sense strand
ucagacauguucaucaaug

SEQ ID NO: 758685 - RNA, 19 nt, Homo sapiens
  misc_RNA (1)...(19): siRNA sense strand
ggacagguacccaccauuc

SEQ ID NO: 758686 - RNA, 19 nt, Homo sapiens
  misc_RNA (1)...(19): siRNA sense strand
caagugguuugucaguaaa

SEQ ID NO: 758687 - RNA, 19 nt, Homo sapiens
  misc_RNA (1)...(19): siRNA sense strand
gagcgucccauacauuaaa

SEQ ID NO: 758688 - RNA, 19 nt, Homo sapiens
  misc_RNA (1)...(19): siRNA sense strand
caagagcgucccauacauu

SEQ ID NO: 758689 - RNA, 19 nt, Homo sapiens
  misc_RNA (1)...(19): siRNA sense strand
caagaaagacgggaacuuc

SEQ ID NO: 758690 - RNA, 19 nt, Homo sapiens
  misc_RNA (1)...(19): siRNA sense strand
gaaaacagacucagacaug

SEQ ID NO: 758691 - RNA, 19 nt, Homo sapiens
  misc_RNA (1)...(19): siRNA sense strand
gaagaugagauugauguau

SEQ ID NO: 758692 - RNA, 19 nt, Homo sapiens
  misc_RNA (1)...(19): siRNA sense strand
ggcaggcucuagagaauuc

SEQ ID NO: 758693 - RNA, 19 nt, Homo sapiens
  misc_RNA (1)...(19): siRNA sense strand
cagucuaaauccuuucaaa

SEQ ID NO: 758694 - RNA, 19 nt, Homo sapiens
  misc_RNA (1)...(19): siRNA sense strand
ggaaagcagcugaagacau

SEQ ID NO: 758695 - RNA, 19 nt, Homo sapiens
  misc_RNA (1)...(19): siRNA sense strand
acucagacauguucaucaa

SEQ ID NO: 758696 - RNA, 19 nt, Homo sapiens
  misc_RNA (1)...(19): siRNA sense strand
aagagcgucccauacauua

SEQ ID NO: 758697 - RNA, 19 nt, Homo sapiens
  misc_RNA (1)...(19): siRNA sense strand
ccaagagcgucccauacau

SEQ ID NO: 758698 - RNA, 19 nt, Homo sapiens
  misc_RNA (1)...(19): siRNA sense strand
uguacagucuaaauccuuu

SEQ ID NO: 758699 - RNA, 19 nt, Homo sapiens
  misc_RNA (1)...(19): siRNA sense strand
ucaaugaguuucccaucag

SEQ ID NO: 758700 - RNA, 19 nt, Homo sapiens
  misc_RNA (1)...(19): siRNA sense strand
agacgucuauuacaaucug

SEQ ID NO: 758701 - RNA, 19 nt, Homo sapiens
  misc_RNA (1)...(19): siRNA sense strand
gaagauuguccgccugucu

SEQ ID NO: 758702 - RNA, 19 nt, Homo sapiens
  misc_RNA (1)...(19): siRNA sense strand
gggacauuauccagaagga

SEQ ID NO: 758703 - RNA, 19 nt, Homo sapiens
  misc_RNA (1)...(19): siRNA sense strand
cgaagaugagauugaugua

SEQ ID NO: 758704 - RNA, 19 nt, Homo sapiens
  misc_RNA (1)...(19): siRNA sense strand
ggugaccucaucccacaaa

SEQ ID NO: 758705 - RNA, 19 nt, Homo sapiens
  misc_RNA (1)...(19): siRNA sense strand
ggacucucuuggacuacug

SEQ ID NO: 758706 - RNA, 19 nt, Homo sapiens
  misc_RNA (1)...(19): siRNA sense strand
cggcaccggcuacguguuu

SEQ ID NO: 758707 - RNA, 19 nt, Homo sapiens
  misc_RNA (1)...(19): siRNA sense strand
ucacuggcuucuugaaacu

SEQ ID NO: 758708 - RNA, 19 nt, Homo sapiens
  misc_RNA (1)...(19): siRNA sense strand
ccucaucccacaaacaguu

SEQ ID NO: 758709 - RNA, 19 nt, Homo sapiens
  misc_RNA (1)...(19): siRNA sense strand
uagcauguacagucuaaau

SEQ ID NO: 758710 - RNA, 19 nt, Homo sapiens
  misc_RNA (1)...(19): siRNA sense strand
ccgaagaugagauugaugu

SEQ ID NO: 758711 - RNA, 19 nt, Homo sapiens
  misc_RNA (1)...(19): siRNA sense strand
gaagggaaagcagcugaag

SEQ ID NO: 758712 - RNA, 19 nt, Homo sapiens
  misc_RNA (1)...(19): siRNA sense strand
guauauuugccuucugguu

SEQ ID NO: 758713 - RNA, 19 nt, Homo sapiens
  misc_RNA (1)...(19): siRNA sense strand
auuacaaucugacccugaa

SEQ ID NO: 758714 - RNA, 19 nt, Homo sapiens
  misc_RNA (1)...(19): siRNA sense strand
cuaucugacugaacugcuu

SEQ ID NO: 758715 - RNA, 19 nt, Homo sapiens
  misc_RNA (1)...(19): siRNA sense strand
gauguauauuugccuucug

SEQ ID NO: 758716 - RNA, 19 nt, Homo sapiens
  misc_RNA (1)...(19): siRNA sense strand
uguacaaugucuccaagag

SEQ ID NO: 758717 - RNA, 19 nt, Homo sapiens
  misc_RNA (1)...(19): siRNA sense strand
gaccucaucccacaaacag

SEQ ID NO: 758718 - RNA, 19 nt, Homo sapiens
  misc_RNA (1)...(19): siRNA sense strand
gcgagucagguguacaaug

SEQ ID NO: 758719 - RNA, 19 nt, Homo sapiens
  misc_RNA (1)...(19): siRNA sense strand
uccuuaagcucccagauac

SEQ ID NO: 758720 - RNA, 19 nt, Homo sapiens
  misc_RNA (1)...(19): siRNA sense strand
caugaugggcauagaaugg

SEQ ID NO: 758721 - RNA, 19 nt, Homo sapiens
  misc_RNA (1)...(19): siRNA sense strand
cuggcaggcucuagagaau

SEQ ID NO: 758722 - RNA, 19 nt, Homo sapiens
  misc_RNA (1)...(19): siRNA sense strand
uuccuuaagcucccagaua

SEQ ID NO: 758723 - RNA, 19 nt, Homo sapiens
  misc_RNA (1)...(19): siRNA sense strand
ggacuacuggcaggcucua

SEQ ID NO: 758724 - RNA, 19 nt, Homo sapiens
  misc_RNA (1)...(19): siRNA sense strand
cucggacucucuuggacua

SEQ ID NO: 758725 - RNA, 19 nt, Homo sapiens
  misc_RNA (1)...(19): siRNA sense strand
ucuccaagagcgucccaua

SEQ ID NO: 758726 - RNA, 19 nt, Homo sapiens
  misc_RNA (1)...(19): siRNA sense strand
gggcucuuuguuuguauuu

SEQ ID NO: 758727 - RNA, 19 nt, Homo sapiens
  misc_RNA (1)...(19): siRNA sense strand
gcauguacagucuaaaucc

SEQ ID NO: 758728 - RNA, 19 nt, Homo sapiens
  misc_RNA (1)...(19): siRNA sense strand
uccaagagcgucccauaca

SEQ ID NO: 758729 - RNA, 19 nt, Homo sapiens
  misc_RNA (1)...(19): siRNA sense strand
agcaagugguuugucagua

SEQ ID NO: 758730 - RNA, 19 nt, Homo sapiens
  misc_RNA (1)...(19): siRNA sense strand
ccauucagcaagugguuug

SEQ ID NO: 758731 - RNA, 19 nt, Homo sapiens
  misc_RNA (1)...(19): siRNA sense strand
gaaagcagcugaagacauu

SEQ ID NO: 758732 - RNA, 19 nt, Homo sapiens
  misc_RNA (1)...(19): siRNA sense strand
gcaagugguuugucaguaa

SEQ ID NO: 758733 - RNA, 19 nt, Homo sapiens
  misc_RNA (1)...(19): siRNA sense strand
ugacugaacugcuucugaa

SEQ ID NO: 758734 - RNA, 19 nt, Homo sapiens
  misc_RNA (1)...(19): siRNA sense strand
cgagucagguguacaaugu

SEQ ID NO: 758735 - RNA, 19 nt, Homo sapiens
  misc_RNA (1)...(19): siRNA sense strand
ucagacauguucaucaaug

SEQ ID NO: 758736 - RNA, 19 nt, Homo sapiens
  misc_RNA (1)...(19): siRNA sense strand
ggacagguacccaccauuc

SEQ ID NO: 758737 - RNA, 19 nt, Homo sapiens
  misc_RNA (1)...(19): siRNA sense strand
caagugguuugucaguaaa

SEQ ID NO: 758738 - RNA, 19 nt, Homo sapiens
  misc_RNA (1)...(19): siRNA sense strand
gagcgucccauacauuaaa

SEQ ID NO: 758739 - RNA, 19 nt, Homo sapiens
  misc_RNA (1)...(19): siRNA sense strand
caagagcgucccauacauu

SEQ ID NO: 758740 - RNA, 19 nt, Homo sapiens
  misc_RNA (1)...(19): siRNA sense strand
caagaaagacgggaacuuc

SEQ ID NO: 758741 - RNA, 19 nt, Homo sapiens
  misc_RNA (1)...(19): siRNA sense strand
gaaaacagacucagacaug

SEQ ID NO: 758742 - RNA, 19 nt, Homo sapiens
  misc_RNA (1)...(19): siRNA sense strand
gaagaugagauugauguau

SEQ ID NO: 758743 - RNA, 19 nt, Homo sapiens
  misc_RNA (1)...(19): siRNA sense strand
ggcaggcucuagagaauuc

SEQ ID NO: 758744 - RNA, 19 nt, Homo sapiens
  misc_RNA (1)...(19): siRNA sense strand
cagucuaaauccuuucaaa

SEQ ID NO: 758745 - RNA, 19 nt, Homo sapiens
  misc_RNA (1)...(19): siRNA sense strand
ggaaagcagcugaagacau

SEQ ID NO: 758746 - RNA, 19 nt, Homo sapiens
  misc_RNA (1)...(19): siRNA sense strand
acucagacauguucaucaa

SEQ ID NO: 758747 - RNA, 19 nt, Homo sapiens
  misc_RNA (1)...(19): siRNA sense strand
aagagcgucccauacauua

SEQ ID NO: 758748 - RNA, 19 nt, Homo sapiens
  misc_RNA (1)...(19): siRNA sense strand
ccaagagcgucccauacau

SEQ ID NO: 758749 - RNA, 19 nt, Homo sapiens
  misc_RNA (1)...(19): siRNA sense strand
uguacagucuaaauccuuu

SEQ ID NO: 758750 - RNA, 19 nt, Homo sapiens
  misc_RNA (1)...(19): siRNA sense strand
ucaaugaguuucccaucag

SEQ ID NO: 758751 - RNA, 19 nt, Homo sapiens
  misc_RNA (1)...(19): siRNA sense strand
agacgucuauuacaaucug

SEQ ID NO: 758752 - RNA, 19 nt, Homo sapiens
  misc_RNA (1)...(19): siRNA sense strand
gaagauuguccgccugucu

SEQ ID NO: 758753 - RNA, 19 nt, Homo sapiens
  misc_RNA (1)...(19): siRNA sense strand
gggacauuauccagaagga

SEQ ID NO: 758754 - RNA, 19 nt, Homo sapiens
  misc_RNA (1)...(19): siRNA sense strand
cgaagaugagauugaugua

SEQ ID NO: 758755 - RNA, 19 nt, Homo sapiens
  misc_RNA (1)...(19): siRNA sense strand
ggugaccucaucccacaaa

SEQ ID NO: 758756 - RNA, 19 nt, Homo sapiens
  misc_RNA (1)...(19): siRNA sense strand
ggacucucuuggacuacug

SEQ ID NO: 758757 - RNA, 19 nt, Homo sapiens
  misc_RNA (1)...(19): siRNA sense strand
cggcaccggcuacguguuu

SEQ ID NO: 758758 - RNA, 19 nt, Homo sapiens
  misc_RNA (1)...(19): siRNA sense strand
ucacuggcuucuugaaacu

SEQ ID NO: 758759 - RNA, 19 nt, Homo sapiens
  misc_RNA (1)...(19): siRNA sense strand
ccucaucccacaaacaguu

SEQ ID NO: 758760 - RNA, 19 nt, Homo sapiens
  misc_RNA (1)...(19): siRNA sense strand
uagcauguacagucuaaau

SEQ ID NO: 758761 - RNA, 19 nt, Homo sapiens
  misc_RNA (1)...(19): siRNA sense strand
ccgaagaugagauugaugu

SEQ ID NO: 758762 - RNA, 19 nt, Homo sapiens
  misc_RNA (1)...(19): siRNA sense strand
gaagggaaagcagcugaag

SEQ ID NO: 758763 - RNA, 19 nt, Homo sapiens
  misc_RNA (1)...(19): siRNA sense strand
guauauuugccuucugguu

SEQ ID NO: 758764 - RNA, 19 nt, Homo sapiens
  misc_RNA (1)...(19): siRNA sense strand
auuacaaucugacccugaa

SEQ ID NO: 758765 - RNA, 19 nt, Homo sapiens
  misc_RNA (1)...(19): siRNA sense strand
cuaucugacugaacugcuu

SEQ ID NO: 758766 - RNA, 19 nt, Homo sapiens
  misc_RNA (1)...(19): siRNA sense strand
gauguauauuugccuucug

SEQ ID NO: 758767 - RNA, 19 nt, Homo sapiens
  misc_RNA (1)...(19): siRNA sense strand
uguacaaugucuccaagag

SEQ ID NO: 758768 - RNA, 19 nt, Homo sapiens
  misc_RNA (1)...(19): siRNA sense strand
gaccucaucccacaaacag

SEQ ID NO: 758769 - RNA, 19 nt, Homo sapiens
  misc_RNA (1)...(19): siRNA sense strand
gcgagucagguguacaaug

SEQ ID NO: 758770 - RNA, 19 nt, Homo sapiens
  misc_RNA (1)...(19): siRNA sense strand
uccuuaagcucccagauac

SEQ ID NO: 758771 - RNA, 19 nt, Homo sapiens
  misc_RNA (1)...(19): siRNA sense strand
caugaugggcauagaaugg

SEQ ID NO: 758772 - RNA, 19 nt, Homo sapiens
  misc_RNA (1)...(19): siRNA sense strand
cuggcaggcucuagagaau

SEQ ID NO: 758773 - RNA, 19 nt, Homo sapiens
  misc_RNA (1)...(19): siRNA sense strand
uuccuuaagcucccagaua

SEQ ID NO: 758774 - RNA, 19 nt, Homo sapiens
  misc_RNA (1)...(19): siRNA sense strand
ggacuacuggcaggcucua

SEQ ID NO: 758775 - RNA, 19 nt, Homo sapiens
  misc_RNA (1)...(19): siRNA sense strand
cucggacucucuuggacua

SEQ ID NO: 758776 - RNA, 19 nt, Homo sapiens
  misc_RNA (1)...(19): siRNA sense strand
ucuccaagagcgucccaua

SEQ ID NO: 758777 - RNA, 19 nt, Homo sapiens
  misc_RNA (1)...(19): siRNA sense strand
gggcucuuuguuuguauuu

SEQ ID NO: 758778 - RNA, 19 nt, Homo sapiens
  misc_RNA (1)...(19): siRNA sense strand
gcauguacagucuaaaucc

SEQ ID NO: 758779 - RNA, 19 nt, Homo sapiens
  misc_RNA (1)...(19): siRNA sense strand
uccaagagcgucccauaca

SEQ ID NO: 758780 - RNA, 19 nt, Homo sapiens
  misc_RNA (1)...(19): siRNA sense strand
agcaagugguuugucagua

SEQ ID NO: 758781 - RNA, 19 nt, Homo sapiens
  misc_RNA (1)...(19): siRNA sense strand
ccauucagcaagugguuug

SEQ ID NO: 758782 - RNA, 19 nt, Homo sapiens
  misc_RNA (1)...(19): siRNA sense strand
ggcaauggcuggcauagua

SEQ ID NO: 758783 - RNA, 19 nt, Homo sapiens
  misc_RNA (1)...(19): siRNA sense strand
gcuggcaucuccaugacua

SEQ ID NO: 758784 - RNA, 19 nt, Homo sapiens
  misc_RNA (1)...(19): siRNA sense strand
gaaccaacucggccucuau

SEQ ID NO: 758785 - RNA, 19 nt, Homo sapiens
  misc_RNA (1)...(19): siRNA sense strand
gccuaaagaagcaguauaa

SEQ ID NO: 758786 - RNA, 19 nt, Homo sapiens
  misc_RNA (1)...(19): siRNA sense strand
caaggccuauacuggcuuu

SEQ ID NO: 758787 - RNA, 19 nt, Homo sapiens
  misc_RNA (1)...(19): siRNA sense strand
gcaacacucaacugcauug

SEQ ID NO: 758788 - RNA, 19 nt, Homo sapiens
  misc_RNA (1)...(19): siRNA sense strand
gauggaagccuuucuacac

SEQ ID NO: 758789 - RNA, 19 nt, Homo sapiens
  misc_RNA (1)...(19): siRNA sense strand
cggccucuaucccuacuuu

SEQ ID NO: 758790 - RNA, 19 nt, Homo sapiens
  misc_RNA (1)...(19): siRNA sense strand
gcaauggcuggcauaguau

SEQ ID NO: 758791 - RNA, 19 nt, Homo sapiens
  misc_RNA (1)...(19): siRNA sense strand
ccgcaacacucaacugcau

SEQ ID NO: 758792 - RNA, 19 nt, Homo sapiens
  misc_RNA (1)...(19): siRNA sense strand
gaacaugaccauuuucuac

SEQ ID NO: 758793 - RNA, 19 nt, Homo sapiens
  misc_RNA (1)...(19): siRNA sense strand
aguauggcuuccaacuaua

SEQ ID NO: 758794 - RNA, 19 nt, Homo sapiens
  misc_RNA (1)...(19): siRNA sense strand
gcaguccauuggugugagu

SEQ ID NO: 758795 - RNA, 19 nt, Homo sapiens
  misc_RNA (1)...(19): siRNA sense strand
acagauggaagccuuucua

SEQ ID NO: 758796 - RNA, 19 nt, Homo sapiens
  misc_RNA (1)...(19): siRNA sense strand
gacggcagccuuggagauu

SEQ ID NO: 758797 - RNA, 19 nt, Homo sapiens
  misc_RNA (1)...(19): siRNA sense strand
ucucugugcuguggaaugu

SEQ ID NO: 758798 - RNA, 19 nt, Homo sapiens
  misc_RNA (1)...(19): siRNA sense strand
ggccuaaagaagcaguaua

SEQ ID NO: 758799 - RNA, 19 nt, Homo sapiens
  misc_RNA (1)...(19): siRNA sense strand
ggacagauggaagccuuuc

SEQ ID NO: 758800 - RNA, 19 nt, Homo sapiens
  misc_RNA (1)...(19): siRNA sense strand
ccugagaccuggcuuugcu

SEQ ID NO: 758801 - RNA, 19 nt, Homo sapiens
  misc_RNA (1)...(19): siRNA sense strand
gaccuugugcaguccauug

SEQ ID NO: 758802 - RNA, 19 nt, Homo sapiens
  misc_RNA (1)...(19): siRNA sense strand
agaaccaacucggccucua

SEQ ID NO: 758803 - RNA, 19 nt, Homo sapiens
  misc_RNA (1)...(19): siRNA sense strand
gugcacugauggaggauac

SEQ ID NO: 758804 - RNA, 19 nt, Homo sapiens
  misc_RNA (1)...(19): siRNA sense strand
ggccuauacuggcuuugag

SEQ ID NO: 758805 - RNA, 19 nt, Homo sapiens
  misc_RNA (1)...(19): siRNA sense strand
cuacccagccuguggcaau

SEQ ID NO: 758806 - RNA, 19 nt, Homo sapiens
  misc_RNA (1)...(19): siRNA sense strand
gcucucagcugucaaugug

SEQ ID NO: 758807 - RNA, 19 nt, Homo sapiens
  misc_RNA (1)...(19): siRNA sense strand
cgucaacaccaccaucugu

SEQ ID NO: 758808 - RNA, 19 nt, Homo sapiens
  misc_RNA (1)...(19): siRNA sense strand
ggaaagcuaucauaaucuu

SEQ ID NO: 758809 - RNA, 19 nt, Homo sapiens
  misc_RNA (1)...(19): siRNA sense strand
ggaagcaugucgucuuuau

SEQ ID NO: 758810 - RNA, 19 nt, Homo sapiens
  misc_RNA (1)...(19): siRNA sense strand
gcaaggauguuaauuuuga

SEQ ID NO: 758811 - RNA, 19 nt, Homo sapiens
  misc_RNA (1)...(19): siRNA sense strand
gauggcagccggcucauaa

SEQ ID NO: 758812 - RNA, 19 nt, Homo sapiens
  misc_RNA (1)...(19): siRNA sense strand
ucauaaagguucauuugga

SEQ ID NO: 758813 - RNA, 19 nt, Homo sapiens
  misc_RNA (1)...(19): siRNA sense strand
gagaauccgcgucaaacua

SEQ ID NO: 758814 - RNA, 19 nt, Homo sapiens
  misc_RNA (1)...(19): siRNA sense strand
gggcaaggauguuaauuuu

SEQ ID NO: 758815 - RNA, 19 nt, Homo sapiens
  misc_RNA (1)...(19): siRNA sense strand
ucggaaagcuaucauaauc

SEQ ID NO: 758816 - RNA, 19 nt, Homo sapiens
  misc_RNA (1)...(19): siRNA sense strand
gcucauaaagguucauuug

SEQ ID NO: 758817 - RNA, 19 nt, Homo sapiens
  misc_RNA (1)...(19): siRNA sense strand
gaaauugugggcaagagaa

SEQ ID NO: 758818 - RNA, 19 nt, Homo sapiens
  misc_RNA (1)...(19): siRNA sense strand
gcgagaagccggacgaguu

SEQ ID NO: 758819 - RNA, 19 nt, Homo sapiens
  misc_RNA (1)...(19): siRNA sense strand
ucccagaguuucaauugua

SEQ ID NO: 758820 - RNA, 19 nt, Homo sapiens
  misc_RNA (1)...(19): siRNA sense strand
aacacaagguugaaacuuu

SEQ ID NO: 758821 - RNA, 19 nt, Homo sapiens
  misc_RNA (1)...(19): siRNA sense strand
ggucggaaagcuaucauaa

SEQ ID NO: 758822 - RNA, 19 nt, Homo sapiens
  misc_RNA (1)...(19): siRNA sense strand
caagagaauccgcgucaaa

SEQ ID NO: 758823 - RNA, 19 nt, Homo sapiens
  misc_RNA (1)...(19): siRNA sense strand
gaacacaagguugaaacuu

SEQ ID NO: 758824 - RNA, 19 nt, Homo sapiens
  misc_RNA (1)...(19): siRNA sense strand
gcagccggcucauaaaggu

SEQ ID NO: 758825 - RNA, 19 nt, Homo sapiens
  misc_RNA (1)...(19): siRNA sense strand
agaggagaauucugccuaa

SEQ ID NO: 758826 - RNA, 19 nt, Homo sapiens
  misc_RNA (1)...(19): siRNA sense strand
ugggaagcaugucgucuuu

SEQ ID NO: 758827 - RNA, 19 nt, Homo sapiens
  misc_RNA (1)...(19): siRNA sense strand
uuccucaacugaaaucuuu

SEQ ID NO: 758828 - RNA, 19 nt, Homo sapiens
  misc_RNA (1)...(19): siRNA sense strand
uaaggaaauugaaguuggu

SEQ ID NO: 758829 - RNA, 19 nt, Homo sapiens
  misc_RNA (1)...(19): siRNA sense strand
gcaagagaauccgcgucaa

SEQ ID NO: 758830 - RNA, 19 nt, Homo sapiens
  misc_RNA (1)...(19): siRNA sense strand
cccagaguuucaauuguaa

SEQ ID NO: 758831 - RNA, 19 nt, Homo sapiens
  misc_RNA (1)...(19): siRNA sense strand
cccaggagccguacucuga

SEQ ID NO: 758832 - RNA, 19 nt, Homo sapiens
  misc_RNA (1)...(19): siRNA sense strand
ggucuucccaagcgaaauu

SEQ ID NO: 758833 - RNA, 19 nt, Homo sapiens
  misc_RNA (1)...(19): siRNA sense strand
acacaagguugaaacuuuu

SEQ ID NO: 758834 - RNA, 19 nt, Homo sapiens
  misc_RNA (1)...(19): siRNA sense strand
gaauccgcgucaaacuaga

SEQ ID NO: 758835 - RNA, 19 nt, Homo sapiens
  misc_RNA (1)...(19): siRNA sense strand
gaagcccaauggcgagaag

SEQ ID NO: 758836 - RNA, 19 nt, Homo sapiens
  misc_RNA (1)...(19): siRNA sense strand
gcuaucauaaucuuuguuc

SEQ ID NO: 758837 - RNA, 19 nt, Homo sapiens
  misc_RNA (1)...(19): siRNA sense strand
gcagaacaauguggaacac

SEQ ID NO: 758838 - RNA, 19 nt, Homo sapiens
  misc_RNA (1)...(19): siRNA sense strand
cgggcaaggauguuaauuu

SEQ ID NO: 758839 - RNA, 19 nt, Homo sapiens
  misc_RNA (1)...(19): siRNA sense strand
uacggcagcuaaggaaauu

SEQ ID NO: 758840 - RNA, 19 nt, Homo sapiens
  misc_RNA (1)...(19): siRNA sense strand
gaugaacucggaccucaag

SEQ ID NO: 758841 - RNA, 19 nt, Homo sapiens
  misc_RNA (1)...(19): siRNA sense strand
ugaauauuacggcagcuaa

SEQ ID NO: 758842 - RNA, 19 nt, Homo sapiens
  misc_RNA (1)...(19): siRNA sense strand
gcuaaggaaauugaaguug

SEQ ID NO: 758843 - RNA, 19 nt, Homo sapiens
  misc_RNA (1)...(19): siRNA sense strand
gaggagaauucugccuaag

SEQ ID NO: 758844 - RNA, 19 nt, Homo sapiens
  misc_RNA (1)...(19): siRNA sense strand
cgagaagccggacgaguuc

SEQ ID NO: 758845 - RNA, 19 nt, Homo sapiens
  misc_RNA (1)...(19): siRNA sense strand
uaaagguucauuuggacaa

SEQ ID NO: 758846 - RNA, 19 nt, Homo sapiens
  misc_RNA (1)...(19): siRNA sense strand
gaagcucacgggcaaggau

SEQ ID NO: 758847 - RNA, 19 nt, Homo sapiens
  misc_RNA (1)...(19): siRNA sense strand
gggaagcaugucgucuuua

SEQ ID NO: 758848 - RNA, 19 nt, Homo sapiens
  misc_RNA (1)...(19): siRNA sense strand
ucacgggcaaggauguuaa

SEQ ID NO: 758849 - RNA, 19 nt, Homo sapiens
  misc_RNA (1)...(19): siRNA sense strand
gaauauuacggcagcuaag

SEQ ID NO: 758850 - RNA, 19 nt, Homo sapiens
  misc_RNA (1)...(19): siRNA sense strand
ucccguuccucaacugaaa

SEQ ID NO: 758851 - RNA, 19 nt, Homo sapiens
  misc_RNA (1)...(19): siRNA sense strand
cgaaauugugggcaagaga

SEQ ID NO: 758852 - RNA, 19 nt, Homo sapiens
  misc_RNA (1)...(19): siRNA sense strand
cggcagcuaaggaaauuga

SEQ ID NO: 758853 - RNA, 19 nt, Homo sapiens
  misc_RNA (1)...(19): siRNA sense strand
gaagcaugucgucuuuauc

SEQ ID NO: 758854 - RNA, 19 nt, Homo sapiens
  misc_RNA (1)...(19): siRNA sense strand
ggugguggucggaaagcua

SEQ ID NO: 758855 - RNA, 19 nt, Homo sapiens
  misc_RNA (1)...(19): siRNA sense strand
ggaacacaagguugaaacu

SEQ ID NO: 758856 - RNA, 19 nt, Homo sapiens
  misc_RNA (1)...(19): siRNA sense strand
ucugacagcugugcacgau

SEQ ID NO: 758857 - RNA, 19 nt, Homo sapiens
  misc_RNA (1)...(19): siRNA sense strand
ugccuaagccaacucgaaa

SEQ ID NO: 758858 - RNA, 19 nt, Homo sapiens
  misc_RNA (1)...(19): siRNA sense strand
agaauccgcgucaaacuag

SEQ ID NO: 758859 - RNA, 19 nt, Homo sapiens
  misc_RNA (1)...(19): siRNA sense strand
cagcuaaggaaauugaagu

SEQ ID NO: 758860 - RNA, 19 nt, Homo sapiens
  misc_RNA (1)...(19): siRNA sense strand
caggagccguacucugaca

SEQ ID NO: 758861 - RNA, 19 nt, Homo sapiens
  misc_RNA (1)...(19): siRNA sense strand
gcgaaauugugggcaagag

SEQ ID NO: 758862 - RNA, 19 nt, Homo sapiens
  misc_RNA (1)...(19): siRNA sense strand
uucuggagcuggagaugaa

SEQ ID NO: 758863 - RNA, 19 nt, Homo sapiens
  misc_RNA (1)...(19): siRNA sense strand
gaacuuaucuggacaggaa

SEQ ID NO: 758864 - RNA, 19 nt, Homo sapiens
  misc_RNA (1)...(19): siRNA sense strand
ggacggugcugcuggauuu

SEQ ID NO: 758865 - RNA, 19 nt, Homo sapiens
  misc_RNA (1)...(19): siRNA sense strand
gggaauuccugcaaguuua

SEQ ID NO: 758866 - RNA, 19 nt, Homo sapiens
  misc_RNA (1)...(19): siRNA sense strand
ccacuuacccucaaagaaa

SEQ ID NO: 758867 - RNA, 19 nt, Homo sapiens
  misc_RNA (1)...(19): siRNA sense strand
gcaauggccuggacuacau

SEQ ID NO: 758868 - RNA, 19 nt, Homo sapiens
  misc_RNA (1)...(19): siRNA sense strand
guacuacccuaucaauaug

SEQ ID NO: 758869 - RNA, 19 nt, Homo sapiens
  misc_RNA (1)...(19): siRNA sense strand
uaugauggcuuccacauuc

SEQ ID NO: 758870 - RNA, 19 nt, Homo sapiens
  misc_RNA (1)...(19): siRNA sense strand
gggaugccaccgacaauua

SEQ ID NO: 758871 - RNA, 19 nt, Homo sapiens
  misc_RNA (1)...(19): siRNA sense strand
ggccacagaugccagcuuu

SEQ ID NO: 758872 - RNA, 19 nt, Homo sapiens
  misc_RNA (1)...(19): siRNA sense strand
ggaaggagaacaaacugaa

SEQ ID NO: 758873 - RNA, 19 nt, Homo sapiens
  misc_RNA (1)...(19): siRNA sense strand
cagaaagaaugcccuccua

SEQ ID NO: 758874 - RNA, 19 nt, Homo sapiens
  misc_RNA (1)...(19): siRNA sense strand
ccagcuuuaucaucaaaua

SEQ ID NO: 758875 - RNA, 19 nt, Homo sapiens
  misc_RNA (1)...(19): siRNA sense strand
gagaccagauggaguggaa

SEQ ID NO: 758876 - RNA, 19 nt, Homo sapiens
  misc_RNA (1)...(19): siRNA sense strand
ccagguggauaaaguuuga

SEQ ID NO: 758877 - RNA, 19 nt, Homo sapiens
  misc_RNA (1)...(19): siRNA sense strand
gaaaguguccaaucagauc

SEQ ID NO: 758878 - RNA, 19 nt, Homo sapiens
  misc_RNA (1)...(19): siRNA sense strand
gaugaucggugccuucaag

SEQ ID NO: 758879 - RNA, 19 nt, Homo sapiens
  misc_RNA (1)...(19): siRNA sense strand
gggacagccucucaucauu

SEQ ID NO: 758880 - RNA, 19 nt, Homo sapiens
  misc_RNA (1)...(19): siRNA sense strand
gcagaagcaugaaugacau

SEQ ID NO: 758881 - RNA, 19 nt, Homo sapiens
  misc_RNA (1)...(19): siRNA sense strand
gaaagaaugcccuccuauc

SEQ ID NO: 758882 - RNA, 19 nt, Homo sapiens
  misc_RNA (1)...(19): siRNA sense strand
gaccagaagggacaucuuu

SEQ ID NO: 758883 - RNA, 19 nt, Homo sapiens
  misc_RNA (1)...(19): siRNA sense strand
gcccagagcagaagcauga

SEQ ID NO: 758884 - RNA, 19 nt, Homo sapiens
  misc_RNA (1)...(19): siRNA sense strand
gcaaaauccuacaaugaaa

SEQ ID NO: 758885 - RNA, 19 nt, Homo sapiens
  misc_RNA (1)...(19): siRNA sense strand
aagccaaacuucaucacua

SEQ ID NO: 758886 - RNA, 19 nt, Homo sapiens
  misc_RNA (1)...(19): siRNA sense strand
gacagcagcauggaucuua

SEQ ID NO: 758887 - RNA, 19 nt, Homo sapiens
  misc_RNA (1)...(19): siRNA sense strand
gcuucuggauuucaucuuu

SEQ ID NO: 758888 - RNA, 19 nt, Homo sapiens
  misc_RNA (1)...(19): siRNA sense strand
gagaguaaccggcaucauc

SEQ ID NO: 758889 - RNA, 19 nt, Homo sapiens
  misc_RNA (1)...(19): siRNA sense strand
guccaucucugccauccua

SEQ ID NO: 758890 - RNA, 19 nt, Homo sapiens
  misc_RNA (1)...(19): siRNA sense strand
gaaagcuggaccacacuaa

SEQ ID NO: 758891 - RNA, 19 nt, Homo sapiens
  misc_RNA (1)...(19): siRNA sense strand
caaacuucaucacuaccua

SEQ ID NO: 758892 - RNA, 19 nt, Homo sapiens
  misc_RNA (1)...(19): siRNA sense strand
ggagauuuccggaucagaa

SEQ ID NO: 758893 - RNA, 19 nt, Homo sapiens
  misc_RNA (1)...(19): siRNA sense strand
ggacccaaauauccggauu

SEQ ID NO: 758894 - RNA, 19 nt, Homo sapiens
  misc_RNA (1)...(19): siRNA sense strand
caccaacgcuucucuguac

SEQ ID NO: 758895 - RNA, 19 nt, Homo sapiens
  misc_RNA (1)...(19): siRNA sense strand
uggauacucugcagcauga

SEQ ID NO: 758896 - RNA, 19 nt, Homo sapiens
  misc_RNA (1)...(19): siRNA sense strand
uuauaaagauucccaugga

SEQ ID NO: 758897 - RNA, 19 nt, Homo sapiens
  misc_RNA (1)...(19): siRNA sense strand
ggaggagauuuccggauca

SEQ ID NO: 758898 - RNA, 19 nt, Homo sapiens
  misc_RNA (1)...(19): siRNA sense strand
gaauacaaccguguucaau

SEQ ID NO: 758899 - RNA, 19 nt, Homo sapiens
  misc_RNA (1)...(19): siRNA sense strand
gacaacauccucccagaga

SEQ ID NO: 758900 - RNA, 19 nt, Homo sapiens
  misc_RNA (1)...(19): siRNA sense strand
gcaaauuacggacgucugu

SEQ ID NO: 758901 - RNA, 19 nt, Homo sapiens
  misc_RNA (1)...(19): siRNA sense strand
acaagaagaggaagagaaa

SEQ ID NO: 758902 - RNA, 19 nt, Homo sapiens
  misc_RNA (1)...(19): siRNA sense strand
gaccuggccuggauugaca

SEQ ID NO: 758903 - RNA, 19 nt, Homo sapiens
  misc_RNA (1)...(19): siRNA sense strand
ggacagccucucaucauuc

SEQ ID NO: 758904 - RNA, 19 nt, Homo sapiens
  misc_RNA (1)...(19): siRNA sense strand
ucagugacguggccuacaa

SEQ ID NO: 758905 - RNA, 19 nt, Homo sapiens
  misc_RNA (1)...(19): siRNA sense strand
gcucauguccuucauccuu

SEQ ID NO: 758906 - RNA, 19 nt, Homo sapiens
  misc_RNA (1)...(19): siRNA sense strand
gauguucuguggaaucgau

SEQ ID NO: 758907 - RNA, 19 nt, Homo sapiens
  misc_RNA (1)...(19): siRNA sense strand
ggagucagccagguggaua

SEQ ID NO: 758908 - RNA, 19 nt, Homo sapiens
  misc_RNA (1)...(19): siRNA sense strand
gacaagaagaggaagagaa

SEQ ID NO: 758909 - RNA, 19 nt, Homo sapiens
  misc_RNA (1)...(19): siRNA sense strand
cuuaucagcuucaucuuca

SEQ ID NO: 758910 - RNA, 19 nt, Homo sapiens
  misc_RNA (1)...(19): siRNA sense strand
ggacuucaagccaaacuuc

SEQ ID NO: 758911 - RNA, 19 nt, Homo sapiens
  misc_RNA (1)...(19): siRNA sense strand
gcuaccaucuggaccuguu

SEQ ID NO: 758912 - RNA, 19 nt, Homo sapiens
  misc_RNA (1)...(19): siRNA sense strand
ggaaagcuggaccacacua

SEQ ID NO: 758913 - RNA, 19 nt, Homo sapiens
  misc_RNA (1)...(19): siRNA sense strand
ggaauuccugcaaguuuau

SEQ ID NO: 758914 - RNA, 19 nt, Homo sapiens
  misc_RNA (1)...(19): siRNA sense strand
ccacagaugccagcuuuau

SEQ ID NO: 758915 - RNA, 19 nt, Homo sapiens
  misc_RNA (1)...(19): siRNA sense strand
ccacauugggcuuccagua

SEQ ID NO: 758916 - RNA, 19 nt, Homo sapiens
  misc_RNA (1)...(19): siRNA sense strand
ccuccucccucgguuauaa

SEQ ID NO: 758917 - RNA, 19 nt, Homo sapiens
  misc_RNA (1)...(19): siRNA sense strand
agaggaaguugcccugguu

SEQ ID NO: 758918 - RNA, 19 nt, Homo sapiens
  misc_RNA (1)...(19): siRNA sense strand
guucuucgguggccugugu

SEQ ID NO: 758919 - RNA, 19 nt, Homo sapiens
  misc_RNA (1)...(19): siRNA sense strand
guggauaaaguuugaagaa

SEQ ID NO: 758920 - RNA, 19 nt, Homo sapiens
  misc_RNA (1)...(19): siRNA sense strand
ggaaaguguccaaucagau

SEQ ID NO: 758921 - RNA, 19 nt, Homo sapiens
  misc_RNA (1)...(19): siRNA sense strand
gagcaaaauccuacaauga

SEQ ID NO: 758922 - RNA, 19 nt, Homo sapiens
  misc_RNA (1)...(19): siRNA sense strand
gcccauccaccgcuccuua

SEQ ID NO: 758923 - RNA, 19 nt, Homo sapiens
  misc_RNA (1)...(19): siRNA sense strand
gacaagaggaaaucugugu

SEQ ID NO: 758924 - RNA, 19 nt, Homo sapiens
  misc_RNA (1)...(19): siRNA sense strand
gcuuugugcuccuuuaugg

SEQ ID NO: 758925 - RNA, 19 nt, Homo sapiens
  misc_RNA (1)...(19): siRNA sense strand
gguggccugugucuggaua

SEQ ID NO: 758926 - RNA, 19 nt, Homo sapiens
  misc_RNA (1)...(19): siRNA sense strand
ggagaaggcugggguagga

SEQ ID NO: 758927 - RNA, 19 nt, Homo sapiens
  misc_RNA (1)...(19): siRNA sense strand
caaguacuacccuaucaau

SEQ ID NO: 758928 - RNA, 19 nt, Homo sapiens
  misc_RNA (1)...(19): siRNA sense strand
gacagccucucaucauucu

SEQ ID NO: 758929 - RNA, 19 nt, Homo sapiens
  misc_RNA (1)...(19): siRNA sense strand
caagaggaaaucuguguuc

SEQ ID NO: 758930 - RNA, 19 nt, Homo sapiens
  misc_RNA (1)...(19): siRNA sense strand
ugaagaagauccccaagga

SEQ ID NO: 758931 - RNA, 19 nt, Homo sapiens
  misc_RNA (1)...(19): siRNA sense strand
guacccacuuacccucaaa

SEQ ID NO: 758932 - RNA, 19 nt, Homo sapiens
  misc_RNA (1)...(19): siRNA sense strand
ggaguuccgccucuggauu

SEQ ID NO: 758933 - RNA, 19 nt, Homo sapiens
  misc_RNA (1)...(19): siRNA sense strand
uugaugaauuucuggauga

SEQ ID NO: 758934 - RNA, 19 nt, Homo sapiens
  misc_RNA (1)...(19): siRNA sense strand
ggaugccaccgacaauuau

SEQ ID NO: 758935 - RNA, 19 nt, Homo sapiens
  misc_RNA (1)...(19): siRNA sense strand
agacagacaagaagaggaa

SEQ ID NO: 758936 - RNA, 19 nt, Homo sapiens
  misc_RNA (1)...(19): siRNA sense strand
ccaugacccugacccugaa

SEQ ID NO: 758937 - RNA, 19 nt, Homo sapiens
  misc_RNA (1)...(19): siRNA sense strand
gaucggugccuucaaguac

SEQ ID NO: 758938 - RNA, 19 nt, Homo sapiens
  misc_RNA (1)...(19): siRNA sense strand
ucagccagguggauaaagu

SEQ ID NO: 758939 - RNA, 19 nt, Homo sapiens
  misc_RNA (1)...(19): siRNA sense strand
ucacugccgucauugucaa

SEQ ID NO: 758940 - RNA, 19 nt, Homo sapiens
  misc_RNA (1)...(19): siRNA sense strand
ggcccauccucaucuuuga

SEQ ID NO: 758941 - RNA, 19 nt, Homo sapiens
  misc_RNA (1)...(19): siRNA sense strand
aaacacagaccagcggaaa

SEQ ID NO: 758942 - RNA, 19 nt, Homo sapiens
  misc_RNA (1)...(19): siRNA sense strand
ggacaguggcuccuuacca

SEQ ID NO: 758943 - RNA, 19 nt, Homo sapiens
  misc_RNA (1)...(19): siRNA sense strand
ucauugagaagcagauuga

SEQ ID NO: 758944 - RNA, 19 nt, Homo sapiens
  misc_RNA (1)...(19): siRNA sense strand
cuuccuggcucccauccua

SEQ ID NO: 758945 - RNA, 19 nt, Homo sapiens
  misc_RNA (1)...(19): siRNA sense strand
ugacgggaaucucugucuu

SEQ ID NO: 758946 - RNA, 19 nt, Homo sapiens
  misc_RNA (1)...(19): siRNA sense strand
gaaggagaacaaacugaag

SEQ ID NO: 758947 - RNA, 19 nt, Homo sapiens
  misc_RNA (1)...(19): siRNA sense strand
aguacuacccuaucaauau

SEQ ID NO: 758948 - RNA, 19 nt, Homo sapiens
  misc_RNA (1)...(19): siRNA sense strand
gaguuccgccucuggauug

SEQ ID NO: 758949 - RNA, 19 nt, Homo sapiens
  misc_RNA (1)...(19): siRNA sense strand
ccagaagggacaucuuuca

SEQ ID NO: 758950 - RNA, 19 nt, Homo sapiens
  misc_RNA (1)...(19): siRNA sense strand
gaucgcaggaauugaugaa

SEQ ID NO: 758951 - RNA, 19 nt, Homo sapiens
  misc_RNA (1)...(19): siRNA sense strand
acagaugccagcuuuauca

SEQ ID NO: 758952 - RNA, 19 nt, Homo sapiens
  misc_RNA (1)...(19): siRNA sense strand
uugcaacccucaugguaga

SEQ ID NO: 758953 - RNA, 19 nt, Homo sapiens
  misc_RNA (1)...(19): siRNA sense strand
acaacauccucccagagaa

SEQ ID NO: 758954 - RNA, 19 nt, Homo sapiens
  misc_RNA (1)...(19): siRNA sense strand
uaaccggcaucaucgucuu

SEQ ID NO: 758955 - RNA, 19 nt, Homo sapiens
  misc_RNA (1)...(19): siRNA sense strand
auacaaccguguucaaugc

SEQ ID NO: 758956 - RNA, 19 nt, Homo sapiens
  misc_RNA (1)...(19): siRNA sense strand
aaauauaucacccgcuuca

SEQ ID NO: 758957 - RNA, 19 nt, Homo sapiens
  misc_RNA (1)...(19): siRNA sense strand
gccucaagauggagacaga

SEQ ID NO: 758958 - RNA, 19 nt, Homo sapiens
  misc_RNA (1)...(19): siRNA sense strand
cauugcaacccucauggua

SEQ ID NO: 758959 - RNA, 19 nt, Homo sapiens
  misc_RNA (1)...(19): siRNA sense strand
caacauccucccagagaag

SEQ ID NO: 758960 - RNA, 19 nt, Homo sapiens
  misc_RNA (1)...(19): siRNA sense strand
gaucacugccgucauuguc

SEQ ID NO: 758961 - RNA, 19 nt, Homo sapiens
  misc_RNA (1)...(19): siRNA sense strand
caccaacgcgaucaccuuu

SEQ ID NO: 758962 - RNA, 19 nt, Homo sapiens
  misc_RNA (1)...(19): siRNA sense strand
ucaucuaccucggcuguau

SEQ ID NO: 758963 - RNA, 19 nt, Homo sapiens
  misc_RNA (1)...(19): siRNA sense strand
gaacuuaucuggacaggaa

SEQ ID NO: 758964 - RNA, 19 nt, Homo sapiens
  misc_RNA (1)...(19): siRNA sense strand
ggacggugcugcuggauuu

SEQ ID NO: 758965 - RNA, 19 nt, Homo sapiens
  misc_RNA (1)...(19): siRNA sense strand
gggaauuccugcaaguuua

SEQ ID NO: 758966 - RNA, 19 nt, Homo sapiens
  misc_RNA (1)...(19): siRNA sense strand
ccacuuacccucaaagaaa

SEQ ID NO: 758967 - RNA, 19 nt, Homo sapiens
  misc_RNA (1)...(19): siRNA sense strand
gcaauggccuggacuacau

SEQ ID NO: 758968 - RNA, 19 nt, Homo sapiens
  misc_RNA (1)...(19): siRNA sense strand
guacuacccuaucaauaug

SEQ ID NO: 758969 - RNA, 19 nt, Homo sapiens
  misc_RNA (1)...(19): siRNA sense strand
uaugauggcuuccacauuc

SEQ ID NO: 758970 - RNA, 19 nt, Homo sapiens
  misc_RNA (1)...(19): siRNA sense strand
gggaugccaccgacaauua

SEQ ID NO: 758971 - RNA, 19 nt, Homo sapiens
  misc_RNA (1)...(19): siRNA sense strand
ggccacagaugccagcuuu

SEQ ID NO: 758972 - RNA, 19 nt, Homo sapiens
  misc_RNA (1)...(19): siRNA sense strand
ggaaggagaacaaacugaa

SEQ ID NO: 758973 - RNA, 19 nt, Homo sapiens
  misc_RNA (1)...(19): siRNA sense strand
cagaaagaaugcccuccua

SEQ ID NO: 758974 - RNA, 19 nt, Homo sapiens
  misc_RNA (1)...(19): siRNA sense strand
ccagcuuuaucaucaaaua

SEQ ID NO: 758975 - RNA, 19 nt, Homo sapiens
  misc_RNA (1)...(19): siRNA sense strand
gagaccagauggaguggaa

SEQ ID NO: 758976 - RNA, 19 nt, Homo sapiens
  misc_RNA (1)...(19): siRNA sense strand
ccagguggauaaaguuuga

SEQ ID NO: 758977 - RNA, 19 nt, Homo sapiens
  misc_RNA (1)...(19): siRNA sense strand
gaugaucggugccuucaag

SEQ ID NO: 758978 - RNA, 19 nt, Homo sapiens
  misc_RNA (1)...(19): siRNA sense strand
gggacagccucucaucauu

SEQ ID NO: 758979 - RNA, 19 nt, Homo sapiens
  misc_RNA (1)...(19): siRNA sense strand
gcagaagcaugaaugacau

SEQ ID NO: 758980 - RNA, 19 nt, Homo sapiens
  misc_RNA (1)...(19): siRNA sense strand
gaaagaaugcccuccuauc

SEQ ID NO: 758981 - RNA, 19 nt, Homo sapiens
  misc_RNA (1)...(19): siRNA sense strand
gaccagaagggacaucuuu

SEQ ID NO: 758982 - RNA, 19 nt, Homo sapiens
  misc_RNA (1)...(19): siRNA sense strand
gcccagagcagaagcauga

SEQ ID NO: 758983 - RNA, 19 nt, Homo sapiens
  misc_RNA (1)...(19): siRNA sense strand
gcaaaauccuacaaugaaa

SEQ ID NO: 758984 - RNA, 19 nt, Homo sapiens
  misc_RNA (1)...(19): siRNA sense strand
aagccaaacuucaucacua

SEQ ID NO: 758985 - RNA, 19 nt, Homo sapiens
  misc_RNA (1)...(19): siRNA sense strand
gacagcagcauggaucuua

SEQ ID NO: 758986 - RNA, 19 nt, Homo sapiens
  misc_RNA (1)...(19): siRNA sense strand
gcuucuggauuucaucuuu

SEQ ID NO: 758987 - RNA, 19 nt, Homo sapiens
  misc_RNA (1)...(19): siRNA sense strand
gagaguaaccggcaucauc

SEQ ID NO: 758988 - RNA, 19 nt, Homo sapiens
  misc_RNA (1)...(19): siRNA sense strand
ggagauuuccggaucagaa

SEQ ID NO: 758989 - RNA, 19 nt, Homo sapiens
  misc_RNA (1)...(19): siRNA sense strand
gaaagcuggaccacacuaa

SEQ ID NO: 758990 - RNA, 19 nt, Homo sapiens
  misc_RNA (1)...(19): siRNA sense strand
caaacuucaucacuaccua

SEQ ID NO: 758991 - RNA, 19 nt, Homo sapiens
  misc_RNA (1)...(19): siRNA sense strand
guccaucucugccauccua

SEQ ID NO: 758992 - RNA, 19 nt, Homo sapiens
  misc_RNA (1)...(19): siRNA sense strand
ggacccaaauauccggauu

SEQ ID NO: 758993 - RNA, 19 nt, Homo sapiens
  misc_RNA (1)...(19): siRNA sense strand
caccaacgcuucucuguac

SEQ ID NO: 758994 - RNA, 19 nt, Homo sapiens
  misc_RNA (1)...(19): siRNA sense strand
uggauacucugcagcauga

SEQ ID NO: 758995 - RNA, 19 nt, Homo sapiens
  misc_RNA (1)...(19): siRNA sense strand
ggaggagauuuccggauca

SEQ ID NO: 758996 - RNA, 19 nt, Homo sapiens
  misc_RNA (1)...(19): siRNA sense strand
gaauacaaccguguucaau

SEQ ID NO: 758997 - RNA, 19 nt, Homo sapiens
  misc_RNA (1)...(19): siRNA sense strand
gcaaauuacggacgucugu

SEQ ID NO: 758998 - RNA, 19 nt, Homo sapiens
  misc_RNA (1)...(19): siRNA sense strand
ggacagccucucaucauuc

SEQ ID NO: 758999 - RNA, 19 nt, Homo sapiens
  misc_RNA (1)...(19): siRNA sense strand
ucagugacguggccuacaa

SEQ ID NO: 759000 - RNA, 19 nt, Homo sapiens
  misc_RNA (1)...(19): siRNA sense strand
gcucauguccuucauccuu

SEQ ID NO: 759001 - RNA, 19 nt, Homo sapiens
  misc_RNA (1)...(19): siRNA sense strand
gauguucuguggaaucgau

SEQ ID NO: 759002 - RNA, 19 nt, Homo sapiens
  misc_RNA (1)...(19): siRNA sense strand
ggagucagccagguggaua

SEQ ID NO: 759003 - RNA, 19 nt, Homo sapiens
  misc_RNA (1)...(19): siRNA sense strand
cuuaucagcuucaucuuca

SEQ ID NO: 759004 - RNA, 19 nt, Homo sapiens
  misc_RNA (1)...(19): siRNA sense strand
ggacuucaagccaaacuuc

SEQ ID NO: 759005 - RNA, 19 nt, Homo sapiens
  misc_RNA (1)...(19): siRNA sense strand
gcuaccaucuggaccuguu

SEQ ID NO: 759006 - RNA, 19 nt, Homo sapiens
  misc_RNA (1)...(19): siRNA sense strand
ggaaagcuggaccacacua

SEQ ID NO: 759007 - RNA, 19 nt, Homo sapiens
  misc_RNA (1)...(19): siRNA sense strand
ggaauuccugcaaguuuau

SEQ ID NO: 759008 - RNA, 19 nt, Homo sapiens
  misc_RNA (1)...(19): siRNA sense strand
ccacagaugccagcuuuau

SEQ ID NO: 759009 - RNA, 19 nt, Homo sapiens
  misc_RNA (1)...(19): siRNA sense strand
guucuucgguggccugugu

SEQ ID NO: 759010 - RNA, 19 nt, Homo sapiens
  misc_RNA (1)...(19): siRNA sense strand
ccacauugggcuuccagua

SEQ ID NO: 759011 - RNA, 19 nt, Homo sapiens
  misc_RNA (1)...(19): siRNA sense strand
agaggaaguugcccugguu

SEQ ID NO: 759012 - RNA, 19 nt, Homo sapiens
  misc_RNA (1)...(19): siRNA sense strand
guggauaaaguuugaagaa

SEQ ID NO: 759013 - RNA, 19 nt, Homo sapiens
  misc_RNA (1)...(19): siRNA sense strand
gagcaaaauccuacaauga

SEQ ID NO: 759014 - RNA, 19 nt, Homo sapiens
  misc_RNA (1)...(19): siRNA sense strand
gcccauccaccgcuccuua

SEQ ID NO: 759015 - RNA, 19 nt, Homo sapiens
  misc_RNA (1)...(19): siRNA sense strand
gacaagaggaaaucugugu

SEQ ID NO: 759016 - RNA, 19 nt, Homo sapiens
  misc_RNA (1)...(19): siRNA sense strand
gcuuugugcuccuuuaugg

SEQ ID NO: 759017 - RNA, 19 nt, Homo sapiens
  misc_RNA (1)...(19): siRNA sense strand
gguggccugugucuggaua

SEQ ID NO: 759018 - RNA, 19 nt, Homo sapiens
  misc_RNA (1)...(19): siRNA sense strand
ggagaaggcugggguagga

SEQ ID NO: 759019 - RNA, 19 nt, Homo sapiens
  misc_RNA (1)...(19): siRNA sense strand
caaguacuacccuaucaau

SEQ ID NO: 759020 - RNA, 19 nt, Homo sapiens
  misc_RNA (1)...(19): siRNA sense strand
gacagccucucaucauucu

SEQ ID NO: 759021 - RNA, 19 nt, Homo sapiens
  misc_RNA (1)...(19): siRNA sense strand
caagaggaaaucuguguuc

SEQ ID NO: 759022 - RNA, 19 nt, Homo sapiens
  misc_RNA (1)...(19): siRNA sense strand
ugaagaagauccccaagga

SEQ ID NO: 759023 - RNA, 19 nt, Homo sapiens
  misc_RNA (1)...(19): siRNA sense strand
uugaugaauuucuggauga

SEQ ID NO: 759024 - RNA, 19 nt, Homo sapiens
  misc_RNA (1)...(19): siRNA sense strand
guacccacuuacccucaaa

SEQ ID NO: 759025 - RNA, 19 nt, Homo sapiens
  misc_RNA (1)...(19): siRNA sense strand
ggaguuccgccucuggauu

SEQ ID NO: 759026 - RNA, 19 nt, Homo sapiens
  misc_RNA (1)...(19): siRNA sense strand
ggaugccaccgacaauuau

SEQ ID NO: 759027 - RNA, 19 nt, Homo sapiens
  misc_RNA (1)...(19): siRNA sense strand
ccaugacccugacccugaa

SEQ ID NO: 759028 - RNA, 19 nt, Homo sapiens
  misc_RNA (1)...(19): siRNA sense strand
gaucggugccuucaaguac

SEQ ID NO: 759029 - RNA, 19 nt, Homo sapiens
  misc_RNA (1)...(19): siRNA sense strand
ucagccagguggauaaagu

SEQ ID NO: 759030 - RNA, 19 nt, Homo sapiens
  misc_RNA (1)...(19): siRNA sense strand
ucacugccgucauugucaa

SEQ ID NO: 759031 - RNA, 19 nt, Homo sapiens
  misc_RNA (1)...(19): siRNA sense strand
ggcccauccucaucuuuga

SEQ ID NO: 759032 - RNA, 19 nt, Homo sapiens
  misc_RNA (1)...(19): siRNA sense strand
aaacacagaccagcggaaa

SEQ ID NO: 759033 - RNA, 19 nt, Homo sapiens
  misc_RNA (1)...(19): siRNA sense strand
ggacaguggcuccuuacca

SEQ ID NO: 759034 - RNA, 19 nt, Homo sapiens
  misc_RNA (1)...(19): siRNA sense strand
ucauugagaagcagauuga

SEQ ID NO: 759035 - RNA, 19 nt, Homo sapiens
  misc_RNA (1)...(19): siRNA sense strand
cuuccuggcucccauccua

SEQ ID NO: 759036 - RNA, 19 nt, Homo sapiens
  misc_RNA (1)...(19): siRNA sense strand
ugacgggaaucucugucuu

SEQ ID NO: 759037 - RNA, 19 nt, Homo sapiens
  misc_RNA (1)...(19): siRNA sense strand
gaaggagaacaaacugaag

SEQ ID NO: 759038 - RNA, 19 nt, Homo sapiens
  misc_RNA (1)...(19): siRNA sense strand
aguacuacccuaucaauau

SEQ ID NO: 759039 - RNA, 19 nt, Homo sapiens
  misc_RNA (1)...(19): siRNA sense strand
gaguuccgccucuggauug

SEQ ID NO: 759040 - RNA, 19 nt, Homo sapiens
  misc_RNA (1)...(19): siRNA sense strand
ccagaagggacaucuuuca

SEQ ID NO: 759041 - RNA, 19 nt, Homo sapiens
  misc_RNA (1)...(19): siRNA sense strand
gaucgcaggaauugaugaa

SEQ ID NO: 759042 - RNA, 19 nt, Homo sapiens
  misc_RNA (1)...(19): siRNA sense strand
acagaugccagcuuuauca

SEQ ID NO: 759043 - RNA, 19 nt, Homo sapiens
  misc_RNA (1)...(19): siRNA sense strand
uugcaacccucaugguaga

SEQ ID NO: 759044 - RNA, 19 nt, Homo sapiens
  misc_RNA (1)...(19): siRNA sense strand
uaaccggcaucaucgucuu

SEQ ID NO: 759045 - RNA, 19 nt, Homo sapiens
  misc_RNA (1)...(19): siRNA sense strand
auacaaccguguucaaugc

SEQ ID NO: 759046 - RNA, 19 nt, Homo sapiens
  misc_RNA (1)...(19): siRNA sense strand
aaauauaucacccgcuuca

SEQ ID NO: 759047 - RNA, 19 nt, Homo sapiens
  misc_RNA (1)...(19): siRNA sense strand
gccucaagauggagacaga

SEQ ID NO: 759048 - RNA, 19 nt, Homo sapiens
  misc_RNA (1)...(19): siRNA sense strand
cauugcaacccucauggua

SEQ ID NO: 759049 - RNA, 19 nt, Homo sapiens
  misc_RNA (1)...(19): siRNA sense strand
gaucacugccgucauuguc

SEQ ID NO: 759050 - RNA, 19 nt, Homo sapiens
  misc_RNA (1)...(19): siRNA sense strand
caccaacgcgaucaccuuu

SEQ ID NO: 759051 - RNA, 19 nt, Homo sapiens
  misc_RNA (1)...(19): siRNA sense strand
ucaucuaccucggcuguau

SEQ ID NO: 759052 - RNA, 19 nt, Homo sapiens
  misc_RNA (1)...(19): siRNA sense strand
uuuggacaguggcuccuua

SEQ ID NO: 759053 - RNA, 19 nt, Homo sapiens
  misc_RNA (1)...(19): siRNA sense strand
agaaggagugucugagcua

SEQ ID NO: 759054 - RNA, 19 nt, Homo sapiens
  misc_RNA (1)...(19): siRNA sense strand
acccaaauauccggauuga

SEQ ID NO: 759055 - RNA, 19 nt, Homo sapiens
  misc_RNA (1)...(19): siRNA sense strand
cuucaucacuaccuacaag

SEQ ID NO: 759056 - RNA, 19 nt, Homo sapiens
  misc_RNA (1)...(19): siRNA sense strand
cuaucaauauggacuucaa

SEQ ID NO: 759057 - RNA, 19 nt, Homo sapiens
  misc_RNA (1)...(19): siRNA sense strand
ccucuucgacuucagcaaa

SEQ ID NO: 759058 - RNA, 19 nt, Homo sapiens
  misc_RNA (1)...(19): siRNA sense strand
gggcccauccucaucuuug

SEQ ID NO: 759059 - RNA, 19 nt, Homo sapiens
  misc_RNA (1)...(19): siRNA sense strand
gccugugucuggauaucaa

SEQ ID NO: 759060 - RNA, 19 nt, Homo sapiens
  misc_RNA (1)...(19): siRNA sense strand
acaccaacgcuucucugua

SEQ ID NO: 759061 - RNA, 19 nt, Homo sapiens
  misc_RNA (1)...(19): siRNA sense strand
gauccugggccucaucauc

SEQ ID NO: 759062 - RNA, 19 nt, Homo sapiens
  misc_RNA (1)...(19): siRNA sense strand
ccacaucgacagccucaag

SEQ ID NO: 759063 - RNA, 19 nt, Homo sapiens
  misc_RNA (1)...(19): siRNA sense strand
gaacuuaucuggacaggaa

SEQ ID NO: 759064 - RNA, 19 nt, Homo sapiens
  misc_RNA (1)...(19): siRNA sense strand
ggacggugcugcuggauuu

SEQ ID NO: 759065 - RNA, 19 nt, Homo sapiens
  misc_RNA (1)...(19): siRNA sense strand
gggaauuccugcaaguuua

SEQ ID NO: 759066 - RNA, 19 nt, Homo sapiens
  misc_RNA (1)...(19): siRNA sense strand
ccacuuacccucaaagaaa

SEQ ID NO: 759067 - RNA, 19 nt, Homo sapiens
  misc_RNA (1)...(19): siRNA sense strand
gcaauggccuggacuacau

SEQ ID NO: 759068 - RNA, 19 nt, Homo sapiens
  misc_RNA (1)...(19): siRNA sense strand
guacuacccuaucaauaug

SEQ ID NO: 759069 - RNA, 19 nt, Homo sapiens
  misc_RNA (1)...(19): siRNA sense strand
uaugauggcuuccacauuc

SEQ ID NO: 759070 - RNA, 19 nt, Homo sapiens
  misc_RNA (1)...(19): siRNA sense strand
gggaugccaccgacaauua

SEQ ID NO: 759071 - RNA, 19 nt, Homo sapiens
  misc_RNA (1)...(19): siRNA sense strand
ggccacagaugccagcuuu

SEQ ID NO: 759072 - RNA, 19 nt, Homo sapiens
  misc_RNA (1)...(19): siRNA sense strand
ggaaggagaacaaacugaa

SEQ ID NO: 759073 - RNA, 19 nt, Homo sapiens
  misc_RNA (1)...(19): siRNA sense strand
cagaaagaaugcccuccua

SEQ ID NO: 759074 - RNA, 19 nt, Homo sapiens
  misc_RNA (1)...(19): siRNA sense strand
ccagcuuuaucaucaaaua

SEQ ID NO: 759075 - RNA, 19 nt, Homo sapiens
  misc_RNA (1)...(19): siRNA sense strand
gagaccagauggaguggaa

SEQ ID NO: 759076 - RNA, 19 nt, Homo sapiens
  misc_RNA (1)...(19): siRNA sense strand
ccagguggauaaaguuuga

SEQ ID NO: 759077 - RNA, 19 nt, Homo sapiens
  misc_RNA (1)...(19): siRNA sense strand
gaaaguguccaaucagauc

SEQ ID NO: 759078 - RNA, 19 nt, Homo sapiens
  misc_RNA (1)...(19): siRNA sense strand
gaugaucggugccuucaag

SEQ ID NO: 759079 - RNA, 19 nt, Homo sapiens
  misc_RNA (1)...(19): siRNA sense strand
gggacagccucucaucauu

SEQ ID NO: 759080 - RNA, 19 nt, Homo sapiens
  misc_RNA (1)...(19): siRNA sense strand
gcagaagcaugaaugacau

SEQ ID NO: 759081 - RNA, 19 nt, Homo sapiens
  misc_RNA (1)...(19): siRNA sense strand
gaaagaaugcccuccuauc

SEQ ID NO: 759082 - RNA, 19 nt, Homo sapiens
  misc_RNA (1)...(19): siRNA sense strand
gaccagaagggacaucuuu

SEQ ID NO: 759083 - RNA, 19 nt, Homo sapiens
  misc_RNA (1)...(19): siRNA sense strand
gcccagagcagaagcauga

SEQ ID NO: 759084 - RNA, 19 nt, Homo sapiens
  misc_RNA (1)...(19): siRNA sense strand
gcaaaauccuacaaugaaa

SEQ ID NO: 759085 - RNA, 19 nt, Homo sapiens
  misc_RNA (1)...(19): siRNA sense strand
aagccaaacuucaucacua

SEQ ID NO: 759086 - RNA, 19 nt, Homo sapiens
  misc_RNA (1)...(19): siRNA sense strand
gacagcagcauggaucuua

SEQ ID NO: 759087 - RNA, 19 nt, Homo sapiens
  misc_RNA (1)...(19): siRNA sense strand
gcuucuggauuucaucuuu

SEQ ID NO: 759088 - RNA, 19 nt, Homo sapiens
  misc_RNA (1)...(19): siRNA sense strand
gagaguaaccggcaucauc

SEQ ID NO: 759089 - RNA, 19 nt, Homo sapiens
  misc_RNA (1)...(19): siRNA sense strand
guccaucucugccauccua

SEQ ID NO: 759090 - RNA, 19 nt, Homo sapiens
  misc_RNA (1)...(19): siRNA sense strand
gaaagcuggaccacacuaa

SEQ ID NO: 759091 - RNA, 19 nt, Homo sapiens
  misc_RNA (1)...(19): siRNA sense strand
caaacuucaucacuaccua

SEQ ID NO: 759092 - RNA, 19 nt, Homo sapiens
  misc_RNA (1)...(19): siRNA sense strand
ggagauuuccggaucagaa

SEQ ID NO: 759093 - RNA, 19 nt, Homo sapiens
  misc_RNA (1)...(19): siRNA sense strand
ggacccaaauauccggauu

SEQ ID NO: 759094 - RNA, 19 nt, Homo sapiens
  misc_RNA (1)...(19): siRNA sense strand
caccaacgcuucucuguac

SEQ ID NO: 759095 - RNA, 19 nt, Homo sapiens
  misc_RNA (1)...(19): siRNA sense strand
uggauacucugcagcauga

SEQ ID NO: 759096 - RNA, 19 nt, Homo sapiens
  misc_RNA (1)...(19): siRNA sense strand
uuauaaagauucccaugga

SEQ ID NO: 759097 - RNA, 19 nt, Homo sapiens
  misc_RNA (1)...(19): siRNA sense strand
ggaggagauuuccggauca

SEQ ID NO: 759098 - RNA, 19 nt, Homo sapiens
  misc_RNA (1)...(19): siRNA sense strand
gaauacaaccguguucaau

SEQ ID NO: 759099 - RNA, 19 nt, Homo sapiens
  misc_RNA (1)...(19): siRNA sense strand
gacaacauccucccagaga

SEQ ID NO: 759100 - RNA, 19 nt, Homo sapiens
  misc_RNA (1)...(19): siRNA sense strand
gcaaauuacggacgucugu

SEQ ID NO: 759101 - RNA, 19 nt, Homo sapiens
  misc_RNA (1)...(19): siRNA sense strand
acaagaagaggaagagaaa

SEQ ID NO: 759102 - RNA, 19 nt, Homo sapiens
  misc_RNA (1)...(19): siRNA sense strand
gaccuggccuggauugaca

SEQ ID NO: 759103 - RNA, 19 nt, Homo sapiens
  misc_RNA (1)...(19): siRNA sense strand
ggacagccucucaucauuc

SEQ ID NO: 759104 - RNA, 19 nt, Homo sapiens
  misc_RNA (1)...(19): siRNA sense strand
ucagugacguggccuacaa

SEQ ID NO: 759105 - RNA, 19 nt, Homo sapiens
  misc_RNA (1)...(19): siRNA sense strand
gcucauguccuucauccuu

SEQ ID NO: 759106 - RNA, 19 nt, Homo sapiens
  misc_RNA (1)...(19): siRNA sense strand
gauguucuguggaaucgau

SEQ ID NO: 759107 - RNA, 19 nt, Homo sapiens
  misc_RNA (1)...(19): siRNA sense strand
ggagucagccagguggaua

SEQ ID NO: 759108 - RNA, 19 nt, Homo sapiens
  misc_RNA (1)...(19): siRNA sense strand
gacaagaagaggaagagaa

SEQ ID NO: 759109 - RNA, 19 nt, Homo sapiens
  misc_RNA (1)...(19): siRNA sense strand
cuuaucagcuucaucuuca

SEQ ID NO: 759110 - RNA, 19 nt, Homo sapiens
  misc_RNA (1)...(19): siRNA sense strand
ggacuucaagccaaacuuc

SEQ ID NO: 759111 - RNA, 19 nt, Homo sapiens
  misc_RNA (1)...(19): siRNA sense strand
gcuaccaucuggaccuguu

SEQ ID NO: 759112 - RNA, 19 nt, Homo sapiens
  misc_RNA (1)...(19): siRNA sense strand
ggaaagcuggaccacacua

SEQ ID NO: 759113 - RNA, 19 nt, Homo sapiens
  misc_RNA (1)...(19): siRNA sense strand
ggaauuccugcaaguuuau

SEQ ID NO: 759114 - RNA, 19 nt, Homo sapiens
  misc_RNA (1)...(19): siRNA sense strand
ccacagaugccagcuuuau

SEQ ID NO: 759115 - RNA, 19 nt, Homo sapiens
  misc_RNA (1)...(19): siRNA sense strand
ccacauugggcuuccagua

SEQ ID NO: 759116 - RNA, 19 nt, Homo sapiens
  misc_RNA (1)...(19): siRNA sense strand
ccuccucccucgguuauaa

SEQ ID NO: 759117 - RNA, 19 nt, Homo sapiens
  misc_RNA (1)...(19): siRNA sense strand
agaggaaguugcccugguu

SEQ ID NO: 759118 - RNA, 19 nt, Homo sapiens
  misc_RNA (1)...(19): siRNA sense strand
guucuucgguggccugugu

SEQ ID NO: 759119 - RNA, 19 nt, Homo sapiens
  misc_RNA (1)...(19): siRNA sense strand
guggauaaaguuugaagaa

SEQ ID NO: 759120 - RNA, 19 nt, Homo sapiens
  misc_RNA (1)...(19): siRNA sense strand
ggaaaguguccaaucagau

SEQ ID NO: 759121 - RNA, 19 nt, Homo sapiens
  misc_RNA (1)...(19): siRNA sense strand
gagcaaaauccuacaauga

SEQ ID NO: 759122 - RNA, 19 nt, Homo sapiens
  misc_RNA (1)...(19): siRNA sense strand
gcccauccaccgcuccuua

SEQ ID NO: 759123 - RNA, 19 nt, Homo sapiens
  misc_RNA (1)...(19): siRNA sense strand
gacaagaggaaaucugugu

SEQ ID NO: 759124 - RNA, 19 nt, Homo sapiens
  misc_RNA (1)...(19): siRNA sense strand
gcuuugugcuccuuuaugg

SEQ ID NO: 759125 - RNA, 19 nt, Homo sapiens
  misc_RNA (1)...(19): siRNA sense strand
gguggccugugucuggaua

SEQ ID NO: 759126 - RNA, 19 nt, Homo sapiens
  misc_RNA (1)...(19): siRNA sense strand
ggagaaggcugggguagga

SEQ ID NO: 759127 - RNA, 19 nt, Homo sapiens
  misc_RNA (1)...(19): siRNA sense strand
caaguacuacccuaucaau

SEQ ID NO: 759128 - RNA, 19 nt, Homo sapiens
  misc_RNA (1)...(19): siRNA sense strand
gacagccucucaucauucu

SEQ ID NO: 759129 - RNA, 19 nt, Homo sapiens
  misc_RNA (1)...(19): siRNA sense strand
caagaggaaaucuguguuc

SEQ ID NO: 759130 - RNA, 19 nt, Homo sapiens
  misc_RNA (1)...(19): siRNA sense strand
ugaagaagauccccaagga

SEQ ID NO: 759131 - RNA, 19 nt, Homo sapiens
  misc_RNA (1)...(19): siRNA sense strand
guacccacuuacccucaaa

SEQ ID NO: 759132 - RNA, 19 nt, Homo sapiens
  misc_RNA (1)...(19): siRNA sense strand
ggaguuccgccucuggauu

SEQ ID NO: 759133 - RNA, 19 nt, Homo sapiens
  misc_RNA (1)...(19): siRNA sense strand
uugaugaauuucuggauga

SEQ ID NO: 759134 - RNA, 19 nt, Homo sapiens
  misc_RNA (1)...(19): siRNA sense strand
ggaugccaccgacaauuau

SEQ ID NO: 759135 - RNA, 19 nt, Homo sapiens
  misc_RNA (1)...(19): siRNA sense strand
agacagacaagaagaggaa

SEQ ID NO: 759136 - RNA, 19 nt, Homo sapiens
  misc_RNA (1)...(19): siRNA sense strand
ccaugacccugacccugaa

SEQ ID NO: 759137 - RNA, 19 nt, Homo sapiens
  misc_RNA (1)...(19): siRNA sense strand
gaucggugccuucaaguac

SEQ ID NO: 759138 - RNA, 19 nt, Homo sapiens
  misc_RNA (1)...(19): siRNA sense strand
ucagccagguggauaaagu

SEQ ID NO: 759139 - RNA, 19 nt, Homo sapiens
  misc_RNA (1)...(19): siRNA sense strand
ucacugccgucauugucaa

SEQ ID NO: 759140 - RNA, 19 nt, Homo sapiens
  misc_RNA (1)...(19): siRNA sense strand
ggcccauccucaucuuuga

SEQ ID NO: 759141 - RNA, 19 nt, Homo sapiens
  misc_RNA (1)...(19): siRNA sense strand
aaacacagaccagcggaaa

SEQ ID NO: 759142 - RNA, 19 nt, Homo sapiens
  misc_RNA (1)...(19): siRNA sense strand
ggacaguggcuccuuacca

SEQ ID NO: 759143 - RNA, 19 nt, Homo sapiens
  misc_RNA (1)...(19): siRNA sense strand
ucauugagaagcagauuga

SEQ ID NO: 759144 - RNA, 19 nt, Homo sapiens
  misc_RNA (1)...(19): siRNA sense strand
cuuccuggcucccauccua

SEQ ID NO: 759145 - RNA, 19 nt, Homo sapiens
  misc_RNA (1)...(19): siRNA sense strand
ugacgggaaucucugucuu

SEQ ID NO: 759146 - RNA, 19 nt, Homo sapiens
  misc_RNA (1)...(19): siRNA sense strand
gaaggagaacaaacugaag

SEQ ID NO: 759147 - RNA, 19 nt, Homo sapiens
  misc_RNA (1)...(19): siRNA sense strand
aguacuacccuaucaauau

SEQ ID NO: 759148 - RNA, 19 nt, Homo sapiens
  misc_RNA (1)...(19): siRNA sense strand
gaguuccgccucuggauug

SEQ ID NO: 759149 - RNA, 19 nt, Homo sapiens
  misc_RNA (1)...(19): siRNA sense strand
ccagaagggacaucuuuca

SEQ ID NO: 759150 - RNA, 19 nt, Homo sapiens
  misc_RNA (1)...(19): siRNA sense strand
gaucgcaggaauugaugaa

SEQ ID NO: 759151 - RNA, 19 nt, Homo sapiens
  misc_RNA (1)...(19): siRNA sense strand
acagaugccagcuuuauca

SEQ ID NO: 759152 - RNA, 19 nt, Homo sapiens
  misc_RNA (1)...(19): siRNA sense strand
uugcaacccucaugguaga

SEQ ID NO: 759153 - RNA, 19 nt, Homo sapiens
  misc_RNA (1)...(19): siRNA sense strand
acaacauccucccagagaa

SEQ ID NO: 759154 - RNA, 19 nt, Homo sapiens
  misc_RNA (1)...(19): siRNA sense strand
uaaccggcaucaucgucuu

SEQ ID NO: 759155 - RNA, 19 nt, Homo sapiens
  misc_RNA (1)...(19): siRNA sense strand
auacaaccguguucaaugc

SEQ ID NO: 759156 - RNA, 19 nt, Homo sapiens
  misc_RNA (1)...(19): siRNA sense strand
aaauauaucacccgcuuca

SEQ ID NO: 759157 - RNA, 19 nt, Homo sapiens
  misc_RNA (1)...(19): siRNA sense strand
gccucaagauggagacaga

SEQ ID NO: 759158 - RNA, 19 nt, Homo sapiens
  misc_RNA (1)...(19): siRNA sense strand
cauugcaacccucauggua

SEQ ID NO: 759159 - RNA, 19 nt, Homo sapiens
  misc_RNA (1)...(19): siRNA sense strand
caacauccucccagagaag

SEQ ID NO: 759160 - RNA, 19 nt, Homo sapiens
  misc_RNA (1)...(19): siRNA sense strand
gaucacugccgucauuguc

SEQ ID NO: 759161 - RNA, 19 nt, Homo sapiens
  misc_RNA (1)...(19): siRNA sense strand
caccaacgcgaucaccuuu

SEQ ID NO: 759162 - RNA, 19 nt, Homo sapiens
  misc_RNA (1)...(19): siRNA sense strand
ucaucuaccucggcuguau

SEQ ID NO: 759163 - RNA, 19 nt, Homo sapiens
  misc_RNA (1)...(19): siRNA sense strand
gaacuuaucuggacaggaa

SEQ ID NO: 759164 - RNA, 19 nt, Homo sapiens
  misc_RNA (1)...(19): siRNA sense strand
ggacggugcugcuggauuu

SEQ ID NO: 759165 - RNA, 19 nt, Homo sapiens
  misc_RNA (1)...(19): siRNA sense strand
gggaauuccugcaaguuua

SEQ ID NO: 759166 - RNA, 19 nt, Homo sapiens
  misc_RNA (1)...(19): siRNA sense strand
ccacuuacccucaaagaaa

SEQ ID NO: 759167 - RNA, 19 nt, Homo sapiens
  misc_RNA (1)...(19): siRNA sense strand
gcaauggccuggacuacau

SEQ ID NO: 759168 - RNA, 19 nt, Homo sapiens
  misc_RNA (1)...(19): siRNA sense strand
guacuacccuaucaauaug

SEQ ID NO: 759169 - RNA, 19 nt, Homo sapiens
  misc_RNA (1)...(19): siRNA sense strand
uaugauggcuuccacauuc

SEQ ID NO: 759170 - RNA, 19 nt, Homo sapiens
  misc_RNA (1)...(19): siRNA sense strand
gggaugccaccgacaauua

SEQ ID NO: 759171 - RNA, 19 nt, Homo sapiens
  misc_RNA (1)...(19): siRNA sense strand
ggccacagaugccagcuuu

SEQ ID NO: 759172 - RNA, 19 nt, Homo sapiens
  misc_RNA (1)...(19): siRNA sense strand
ggaaggagaacaaacugaa

SEQ ID NO: 759173 - RNA, 19 nt, Homo sapiens
  misc_RNA (1)...(19): siRNA sense strand
cagaaagaaugcccuccua

SEQ ID NO: 759174 - RNA, 19 nt, Homo sapiens
  misc_RNA (1)...(19): siRNA sense strand
ccagcuuuaucaucaaaua

SEQ ID NO: 759175 - RNA, 19 nt, Homo sapiens
  misc_RNA (1)...(19): siRNA sense strand
gagaccagauggaguggaa

SEQ ID NO: 759176 - RNA, 19 nt, Homo sapiens
  misc_RNA (1)...(19): siRNA sense strand
ccagguggauaaaguuuga

SEQ ID NO: 759177 - RNA, 19 nt, Homo sapiens
  misc_RNA (1)...(19): siRNA sense strand
gaaaguguccaaucagauc

SEQ ID NO: 759178 - RNA, 19 nt, Homo sapiens
  misc_RNA (1)...(19): siRNA sense strand
gaugaucggugccuucaag

SEQ ID NO: 759179 - RNA, 19 nt, Homo sapiens
  misc_RNA (1)...(19): siRNA sense strand
gggacagccucucaucauu

SEQ ID NO: 759180 - RNA, 19 nt, Homo sapiens
  misc_RNA (1)...(19): siRNA sense strand
gcagaagcaugaaugacau

SEQ ID NO: 759181 - RNA, 19 nt, Homo sapiens
  misc_RNA (1)...(19): siRNA sense strand
gaaagaaugcccuccuauc

SEQ ID NO: 759182 - RNA, 19 nt, Homo sapiens
  misc_RNA (1)...(19): siRNA sense strand
gaccagaagggacaucuuu

SEQ ID NO: 759183 - RNA, 19 nt, Homo sapiens
  misc_RNA (1)...(19): siRNA sense strand
gcccagagcagaagcauga

SEQ ID NO: 759184 - RNA, 19 nt, Homo sapiens
  misc_RNA (1)...(19): siRNA sense strand
gcaaaauccuacaaugaaa

SEQ ID NO: 759185 - RNA, 19 nt, Homo sapiens
  misc_RNA (1)...(19): siRNA sense strand
aagccaaacuucaucacua

SEQ ID NO: 759186 - RNA, 19 nt, Homo sapiens
  misc_RNA (1)...(19): siRNA sense strand
gacagcagcauggaucuua

SEQ ID NO: 759187 - RNA, 19 nt, Homo sapiens
  misc_RNA (1)...(19): siRNA sense strand
gcuucuggauuucaucuuu

SEQ ID NO: 759188 - RNA, 19 nt, Homo sapiens
  misc_RNA (1)...(19): siRNA sense strand
gagaguaaccggcaucauc

SEQ ID NO: 759189 - RNA, 19 nt, Homo sapiens
  misc_RNA (1)...(19): siRNA sense strand
guccaucucugccauccua

SEQ ID NO: 759190 - RNA, 19 nt, Homo sapiens
  misc_RNA (1)...(19): siRNA sense strand
gaaagcuggaccacacuaa

SEQ ID NO: 759191 - RNA, 19 nt, Homo sapiens
  misc_RNA (1)...(19): siRNA sense strand
caaacuucaucacuaccua

SEQ ID NO: 759192 - RNA, 19 nt, Homo sapiens
  misc_RNA (1)...(19): siRNA sense strand
ggagauuuccggaucagaa

SEQ ID NO: 759193 - RNA, 19 nt, Homo sapiens
  misc_RNA (1)...(19): siRNA sense strand
ggacccaaauauccggauu

SEQ ID NO: 759194 - RNA, 19 nt, Homo sapiens
  misc_RNA (1)...(19): siRNA sense strand
caccaacgcuucucuguac

SEQ ID NO: 759195 - RNA, 19 nt, Homo sapiens
  misc_RNA (1)...(19): siRNA sense strand
uggauacucugcagcauga

SEQ ID NO: 759196 - RNA, 19 nt, Homo sapiens
  misc_RNA (1)...(19): siRNA sense strand
uuauaaagauucccaugga

SEQ ID NO: 759197 - RNA, 19 nt, Homo sapiens
  misc_RNA (1)...(19): siRNA sense strand
ggaggagauuuccggauca

SEQ ID NO: 759198 - RNA, 19 nt, Homo sapiens
  misc_RNA (1)...(19): siRNA sense strand
gaauacaaccguguucaau

SEQ ID NO: 759199 - RNA, 19 nt, Homo sapiens
  misc_RNA (1)...(19): siRNA sense strand
gacaacauccucccagaga

SEQ ID NO: 759200 - RNA, 19 nt, Homo sapiens
  misc_RNA (1)...(19): siRNA sense strand
gcaaauuacggacgucugu

SEQ ID NO: 759201 - RNA, 19 nt, Homo sapiens
  misc_RNA (1)...(19): siRNA sense strand
acaagaagaggaagagaaa

SEQ ID NO: 759202 - RNA, 19 nt, Homo sapiens
  misc_RNA (1)...(19): siRNA sense strand
gaccuggccuggauugaca

SEQ ID NO: 759203 - RNA, 19 nt, Homo sapiens
  misc_RNA (1)...(19): siRNA sense strand
ggacagccucucaucauuc

SEQ ID NO: 759204 - RNA, 19 nt, Homo sapiens
  misc_RNA (1)...(19): siRNA sense strand
ucagugacguggccuacaa

SEQ ID NO: 759205 - RNA, 19 nt, Homo sapiens
  misc_RNA (1)...(19): siRNA sense strand
gcucauguccuucauccuu

SEQ ID NO: 759206 - RNA, 19 nt, Homo sapiens
  misc_RNA (1)...(19): siRNA sense strand
gauguucuguggaaucgau

SEQ ID NO: 759207 - RNA, 19 nt, Homo sapiens
  misc_RNA (1)...(19): siRNA sense strand
ggagucagccagguggaua

SEQ ID NO: 759208 - RNA, 19 nt, Homo sapiens
  misc_RNA (1)...(19): siRNA sense strand
gacaagaagaggaagagaa

SEQ ID NO: 759209 - RNA, 19 nt, Homo sapiens
  misc_RNA (1)...(19): siRNA sense strand
cuuaucagcuucaucuuca

SEQ ID NO: 759210 - RNA, 19 nt, Homo sapiens
  misc_RNA (1)...(19): siRNA sense strand
ggacuucaagccaaacuuc

SEQ ID NO: 759211 - RNA, 19 nt, Homo sapiens
  misc_RNA (1)...(19): siRNA sense strand
gcuaccaucuggaccuguu

SEQ ID NO: 759212 - RNA, 19 nt, Homo sapiens
  misc_RNA (1)...(19): siRNA sense strand
ggaaagcuggaccacacua

SEQ ID NO: 759213 - RNA, 19 nt, Homo sapiens
  misc_RNA (1)...(19): siRNA sense strand
ggaauuccugcaaguuuau

SEQ ID NO: 759214 - RNA, 19 nt, Homo sapiens
  misc_RNA (1)...(19): siRNA sense strand
ccacagaugccagcuuuau

SEQ ID NO: 759215 - RNA, 19 nt, Homo sapiens
  misc_RNA (1)...(19): siRNA sense strand
ccacauugggcuuccagua

SEQ ID NO: 759216 - RNA, 19 nt, Homo sapiens
  misc_RNA (1)...(19): siRNA sense strand
ccuccucccucgguuauaa

SEQ ID NO: 759217 - RNA, 19 nt, Homo sapiens
  misc_RNA (1)...(19): siRNA sense strand
agaggaaguugcccugguu

SEQ ID NO: 759218 - RNA, 19 nt, Homo sapiens
  misc_RNA (1)...(19): siRNA sense strand
guucuucgguggccugugu

SEQ ID NO: 759219 - RNA, 19 nt, Homo sapiens
  misc_RNA (1)...(19): siRNA sense strand
guggauaaaguuugaagaa

SEQ ID NO: 759220 - RNA, 19 nt, Homo sapiens
  misc_RNA (1)...(19): siRNA sense strand
ggaaaguguccaaucagau

SEQ ID NO: 759221 - RNA, 19 nt, Homo sapiens
  misc_RNA (1)...(19): siRNA sense strand
gagcaaaauccuacaauga

SEQ ID NO: 759222 - RNA, 19 nt, Homo sapiens
  misc_RNA (1)...(19): siRNA sense strand
gcccauccaccgcuccuua

SEQ ID NO: 759223 - RNA, 19 nt, Homo sapiens
  misc_RNA (1)...(19): siRNA sense strand
gacaagaggaaaucugugu

SEQ ID NO: 759224 - RNA, 19 nt, Homo sapiens
  misc_RNA (1)...(19): siRNA sense strand
gcuuugugcuccuuuaugg

SEQ ID NO: 759225 - RNA, 19 nt, Homo sapiens
  misc_RNA (1)...(19): siRNA sense strand
gguggccugugucuggaua

SEQ ID NO: 759226 - RNA, 19 nt, Homo sapiens
  misc_RNA (1)...(19): siRNA sense strand
ggagaaggcugggguagga

SEQ ID NO: 759227 - RNA, 19 nt, Homo sapiens
  misc_RNA (1)...(19): siRNA sense strand
caaguacuacccuaucaau

SEQ ID NO: 759228 - RNA, 19 nt, Homo sapiens
  misc_RNA (1)...(19): siRNA sense strand
gacagccucucaucauucu

SEQ ID NO: 759229 - RNA, 19 nt, Homo sapiens
  misc_RNA (1)...(19): siRNA sense strand
caagaggaaaucuguguuc

SEQ ID NO: 759230 - RNA, 19 nt, Homo sapiens
  misc_RNA (1)...(19): siRNA sense strand
ugaagaagauccccaagga

SEQ ID NO: 759231 - RNA, 19 nt, Homo sapiens
  misc_RNA (1)...(19): siRNA sense strand
guacccacuuacccucaaa

SEQ ID NO: 759232 - RNA, 19 nt, Homo sapiens
  misc_RNA (1)...(19): siRNA sense strand
ggaguuccgccucuggauu

SEQ ID NO: 759233 - RNA, 19 nt, Homo sapiens
  misc_RNA (1)...(19): siRNA sense strand
uugaugaauuucuggauga

SEQ ID NO: 759234 - RNA, 19 nt, Homo sapiens
  misc_RNA (1)...(19): siRNA sense strand
ggaugccaccgacaauuau

SEQ ID NO: 759235 - RNA, 19 nt, Homo sapiens
  misc_RNA (1)...(19): siRNA sense strand
agacagacaagaagaggaa

SEQ ID NO: 759236 - RNA, 19 nt, Homo sapiens
  misc_RNA (1)...(19): siRNA sense strand
ccaugacccugacccugaa

SEQ ID NO: 759237 - RNA, 19 nt, Homo sapiens
  misc_RNA (1)...(19): siRNA sense strand
gaucggugccuucaaguac

SEQ ID NO: 759238 - RNA, 19 nt, Homo sapiens
  misc_RNA (1)...(19): siRNA sense strand
ucagccagguggauaaagu

SEQ ID NO: 759239 - RNA, 19 nt, Homo sapiens
  misc_RNA (1)...(19): siRNA sense strand
ucacugccgucauugucaa

SEQ ID NO: 759240 - RNA, 19 nt, Homo sapiens
  misc_RNA (1)...(19): siRNA sense strand
ggcccauccucaucuuuga

SEQ ID NO: 759241 - RNA, 19 nt, Homo sapiens
  misc_RNA (1)...(19): siRNA sense strand
aaacacagaccagcggaaa

SEQ ID NO: 759242 - RNA, 19 nt, Homo sapiens
  misc_RNA (1)...(19): siRNA sense strand
ggacaguggcuccuuacca

SEQ ID NO: 759243 - RNA, 19 nt, Homo sapiens
  misc_RNA (1)...(19): siRNA sense strand
ucauugagaagcagauuga

SEQ ID NO: 759244 - RNA, 19 nt, Homo sapiens
  misc_RNA (1)...(19): siRNA sense strand
cuuccuggcucccauccua

SEQ ID NO: 759245 - RNA, 19 nt, Homo sapiens
  misc_RNA (1)...(19): siRNA sense strand
ugacgggaaucucugucuu

SEQ ID NO: 759246 - RNA, 19 nt, Homo sapiens
  misc_RNA (1)...(19): siRNA sense strand
gaaggagaacaaacugaag

SEQ ID NO: 759247 - RNA, 19 nt, Homo sapiens
  misc_RNA (1)...(19): siRNA sense strand
aguacuacccuaucaauau

SEQ ID NO: 759248 - RNA, 19 nt, Homo sapiens
  misc_RNA (1)...(19): siRNA sense strand
gaguuccgccucuggauug

SEQ ID NO: 759249 - RNA, 19 nt, Homo sapiens
  misc_RNA (1)...(19): siRNA sense strand
ccagaagggacaucuuuca

SEQ ID NO: 759250 - RNA, 19 nt, Homo sapiens
  misc_RNA (1)...(19): siRNA sense strand
gaucgcaggaauugaugaa

SEQ ID NO: 759251 - RNA, 19 nt, Homo sapiens
  misc_RNA (1)...(19): siRNA sense strand
acagaugccagcuuuauca

SEQ ID NO: 759252 - RNA, 19 nt, Homo sapiens
  misc_RNA (1)...(19): siRNA sense strand
uugcaacccucaugguaga

SEQ ID NO: 759253 - RNA, 19 nt, Homo sapiens
  misc_RNA (1)...(19): siRNA sense strand
acaacauccucccagagaa

SEQ ID NO: 759254 - RNA, 19 nt, Homo sapiens
  misc_RNA (1)...(19): siRNA sense strand
uaaccggcaucaucgucuu

SEQ ID NO: 759255 - RNA, 19 nt, Homo sapiens
  misc_RNA (1)...(19): siRNA sense strand
auacaaccguguucaaugc

SEQ ID NO: 759256 - RNA, 19 nt, Homo sapiens
  misc_RNA (1)...(19): siRNA sense strand
aaauauaucacccgcuuca

SEQ ID NO: 759257 - RNA, 19 nt, Homo sapiens
  misc_RNA (1)...(19): siRNA sense strand
gccucaagauggagacaga

SEQ ID NO: 759258 - RNA, 19 nt, Homo sapiens
  misc_RNA (1)...(19): siRNA sense strand
cauugcaacccucauggua

SEQ ID NO: 759259 - RNA, 19 nt, Homo sapiens
  misc_RNA (1)...(19): siRNA sense strand
caacauccucccagagaag

SEQ ID NO: 759260 - RNA, 19 nt, Homo sapiens
  misc_RNA (1)...(19): siRNA sense strand
gaucacugccgucauuguc

SEQ ID NO: 759261 - RNA, 19 nt, Homo sapiens
  misc_RNA (1)...(19): siRNA sense strand
caccaacgcgaucaccuuu

SEQ ID NO: 759262 - RNA, 19 nt, Homo sapiens
  misc_RNA (1)...(19): siRNA sense strand
ucaucuaccucggcuguau

SEQ ID NO: 759263 - RNA, 19 nt, Homo sapiens
  misc_RNA (1)...(19): siRNA sense strand
ggaugagcuugauaaauua

SEQ ID NO: 759264 - RNA, 19 nt, Homo sapiens
  misc_RNA (1)...(19): siRNA sense strand
gcaacaagagaaagaauua

SEQ ID NO: 759265 - RNA, 19 nt, Homo sapiens
  misc_RNA (1)...(19): siRNA sense strand
uggaugagcuugauaaauu

SEQ ID NO: 759266 - RNA, 19 nt, Homo sapiens
  misc_RNA (1)...(19): siRNA sense strand
gagcucaaaucaagaauau

SEQ ID NO: 759267 - RNA, 19 nt, Homo sapiens
  misc_RNA (1)...(19): siRNA sense strand
aaacaucucucucugcaaa

SEQ ID NO: 759268 - RNA, 19 nt, Homo sapiens
  misc_RNA (1)...(19): siRNA sense strand
ugaaagcuauaaagcguua

SEQ ID NO: 759269 - RNA, 19 nt, Homo sapiens
  misc_RNA (1)...(19): siRNA sense strand
gaauaaaguucuagguauc

SEQ ID NO: 759270 - RNA, 19 nt, Homo sapiens
  misc_RNA (1)...(19): siRNA sense strand
gaccaggacuaaugaacua

SEQ ID NO: 759271 - RNA, 19 nt, Homo sapiens
  misc_RNA (1)...(19): siRNA sense strand
gcaaagccuugaagauguu

SEQ ID NO: 759272 - RNA, 19 nt, Homo sapiens
  misc_RNA (1)...(19): siRNA sense strand
gaggaagaauuaaagcaaa

SEQ ID NO: 759273 - RNA, 19 nt, Homo sapiens
  misc_RNA (1)...(19): siRNA sense strand
gaacucaucauuacaggaa

SEQ ID NO: 759274 - RNA, 19 nt, Homo sapiens
  misc_RNA (1)...(19): siRNA sense strand
caagaggaauugaauaaag

SEQ ID NO: 759275 - RNA, 19 nt, Homo sapiens
  misc_RNA (1)...(19): siRNA sense strand
cgaagagucucaagggaaa

SEQ ID NO: 759276 - RNA, 19 nt, Homo sapiens
  misc_RNA (1)...(19): siRNA sense strand
gaauagagaacacaacgaa

SEQ ID NO: 759277 - RNA, 19 nt, Homo sapiens
  misc_RNA (1)...(19): siRNA sense strand
gauacuaccuugccugcuu

SEQ ID NO: 759278 - RNA, 19 nt, Homo sapiens
  misc_RNA (1)...(19): siRNA sense strand
ugaaagagaagaaugauga

SEQ ID NO: 759279 - RNA, 19 nt, Homo sapiens
  misc_RNA (1)...(19): siRNA sense strand
ggaauacaucgaagaaauu

SEQ ID NO: 759280 - RNA, 19 nt, Homo sapiens
  misc_RNA (1)...(19): siRNA sense strand
gaauugaccaggacuaaug

SEQ ID NO: 759281 - RNA, 19 nt, Homo sapiens
  misc_RNA (1)...(19): siRNA sense strand
gaaaauagccaacucaaau

SEQ ID NO: 759282 - RNA, 19 nt, Homo sapiens
  misc_RNA (1)...(19): siRNA sense strand
aucuagagcugaagaauua

SEQ ID NO: 759283 - RNA, 19 nt, Homo sapiens
  misc_RNA (1)...(19): siRNA sense strand
ggaccaguauccuuucaga

SEQ ID NO: 759284 - RNA, 19 nt, Homo sapiens
  misc_RNA (1)...(19): siRNA sense strand
guuaacagccagugagaua

SEQ ID NO: 759285 - RNA, 19 nt, Homo sapiens
  misc_RNA (1)...(19): siRNA sense strand
ucaagcauguugugaaguu

SEQ ID NO: 759286 - RNA, 19 nt, Homo sapiens
  misc_RNA (1)...(19): siRNA sense strand
gcuaaaugcugcacuaagg

SEQ ID NO: 759287 - RNA, 19 nt, Homo sapiens
  misc_RNA (1)...(19): siRNA sense strand
caacucaaaucggaaguau

SEQ ID NO: 759288 - RNA, 19 nt, Homo sapiens
  misc_RNA (1)...(19): siRNA sense strand
gcuagauauugcccaguua

SEQ ID NO: 759289 - RNA, 19 nt, Homo sapiens
  misc_RNA (1)...(19): siRNA sense strand
gcucaggaacagcuaaaua

SEQ ID NO: 759290 - RNA, 19 nt, Homo sapiens
  misc_RNA (1)...(19): siRNA sense strand
gaaauuaguugugcuucag

SEQ ID NO: 759291 - RNA, 19 nt, Homo sapiens
  misc_RNA (1)...(19): siRNA sense strand
gcacuaaaggaaacagaaa

SEQ ID NO: 759292 - RNA, 19 nt, Homo sapiens
  misc_RNA (1)...(19): siRNA sense strand
gcucaaaucaagaauaugu

SEQ ID NO: 759293 - RNA, 19 nt, Homo sapiens
  misc_RNA (1)...(19): siRNA sense strand
caaguggcgucuccucuau

SEQ ID NO: 759294 - RNA, 19 nt, Homo sapiens
  misc_RNA (1)...(19): siRNA sense strand
gcaacaggaggaagacuuu

SEQ ID NO: 759295 - RNA, 19 nt, Homo sapiens
  misc_RNA (1)...(19): siRNA sense strand
uggaauacaucgaagaaau

SEQ ID NO: 759296 - RNA, 19 nt, Homo sapiens
  misc_RNA (1)...(19): siRNA sense strand
cugaagaaauuaacaagug

SEQ ID NO: 759297 - RNA, 19 nt, Homo sapiens
  misc_RNA (1)...(19): siRNA sense strand
gaacacaacgaaaaucuaa

SEQ ID NO: 759298 - RNA, 19 nt, Homo sapiens
  misc_RNA (1)...(19): siRNA sense strand
gaagaaauuaguugugcuu

SEQ ID NO: 759299 - RNA, 19 nt, Homo sapiens
  misc_RNA (1)...(19): siRNA sense strand
gcuggagaacucaucauua

SEQ ID NO: 759300 - RNA, 19 nt, Homo sapiens
  misc_RNA (1)...(19): siRNA sense strand
aaaguuaagucuucggaau

SEQ ID NO: 759301 - RNA, 19 nt, Homo sapiens
  misc_RNA (1)...(19): siRNA sense strand
cagcagaauuaacugaaga

SEQ ID NO: 759302 - RNA, 19 nt, Homo sapiens
  misc_RNA (1)...(19): siRNA sense strand
caagucagcacuaaaggaa

SEQ ID NO: 759303 - RNA, 19 nt, Homo sapiens
  misc_RNA (1)...(19): siRNA sense strand
agauguuacugcucaauuu

SEQ ID NO: 759304 - RNA, 19 nt, Homo sapiens
  misc_RNA (1)...(19): siRNA sense strand
gaccaugucaacaggaaua

SEQ ID NO: 759305 - RNA, 19 nt, Homo sapiens
  misc_RNA (1)...(19): siRNA sense strand
ggacuaaugaacuacuaaa

SEQ ID NO: 759306 - RNA, 19 nt, Homo sapiens
  misc_RNA (1)...(19): siRNA sense strand
ccaaaggagucucgaagag

SEQ ID NO: 759307 - RNA, 19 nt, Homo sapiens
  misc_RNA (1)...(19): siRNA sense strand
ucaagaaucauggaaguaa

SEQ ID NO: 759308 - RNA, 19 nt, Homo sapiens
  misc_RNA (1)...(19): siRNA sense strand
uaaggaugcuucuagaucu

SEQ ID NO: 759309 - RNA, 19 nt, Homo sapiens
  misc_RNA (1)...(19): siRNA sense strand
gaaagagaagaaugaugaa

SEQ ID NO: 759310 - RNA, 19 nt, Homo sapiens
  misc_RNA (1)...(19): siRNA sense strand
caagaaggcauggagauga

SEQ ID NO: 759311 - RNA, 19 nt, Homo sapiens
  misc_RNA (1)...(19): siRNA sense strand
guugugaaguugaaagaug

SEQ ID NO: 759312 - RNA, 19 nt, Homo sapiens
  misc_RNA (1)...(19): siRNA sense strand
aaauaaugcuacacuggaa

SEQ ID NO: 759313 - RNA, 19 nt, Homo sapiens
  misc_RNA (1)...(19): siRNA sense strand
uaacugauuugcagaacca

SEQ ID NO: 759314 - RNA, 19 nt, Homo sapiens
  misc_RNA (1)...(19): siRNA sense strand
uaugauggcuaagcaagaa

SEQ ID NO: 759315 - RNA, 19 nt, Homo sapiens
  misc_RNA (1)...(19): siRNA sense strand
caacagcagaauuaacuga

SEQ ID NO: 759316 - RNA, 19 nt, Homo sapiens
  misc_RNA (1)...(19): siRNA sense strand
ggaaaaguaugacaguaug

SEQ ID NO: 759317 - RNA, 19 nt, Homo sapiens
  misc_RNA (1)...(19): siRNA sense strand
gugcaaagccuugaagaug

SEQ ID NO: 759318 - RNA, 19 nt, Homo sapiens
  misc_RNA (1)...(19): siRNA sense strand
guaaggaugcuucuagauc

SEQ ID NO: 759319 - RNA, 19 nt, Homo sapiens
  misc_RNA (1)...(19): siRNA sense strand
caaugacccuucugguugu

SEQ ID NO: 759320 - RNA, 19 nt, Homo sapiens
  misc_RNA (1)...(19): siRNA sense strand
gaauuaucuucgagucuuc

SEQ ID NO: 759321 - RNA, 19 nt, Homo sapiens
  misc_RNA (1)...(19): siRNA sense strand
ggaggaagacuuuagaaaa

SEQ ID NO: 759322 - RNA, 19 nt, Homo sapiens
  misc_RNA (1)...(19): siRNA sense strand
agaauuaucuucgagucuu

SEQ ID NO: 759323 - RNA, 19 nt, Homo sapiens
  misc_RNA (1)...(19): siRNA sense strand
gcaagaaggcauggagaug

SEQ ID NO: 759324 - RNA, 19 nt, Homo sapiens
  misc_RNA (1)...(19): siRNA sense strand
ucaaaucggaaguaucaaa

SEQ ID NO: 759325 - RNA, 19 nt, Homo sapiens
  misc_RNA (1)...(19): siRNA sense strand
cugaaaggcuggucaagca

SEQ ID NO: 759326 - RNA, 19 nt, Homo sapiens
  misc_RNA (1)...(19): siRNA sense strand
ugaaaugucagcugcuuga

SEQ ID NO: 759327 - RNA, 19 nt, Homo sapiens
  misc_RNA (1)...(19): siRNA sense strand
aagaaggcauggagaugaa

SEQ ID NO: 759328 - RNA, 19 nt, Homo sapiens
  misc_RNA (1)...(19): siRNA sense strand
acaaauugauucacuucug

SEQ ID NO: 759329 - RNA, 19 nt, Homo sapiens
  misc_RNA (1)...(19): siRNA sense strand
ccaggugcuuaugauguua

SEQ ID NO: 759330 - RNA, 19 nt, Homo sapiens
  misc_RNA (1)...(19): siRNA sense strand
uauggagugucaagaauca

SEQ ID NO: 759331 - RNA, 19 nt, Homo sapiens
  misc_RNA (1)...(19): siRNA sense strand
gaaaggcuggucaagcaau

SEQ ID NO: 759332 - RNA, 19 nt, Homo sapiens
  misc_RNA (1)...(19): siRNA sense strand
uaaagcaaacacuggauga

SEQ ID NO: 759333 - RNA, 19 nt, Homo sapiens
  misc_RNA (1)...(19): siRNA sense strand
cuucgagucuucaucagaa

SEQ ID NO: 759334 - RNA, 19 nt, Homo sapiens
  misc_RNA (1)...(19): siRNA sense strand
acaucucucucugcaaaua

SEQ ID NO: 759335 - RNA, 19 nt, Homo sapiens
  misc_RNA (1)...(19): siRNA sense strand
caacaggaggaagacuuua

SEQ ID NO: 759336 - RNA, 19 nt, Homo sapiens
  misc_RNA (1)...(19): siRNA sense strand
uaacagccagugagauaga

SEQ ID NO: 759337 - RNA, 19 nt, Homo sapiens
  misc_RNA (1)...(19): siRNA sense strand
gaaucuguuugaggaagaa

SEQ ID NO: 759338 - RNA, 19 nt, Homo sapiens
  misc_RNA (1)...(19): siRNA sense strand
caacaggaauagagaacac

SEQ ID NO: 759339 - RNA, 19 nt, Homo sapiens
  misc_RNA (1)...(19): siRNA sense strand
caggacuaaugaacuacua

SEQ ID NO: 759340 - RNA, 19 nt, Homo sapiens
  misc_RNA (1)...(19): siRNA sense strand
ggagaacucaucauuacag

SEQ ID NO: 759341 - RNA, 19 nt, Homo sapiens
  misc_RNA (1)...(19): siRNA sense strand
cuggagaacucaucauuac

SEQ ID NO: 759342 - RNA, 19 nt, Homo sapiens
  misc_RNA (1)...(19): siRNA sense strand
ugcaaagccuugaagaugu

SEQ ID NO: 759343 - RNA, 19 nt, Homo sapiens
  misc_RNA (1)...(19): siRNA sense strand
aagagaagaaucuguuuga

SEQ ID NO: 759344 - RNA, 19 nt, Homo sapiens
  misc_RNA (1)...(19): siRNA sense strand
cuaaacaaguagaagaucu

SEQ ID NO: 759345 - RNA, 19 nt, Homo sapiens
  misc_RNA (1)...(19): siRNA sense strand
agaaauuaguugugcuuca

SEQ ID NO: 759346 - RNA, 19 nt, Homo sapiens
  misc_RNA (1)...(19): siRNA sense strand
aaaggcuggucaagcaauu

SEQ ID NO: 759347 - RNA, 19 nt, Homo sapiens
  misc_RNA (1)...(19): siRNA sense strand
ucaggaacagcuaaauaaa

SEQ ID NO: 759348 - RNA, 19 nt, Homo sapiens
  misc_RNA (1)...(19): siRNA sense strand
agaaccaacucaagcaaca

SEQ ID NO: 759349 - RNA, 19 nt, Homo sapiens
  misc_RNA (1)...(19): siRNA sense strand
gauguuacugcucaauuug

SEQ ID NO: 759350 - RNA, 19 nt, Homo sapiens
  misc_RNA (1)...(19): siRNA sense strand
uagcccaacuggagggaaa

SEQ ID NO: 759351 - RNA, 19 nt, Homo sapiens
  misc_RNA (1)...(19): siRNA sense strand
acucaaaucggaaguauca

SEQ ID NO: 759352 - RNA, 19 nt, Homo sapiens
  misc_RNA (1)...(19): siRNA sense strand
gaccaagucagcacuaaag

SEQ ID NO: 759353 - RNA, 19 nt, Homo sapiens
  misc_RNA (1)...(19): siRNA sense strand
gaagaaucuguuugaggaa

SEQ ID NO: 759354 - RNA, 19 nt, Homo sapiens
  misc_RNA (1)...(19): siRNA sense strand
caacgaaaaucuaaaugca

SEQ ID NO: 759355 - RNA, 19 nt, Homo sapiens
  misc_RNA (1)...(19): siRNA sense strand
auucuaagcuuggaguuga

SEQ ID NO: 759356 - RNA, 19 nt, Homo sapiens
  misc_RNA (1)...(19): siRNA sense strand
ccuauggagugucaagaau

SEQ ID NO: 759357 - RNA, 19 nt, Homo sapiens
  misc_RNA (1)...(19): siRNA sense strand
gacaaaacuucaagaggaa

SEQ ID NO: 759358 - RNA, 19 nt, Homo sapiens
  misc_RNA (1)...(19): siRNA sense strand
aaucaagcauguugugaag

SEQ ID NO: 759359 - RNA, 19 nt, Homo sapiens
  misc_RNA (1)...(19): siRNA sense strand
ucuccucuaugaagaacua

SEQ ID NO: 759360 - RNA, 19 nt, Homo sapiens
  misc_RNA (1)...(19): siRNA sense strand
gaggaagacuuuagaaaac

SEQ ID NO: 759361 - RNA, 19 nt, Homo sapiens
  misc_RNA (1)...(19): siRNA sense strand
gcagaaccaacucaagcaa

SEQ ID NO: 759362 - RNA, 19 nt, Homo sapiens
  misc_RNA (1)...(19): siRNA sense strand
aaacaaagaugagggguau

SEQ ID NO: 759363 - RNA, 19 nt, Homo sapiens
  misc_RNA (1)...(19): siRNA sense strand
ggaugagcuugauaaauua

SEQ ID NO: 759364 - RNA, 19 nt, Homo sapiens
  misc_RNA (1)...(19): siRNA sense strand
gcaacaagagaaagaauua

SEQ ID NO: 759365 - RNA, 19 nt, Homo sapiens
  misc_RNA (1)...(19): siRNA sense strand
uggaugagcuugauaaauu

SEQ ID NO: 759366 - RNA, 19 nt, Homo sapiens
  misc_RNA (1)...(19): siRNA sense strand
gagcucaaaucaagaauau

SEQ ID NO: 759367 - RNA, 19 nt, Homo sapiens
  misc_RNA (1)...(19): siRNA sense strand
aaacaucucucucugcaaa

SEQ ID NO: 759368 - RNA, 19 nt, Homo sapiens
  misc_RNA (1)...(19): siRNA sense strand
ugaaagcuauaaagcguua

SEQ ID NO: 759369 - RNA, 19 nt, Homo sapiens
  misc_RNA (1)...(19): siRNA sense strand
gaauaaaguucuagguauc

SEQ ID NO: 759370 - RNA, 19 nt, Homo sapiens
  misc_RNA (1)...(19): siRNA sense strand
gaccaggacuaaugaacua

SEQ ID NO: 759371 - RNA, 19 nt, Homo sapiens
  misc_RNA (1)...(19): siRNA sense strand
gcaaagccuugaagauguu

SEQ ID NO: 759372 - RNA, 19 nt, Homo sapiens
  misc_RNA (1)...(19): siRNA sense strand
gaggaagaauuaaagcaaa

SEQ ID NO: 759373 - RNA, 19 nt, Homo sapiens
  misc_RNA (1)...(19): siRNA sense strand
gaacucaucauuacaggaa

SEQ ID NO: 759374 - RNA, 19 nt, Homo sapiens
  misc_RNA (1)...(19): siRNA sense strand
caagaggaauugaauaaag

SEQ ID NO: 759375 - RNA, 19 nt, Homo sapiens
  misc_RNA (1)...(19): siRNA sense strand
cgaagagucucaagggaaa

SEQ ID NO: 759376 - RNA, 19 nt, Homo sapiens
  misc_RNA (1)...(19): siRNA sense strand
gaauagagaacacaacgaa

SEQ ID NO: 759377 - RNA, 19 nt, Homo sapiens
  misc_RNA (1)...(19): siRNA sense strand
gauacuaccuugccugcuu

SEQ ID NO: 759378 - RNA, 19 nt, Homo sapiens
  misc_RNA (1)...(19): siRNA sense strand
ugaaagagaagaaugauga

SEQ ID NO: 759379 - RNA, 19 nt, Homo sapiens
  misc_RNA (1)...(19): siRNA sense strand
ggaauacaucgaagaaauu

SEQ ID NO: 759380 - RNA, 19 nt, Homo sapiens
  misc_RNA (1)...(19): siRNA sense strand
gaauugaccaggacuaaug

SEQ ID NO: 759381 - RNA, 19 nt, Homo sapiens
  misc_RNA (1)...(19): siRNA sense strand
gaaaauagccaacucaaau

SEQ ID NO: 759382 - RNA, 19 nt, Homo sapiens
  misc_RNA (1)...(19): siRNA sense strand
aucuagagcugaagaauua

SEQ ID NO: 759383 - RNA, 19 nt, Homo sapiens
  misc_RNA (1)...(19): siRNA sense strand
ggaccaguauccuuucaga

SEQ ID NO: 759384 - RNA, 19 nt, Homo sapiens
  misc_RNA (1)...(19): siRNA sense strand
guuaacagccagugagaua

SEQ ID NO: 759385 - RNA, 19 nt, Homo sapiens
  misc_RNA (1)...(19): siRNA sense strand
ucaagcauguugugaaguu

SEQ ID NO: 759386 - RNA, 19 nt, Homo sapiens
  misc_RNA (1)...(19): siRNA sense strand
gcuaaaugcugcacuaagg

SEQ ID NO: 759387 - RNA, 19 nt, Homo sapiens
  misc_RNA (1)...(19): siRNA sense strand
caacucaaaucggaaguau

SEQ ID NO: 759388 - RNA, 19 nt, Homo sapiens
  misc_RNA (1)...(19): siRNA sense strand
gcuagauauugcccaguua

SEQ ID NO: 759389 - RNA, 19 nt, Homo sapiens
  misc_RNA (1)...(19): siRNA sense strand
gcucaggaacagcuaaaua

SEQ ID NO: 759390 - RNA, 19 nt, Homo sapiens
  misc_RNA (1)...(19): siRNA sense strand
gaaauuaguugugcuucag

SEQ ID NO: 759391 - RNA, 19 nt, Homo sapiens
  misc_RNA (1)...(19): siRNA sense strand
gcacuaaaggaaacagaaa

SEQ ID NO: 759392 - RNA, 19 nt, Homo sapiens
  misc_RNA (1)...(19): siRNA sense strand
gcucaaaucaagaauaugu

SEQ ID NO: 759393 - RNA, 19 nt, Homo sapiens
  misc_RNA (1)...(19): siRNA sense strand
caaguggcgucuccucuau

SEQ ID NO: 759394 - RNA, 19 nt, Homo sapiens
  misc_RNA (1)...(19): siRNA sense strand
gcaacaggaggaagacuuu

SEQ ID NO: 759395 - RNA, 19 nt, Homo sapiens
  misc_RNA (1)...(19): siRNA sense strand
uggaauacaucgaagaaau

SEQ ID NO: 759396 - RNA, 19 nt, Homo sapiens
  misc_RNA (1)...(19): siRNA sense strand
cugaagaaauuaacaagug

SEQ ID NO: 759397 - RNA, 19 nt, Homo sapiens
  misc_RNA (1)...(19): siRNA sense strand
gaacacaacgaaaaucuaa

SEQ ID NO: 759398 - RNA, 19 nt, Homo sapiens
  misc_RNA (1)...(19): siRNA sense strand
gaagaaauuaguugugcuu

SEQ ID NO: 759399 - RNA, 19 nt, Homo sapiens
  misc_RNA (1)...(19): siRNA sense strand
gcuggagaacucaucauua

SEQ ID NO: 759400 - RNA, 19 nt, Homo sapiens
  misc_RNA (1)...(19): siRNA sense strand
aaaguuaagucuucggaau

SEQ ID NO: 759401 - RNA, 19 nt, Homo sapiens
  misc_RNA (1)...(19): siRNA sense strand
cagcagaauuaacugaaga

SEQ ID NO: 759402 - RNA, 19 nt, Homo sapiens
  misc_RNA (1)...(19): siRNA sense strand
caagucagcacuaaaggaa

SEQ ID NO: 759403 - RNA, 19 nt, Homo sapiens
  misc_RNA (1)...(19): siRNA sense strand
agauguuacugcucaauuu

SEQ ID NO: 759404 - RNA, 19 nt, Homo sapiens
  misc_RNA (1)...(19): siRNA sense strand
gaccaugucaacaggaaua

SEQ ID NO: 759405 - RNA, 19 nt, Homo sapiens
  misc_RNA (1)...(19): siRNA sense strand
ggacuaaugaacuacuaaa

SEQ ID NO: 759406 - RNA, 19 nt, Homo sapiens
  misc_RNA (1)...(19): siRNA sense strand
ccaaaggagucucgaagag

SEQ ID NO: 759407 - RNA, 19 nt, Homo sapiens
  misc_RNA (1)...(19): siRNA sense strand
ucaagaaucauggaaguaa

SEQ ID NO: 759408 - RNA, 19 nt, Homo sapiens
  misc_RNA (1)...(19): siRNA sense strand
uaaggaugcuucuagaucu

SEQ ID NO: 759409 - RNA, 19 nt, Homo sapiens
  misc_RNA (1)...(19): siRNA sense strand
gaaagagaagaaugaugaa

SEQ ID NO: 759410 - RNA, 19 nt, Homo sapiens
  misc_RNA (1)...(19): siRNA sense strand
caagaaggcauggagauga

SEQ ID NO: 759411 - RNA, 19 nt, Homo sapiens
  misc_RNA (1)...(19): siRNA sense strand
guugugaaguugaaagaug

SEQ ID NO: 759412 - RNA, 19 nt, Homo sapiens
  misc_RNA (1)...(19): siRNA sense strand
aaauaaugcuacacuggaa

SEQ ID NO: 759413 - RNA, 19 nt, Homo sapiens
  misc_RNA (1)...(19): siRNA sense strand
uaacugauuugcagaacca

SEQ ID NO: 759414 - RNA, 19 nt, Homo sapiens
  misc_RNA (1)...(19): siRNA sense strand
uaugauggcuaagcaagaa

SEQ ID NO: 759415 - RNA, 19 nt, Homo sapiens
  misc_RNA (1)...(19): siRNA sense strand
caacagcagaauuaacuga

SEQ ID NO: 759416 - RNA, 19 nt, Homo sapiens
  misc_RNA (1)...(19): siRNA sense strand
ggaaaaguaugacaguaug

SEQ ID NO: 759417 - RNA, 19 nt, Homo sapiens
  misc_RNA (1)...(19): siRNA sense strand
gugcaaagccuugaagaug

SEQ ID NO: 759418 - RNA, 19 nt, Homo sapiens
  misc_RNA (1)...(19): siRNA sense strand
guaaggaugcuucuagauc

SEQ ID NO: 759419 - RNA, 19 nt, Homo sapiens
  misc_RNA (1)...(19): siRNA sense strand
caaugacccuucugguugu

SEQ ID NO: 759420 - RNA, 19 nt, Homo sapiens
  misc_RNA (1)...(19): siRNA sense strand
gaauuaucuucgagucuuc

SEQ ID NO: 759421 - RNA, 19 nt, Homo sapiens
  misc_RNA (1)...(19): siRNA sense strand
ggaggaagacuuuagaaaa

SEQ ID NO: 759422 - RNA, 19 nt, Homo sapiens
  misc_RNA (1)...(19): siRNA sense strand
agaauuaucuucgagucuu

SEQ ID NO: 759423 - RNA, 19 nt, Homo sapiens
  misc_RNA (1)...(19): siRNA sense strand
gcaagaaggcauggagaug

SEQ ID NO: 759424 - RNA, 19 nt, Homo sapiens
  misc_RNA (1)...(19): siRNA sense strand
ucaaaucggaaguaucaaa

SEQ ID NO: 759425 - RNA, 19 nt, Homo sapiens
  misc_RNA (1)...(19): siRNA sense strand
cugaaaggcuggucaagca

SEQ ID NO: 759426 - RNA, 19 nt, Homo sapiens
  misc_RNA (1)...(19): siRNA sense strand
ugaaaugucagcugcuuga

SEQ ID NO: 759427 - RNA, 19 nt, Homo sapiens
  misc_RNA (1)...(19): siRNA sense strand
aagaaggcauggagaugaa

SEQ ID NO: 759428 - RNA, 19 nt, Homo sapiens
  misc_RNA (1)...(19): siRNA sense strand
acaaauugauucacuucug

SEQ ID NO: 759429 - RNA, 19 nt, Homo sapiens
  misc_RNA (1)...(19): siRNA sense strand
ccaggugcuuaugauguua

SEQ ID NO: 759430 - RNA, 19 nt, Homo sapiens
  misc_RNA (1)...(19): siRNA sense strand
uauggagugucaagaauca

SEQ ID NO: 759431 - RNA, 19 nt, Homo sapiens
  misc_RNA (1)...(19): siRNA sense strand
gaaaggcuggucaagcaau

SEQ ID NO: 759432 - RNA, 19 nt, Homo sapiens
  misc_RNA (1)...(19): siRNA sense strand
uaaagcaaacacuggauga

SEQ ID NO: 759433 - RNA, 19 nt, Homo sapiens
  misc_RNA (1)...(19): siRNA sense strand
cuucgagucuucaucagaa

SEQ ID NO: 759434 - RNA, 19 nt, Homo sapiens
  misc_RNA (1)...(19): siRNA sense strand
acaucucucucugcaaaua

SEQ ID NO: 759435 - RNA, 19 nt, Homo sapiens
  misc_RNA (1)...(19): siRNA sense strand
caacaggaggaagacuuua

SEQ ID NO: 759436 - RNA, 19 nt, Homo sapiens
  misc_RNA (1)...(19): siRNA sense strand
uaacagccagugagauaga

SEQ ID NO: 759437 - RNA, 19 nt, Homo sapiens
  misc_RNA (1)...(19): siRNA sense strand
gaaucuguuugaggaagaa

SEQ ID NO: 759438 - RNA, 19 nt, Homo sapiens
  misc_RNA (1)...(19): siRNA sense strand
caacaggaauagagaacac

SEQ ID NO: 759439 - RNA, 19 nt, Homo sapiens
  misc_RNA (1)...(19): siRNA sense strand
caggacuaaugaacuacua

SEQ ID NO: 759440 - RNA, 19 nt, Homo sapiens
  misc_RNA (1)...(19): siRNA sense strand
ggagaacucaucauuacag

SEQ ID NO: 759441 - RNA, 19 nt, Homo sapiens
  misc_RNA (1)...(19): siRNA sense strand
cuggagaacucaucauuac

SEQ ID NO: 759442 - RNA, 19 nt, Homo sapiens
  misc_RNA (1)...(19): siRNA sense strand
ugcaaagccuugaagaugu

SEQ ID NO: 759443 - RNA, 19 nt, Homo sapiens
  misc_RNA (1)...(19): siRNA sense strand
aagagaagaaucuguuuga

SEQ ID NO: 759444 - RNA, 19 nt, Homo sapiens
  misc_RNA (1)...(19): siRNA sense strand
cuaaacaaguagaagaucu

SEQ ID NO: 759445 - RNA, 19 nt, Homo sapiens
  misc_RNA (1)...(19): siRNA sense strand
agaaauuaguugugcuuca

SEQ ID NO: 759446 - RNA, 19 nt, Homo sapiens
  misc_RNA (1)...(19): siRNA sense strand
aaaggcuggucaagcaauu

SEQ ID NO: 759447 - RNA, 19 nt, Homo sapiens
  misc_RNA (1)...(19): siRNA sense strand
ucaggaacagcuaaauaaa

SEQ ID NO: 759448 - RNA, 19 nt, Homo sapiens
  misc_RNA (1)...(19): siRNA sense strand
agaaccaacucaagcaaca

SEQ ID NO: 759449 - RNA, 19 nt, Homo sapiens
  misc_RNA (1)...(19): siRNA sense strand
gauguuacugcucaauuug

SEQ ID NO: 759450 - RNA, 19 nt, Homo sapiens
  misc_RNA (1)...(19): siRNA sense strand
uagcccaacuggagggaaa

SEQ ID NO: 759451 - RNA, 19 nt, Homo sapiens
  misc_RNA (1)...(19): siRNA sense strand
acucaaaucggaaguauca

SEQ ID NO: 759452 - RNA, 19 nt, Homo sapiens
  misc_RNA (1)...(19): siRNA sense strand
gaccaagucagcacuaaag

SEQ ID NO: 759453 - RNA, 19 nt, Homo sapiens
  misc_RNA (1)...(19): siRNA sense strand
gaagaaucuguuugaggaa

SEQ ID NO: 759454 - RNA, 19 nt, Homo sapiens
  misc_RNA (1)...(19): siRNA sense strand
caacgaaaaucuaaaugca

SEQ ID NO: 759455 - RNA, 19 nt, Homo sapiens
  misc_RNA (1)...(19): siRNA sense strand
auucuaagcuuggaguuga

SEQ ID NO: 759456 - RNA, 19 nt, Homo sapiens
  misc_RNA (1)...(19): siRNA sense strand
ccuauggagugucaagaau

SEQ ID NO: 759457 - RNA, 19 nt, Homo sapiens
  misc_RNA (1)...(19): siRNA sense strand
gacaaaacuucaagaggaa

SEQ ID NO: 759458 - RNA, 19 nt, Homo sapiens
  misc_RNA (1)...(19): siRNA sense strand
aaucaagcauguugugaag

SEQ ID NO: 759459 - RNA, 19 nt, Homo sapiens
  misc_RNA (1)...(19): siRNA sense strand
ucuccucuaugaagaacua

SEQ ID NO: 759460 - RNA, 19 nt, Homo sapiens
  misc_RNA (1)...(19): siRNA sense strand
gaggaagacuuuagaaaac

SEQ ID NO: 759461 - RNA, 19 nt, Homo sapiens
  misc_RNA (1)...(19): siRNA sense strand
gcagaaccaacucaagcaa

SEQ ID NO: 759462 - RNA, 19 nt, Homo sapiens
  misc_RNA (1)...(19): siRNA sense strand
aaacaaagaugagggguau

SEQ ID NO: 759463 - RNA, 19 nt, Homo sapiens
  misc_RNA (1)...(19): siRNA sense strand
ggagagaaaugagcccaua

SEQ ID NO: 759464 - RNA, 19 nt, Homo sapiens
  misc_RNA (1)...(19): siRNA sense strand
gggaggagcuggaggaaga

SEQ ID NO: 759465 - RNA, 19 nt, Homo sapiens
  misc_RNA (1)...(19): siRNA sense strand
cauauucccugcccugaua

SEQ ID NO: 759466 - RNA, 19 nt, Homo sapiens
  misc_RNA (1)...(19): siRNA sense strand
gggaagugcucaagaccua

SEQ ID NO: 759467 - RNA, 19 nt, Homo sapiens
  misc_RNA (1)...(19): siRNA sense strand
gagcggacgucccuaaugu

SEQ ID NO: 759468 - RNA, 19 nt, Homo sapiens
  misc_RNA (1)...(19): siRNA sense strand
ggaggacccugaccgcuau

SEQ ID NO: 759469 - RNA, 19 nt, Homo sapiens
  misc_RNA (1)...(19): siRNA sense strand
ccaaagggccucugagaau

SEQ ID NO: 759470 - RNA, 19 nt, Homo sapiens
  misc_RNA (1)...(19): siRNA sense strand
caaagggccucugagaaug

SEQ ID NO: 759471 - RNA, 19 nt, Homo sapiens
  misc_RNA (1)...(19): siRNA sense strand
gcucauggcccuaguguuc

SEQ ID NO: 759472 - RNA, 19 nt, Homo sapiens
  misc_RNA (1)...(19): siRNA sense strand
ucacauucauggccucuga

SEQ ID NO: 759473 - RNA, 19 nt, Homo sapiens
  misc_RNA (1)...(19): siRNA sense strand
cagcaggccuaccucauca

SEQ ID NO: 759474 - RNA, 19 nt, Homo sapiens
  misc_RNA (1)...(19): siRNA sense strand
gagaaaugagcccauauuc

SEQ ID NO: 759475 - RNA, 19 nt, Homo sapiens
  misc_RNA (1)...(19): siRNA sense strand
aggaagagcugacccucaa

SEQ ID NO: 759476 - RNA, 19 nt, Homo sapiens
  misc_RNA (1)...(19): siRNA sense strand
gaagacuccuaugacaguu

SEQ ID NO: 759477 - RNA, 19 nt, Homo sapiens
  misc_RNA (1)...(19): siRNA sense strand
gaagagcugacccucaaau

SEQ ID NO: 759478 - RNA, 19 nt, Homo sapiens
  misc_RNA (1)...(19): siRNA sense strand
gcucaagaccuacaaugug

SEQ ID NO: 759479 - RNA, 19 nt, Homo sapiens
  misc_RNA (1)...(19): siRNA sense strand
cucauuggcuugugucuga

SEQ ID NO: 759480 - RNA, 19 nt, Homo sapiens
  misc_RNA (1)...(19): siRNA sense strand
gaugagcggacgucccuaa

SEQ ID NO: 759481 - RNA, 19 nt, Homo sapiens
  misc_RNA (1)...(19): siRNA sense strand
ugagaaugcugguagaaac

SEQ ID NO: 759482 - RNA, 19 nt, Homo sapiens
  misc_RNA (1)...(19): siRNA sense strand
ggagaagccaggagaacga

SEQ ID NO: 759483 - RNA, 19 nt, Homo sapiens
  misc_RNA (1)...(19): siRNA sense strand
gcugguugaucaugucuuc

SEQ ID NO: 759484 - RNA, 19 nt, Homo sapiens
  misc_RNA (1)...(19): siRNA sense strand
gcugaacacccucaucaug

SEQ ID NO: 759485 - RNA, 19 nt, Homo sapiens
  misc_RNA (1)...(19): siRNA sense strand
gagcgaagcacgugaucau

SEQ ID NO: 759486 - RNA, 19 nt, Homo sapiens
  misc_RNA (1)...(19): siRNA sense strand
aaacugcccaggagagaaa

SEQ ID NO: 759487 - RNA, 19 nt, Homo sapiens
  misc_RNA (1)...(19): siRNA sense strand
gacauucacugaggacaca

SEQ ID NO: 759488 - RNA, 19 nt, Homo sapiens
  misc_RNA (1)...(19): siRNA sense strand
aggaagaagugugugauga

SEQ ID NO: 759489 - RNA, 19 nt, Homo sapiens
  misc_RNA (1)...(19): siRNA sense strand
ucaagucugugcgcuucua

SEQ ID NO: 759490 - RNA, 19 nt, Homo sapiens
  misc_RNA (1)...(19): siRNA sense strand
gcagcaggccuaccucauc

SEQ ID NO: 759491 - RNA, 19 nt, Homo sapiens
  misc_RNA (1)...(19): siRNA sense strand
ugguggugcucuacaagua

SEQ ID NO: 759492 - RNA, 19 nt, Homo sapiens
  misc_RNA (1)...(19): siRNA sense strand
gaucagcgucaucgugguu

SEQ ID NO: 759493 - RNA, 19 nt, Homo sapiens
  misc_RNA (1)...(19): siRNA sense strand
ggaagaagugugugaugag

SEQ ID NO: 759494 - RNA, 19 nt, Homo sapiens
  misc_RNA (1)...(19): siRNA sense strand
ugacagcgaggaagaagug

SEQ ID NO: 759495 - RNA, 19 nt, Homo sapiens
  misc_RNA (1)...(19): siRNA sense strand
ggacuucaucuucuacagu

SEQ ID NO: 759496 - RNA, 19 nt, Homo sapiens
  misc_RNA (1)...(19): siRNA sense strand
agagaaaugagcccauauu

SEQ ID NO: 759497 - RNA, 19 nt, Homo sapiens
  misc_RNA (1)...(19): siRNA sense strand
gguuaugaccaucuucuug

SEQ ID NO: 759498 - RNA, 19 nt, Homo sapiens
  misc_RNA (1)...(19): siRNA sense strand
gaaacugcccaggagagaa

SEQ ID NO: 759499 - RNA, 19 nt, Homo sapiens
  misc_RNA (1)...(19): siRNA sense strand
gagcugacccucaaauacg

SEQ ID NO: 759500 - RNA, 19 nt, Homo sapiens
  misc_RNA (1)...(19): siRNA sense strand
gaggaagaagugugugaug

SEQ ID NO: 759501 - RNA, 19 nt, Homo sapiens
  misc_RNA (1)...(19): siRNA sense strand
uugaucaugucuucacuga

SEQ ID NO: 759502 - RNA, 19 nt, Homo sapiens
  misc_RNA (1)...(19): siRNA sense strand
gaauggacagcucaucuac

SEQ ID NO: 759503 - RNA, 19 nt, Homo sapiens
  misc_RNA (1)...(19): siRNA sense strand
gcccuaguguucaucaagu

SEQ ID NO: 759504 - RNA, 19 nt, Homo sapiens
  misc_RNA (1)...(19): siRNA sense strand
gcacgugaucaugcuguuu

SEQ ID NO: 759505 - RNA, 19 nt, Homo sapiens
  misc_RNA (1)...(19): siRNA sense strand
agaauggacagcucaucua

SEQ ID NO: 759506 - RNA, 19 nt, Homo sapiens
  misc_RNA (1)...(19): siRNA sense strand
gugcugaacacccucauca

SEQ ID NO: 759507 - RNA, 19 nt, Homo sapiens
  misc_RNA (1)...(19): siRNA sense strand
cccaucagcucuacaucug

SEQ ID NO: 759508 - RNA, 19 nt, Homo sapiens
  misc_RNA (1)...(19): siRNA sense strand
gagagaaaugagcccauau

SEQ ID NO: 759509 - RNA, 19 nt, Homo sapiens
  misc_RNA (1)...(19): siRNA sense strand
auccauggcugguugauca

SEQ ID NO: 759510 - RNA, 19 nt, Homo sapiens
  misc_RNA (1)...(19): siRNA sense strand
cagcucaucuacacgacau

SEQ ID NO: 759511 - RNA, 19 nt, Homo sapiens
  misc_RNA (1)...(19): siRNA sense strand
gcgaggaagaaguguguga

SEQ ID NO: 759512 - RNA, 19 nt, Homo sapiens
  misc_RNA (1)...(19): siRNA sense strand
gaagugcucaagaccuaca

SEQ ID NO: 759513 - RNA, 19 nt, Homo sapiens
  misc_RNA (1)...(19): siRNA sense strand
auaccacgcuggccugcuu

SEQ ID NO: 759514 - RNA, 19 nt, Homo sapiens
  misc_RNA (1)...(19): siRNA sense strand
gcccugauauacucaucug

SEQ ID NO: 759515 - RNA, 19 nt, Homo sapiens
  misc_RNA (1)...(19): siRNA sense strand
ggaagagcugacccucaaa

SEQ ID NO: 759516 - RNA, 19 nt, Homo sapiens
  misc_RNA (1)...(19): siRNA sense strand
gcugugcugugucccaaag

SEQ ID NO: 759517 - RNA, 19 nt, Homo sapiens
  misc_RNA (1)...(19): siRNA sense strand
ccuacaauguggccaugga

SEQ ID NO: 759518 - RNA, 19 nt, Homo sapiens
  misc_RNA (1)...(19): siRNA sense strand
guaccgcugcuacaaguuc

SEQ ID NO: 759519 - RNA, 19 nt, Homo sapiens
  misc_RNA (1)...(19): siRNA sense strand
ucucguggcugugcugugu

SEQ ID NO: 759520 - RNA, 19 nt, Homo sapiens
  misc_RNA (1)...(19): siRNA sense strand
gcaggccuaccucaucaug

SEQ ID NO: 759521 - RNA, 19 nt, Homo sapiens
  misc_RNA (1)...(19): siRNA sense strand
gaagaauggacagcucauc

SEQ ID NO: 759522 - RNA, 19 nt, Homo sapiens
  misc_RNA (1)...(19): siRNA sense strand
aagagcugacccucaaaua

SEQ ID NO: 759523 - RNA, 19 nt, Homo sapiens
  misc_RNA (1)...(19): siRNA sense strand
uagccaccaucaagucugu

SEQ ID NO: 759524 - RNA, 19 nt, Homo sapiens
  misc_RNA (1)...(19): siRNA sense strand
cccuaguguucaucaagua

SEQ ID NO: 759525 - RNA, 19 nt, Homo sapiens
  misc_RNA (1)...(19): siRNA sense strand
acaauguggccauggacua

SEQ ID NO: 759526 - RNA, 19 nt, Homo sapiens
  misc_RNA (1)...(19): siRNA sense strand
ggaggaagaggaggaaagg

SEQ ID NO: 759527 - RNA, 19 nt, Homo sapiens
  misc_RNA (1)...(19): siRNA sense strand
ccugaccgcuaugucugua

SEQ ID NO: 759528 - RNA, 19 nt, Homo sapiens
  misc_RNA (1)...(19): siRNA sense strand
caaguaccgcugcuacaag

SEQ ID NO: 759529 - RNA, 19 nt, Homo sapiens
  misc_RNA (1)...(19): siRNA sense strand
cauccucauuggcuugugu

SEQ ID NO: 759530 - RNA, 19 nt, Homo sapiens
  misc_RNA (1)...(19): siRNA sense strand
acaaguaccgcugcuacaa

SEQ ID NO: 759531 - RNA, 19 nt, Homo sapiens
  misc_RNA (1)...(19): siRNA sense strand
cguucgggcucaucuuuua

SEQ ID NO: 759532 - RNA, 19 nt, Homo sapiens
  misc_RNA (1)...(19): siRNA sense strand
gagaaugcugguagaaacu

SEQ ID NO: 759533 - RNA, 19 nt, Homo sapiens
  misc_RNA (1)...(19): siRNA sense strand
ccucuucaccuauaucuac

SEQ ID NO: 759534 - RNA, 19 nt, Homo sapiens
  misc_RNA (1)...(19): siRNA sense strand
cuguuccucuucaccuaua

SEQ ID NO: 759535 - RNA, 19 nt, Homo sapiens
  misc_RNA (1)...(19): siRNA sense strand
gcccagaggauggagagaa

SEQ ID NO: 759536 - RNA, 19 nt, Homo sapiens
  misc_RNA (1)...(19): siRNA sense strand
aaguaccgcugcuacaagu

SEQ ID NO: 759537 - RNA, 19 nt, Homo sapiens
  misc_RNA (1)...(19): siRNA sense strand
ucaaauacggagcgaagca

SEQ ID NO: 759538 - RNA, 19 nt, Homo sapiens
  misc_RNA (1)...(19): siRNA sense strand
ugaccgcuaugucuguagu

SEQ ID NO: 759539 - RNA, 19 nt, Homo sapiens
  misc_RNA (1)...(19): siRNA sense strand
cgccaucucuguguaugau

SEQ ID NO: 759540 - RNA, 19 nt, Homo sapiens
  misc_RNA (1)...(19): siRNA sense strand
cacgugaucaugcuguuug

SEQ ID NO: 759541 - RNA, 19 nt, Homo sapiens
  misc_RNA (1)...(19): siRNA sense strand
cuucguggccauccucauu

SEQ ID NO: 759542 - RNA, 19 nt, Homo sapiens
  misc_RNA (1)...(19): siRNA sense strand
cagcgaggaagaagugugu

SEQ ID NO: 759543 - RNA, 19 nt, Homo sapiens
  misc_RNA (1)...(19): siRNA sense strand
cccaaagggccucugagaa

SEQ ID NO: 759544 - RNA, 19 nt, Homo sapiens
  misc_RNA (1)...(19): siRNA sense strand
ggacuaccccacccucuug

SEQ ID NO: 759545 - RNA, 19 nt, Homo sapiens
  misc_RNA (1)...(19): siRNA sense strand
cacguucgggcucaucuuu

SEQ ID NO: 759546 - RNA, 19 nt, Homo sapiens
  misc_RNA (1)...(19): siRNA sense strand
ggagagaaaugagcccaua

SEQ ID NO: 759547 - RNA, 19 nt, Homo sapiens
  misc_RNA (1)...(19): siRNA sense strand
gggaggagcuggaggaaga

SEQ ID NO: 759548 - RNA, 19 nt, Homo sapiens
  misc_RNA (1)...(19): siRNA sense strand
cauauucccugcccugaua

SEQ ID NO: 759549 - RNA, 19 nt, Homo sapiens
  misc_RNA (1)...(19): siRNA sense strand
gggaagugcucaagaccua

SEQ ID NO: 759550 - RNA, 19 nt, Homo sapiens
  misc_RNA (1)...(19): siRNA sense strand
gagcggacgucccuaaugu

SEQ ID NO: 759551 - RNA, 19 nt, Homo sapiens
  misc_RNA (1)...(19): siRNA sense strand
ggaggacccugaccgcuau

SEQ ID NO: 759552 - RNA, 19 nt, Homo sapiens
  misc_RNA (1)...(19): siRNA sense strand
ccaaagggccucugagaau

SEQ ID NO: 759553 - RNA, 19 nt, Homo sapiens
  misc_RNA (1)...(19): siRNA sense strand
caaagggccucugagaaug

SEQ ID NO: 759554 - RNA, 19 nt, Homo sapiens
  misc_RNA (1)...(19): siRNA sense strand
gcucauggcccuaguguuc

SEQ ID NO: 759555 - RNA, 19 nt, Homo sapiens
  misc_RNA (1)...(19): siRNA sense strand
ucacauucauggccucuga

SEQ ID NO: 759556 - RNA, 19 nt, Homo sapiens
  misc_RNA (1)...(19): siRNA sense strand
cagcaggccuaccucauca

SEQ ID NO: 759557 - RNA, 19 nt, Homo sapiens
  misc_RNA (1)...(19): siRNA sense strand
gagaaaugagcccauauuc

SEQ ID NO: 759558 - RNA, 19 nt, Homo sapiens
  misc_RNA (1)...(19): siRNA sense strand
aggaagagcugacccucaa

SEQ ID NO: 759559 - RNA, 19 nt, Homo sapiens
  misc_RNA (1)...(19): siRNA sense strand
gaagacuccuaugacaguu

SEQ ID NO: 759560 - RNA, 19 nt, Homo sapiens
  misc_RNA (1)...(19): siRNA sense strand
gaagagcugacccucaaau

SEQ ID NO: 759561 - RNA, 19 nt, Homo sapiens
  misc_RNA (1)...(19): siRNA sense strand
gcucaagaccuacaaugug

SEQ ID NO: 759562 - RNA, 19 nt, Homo sapiens
  misc_RNA (1)...(19): siRNA sense strand
cucauuggcuugugucuga

SEQ ID NO: 759563 - RNA, 19 nt, Homo sapiens
  misc_RNA (1)...(19): siRNA sense strand
gaugagcggacgucccuaa

SEQ ID NO: 759564 - RNA, 19 nt, Homo sapiens
  misc_RNA (1)...(19): siRNA sense strand
ugagaaugcugguagaaac

SEQ ID NO: 759565 - RNA, 19 nt, Homo sapiens
  misc_RNA (1)...(19): siRNA sense strand
ggagaagccaggagaacga

SEQ ID NO: 759566 - RNA, 19 nt, Homo sapiens
  misc_RNA (1)...(19): siRNA sense strand
gcugguugaucaugucuuc

SEQ ID NO: 759567 - RNA, 19 nt, Homo sapiens
  misc_RNA (1)...(19): siRNA sense strand
gcugaacacccucaucaug

SEQ ID NO: 759568 - RNA, 19 nt, Homo sapiens
  misc_RNA (1)...(19): siRNA sense strand
gagcgaagcacgugaucau

SEQ ID NO: 759569 - RNA, 19 nt, Homo sapiens
  misc_RNA (1)...(19): siRNA sense strand
aaacugcccaggagagaaa

SEQ ID NO: 759570 - RNA, 19 nt, Homo sapiens
  misc_RNA (1)...(19): siRNA sense strand
gacauucacugaggacaca

SEQ ID NO: 759571 - RNA, 19 nt, Homo sapiens
  misc_RNA (1)...(19): siRNA sense strand
aggaagaagugugugauga

SEQ ID NO: 759572 - RNA, 19 nt, Homo sapiens
  misc_RNA (1)...(19): siRNA sense strand
ucaagucugugcgcuucua

SEQ ID NO: 759573 - RNA, 19 nt, Homo sapiens
  misc_RNA (1)...(19): siRNA sense strand
gcagcaggccuaccucauc

SEQ ID NO: 759574 - RNA, 19 nt, Homo sapiens
  misc_RNA (1)...(19): siRNA sense strand
ugguggugcucuacaagua

SEQ ID NO: 759575 - RNA, 19 nt, Homo sapiens
  misc_RNA (1)...(19): siRNA sense strand
gaucagcgucaucgugguu

SEQ ID NO: 759576 - RNA, 19 nt, Homo sapiens
  misc_RNA (1)...(19): siRNA sense strand
ggaagaagugugugaugag

SEQ ID NO: 759577 - RNA, 19 nt, Homo sapiens
  misc_RNA (1)...(19): siRNA sense strand
ugacagcgaggaagaagug

SEQ ID NO: 759578 - RNA, 19 nt, Homo sapiens
  misc_RNA (1)...(19): siRNA sense strand
ggacuucaucuucuacagu

SEQ ID NO: 759579 - RNA, 19 nt, Homo sapiens
  misc_RNA (1)...(19): siRNA sense strand
agagaaaugagcccauauu

SEQ ID NO: 759580 - RNA, 19 nt, Homo sapiens
  misc_RNA (1)...(19): siRNA sense strand
gguuaugaccaucuucuug

SEQ ID NO: 759581 - RNA, 19 nt, Homo sapiens
  misc_RNA (1)...(19): siRNA sense strand
gaaacugcccaggagagaa

SEQ ID NO: 759582 - RNA, 19 nt, Homo sapiens
  misc_RNA (1)...(19): siRNA sense strand
gagcugacccucaaauacg

SEQ ID NO: 759583 - RNA, 19 nt, Homo sapiens
  misc_RNA (1)...(19): siRNA sense strand
gaggaagaagugugugaug

SEQ ID NO: 759584 - RNA, 19 nt, Homo sapiens
  misc_RNA (1)...(19): siRNA sense strand
uugaucaugucuucacuga

SEQ ID NO: 759585 - RNA, 19 nt, Homo sapiens
  misc_RNA (1)...(19): siRNA sense strand
gaauggacagcucaucuac

SEQ ID NO: 759586 - RNA, 19 nt, Homo sapiens
  misc_RNA (1)...(19): siRNA sense strand
gcccuaguguucaucaagu

SEQ ID NO: 759587 - RNA, 19 nt, Homo sapiens
  misc_RNA (1)...(19): siRNA sense strand
gcacgugaucaugcuguuu

SEQ ID NO: 759588 - RNA, 19 nt, Homo sapiens
  misc_RNA (1)...(19): siRNA sense strand
agaauggacagcucaucua

SEQ ID NO: 759589 - RNA, 19 nt, Homo sapiens
  misc_RNA (1)...(19): siRNA sense strand
gugcugaacacccucauca

SEQ ID NO: 759590 - RNA, 19 nt, Homo sapiens
  misc_RNA (1)...(19): siRNA sense strand
cccaucagcucuacaucug

SEQ ID NO: 759591 - RNA, 19 nt, Homo sapiens
  misc_RNA (1)...(19): siRNA sense strand
gagagaaaugagcccauau

SEQ ID NO: 759592 - RNA, 19 nt, Homo sapiens
  misc_RNA (1)...(19): siRNA sense strand
auccauggcugguugauca

SEQ ID NO: 759593 - RNA, 19 nt, Homo sapiens
  misc_RNA (1)...(19): siRNA sense strand
cagcucaucuacacgacau

SEQ ID NO: 759594 - RNA, 19 nt, Homo sapiens
  misc_RNA (1)...(19): siRNA sense strand
gcgaggaagaaguguguga

SEQ ID NO: 759595 - RNA, 19 nt, Homo sapiens
  misc_RNA (1)...(19): siRNA sense strand
gaagugcucaagaccuaca

SEQ ID NO: 759596 - RNA, 19 nt, Homo sapiens
  misc_RNA (1)...(19): siRNA sense strand
auaccacgcuggccugcuu

SEQ ID NO: 759597 - RNA, 19 nt, Homo sapiens
  misc_RNA (1)...(19): siRNA sense strand
gcccugauauacucaucug

SEQ ID NO: 759598 - RNA, 19 nt, Homo sapiens
  misc_RNA (1)...(19): siRNA sense strand
ggaagagcugacccucaaa

SEQ ID NO: 759599 - RNA, 19 nt, Homo sapiens
  misc_RNA (1)...(19): siRNA sense strand
gcugugcugugucccaaag

SEQ ID NO: 759600 - RNA, 19 nt, Homo sapiens
  misc_RNA (1)...(19): siRNA sense strand
ccuacaauguggccaugga

SEQ ID NO: 759601 - RNA, 19 nt, Homo sapiens
  misc_RNA (1)...(19): siRNA sense strand
guaccgcugcuacaaguuc

SEQ ID NO: 759602 - RNA, 19 nt, Homo sapiens
  misc_RNA (1)...(19): siRNA sense strand
ucucguggcugugcugugu

SEQ ID NO: 759603 - RNA, 19 nt, Homo sapiens
  misc_RNA (1)...(19): siRNA sense strand
gcaggccuaccucaucaug

SEQ ID NO: 759604 - RNA, 19 nt, Homo sapiens
  misc_RNA (1)...(19): siRNA sense strand
gaagaauggacagcucauc

SEQ ID NO: 759605 - RNA, 19 nt, Homo sapiens
  misc_RNA (1)...(19): siRNA sense strand
aagagcugacccucaaaua

SEQ ID NO: 759606 - RNA, 19 nt, Homo sapiens
  misc_RNA (1)...(19): siRNA sense strand
uagccaccaucaagucugu

SEQ ID NO: 759607 - RNA, 19 nt, Homo sapiens
  misc_RNA (1)...(19): siRNA sense strand
cccuaguguucaucaagua

SEQ ID NO: 759608 - RNA, 19 nt, Homo sapiens
  misc_RNA (1)...(19): siRNA sense strand
acaauguggccauggacua

SEQ ID NO: 759609 - RNA, 19 nt, Homo sapiens
  misc_RNA (1)...(19): siRNA sense strand
ggaggaagaggaggaaagg

SEQ ID NO: 759610 - RNA, 19 nt, Homo sapiens
  misc_RNA (1)...(19): siRNA sense strand
ccugaccgcuaugucugua

SEQ ID NO: 759611 - RNA, 19 nt, Homo sapiens
  misc_RNA (1)...(19): siRNA sense strand
caaguaccgcugcuacaag

SEQ ID NO: 759612 - RNA, 19 nt, Homo sapiens
  misc_RNA (1)...(19): siRNA sense strand
cauccucauuggcuugugu

SEQ ID NO: 759613 - RNA, 19 nt, Homo sapiens
  misc_RNA (1)...(19): siRNA sense strand
acaaguaccgcugcuacaa

SEQ ID NO: 759614 - RNA, 19 nt, Homo sapiens
  misc_RNA (1)...(19): siRNA sense strand
cguucgggcucaucuuuua

SEQ ID NO: 759615 - RNA, 19 nt, Homo sapiens
  misc_RNA (1)...(19): siRNA sense strand
gagaaugcugguagaaacu

SEQ ID NO: 759616 - RNA, 19 nt, Homo sapiens
  misc_RNA (1)...(19): siRNA sense strand
ccucuucaccuauaucuac

SEQ ID NO: 759617 - RNA, 19 nt, Homo sapiens
  misc_RNA (1)...(19): siRNA sense strand
cuguuccucuucaccuaua

SEQ ID NO: 759618 - RNA, 19 nt, Homo sapiens
  misc_RNA (1)...(19): siRNA sense strand
gcccagaggauggagagaa

SEQ ID NO: 759619 - RNA, 19 nt, Homo sapiens
  misc_RNA (1)...(19): siRNA sense strand
aaguaccgcugcuacaagu

SEQ ID NO: 759620 - RNA, 19 nt, Homo sapiens
  misc_RNA (1)...(19): siRNA sense strand
ucaaauacggagcgaagca

SEQ ID NO: 759621 - RNA, 19 nt, Homo sapiens
  misc_RNA (1)...(19): siRNA sense strand
ugaccgcuaugucuguagu

SEQ ID NO: 759622 - RNA, 19 nt, Homo sapiens
  misc_RNA (1)...(19): siRNA sense strand
cgccaucucuguguaugau

SEQ ID NO: 759623 - RNA, 19 nt, Homo sapiens
  misc_RNA (1)...(19): siRNA sense strand
cacgugaucaugcuguuug

SEQ ID NO: 759624 - RNA, 19 nt, Homo sapiens
  misc_RNA (1)...(19): siRNA sense strand
cuucguggccauccucauu

SEQ ID NO: 759625 - RNA, 19 nt, Homo sapiens
  misc_RNA (1)...(19): siRNA sense strand
cagcgaggaagaagugugu

SEQ ID NO: 759626 - RNA, 19 nt, Homo sapiens
  misc_RNA (1)...(19): siRNA sense strand
cccaaagggccucugagaa

SEQ ID NO: 759627 - RNA, 19 nt, Homo sapiens
  misc_RNA (1)...(19): siRNA sense strand
ggacuaccccacccucuug

SEQ ID NO: 759628 - RNA, 19 nt, Homo sapiens
  misc_RNA (1)...(19): siRNA sense strand
cacguucgggcucaucuuu

SEQ ID NO: 759629 - RNA, 19 nt, Homo sapiens
  misc_RNA (1)...(19): siRNA sense strand
uaagaugacucaccggaua

SEQ ID NO: 759630 - RNA, 19 nt, Homo sapiens
  misc_RNA (1)...(19): siRNA sense strand
ggagagccauggagagaca

SEQ ID NO: 759631 - RNA, 19 nt, Homo sapiens
  misc_RNA (1)...(19): siRNA sense strand
gaaggagggaggagaaaga

SEQ ID NO: 759632 - RNA, 19 nt, Homo sapiens
  misc_RNA (1)...(19): siRNA sense strand
ggacuaggcuacagaucag

SEQ ID NO: 759633 - RNA, 19 nt, Homo sapiens
  misc_RNA (1)...(19): siRNA sense strand
gacugaaccugccagagaa

SEQ ID NO: 759634 - RNA, 19 nt, Homo sapiens
  misc_RNA (1)...(19): siRNA sense strand
gcagaaggagcaucaggaa

SEQ ID NO: 759635 - RNA, 19 nt, Homo sapiens
  misc_RNA (1)...(19): siRNA sense strand
gaaggcaccagcagcagaa

SEQ ID NO: 759636 - RNA, 19 nt, Homo sapiens
  misc_RNA (1)...(19): siRNA sense strand
gacacccacuuccaagauu

SEQ ID NO: 759637 - RNA, 19 nt, Homo sapiens
  misc_RNA (1)...(19): siRNA sense strand
agaaggagcaucaggaaga

SEQ ID NO: 759638 - RNA, 19 nt, Homo sapiens
  misc_RNA (1)...(19): siRNA sense strand
gaaccugccagagaaagaa

SEQ ID NO: 759639 - RNA, 19 nt, Homo sapiens
  misc_RNA (1)...(19): siRNA sense strand
gaacugugacacccacuuc

SEQ ID NO: 759640 - RNA, 19 nt, Homo sapiens
  misc_RNA (1)...(19): siRNA sense strand
agacugaaccugccagaga

SEQ ID NO: 759641 - RNA, 19 nt, Homo sapiens
  misc_RNA (1)...(19): siRNA sense strand
gagaaagaaagagaaagaa

SEQ ID NO: 759642 - RNA, 19 nt, Homo sapiens
  misc_RNA (1)...(19): siRNA sense strand
ccagagaaagaaagagaaa

SEQ ID NO: 759643 - RNA, 19 nt, Homo sapiens
  misc_RNA (1)...(19): siRNA sense strand
ggaaggacuaggcuacaga

SEQ ID NO: 759644 - RNA, 19 nt, Homo sapiens
  misc_RNA (1)...(19): siRNA sense strand
agagaaagaaagagaaaga

SEQ ID NO: 759645 - RNA, 19 nt, Homo sapiens
  misc_RNA (1)...(19): siRNA sense strand
gaaaaccggucuccuacuc

SEQ ID NO: 759646 - RNA, 19 nt, Homo sapiens
  misc_RNA (1)...(19): siRNA sense strand
gcuccugacucccagagau

SEQ ID NO: 759647 - RNA, 19 nt, Homo sapiens
  misc_RNA (1)...(19): siRNA sense strand
gaaggagcaucaggaagac

SEQ ID NO: 759648 - RNA, 19 nt, Homo sapiens
  misc_RNA (1)...(19): siRNA sense strand
gagacaaggagcccggaaa

SEQ ID NO: 759649 - RNA, 19 nt, Homo sapiens
  misc_RNA (1)...(19): siRNA sense strand
gaaggacuaggcuacagau

SEQ ID NO: 759650 - RNA, 19 nt, Homo sapiens
  misc_RNA (1)...(19): siRNA sense strand
gagaaggagggaggagaaa

SEQ ID NO: 759651 - RNA, 19 nt, Homo sapiens
  misc_RNA (1)...(19): siRNA sense strand
ggcccuugcucaucaccuu

SEQ ID NO: 759652 - RNA, 19 nt, Homo sapiens
  misc_RNA (1)...(19): siRNA sense strand
ugacacccacuuccaagau

SEQ ID NO: 759653 - RNA, 19 nt, Homo sapiens
  misc_RNA (1)...(19): siRNA sense strand
acacccacuuccaagauuc

SEQ ID NO: 759654 - RNA, 19 nt, Homo sapiens
  misc_RNA (1)...(19): siRNA sense strand
agagaaggagggaggagaa

SEQ ID NO: 759655 - RNA, 19 nt, Homo sapiens
  misc_RNA (1)...(19): siRNA sense strand
gagcgggaucuaaggacuu

SEQ ID NO: 759656 - RNA, 19 nt, Homo sapiens
  misc_RNA (1)...(19): siRNA sense strand
cccuugaggcugaggauaa

SEQ ID NO: 759657 - RNA, 19 nt, Homo sapiens
  misc_RNA (1)...(19): siRNA sense strand
ccucccaaccuuccacuug

SEQ ID NO: 759658 - RNA, 19 nt, Homo sapiens
  misc_RNA (1)...(19): siRNA sense strand
gaaagagaaagaaaagaag

SEQ ID NO: 759659 - RNA, 19 nt, Homo sapiens
  misc_RNA (1)...(19): siRNA sense strand
gaacacuccucacuucuuc

SEQ ID NO: 759660 - RNA, 19 nt, Homo sapiens
  misc_RNA (1)...(19): siRNA sense strand
cagaagccauguuagauga

SEQ ID NO: 759661 - RNA, 19 nt, Homo sapiens
  misc_RNA (1)...(19): siRNA sense strand
ugagaucaccuucaguuua

SEQ ID NO: 759662 - RNA, 19 nt, Homo sapiens
  misc_RNA (1)...(19): siRNA sense strand
gagaucaccuucaguuuac

SEQ ID NO: 759663 - RNA, 19 nt, Homo sapiens
  misc_RNA (1)...(19): siRNA sense strand
ucagcaacauugucauuaa

SEQ ID NO: 759664 - RNA, 19 nt, Homo sapiens
  misc_RNA (1)...(19): siRNA sense strand
ggagaaagccugagaagac

SEQ ID NO: 759665 - RNA, 19 nt, Homo sapiens
  misc_RNA (1)...(19): siRNA sense strand
gagaaagccugagaagaca

SEQ ID NO: 759666 - RNA, 19 nt, Homo sapiens
  misc_RNA (1)...(19): siRNA sense strand
gaagucggcagaagaguug

SEQ ID NO: 759667 - RNA, 19 nt, Homo sapiens
  misc_RNA (1)...(19): siRNA sense strand
ccucugagcuugccuucuu

SEQ ID NO: 759668 - RNA, 19 nt, Homo sapiens
  misc_RNA (1)...(19): siRNA sense strand
ggagggcuuuggaccauga

SEQ ID NO: 759669 - RNA, 19 nt, Homo sapiens
  misc_RNA (1)...(19): siRNA sense strand
gcaacauugucauuaagga

SEQ ID NO: 759670 - RNA, 19 nt, Homo sapiens
  misc_RNA (1)...(19): siRNA sense strand
caaaugccguuuccagaag

SEQ ID NO: 759671 - RNA, 19 nt, Homo sapiens
  misc_RNA (1)...(19): siRNA sense strand
gcagaagccauguuagaug

SEQ ID NO: 759672 - RNA, 19 nt, Homo sapiens
  misc_RNA (1)...(19): siRNA sense strand
acucucagauucuuuacua

SEQ ID NO: 759673 - RNA, 19 nt, Homo sapiens
  misc_RNA (1)...(19): siRNA sense strand
gaucagcaacauugucauu

SEQ ID NO: 759674 - RNA, 19 nt, Homo sapiens
  misc_RNA (1)...(19): siRNA sense strand
ggcaagaucagcaacauug

SEQ ID NO: 759675 - RNA, 19 nt, Homo sapiens
  misc_RNA (1)...(19): siRNA sense strand
ggaagaccacggagaccua

SEQ ID NO: 759676 - RNA, 19 nt, Homo sapiens
  misc_RNA (1)...(19): siRNA sense strand
caacuucucuguggacucu

SEQ ID NO: 759677 - RNA, 19 nt, Homo sapiens
  misc_RNA (1)...(19): siRNA sense strand
gcuaugagaucaccuucag

SEQ ID NO: 759678 - RNA, 19 nt, Homo sapiens
  misc_RNA (1)...(19): siRNA sense strand
gccugucacugucguguuu

SEQ ID NO: 759679 - RNA, 19 nt, Homo sapiens
  misc_RNA (1)...(19): siRNA sense strand
gaaguuugccaucuacauc

SEQ ID NO: 759680 - RNA, 19 nt, Homo sapiens
  misc_RNA (1)...(19): siRNA sense strand
ggacauggugcgagugaug

SEQ ID NO: 759681 - RNA, 19 nt, Homo sapiens
  misc_RNA (1)...(19): siRNA sense strand
ucaaaugccguuuccagaa

SEQ ID NO: 759682 - RNA, 19 nt, Homo sapiens
  misc_RNA (1)...(19): siRNA sense strand
gcucaacuuucuacucuac

SEQ ID NO: 759683 - RNA, 19 nt, Homo sapiens
  misc_RNA (1)...(19): siRNA sense strand
cgggaggccuuuaacauca

SEQ ID NO: 759684 - RNA, 19 nt, Homo sapiens
  misc_RNA (1)...(19): siRNA sense strand
gugcucaacuuucuacucu

SEQ ID NO: 759685 - RNA, 19 nt, Homo sapiens
  misc_RNA (1)...(19): siRNA sense strand
gacaugaugagcuacauug

SEQ ID NO: 759686 - RNA, 19 nt, Homo sapiens
  misc_RNA (1)...(19): siRNA sense strand
gaccagaaguuugccaucu

SEQ ID NO: 759687 - RNA, 19 nt, Homo sapiens
  misc_RNA (1)...(19): siRNA sense strand
ggaggccuuuaacaucauu

SEQ ID NO: 759688 - RNA, 19 nt, Homo sapiens
  misc_RNA (1)...(19): siRNA sense strand
ucugaacacuccucacuuc

SEQ ID NO: 759689 - RNA, 19 nt, Homo sapiens
  misc_RNA (1)...(19): siRNA sense strand
gaaagccugagaagacaga

SEQ ID NO: 759690 - RNA, 19 nt, Homo sapiens
  misc_RNA (1)...(19): siRNA sense strand
ggacaugaugagcuacauu

SEQ ID NO: 759691 - RNA, 19 nt, Homo sapiens
  misc_RNA (1)...(19): siRNA sense strand
gugcaaccuuuccugaaug

SEQ ID NO: 759692 - RNA, 19 nt, Homo sapiens
  misc_RNA (1)...(19): siRNA sense strand
cuaccgcucugguggaaga

SEQ ID NO: 759693 - RNA, 19 nt, Homo sapiens
  misc_RNA (1)...(19): siRNA sense strand
acucaccgcuguacauuca

SEQ ID NO: 759694 - RNA, 19 nt, Homo sapiens
  misc_RNA (1)...(19): siRNA sense strand
agaggcagaagccauguua

SEQ ID NO: 759695 - RNA, 19 nt, Homo sapiens
  misc_RNA (1)...(19): siRNA sense strand
cagcaacauugucauuaag

SEQ ID NO: 759696 - RNA, 19 nt, Homo sapiens
  misc_RNA (1)...(19): siRNA sense strand
gcuaaugaccugggagcua

SEQ ID NO: 759697 - RNA, 19 nt, Homo sapiens
  misc_RNA (1)...(19): siRNA sense strand
cccaggacaugaugagcua

SEQ ID NO: 759698 - RNA, 19 nt, Homo sapiens
  misc_RNA (1)...(19): siRNA sense strand
ggcgcuaugugcaaccuuu

SEQ ID NO: 759699 - RNA, 19 nt, Homo sapiens
  misc_RNA (1)...(19): siRNA sense strand
uaugagaucaccuucaguu

SEQ ID NO: 759700 - RNA, 19 nt, Homo sapiens
  misc_RNA (1)...(19): siRNA sense strand
ccagaaguuugccaucuac

SEQ ID NO: 759701 - RNA, 19 nt, Homo sapiens
  misc_RNA (1)...(19): siRNA sense strand
ccaagucccaugaugucua

SEQ ID NO: 759702 - RNA, 19 nt, Homo sapiens
  misc_RNA (1)...(19): siRNA sense strand
caagucccaugaugucuac

SEQ ID NO: 759703 - RNA, 19 nt, Homo sapiens
  misc_RNA (1)...(19): siRNA sense strand
gcccaggccaugucuuuga

SEQ ID NO: 759704 - RNA, 19 nt, Homo sapiens
  misc_RNA (1)...(19): siRNA sense strand
cagcuacuauuuggacaug

SEQ ID NO: 759705 - RNA, 19 nt, Homo sapiens
  misc_RNA (1)...(19): siRNA sense strand
agauuccucugaaauacaa

SEQ ID NO: 759706 - RNA, 19 nt, Homo sapiens
  misc_RNA (1)...(19): siRNA sense strand
caguugcgguugcucuuug

SEQ ID NO: 759707 - RNA, 19 nt, Homo sapiens
  misc_RNA (1)...(19): siRNA sense strand
uuucagggccuacgaguga

SEQ ID NO: 759708 - RNA, 19 nt, Homo sapiens
  misc_RNA (1)...(19): siRNA sense strand
ugugcaaccuuuccugaau

SEQ ID NO: 759709 - RNA, 19 nt, Homo sapiens
  misc_RNA (1)...(19): siRNA sense strand
ccagugcugccuccuugua

SEQ ID NO: 759710 - RNA, 19 nt, Homo sapiens
  misc_RNA (1)...(19): siRNA sense strand
gcuacuauuuggacaugca

SEQ ID NO: 759711 - RNA, 19 nt, Homo sapiens
  misc_RNA (1)...(19): siRNA sense strand
ccucugaaauacaaaauga

SEQ ID NO: 759712 - RNA, 19 nt, Homo sapiens
  misc_RNA (1)...(19): siRNA sense strand
accagaaguuugccaucua

SEQ ID NO: 759713 - RNA, 19 nt, Homo sapiens
  misc_RNA (1)...(19): siRNA sense strand
gcaagaucagcaacauugu

SEQ ID NO: 759714 - RNA, 19 nt, Homo sapiens
  misc_RNA (1)...(19): siRNA sense strand
ccaccaaugccuuccauag

SEQ ID NO: 759715 - RNA, 19 nt, Homo sapiens
  misc_RNA (1)...(19): siRNA sense strand
cuguguacgugauaucuga

SEQ ID NO: 759716 - RNA, 19 nt, Homo sapiens
  misc_RNA (1)...(19): siRNA sense strand
cagauucuuuacuaugcaa

SEQ ID NO: 759717 - RNA, 19 nt, Homo sapiens
  misc_RNA (1)...(19): siRNA sense strand
gagauuccucugaaauaca

SEQ ID NO: 759718 - RNA, 19 nt, Homo sapiens
  misc_RNA (1)...(19): siRNA sense strand
ucuuuacuaugcaauguug

SEQ ID NO: 759719 - RNA, 19 nt, Homo sapiens
  misc_RNA (1)...(19): siRNA sense strand
gggcaagaucagcaacauu

SEQ ID NO: 759720 - RNA, 19 nt, Homo sapiens
  misc_RNA (1)...(19): siRNA sense strand
gagucgagguggacauggu

SEQ ID NO: 759721 - RNA, 19 nt, Homo sapiens
  misc_RNA (1)...(19): siRNA sense strand
uggacucucagauucuuua

SEQ ID NO: 759722 - RNA, 19 nt, Homo sapiens
  misc_RNA (1)...(19): siRNA sense strand
aggacgacguggcaucuga

SEQ ID NO: 759723 - RNA, 19 nt, Homo sapiens
  misc_RNA (1)...(19): siRNA sense strand
accaaugccuuccauaguc

SEQ ID NO: 759724 - RNA, 19 nt, Homo sapiens
  misc_RNA (1)...(19): siRNA sense strand
ggcagaagccauguuagau

SEQ ID NO: 759725 - RNA, 19 nt, Homo sapiens
  misc_RNA (1)...(19): siRNA sense strand
uccuccaccuccuuuauuu

SEQ ID NO: 759726 - RNA, 19 nt, Homo sapiens
  misc_RNA (1)...(19): siRNA sense strand
uagcugccguccagaaguc

SEQ ID NO: 759727 - RNA, 19 nt, Homo sapiens
  misc_RNA (1)...(19): siRNA sense strand
cagcuugggcuaugagauc

SEQ ID NO: 759728 - RNA, 19 nt, Homo sapiens
  misc_RNA (1)...(19): siRNA sense strand
gggaggccuuuaacaucau

SEQ ID NO: 759729 - RNA, 19 nt, Homo sapiens
  misc_RNA (1)...(19): siRNA sense strand
ugaacacuccucacuucuu

SEQ ID NO: 759730 - RNA, 19 nt, Homo sapiens
  misc_RNA (1)...(19): siRNA sense strand
gggguggcauuaugguaua

SEQ ID NO: 759731 - RNA, 19 nt, Homo sapiens
  misc_RNA (1)...(19): siRNA sense strand
ucacuccuccaccuccuuu

SEQ ID NO: 759732 - RNA, 19 nt, Homo sapiens
  misc_RNA (1)...(19): siRNA sense strand
aggcagaagccauguuaga

SEQ ID NO: 759733 - RNA, 19 nt, Homo sapiens
  misc_RNA (1)...(19): siRNA sense strand
ccaucuacaucccacucuu

SEQ ID NO: 759734 - RNA, 19 nt, Homo sapiens
  misc_RNA (1)...(19): siRNA sense strand
ccagaagucggcagaagag

SEQ ID NO: 759735 - RNA, 19 nt, Homo sapiens
  misc_RNA (1)...(19): siRNA sense strand
caagaucagcaacauuguc

SEQ ID NO: 759736 - RNA, 19 nt, Homo sapiens
  misc_RNA (1)...(19): siRNA sense strand
acaaguggagcgcugagaa

SEQ ID NO: 759737 - RNA, 19 nt, Homo sapiens
  misc_RNA (1)...(19): siRNA sense strand
agaagucggcagaagaguu

SEQ ID NO: 759738 - RNA, 19 nt, Homo sapiens
  misc_RNA (1)...(19): siRNA sense strand
gagagucgagguggacaug

SEQ ID NO: 759739 - RNA, 19 nt, Homo sapiens
  misc_RNA (1)...(19): siRNA sense strand
ucucagauucuuuacuaug

SEQ ID NO: 759740 - RNA, 19 nt, Homo sapiens
  misc_RNA (1)...(19): siRNA sense strand
caccuucaguuuacucaac

SEQ ID NO: 759741 - RNA, 19 nt, Homo sapiens
  misc_RNA (1)...(19): siRNA sense strand
caccaaugccuuccauagu

SEQ ID NO: 759742 - RNA, 19 nt, Homo sapiens
  misc_RNA (1)...(19): siRNA sense strand
guacauucaggacaaggau

SEQ ID NO: 759743 - RNA, 19 nt, Homo sapiens
  misc_RNA (1)...(19): siRNA sense strand
ucagauucuuuacuaugca

SEQ ID NO: 759744 - RNA, 19 nt, Homo sapiens
  misc_RNA (1)...(19): siRNA sense strand
caaguggagcgcugagaag

SEQ ID NO: 759745 - RNA, 19 nt, Homo sapiens
  misc_RNA (1)...(19): siRNA sense strand
gccaggaagcugugacauc

SEQ ID NO: 759746 - RNA, 19 nt, Homo sapiens
  misc_RNA (1)...(19): siRNA sense strand
cgguugcucuuugggauug

SEQ ID NO: 759747 - RNA, 19 nt, Homo sapiens
  misc_RNA (1)...(19): siRNA sense strand
cuacgugccugagcuugca

SEQ ID NO: 759748 - RNA, 19 nt, Homo sapiens
  misc_RNA (1)...(19): siRNA sense strand
ggcuaccgcucugguggaa

SEQ ID NO: 759749 - RNA, 19 nt, Homo sapiens
  misc_RNA (1)...(19): siRNA sense strand
ggcugcggcuacacaccua

SEQ ID NO: 759750 - RNA, 19 nt, Homo sapiens
  misc_RNA (1)...(19): siRNA sense strand
ccugaugaccagaaguuug

SEQ ID NO: 759751 - RNA, 19 nt, Homo sapiens
  misc_RNA (1)...(19): siRNA sense strand
gggccucguugccuuacuc

SEQ ID NO: 759752 - RNA, 19 nt, Homo sapiens
  misc_RNA (1)...(19): siRNA sense strand
guccagaagucggcagaag

SEQ ID NO: 759753 - RNA, 19 nt, Homo sapiens
  misc_RNA (1)...(19): siRNA sense strand
aagaucagcaacauuguca

SEQ ID NO: 759754 - RNA, 19 nt, Homo sapiens
  misc_RNA (1)...(19): siRNA sense strand
acagccaccaccacccuua

SEQ ID NO: 759755 - RNA, 19 nt, Homo sapiens
  misc_RNA (1)...(19): siRNA sense strand
ggacauagaguguuucaug

SEQ ID NO: 759756 - RNA, 19 nt, Homo sapiens
  misc_RNA (1)...(19): siRNA sense strand
gaugaaaccuaccugaugu

SEQ ID NO: 759757 - RNA, 19 nt, Homo sapiens
  misc_RNA (1)...(19): siRNA sense strand
gcgagaaacugcaaucugu

SEQ ID NO: 759758 - RNA, 19 nt, Homo sapiens
  misc_RNA (1)...(19): siRNA sense strand
gcacaaacacgcaaacaau

SEQ ID NO: 759759 - RNA, 19 nt, Homo sapiens
  misc_RNA (1)...(19): siRNA sense strand
ucacagccaucgacaggua

SEQ ID NO: 759760 - RNA, 19 nt, Homo sapiens
  misc_RNA (1)...(19): siRNA sense strand
ggucaagauugccaaggua

SEQ ID NO: 759761 - RNA, 19 nt, Homo sapiens
  misc_RNA (1)...(19): siRNA sense strand
gacauuagguuagccaaga

SEQ ID NO: 759762 - RNA, 19 nt, Homo sapiens
  misc_RNA (1)...(19): siRNA sense strand
ugaacaagcucauuaagac

SEQ ID NO: 759763 - RNA, 19 nt, Homo sapiens
  misc_RNA (1)...(19): siRNA sense strand
caugguguaugaugucuuu

SEQ ID NO: 759764 - RNA, 19 nt, Homo sapiens
  misc_RNA (1)...(19): siRNA sense strand
ccacugaccuccuguacgu

SEQ ID NO: 759765 - RNA, 19 nt, Homo sapiens
  misc_RNA (1)...(19): siRNA sense strand
caagagcacggucaagauu

SEQ ID NO: 759766 - RNA, 19 nt, Homo sapiens
  misc_RNA (1)...(19): siRNA sense strand
caacguguuucuguucaaa

SEQ ID NO: 759767 - RNA, 19 nt, Homo sapiens
  misc_RNA (1)...(19): siRNA sense strand
gaccauagccauugugauc

SEQ ID NO: 759768 - RNA, 19 nt, Homo sapiens
  misc_RNA (1)...(19): siRNA sense strand
uuaagacgguguuugcauu

SEQ ID NO: 759769 - RNA, 19 nt, Homo sapiens
  misc_RNA (1)...(19): siRNA sense strand
gauccuagauggccuugca

SEQ ID NO: 759770 - RNA, 19 nt, Homo sapiens
  misc_RNA (1)...(19): siRNA sense strand
aaaccuaccugauguucug

SEQ ID NO: 759771 - RNA, 19 nt, Homo sapiens
  misc_RNA (1)...(19): siRNA sense strand
ucauggacauagaguguuu

SEQ ID NO: 759772 - RNA, 19 nt, Homo sapiens
  misc_RNA (1)...(19): siRNA sense strand
gagcauguuucccucuugu

SEQ ID NO: 759773 - RNA, 19 nt, Homo sapiens
  misc_RNA (1)...(19): siRNA sense strand
cuagauggccuugcagaua

SEQ ID NO: 759774 - RNA, 19 nt, Homo sapiens
  misc_RNA (1)...(19): siRNA sense strand
gcaacguguuucuguucaa

SEQ ID NO: 759775 - RNA, 19 nt, Homo sapiens
  misc_RNA (1)...(19): siRNA sense strand
ggagcauguuucccucuug

SEQ ID NO: 759776 - RNA, 19 nt, Homo sapiens
  misc_RNA (1)...(19): siRNA sense strand
ucuaugcucugaggaguaa

SEQ ID NO: 759777 - RNA, 19 nt, Homo sapiens
  misc_RNA (1)...(19): siRNA sense strand
acauguauauucucuggaa

SEQ ID NO: 759778 - RNA, 19 nt, Homo sapiens
  misc_RNA (1)...(19): siRNA sense strand
gaacugcgagaaacugcaa

SEQ ID NO: 759779 - RNA, 19 nt, Homo sapiens
  misc_RNA (1)...(19): siRNA sense strand
ccgcauggacauuagguua

SEQ ID NO: 759780 - RNA, 19 nt, Homo sapiens
  misc_RNA (1)...(19): siRNA sense strand
gcauguuucccucuuguga

SEQ ID NO: 759781 - RNA, 19 nt, Homo sapiens
  misc_RNA (1)...(19): siRNA sense strand
uagauggccuugcagauac

SEQ ID NO: 759782 - RNA, 19 nt, Homo sapiens
  misc_RNA (1)...(19): siRNA sense strand
ggagaacuucauggacaua

SEQ ID NO: 759783 - RNA, 19 nt, Homo sapiens
  misc_RNA (1)...(19): siRNA sense strand
acagguacauauccauuca

SEQ ID NO: 759784 - RNA, 19 nt, Homo sapiens
  misc_RNA (1)...(19): siRNA sense strand
cgacagguacauauccauu

SEQ ID NO: 759785 - RNA, 19 nt, Homo sapiens
  misc_RNA (1)...(19): siRNA sense strand
gggagaacuucauggacau

SEQ ID NO: 759786 - RNA, 19 nt, Homo sapiens
  misc_RNA (1)...(19): siRNA sense strand
gaacuucauggacauagag

SEQ ID NO: 759787 - RNA, 19 nt, Homo sapiens
  misc_RNA (1)...(19): siRNA sense strand
cugcgcagccucuggauaa

SEQ ID NO: 759788 - RNA, 19 nt, Homo sapiens
  misc_RNA (1)...(19): siRNA sense strand
ugaugaaaccuaccugaug

SEQ ID NO: 759789 - RNA, 19 nt, Homo sapiens
  misc_RNA (1)...(19): siRNA sense strand
ucaguacgaagacaucaaa

SEQ ID NO: 759790 - RNA, 19 nt, Homo sapiens
  misc_RNA (1)...(19): siRNA sense strand
caagcccgcauggacauua

SEQ ID NO: 759791 - RNA, 19 nt, Homo sapiens
  misc_RNA (1)...(19): siRNA sense strand
gggcuggaacugcgagaaa

SEQ ID NO: 759792 - RNA, 19 nt, Homo sapiens
  misc_RNA (1)...(19): siRNA sense strand
gauguggaccauagccauu

SEQ ID NO: 759793 - RNA, 19 nt, Homo sapiens
  misc_RNA (1)...(19): siRNA sense strand
uacgugggcucaaaugaca

SEQ ID NO: 759794 - RNA, 19 nt, Homo sapiens
  misc_RNA (1)...(19): siRNA sense strand
caaacaaugcagccagugu

SEQ ID NO: 759795 - RNA, 19 nt, Homo sapiens
  misc_RNA (1)...(19): siRNA sense strand
cggacugccugcacaaaca

SEQ ID NO: 759796 - RNA, 19 nt, Homo sapiens
  misc_RNA (1)...(19): siRNA sense strand
cacaaacacgcaaacaaug

SEQ ID NO: 759797 - RNA, 19 nt, Homo sapiens
  misc_RNA (1)...(19): siRNA sense strand
cagcguggcacccagaaga

SEQ ID NO: 759798 - RNA, 19 nt, Homo sapiens
  misc_RNA (1)...(19): siRNA sense strand
ucauugacuuccacguguu

SEQ ID NO: 759799 - RNA, 19 nt, Homo sapiens
  misc_RNA (1)...(19): siRNA sense strand
gcaaagauagccgcaacgu

SEQ ID NO: 759800 - RNA, 19 nt, Homo sapiens
  misc_RNA (1)...(19): siRNA sense strand
agaacuucauggacauaga

SEQ ID NO: 759801 - RNA, 19 nt, Homo sapiens
  misc_RNA (1)...(19): siRNA sense strand
gcguacauguauauucucu

SEQ ID NO: 759802 - RNA, 19 nt, Homo sapiens
  misc_RNA (1)...(19): siRNA sense strand
ccagcguacugcuucuguu

SEQ ID NO: 759803 - RNA, 19 nt, Homo sapiens
  misc_RNA (1)...(19): siRNA sense strand
gucuacagcuucauugacu

SEQ ID NO: 759804 - RNA, 19 nt, Homo sapiens
  misc_RNA (1)...(19): siRNA sense strand
ucaagagcacggucaagau

SEQ ID NO: 759805 - RNA, 19 nt, Homo sapiens
  misc_RNA (1)...(19): siRNA sense strand
cgagaaacugcaaucuguu

SEQ ID NO: 759806 - RNA, 19 nt, Homo sapiens
  misc_RNA (1)...(19): siRNA sense strand
gccgcaacguguuucuguu

SEQ ID NO: 759807 - RNA, 19 nt, Homo sapiens
  misc_RNA (1)...(19): siRNA sense strand
gucaagauugccaagguaa

SEQ ID NO: 759808 - RNA, 19 nt, Homo sapiens
  misc_RNA (1)...(19): siRNA sense strand
gcauggacauuagguuagc

SEQ ID NO: 759809 - RNA, 19 nt, Homo sapiens
  misc_RNA (1)...(19): siRNA sense strand
ugccugauguggaccauag

SEQ ID NO: 759810 - RNA, 19 nt, Homo sapiens
  misc_RNA (1)...(19): siRNA sense strand
gacagguacauauccauuc

SEQ ID NO: 759811 - RNA, 19 nt, Homo sapiens
  misc_RNA (1)...(19): siRNA sense strand
ggucacggccuccuucacu

SEQ ID NO: 759812 - RNA, 19 nt, Homo sapiens
  misc_RNA (1)...(19): siRNA sense strand
caaacacgcaaacaaugca

SEQ ID NO: 759813 - RNA, 19 nt, Homo sapiens
  misc_RNA (1)...(19): siRNA sense strand
agaagagcaucaucaucca

SEQ ID NO: 759814 - RNA, 19 nt, Homo sapiens
  misc_RNA (1)...(19): siRNA sense strand
ccacgccguccgcaugauu

SEQ ID NO: 759815 - RNA, 19 nt, Homo sapiens
  misc_RNA (1)...(19): siRNA sense strand
ccacguguuccaccgcaaa

SEQ ID NO: 759816 - RNA, 19 nt, Homo sapiens
  misc_RNA (1)...(19): siRNA sense strand
guacgugggcucaaaugac

SEQ ID NO: 759817 - RNA, 19 nt, Homo sapiens
  misc_RNA (1)...(19): siRNA sense strand
cccaucaucuaugcucuga

SEQ ID NO: 759818 - RNA, 19 nt, Homo sapiens
  misc_RNA (1)...(19): siRNA sense strand
uaagacgguguuugcauuc

SEQ ID NO: 759819 - RNA, 19 nt, Homo sapiens
  misc_RNA (1)...(19): siRNA sense strand
gcguacugcuucuguucau

SEQ ID NO: 759820 - RNA, 19 nt, Homo sapiens
  misc_RNA (1)...(19): siRNA sense strand
gaaaccuaccugauguucu

SEQ ID NO: 759821 - RNA, 19 nt, Homo sapiens
  misc_RNA (1)...(19): siRNA sense strand
guguuccaccgcaaagaua

SEQ ID NO: 759822 - RNA, 19 nt, Homo sapiens
  misc_RNA (1)...(19): siRNA sense strand
gacauucaguacgaagaca

SEQ ID NO: 759823 - RNA, 19 nt, Homo sapiens
  misc_RNA (1)...(19): siRNA sense strand
ccaagguaaccaugucugu

SEQ ID NO: 759824 - RNA, 19 nt, Homo sapiens
  misc_RNA (1)...(19): siRNA sense strand
cggagcauguuucccucuu

SEQ ID NO: 759825 - RNA, 19 nt, Homo sapiens
  misc_RNA (1)...(19): siRNA sense strand
augcguacauguauauucu

SEQ ID NO: 759826 - RNA, 19 nt, Homo sapiens
  misc_RNA (1)...(19): siRNA sense strand
gcccucugcuugcaaucau

SEQ ID NO: 759827 - RNA, 19 nt, Homo sapiens
  misc_RNA (1)...(19): siRNA sense strand
ggagaaugaggagaacauc

SEQ ID NO: 759828 - RNA, 19 nt, Homo sapiens
  misc_RNA (1)...(19): siRNA sense strand
ccagaagagcaucaucauc

SEQ ID NO: 759829 - RNA, 19 nt, Homo sapiens
  misc_RNA (1)...(19): siRNA sense strand
ggacauagaguguuucaug

SEQ ID NO: 759830 - RNA, 19 nt, Homo sapiens
  misc_RNA (1)...(19): siRNA sense strand
gaugaaaccuaccugaugu

SEQ ID NO: 759831 - RNA, 19 nt, Homo sapiens
  misc_RNA (1)...(19): siRNA sense strand
gcgagaaacugcaaucugu

SEQ ID NO: 759832 - RNA, 19 nt, Homo sapiens
  misc_RNA (1)...(19): siRNA sense strand
gcacaaacacgcaaacaau

SEQ ID NO: 759833 - RNA, 19 nt, Homo sapiens
  misc_RNA (1)...(19): siRNA sense strand
ucacagccaucgacaggua

SEQ ID NO: 759834 - RNA, 19 nt, Homo sapiens
  misc_RNA (1)...(19): siRNA sense strand
gacauuagguuagccaaga

SEQ ID NO: 759835 - RNA, 19 nt, Homo sapiens
  misc_RNA (1)...(19): siRNA sense strand
ugaacaagcucauuaagac

SEQ ID NO: 759836 - RNA, 19 nt, Homo sapiens
  misc_RNA (1)...(19): siRNA sense strand
caugguguaugaugucuuu

SEQ ID NO: 759837 - RNA, 19 nt, Homo sapiens
  misc_RNA (1)...(19): siRNA sense strand
caacguguuucuguucaaa

SEQ ID NO: 759838 - RNA, 19 nt, Homo sapiens
  misc_RNA (1)...(19): siRNA sense strand
ccacugaccuccuguacgu

SEQ ID NO: 759839 - RNA, 19 nt, Homo sapiens
  misc_RNA (1)...(19): siRNA sense strand
gaccauagccauugugauc

SEQ ID NO: 759840 - RNA, 19 nt, Homo sapiens
  misc_RNA (1)...(19): siRNA sense strand
uuaagacgguguuugcauu

SEQ ID NO: 759841 - RNA, 19 nt, Homo sapiens
  misc_RNA (1)...(19): siRNA sense strand
aaaccuaccugauguucug

SEQ ID NO: 759842 - RNA, 19 nt, Homo sapiens
  misc_RNA (1)...(19): siRNA sense strand
ucauggacauagaguguuu

SEQ ID NO: 759843 - RNA, 19 nt, Homo sapiens
  misc_RNA (1)...(19): siRNA sense strand
gagcauguuucccucuugu

SEQ ID NO: 759844 - RNA, 19 nt, Homo sapiens
  misc_RNA (1)...(19): siRNA sense strand
gcaacguguuucuguucaa

SEQ ID NO: 759845 - RNA, 19 nt, Homo sapiens
  misc_RNA (1)...(19): siRNA sense strand
ggagcauguuucccucuug

SEQ ID NO: 759846 - RNA, 19 nt, Homo sapiens
  misc_RNA (1)...(19): siRNA sense strand
ucuaugcucugaggaguaa

SEQ ID NO: 759847 - RNA, 19 nt, Homo sapiens
  misc_RNA (1)...(19): siRNA sense strand
acauguauauucucuggaa

SEQ ID NO: 759848 - RNA, 19 nt, Homo sapiens
  misc_RNA (1)...(19): siRNA sense strand
gaacugcgagaaacugcaa

SEQ ID NO: 759849 - RNA, 19 nt, Homo sapiens
  misc_RNA (1)...(19): siRNA sense strand
ccgcauggacauuagguua

SEQ ID NO: 759850 - RNA, 19 nt, Homo sapiens
  misc_RNA (1)...(19): siRNA sense strand
gcauguuucccucuuguga

SEQ ID NO: 759851 - RNA, 19 nt, Homo sapiens
  misc_RNA (1)...(19): siRNA sense strand
ggagaacuucauggacaua

SEQ ID NO: 759852 - RNA, 19 nt, Homo sapiens
  misc_RNA (1)...(19): siRNA sense strand
acagguacauauccauuca

SEQ ID NO: 759853 - RNA, 19 nt, Homo sapiens
  misc_RNA (1)...(19): siRNA sense strand
cgacagguacauauccauu

SEQ ID NO: 759854 - RNA, 19 nt, Homo sapiens
  misc_RNA (1)...(19): siRNA sense strand
gggagaacuucauggacau

SEQ ID NO: 759855 - RNA, 19 nt, Homo sapiens
  misc_RNA (1)...(19): siRNA sense strand
gaacuucauggacauagag

SEQ ID NO: 759856 - RNA, 19 nt, Homo sapiens
  misc_RNA (1)...(19): siRNA sense strand
cugcgcagccucuggauaa

SEQ ID NO: 759857 - RNA, 19 nt, Homo sapiens
  misc_RNA (1)...(19): siRNA sense strand
ugaugaaaccuaccugaug

SEQ ID NO: 759858 - RNA, 19 nt, Homo sapiens
  misc_RNA (1)...(19): siRNA sense strand
ucaguacgaagacaucaaa

SEQ ID NO: 759859 - RNA, 19 nt, Homo sapiens
  misc_RNA (1)...(19): siRNA sense strand
caagcccgcauggacauua

SEQ ID NO: 759860 - RNA, 19 nt, Homo sapiens
  misc_RNA (1)...(19): siRNA sense strand
gggcuggaacugcgagaaa

SEQ ID NO: 759861 - RNA, 19 nt, Homo sapiens
  misc_RNA (1)...(19): siRNA sense strand
gauguggaccauagccauu

SEQ ID NO: 759862 - RNA, 19 nt, Homo sapiens
  misc_RNA (1)...(19): siRNA sense strand
uacgugggcucaaaugaca

SEQ ID NO: 759863 - RNA, 19 nt, Homo sapiens
  misc_RNA (1)...(19): siRNA sense strand
caaacaaugcagccagugu

SEQ ID NO: 759864 - RNA, 19 nt, Homo sapiens
  misc_RNA (1)...(19): siRNA sense strand
cggacugccugcacaaaca

SEQ ID NO: 759865 - RNA, 19 nt, Homo sapiens
  misc_RNA (1)...(19): siRNA sense strand
cacaaacacgcaaacaaug

SEQ ID NO: 759866 - RNA, 19 nt, Homo sapiens
  misc_RNA (1)...(19): siRNA sense strand
cagcguggcacccagaaga

SEQ ID NO: 759867 - RNA, 19 nt, Homo sapiens
  misc_RNA (1)...(19): siRNA sense strand
ucauugacuuccacguguu

SEQ ID NO: 759868 - RNA, 19 nt, Homo sapiens
  misc_RNA (1)...(19): siRNA sense strand
gcaaagauagccgcaacgu

SEQ ID NO: 759869 - RNA, 19 nt, Homo sapiens
  misc_RNA (1)...(19): siRNA sense strand
agaacuucauggacauaga

SEQ ID NO: 759870 - RNA, 19 nt, Homo sapiens
  misc_RNA (1)...(19): siRNA sense strand
gcguacauguauauucucu

SEQ ID NO: 759871 - RNA, 19 nt, Homo sapiens
  misc_RNA (1)...(19): siRNA sense strand
ccagcguacugcuucuguu

SEQ ID NO: 759872 - RNA, 19 nt, Homo sapiens
  misc_RNA (1)...(19): siRNA sense strand
gucuacagcuucauugacu

SEQ ID NO: 759873 - RNA, 19 nt, Homo sapiens
  misc_RNA (1)...(19): siRNA sense strand
cgagaaacugcaaucuguu

SEQ ID NO: 759874 - RNA, 19 nt, Homo sapiens
  misc_RNA (1)...(19): siRNA sense strand
gccgcaacguguuucuguu

SEQ ID NO: 759875 - RNA, 19 nt, Homo sapiens
  misc_RNA (1)...(19): siRNA sense strand
gucaagauugccaagguaa

SEQ ID NO: 759876 - RNA, 19 nt, Homo sapiens
  misc_RNA (1)...(19): siRNA sense strand
gcauggacauuagguuagc

SEQ ID NO: 759877 - RNA, 19 nt, Homo sapiens
  misc_RNA (1)...(19): siRNA sense strand
ugccugauguggaccauag

SEQ ID NO: 759878 - RNA, 19 nt, Homo sapiens
  misc_RNA (1)...(19): siRNA sense strand
gacagguacauauccauuc

SEQ ID NO: 759879 - RNA, 19 nt, Homo sapiens
  misc_RNA (1)...(19): siRNA sense strand
ggucacggccuccuucacu

SEQ ID NO: 759880 - RNA, 19 nt, Homo sapiens
  misc_RNA (1)...(19): siRNA sense strand
caaacacgcaaacaaugca

SEQ ID NO: 759881 - RNA, 19 nt, Homo sapiens
  misc_RNA (1)...(19): siRNA sense strand
agaagagcaucaucaucca

SEQ ID NO: 759882 - RNA, 19 nt, Homo sapiens
  misc_RNA (1)...(19): siRNA sense strand
ccacgccguccgcaugauu

SEQ ID NO: 759883 - RNA, 19 nt, Homo sapiens
  misc_RNA (1)...(19): siRNA sense strand
ccacguguuccaccgcaaa

SEQ ID NO: 759884 - RNA, 19 nt, Homo sapiens
  misc_RNA (1)...(19): siRNA sense strand
guacgugggcucaaaugac

SEQ ID NO: 759885 - RNA, 19 nt, Homo sapiens
  misc_RNA (1)...(19): siRNA sense strand
cccaucaucuaugcucuga

SEQ ID NO: 759886 - RNA, 19 nt, Homo sapiens
  misc_RNA (1)...(19): siRNA sense strand
uaagacgguguuugcauuc

SEQ ID NO: 759887 - RNA, 19 nt, Homo sapiens
  misc_RNA (1)...(19): siRNA sense strand
gcguacugcuucuguucau

SEQ ID NO: 759888 - RNA, 19 nt, Homo sapiens
  misc_RNA (1)...(19): siRNA sense strand
gaaaccuaccugauguucu

SEQ ID NO: 759889 - RNA, 19 nt, Homo sapiens
  misc_RNA (1)...(19): siRNA sense strand
guguuccaccgcaaagaua

SEQ ID NO: 759890 - RNA, 19 nt, Homo sapiens
  misc_RNA (1)...(19): siRNA sense strand
gacauucaguacgaagaca

SEQ ID NO: 759891 - RNA, 19 nt, Homo sapiens
  misc_RNA (1)...(19): siRNA sense strand
ccaagguaaccaugucugu

SEQ ID NO: 759892 - RNA, 19 nt, Homo sapiens
  misc_RNA (1)...(19): siRNA sense strand
cggagcauguuucccucuu

SEQ ID NO: 759893 - RNA, 19 nt, Homo sapiens
  misc_RNA (1)...(19): siRNA sense strand
ggagaaugaggagaacauc

SEQ ID NO: 759894 - RNA, 19 nt, Homo sapiens
  misc_RNA (1)...(19): siRNA sense strand
gcccucugcuugcaaucau

SEQ ID NO: 759895 - RNA, 19 nt, Homo sapiens
  misc_RNA (1)...(19): siRNA sense strand
ccagaagagcaucaucauc

SEQ ID NO: 759896 - RNA, 19 nt, Homo sapiens
  misc_RNA (1)...(19): siRNA sense strand
augcguacauguauauucu

SEQ ID NO: 759897 - RNA, 19 nt, Homo sapiens
  misc_RNA (1)...(19): siRNA sense strand
cuaaagagauggaacauaa

SEQ ID NO: 759898 - RNA, 19 nt, Homo sapiens
  misc_RNA (1)...(19): siRNA sense strand
agaaggagcuuuagcauuu

SEQ ID NO: 759899 - RNA, 19 nt, Homo sapiens
  misc_RNA (1)...(19): siRNA sense strand
gcuagaaccuccuguagua

SEQ ID NO: 759900 - RNA, 19 nt, Homo sapiens
  misc_RNA (1)...(19): siRNA sense strand
ggaaauuggugaagagaaa

SEQ ID NO: 759901 - RNA, 19 nt, Homo sapiens
  misc_RNA (1)...(19): siRNA sense strand
gagccagaaucuucaauua

SEQ ID NO: 759902 - RNA, 19 nt, Homo sapiens
  misc_RNA (1)...(19): siRNA sense strand
ggauaaggcucaauuacuu

SEQ ID NO: 759903 - RNA, 19 nt, Homo sapiens
  misc_RNA (1)...(19): siRNA sense strand
caacugagguggcuauaga

SEQ ID NO: 759904 - RNA, 19 nt, Homo sapiens
  misc_RNA (1)...(19): siRNA sense strand
ugacaaagauucuggauuc

SEQ ID NO: 759905 - RNA, 19 nt, Homo sapiens
  misc_RNA (1)...(19): siRNA sense strand
cgacagcgcuggaauccua

SEQ ID NO: 759906 - RNA, 19 nt, Homo sapiens
  misc_RNA (1)...(19): siRNA sense strand
gcgcuggaauccuauaaua

SEQ ID NO: 759907 - RNA, 19 nt, Homo sapiens
  misc_RNA (1)...(19): siRNA sense strand
ggucuuagauacagaacua

SEQ ID NO: 759908 - RNA, 19 nt, Homo sapiens
  misc_RNA (1)...(19): siRNA sense strand
gaagauagaggaaguacuu

SEQ ID NO: 759909 - RNA, 19 nt, Homo sapiens
  misc_RNA (1)...(19): siRNA sense strand
gaaguaagcguuccaaauc

SEQ ID NO: 759910 - RNA, 19 nt, Homo sapiens
  misc_RNA (1)...(19): siRNA sense strand
ucauuaagaucucgaagua

SEQ ID NO: 759911 - RNA, 19 nt, Homo sapiens
  misc_RNA (1)...(19): siRNA sense strand
aaacagauccuacugauga

SEQ ID NO: 759912 - RNA, 19 nt, Homo sapiens
  misc_RNA (1)...(19): siRNA sense strand
ggaagaagaucuguaucaa

SEQ ID NO: 759913 - RNA, 19 nt, Homo sapiens
  misc_RNA (1)...(19): siRNA sense strand
ggauacagaagaaccauua

SEQ ID NO: 759914 - RNA, 19 nt, Homo sapiens
  misc_RNA (1)...(19): siRNA sense strand
agaaagagcuucagagucu

SEQ ID NO: 759915 - RNA, 19 nt, Homo sapiens
  misc_RNA (1)...(19): siRNA sense strand
gcucuaugaugucagcuua

SEQ ID NO: 759916 - RNA, 19 nt, Homo sapiens
  misc_RNA (1)...(19): siRNA sense strand
ggagaucucuguucagucu

SEQ ID NO: 759917 - RNA, 19 nt, Homo sapiens
  misc_RNA (1)...(19): siRNA sense strand
caucaucccuuuaaacuca

SEQ ID NO: 759918 - RNA, 19 nt, Homo sapiens
  misc_RNA (1)...(19): siRNA sense strand
agacgaagcuucaguaucu

SEQ ID NO: 759919 - RNA, 19 nt, Homo sapiens
  misc_RNA (1)...(19): siRNA sense strand
gcugaacgcucuaugaugu

SEQ ID NO: 759920 - RNA, 19 nt, Homo sapiens
  misc_RNA (1)...(19): siRNA sense strand
gcucuaugaugucuuauga

SEQ ID NO: 759921 - RNA, 19 nt, Homo sapiens
  misc_RNA (1)...(19): siRNA sense strand
gaagaaauagugcagaaga

SEQ ID NO: 759922 - RNA, 19 nt, Homo sapiens
  misc_RNA (1)...(19): siRNA sense strand
caaaucuucugaacacaaa

SEQ ID NO: 759923 - RNA, 19 nt, Homo sapiens
  misc_RNA (1)...(19): siRNA sense strand
gauauaagccagacuugaa

SEQ ID NO: 759924 - RNA, 19 nt, Homo sapiens
  misc_RNA (1)...(19): siRNA sense strand
gaaacucuaucuucuacug

SEQ ID NO: 759925 - RNA, 19 nt, Homo sapiens
  misc_RNA (1)...(19): siRNA sense strand
gaugaagucugugcugaaa

SEQ ID NO: 759926 - RNA, 19 nt, Homo sapiens
  misc_RNA (1)...(19): siRNA sense strand
gaagucaucugagccaguu

SEQ ID NO: 759927 - RNA, 19 nt, Homo sapiens
  misc_RNA (1)...(19): siRNA sense strand
gcugagcgcucuaugaugu

SEQ ID NO: 759928 - RNA, 19 nt, Homo sapiens
  misc_RNA (1)...(19): siRNA sense strand
aaacagaucgcacagagua

SEQ ID NO: 759929 - RNA, 19 nt, Homo sapiens
  misc_RNA (1)...(19): siRNA sense strand
gaagaagaucuguaucaaa

SEQ ID NO: 759930 - RNA, 19 nt, Homo sapiens
  misc_RNA (1)...(19): siRNA sense strand
caucggagauugcagauuc

SEQ ID NO: 759931 - RNA, 19 nt, Homo sapiens
  misc_RNA (1)...(19): siRNA sense strand
ugaagcagauuuagugaga

SEQ ID NO: 759932 - RNA, 19 nt, Homo sapiens
  misc_RNA (1)...(19): siRNA sense strand
gaaagugaacaugguauaa

SEQ ID NO: 759933 - RNA, 19 nt, Homo sapiens
  misc_RNA (1)...(19): siRNA sense strand
agagcagacucaaguaaua

SEQ ID NO: 759934 - RNA, 19 nt, Homo sapiens
  misc_RNA (1)...(19): siRNA sense strand
gguagaagaaggagcuuua

SEQ ID NO: 759935 - RNA, 19 nt, Homo sapiens
  misc_RNA (1)...(19): siRNA sense strand
ccaggagucuaccaaauga

SEQ ID NO: 759936 - RNA, 19 nt, Homo sapiens
  misc_RNA (1)...(19): siRNA sense strand
gaacgucuuacaagccuua

SEQ ID NO: 759937 - RNA, 19 nt, Homo sapiens
  misc_RNA (1)...(19): siRNA sense strand
ugacuuguaugguaucuga

SEQ ID NO: 759938 - RNA, 19 nt, Homo sapiens
  misc_RNA (1)...(19): siRNA sense strand
caaagauucuggauuccuu

SEQ ID NO: 759939 - RNA, 19 nt, Homo sapiens
  misc_RNA (1)...(19): siRNA sense strand
uguagagucugcaguagua

SEQ ID NO: 759940 - RNA, 19 nt, Homo sapiens
  misc_RNA (1)...(19): siRNA sense strand
gcugaucgaucuaugaugu

SEQ ID NO: 759941 - RNA, 19 nt, Homo sapiens
  misc_RNA (1)...(19): siRNA sense strand
caucaaagaucauguuggu

SEQ ID NO: 759942 - RNA, 19 nt, Homo sapiens
  misc_RNA (1)...(19): siRNA sense strand
caucagagccuccuguuau

SEQ ID NO: 759943 - RNA, 19 nt, Homo sapiens
  misc_RNA (1)...(19): siRNA sense strand
gaagaagguuuagcagauc

SEQ ID NO: 759944 - RNA, 19 nt, Homo sapiens
  misc_RNA (1)...(19): siRNA sense strand
gaaaggaauuaaucuaucc

SEQ ID NO: 759945 - RNA, 19 nt, Homo sapiens
  misc_RNA (1)...(19): siRNA sense strand
ccaagcacaucaacaacaa

SEQ ID NO: 759946 - RNA, 19 nt, Homo sapiens
  misc_RNA (1)...(19): siRNA sense strand
uaugaacgcuccaugaugu

SEQ ID NO: 759947 - RNA, 19 nt, Homo sapiens
  misc_RNA (1)...(19): siRNA sense strand
uaugaacgcuccaugaugu

SEQ ID NO: 759948 - RNA, 19 nt, Homo sapiens
  misc_RNA (1)...(19): siRNA sense strand
cgacagcagugccugaguu

SEQ ID NO: 759949 - RNA, 19 nt, Homo sapiens
  misc_RNA (1)...(19): siRNA sense strand
agaagaagguuuagcagau

SEQ ID NO: 759950 - RNA, 19 nt, Homo sapiens
  misc_RNA (1)...(19): siRNA sense strand
cgacgaaggucuagaucug

SEQ ID NO: 759951 - RNA, 19 nt, Homo sapiens
  misc_RNA (1)...(19): siRNA sense strand
ccuuagagcuggcauugaa

SEQ ID NO: 759952 - RNA, 19 nt, Homo sapiens
  misc_RNA (1)...(19): siRNA sense strand
gaaaguaguggaggagaaa

SEQ ID NO: 759953 - RNA, 19 nt, Homo sapiens
  misc_RNA (1)...(19): siRNA sense strand
gcucagcccuaaagaaagu

SEQ ID NO: 759954 - RNA, 19 nt, Homo sapiens
  misc_RNA (1)...(19): siRNA sense strand
gcuccaugaugucagcuua

SEQ ID NO: 759955 - RNA, 19 nt, Homo sapiens
  misc_RNA (1)...(19): siRNA sense strand
caacgauggugcuggaguu

SEQ ID NO: 759956 - RNA, 19 nt, Homo sapiens
  misc_RNA (1)...(19): siRNA sense strand
gauacagaacuacgauaua

SEQ ID NO: 759957 - RNA, 19 nt, Homo sapiens
  misc_RNA (1)...(19): siRNA sense strand
agaacacccuuaagaagaa

SEQ ID NO: 759958 - RNA, 19 nt, Homo sapiens
  misc_RNA (1)...(19): siRNA sense strand
uagugaagcugacauugaa

SEQ ID NO: 759959 - RNA, 19 nt, Homo sapiens
  misc_RNA (1)...(19): siRNA sense strand
cugaugaaauucccacuaa

SEQ ID NO: 759960 - RNA, 19 nt, Homo sapiens
  misc_RNA (1)...(19): siRNA sense strand
ugaaagagggcuccagaaa

SEQ ID NO: 759961 - RNA, 19 nt, Homo sapiens
  misc_RNA (1)...(19): siRNA sense strand
ggauaguguuuauggagaa

SEQ ID NO: 759962 - RNA, 19 nt, Homo sapiens
  misc_RNA (1)...(19): siRNA sense strand
guaaagaagaugaugaugu

SEQ ID NO: 759963 - RNA, 19 nt, Homo sapiens
  misc_RNA (1)...(19): siRNA sense strand
uaaugcagcugccaugugu

SEQ ID NO: 759964 - RNA, 19 nt, Homo sapiens
  misc_RNA (1)...(19): siRNA sense strand
agaucaagcuccagggaua

SEQ ID NO: 759965 - RNA, 19 nt, Homo sapiens
  misc_RNA (1)...(19): siRNA sense strand
ugaaacaaauacacccauu

SEQ ID NO: 759966 - RNA, 19 nt, Homo sapiens
  misc_RNA (1)...(19): siRNA sense strand
aaacaaauacacccauuga

SEQ ID NO: 759967 - RNA, 19 nt, Homo sapiens
  misc_RNA (1)...(19): siRNA sense strand
gcagcugaccgaucuauga

SEQ ID NO: 759968 - RNA, 19 nt, Homo sapiens
  misc_RNA (1)...(19): siRNA sense strand
ccagagccaucaaagauca

SEQ ID NO: 759969 - RNA, 19 nt, Homo sapiens
  misc_RNA (1)...(19): siRNA sense strand
ggaugaagaggaagaagaa

SEQ ID NO: 759970 - RNA, 19 nt, Homo sapiens
  misc_RNA (1)...(19): siRNA sense strand
aggaggagcuacuauagaa

SEQ ID NO: 759971 - RNA, 19 nt, Homo sapiens
  misc_RNA (1)...(19): siRNA sense strand
gaagaucuguaucaaaaga

SEQ ID NO: 759972 - RNA, 19 nt, Homo sapiens
  misc_RNA (1)...(19): siRNA sense strand
guaaguaguaugccagaaa

SEQ ID NO: 759973 - RNA, 19 nt, Homo sapiens
  misc_RNA (1)...(19): siRNA sense strand
gaaacaaauacacccauug

SEQ ID NO: 759974 - RNA, 19 nt, Homo sapiens
  misc_RNA (1)...(19): siRNA sense strand
ggucuuucguggucaguaa

SEQ ID NO: 759975 - RNA, 19 nt, Homo sapiens
  misc_RNA (1)...(19): siRNA sense strand
caaugucaguggaguauca

SEQ ID NO: 759976 - RNA, 19 nt, Homo sapiens
  misc_RNA (1)...(19): siRNA sense strand
agagacagcagaaacauuu

SEQ ID NO: 759977 - RNA, 19 nt, Homo sapiens
  misc_RNA (1)...(19): siRNA sense strand
gagccaagcacaucaacaa

SEQ ID NO: 759978 - RNA, 19 nt, Homo sapiens
  misc_RNA (1)...(19): siRNA sense strand
ucaagaacacccuuaagaa

SEQ ID NO: 759979 - RNA, 19 nt, Homo sapiens
  misc_RNA (1)...(19): siRNA sense strand
guagugaagcugacauuga

SEQ ID NO: 759980 - RNA, 19 nt, Homo sapiens
  misc_RNA (1)...(19): siRNA sense strand
gcugaucguucaaugaugu

SEQ ID NO: 759981 - RNA, 19 nt, Homo sapiens
  misc_RNA (1)...(19): siRNA sense strand
gaaauagugcagaagauag

SEQ ID NO: 759982 - RNA, 19 nt, Homo sapiens
  misc_RNA (1)...(19): siRNA sense strand
gcauuuggcccaucugaga

SEQ ID NO: 759983 - RNA, 19 nt, Homo sapiens
  misc_RNA (1)...(19): siRNA sense strand
guuaacaccuguagagucu

SEQ ID NO: 759984 - RNA, 19 nt, Homo sapiens
  misc_RNA (1)...(19): siRNA sense strand
caaagaucauguugguaga

SEQ ID NO: 759985 - RNA, 19 nt, Homo sapiens
  misc_RNA (1)...(19): siRNA sense strand
gcugaauggugaaacaaau

SEQ ID NO: 759986 - RNA, 19 nt, Homo sapiens
  misc_RNA (1)...(19): siRNA sense strand
ugaagucugugcugaaauc

SEQ ID NO: 759987 - RNA, 19 nt, Homo sapiens
  misc_RNA (1)...(19): siRNA sense strand
ggacauggaacgucuuaca

SEQ ID NO: 759988 - RNA, 19 nt, Homo sapiens
  misc_RNA (1)...(19): siRNA sense strand
aaagagacacugccugauu

SEQ ID NO: 759989 - RNA, 19 nt, Homo sapiens
  misc_RNA (1)...(19): siRNA sense strand
cagcaucuacucucaguuu

SEQ ID NO: 759990 - RNA, 19 nt, Homo sapiens
  misc_RNA (1)...(19): siRNA sense strand
gcagaaacauuugauucca

SEQ ID NO: 759991 - RNA, 19 nt, Homo sapiens
  misc_RNA (1)...(19): siRNA sense strand
cagaaacccuugugguauc

SEQ ID NO: 759992 - RNA, 19 nt, Homo sapiens
  misc_RNA (1)...(19): siRNA sense strand
caucacauguuaugaaagg

SEQ ID NO: 759993 - RNA, 19 nt, Homo sapiens
  misc_RNA (1)...(19): siRNA sense strand
gaaggagcuuuagcauuuc

SEQ ID NO: 759994 - RNA, 19 nt, Homo sapiens
  misc_RNA (1)...(19): siRNA sense strand
aagcacagauccaagucua

SEQ ID NO: 759995 - RNA, 19 nt, Homo sapiens
  misc_RNA (1)...(19): siRNA sense strand
uaaugaagcagauuuagug

SEQ ID NO: 759996 - RNA, 19 nt, Homo sapiens
  misc_RNA (1)...(19): siRNA sense strand
gaacuaguaaggguauuga

SEQ ID NO: 759997 - RNA, 19 nt, Homo sapiens
  misc_RNA (1)...(19): siRNA sense strand
cuaaagagauggaacauaa

SEQ ID NO: 759998 - RNA, 19 nt, Homo sapiens
  misc_RNA (1)...(19): siRNA sense strand
agaaggagcuuuagcauuu

SEQ ID NO: 759999 - RNA, 19 nt, Homo sapiens
  misc_RNA (1)...(19): siRNA sense strand
gcuagaaccuccuguagua

SEQ ID NO: 760000 - RNA, 19 nt, Homo sapiens
  misc_RNA (1)...(19): siRNA sense strand
ggaaauuggugaagagaaa

SEQ ID NO: 760001 - RNA, 19 nt, Homo sapiens
  misc_RNA (1)...(19): siRNA sense strand
gagccagaaucuucaauua

SEQ ID NO: 760002 - RNA, 19 nt, Homo sapiens
  misc_RNA (1)...(19): siRNA sense strand
ggauaaggcucaauuacuu

SEQ ID NO: 760003 - RNA, 19 nt, Homo sapiens
  misc_RNA (1)...(19): siRNA sense strand
caacugagguggcuauaga

SEQ ID NO: 760004 - RNA, 19 nt, Homo sapiens
  misc_RNA (1)...(19): siRNA sense strand
ugacaaagauucuggauuc

SEQ ID NO: 760005 - RNA, 19 nt, Homo sapiens
  misc_RNA (1)...(19): siRNA sense strand
cgacagcgcuggaauccua

SEQ ID NO: 760006 - RNA, 19 nt, Homo sapiens
  misc_RNA (1)...(19): siRNA sense strand
gcgcuggaauccuauaaua

SEQ ID NO: 760007 - RNA, 19 nt, Homo sapiens
  misc_RNA (1)...(19): siRNA sense strand
ggucuuagauacagaacua

SEQ ID NO: 760008 - RNA, 19 nt, Homo sapiens
  misc_RNA (1)...(19): siRNA sense strand
gaagauagaggaaguacuu

SEQ ID NO: 760009 - RNA, 19 nt, Homo sapiens
  misc_RNA (1)...(19): siRNA sense strand
gaaguaagcguuccaaauc

SEQ ID NO: 760010 - RNA, 19 nt, Homo sapiens
  misc_RNA (1)...(19): siRNA sense strand
ucauuaagaucucgaagua

SEQ ID NO: 760011 - RNA, 19 nt, Homo sapiens
  misc_RNA (1)...(19): siRNA sense strand
aaacagauccuacugauga

SEQ ID NO: 760012 - RNA, 19 nt, Homo sapiens
  misc_RNA (1)...(19): siRNA sense strand
ggaagaagaucuguaucaa

SEQ ID NO: 760013 - RNA, 19 nt, Homo sapiens
  misc_RNA (1)...(19): siRNA sense strand
ggauacagaagaaccauua

SEQ ID NO: 760014 - RNA, 19 nt, Homo sapiens
  misc_RNA (1)...(19): siRNA sense strand
agaaagagcuucagagucu

SEQ ID NO: 760015 - RNA, 19 nt, Homo sapiens
  misc_RNA (1)...(19): siRNA sense strand
gcucuaugaugucagcuua

SEQ ID NO: 760016 - RNA, 19 nt, Homo sapiens
  misc_RNA (1)...(19): siRNA sense strand
ggagaucucuguucagucu

SEQ ID NO: 760017 - RNA, 19 nt, Homo sapiens
  misc_RNA (1)...(19): siRNA sense strand
caucaucccuuuaaacuca

SEQ ID NO: 760018 - RNA, 19 nt, Homo sapiens
  misc_RNA (1)...(19): siRNA sense strand
agacgaagcuucaguaucu

SEQ ID NO: 760019 - RNA, 19 nt, Homo sapiens
  misc_RNA (1)...(19): siRNA sense strand
gcugaacgcucuaugaugu

SEQ ID NO: 760020 - RNA, 19 nt, Homo sapiens
  misc_RNA (1)...(19): siRNA sense strand
gcucuaugaugucuuauga

SEQ ID NO: 760021 - RNA, 19 nt, Homo sapiens
  misc_RNA (1)...(19): siRNA sense strand
gaagaaauagugcagaaga

SEQ ID NO: 760022 - RNA, 19 nt, Homo sapiens
  misc_RNA (1)...(19): siRNA sense strand
caaaucuucugaacacaaa

SEQ ID NO: 760023 - RNA, 19 nt, Homo sapiens
  misc_RNA (1)...(19): siRNA sense strand
gauauaagccagacuugaa

SEQ ID NO: 760024 - RNA, 19 nt, Homo sapiens
  misc_RNA (1)...(19): siRNA sense strand
gaaacucuaucuucuacug

SEQ ID NO: 760025 - RNA, 19 nt, Homo sapiens
  misc_RNA (1)...(19): siRNA sense strand
gaugaagucugugcugaaa

SEQ ID NO: 760026 - RNA, 19 nt, Homo sapiens
  misc_RNA (1)...(19): siRNA sense strand
gaagucaucugagccaguu

SEQ ID NO: 760027 - RNA, 19 nt, Homo sapiens
  misc_RNA (1)...(19): siRNA sense strand
gcugagcgcucuaugaugu

SEQ ID NO: 760028 - RNA, 19 nt, Homo sapiens
  misc_RNA (1)...(19): siRNA sense strand
aaacagaucgcacagagua

SEQ ID NO: 760029 - RNA, 19 nt, Homo sapiens
  misc_RNA (1)...(19): siRNA sense strand
gaagaagaucuguaucaaa

SEQ ID NO: 760030 - RNA, 19 nt, Homo sapiens
  misc_RNA (1)...(19): siRNA sense strand
caucggagauugcagauuc

SEQ ID NO: 760031 - RNA, 19 nt, Homo sapiens
  misc_RNA (1)...(19): siRNA sense strand
ugaagcagauuuagugaga

SEQ ID NO: 760032 - RNA, 19 nt, Homo sapiens
  misc_RNA (1)...(19): siRNA sense strand
gaaagugaacaugguauaa

SEQ ID NO: 760033 - RNA, 19 nt, Homo sapiens
  misc_RNA (1)...(19): siRNA sense strand
agagcagacucaaguaaua

SEQ ID NO: 760034 - RNA, 19 nt, Homo sapiens
  misc_RNA (1)...(19): siRNA sense strand
gguagaagaaggagcuuua

SEQ ID NO: 760035 - RNA, 19 nt, Homo sapiens
  misc_RNA (1)...(19): siRNA sense strand
ccaggagucuaccaaauga

SEQ ID NO: 760036 - RNA, 19 nt, Homo sapiens
  misc_RNA (1)...(19): siRNA sense strand
gaacgucuuacaagccuua

SEQ ID NO: 760037 - RNA, 19 nt, Homo sapiens
  misc_RNA (1)...(19): siRNA sense strand
ugacuuguaugguaucuga

SEQ ID NO: 760038 - RNA, 19 nt, Homo sapiens
  misc_RNA (1)...(19): siRNA sense strand
caaagauucuggauuccuu

SEQ ID NO: 760039 - RNA, 19 nt, Homo sapiens
  misc_RNA (1)...(19): siRNA sense strand
uguagagucugcaguagua

SEQ ID NO: 760040 - RNA, 19 nt, Homo sapiens
  misc_RNA (1)...(19): siRNA sense strand
gcugaucgaucuaugaugu

SEQ ID NO: 760041 - RNA, 19 nt, Homo sapiens
  misc_RNA (1)...(19): siRNA sense strand
caucaaagaucauguuggu

SEQ ID NO: 760042 - RNA, 19 nt, Homo sapiens
  misc_RNA (1)...(19): siRNA sense strand
caucagagccuccuguuau

SEQ ID NO: 760043 - RNA, 19 nt, Homo sapiens
  misc_RNA (1)...(19): siRNA sense strand
gaagaagguuuagcagauc

SEQ ID NO: 760044 - RNA, 19 nt, Homo sapiens
  misc_RNA (1)...(19): siRNA sense strand
gaaaggaauuaaucuaucc

SEQ ID NO: 760045 - RNA, 19 nt, Homo sapiens
  misc_RNA (1)...(19): siRNA sense strand
ccaagcacaucaacaacaa

SEQ ID NO: 760046 - RNA, 19 nt, Homo sapiens
  misc_RNA (1)...(19): siRNA sense strand
uaugaacgcuccaugaugu

SEQ ID NO: 760047 - RNA, 19 nt, Homo sapiens
  misc_RNA (1)...(19): siRNA sense strand
uaugaacgcuccaugaugu

SEQ ID NO: 760048 - RNA, 19 nt, Homo sapiens
  misc_RNA (1)...(19): siRNA sense strand
cgacagcagugccugaguu

SEQ ID NO: 760049 - RNA, 19 nt, Homo sapiens
  misc_RNA (1)...(19): siRNA sense strand
agaagaagguuuagcagau

SEQ ID NO: 760050 - RNA, 19 nt, Homo sapiens
  misc_RNA (1)...(19): siRNA sense strand
cgacgaaggucuagaucug

SEQ ID NO: 760051 - RNA, 19 nt, Homo sapiens
  misc_RNA (1)...(19): siRNA sense strand
ccuuagagcuggcauugaa

SEQ ID NO: 760052 - RNA, 19 nt, Homo sapiens
  misc_RNA (1)...(19): siRNA sense strand
gaaaguaguggaggagaaa

SEQ ID NO: 760053 - RNA, 19 nt, Homo sapiens
  misc_RNA (1)...(19): siRNA sense strand
gcucagcccuaaagaaagu

SEQ ID NO: 760054 - RNA, 19 nt, Homo sapiens
  misc_RNA (1)...(19): siRNA sense strand
gcuccaugaugucagcuua

SEQ ID NO: 760055 - RNA, 19 nt, Homo sapiens
  misc_RNA (1)...(19): siRNA sense strand
caacgauggugcuggaguu

SEQ ID NO: 760056 - RNA, 19 nt, Homo sapiens
  misc_RNA (1)...(19): siRNA sense strand
gauacagaacuacgauaua

SEQ ID NO: 760057 - RNA, 19 nt, Homo sapiens
  misc_RNA (1)...(19): siRNA sense strand
agaacacccuuaagaagaa

SEQ ID NO: 760058 - RNA, 19 nt, Homo sapiens
  misc_RNA (1)...(19): siRNA sense strand
uagugaagcugacauugaa

SEQ ID NO: 760059 - RNA, 19 nt, Homo sapiens
  misc_RNA (1)...(19): siRNA sense strand
cugaugaaauucccacuaa

SEQ ID NO: 760060 - RNA, 19 nt, Homo sapiens
  misc_RNA (1)...(19): siRNA sense strand
ugaaagagggcuccagaaa

SEQ ID NO: 760061 - RNA, 19 nt, Homo sapiens
  misc_RNA (1)...(19): siRNA sense strand
ggauaguguuuauggagaa

SEQ ID NO: 760062 - RNA, 19 nt, Homo sapiens
  misc_RNA (1)...(19): siRNA sense strand
uaaugcagcugccaugugu

SEQ ID NO: 760063 - RNA, 19 nt, Homo sapiens
  misc_RNA (1)...(19): siRNA sense strand
agaucaagcuccagggaua

SEQ ID NO: 760064 - RNA, 19 nt, Homo sapiens
  misc_RNA (1)...(19): siRNA sense strand
ugaaacaaauacacccauu

SEQ ID NO: 760065 - RNA, 19 nt, Homo sapiens
  misc_RNA (1)...(19): siRNA sense strand
aaacaaauacacccauuga

SEQ ID NO: 760066 - RNA, 19 nt, Homo sapiens
  misc_RNA (1)...(19): siRNA sense strand
gcagcugaccgaucuauga

SEQ ID NO: 760067 - RNA, 19 nt, Homo sapiens
  misc_RNA (1)...(19): siRNA sense strand
ccagagccaucaaagauca

SEQ ID NO: 760068 - RNA, 19 nt, Homo sapiens
  misc_RNA (1)...(19): siRNA sense strand
ggaugaagaggaagaagaa

SEQ ID NO: 760069 - RNA, 19 nt, Homo sapiens
  misc_RNA (1)...(19): siRNA sense strand
aggaggagcuacuauagaa

SEQ ID NO: 760070 - RNA, 19 nt, Homo sapiens
  misc_RNA (1)...(19): siRNA sense strand
gaagaucuguaucaaaaga

SEQ ID NO: 760071 - RNA, 19 nt, Homo sapiens
  misc_RNA (1)...(19): siRNA sense strand
guaaguaguaugccagaaa

SEQ ID NO: 760072 - RNA, 19 nt, Homo sapiens
  misc_RNA (1)...(19): siRNA sense strand
gaaacaaauacacccauug

SEQ ID NO: 760073 - RNA, 19 nt, Homo sapiens
  misc_RNA (1)...(19): siRNA sense strand
ggucuuucguggucaguaa

SEQ ID NO: 760074 - RNA, 19 nt, Homo sapiens
  misc_RNA (1)...(19): siRNA sense strand
caaugucaguggaguauca

SEQ ID NO: 760075 - RNA, 19 nt, Homo sapiens
  misc_RNA (1)...(19): siRNA sense strand
agagacagcagaaacauuu

SEQ ID NO: 760076 - RNA, 19 nt, Homo sapiens
  misc_RNA (1)...(19): siRNA sense strand
gaaauagugcagaagauag

SEQ ID NO: 760077 - RNA, 19 nt, Homo sapiens
  misc_RNA (1)...(19): siRNA sense strand
ucaagaacacccuuaagaa

SEQ ID NO: 760078 - RNA, 19 nt, Homo sapiens
  misc_RNA (1)...(19): siRNA sense strand
guagugaagcugacauuga

SEQ ID NO: 760079 - RNA, 19 nt, Homo sapiens
  misc_RNA (1)...(19): siRNA sense strand
gcugaucguucaaugaugu

SEQ ID NO: 760080 - RNA, 19 nt, Homo sapiens
  misc_RNA (1)...(19): siRNA sense strand
gagccaagcacaucaacaa

SEQ ID NO: 760081 - RNA, 19 nt, Homo sapiens
  misc_RNA (1)...(19): siRNA sense strand
gcauuuggcccaucugaga

SEQ ID NO: 760082 - RNA, 19 nt, Homo sapiens
  misc_RNA (1)...(19): siRNA sense strand
guuaacaccuguagagucu

SEQ ID NO: 760083 - RNA, 19 nt, Homo sapiens
  misc_RNA (1)...(19): siRNA sense strand
caaagaucauguugguaga

SEQ ID NO: 760084 - RNA, 19 nt, Homo sapiens
  misc_RNA (1)...(19): siRNA sense strand
gcugaauggugaaacaaau

SEQ ID NO: 760085 - RNA, 19 nt, Homo sapiens
  misc_RNA (1)...(19): siRNA sense strand
ugaagucugugcugaaauc

SEQ ID NO: 760086 - RNA, 19 nt, Homo sapiens
  misc_RNA (1)...(19): siRNA sense strand
ggacauggaacgucuuaca

SEQ ID NO: 760087 - RNA, 19 nt, Homo sapiens
  misc_RNA (1)...(19): siRNA sense strand
aaagagacacugccugauu

SEQ ID NO: 760088 - RNA, 19 nt, Homo sapiens
  misc_RNA (1)...(19): siRNA sense strand
cagcaucuacucucaguuu

SEQ ID NO: 760089 - RNA, 19 nt, Homo sapiens
  misc_RNA (1)...(19): siRNA sense strand
gcagaaacauuugauucca

SEQ ID NO: 760090 - RNA, 19 nt, Homo sapiens
  misc_RNA (1)...(19): siRNA sense strand
cagaaacccuugugguauc

SEQ ID NO: 760091 - RNA, 19 nt, Homo sapiens
  misc_RNA (1)...(19): siRNA sense strand
gaaccauccaugacaaaga

SEQ ID NO: 760092 - RNA, 19 nt, Homo sapiens
  misc_RNA (1)...(19): siRNA sense strand
gaaggagcuuuagcauuuc

SEQ ID NO: 760093 - RNA, 19 nt, Homo sapiens
  misc_RNA (1)...(19): siRNA sense strand
aagcacagauccaagucua

SEQ ID NO: 760094 - RNA, 19 nt, Homo sapiens
  misc_RNA (1)...(19): siRNA sense strand
uaaugaagcagauuuagug

SEQ ID NO: 760095 - RNA, 19 nt, Homo sapiens
  misc_RNA (1)...(19): siRNA sense strand
gaacuaguaaggguauuga

SEQ ID NO: 760096 - RNA, 19 nt, Homo sapiens
  misc_RNA (1)...(19): siRNA sense strand
caucacauguuaugaaagg

SEQ ID NO: 760097 - RNA, 19 nt, Homo sapiens
  misc_RNA (1)...(19): siRNA sense strand
cuaaagagauggaacauaa

SEQ ID NO: 760098 - RNA, 19 nt, Homo sapiens
  misc_RNA (1)...(19): siRNA sense strand
agaaggagcuuuagcauuu

SEQ ID NO: 760099 - RNA, 19 nt, Homo sapiens
  misc_RNA (1)...(19): siRNA sense strand
gcuagaaccuccuguagua

SEQ ID NO: 760100 - RNA, 19 nt, Homo sapiens
  misc_RNA (1)...(19): siRNA sense strand
ggaaauuggugaagagaaa

SEQ ID NO: 760101 - RNA, 19 nt, Homo sapiens
  misc_RNA (1)...(19): siRNA sense strand
gagccagaaucuucaauua

SEQ ID NO: 760102 - RNA, 19 nt, Homo sapiens
  misc_RNA (1)...(19): siRNA sense strand
ggauaaggcucaauuacuu

SEQ ID NO: 760103 - RNA, 19 nt, Homo sapiens
  misc_RNA (1)...(19): siRNA sense strand
caacugagguggcuauaga

SEQ ID NO: 760104 - RNA, 19 nt, Homo sapiens
  misc_RNA (1)...(19): siRNA sense strand
ugacaaagauucuggauuc

SEQ ID NO: 760105 - RNA, 19 nt, Homo sapiens
  misc_RNA (1)...(19): siRNA sense strand
cgacagcgcuggaauccua

SEQ ID NO: 760106 - RNA, 19 nt, Homo sapiens
  misc_RNA (1)...(19): siRNA sense strand
gcgcuggaauccuauaaua

SEQ ID NO: 760107 - RNA, 19 nt, Homo sapiens
  misc_RNA (1)...(19): siRNA sense strand
ggucuuagauacagaacua

SEQ ID NO: 760108 - RNA, 19 nt, Homo sapiens
  misc_RNA (1)...(19): siRNA sense strand
gaagauagaggaaguacuu

SEQ ID NO: 760109 - RNA, 19 nt, Homo sapiens
  misc_RNA (1)...(19): siRNA sense strand
gaaguaagcguuccaaauc

SEQ ID NO: 760110 - RNA, 19 nt, Homo sapiens
  misc_RNA (1)...(19): siRNA sense strand
ucauuaagaucucgaagua

SEQ ID NO: 760111 - RNA, 19 nt, Homo sapiens
  misc_RNA (1)...(19): siRNA sense strand
aaacagauccuacugauga

SEQ ID NO: 760112 - RNA, 19 nt, Homo sapiens
  misc_RNA (1)...(19): siRNA sense strand
ggaagaagaucuguaucaa

SEQ ID NO: 760113 - RNA, 19 nt, Homo sapiens
  misc_RNA (1)...(19): siRNA sense strand
ggauacagaagaaccauua

SEQ ID NO: 760114 - RNA, 19 nt, Homo sapiens
  misc_RNA (1)...(19): siRNA sense strand
agaaagagcuucagagucu

SEQ ID NO: 760115 - RNA, 19 nt, Homo sapiens
  misc_RNA (1)...(19): siRNA sense strand
gcucuaugaugucagcuua

SEQ ID NO: 760116 - RNA, 19 nt, Homo sapiens
  misc_RNA (1)...(19): siRNA sense strand
ggagaucucuguucagucu

SEQ ID NO: 760117 - RNA, 19 nt, Homo sapiens
  misc_RNA (1)...(19): siRNA sense strand
agacgaagcuucaguaucu

SEQ ID NO: 760118 - RNA, 19 nt, Homo sapiens
  misc_RNA (1)...(19): siRNA sense strand
gcugaacgcucuaugaugu

SEQ ID NO: 760119 - RNA, 19 nt, Homo sapiens
  misc_RNA (1)...(19): siRNA sense strand
gcucuaugaugucuuauga

SEQ ID NO: 760120 - RNA, 19 nt, Homo sapiens
  misc_RNA (1)...(19): siRNA sense strand
gaagaaauagugcagaaga

SEQ ID NO: 760121 - RNA, 19 nt, Homo sapiens
  misc_RNA (1)...(19): siRNA sense strand
caaaucuucugaacacaaa

SEQ ID NO: 760122 - RNA, 19 nt, Homo sapiens
  misc_RNA (1)...(19): siRNA sense strand
gauauaagccagacuugaa

SEQ ID NO: 760123 - RNA, 19 nt, Homo sapiens
  misc_RNA (1)...(19): siRNA sense strand
gaaacucuaucuucuacug

SEQ ID NO: 760124 - RNA, 19 nt, Homo sapiens
  misc_RNA (1)...(19): siRNA sense strand
gaugaagucugugcugaaa

SEQ ID NO: 760125 - RNA, 19 nt, Homo sapiens
  misc_RNA (1)...(19): siRNA sense strand
gaagucaucugagccaguu

SEQ ID NO: 760126 - RNA, 19 nt, Homo sapiens
  misc_RNA (1)...(19): siRNA sense strand
gcugagcgcucuaugaugu

SEQ ID NO: 760127 - RNA, 19 nt, Homo sapiens
  misc_RNA (1)...(19): siRNA sense strand
gaagaagaucuguaucaaa

SEQ ID NO: 760128 - RNA, 19 nt, Homo sapiens
  misc_RNA (1)...(19): siRNA sense strand
caucggagauugcagauuc

SEQ ID NO: 760129 - RNA, 19 nt, Homo sapiens
  misc_RNA (1)...(19): siRNA sense strand
ugaagcagauuuagugaga

SEQ ID NO: 760130 - RNA, 19 nt, Homo sapiens
  misc_RNA (1)...(19): siRNA sense strand
gaaagugaacaugguauaa

SEQ ID NO: 760131 - RNA, 19 nt, Homo sapiens
  misc_RNA (1)...(19): siRNA sense strand
agagcagacucaaguaaua

SEQ ID NO: 760132 - RNA, 19 nt, Homo sapiens
  misc_RNA (1)...(19): siRNA sense strand
gguagaagaaggagcuuua

SEQ ID NO: 760133 - RNA, 19 nt, Homo sapiens
  misc_RNA (1)...(19): siRNA sense strand
ccaggagucuaccaaauga

SEQ ID NO: 760134 - RNA, 19 nt, Homo sapiens
  misc_RNA (1)...(19): siRNA sense strand
gaacgucuuacaagccuua

SEQ ID NO: 760135 - RNA, 19 nt, Homo sapiens
  misc_RNA (1)...(19): siRNA sense strand
ugacuuguaugguaucuga

SEQ ID NO: 760136 - RNA, 19 nt, Homo sapiens
  misc_RNA (1)...(19): siRNA sense strand
caaagauucuggauuccuu

SEQ ID NO: 760137 - RNA, 19 nt, Homo sapiens
  misc_RNA (1)...(19): siRNA sense strand
uguagagucugcaguagua

SEQ ID NO: 760138 - RNA, 19 nt, Homo sapiens
  misc_RNA (1)...(19): siRNA sense strand
gcugaucgaucuaugaugu

SEQ ID NO: 760139 - RNA, 19 nt, Homo sapiens
  misc_RNA (1)...(19): siRNA sense strand
caucaaagaucauguuggu

SEQ ID NO: 760140 - RNA, 19 nt, Homo sapiens
  misc_RNA (1)...(19): siRNA sense strand
caucagagccuccuguuau

SEQ ID NO: 760141 - RNA, 19 nt, Homo sapiens
  misc_RNA (1)...(19): siRNA sense strand
gaagaagguuuagcagauc

SEQ ID NO: 760142 - RNA, 19 nt, Homo sapiens
  misc_RNA (1)...(19): siRNA sense strand
gaaaggaauuaaucuaucc

SEQ ID NO: 760143 - RNA, 19 nt, Homo sapiens
  misc_RNA (1)...(19): siRNA sense strand
ccaagcacaucaacaacaa

SEQ ID NO: 760144 - RNA, 19 nt, Homo sapiens
  misc_RNA (1)...(19): siRNA sense strand
uaugaacgcuccaugaugu

SEQ ID NO: 760145 - RNA, 19 nt, Homo sapiens
  misc_RNA (1)...(19): siRNA sense strand
uaugaacgcuccaugaugu

SEQ ID NO: 760146 - RNA, 19 nt, Homo sapiens
  misc_RNA (1)...(19): siRNA sense strand
cgacagcagugccugaguu

SEQ ID NO: 760147 - RNA, 19 nt, Homo sapiens
  misc_RNA (1)...(19): siRNA sense strand
agaagaagguuuagcagau

SEQ ID NO: 760148 - RNA, 19 nt, Homo sapiens
  misc_RNA (1)...(19): siRNA sense strand
cgacgaaggucuagaucug

SEQ ID NO: 760149 - RNA, 19 nt, Homo sapiens
  misc_RNA (1)...(19): siRNA sense strand
ccuuagagcuggcauugaa

SEQ ID NO: 760150 - RNA, 19 nt, Homo sapiens
  misc_RNA (1)...(19): siRNA sense strand
gaaaguaguggaggagaaa

SEQ ID NO: 760151 - RNA, 19 nt, Homo sapiens
  misc_RNA (1)...(19): siRNA sense strand
gcucagcccuaaagaaagu

SEQ ID NO: 760152 - RNA, 19 nt, Homo sapiens
  misc_RNA (1)...(19): siRNA sense strand
gcuccaugaugucagcuua

SEQ ID NO: 760153 - RNA, 19 nt, Homo sapiens
  misc_RNA (1)...(19): siRNA sense strand
caacgauggugcuggaguu

SEQ ID NO: 760154 - RNA, 19 nt, Homo sapiens
  misc_RNA (1)...(19): siRNA sense strand
gauacagaacuacgauaua

SEQ ID NO: 760155 - RNA, 19 nt, Homo sapiens
  misc_RNA (1)...(19): siRNA sense strand
agaacacccuuaagaagaa

SEQ ID NO: 760156 - RNA, 19 nt, Homo sapiens
  misc_RNA (1)...(19): siRNA sense strand
uagugaagcugacauugaa

SEQ ID NO: 760157 - RNA, 19 nt, Homo sapiens
  misc_RNA (1)...(19): siRNA sense strand
cugaugaaauucccacuaa

SEQ ID NO: 760158 - RNA, 19 nt, Homo sapiens
  misc_RNA (1)...(19): siRNA sense strand
ugaaagagggcuccagaaa

SEQ ID NO: 760159 - RNA, 19 nt, Homo sapiens
  misc_RNA (1)...(19): siRNA sense strand
uaaugcagcugccaugugu

SEQ ID NO: 760160 - RNA, 19 nt, Homo sapiens
  misc_RNA (1)...(19): siRNA sense strand
aaacaaauacacccauuga

SEQ ID NO: 760161 - RNA, 19 nt, Homo sapiens
  misc_RNA (1)...(19): siRNA sense strand
agaucaagcuccagggaua

SEQ ID NO: 760162 - RNA, 19 nt, Homo sapiens
  misc_RNA (1)...(19): siRNA sense strand
ugaaacaaauacacccauu

SEQ ID NO: 760163 - RNA, 19 nt, Homo sapiens
  misc_RNA (1)...(19): siRNA sense strand
gcagcugaccgaucuauga

SEQ ID NO: 760164 - RNA, 19 nt, Homo sapiens
  misc_RNA (1)...(19): siRNA sense strand
ccagagccaucaaagauca

SEQ ID NO: 760165 - RNA, 19 nt, Homo sapiens
  misc_RNA (1)...(19): siRNA sense strand
aggaggagcuacuauagaa

SEQ ID NO: 760166 - RNA, 19 nt, Homo sapiens
  misc_RNA (1)...(19): siRNA sense strand
gaagaucuguaucaaaaga

SEQ ID NO: 760167 - RNA, 19 nt, Homo sapiens
  misc_RNA (1)...(19): siRNA sense strand
guaaguaguaugccagaaa

SEQ ID NO: 760168 - RNA, 19 nt, Homo sapiens
  misc_RNA (1)...(19): siRNA sense strand
ggucuuucguggucaguaa

SEQ ID NO: 760169 - RNA, 19 nt, Homo sapiens
  misc_RNA (1)...(19): siRNA sense strand
gaaacaaauacacccauug

SEQ ID NO: 760170 - RNA, 19 nt, Homo sapiens
  misc_RNA (1)...(19): siRNA sense strand
caaugucaguggaguauca

SEQ ID NO: 760171 - RNA, 19 nt, Homo sapiens
  misc_RNA (1)...(19): siRNA sense strand
agagacagcagaaacauuu

SEQ ID NO: 760172 - RNA, 19 nt, Homo sapiens
  misc_RNA (1)...(19): siRNA sense strand
gagccaagcacaucaacaa

SEQ ID NO: 760173 - RNA, 19 nt, Homo sapiens
  misc_RNA (1)...(19): siRNA sense strand
ucaagaacacccuuaagaa

SEQ ID NO: 760174 - RNA, 19 nt, Homo sapiens
  misc_RNA (1)...(19): siRNA sense strand
gaaauagugcagaagauag

SEQ ID NO: 760175 - RNA, 19 nt, Homo sapiens
  misc_RNA (1)...(19): siRNA sense strand
guagugaagcugacauuga

SEQ ID NO: 760176 - RNA, 19 nt, Homo sapiens
  misc_RNA (1)...(19): siRNA sense strand
gcugaucguucaaugaugu

SEQ ID NO: 760177 - RNA, 19 nt, Homo sapiens
  misc_RNA (1)...(19): siRNA sense strand
gcugaauggugaaacaaau

SEQ ID NO: 760178 - RNA, 19 nt, Homo sapiens
  misc_RNA (1)...(19): siRNA sense strand
guuaacaccuguagagucu

SEQ ID NO: 760179 - RNA, 19 nt, Homo sapiens
  misc_RNA (1)...(19): siRNA sense strand
caaagaucauguugguaga

SEQ ID NO: 760180 - RNA, 19 nt, Homo sapiens
  misc_RNA (1)...(19): siRNA sense strand
gcauuuggcccaucugaga

SEQ ID NO: 760181 - RNA, 19 nt, Homo sapiens
  misc_RNA (1)...(19): siRNA sense strand
ugaagucugugcugaaauc

SEQ ID NO: 760182 - RNA, 19 nt, Homo sapiens
  misc_RNA (1)...(19): siRNA sense strand
ggacauggaacgucuuaca

SEQ ID NO: 760183 - RNA, 19 nt, Homo sapiens
  misc_RNA (1)...(19): siRNA sense strand
aaagagacacugccugauu

SEQ ID NO: 760184 - RNA, 19 nt, Homo sapiens
  misc_RNA (1)...(19): siRNA sense strand
cagcaucuacucucaguuu

SEQ ID NO: 760185 - RNA, 19 nt, Homo sapiens
  misc_RNA (1)...(19): siRNA sense strand
gcagaaacauuugauucca

SEQ ID NO: 760186 - RNA, 19 nt, Homo sapiens
  misc_RNA (1)...(19): siRNA sense strand
cagaaacccuugugguauc

SEQ ID NO: 760187 - RNA, 19 nt, Homo sapiens
  misc_RNA (1)...(19): siRNA sense strand
ccacacaucuuagaaacuc

SEQ ID NO: 760188 - RNA, 19 nt, Homo sapiens
  misc_RNA (1)...(19): siRNA sense strand
gaaggagcuuuagcauuuc

SEQ ID NO: 760189 - RNA, 19 nt, Homo sapiens
  misc_RNA (1)...(19): siRNA sense strand
aagcacagauccaagucua

SEQ ID NO: 760190 - RNA, 19 nt, Homo sapiens
  misc_RNA (1)...(19): siRNA sense strand
uaaugaagcagauuuagug

SEQ ID NO: 760191 - RNA, 19 nt, Homo sapiens
  misc_RNA (1)...(19): siRNA sense strand
gaacuaguaaggguauuga

SEQ ID NO: 760192 - RNA, 19 nt, Homo sapiens
  misc_RNA (1)...(19): siRNA sense strand
caucacauguuaugaaagg

SEQ ID NO: 760193 - RNA, 19 nt, Homo sapiens
  misc_RNA (1)...(19): siRNA sense strand
gaaccauccaugacaaaga

SEQ ID NO: 760194 - RNA, 19 nt, Homo sapiens
  misc_RNA (1)...(19): siRNA sense strand
ccagaaccauccaugacaa

SEQ ID NO: 760195 - RNA, 19 nt, Homo sapiens
  misc_RNA (1)...(19): siRNA sense strand
cuacaucaguaaucucaga

SEQ ID NO: 760196 - RNA, 19 nt, Homo sapiens
  misc_RNA (1)...(19): siRNA sense strand
caagaacacccuuaagaag

SEQ ID NO: 760197 - RNA, 19 nt, Homo sapiens
  misc_RNA (1)...(19): siRNA sense strand
cuaaagagauggaacauaa

SEQ ID NO: 760198 - RNA, 19 nt, Homo sapiens
  misc_RNA (1)...(19): siRNA sense strand
agaaggagcuuuagcauuu

SEQ ID NO: 760199 - RNA, 19 nt, Homo sapiens
  misc_RNA (1)...(19): siRNA sense strand
gcuagaaccuccuguagua

SEQ ID NO: 760200 - RNA, 19 nt, Homo sapiens
  misc_RNA (1)...(19): siRNA sense strand
ggaaauuggugaagagaaa

SEQ ID NO: 760201 - RNA, 19 nt, Homo sapiens
  misc_RNA (1)...(19): siRNA sense strand
gagccagaaucuucaauua

SEQ ID NO: 760202 - RNA, 19 nt, Homo sapiens
  misc_RNA (1)...(19): siRNA sense strand
ggauaaggcucaauuacuu

SEQ ID NO: 760203 - RNA, 19 nt, Homo sapiens
  misc_RNA (1)...(19): siRNA sense strand
caacugagguggcuauaga

SEQ ID NO: 760204 - RNA, 19 nt, Homo sapiens
  misc_RNA (1)...(19): siRNA sense strand
ugacaaagauucuggauuc

SEQ ID NO: 760205 - RNA, 19 nt, Homo sapiens
  misc_RNA (1)...(19): siRNA sense strand
cgacagcgcuggaauccua

SEQ ID NO: 760206 - RNA, 19 nt, Homo sapiens
  misc_RNA (1)...(19): siRNA sense strand
gcgcuggaauccuauaaua

SEQ ID NO: 760207 - RNA, 19 nt, Homo sapiens
  misc_RNA (1)...(19): siRNA sense strand
ggucuuagauacagaacua

SEQ ID NO: 760208 - RNA, 19 nt, Homo sapiens
  misc_RNA (1)...(19): siRNA sense strand
gaagauagaggaaguacuu

SEQ ID NO: 760209 - RNA, 19 nt, Homo sapiens
  misc_RNA (1)...(19): siRNA sense strand
gaaguaagcguuccaaauc

SEQ ID NO: 760210 - RNA, 19 nt, Homo sapiens
  misc_RNA (1)...(19): siRNA sense strand
ucauuaagaucucgaagua

SEQ ID NO: 760211 - RNA, 19 nt, Homo sapiens
  misc_RNA (1)...(19): siRNA sense strand
aaacagauccuacugauga

SEQ ID NO: 760212 - RNA, 19 nt, Homo sapiens
  misc_RNA (1)...(19): siRNA sense strand
ggaagaagaucuguaucaa

SEQ ID NO: 760213 - RNA, 19 nt, Homo sapiens
  misc_RNA (1)...(19): siRNA sense strand
ggauacagaagaaccauua

SEQ ID NO: 760214 - RNA, 19 nt, Homo sapiens
  misc_RNA (1)...(19): siRNA sense strand
agaaagagcuucagagucu

SEQ ID NO: 760215 - RNA, 19 nt, Homo sapiens
  misc_RNA (1)...(19): siRNA sense strand
gcucuaugaugucagcuua

SEQ ID NO: 760216 - RNA, 19 nt, Homo sapiens
  misc_RNA (1)...(19): siRNA sense strand
ggagaucucuguucagucu

SEQ ID NO: 760217 - RNA, 19 nt, Homo sapiens
  misc_RNA (1)...(19): siRNA sense strand
caucaucccuuuaaacuca

SEQ ID NO: 760218 - RNA, 19 nt, Homo sapiens
  misc_RNA (1)...(19): siRNA sense strand
agacgaagcuucaguaucu

SEQ ID NO: 760219 - RNA, 19 nt, Homo sapiens
  misc_RNA (1)...(19): siRNA sense strand
gcugaacgcucuaugaugu

SEQ ID NO: 760220 - RNA, 19 nt, Homo sapiens
  misc_RNA (1)...(19): siRNA sense strand
gcucuaugaugucuuauga

SEQ ID NO: 760221 - RNA, 19 nt, Homo sapiens
  misc_RNA (1)...(19): siRNA sense strand
gaagaaauagugcagaaga

SEQ ID NO: 760222 - RNA, 19 nt, Homo sapiens
  misc_RNA (1)...(19): siRNA sense strand
caaaucuucugaacacaaa

SEQ ID NO: 760223 - RNA, 19 nt, Homo sapiens
  misc_RNA (1)...(19): siRNA sense strand
gauauaagccagacuugaa

SEQ ID NO: 760224 - RNA, 19 nt, Homo sapiens
  misc_RNA (1)...(19): siRNA sense strand
gaaacucuaucuucuacug

SEQ ID NO: 760225 - RNA, 19 nt, Homo sapiens
  misc_RNA (1)...(19): siRNA sense strand
gaugaagucugugcugaaa

SEQ ID NO: 760226 - RNA, 19 nt, Homo sapiens
  misc_RNA (1)...(19): siRNA sense strand
gaagucaucugagccaguu

SEQ ID NO: 760227 - RNA, 19 nt, Homo sapiens
  misc_RNA (1)...(19): siRNA sense strand
gcugagcgcucuaugaugu

SEQ ID NO: 760228 - RNA, 19 nt, Homo sapiens
  misc_RNA (1)...(19): siRNA sense strand
aaacagaucgcacagagua

SEQ ID NO: 760229 - RNA, 19 nt, Homo sapiens
  misc_RNA (1)...(19): siRNA sense strand
gaagaagaucuguaucaaa

SEQ ID NO: 760230 - RNA, 19 nt, Homo sapiens
  misc_RNA (1)...(19): siRNA sense strand
caucggagauugcagauuc

SEQ ID NO: 760231 - RNA, 19 nt, Homo sapiens
  misc_RNA (1)...(19): siRNA sense strand
ugaagcagauuuagugaga

SEQ ID NO: 760232 - RNA, 19 nt, Homo sapiens
  misc_RNA (1)...(19): siRNA sense strand
gaaagugaacaugguauaa

SEQ ID NO: 760233 - RNA, 19 nt, Homo sapiens
  misc_RNA (1)...(19): siRNA sense strand
agagcagacucaaguaaua

SEQ ID NO: 760234 - RNA, 19 nt, Homo sapiens
  misc_RNA (1)...(19): siRNA sense strand
gguagaagaaggagcuuua

SEQ ID NO: 760235 - RNA, 19 nt, Homo sapiens
  misc_RNA (1)...(19): siRNA sense strand
ccaggagucuaccaaauga

SEQ ID NO: 760236 - RNA, 19 nt, Homo sapiens
  misc_RNA (1)...(19): siRNA sense strand
gaacgucuuacaagccuua

SEQ ID NO: 760237 - RNA, 19 nt, Homo sapiens
  misc_RNA (1)...(19): siRNA sense strand
ugacuuguaugguaucuga

SEQ ID NO: 760238 - RNA, 19 nt, Homo sapiens
  misc_RNA (1)...(19): siRNA sense strand
caaagauucuggauuccuu

SEQ ID NO: 760239 - RNA, 19 nt, Homo sapiens
  misc_RNA (1)...(19): siRNA sense strand
uguagagucugcaguagua

SEQ ID NO: 760240 - RNA, 19 nt, Homo sapiens
  misc_RNA (1)...(19): siRNA sense strand
gcugaucgaucuaugaugu

SEQ ID NO: 760241 - RNA, 19 nt, Homo sapiens
  misc_RNA (1)...(19): siRNA sense strand
caucaaagaucauguuggu

SEQ ID NO: 760242 - RNA, 19 nt, Homo sapiens
  misc_RNA (1)...(19): siRNA sense strand
caucagagccuccuguuau

SEQ ID NO: 760243 - RNA, 19 nt, Homo sapiens
  misc_RNA (1)...(19): siRNA sense strand
gaagaagguuuagcagauc

SEQ ID NO: 760244 - RNA, 19 nt, Homo sapiens
  misc_RNA (1)...(19): siRNA sense strand
gaaaggaauuaaucuaucc

SEQ ID NO: 760245 - RNA, 19 nt, Homo sapiens
  misc_RNA (1)...(19): siRNA sense strand
ccaagcacaucaacaacaa

SEQ ID NO: 760246 - RNA, 19 nt, Homo sapiens
  misc_RNA (1)...(19): siRNA sense strand
uaugaacgcuccaugaugu

SEQ ID NO: 760247 - RNA, 19 nt, Homo sapiens
  misc_RNA (1)...(19): siRNA sense strand
uaugaacgcuccaugaugu

SEQ ID NO: 760248 - RNA, 19 nt, Homo sapiens
  misc_RNA (1)...(19): siRNA sense strand
cgacagcagugccugaguu

SEQ ID NO: 760249 - RNA, 19 nt, Homo sapiens
  misc_RNA (1)...(19): siRNA sense strand
agaagaagguuuagcagau

SEQ ID NO: 760250 - RNA, 19 nt, Homo sapiens
  misc_RNA (1)...(19): siRNA sense strand
cgacgaaggucuagaucug

SEQ ID NO: 760251 - RNA, 19 nt, Homo sapiens
  misc_RNA (1)...(19): siRNA sense strand
ccuuagagcuggcauugaa

SEQ ID NO: 760252 - RNA, 19 nt, Homo sapiens
  misc_RNA (1)...(19): siRNA sense strand
gaaaguaguggaggagaaa

SEQ ID NO: 760253 - RNA, 19 nt, Homo sapiens
  misc_RNA (1)...(19): siRNA sense strand
gcucagcccuaaagaaagu

SEQ ID NO: 760254 - RNA, 19 nt, Homo sapiens
  misc_RNA (1)...(19): siRNA sense strand
gcuccaugaugucagcuua

SEQ ID NO: 760255 - RNA, 19 nt, Homo sapiens
  misc_RNA (1)...(19): siRNA sense strand
caacgauggugcuggaguu

SEQ ID NO: 760256 - RNA, 19 nt, Homo sapiens
  misc_RNA (1)...(19): siRNA sense strand
gauacagaacuacgauaua

SEQ ID NO: 760257 - RNA, 19 nt, Homo sapiens
  misc_RNA (1)...(19): siRNA sense strand
agaacacccuuaagaagaa

SEQ ID NO: 760258 - RNA, 19 nt, Homo sapiens
  misc_RNA (1)...(19): siRNA sense strand
uagugaagcugacauugaa

SEQ ID NO: 760259 - RNA, 19 nt, Homo sapiens
  misc_RNA (1)...(19): siRNA sense strand
cugaugaaauucccacuaa

SEQ ID NO: 760260 - RNA, 19 nt, Homo sapiens
  misc_RNA (1)...(19): siRNA sense strand
ugaaagagggcuccagaaa

SEQ ID NO: 760261 - RNA, 19 nt, Homo sapiens
  misc_RNA (1)...(19): siRNA sense strand
ggauaguguuuauggagaa

SEQ ID NO: 760262 - RNA, 19 nt, Homo sapiens
  misc_RNA (1)...(19): siRNA sense strand
uaaugcagcugccaugugu

SEQ ID NO: 760263 - RNA, 19 nt, Homo sapiens
  misc_RNA (1)...(19): siRNA sense strand
agaucaagcuccagggaua

SEQ ID NO: 760264 - RNA, 19 nt, Homo sapiens
  misc_RNA (1)...(19): siRNA sense strand
ugaaacaaauacacccauu

SEQ ID NO: 760265 - RNA, 19 nt, Homo sapiens
  misc_RNA (1)...(19): siRNA sense strand
aaacaaauacacccauuga

SEQ ID NO: 760266 - RNA, 19 nt, Homo sapiens
  misc_RNA (1)...(19): siRNA sense strand
gcagcugaccgaucuauga

SEQ ID NO: 760267 - RNA, 19 nt, Homo sapiens
  misc_RNA (1)...(19): siRNA sense strand
ccagagccaucaaagauca

SEQ ID NO: 760268 - RNA, 19 nt, Homo sapiens
  misc_RNA (1)...(19): siRNA sense strand
ggaugaagaggaagaagaa

SEQ ID NO: 760269 - RNA, 19 nt, Homo sapiens
  misc_RNA (1)...(19): siRNA sense strand
aggaggagcuacuauagaa

SEQ ID NO: 760270 - RNA, 19 nt, Homo sapiens
  misc_RNA (1)...(19): siRNA sense strand
gaagaucuguaucaaaaga

SEQ ID NO: 760271 - RNA, 19 nt, Homo sapiens
  misc_RNA (1)...(19): siRNA sense strand
guaaguaguaugccagaaa

SEQ ID NO: 760272 - RNA, 19 nt, Homo sapiens
  misc_RNA (1)...(19): siRNA sense strand
gaaacaaauacacccauug

SEQ ID NO: 760273 - RNA, 19 nt, Homo sapiens
  misc_RNA (1)...(19): siRNA sense strand
ggucuuucguggucaguaa

SEQ ID NO: 760274 - RNA, 19 nt, Homo sapiens
  misc_RNA (1)...(19): siRNA sense strand
caaugucaguggaguauca

SEQ ID NO: 760275 - RNA, 19 nt, Homo sapiens
  misc_RNA (1)...(19): siRNA sense strand
agagacagcagaaacauuu

SEQ ID NO: 760276 - RNA, 19 nt, Homo sapiens
  misc_RNA (1)...(19): siRNA sense strand
gaaauagugcagaagauag

SEQ ID NO: 760277 - RNA, 19 nt, Homo sapiens
  misc_RNA (1)...(19): siRNA sense strand
ucaagaacacccuuaagaa

SEQ ID NO: 760278 - RNA, 19 nt, Homo sapiens
  misc_RNA (1)...(19): siRNA sense strand
guagugaagcugacauuga

SEQ ID NO: 760279 - RNA, 19 nt, Homo sapiens
  misc_RNA (1)...(19): siRNA sense strand
gcugaucguucaaugaugu

SEQ ID NO: 760280 - RNA, 19 nt, Homo sapiens
  misc_RNA (1)...(19): siRNA sense strand
gagccaagcacaucaacaa

SEQ ID NO: 760281 - RNA, 19 nt, Homo sapiens
  misc_RNA (1)...(19): siRNA sense strand
gcauuuggcccaucugaga

SEQ ID NO: 760282 - RNA, 19 nt, Homo sapiens
  misc_RNA (1)...(19): siRNA sense strand
guuaacaccuguagagucu

SEQ ID NO: 760283 - RNA, 19 nt, Homo sapiens
  misc_RNA (1)...(19): siRNA sense strand
caaagaucauguugguaga

SEQ ID NO: 760284 - RNA, 19 nt, Homo sapiens
  misc_RNA (1)...(19): siRNA sense strand
gcugaauggugaaacaaau

SEQ ID NO: 760285 - RNA, 19 nt, Homo sapiens
  misc_RNA (1)...(19): siRNA sense strand
ugaagucugugcugaaauc

SEQ ID NO: 760286 - RNA, 19 nt, Homo sapiens
  misc_RNA (1)...(19): siRNA sense strand
ggacauggaacgucuuaca

SEQ ID NO: 760287 - RNA, 19 nt, Homo sapiens
  misc_RNA (1)...(19): siRNA sense strand
aaagagacacugccugauu

SEQ ID NO: 760288 - RNA, 19 nt, Homo sapiens
  misc_RNA (1)...(19): siRNA sense strand
cagcaucuacucucaguuu

SEQ ID NO: 760289 - RNA, 19 nt, Homo sapiens
  misc_RNA (1)...(19): siRNA sense strand
gcagaaacauuugauucca

SEQ ID NO: 760290 - RNA, 19 nt, Homo sapiens
  misc_RNA (1)...(19): siRNA sense strand
cagaaacccuugugguauc

SEQ ID NO: 760291 - RNA, 19 nt, Homo sapiens
  misc_RNA (1)...(19): siRNA sense strand
gaaccauccaugacaaaga

SEQ ID NO: 760292 - RNA, 19 nt, Homo sapiens
  misc_RNA (1)...(19): siRNA sense strand
gaaggagcuuuagcauuuc

SEQ ID NO: 760293 - RNA, 19 nt, Homo sapiens
  misc_RNA (1)...(19): siRNA sense strand
aagcacagauccaagucua

SEQ ID NO: 760294 - RNA, 19 nt, Homo sapiens
  misc_RNA (1)...(19): siRNA sense strand
uaaugaagcagauuuagug

SEQ ID NO: 760295 - RNA, 19 nt, Homo sapiens
  misc_RNA (1)...(19): siRNA sense strand
gaacuaguaaggguauuga

SEQ ID NO: 760296 - RNA, 19 nt, Homo sapiens
  misc_RNA (1)...(19): siRNA sense strand
caucacauguuaugaaagg

SEQ ID NO: 760297 - RNA, 19 nt, Homo sapiens
  misc_RNA (1)...(19): siRNA sense strand
cuaaagagauggaacauaa

SEQ ID NO: 760298 - RNA, 19 nt, Homo sapiens
  misc_RNA (1)...(19): siRNA sense strand
agaaggagcuuuagcauuu

SEQ ID NO: 760299 - RNA, 19 nt, Homo sapiens
  misc_RNA (1)...(19): siRNA sense strand
gcuagaaccuccuguagua

SEQ ID NO: 760300 - RNA, 19 nt, Homo sapiens
  misc_RNA (1)...(19): siRNA sense strand
ggaaauuggugaagagaaa

SEQ ID NO: 760301 - RNA, 19 nt, Homo sapiens
  misc_RNA (1)...(19): siRNA sense strand
gagccagaaucuucaauua

SEQ ID NO: 760302 - RNA, 19 nt, Homo sapiens
  misc_RNA (1)...(19): siRNA sense strand
ggauaaggcucaauuacuu

SEQ ID NO: 760303 - RNA, 19 nt, Homo sapiens
  misc_RNA (1)...(19): siRNA sense strand
caacugagguggcuauaga

SEQ ID NO: 760304 - RNA, 19 nt, Homo sapiens
  misc_RNA (1)...(19): siRNA sense strand
ugacaaagauucuggauuc

SEQ ID NO: 760305 - RNA, 19 nt, Homo sapiens
  misc_RNA (1)...(19): siRNA sense strand
cgacagcgcuggaauccua

SEQ ID NO: 760306 - RNA, 19 nt, Homo sapiens
  misc_RNA (1)...(19): siRNA sense strand
gcgcuggaauccuauaaua

SEQ ID NO: 760307 - RNA, 19 nt, Homo sapiens
  misc_RNA (1)...(19): siRNA sense strand
ggucuuagauacagaacua

SEQ ID NO: 760308 - RNA, 19 nt, Homo sapiens
  misc_RNA (1)...(19): siRNA sense strand
gaagauagaggaaguacuu

SEQ ID NO: 760309 - RNA, 19 nt, Homo sapiens
  misc_RNA (1)...(19): siRNA sense strand
gaaguaagcguuccaaauc

SEQ ID NO: 760310 - RNA, 19 nt, Homo sapiens
  misc_RNA (1)...(19): siRNA sense strand
ucauuaagaucucgaagua

SEQ ID NO: 760311 - RNA, 19 nt, Homo sapiens
  misc_RNA (1)...(19): siRNA sense strand
aaacagauccuacugauga

SEQ ID NO: 760312 - RNA, 19 nt, Homo sapiens
  misc_RNA (1)...(19): siRNA sense strand
ggaagaagaucuguaucaa

SEQ ID NO: 760313 - RNA, 19 nt, Homo sapiens
  misc_RNA (1)...(19): siRNA sense strand
ggauacagaagaaccauua

SEQ ID NO: 760314 - RNA, 19 nt, Homo sapiens
  misc_RNA (1)...(19): siRNA sense strand
agaaagagcuucagagucu

SEQ ID NO: 760315 - RNA, 19 nt, Homo sapiens
  misc_RNA (1)...(19): siRNA sense strand
gcucuaugaugucagcuua

SEQ ID NO: 760316 - RNA, 19 nt, Homo sapiens
  misc_RNA (1)...(19): siRNA sense strand
ggagaucucuguucagucu

SEQ ID NO: 760317 - RNA, 19 nt, Homo sapiens
  misc_RNA (1)...(19): siRNA sense strand
caucaucccuuuaaacuca

SEQ ID NO: 760318 - RNA, 19 nt, Homo sapiens
  misc_RNA (1)...(19): siRNA sense strand
agacgaagcuucaguaucu

SEQ ID NO: 760319 - RNA, 19 nt, Homo sapiens
  misc_RNA (1)...(19): siRNA sense strand
gcugaacgcucuaugaugu

SEQ ID NO: 760320 - RNA, 19 nt, Homo sapiens
  misc_RNA (1)...(19): siRNA sense strand
gcucuaugaugucuuauga

SEQ ID NO: 760321 - RNA, 19 nt, Homo sapiens
  misc_RNA (1)...(19): siRNA sense strand
gaagaaauagugcagaaga

SEQ ID NO: 760322 - RNA, 19 nt, Homo sapiens
  misc_RNA (1)...(19): siRNA sense strand
caaaucuucugaacacaaa

SEQ ID NO: 760323 - RNA, 19 nt, Homo sapiens
  misc_RNA (1)...(19): siRNA sense strand
gauauaagccagacuugaa

SEQ ID NO: 760324 - RNA, 19 nt, Homo sapiens
  misc_RNA (1)...(19): siRNA sense strand
gaaacucuaucuucuacug

SEQ ID NO: 760325 - RNA, 19 nt, Homo sapiens
  misc_RNA (1)...(19): siRNA sense strand
gaugaagucugugcugaaa

SEQ ID NO: 760326 - RNA, 19 nt, Homo sapiens
  misc_RNA (1)...(19): siRNA sense strand
gaagucaucugagccaguu

SEQ ID NO: 760327 - RNA, 19 nt, Homo sapiens
  misc_RNA (1)...(19): siRNA sense strand
gcugagcgcucuaugaugu

SEQ ID NO: 760328 - RNA, 19 nt, Homo sapiens
  misc_RNA (1)...(19): siRNA sense strand
aaacagaucgcacagagua

SEQ ID NO: 760329 - RNA, 19 nt, Homo sapiens
  misc_RNA (1)...(19): siRNA sense strand
gaagaagaucuguaucaaa

SEQ ID NO: 760330 - RNA, 19 nt, Homo sapiens
  misc_RNA (1)...(19): siRNA sense strand
caucggagauugcagauuc

SEQ ID NO: 760331 - RNA, 19 nt, Homo sapiens
  misc_RNA (1)...(19): siRNA sense strand
ugaagcagauuuagugaga

SEQ ID NO: 760332 - RNA, 19 nt, Homo sapiens
  misc_RNA (1)...(19): siRNA sense strand
gaaagugaacaugguauaa

SEQ ID NO: 760333 - RNA, 19 nt, Homo sapiens
  misc_RNA (1)...(19): siRNA sense strand
agagcagacucaaguaaua

SEQ ID NO: 760334 - RNA, 19 nt, Homo sapiens
  misc_RNA (1)...(19): siRNA sense strand
gguagaagaaggagcuuua

SEQ ID NO: 760335 - RNA, 19 nt, Homo sapiens
  misc_RNA (1)...(19): siRNA sense strand
ccaggagucuaccaaauga

SEQ ID NO: 760336 - RNA, 19 nt, Homo sapiens
  misc_RNA (1)...(19): siRNA sense strand
gaacgucuuacaagccuua

SEQ ID NO: 760337 - RNA, 19 nt, Homo sapiens
  misc_RNA (1)...(19): siRNA sense strand
ugacuuguaugguaucuga

SEQ ID NO: 760338 - RNA, 19 nt, Homo sapiens
  misc_RNA (1)...(19): siRNA sense strand
caaagauucuggauuccuu

SEQ ID NO: 760339 - RNA, 19 nt, Homo sapiens
  misc_RNA (1)...(19): siRNA sense strand
uguagagucugcaguagua

SEQ ID NO: 760340 - RNA, 19 nt, Homo sapiens
  misc_RNA (1)...(19): siRNA sense strand
gcugaucgaucuaugaugu

SEQ ID NO: 760341 - RNA, 19 nt, Homo sapiens
  misc_RNA (1)...(19): siRNA sense strand
caucaaagaucauguuggu

SEQ ID NO: 760342 - RNA, 19 nt, Homo sapiens
  misc_RNA (1)...(19): siRNA sense strand
caucagagccuccuguuau

SEQ ID NO: 760343 - RNA, 19 nt, Homo sapiens
  misc_RNA (1)...(19): siRNA sense strand
gaagaagguuuagcagauc

SEQ ID NO: 760344 - RNA, 19 nt, Homo sapiens
  misc_RNA (1)...(19): siRNA sense strand
gaaaggaauuaaucuaucc

SEQ ID NO: 760345 - RNA, 19 nt, Homo sapiens
  misc_RNA (1)...(19): siRNA sense strand
ccaagcacaucaacaacaa

SEQ ID NO: 760346 - RNA, 19 nt, Homo sapiens
  misc_RNA (1)...(19): siRNA sense strand
uaugaacgcuccaugaugu

SEQ ID NO: 760347 - RNA, 19 nt, Homo sapiens
  misc_RNA (1)...(19): siRNA sense strand
uaugaacgcuccaugaugu

SEQ ID NO: 760348 - RNA, 19 nt, Homo sapiens
  misc_RNA (1)...(19): siRNA sense strand
cgacagcagugccugaguu

SEQ ID NO: 760349 - RNA, 19 nt, Homo sapiens
  misc_RNA (1)...(19): siRNA sense strand
agaagaagguuuagcagau

SEQ ID NO: 760350 - RNA, 19 nt, Homo sapiens
  misc_RNA (1)...(19): siRNA sense strand
cgacgaaggucuagaucug

SEQ ID NO: 760351 - RNA, 19 nt, Homo sapiens
  misc_RNA (1)...(19): siRNA sense strand
ccuuagagcuggcauugaa

SEQ ID NO: 760352 - RNA, 19 nt, Homo sapiens
  misc_RNA (1)...(19): siRNA sense strand
gaaaguaguggaggagaaa

SEQ ID NO: 760353 - RNA, 19 nt, Homo sapiens
  misc_RNA (1)...(19): siRNA sense strand
gcucagcccuaaagaaagu

SEQ ID NO: 760354 - RNA, 19 nt, Homo sapiens
  misc_RNA (1)...(19): siRNA sense strand
gcuccaugaugucagcuua

SEQ ID NO: 760355 - RNA, 19 nt, Homo sapiens
  misc_RNA (1)...(19): siRNA sense strand
caacgauggugcuggaguu

SEQ ID NO: 760356 - RNA, 19 nt, Homo sapiens
  misc_RNA (1)...(19): siRNA sense strand
gauacagaacuacgauaua

SEQ ID NO: 760357 - RNA, 19 nt, Homo sapiens
  misc_RNA (1)...(19): siRNA sense strand
agaacacccuuaagaagaa

SEQ ID NO: 760358 - RNA, 19 nt, Homo sapiens
  misc_RNA (1)...(19): siRNA sense strand
uagugaagcugacauugaa

SEQ ID NO: 760359 - RNA, 19 nt, Homo sapiens
  misc_RNA (1)...(19): siRNA sense strand
cugaugaaauucccacuaa

SEQ ID NO: 760360 - RNA, 19 nt, Homo sapiens
  misc_RNA (1)...(19): siRNA sense strand
ugaaagagggcuccagaaa

SEQ ID NO: 760361 - RNA, 19 nt, Homo sapiens
  misc_RNA (1)...(19): siRNA sense strand
ggauaguguuuauggagaa

SEQ ID NO: 760362 - RNA, 19 nt, Homo sapiens
  misc_RNA (1)...(19): siRNA sense strand
uaaugcagcugccaugugu

SEQ ID NO: 760363 - RNA, 19 nt, Homo sapiens
  misc_RNA (1)...(19): siRNA sense strand
agaucaagcuccagggaua

SEQ ID NO: 760364 - RNA, 19 nt, Homo sapiens
  misc_RNA (1)...(19): siRNA sense strand
ugaaacaaauacacccauu

SEQ ID NO: 760365 - RNA, 19 nt, Homo sapiens
  misc_RNA (1)...(19): siRNA sense strand
aaacaaauacacccauuga

SEQ ID NO: 760366 - RNA, 19 nt, Homo sapiens
  misc_RNA (1)...(19): siRNA sense strand
gcagcugaccgaucuauga

SEQ ID NO: 760367 - RNA, 19 nt, Homo sapiens
  misc_RNA (1)...(19): siRNA sense strand
ccagagccaucaaagauca

SEQ ID NO: 760368 - RNA, 19 nt, Homo sapiens
  misc_RNA (1)...(19): siRNA sense strand
ggaugaagaggaagaagaa

SEQ ID NO: 760369 - RNA, 19 nt, Homo sapiens
  misc_RNA (1)...(19): siRNA sense strand
aggaggagcuacuauagaa

SEQ ID NO: 760370 - RNA, 19 nt, Homo sapiens
  misc_RNA (1)...(19): siRNA sense strand
gaagaucuguaucaaaaga

SEQ ID NO: 760371 - RNA, 19 nt, Homo sapiens
  misc_RNA (1)...(19): siRNA sense strand
guaaguaguaugccagaaa

SEQ ID NO: 760372 - RNA, 19 nt, Homo sapiens
  misc_RNA (1)...(19): siRNA sense strand
gaaacaaauacacccauug

SEQ ID NO: 760373 - RNA, 19 nt, Homo sapiens
  misc_RNA (1)...(19): siRNA sense strand
ggucuuucguggucaguaa

SEQ ID NO: 760374 - RNA, 19 nt, Homo sapiens
  misc_RNA (1)...(19): siRNA sense strand
caaugucaguggaguauca

SEQ ID NO: 760375 - RNA, 19 nt, Homo sapiens
  misc_RNA (1)...(19): siRNA sense strand
agagacagcagaaacauuu

SEQ ID NO: 760376 - RNA, 19 nt, Homo sapiens
  misc_RNA (1)...(19): siRNA sense strand
gaaauagugcagaagauag

SEQ ID NO: 760377 - RNA, 19 nt, Homo sapiens
  misc_RNA (1)...(19): siRNA sense strand
ucaagaacacccuuaagaa

SEQ ID NO: 760378 - RNA, 19 nt, Homo sapiens
  misc_RNA (1)...(19): siRNA sense strand
guagugaagcugacauuga

SEQ ID NO: 760379 - RNA, 19 nt, Homo sapiens
  misc_RNA (1)...(19): siRNA sense strand
gcugaucguucaaugaugu

SEQ ID NO: 760380 - RNA, 19 nt, Homo sapiens
  misc_RNA (1)...(19): siRNA sense strand
gagccaagcacaucaacaa

SEQ ID NO: 760381 - RNA, 19 nt, Homo sapiens
  misc_RNA (1)...(19): siRNA sense strand
gcauuuggcccaucugaga

SEQ ID NO: 760382 - RNA, 19 nt, Homo sapiens
  misc_RNA (1)...(19): siRNA sense strand
guuaacaccuguagagucu

SEQ ID NO: 760383 - RNA, 19 nt, Homo sapiens
  misc_RNA (1)...(19): siRNA sense strand
caaagaucauguugguaga

SEQ ID NO: 760384 - RNA, 19 nt, Homo sapiens
  misc_RNA (1)...(19): siRNA sense strand
gcugaauggugaaacaaau

SEQ ID NO: 760385 - RNA, 19 nt, Homo sapiens
  misc_RNA (1)...(19): siRNA sense strand
ugaagucugugcugaaauc

SEQ ID NO: 760386 - RNA, 19 nt, Homo sapiens
  misc_RNA (1)...(19): siRNA sense strand
ggacauggaacgucuuaca

SEQ ID NO: 760387 - RNA, 19 nt, Homo sapiens
  misc_RNA (1)...(19): siRNA sense strand
aaagagacacugccugauu

SEQ ID NO: 760388 - RNA, 19 nt, Homo sapiens
  misc_RNA (1)...(19): siRNA sense strand
cagcaucuacucucaguuu

SEQ ID NO: 760389 - RNA, 19 nt, Homo sapiens
  misc_RNA (1)...(19): siRNA sense strand
gcagaaacauuugauucca

SEQ ID NO: 760390 - RNA, 19 nt, Homo sapiens
  misc_RNA (1)...(19): siRNA sense strand
cagaaacccuugugguauc

SEQ ID NO: 760391 - RNA, 19 nt, Homo sapiens
  misc_RNA (1)...(19): siRNA sense strand
gaaccauccaugacaaaga

SEQ ID NO: 760392 - RNA, 19 nt, Homo sapiens
  misc_RNA (1)...(19): siRNA sense strand
gaaggagcuuuagcauuuc

SEQ ID NO: 760393 - RNA, 19 nt, Homo sapiens
  misc_RNA (1)...(19): siRNA sense strand
aagcacagauccaagucua

SEQ ID NO: 760394 - RNA, 19 nt, Homo sapiens
  misc_RNA (1)...(19): siRNA sense strand
uaaugaagcagauuuagug

SEQ ID NO: 760395 - RNA, 19 nt, Homo sapiens
  misc_RNA (1)...(19): siRNA sense strand
gaacuaguaaggguauuga

SEQ ID NO: 760396 - RNA, 19 nt, Homo sapiens
  misc_RNA (1)...(19): siRNA sense strand
caucacauguuaugaaagg

SEQ ID NO: 760397 - RNA, 19 nt, Homo sapiens
  misc_RNA (1)...(19): siRNA sense strand
cuaaagagauggaacauaa

SEQ ID NO: 760398 - RNA, 19 nt, Homo sapiens
  misc_RNA (1)...(19): siRNA sense strand
agaaggagcuuuagcauuu

SEQ ID NO: 760399 - RNA, 19 nt, Homo sapiens
  misc_RNA (1)...(19): siRNA sense strand
gcuagaaccuccuguagua

SEQ ID NO: 760400 - RNA, 19 nt, Homo sapiens
  misc_RNA (1)...(19): siRNA sense strand
ggaaauuggugaagagaaa

SEQ ID NO: 760401 - RNA, 19 nt, Homo sapiens
  misc_RNA (1)...(19): siRNA sense strand
gagccagaaucuucaauua

SEQ ID NO: 760402 - RNA, 19 nt, Homo sapiens
  misc_RNA (1)...(19): siRNA sense strand
ggauaaggcucaauuacuu

SEQ ID NO: 760403 - RNA, 19 nt, Homo sapiens
  misc_RNA (1)...(19): siRNA sense strand
caacugagguggcuauaga

SEQ ID NO: 760404 - RNA, 19 nt, Homo sapiens
  misc_RNA (1)...(19): siRNA sense strand
ugacaaagauucuggauuc

SEQ ID NO: 760405 - RNA, 19 nt, Homo sapiens
  misc_RNA (1)...(19): siRNA sense strand
cgacagcgcuggaauccua

SEQ ID NO: 760406 - RNA, 19 nt, Homo sapiens
  misc_RNA (1)...(19): siRNA sense strand
gcgcuggaauccuauaaua

SEQ ID NO: 760407 - RNA, 19 nt, Homo sapiens
  misc_RNA (1)...(19): siRNA sense strand
ggucuuagauacagaacua

SEQ ID NO: 760408 - RNA, 19 nt, Homo sapiens
  misc_RNA (1)...(19): siRNA sense strand
gaagauagaggaaguacuu

SEQ ID NO: 760409 - RNA, 19 nt, Homo sapiens
  misc_RNA (1)...(19): siRNA sense strand
gaaguaagcguuccaaauc

SEQ ID NO: 760410 - RNA, 19 nt, Homo sapiens
  misc_RNA (1)...(19): siRNA sense strand
ucauuaagaucucgaagua

SEQ ID NO: 760411 - RNA, 19 nt, Homo sapiens
  misc_RNA (1)...(19): siRNA sense strand
aaacagauccuacugauga

SEQ ID NO: 760412 - RNA, 19 nt, Homo sapiens
  misc_RNA (1)...(19): siRNA sense strand
ggaagaagaucuguaucaa

SEQ ID NO: 760413 - RNA, 19 nt, Homo sapiens
  misc_RNA (1)...(19): siRNA sense strand
ggauacagaagaaccauua

SEQ ID NO: 760414 - RNA, 19 nt, Homo sapiens
  misc_RNA (1)...(19): siRNA sense strand
agaaagagcuucagagucu

SEQ ID NO: 760415 - RNA, 19 nt, Homo sapiens
  misc_RNA (1)...(19): siRNA sense strand
gcucuaugaugucagcuua

SEQ ID NO: 760416 - RNA, 19 nt, Homo sapiens
  misc_RNA (1)...(19): siRNA sense strand
ggagaucucuguucagucu

SEQ ID NO: 760417 - RNA, 19 nt, Homo sapiens
  misc_RNA (1)...(19): siRNA sense strand
caucaucccuuuaaacuca

SEQ ID NO: 760418 - RNA, 19 nt, Homo sapiens
  misc_RNA (1)...(19): siRNA sense strand
agacgaagcuucaguaucu

SEQ ID NO: 760419 - RNA, 19 nt, Homo sapiens
  misc_RNA (1)...(19): siRNA sense strand
gcugaacgcucuaugaugu

SEQ ID NO: 760420 - RNA, 19 nt, Homo sapiens
  misc_RNA (1)...(19): siRNA sense strand
gcucuaugaugucuuauga

SEQ ID NO: 760421 - RNA, 19 nt, Homo sapiens
  misc_RNA (1)...(19): siRNA sense strand
gaagaaauagugcagaaga

SEQ ID NO: 760422 - RNA, 19 nt, Homo sapiens
  misc_RNA (1)...(19): siRNA sense strand
caaaucuucugaacacaaa

SEQ ID NO: 760423 - RNA, 19 nt, Homo sapiens
  misc_RNA (1)...(19): siRNA sense strand
gauauaagccagacuugaa

SEQ ID NO: 760424 - RNA, 19 nt, Homo sapiens
  misc_RNA (1)...(19): siRNA sense strand
gaaacucuaucuucuacug

SEQ ID NO: 760425 - RNA, 19 nt, Homo sapiens
  misc_RNA (1)...(19): siRNA sense strand
gaugaagucugugcugaaa

SEQ ID NO: 760426 - RNA, 19 nt, Homo sapiens
  misc_RNA (1)...(19): siRNA sense strand
gaagucaucugagccaguu

SEQ ID NO: 760427 - RNA, 19 nt, Homo sapiens
  misc_RNA (1)...(19): siRNA sense strand
gcugagcgcucuaugaugu

SEQ ID NO: 760428 - RNA, 19 nt, Homo sapiens
  misc_RNA (1)...(19): siRNA sense strand
aaacagaucgcacagagua

SEQ ID NO: 760429 - RNA, 19 nt, Homo sapiens
  misc_RNA (1)...(19): siRNA sense strand
gaagaagaucuguaucaaa

SEQ ID NO: 760430 - RNA, 19 nt, Homo sapiens
  misc_RNA (1)...(19): siRNA sense strand
caucggagauugcagauuc

SEQ ID NO: 760431 - RNA, 19 nt, Homo sapiens
  misc_RNA (1)...(19): siRNA sense strand
ugaagcagauuuagugaga

SEQ ID NO: 760432 - RNA, 19 nt, Homo sapiens
  misc_RNA (1)...(19): siRNA sense strand
gaaagugaacaugguauaa

SEQ ID NO: 760433 - RNA, 19 nt, Homo sapiens
  misc_RNA (1)...(19): siRNA sense strand
agagcagacucaaguaaua

SEQ ID NO: 760434 - RNA, 19 nt, Homo sapiens
  misc_RNA (1)...(19): siRNA sense strand
gguagaagaaggagcuuua

SEQ ID NO: 760435 - RNA, 19 nt, Homo sapiens
  misc_RNA (1)...(19): siRNA sense strand
ccaggagucuaccaaauga

SEQ ID NO: 760436 - RNA, 19 nt, Homo sapiens
  misc_RNA (1)...(19): siRNA sense strand
gaacgucuuacaagccuua

SEQ ID NO: 760437 - RNA, 19 nt, Homo sapiens
  misc_RNA (1)...(19): siRNA sense strand
ugacuuguaugguaucuga

SEQ ID NO: 760438 - RNA, 19 nt, Homo sapiens
  misc_RNA (1)...(19): siRNA sense strand
caaagauucuggauuccuu

SEQ ID NO: 760439 - RNA, 19 nt, Homo sapiens
  misc_RNA (1)...(19): siRNA sense strand
uguagagucugcaguagua

SEQ ID NO: 760440 - RNA, 19 nt, Homo sapiens
  misc_RNA (1)...(19): siRNA sense strand
gcugaucgaucuaugaugu

SEQ ID NO: 760441 - RNA, 19 nt, Homo sapiens
  misc_RNA (1)...(19): siRNA sense strand
caucaaagaucauguuggu

SEQ ID NO: 760442 - RNA, 19 nt, Homo sapiens
  misc_RNA (1)...(19): siRNA sense strand
caucagagccuccuguuau

SEQ ID NO: 760443 - RNA, 19 nt, Homo sapiens
  misc_RNA (1)...(19): siRNA sense strand
gaagaagguuuagcagauc

SEQ ID NO: 760444 - RNA, 19 nt, Homo sapiens
  misc_RNA (1)...(19): siRNA sense strand
gaaaggaauuaaucuaucc

SEQ ID NO: 760445 - RNA, 19 nt, Homo sapiens
  misc_RNA (1)...(19): siRNA sense strand
ccaagcacaucaacaacaa

SEQ ID NO: 760446 - RNA, 19 nt, Homo sapiens
  misc_RNA (1)...(19): siRNA sense strand
uaugaacgcuccaugaugu

SEQ ID NO: 760447 - RNA, 19 nt, Homo sapiens
  misc_RNA (1)...(19): siRNA sense strand
uaugaacgcuccaugaugu

SEQ ID NO: 760448 - RNA, 19 nt, Homo sapiens
  misc_RNA (1)...(19): siRNA sense strand
cgacagcagugccugaguu

SEQ ID NO: 760449 - RNA, 19 nt, Homo sapiens
  misc_RNA (1)...(19): siRNA sense strand
agaagaagguuuagcagau

SEQ ID NO: 760450 - RNA, 19 nt, Homo sapiens
  misc_RNA (1)...(19): siRNA sense strand
cgacgaaggucuagaucug

SEQ ID NO: 760451 - RNA, 19 nt, Homo sapiens
  misc_RNA (1)...(19): siRNA sense strand
ccuuagagcuggcauugaa

SEQ ID NO: 760452 - RNA, 19 nt, Homo sapiens
  misc_RNA (1)...(19): siRNA sense strand
gaaaguaguggaggagaaa

SEQ ID NO: 760453 - RNA, 19 nt, Homo sapiens
  misc_RNA (1)...(19): siRNA sense strand
gcucagcccuaaagaaagu

SEQ ID NO: 760454 - RNA, 19 nt, Homo sapiens
  misc_RNA (1)...(19): siRNA sense strand
gcuccaugaugucagcuua

SEQ ID NO: 760455 - RNA, 19 nt, Homo sapiens
  misc_RNA (1)...(19): siRNA sense strand
caacgauggugcuggaguu

SEQ ID NO: 760456 - RNA, 19 nt, Homo sapiens
  misc_RNA (1)...(19): siRNA sense strand
gauacagaacuacgauaua

SEQ ID NO: 760457 - RNA, 19 nt, Homo sapiens
  misc_RNA (1)...(19): siRNA sense strand
agaacacccuuaagaagaa

SEQ ID NO: 760458 - RNA, 19 nt, Homo sapiens
  misc_RNA (1)...(19): siRNA sense strand
uagugaagcugacauugaa

SEQ ID NO: 760459 - RNA, 19 nt, Homo sapiens
  misc_RNA (1)...(19): siRNA sense strand
cugaugaaauucccacuaa

SEQ ID NO: 760460 - RNA, 19 nt, Homo sapiens
  misc_RNA (1)...(19): siRNA sense strand
ugaaagagggcuccagaaa

SEQ ID NO: 760461 - RNA, 19 nt, Homo sapiens
  misc_RNA (1)...(19): siRNA sense strand
ggauaguguuuauggagaa

SEQ ID NO: 760462 - RNA, 19 nt, Homo sapiens
  misc_RNA (1)...(19): siRNA sense strand
uaaugcagcugccaugugu

SEQ ID NO: 760463 - RNA, 19 nt, Homo sapiens
  misc_RNA (1)...(19): siRNA sense strand
agaucaagcuccagggaua

SEQ ID NO: 760464 - RNA, 19 nt, Homo sapiens
  misc_RNA (1)...(19): siRNA sense strand
ugaaacaaauacacccauu

SEQ ID NO: 760465 - RNA, 19 nt, Homo sapiens
  misc_RNA (1)...(19): siRNA sense strand
aaacaaauacacccauuga

SEQ ID NO: 760466 - RNA, 19 nt, Homo sapiens
  misc_RNA (1)...(19): siRNA sense strand
gcagcugaccgaucuauga

SEQ ID NO: 760467 - RNA, 19 nt, Homo sapiens
  misc_RNA (1)...(19): siRNA sense strand
ccagagccaucaaagauca

SEQ ID NO: 760468 - RNA, 19 nt, Homo sapiens
  misc_RNA (1)...(19): siRNA sense strand
ggaugaagaggaagaagaa

SEQ ID NO: 760469 - RNA, 19 nt, Homo sapiens
  misc_RNA (1)...(19): siRNA sense strand
aggaggagcuacuauagaa

SEQ ID NO: 760470 - RNA, 19 nt, Homo sapiens
  misc_RNA (1)...(19): siRNA sense strand
gaagaucuguaucaaaaga

SEQ ID NO: 760471 - RNA, 19 nt, Homo sapiens
  misc_RNA (1)...(19): siRNA sense strand
guaaguaguaugccagaaa

SEQ ID NO: 760472 - RNA, 19 nt, Homo sapiens
  misc_RNA (1)...(19): siRNA sense strand
gaaacaaauacacccauug

SEQ ID NO: 760473 - RNA, 19 nt, Homo sapiens
  misc_RNA (1)...(19): siRNA sense strand
ggucuuucguggucaguaa

SEQ ID NO: 760474 - RNA, 19 nt, Homo sapiens
  misc_RNA (1)...(19): siRNA sense strand
caaugucaguggaguauca

SEQ ID NO: 760475 - RNA, 19 nt, Homo sapiens
  misc_RNA (1)...(19): siRNA sense strand
agagacagcagaaacauuu

SEQ ID NO: 760476 - RNA, 19 nt, Homo sapiens
  misc_RNA (1)...(19): siRNA sense strand
gaaauagugcagaagauag

SEQ ID NO: 760477 - RNA, 19 nt, Homo sapiens
  misc_RNA (1)...(19): siRNA sense strand
ucaagaacacccuuaagaa

SEQ ID NO: 760478 - RNA, 19 nt, Homo sapiens
  misc_RNA (1)...(19): siRNA sense strand
guagugaagcugacauuga

SEQ ID NO: 760479 - RNA, 19 nt, Homo sapiens
  misc_RNA (1)...(19): siRNA sense strand
gcugaucguucaaugaugu

SEQ ID NO: 760480 - RNA, 19 nt, Homo sapiens
  misc_RNA (1)...(19): siRNA sense strand
gagccaagcacaucaacaa

SEQ ID NO: 760481 - RNA, 19 nt, Homo sapiens
  misc_RNA (1)...(19): siRNA sense strand
gcauuuggcccaucugaga

SEQ ID NO: 760482 - RNA, 19 nt, Homo sapiens
  misc_RNA (1)...(19): siRNA sense strand
guuaacaccuguagagucu

SEQ ID NO: 760483 - RNA, 19 nt, Homo sapiens
  misc_RNA (1)...(19): siRNA sense strand
caaagaucauguugguaga

SEQ ID NO: 760484 - RNA, 19 nt, Homo sapiens
  misc_RNA (1)...(19): siRNA sense strand
gcugaauggugaaacaaau

SEQ ID NO: 760485 - RNA, 19 nt, Homo sapiens
  misc_RNA (1)...(19): siRNA sense strand
ugaagucugugcugaaauc

SEQ ID NO: 760486 - RNA, 19 nt, Homo sapiens
  misc_RNA (1)...(19): siRNA sense strand
ggacauggaacgucuuaca

SEQ ID NO: 760487 - RNA, 19 nt, Homo sapiens
  misc_RNA (1)...(19): siRNA sense strand
aaagagacacugccugauu

SEQ ID NO: 760488 - RNA, 19 nt, Homo sapiens
  misc_RNA (1)...(19): siRNA sense strand
cagcaucuacucucaguuu

SEQ ID NO: 760489 - RNA, 19 nt, Homo sapiens
  misc_RNA (1)...(19): siRNA sense strand
gcagaaacauuugauucca

SEQ ID NO: 760490 - RNA, 19 nt, Homo sapiens
  misc_RNA (1)...(19): siRNA sense strand
cagaaacccuugugguauc

SEQ ID NO: 760491 - RNA, 19 nt, Homo sapiens
  misc_RNA (1)...(19): siRNA sense strand
gaaccauccaugacaaaga

SEQ ID NO: 760492 - RNA, 19 nt, Homo sapiens
  misc_RNA (1)...(19): siRNA sense strand
gaaggagcuuuagcauuuc

SEQ ID NO: 760493 - RNA, 19 nt, Homo sapiens
  misc_RNA (1)...(19): siRNA sense strand
aagcacagauccaagucua

SEQ ID NO: 760494 - RNA, 19 nt, Homo sapiens
  misc_RNA (1)...(19): siRNA sense strand
uaaugaagcagauuuagug

SEQ ID NO: 760495 - RNA, 19 nt, Homo sapiens
  misc_RNA (1)...(19): siRNA sense strand
gaacuaguaaggguauuga

SEQ ID NO: 760496 - RNA, 19 nt, Homo sapiens
  misc_RNA (1)...(19): siRNA sense strand
caucacauguuaugaaagg

SEQ ID NO: 760497 - RNA, 19 nt, Homo sapiens
  misc_RNA (1)...(19): siRNA sense strand
ucagaaagcuggcaaagaa

SEQ ID NO: 760498 - RNA, 19 nt, Homo sapiens
  misc_RNA (1)...(19): siRNA sense strand
gaauugauguuucucauga

SEQ ID NO: 760499 - RNA, 19 nt, Homo sapiens
  misc_RNA (1)...(19): siRNA sense strand
gaaguguccucaaauugua

SEQ ID NO: 760500 - RNA, 19 nt, Homo sapiens
  misc_RNA (1)...(19): siRNA sense strand
ggcagagccugaagaauuu

SEQ ID NO: 760501 - RNA, 19 nt, Homo sapiens
  misc_RNA (1)...(19): siRNA sense strand
agacagcaguggagaauug

SEQ ID NO: 760502 - RNA, 19 nt, Homo sapiens
  misc_RNA (1)...(19): siRNA sense strand
cgaaagaggcaaauaugaa

SEQ ID NO: 760503 - RNA, 19 nt, Homo sapiens
  misc_RNA (1)...(19): siRNA sense strand
uaugaaguguccucaaauu

SEQ ID NO: 760504 - RNA, 19 nt, Homo sapiens
  misc_RNA (1)...(19): siRNA sense strand
ugacaaaccaagaggauuu

SEQ ID NO: 760505 - RNA, 19 nt, Homo sapiens
  misc_RNA (1)...(19): siRNA sense strand
aauaugaaguguccucaaa

SEQ ID NO: 760506 - RNA, 19 nt, Homo sapiens
  misc_RNA (1)...(19): siRNA sense strand
gacagcaaaucaaagaaga

SEQ ID NO: 760507 - RNA, 19 nt, Homo sapiens
  misc_RNA (1)...(19): siRNA sense strand
ugaagaauuugucguggaa

SEQ ID NO: 760508 - RNA, 19 nt, Homo sapiens
  misc_RNA (1)...(19): siRNA sense strand
gaaagaggcaaauaugaag

SEQ ID NO: 760509 - RNA, 19 nt, Homo sapiens
  misc_RNA (1)...(19): siRNA sense strand
gaugacagcaaaucaaaga

SEQ ID NO: 760510 - RNA, 19 nt, Homo sapiens
  misc_RNA (1)...(19): siRNA sense strand
caacaaaacuacauugcaa

SEQ ID NO: 760511 - RNA, 19 nt, Homo sapiens
  misc_RNA (1)...(19): siRNA sense strand
aaacagaauggaaagagua

SEQ ID NO: 760512 - RNA, 19 nt, Homo sapiens
  misc_RNA (1)...(19): siRNA sense strand
uggaagggauuuacagaug

SEQ ID NO: 760513 - RNA, 19 nt, Homo sapiens
  misc_RNA (1)...(19): siRNA sense strand
gcgaaagaggcaaauauga

SEQ ID NO: 760514 - RNA, 19 nt, Homo sapiens
  misc_RNA (1)...(19): siRNA sense strand
aagagaugcugcugacaaa

SEQ ID NO: 760515 - RNA, 19 nt, Homo sapiens
  misc_RNA (1)...(19): siRNA sense strand
agaauugauugaagcguuu

SEQ ID NO: 760516 - RNA, 19 nt, Homo sapiens
  misc_RNA (1)...(19): siRNA sense strand
gaaauggaaagauucagau

SEQ ID NO: 760517 - RNA, 19 nt, Homo sapiens
  misc_RNA (1)...(19): siRNA sense strand
cagaagaugaagcucaaua

SEQ ID NO: 760518 - RNA, 19 nt, Homo sapiens
  misc_RNA (1)...(19): siRNA sense strand
gagacuaacuuggcauucu

SEQ ID NO: 760519 - RNA, 19 nt, Homo sapiens
  misc_RNA (1)...(19): siRNA sense strand
gauccugaaagaauaauug

SEQ ID NO: 760520 - RNA, 19 nt, Homo sapiens
  misc_RNA (1)...(19): siRNA sense strand
augggaaaguggaauauuu

SEQ ID NO: 760521 - RNA, 19 nt, Homo sapiens
  misc_RNA (1)...(19): siRNA sense strand
ugaaugggaaaguggaaua

SEQ ID NO: 760522 - RNA, 19 nt, Homo sapiens
  misc_RNA (1)...(19): siRNA sense strand
ugaaguguccucaaauugu

SEQ ID NO: 760523 - RNA, 19 nt, Homo sapiens
  misc_RNA (1)...(19): siRNA sense strand
ugaaucugaugacagcaaa

SEQ ID NO: 760524 - RNA, 19 nt, Homo sapiens
  misc_RNA (1)...(19): siRNA sense strand
cucaugaaauggaaagauu

SEQ ID NO: 760525 - RNA, 19 nt, Homo sapiens
  misc_RNA (1)...(19): siRNA sense strand
agacuaacuuggcauucuu

SEQ ID NO: 760526 - RNA, 19 nt, Homo sapiens
  misc_RNA (1)...(19): siRNA sense strand
aguacuagaucgacgugua

SEQ ID NO: 760527 - RNA, 19 nt, Homo sapiens
  misc_RNA (1)...(19): siRNA sense strand
agaagaugaagcucaauaa

SEQ ID NO: 760528 - RNA, 19 nt, Homo sapiens
  misc_RNA (1)...(19): siRNA sense strand
gaagggauuuacagaugcu

SEQ ID NO: 760529 - RNA, 19 nt, Homo sapiens
  misc_RNA (1)...(19): siRNA sense strand
aaagagaugcugcugacaa

SEQ ID NO: 760530 - RNA, 19 nt, Homo sapiens
  misc_RNA (1)...(19): siRNA sense strand
cagcaaaucaaagaagaaa

SEQ ID NO: 760531 - RNA, 19 nt, Homo sapiens
  misc_RNA (1)...(19): siRNA sense strand
uuacagaugcugacaauac

SEQ ID NO: 760532 - RNA, 19 nt, Homo sapiens
  misc_RNA (1)...(19): siRNA sense strand
gaaguggaagggauuuaca

SEQ ID NO: 760533 - RNA, 19 nt, Homo sapiens
  misc_RNA (1)...(19): siRNA sense strand
ugauugaagcguuucuuaa

SEQ ID NO: 760534 - RNA, 19 nt, Homo sapiens
  misc_RNA (1)...(19): siRNA sense strand
aagcguuucuuaacucuca

SEQ ID NO: 760535 - RNA, 19 nt, Homo sapiens
  misc_RNA (1)...(19): siRNA sense strand
uaucugacagugaaucuga

SEQ ID NO: 760536 - RNA, 19 nt, Homo sapiens
  misc_RNA (1)...(19): siRNA sense strand
gagagacuaacuuggcauu

SEQ ID NO: 760537 - RNA, 19 nt, Homo sapiens
  misc_RNA (1)...(19): siRNA sense strand
gaaugggaaaguggaauau

SEQ ID NO: 760538 - RNA, 19 nt, Homo sapiens
  misc_RNA (1)...(19): siRNA sense strand
ggcgaaagaggcaaauaug

SEQ ID NO: 760539 - RNA, 19 nt, Homo sapiens
  misc_RNA (1)...(19): siRNA sense strand
gauugaagcguuucuuaac

SEQ ID NO: 760540 - RNA, 19 nt, Homo sapiens
  misc_RNA (1)...(19): siRNA sense strand
gacagugaaucugaugaca

SEQ ID NO: 760541 - RNA, 19 nt, Homo sapiens
  misc_RNA (1)...(19): siRNA sense strand
uuuagauuguccagaauug

SEQ ID NO: 760542 - RNA, 19 nt, Homo sapiens
  misc_RNA (1)...(19): siRNA sense strand
uccagaagaugaagcucaa

SEQ ID NO: 760543 - RNA, 19 nt, Homo sapiens
  misc_RNA (1)...(19): siRNA sense strand
cuagaucgacguguaguga

SEQ ID NO: 760544 - RNA, 19 nt, Homo sapiens
  misc_RNA (1)...(19): siRNA sense strand
guacuagaucgacguguag

SEQ ID NO: 760545 - RNA, 19 nt, Homo sapiens
  misc_RNA (1)...(19): siRNA sense strand
cagaugcugacaauacuug

SEQ ID NO: 760546 - RNA, 19 nt, Homo sapiens
  misc_RNA (1)...(19): siRNA sense strand
cagaaagcuggcaaagaaa

SEQ ID NO: 760547 - RNA, 19 nt, Homo sapiens
  misc_RNA (1)...(19): siRNA sense strand
gcaguggagaauugauguu

SEQ ID NO: 760548 - RNA, 19 nt, Homo sapiens
  misc_RNA (1)...(19): siRNA sense strand
uugauugaagcguuucuua

SEQ ID NO: 760549 - RNA, 19 nt, Homo sapiens
  misc_RNA (1)...(19): siRNA sense strand
ggauuugccagaggucuug

SEQ ID NO: 760550 - RNA, 19 nt, Homo sapiens
  misc_RNA (1)...(19): siRNA sense strand
gcaaaucaaagaagaaaag

SEQ ID NO: 760551 - RNA, 19 nt, Homo sapiens
  misc_RNA (1)...(19): siRNA sense strand
ugacagcaaaucaaagaag

SEQ ID NO: 760552 - RNA, 19 nt, Homo sapiens
  misc_RNA (1)...(19): siRNA sense strand
uggcgaaagaggcaaauau

SEQ ID NO: 760553 - RNA, 19 nt, Homo sapiens
  misc_RNA (1)...(19): siRNA sense strand
agaucgacguguagugaau

SEQ ID NO: 760554 - RNA, 19 nt, Homo sapiens
  misc_RNA (1)...(19): siRNA sense strand
gaagaauuugucguggaaa

SEQ ID NO: 760555 - RNA, 19 nt, Homo sapiens
  misc_RNA (1)...(19): siRNA sense strand
aauggaaagauucagauga

SEQ ID NO: 760556 - RNA, 19 nt, Homo sapiens
  misc_RNA (1)...(19): siRNA sense strand
caguggagaauugauguuu

SEQ ID NO: 760557 - RNA, 19 nt, Homo sapiens
  misc_RNA (1)...(19): siRNA sense strand
gcugacaaaccaagaggau

SEQ ID NO: 760558 - RNA, 19 nt, Homo sapiens
  misc_RNA (1)...(19): siRNA sense strand
ugaagcguuucuuaacucu

SEQ ID NO: 760559 - RNA, 19 nt, Homo sapiens
  misc_RNA (1)...(19): siRNA sense strand
uacagaugcugacaauacu

SEQ ID NO: 760560 - RNA, 19 nt, Homo sapiens
  misc_RNA (1)...(19): siRNA sense strand
cagcaguggagaauugaug

SEQ ID NO: 760561 - RNA, 19 nt, Homo sapiens
  misc_RNA (1)...(19): siRNA sense strand
ggaaccugaagaaaauuua

SEQ ID NO: 760562 - RNA, 19 nt, Homo sapiens
  misc_RNA (1)...(19): siRNA sense strand
auggaaagauucagaugag

SEQ ID NO: 760563 - RNA, 19 nt, Homo sapiens
  misc_RNA (1)...(19): siRNA sense strand
uugaagcguuucuuaacuc

SEQ ID NO: 760564 - RNA, 19 nt, Homo sapiens
  misc_RNA (1)...(19): siRNA sense strand
uguagugaaugggaaagug

SEQ ID NO: 760565 - RNA, 19 nt, Homo sapiens
  misc_RNA (1)...(19): siRNA sense strand
gaucgacguguagugaaug

SEQ ID NO: 760566 - RNA, 19 nt, Homo sapiens
  misc_RNA (1)...(19): siRNA sense strand
ucagaaagcuggcaaagaa

SEQ ID NO: 760567 - RNA, 19 nt, Homo sapiens
  misc_RNA (1)...(19): siRNA sense strand
gaauugauguuucucauga

SEQ ID NO: 760568 - RNA, 19 nt, Homo sapiens
  misc_RNA (1)...(19): siRNA sense strand
gaaguguccucaaauugua

SEQ ID NO: 760569 - RNA, 19 nt, Homo sapiens
  misc_RNA (1)...(19): siRNA sense strand
ggcagagccugaagaauuu

SEQ ID NO: 760570 - RNA, 19 nt, Homo sapiens
  misc_RNA (1)...(19): siRNA sense strand
agacagcaguggagaauug

SEQ ID NO: 760571 - RNA, 19 nt, Homo sapiens
  misc_RNA (1)...(19): siRNA sense strand
cgaaagaggcaaauaugaa

SEQ ID NO: 760572 - RNA, 19 nt, Homo sapiens
  misc_RNA (1)...(19): siRNA sense strand
uaugaaguguccucaaauu

SEQ ID NO: 760573 - RNA, 19 nt, Homo sapiens
  misc_RNA (1)...(19): siRNA sense strand
ugacaaaccaagaggauuu

SEQ ID NO: 760574 - RNA, 19 nt, Homo sapiens
  misc_RNA (1)...(19): siRNA sense strand
aauaugaaguguccucaaa

SEQ ID NO: 760575 - RNA, 19 nt, Homo sapiens
  misc_RNA (1)...(19): siRNA sense strand
gacagcaaaucaaagaaga

SEQ ID NO: 760576 - RNA, 19 nt, Homo sapiens
  misc_RNA (1)...(19): siRNA sense strand
ugaagaauuugucguggaa

SEQ ID NO: 760577 - RNA, 19 nt, Homo sapiens
  misc_RNA (1)...(19): siRNA sense strand
gaaagaggcaaauaugaag

SEQ ID NO: 760578 - RNA, 19 nt, Homo sapiens
  misc_RNA (1)...(19): siRNA sense strand
gaugacagcaaaucaaaga

SEQ ID NO: 760579 - RNA, 19 nt, Homo sapiens
  misc_RNA (1)...(19): siRNA sense strand
caacaaaacuacauugcaa

SEQ ID NO: 760580 - RNA, 19 nt, Homo sapiens
  misc_RNA (1)...(19): siRNA sense strand
aaacagaauggaaagagua

SEQ ID NO: 760581 - RNA, 19 nt, Homo sapiens
  misc_RNA (1)...(19): siRNA sense strand
uggaagggauuuacagaug

SEQ ID NO: 760582 - RNA, 19 nt, Homo sapiens
  misc_RNA (1)...(19): siRNA sense strand
gcgaaagaggcaaauauga

SEQ ID NO: 760583 - RNA, 19 nt, Homo sapiens
  misc_RNA (1)...(19): siRNA sense strand
aagagaugcugcugacaaa

SEQ ID NO: 760584 - RNA, 19 nt, Homo sapiens
  misc_RNA (1)...(19): siRNA sense strand
agaauugauugaagcguuu

SEQ ID NO: 760585 - RNA, 19 nt, Homo sapiens
  misc_RNA (1)...(19): siRNA sense strand
gaaauggaaagauucagau

SEQ ID NO: 760586 - RNA, 19 nt, Homo sapiens
  misc_RNA (1)...(19): siRNA sense strand
cagaagaugaagcucaaua

SEQ ID NO: 760587 - RNA, 19 nt, Homo sapiens
  misc_RNA (1)...(19): siRNA sense strand
gagacuaacuuggcauucu

SEQ ID NO: 760588 - RNA, 19 nt, Homo sapiens
  misc_RNA (1)...(19): siRNA sense strand
gauccugaaagaauaauug

SEQ ID NO: 760589 - RNA, 19 nt, Homo sapiens
  misc_RNA (1)...(19): siRNA sense strand
augggaaaguggaauauuu

SEQ ID NO: 760590 - RNA, 19 nt, Homo sapiens
  misc_RNA (1)...(19): siRNA sense strand
ugaaugggaaaguggaaua

SEQ ID NO: 760591 - RNA, 19 nt, Homo sapiens
  misc_RNA (1)...(19): siRNA sense strand
ugaaguguccucaaauugu

SEQ ID NO: 760592 - RNA, 19 nt, Homo sapiens
  misc_RNA (1)...(19): siRNA sense strand
ugaaucugaugacagcaaa

SEQ ID NO: 760593 - RNA, 19 nt, Homo sapiens
  misc_RNA (1)...(19): siRNA sense strand
cucaugaaauggaaagauu

SEQ ID NO: 760594 - RNA, 19 nt, Homo sapiens
  misc_RNA (1)...(19): siRNA sense strand
agacuaacuuggcauucuu

SEQ ID NO: 760595 - RNA, 19 nt, Homo sapiens
  misc_RNA (1)...(19): siRNA sense strand
aguacuagaucgacgugua

SEQ ID NO: 760596 - RNA, 19 nt, Homo sapiens
  misc_RNA (1)...(19): siRNA sense strand
agaagaugaagcucaauaa

SEQ ID NO: 760597 - RNA, 19 nt, Homo sapiens
  misc_RNA (1)...(19): siRNA sense strand
gaagggauuuacagaugcu

SEQ ID NO: 760598 - RNA, 19 nt, Homo sapiens
  misc_RNA (1)...(19): siRNA sense strand
aaagagaugcugcugacaa

SEQ ID NO: 760599 - RNA, 19 nt, Homo sapiens
  misc_RNA (1)...(19): siRNA sense strand
cagcaaaucaaagaagaaa

SEQ ID NO: 760600 - RNA, 19 nt, Homo sapiens
  misc_RNA (1)...(19): siRNA sense strand
uuacagaugcugacaauac

SEQ ID NO: 760601 - RNA, 19 nt, Homo sapiens
  misc_RNA (1)...(19): siRNA sense strand
gaaguggaagggauuuaca

SEQ ID NO: 760602 - RNA, 19 nt, Homo sapiens
  misc_RNA (1)...(19): siRNA sense strand
ugauugaagcguuucuuaa

SEQ ID NO: 760603 - RNA, 19 nt, Homo sapiens
  misc_RNA (1)...(19): siRNA sense strand
aagcguuucuuaacucuca

SEQ ID NO: 760604 - RNA, 19 nt, Homo sapiens
  misc_RNA (1)...(19): siRNA sense strand
uaucugacagugaaucuga

SEQ ID NO: 760605 - RNA, 19 nt, Homo sapiens
  misc_RNA (1)...(19): siRNA sense strand
gagagacuaacuuggcauu

SEQ ID NO: 760606 - RNA, 19 nt, Homo sapiens
  misc_RNA (1)...(19): siRNA sense strand
gaaugggaaaguggaauau

SEQ ID NO: 760607 - RNA, 19 nt, Homo sapiens
  misc_RNA (1)...(19): siRNA sense strand
ggcgaaagaggcaaauaug

SEQ ID NO: 760608 - RNA, 19 nt, Homo sapiens
  misc_RNA (1)...(19): siRNA sense strand
gauugaagcguuucuuaac

SEQ ID NO: 760609 - RNA, 19 nt, Homo sapiens
  misc_RNA (1)...(19): siRNA sense strand
gacagugaaucugaugaca

SEQ ID NO: 760610 - RNA, 19 nt, Homo sapiens
  misc_RNA (1)...(19): siRNA sense strand
uuuagauuguccagaauug

SEQ ID NO: 760611 - RNA, 19 nt, Homo sapiens
  misc_RNA (1)...(19): siRNA sense strand
uccagaagaugaagcucaa

SEQ ID NO: 760612 - RNA, 19 nt, Homo sapiens
  misc_RNA (1)...(19): siRNA sense strand
cuagaucgacguguaguga

SEQ ID NO: 760613 - RNA, 19 nt, Homo sapiens
  misc_RNA (1)...(19): siRNA sense strand
guacuagaucgacguguag

SEQ ID NO: 760614 - RNA, 19 nt, Homo sapiens
  misc_RNA (1)...(19): siRNA sense strand
cagaugcugacaauacuug

SEQ ID NO: 760615 - RNA, 19 nt, Homo sapiens
  misc_RNA (1)...(19): siRNA sense strand
cagaaagcuggcaaagaaa

SEQ ID NO: 760616 - RNA, 19 nt, Homo sapiens
  misc_RNA (1)...(19): siRNA sense strand
gcaguggagaauugauguu

SEQ ID NO: 760617 - RNA, 19 nt, Homo sapiens
  misc_RNA (1)...(19): siRNA sense strand
uugauugaagcguuucuua

SEQ ID NO: 760618 - RNA, 19 nt, Homo sapiens
  misc_RNA (1)...(19): siRNA sense strand
ggauuugccagaggucuug

SEQ ID NO: 760619 - RNA, 19 nt, Homo sapiens
  misc_RNA (1)...(19): siRNA sense strand
gcaaaucaaagaagaaaag

SEQ ID NO: 760620 - RNA, 19 nt, Homo sapiens
  misc_RNA (1)...(19): siRNA sense strand
ugacagcaaaucaaagaag

SEQ ID NO: 760621 - RNA, 19 nt, Homo sapiens
  misc_RNA (1)...(19): siRNA sense strand
uggcgaaagaggcaaauau

SEQ ID NO: 760622 - RNA, 19 nt, Homo sapiens
  misc_RNA (1)...(19): siRNA sense strand
agaucgacguguagugaau

SEQ ID NO: 760623 - RNA, 19 nt, Homo sapiens
  misc_RNA (1)...(19): siRNA sense strand
gaagaauuugucguggaaa

SEQ ID NO: 760624 - RNA, 19 nt, Homo sapiens
  misc_RNA (1)...(19): siRNA sense strand
aauggaaagauucagauga

SEQ ID NO: 760625 - RNA, 19 nt, Homo sapiens
  misc_RNA (1)...(19): siRNA sense strand
caguggagaauugauguuu

SEQ ID NO: 760626 - RNA, 19 nt, Homo sapiens
  misc_RNA (1)...(19): siRNA sense strand
gcugacaaaccaagaggau

SEQ ID NO: 760627 - RNA, 19 nt, Homo sapiens
  misc_RNA (1)...(19): siRNA sense strand
ugaagcguuucuuaacucu

SEQ ID NO: 760628 - RNA, 19 nt, Homo sapiens
  misc_RNA (1)...(19): siRNA sense strand
uacagaugcugacaauacu

SEQ ID NO: 760629 - RNA, 19 nt, Homo sapiens
  misc_RNA (1)...(19): siRNA sense strand
cagcaguggagaauugaug

SEQ ID NO: 760630 - RNA, 19 nt, Homo sapiens
  misc_RNA (1)...(19): siRNA sense strand
ggaaccugaagaaaauuua

SEQ ID NO: 760631 - RNA, 19 nt, Homo sapiens
  misc_RNA (1)...(19): siRNA sense strand
auggaaagauucagaugag

SEQ ID NO: 760632 - RNA, 19 nt, Homo sapiens
  misc_RNA (1)...(19): siRNA sense strand
uugaagcguuucuuaacuc

SEQ ID NO: 760633 - RNA, 19 nt, Homo sapiens
  misc_RNA (1)...(19): siRNA sense strand
uguagugaaugggaaagug

SEQ ID NO: 760634 - RNA, 19 nt, Homo sapiens
  misc_RNA (1)...(19): siRNA sense strand
gaucgacguguagugaaug

SEQ ID NO: 760635 - RNA, 19 nt, Homo sapiens
  misc_RNA (1)...(19): siRNA sense strand
ggaaagaucccuauggaaa

SEQ ID NO: 760636 - RNA, 19 nt, Homo sapiens
  misc_RNA (1)...(19): siRNA sense strand
gaggaaagaucccuaugga

SEQ ID NO: 760637 - RNA, 19 nt, Homo sapiens
  misc_RNA (1)...(19): siRNA sense strand
caggagaucauuaagauua

SEQ ID NO: 760638 - RNA, 19 nt, Homo sapiens
  misc_RNA (1)...(19): siRNA sense strand
gcucggauaugucgacuuc

SEQ ID NO: 760639 - RNA, 19 nt, Homo sapiens
  misc_RNA (1)...(19): siRNA sense strand
gaaaacaggagaucauuaa

SEQ ID NO: 760640 - RNA, 19 nt, Homo sapiens
  misc_RNA (1)...(19): siRNA sense strand
ggagcuguuugaagacauu

SEQ ID NO: 760641 - RNA, 19 nt, Homo sapiens
  misc_RNA (1)...(19): siRNA sense strand
guacuacagugaagcagau

SEQ ID NO: 760642 - RNA, 19 nt, Homo sapiens
  misc_RNA (1)...(19): siRNA sense strand
gaacgugaggcucggauau

SEQ ID NO: 760643 - RNA, 19 nt, Homo sapiens
  misc_RNA (1)...(19): siRNA sense strand
uuacagaacagcugauuga

SEQ ID NO: 760644 - RNA, 19 nt, Homo sapiens
  misc_RNA (1)...(19): siRNA sense strand
guacacaacgcuacagaug

SEQ ID NO: 760645 - RNA, 19 nt, Homo sapiens
  misc_RNA (1)...(19): siRNA sense strand
gcagaugccagccacugua

SEQ ID NO: 760646 - RNA, 19 nt, Homo sapiens
  misc_RNA (1)...(19): siRNA sense strand
ccgucaagcuggcugauuu

SEQ ID NO: 760647 - RNA, 19 nt, Homo sapiens
  misc_RNA (1)...(19): siRNA sense strand
gauggcaaguggcucaaug

SEQ ID NO: 760648 - RNA, 19 nt, Homo sapiens
  misc_RNA (1)...(19): siRNA sense strand
gagagcagcaggcuugguu

SEQ ID NO: 760649 - RNA, 19 nt, Homo sapiens
  misc_RNA (1)...(19): siRNA sense strand
aacaggagaucauuaagau

SEQ ID NO: 760650 - RNA, 19 nt, Homo sapiens
  misc_RNA (1)...(19): siRNA sense strand
aaacaggagaucauuaaga

SEQ ID NO: 760651 - RNA, 19 nt, Homo sapiens
  misc_RNA (1)...(19): siRNA sense strand
gcaagggugcuuucucugu

SEQ ID NO: 760652 - RNA, 19 nt, Homo sapiens
  misc_RNA (1)...(19): siRNA sense strand
ccagagaguacuacaguga

SEQ ID NO: 760653 - RNA, 19 nt, Homo sapiens
  misc_RNA (1)...(19): siRNA sense strand
gaacuugaucaaccagaug

SEQ ID NO: 760654 - RNA, 19 nt, Homo sapiens
  misc_RNA (1)...(19): siRNA sense strand
gaacagcaagccuauccau

SEQ ID NO: 760655 - RNA, 19 nt, Homo sapiens
  misc_RNA (1)...(19): siRNA sense strand
ggagaguguuaaccacauc

SEQ ID NO: 760656 - RNA, 19 nt, Homo sapiens
  misc_RNA (1)...(19): siRNA sense strand
agaaucuccuguccaagaa

SEQ ID NO: 760657 - RNA, 19 nt, Homo sapiens
  misc_RNA (1)...(19): siRNA sense strand
gaaagaucccuauggaaaa

SEQ ID NO: 760658 - RNA, 19 nt, Homo sapiens
  misc_RNA (1)...(19): siRNA sense strand
cagcaggcuugguuugguu

SEQ ID NO: 760659 - RNA, 19 nt, Homo sapiens
  misc_RNA (1)...(19): siRNA sense strand
ccaaaagccuauugaacaa

SEQ ID NO: 760660 - RNA, 19 nt, Homo sapiens
  misc_RNA (1)...(19): siRNA sense strand
ucugaaacauccaaacauc

SEQ ID NO: 760661 - RNA, 19 nt, Homo sapiens
  misc_RNA (1)...(19): siRNA sense strand
caacaccaccacagaagau

SEQ ID NO: 760662 - RNA, 19 nt, Homo sapiens
  misc_RNA (1)...(19): siRNA sense strand
gcaacaccaccacagaaga

SEQ ID NO: 760663 - RNA, 19 nt, Homo sapiens
  misc_RNA (1)...(19): siRNA sense strand
gaccauaaacccagcaaag

SEQ ID NO: 760664 - RNA, 19 nt, Homo sapiens
  misc_RNA (1)...(19): siRNA sense strand
gcggggagcuguuugaaga

SEQ ID NO: 760665 - RNA, 19 nt, Homo sapiens
  misc_RNA (1)...(19): siRNA sense strand
gcgccuccaugacaguauu

SEQ ID NO: 760666 - RNA, 19 nt, Homo sapiens
  misc_RNA (1)...(19): siRNA sense strand
gcaccagccagucagaaga

SEQ ID NO: 760667 - RNA, 19 nt, Homo sapiens
  misc_RNA (1)...(19): siRNA sense strand
aaccagaugcugaccauaa

SEQ ID NO: 760668 - RNA, 19 nt, Homo sapiens
  misc_RNA (1)...(19): siRNA sense strand
aggagacuguggaguguuu

SEQ ID NO: 760669 - RNA, 19 nt, Homo sapiens
  misc_RNA (1)...(19): siRNA sense strand
ggagaucauuaagauuaca

SEQ ID NO: 760670 - RNA, 19 nt, Homo sapiens
  misc_RNA (1)...(19): siRNA sense strand
uaugucgacuucugaaaca

SEQ ID NO: 760671 - RNA, 19 nt, Homo sapiens
  misc_RNA (1)...(19): siRNA sense strand
ccaagaacagcaagccuau

SEQ ID NO: 760672 - RNA, 19 nt, Homo sapiens
  misc_RNA (1)...(19): siRNA sense strand
gaaaaccuguggauaucug

SEQ ID NO: 760673 - RNA, 19 nt, Homo sapiens
  misc_RNA (1)...(19): siRNA sense strand
ccugaggucuugaggaaag

SEQ ID NO: 760674 - RNA, 19 nt, Homo sapiens
  misc_RNA (1)...(19): siRNA sense strand
gcagcaggcuugguuuggu

SEQ ID NO: 760675 - RNA, 19 nt, Homo sapiens
  misc_RNA (1)...(19): siRNA sense strand
gagcagcaggcuugguuug

SEQ ID NO: 760676 - RNA, 19 nt, Homo sapiens
  misc_RNA (1)...(19): siRNA sense strand
ccgcaggugugugaagaaa

SEQ ID NO: 760677 - RNA, 19 nt, Homo sapiens
  misc_RNA (1)...(19): siRNA sense strand
gggaugaggaucagcacaa

SEQ ID NO: 760678 - RNA, 19 nt, Homo sapiens
  misc_RNA (1)...(19): siRNA sense strand
ggaugaggaucagcacaag

SEQ ID NO: 760679 - RNA, 19 nt, Homo sapiens
  misc_RNA (1)...(19): siRNA sense strand
gauaugucgacuucugaaa

SEQ ID NO: 760680 - RNA, 19 nt, Homo sapiens
  misc_RNA (1)...(19): siRNA sense strand
gccagccacuguauacauc

SEQ ID NO: 760681 - RNA, 19 nt, Homo sapiens
  misc_RNA (1)...(19): siRNA sense strand
uggcaagggugcuuucucu

SEQ ID NO: 760682 - RNA, 19 nt, Homo sapiens
  misc_RNA (1)...(19): siRNA sense strand
gauuucccaucaccagaau

SEQ ID NO: 760683 - RNA, 19 nt, Homo sapiens
  misc_RNA (1)...(19): siRNA sense strand
ucaggagacuguggagugu

SEQ ID NO: 760684 - RNA, 19 nt, Homo sapiens
  misc_RNA (1)...(19): siRNA sense strand
accagaugcugaccauaaa

SEQ ID NO: 760685 - RNA, 19 nt, Homo sapiens
  misc_RNA (1)...(19): siRNA sense strand
ggauaugucgacuucugaa

SEQ ID NO: 760686 - RNA, 19 nt, Homo sapiens
  misc_RNA (1)...(19): siRNA sense strand
uucacuaccucguguuuga

SEQ ID NO: 760687 - RNA, 19 nt, Homo sapiens
  misc_RNA (1)...(19): siRNA sense strand
ucaaccagaugcugaccau

SEQ ID NO: 760688 - RNA, 19 nt, Homo sapiens
  misc_RNA (1)...(19): siRNA sense strand
ggccagagaguacuacagu

SEQ ID NO: 760689 - RNA, 19 nt, Homo sapiens
  misc_RNA (1)...(19): siRNA sense strand
ggcucaauguccacuauca

SEQ ID NO: 760690 - RNA, 19 nt, Homo sapiens
  misc_RNA (1)...(19): siRNA sense strand
gauuacagaacagcugauu

SEQ ID NO: 760691 - RNA, 19 nt, Homo sapiens
  misc_RNA (1)...(19): siRNA sense strand
aucaagggcuccacagaga

SEQ ID NO: 760692 - RNA, 19 nt, Homo sapiens
  misc_RNA (1)...(19): siRNA sense strand
ggaucaagggcuccacaga

SEQ ID NO: 760693 - RNA, 19 nt, Homo sapiens
  misc_RNA (1)...(19): siRNA sense strand
aaucaucaauaccaagaag

SEQ ID NO: 760694 - RNA, 19 nt, Homo sapiens
  misc_RNA (1)...(19): siRNA sense strand
gggaucaccagaaacuaga

SEQ ID NO: 760695 - RNA, 19 nt, Homo sapiens
  misc_RNA (1)...(19): siRNA sense strand
cagcgugcaucgccuacau

SEQ ID NO: 760696 - RNA, 19 nt, Homo sapiens
  misc_RNA (1)...(19): siRNA sense strand
ccaugacaguauuucugaa

SEQ ID NO: 760697 - RNA, 19 nt, Homo sapiens
  misc_RNA (1)...(19): siRNA sense strand
ccucguguuugaccuuguu

SEQ ID NO: 760698 - RNA, 19 nt, Homo sapiens
  misc_RNA (1)...(19): siRNA sense strand
ucggauaugucgacuucug

SEQ ID NO: 760699 - RNA, 19 nt, Homo sapiens
  misc_RNA (1)...(19): siRNA sense strand
cgaaaacaggagaucauua

SEQ ID NO: 760700 - RNA, 19 nt, Homo sapiens
  misc_RNA (1)...(19): siRNA sense strand
ucaucaauaccaagaaguu

SEQ ID NO: 760701 - RNA, 19 nt, Homo sapiens
  misc_RNA (1)...(19): siRNA sense strand
gccaaaagccuauugaaca

SEQ ID NO: 760702 - RNA, 19 nt, Homo sapiens
  misc_RNA (1)...(19): siRNA sense strand
gaugccagccacuguauac

SEQ ID NO: 760703 - RNA, 19 nt, Homo sapiens
  misc_RNA (1)...(19): siRNA sense strand
agaacuugaucaaccagau

SEQ ID NO: 760704 - RNA, 19 nt, Homo sapiens
  misc_RNA (1)...(19): siRNA sense strand
acagcaagccuauccauac

SEQ ID NO: 760705 - RNA, 19 nt, Homo sapiens
  misc_RNA (1)...(19): siRNA sense strand
caucaacaauggggacuuu

SEQ ID NO: 760706 - RNA, 19 nt, Homo sapiens
  misc_RNA (1)...(19): siRNA sense strand
agagaguacuacagugaag

SEQ ID NO: 760707 - RNA, 19 nt, Homo sapiens
  misc_RNA (1)...(19): siRNA sense strand
cagagaguacuacagugaa

SEQ ID NO: 760708 - RNA, 19 nt, Homo sapiens
  misc_RNA (1)...(19): siRNA sense strand
caucaauaccaagaaguug

SEQ ID NO: 760709 - RNA, 19 nt, Homo sapiens
  misc_RNA (1)...(19): siRNA sense strand
guccgcaggugugugaaga

SEQ ID NO: 760710 - RNA, 19 nt, Homo sapiens
  misc_RNA (1)...(19): siRNA sense strand
gcaggugugugaagaaaac

SEQ ID NO: 760711 - RNA, 19 nt, Homo sapiens
  misc_RNA (1)...(19): siRNA sense strand
uuugaggccuacacgaaga

SEQ ID NO: 760712 - RNA, 19 nt, Homo sapiens
  misc_RNA (1)...(19): siRNA sense strand
ggacacgguaacuccugaa

SEQ ID NO: 760713 - RNA, 19 nt, Homo sapiens
  misc_RNA (1)...(19): siRNA sense strand
ccagaaugggacacgguaa

SEQ ID NO: 760714 - RNA, 19 nt, Homo sapiens
  misc_RNA (1)...(19): siRNA sense strand
acauccgccucacccagua

SEQ ID NO: 760715 - RNA, 19 nt, Homo sapiens
  misc_RNA (1)...(19): siRNA sense strand
ugaaacauccaaacaucgu

SEQ ID NO: 760716 - RNA, 19 nt, Homo sapiens
  misc_RNA (1)...(19): siRNA sense strand
gcugcaacaccaccacaga

SEQ ID NO: 760717 - RNA, 19 nt, Homo sapiens
  misc_RNA (1)...(19): siRNA sense strand
aaaagccuauugaacaaga

SEQ ID NO: 760718 - RNA, 19 nt, Homo sapiens
  misc_RNA (1)...(19): siRNA sense strand
ugaggaaagaucccuaugg

SEQ ID NO: 760719 - RNA, 19 nt, Homo sapiens
  misc_RNA (1)...(19): siRNA sense strand
ccuacacgaagauuuguga

SEQ ID NO: 760720 - RNA, 19 nt, Homo sapiens
  misc_RNA (1)...(19): siRNA sense strand
ggaaagaucccuauggaaa

SEQ ID NO: 760721 - RNA, 19 nt, Homo sapiens
  misc_RNA (1)...(19): siRNA sense strand
gaggaaagaucccuaugga

SEQ ID NO: 760722 - RNA, 19 nt, Homo sapiens
  misc_RNA (1)...(19): siRNA sense strand
caggagaucauuaagauua

SEQ ID NO: 760723 - RNA, 19 nt, Homo sapiens
  misc_RNA (1)...(19): siRNA sense strand
gcucggauaugucgacuuc

SEQ ID NO: 760724 - RNA, 19 nt, Homo sapiens
  misc_RNA (1)...(19): siRNA sense strand
gaaaacaggagaucauuaa

SEQ ID NO: 760725 - RNA, 19 nt, Homo sapiens
  misc_RNA (1)...(19): siRNA sense strand
ggagcuguuugaagacauu

SEQ ID NO: 760726 - RNA, 19 nt, Homo sapiens
  misc_RNA (1)...(19): siRNA sense strand
guacuacagugaagcagau

SEQ ID NO: 760727 - RNA, 19 nt, Homo sapiens
  misc_RNA (1)...(19): siRNA sense strand
gaacgugaggcucggauau

SEQ ID NO: 760728 - RNA, 19 nt, Homo sapiens
  misc_RNA (1)...(19): siRNA sense strand
uuacagaacagcugauuga

SEQ ID NO: 760729 - RNA, 19 nt, Homo sapiens
  misc_RNA (1)...(19): siRNA sense strand
guacacaacgcuacagaug

SEQ ID NO: 760730 - RNA, 19 nt, Homo sapiens
  misc_RNA (1)...(19): siRNA sense strand
gcagaugccagccacugua

SEQ ID NO: 760731 - RNA, 19 nt, Homo sapiens
  misc_RNA (1)...(19): siRNA sense strand
ccgucaagcuggcugauuu

SEQ ID NO: 760732 - RNA, 19 nt, Homo sapiens
  misc_RNA (1)...(19): siRNA sense strand
gauggcaaguggcucaaug

SEQ ID NO: 760733 - RNA, 19 nt, Homo sapiens
  misc_RNA (1)...(19): siRNA sense strand
gagagcagcaggcuugguu

SEQ ID NO: 760734 - RNA, 19 nt, Homo sapiens
  misc_RNA (1)...(19): siRNA sense strand
aacaggagaucauuaagau

SEQ ID NO: 760735 - RNA, 19 nt, Homo sapiens
  misc_RNA (1)...(19): siRNA sense strand
aaacaggagaucauuaaga

SEQ ID NO: 760736 - RNA, 19 nt, Homo sapiens
  misc_RNA (1)...(19): siRNA sense strand
gcaagggugcuuucucugu

SEQ ID NO: 760737 - RNA, 19 nt, Homo sapiens
  misc_RNA (1)...(19): siRNA sense strand
ccagagaguacuacaguga

SEQ ID NO: 760738 - RNA, 19 nt, Homo sapiens
  misc_RNA (1)...(19): siRNA sense strand
gaacuugaucaaccagaug

SEQ ID NO: 760739 - RNA, 19 nt, Homo sapiens
  misc_RNA (1)...(19): siRNA sense strand
gaacagcaagccuauccau

SEQ ID NO: 760740 - RNA, 19 nt, Homo sapiens
  misc_RNA (1)...(19): siRNA sense strand
ggagaguguuaaccacauc

SEQ ID NO: 760741 - RNA, 19 nt, Homo sapiens
  misc_RNA (1)...(19): siRNA sense strand
agaaucuccuguccaagaa

SEQ ID NO: 760742 - RNA, 19 nt, Homo sapiens
  misc_RNA (1)...(19): siRNA sense strand
gaaagaucccuauggaaaa

SEQ ID NO: 760743 - RNA, 19 nt, Homo sapiens
  misc_RNA (1)...(19): siRNA sense strand
cagcaggcuugguuugguu

SEQ ID NO: 760744 - RNA, 19 nt, Homo sapiens
  misc_RNA (1)...(19): siRNA sense strand
ccaaaagccuauugaacaa

SEQ ID NO: 760745 - RNA, 19 nt, Homo sapiens
  misc_RNA (1)...(19): siRNA sense strand
ucugaaacauccaaacauc

SEQ ID NO: 760746 - RNA, 19 nt, Homo sapiens
  misc_RNA (1)...(19): siRNA sense strand
caacaccaccacagaagau

SEQ ID NO: 760747 - RNA, 19 nt, Homo sapiens
  misc_RNA (1)...(19): siRNA sense strand
gcaacaccaccacagaaga

SEQ ID NO: 760748 - RNA, 19 nt, Homo sapiens
  misc_RNA (1)...(19): siRNA sense strand
gaccauaaacccagcaaag

SEQ ID NO: 760749 - RNA, 19 nt, Homo sapiens
  misc_RNA (1)...(19): siRNA sense strand
gcggggagcuguuugaaga

SEQ ID NO: 760750 - RNA, 19 nt, Homo sapiens
  misc_RNA (1)...(19): siRNA sense strand
gcgccuccaugacaguauu

SEQ ID NO: 760751 - RNA, 19 nt, Homo sapiens
  misc_RNA (1)...(19): siRNA sense strand
gcaccagccagucagaaga

SEQ ID NO: 760752 - RNA, 19 nt, Homo sapiens
  misc_RNA (1)...(19): siRNA sense strand
aaccagaugcugaccauaa

SEQ ID NO: 760753 - RNA, 19 nt, Homo sapiens
  misc_RNA (1)...(19): siRNA sense strand
aggagacuguggaguguuu

SEQ ID NO: 760754 - RNA, 19 nt, Homo sapiens
  misc_RNA (1)...(19): siRNA sense strand
ggagaucauuaagauuaca

SEQ ID NO: 760755 - RNA, 19 nt, Homo sapiens
  misc_RNA (1)...(19): siRNA sense strand
uaugucgacuucugaaaca

SEQ ID NO: 760756 - RNA, 19 nt, Homo sapiens
  misc_RNA (1)...(19): siRNA sense strand
ccaagaacagcaagccuau

SEQ ID NO: 760757 - RNA, 19 nt, Homo sapiens
  misc_RNA (1)...(19): siRNA sense strand
gaaaaccuguggauaucug

SEQ ID NO: 760758 - RNA, 19 nt, Homo sapiens
  misc_RNA (1)...(19): siRNA sense strand
ccugaggucuugaggaaag

SEQ ID NO: 760759 - RNA, 19 nt, Homo sapiens
  misc_RNA (1)...(19): siRNA sense strand
gcagcaggcuugguuuggu

SEQ ID NO: 760760 - RNA, 19 nt, Homo sapiens
  misc_RNA (1)...(19): siRNA sense strand
gagcagcaggcuugguuug

SEQ ID NO: 760761 - RNA, 19 nt, Homo sapiens
  misc_RNA (1)...(19): siRNA sense strand
ccgcaggugugugaagaaa

SEQ ID NO: 760762 - RNA, 19 nt, Homo sapiens
  misc_RNA (1)...(19): siRNA sense strand
gggaugaggaucagcacaa

SEQ ID NO: 760763 - RNA, 19 nt, Homo sapiens
  misc_RNA (1)...(19): siRNA sense strand
ggaugaggaucagcacaag

SEQ ID NO: 760764 - RNA, 19 nt, Homo sapiens
  misc_RNA (1)...(19): siRNA sense strand
gauaugucgacuucugaaa

SEQ ID NO: 760765 - RNA, 19 nt, Homo sapiens
  misc_RNA (1)...(19): siRNA sense strand
gccagccacuguauacauc

SEQ ID NO: 760766 - RNA, 19 nt, Homo sapiens
  misc_RNA (1)...(19): siRNA sense strand
uggcaagggugcuuucucu

SEQ ID NO: 760767 - RNA, 19 nt, Homo sapiens
  misc_RNA (1)...(19): siRNA sense strand
gauuucccaucaccagaau

SEQ ID NO: 760768 - RNA, 19 nt, Homo sapiens
  misc_RNA (1)...(19): siRNA sense strand
ucaggagacuguggagugu

SEQ ID NO: 760769 - RNA, 19 nt, Homo sapiens
  misc_RNA (1)...(19): siRNA sense strand
accagaugcugaccauaaa

SEQ ID NO: 760770 - RNA, 19 nt, Homo sapiens
  misc_RNA (1)...(19): siRNA sense strand
ggauaugucgacuucugaa

SEQ ID NO: 760771 - RNA, 19 nt, Homo sapiens
  misc_RNA (1)...(19): siRNA sense strand
uucacuaccucguguuuga

SEQ ID NO: 760772 - RNA, 19 nt, Homo sapiens
  misc_RNA (1)...(19): siRNA sense strand
ucaaccagaugcugaccau

SEQ ID NO: 760773 - RNA, 19 nt, Homo sapiens
  misc_RNA (1)...(19): siRNA sense strand
ggccagagaguacuacagu

SEQ ID NO: 760774 - RNA, 19 nt, Homo sapiens
  misc_RNA (1)...(19): siRNA sense strand
ggcucaauguccacuauca

SEQ ID NO: 760775 - RNA, 19 nt, Homo sapiens
  misc_RNA (1)...(19): siRNA sense strand
gauuacagaacagcugauu

SEQ ID NO: 760776 - RNA, 19 nt, Homo sapiens
  misc_RNA (1)...(19): siRNA sense strand
aucaagggcuccacagaga

SEQ ID NO: 760777 - RNA, 19 nt, Homo sapiens
  misc_RNA (1)...(19): siRNA sense strand
ggaucaagggcuccacaga

SEQ ID NO: 760778 - RNA, 19 nt, Homo sapiens
  misc_RNA (1)...(19): siRNA sense strand
aaucaucaauaccaagaag

SEQ ID NO: 760779 - RNA, 19 nt, Homo sapiens
  misc_RNA (1)...(19): siRNA sense strand
gggaucaccagaaacuaga

SEQ ID NO: 760780 - RNA, 19 nt, Homo sapiens
  misc_RNA (1)...(19): siRNA sense strand
cagcgugcaucgccuacau

SEQ ID NO: 760781 - RNA, 19 nt, Homo sapiens
  misc_RNA (1)...(19): siRNA sense strand
ccaugacaguauuucugaa

SEQ ID NO: 760782 - RNA, 19 nt, Homo sapiens
  misc_RNA (1)...(19): siRNA sense strand
ccucguguuugaccuuguu

SEQ ID NO: 760783 - RNA, 19 nt, Homo sapiens
  misc_RNA (1)...(19): siRNA sense strand
ucggauaugucgacuucug

SEQ ID NO: 760784 - RNA, 19 nt, Homo sapiens
  misc_RNA (1)...(19): siRNA sense strand
cgaaaacaggagaucauua

SEQ ID NO: 760785 - RNA, 19 nt, Homo sapiens
  misc_RNA (1)...(19): siRNA sense strand
ucaucaauaccaagaaguu

SEQ ID NO: 760786 - RNA, 19 nt, Homo sapiens
  misc_RNA (1)...(19): siRNA sense strand
gccaaaagccuauugaaca

SEQ ID NO: 760787 - RNA, 19 nt, Homo sapiens
  misc_RNA (1)...(19): siRNA sense strand
gaugccagccacuguauac

SEQ ID NO: 760788 - RNA, 19 nt, Homo sapiens
  misc_RNA (1)...(19): siRNA sense strand
agaacuugaucaaccagau

SEQ ID NO: 760789 - RNA, 19 nt, Homo sapiens
  misc_RNA (1)...(19): siRNA sense strand
acagcaagccuauccauac

SEQ ID NO: 760790 - RNA, 19 nt, Homo sapiens
  misc_RNA (1)...(19): siRNA sense strand
caucaacaauggggacuuu

SEQ ID NO: 760791 - RNA, 19 nt, Homo sapiens
  misc_RNA (1)...(19): siRNA sense strand
agagaguacuacagugaag

SEQ ID NO: 760792 - RNA, 19 nt, Homo sapiens
  misc_RNA (1)...(19): siRNA sense strand
cagagaguacuacagugaa

SEQ ID NO: 760793 - RNA, 19 nt, Homo sapiens
  misc_RNA (1)...(19): siRNA sense strand
caucaauaccaagaaguug

SEQ ID NO: 760794 - RNA, 19 nt, Homo sapiens
  misc_RNA (1)...(19): siRNA sense strand
guccgcaggugugugaaga

SEQ ID NO: 760795 - RNA, 19 nt, Homo sapiens
  misc_RNA (1)...(19): siRNA sense strand
gcaggugugugaagaaaac

SEQ ID NO: 760796 - RNA, 19 nt, Homo sapiens
  misc_RNA (1)...(19): siRNA sense strand
uuugaggccuacacgaaga

SEQ ID NO: 760797 - RNA, 19 nt, Homo sapiens
  misc_RNA (1)...(19): siRNA sense strand
ggacacgguaacuccugaa

SEQ ID NO: 760798 - RNA, 19 nt, Homo sapiens
  misc_RNA (1)...(19): siRNA sense strand
ccagaaugggacacgguaa

SEQ ID NO: 760799 - RNA, 19 nt, Homo sapiens
  misc_RNA (1)...(19): siRNA sense strand
acauccgccucacccagua

SEQ ID NO: 760800 - RNA, 19 nt, Homo sapiens
  misc_RNA (1)...(19): siRNA sense strand
ugaaacauccaaacaucgu

SEQ ID NO: 760801 - RNA, 19 nt, Homo sapiens
  misc_RNA (1)...(19): siRNA sense strand
gcugcaacaccaccacaga

SEQ ID NO: 760802 - RNA, 19 nt, Homo sapiens
  misc_RNA (1)...(19): siRNA sense strand
aaaagccuauugaacaaga

SEQ ID NO: 760803 - RNA, 19 nt, Homo sapiens
  misc_RNA (1)...(19): siRNA sense strand
ugaggaaagaucccuaugg

SEQ ID NO: 760804 - RNA, 19 nt, Homo sapiens
  misc_RNA (1)...(19): siRNA sense strand
ccuacacgaagauuuguga

SEQ ID NO: 760805 - RNA, 19 nt, Homo sapiens
  misc_RNA (1)...(19): siRNA sense strand
ggaaagaucccuauggaaa

SEQ ID NO: 760806 - RNA, 19 nt, Homo sapiens
  misc_RNA (1)...(19): siRNA sense strand
gaggaaagaucccuaugga

SEQ ID NO: 760807 - RNA, 19 nt, Homo sapiens
  misc_RNA (1)...(19): siRNA sense strand
caggagaucauuaagauua

SEQ ID NO: 760808 - RNA, 19 nt, Homo sapiens
  misc_RNA (1)...(19): siRNA sense strand
gcucggauaugucgacuuc

SEQ ID NO: 760809 - RNA, 19 nt, Homo sapiens
  misc_RNA (1)...(19): siRNA sense strand
gaaaacaggagaucauuaa

SEQ ID NO: 760810 - RNA, 19 nt, Homo sapiens
  misc_RNA (1)...(19): siRNA sense strand
ggagcuguuugaagacauu

SEQ ID NO: 760811 - RNA, 19 nt, Homo sapiens
  misc_RNA (1)...(19): siRNA sense strand
guacuacagugaagcagau

SEQ ID NO: 760812 - RNA, 19 nt, Homo sapiens
  misc_RNA (1)...(19): siRNA sense strand
gaacgugaggcucggauau

SEQ ID NO: 760813 - RNA, 19 nt, Homo sapiens
  misc_RNA (1)...(19): siRNA sense strand
uuacagaacagcugauuga

SEQ ID NO: 760814 - RNA, 19 nt, Homo sapiens
  misc_RNA (1)...(19): siRNA sense strand
guacacaacgcuacagaug

SEQ ID NO: 760815 - RNA, 19 nt, Homo sapiens
  misc_RNA (1)...(19): siRNA sense strand
gcagaugccagccacugua

SEQ ID NO: 760816 - RNA, 19 nt, Homo sapiens
  misc_RNA (1)...(19): siRNA sense strand
ccgucaagcuggcugauuu

SEQ ID NO: 760817 - RNA, 19 nt, Homo sapiens
  misc_RNA (1)...(19): siRNA sense strand
gauggcaaguggcucaaug

SEQ ID NO: 760818 - RNA, 19 nt, Homo sapiens
  misc_RNA (1)...(19): siRNA sense strand
gagagcagcaggcuugguu

SEQ ID NO: 760819 - RNA, 19 nt, Homo sapiens
  misc_RNA (1)...(19): siRNA sense strand
aacaggagaucauuaagau

SEQ ID NO: 760820 - RNA, 19 nt, Homo sapiens
  misc_RNA (1)...(19): siRNA sense strand
aaacaggagaucauuaaga

SEQ ID NO: 760821 - RNA, 19 nt, Homo sapiens
  misc_RNA (1)...(19): siRNA sense strand
gcaagggugcuuucucugu

SEQ ID NO: 760822 - RNA, 19 nt, Homo sapiens
  misc_RNA (1)...(19): siRNA sense strand
ccagagaguacuacaguga

SEQ ID NO: 760823 - RNA, 19 nt, Homo sapiens
  misc_RNA (1)...(19): siRNA sense strand
gaacuugaucaaccagaug

SEQ ID NO: 760824 - RNA, 19 nt, Homo sapiens
  misc_RNA (1)...(19): siRNA sense strand
gaacagcaagccuauccau

SEQ ID NO: 760825 - RNA, 19 nt, Homo sapiens
  misc_RNA (1)...(19): siRNA sense strand
ggagaguguuaaccacauc

SEQ ID NO: 760826 - RNA, 19 nt, Homo sapiens
  misc_RNA (1)...(19): siRNA sense strand
agaaucuccuguccaagaa

SEQ ID NO: 760827 - RNA, 19 nt, Homo sapiens
  misc_RNA (1)...(19): siRNA sense strand
gaaagaucccuauggaaaa

SEQ ID NO: 760828 - RNA, 19 nt, Homo sapiens
  misc_RNA (1)...(19): siRNA sense strand
cagcaggcuugguuugguu

SEQ ID NO: 760829 - RNA, 19 nt, Homo sapiens
  misc_RNA (1)...(19): siRNA sense strand
ccaaaagccuauugaacaa

SEQ ID NO: 760830 - RNA, 19 nt, Homo sapiens
  misc_RNA (1)...(19): siRNA sense strand
ucugaaacauccaaacauc

SEQ ID NO: 760831 - RNA, 19 nt, Homo sapiens
  misc_RNA (1)...(19): siRNA sense strand
caacaccaccacagaagau

SEQ ID NO: 760832 - RNA, 19 nt, Homo sapiens
  misc_RNA (1)...(19): siRNA sense strand
gcaacaccaccacagaaga

SEQ ID NO: 760833 - RNA, 19 nt, Homo sapiens
  misc_RNA (1)...(19): siRNA sense strand
gaccauaaacccagcaaag

SEQ ID NO: 760834 - RNA, 19 nt, Homo sapiens
  misc_RNA (1)...(19): siRNA sense strand
gcggggagcuguuugaaga

SEQ ID NO: 760835 - RNA, 19 nt, Homo sapiens
  misc_RNA (1)...(19): siRNA sense strand
gcgccuccaugacaguauu

SEQ ID NO: 760836 - RNA, 19 nt, Homo sapiens
  misc_RNA (1)...(19): siRNA sense strand
gcaccagccagucagaaga

SEQ ID NO: 760837 - RNA, 19 nt, Homo sapiens
  misc_RNA (1)...(19): siRNA sense strand
aaccagaugcugaccauaa

SEQ ID NO: 760838 - RNA, 19 nt, Homo sapiens
  misc_RNA (1)...(19): siRNA sense strand
aggagacuguggaguguuu

SEQ ID NO: 760839 - RNA, 19 nt, Homo sapiens
  misc_RNA (1)...(19): siRNA sense strand
ggagaucauuaagauuaca

SEQ ID NO: 760840 - RNA, 19 nt, Homo sapiens
  misc_RNA (1)...(19): siRNA sense strand
uaugucgacuucugaaaca

SEQ ID NO: 760841 - RNA, 19 nt, Homo sapiens
  misc_RNA (1)...(19): siRNA sense strand
ccaagaacagcaagccuau

SEQ ID NO: 760842 - RNA, 19 nt, Homo sapiens
  misc_RNA (1)...(19): siRNA sense strand
gaaaaccuguggauaucug

SEQ ID NO: 760843 - RNA, 19 nt, Homo sapiens
  misc_RNA (1)...(19): siRNA sense strand
ccugaggucuugaggaaag

SEQ ID NO: 760844 - RNA, 19 nt, Homo sapiens
  misc_RNA (1)...(19): siRNA sense strand
gcagcaggcuugguuuggu

SEQ ID NO: 760845 - RNA, 19 nt, Homo sapiens
  misc_RNA (1)...(19): siRNA sense strand
gagcagcaggcuugguuug

SEQ ID NO: 760846 - RNA, 19 nt, Homo sapiens
  misc_RNA (1)...(19): siRNA sense strand
ccgcaggugugugaagaaa

SEQ ID NO: 760847 - RNA, 19 nt, Homo sapiens
  misc_RNA (1)...(19): siRNA sense strand
gggaugaggaucagcacaa

SEQ ID NO: 760848 - RNA, 19 nt, Homo sapiens
  misc_RNA (1)...(19): siRNA sense strand
ggaugaggaucagcacaag

SEQ ID NO: 760849 - RNA, 19 nt, Homo sapiens
  misc_RNA (1)...(19): siRNA sense strand
gauaugucgacuucugaaa

SEQ ID NO: 760850 - RNA, 19 nt, Homo sapiens
  misc_RNA (1)...(19): siRNA sense strand
gccagccacuguauacauc

SEQ ID NO: 760851 - RNA, 19 nt, Homo sapiens
  misc_RNA (1)...(19): siRNA sense strand
uggcaagggugcuuucucu

SEQ ID NO: 760852 - RNA, 19 nt, Homo sapiens
  misc_RNA (1)...(19): siRNA sense strand
gauuucccaucaccagaau

SEQ ID NO: 760853 - RNA, 19 nt, Homo sapiens
  misc_RNA (1)...(19): siRNA sense strand
ucaggagacuguggagugu

SEQ ID NO: 760854 - RNA, 19 nt, Homo sapiens
  misc_RNA (1)...(19): siRNA sense strand
accagaugcugaccauaaa

SEQ ID NO: 760855 - RNA, 19 nt, Homo sapiens
  misc_RNA (1)...(19): siRNA sense strand
ggauaugucgacuucugaa

SEQ ID NO: 760856 - RNA, 19 nt, Homo sapiens
  misc_RNA (1)...(19): siRNA sense strand
uucacuaccucguguuuga

SEQ ID NO: 760857 - RNA, 19 nt, Homo sapiens
  misc_RNA (1)...(19): siRNA sense strand
ucaaccagaugcugaccau

SEQ ID NO: 760858 - RNA, 19 nt, Homo sapiens
  misc_RNA (1)...(19): siRNA sense strand
ggccagagaguacuacagu

SEQ ID NO: 760859 - RNA, 19 nt, Homo sapiens
  misc_RNA (1)...(19): siRNA sense strand
ggcucaauguccacuauca

SEQ ID NO: 760860 - RNA, 19 nt, Homo sapiens
  misc_RNA (1)...(19): siRNA sense strand
gauuacagaacagcugauu

SEQ ID NO: 760861 - RNA, 19 nt, Homo sapiens
  misc_RNA (1)...(19): siRNA sense strand
aucaagggcuccacagaga

SEQ ID NO: 760862 - RNA, 19 nt, Homo sapiens
  misc_RNA (1)...(19): siRNA sense strand
ggaucaagggcuccacaga

SEQ ID NO: 760863 - RNA, 19 nt, Homo sapiens
  misc_RNA (1)...(19): siRNA sense strand
aaucaucaauaccaagaag

SEQ ID NO: 760864 - RNA, 19 nt, Homo sapiens
  misc_RNA (1)...(19): siRNA sense strand
gggaucaccagaaacuaga

SEQ ID NO: 760865 - RNA, 19 nt, Homo sapiens
  misc_RNA (1)...(19): siRNA sense strand
cagcgugcaucgccuacau

SEQ ID NO: 760866 - RNA, 19 nt, Homo sapiens
  misc_RNA (1)...(19): siRNA sense strand
ccaugacaguauuucugaa

SEQ ID NO: 760867 - RNA, 19 nt, Homo sapiens
  misc_RNA (1)...(19): siRNA sense strand
ccucguguuugaccuuguu

SEQ ID NO: 760868 - RNA, 19 nt, Homo sapiens
  misc_RNA (1)...(19): siRNA sense strand
ucggauaugucgacuucug

SEQ ID NO: 760869 - RNA, 19 nt, Homo sapiens
  misc_RNA (1)...(19): siRNA sense strand
cgaaaacaggagaucauua

SEQ ID NO: 760870 - RNA, 19 nt, Homo sapiens
  misc_RNA (1)...(19): siRNA sense strand
ucaucaauaccaagaaguu

SEQ ID NO: 760871 - RNA, 19 nt, Homo sapiens
  misc_RNA (1)...(19): siRNA sense strand
gccaaaagccuauugaaca

SEQ ID NO: 760872 - RNA, 19 nt, Homo sapiens
  misc_RNA (1)...(19): siRNA sense strand
gaugccagccacuguauac

SEQ ID NO: 760873 - RNA, 19 nt, Homo sapiens
  misc_RNA (1)...(19): siRNA sense strand
agaacuugaucaaccagau

SEQ ID NO: 760874 - RNA, 19 nt, Homo sapiens
  misc_RNA (1)...(19): siRNA sense strand
acagcaagccuauccauac

SEQ ID NO: 760875 - RNA, 19 nt, Homo sapiens
  misc_RNA (1)...(19): siRNA sense strand
caucaacaauggggacuuu

SEQ ID NO: 760876 - RNA, 19 nt, Homo sapiens
  misc_RNA (1)...(19): siRNA sense strand
agagaguacuacagugaag

SEQ ID NO: 760877 - RNA, 19 nt, Homo sapiens
  misc_RNA (1)...(19): siRNA sense strand
cagagaguacuacagugaa

SEQ ID NO: 760878 - RNA, 19 nt, Homo sapiens
  misc_RNA (1)...(19): siRNA sense strand
caucaauaccaagaaguug

SEQ ID NO: 760879 - RNA, 19 nt, Homo sapiens
  misc_RNA (1)...(19): siRNA sense strand
guccgcaggugugugaaga

SEQ ID NO: 760880 - RNA, 19 nt, Homo sapiens
  misc_RNA (1)...(19): siRNA sense strand
gcaggugugugaagaaaac

SEQ ID NO: 760881 - RNA, 19 nt, Homo sapiens
  misc_RNA (1)...(19): siRNA sense strand
uuugaggccuacacgaaga

SEQ ID NO: 760882 - RNA, 19 nt, Homo sapiens
  misc_RNA (1)...(19): siRNA sense strand
ggacacgguaacuccugaa

SEQ ID NO: 760883 - RNA, 19 nt, Homo sapiens
  misc_RNA (1)...(19): siRNA sense strand
ccagaaugggacacgguaa

SEQ ID NO: 760884 - RNA, 19 nt, Homo sapiens
  misc_RNA (1)...(19): siRNA sense strand
acauccgccucacccagua

SEQ ID NO: 760885 - RNA, 19 nt, Homo sapiens
  misc_RNA (1)...(19): siRNA sense strand
ugaaacauccaaacaucgu

SEQ ID NO: 760886 - RNA, 19 nt, Homo sapiens
  misc_RNA (1)...(19): siRNA sense strand
gcugcaacaccaccacaga

SEQ ID NO: 760887 - RNA, 19 nt, Homo sapiens
  misc_RNA (1)...(19): siRNA sense strand
aaaagccuauugaacaaga

SEQ ID NO: 760888 - RNA, 19 nt, Homo sapiens
  misc_RNA (1)...(19): siRNA sense strand
ugaggaaagaucccuaugg

SEQ ID NO: 760889 - RNA, 19 nt, Homo sapiens
  misc_RNA (1)...(19): siRNA sense strand
ccuacacgaagauuuguga

SEQ ID NO: 760890 - RNA, 19 nt, Homo sapiens
  misc_RNA (1)...(19): siRNA sense strand
ggaaagaucccuauggaaa

SEQ ID NO: 760891 - RNA, 19 nt, Homo sapiens
  misc_RNA (1)...(19): siRNA sense strand
gaggaaagaucccuaugga

SEQ ID NO: 760892 - RNA, 19 nt, Homo sapiens
  misc_RNA (1)...(19): siRNA sense strand
caggagaucauuaagauua

SEQ ID NO: 760893 - RNA, 19 nt, Homo sapiens
  misc_RNA (1)...(19): siRNA sense strand
gcucggauaugucgacuuc

SEQ ID NO: 760894 - RNA, 19 nt, Homo sapiens
  misc_RNA (1)...(19): siRNA sense strand
gaaaacaggagaucauuaa

SEQ ID NO: 760895 - RNA, 19 nt, Homo sapiens
  misc_RNA (1)...(19): siRNA sense strand
ggagcuguuugaagacauu

SEQ ID NO: 760896 - RNA, 19 nt, Homo sapiens
  misc_RNA (1)...(19): siRNA sense strand
guacuacagugaagcagau

SEQ ID NO: 760897 - RNA, 19 nt, Homo sapiens
  misc_RNA (1)...(19): siRNA sense strand
gaacgugaggcucggauau

SEQ ID NO: 760898 - RNA, 19 nt, Homo sapiens
  misc_RNA (1)...(19): siRNA sense strand
uuacagaacagcugauuga

SEQ ID NO: 760899 - RNA, 19 nt, Homo sapiens
  misc_RNA (1)...(19): siRNA sense strand
guacacaacgcuacagaug

SEQ ID NO: 760900 - RNA, 19 nt, Homo sapiens
  misc_RNA (1)...(19): siRNA sense strand
gcagaugccagccacugua

SEQ ID NO: 760901 - RNA, 19 nt, Homo sapiens
  misc_RNA (1)...(19): siRNA sense strand
ccgucaagcuggcugauuu

SEQ ID NO: 760902 - RNA, 19 nt, Homo sapiens
  misc_RNA (1)...(19): siRNA sense strand
gauggcaaguggcucaaug

SEQ ID NO: 760903 - RNA, 19 nt, Homo sapiens
  misc_RNA (1)...(19): siRNA sense strand
gagagcagcaggcuugguu

SEQ ID NO: 760904 - RNA, 19 nt, Homo sapiens
  misc_RNA (1)...(19): siRNA sense strand
aacaggagaucauuaagau

SEQ ID NO: 760905 - RNA, 19 nt, Homo sapiens
  misc_RNA (1)...(19): siRNA sense strand
aaacaggagaucauuaaga

SEQ ID NO: 760906 - RNA, 19 nt, Homo sapiens
  misc_RNA (1)...(19): siRNA sense strand
gcaagggugcuuucucugu

SEQ ID NO: 760907 - RNA, 19 nt, Homo sapiens
  misc_RNA (1)...(19): siRNA sense strand
ccagagaguacuacaguga

SEQ ID NO: 760908 - RNA, 19 nt, Homo sapiens
  misc_RNA (1)...(19): siRNA sense strand
gaacuugaucaaccagaug

SEQ ID NO: 760909 - RNA, 19 nt, Homo sapiens
  misc_RNA (1)...(19): siRNA sense strand
gaacagcaagccuauccau

SEQ ID NO: 760910 - RNA, 19 nt, Homo sapiens
  misc_RNA (1)...(19): siRNA sense strand
ggagaguguuaaccacauc

SEQ ID NO: 760911 - RNA, 19 nt, Homo sapiens
  misc_RNA (1)...(19): siRNA sense strand
agaaucuccuguccaagaa

SEQ ID NO: 760912 - RNA, 19 nt, Homo sapiens
  misc_RNA (1)...(19): siRNA sense strand
gaaagaucccuauggaaaa

SEQ ID NO: 760913 - RNA, 19 nt, Homo sapiens
  misc_RNA (1)...(19): siRNA sense strand
cagcaggcuugguuugguu

SEQ ID NO: 760914 - RNA, 19 nt, Homo sapiens
  misc_RNA (1)...(19): siRNA sense strand
ccaaaagccuauugaacaa

SEQ ID NO: 760915 - RNA, 19 nt, Homo sapiens
  misc_RNA (1)...(19): siRNA sense strand
ucugaaacauccaaacauc

SEQ ID NO: 760916 - RNA, 19 nt, Homo sapiens
  misc_RNA (1)...(19): siRNA sense strand
caacaccaccacagaagau

SEQ ID NO: 760917 - RNA, 19 nt, Homo sapiens
  misc_RNA (1)...(19): siRNA sense strand
gcaacaccaccacagaaga

SEQ ID NO: 760918 - RNA, 19 nt, Homo sapiens
  misc_RNA (1)...(19): siRNA sense strand
gaccauaaacccagcaaag

SEQ ID NO: 760919 - RNA, 19 nt, Homo sapiens
  misc_RNA (1)...(19): siRNA sense strand
gcggggagcuguuugaaga

SEQ ID NO: 760920 - RNA, 19 nt, Homo sapiens
  misc_RNA (1)...(19): siRNA sense strand
gcgccuccaugacaguauu

SEQ ID NO: 760921 - RNA, 19 nt, Homo sapiens
  misc_RNA (1)...(19): siRNA sense strand
gcaccagccagucagaaga

SEQ ID NO: 760922 - RNA, 19 nt, Homo sapiens
  misc_RNA (1)...(19): siRNA sense strand
aaccagaugcugaccauaa

SEQ ID NO: 760923 - RNA, 19 nt, Homo sapiens
  misc_RNA (1)...(19): siRNA sense strand
aggagacuguggaguguuu

SEQ ID NO: 760924 - RNA, 19 nt, Homo sapiens
  misc_RNA (1)...(19): siRNA sense strand
ggagaucauuaagauuaca

SEQ ID NO: 760925 - RNA, 19 nt, Homo sapiens
  misc_RNA (1)...(19): siRNA sense strand
uaugucgacuucugaaaca

SEQ ID NO: 760926 - RNA, 19 nt, Homo sapiens
  misc_RNA (1)...(19): siRNA sense strand
ccaagaacagcaagccuau

SEQ ID NO: 760927 - RNA, 19 nt, Homo sapiens
  misc_RNA (1)...(19): siRNA sense strand
gaaaaccuguggauaucug

SEQ ID NO: 760928 - RNA, 19 nt, Homo sapiens
  misc_RNA (1)...(19): siRNA sense strand
ccugaggucuugaggaaag

SEQ ID NO: 760929 - RNA, 19 nt, Homo sapiens
  misc_RNA (1)...(19): siRNA sense strand
gcagcaggcuugguuuggu

SEQ ID NO: 760930 - RNA, 19 nt, Homo sapiens
  misc_RNA (1)...(19): siRNA sense strand
gagcagcaggcuugguuug

SEQ ID NO: 760931 - RNA, 19 nt, Homo sapiens
  misc_RNA (1)...(19): siRNA sense strand
ccgcaggugugugaagaaa

SEQ ID NO: 760932 - RNA, 19 nt, Homo sapiens
  misc_RNA (1)...(19): siRNA sense strand
gggaugaggaucagcacaa

SEQ ID NO: 760933 - RNA, 19 nt, Homo sapiens
  misc_RNA (1)...(19): siRNA sense strand
ggaugaggaucagcacaag

SEQ ID NO: 760934 - RNA, 19 nt, Homo sapiens
  misc_RNA (1)...(19): siRNA sense strand
gauaugucgacuucugaaa

SEQ ID NO: 760935 - RNA, 19 nt, Homo sapiens
  misc_RNA (1)...(19): siRNA sense strand
gccagccacuguauacauc

SEQ ID NO: 760936 - RNA, 19 nt, Homo sapiens
  misc_RNA (1)...(19): siRNA sense strand
uggcaagggugcuuucucu

SEQ ID NO: 760937 - RNA, 19 nt, Homo sapiens
  misc_RNA (1)...(19): siRNA sense strand
gauuucccaucaccagaau

SEQ ID NO: 760938 - RNA, 19 nt, Homo sapiens
  misc_RNA (1)...(19): siRNA sense strand
ucaggagacuguggagugu

SEQ ID NO: 760939 - RNA, 19 nt, Homo sapiens
  misc_RNA (1)...(19): siRNA sense strand
accagaugcugaccauaaa

SEQ ID NO: 760940 - RNA, 19 nt, Homo sapiens
  misc_RNA (1)...(19): siRNA sense strand
ggauaugucgacuucugaa

SEQ ID NO: 760941 - RNA, 19 nt, Homo sapiens
  misc_RNA (1)...(19): siRNA sense strand
uucacuaccucguguuuga

SEQ ID NO: 760942 - RNA, 19 nt, Homo sapiens
  misc_RNA (1)...(19): siRNA sense strand
ucaaccagaugcugaccau

SEQ ID NO: 760943 - RNA, 19 nt, Homo sapiens
  misc_RNA (1)...(19): siRNA sense strand
ggccagagaguacuacagu

SEQ ID NO: 760944 - RNA, 19 nt, Homo sapiens
  misc_RNA (1)...(19): siRNA sense strand
ggcucaauguccacuauca

SEQ ID NO: 760945 - RNA, 19 nt, Homo sapiens
  misc_RNA (1)...(19): siRNA sense strand
gauuacagaacagcugauu

SEQ ID NO: 760946 - RNA, 19 nt, Homo sapiens
  misc_RNA (1)...(19): siRNA sense strand
aucaagggcuccacagaga

SEQ ID NO: 760947 - RNA, 19 nt, Homo sapiens
  misc_RNA (1)...(19): siRNA sense strand
ggaucaagggcuccacaga

SEQ ID NO: 760948 - RNA, 19 nt, Homo sapiens
  misc_RNA (1)...(19): siRNA sense strand
aaucaucaauaccaagaag

SEQ ID NO: 760949 - RNA, 19 nt, Homo sapiens
  misc_RNA (1)...(19): siRNA sense strand
gggaucaccagaaacuaga

SEQ ID NO: 760950 - RNA, 19 nt, Homo sapiens
  misc_RNA (1)...(19): siRNA sense strand
cagcgugcaucgccuacau

SEQ ID NO: 760951 - RNA, 19 nt, Homo sapiens
  misc_RNA (1)...(19): siRNA sense strand
ccaugacaguauuucugaa

SEQ ID NO: 760952 - RNA, 19 nt, Homo sapiens
  misc_RNA (1)...(19): siRNA sense strand
ccucguguuugaccuuguu

SEQ ID NO: 760953 - RNA, 19 nt, Homo sapiens
  misc_RNA (1)...(19): siRNA sense strand
ucggauaugucgacuucug

SEQ ID NO: 760954 - RNA, 19 nt, Homo sapiens
  misc_RNA (1)...(19): siRNA sense strand
cgaaaacaggagaucauua

SEQ ID NO: 760955 - RNA, 19 nt, Homo sapiens
  misc_RNA (1)...(19): siRNA sense strand
ucaucaauaccaagaaguu

SEQ ID NO: 760956 - RNA, 19 nt, Homo sapiens
  misc_RNA (1)...(19): siRNA sense strand
gccaaaagccuauugaaca

SEQ ID NO: 760957 - RNA, 19 nt, Homo sapiens
  misc_RNA (1)...(19): siRNA sense strand
gaugccagccacuguauac

SEQ ID NO: 760958 - RNA, 19 nt, Homo sapiens
  misc_RNA (1)...(19): siRNA sense strand
agaacuugaucaaccagau

SEQ ID NO: 760959 - RNA, 19 nt, Homo sapiens
  misc_RNA (1)...(19): siRNA sense strand
acagcaagccuauccauac

SEQ ID NO: 760960 - RNA, 19 nt, Homo sapiens
  misc_RNA (1)...(19): siRNA sense strand
caucaacaauggggacuuu

SEQ ID NO: 760961 - RNA, 19 nt, Homo sapiens
  misc_RNA (1)...(19): siRNA sense strand
agagaguacuacagugaag

SEQ ID NO: 760962 - RNA, 19 nt, Homo sapiens
  misc_RNA (1)...(19): siRNA sense strand
cagagaguacuacagugaa

SEQ ID NO: 760963 - RNA, 19 nt, Homo sapiens
  misc_RNA (1)...(19): siRNA sense strand
caucaauaccaagaaguug

SEQ ID NO: 760964 - RNA, 19 nt, Homo sapiens
  misc_RNA (1)...(19): siRNA sense strand
guccgcaggugugugaaga

SEQ ID NO: 760965 - RNA, 19 nt, Homo sapiens
  misc_RNA (1)...(19): siRNA sense strand
gcaggugugugaagaaaac

SEQ ID NO: 760966 - RNA, 19 nt, Homo sapiens
  misc_RNA (1)...(19): siRNA sense strand
uuugaggccuacacgaaga

SEQ ID NO: 760967 - RNA, 19 nt, Homo sapiens
  misc_RNA (1)...(19): siRNA sense strand
ggacacgguaacuccugaa

SEQ ID NO: 760968 - RNA, 19 nt, Homo sapiens
  misc_RNA (1)...(19): siRNA sense strand
ccagaaugggacacgguaa

SEQ ID NO: 760969 - RNA, 19 nt, Homo sapiens
  misc_RNA (1)...(19): siRNA sense strand
acauccgccucacccagua

SEQ ID NO: 760970 - RNA, 19 nt, Homo sapiens
  misc_RNA (1)...(19): siRNA sense strand
ugaaacauccaaacaucgu

SEQ ID NO: 760971 - RNA, 19 nt, Homo sapiens
  misc_RNA (1)...(19): siRNA sense strand
gcugcaacaccaccacaga

SEQ ID NO: 760972 - RNA, 19 nt, Homo sapiens
  misc_RNA (1)...(19): siRNA sense strand
aaaagccuauugaacaaga

SEQ ID NO: 760973 - RNA, 19 nt, Homo sapiens
  misc_RNA (1)...(19): siRNA sense strand
ugaggaaagaucccuaugg

SEQ ID NO: 760974 - RNA, 19 nt, Homo sapiens
  misc_RNA (1)...(19): siRNA sense strand
ccuacacgaagauuuguga

SEQ ID NO: 760975 - RNA, 19 nt, Homo sapiens
  misc_RNA (1)...(19): siRNA sense strand
ggaaagaucccuauggaaa

SEQ ID NO: 760976 - RNA, 19 nt, Homo sapiens
  misc_RNA (1)...(19): siRNA sense strand
gaggaaagaucccuaugga

SEQ ID NO: 760977 - RNA, 19 nt, Homo sapiens
  misc_RNA (1)...(19): siRNA sense strand
caggagaucauuaagauua

SEQ ID NO: 760978 - RNA, 19 nt, Homo sapiens
  misc_RNA (1)...(19): siRNA sense strand
gcucggauaugucgacuuc

SEQ ID NO: 760979 - RNA, 19 nt, Homo sapiens
  misc_RNA (1)...(19): siRNA sense strand
gaaaacaggagaucauuaa

SEQ ID NO: 760980 - RNA, 19 nt, Homo sapiens
  misc_RNA (1)...(19): siRNA sense strand
ggagcuguuugaagacauu

SEQ ID NO: 760981 - RNA, 19 nt, Homo sapiens
  misc_RNA (1)...(19): siRNA sense strand
guacuacagugaagcagau

SEQ ID NO: 760982 - RNA, 19 nt, Homo sapiens
  misc_RNA (1)...(19): siRNA sense strand
gaacgugaggcucggauau

SEQ ID NO: 760983 - RNA, 19 nt, Homo sapiens
  misc_RNA (1)...(19): siRNA sense strand
guacacaacgcuacagaug

SEQ ID NO: 760984 - RNA, 19 nt, Homo sapiens
  misc_RNA (1)...(19): siRNA sense strand
gcagaugccagccacugua

SEQ ID NO: 760985 - RNA, 19 nt, Homo sapiens
  misc_RNA (1)...(19): siRNA sense strand
ccgucaagcuggcugauuu

SEQ ID NO: 760986 - RNA, 19 nt, Homo sapiens
  misc_RNA (1)...(19): siRNA sense strand
gagagcagcaggcuugguu

SEQ ID NO: 760987 - RNA, 19 nt, Homo sapiens
  misc_RNA (1)...(19): siRNA sense strand
aacaggagaucauuaagau

SEQ ID NO: 760988 - RNA, 19 nt, Homo sapiens
  misc_RNA (1)...(19): siRNA sense strand
aaacaggagaucauuaaga

SEQ ID NO: 760989 - RNA, 19 nt, Homo sapiens
  misc_RNA (1)...(19): siRNA sense strand
ccagagaguacuacaguga

SEQ ID NO: 760990 - RNA, 19 nt, Homo sapiens
  misc_RNA (1)...(19): siRNA sense strand
gcaagggugcuuucucugu

SEQ ID NO: 760991 - RNA, 19 nt, Homo sapiens
  misc_RNA (1)...(19): siRNA sense strand
gaacuugaucaaccagaug

SEQ ID NO: 760992 - RNA, 19 nt, Homo sapiens
  misc_RNA (1)...(19): siRNA sense strand
ggagaguguuaaccacauc

SEQ ID NO: 760993 - RNA, 19 nt, Homo sapiens
  misc_RNA (1)...(19): siRNA sense strand
gaaagaucccuauggaaaa

SEQ ID NO: 760994 - RNA, 19 nt, Homo sapiens
  misc_RNA (1)...(19): siRNA sense strand
cagcaggcuugguuugguu

SEQ ID NO: 760995 - RNA, 19 nt, Homo sapiens
  misc_RNA (1)...(19): siRNA sense strand
ccaaaagccuauugaacaa

SEQ ID NO: 760996 - RNA, 19 nt, Homo sapiens
  misc_RNA (1)...(19): siRNA sense strand
ucugaaacauccaaacauc

SEQ ID NO: 760997 - RNA, 19 nt, Homo sapiens
  misc_RNA (1)...(19): siRNA sense strand
caacaccaccacagaagau

SEQ ID NO: 760998 - RNA, 19 nt, Homo sapiens
  misc_RNA (1)...(19): siRNA sense strand
gcaacaccaccacagaaga

SEQ ID NO: 760999 - RNA, 19 nt, Homo sapiens
  misc_RNA (1)...(19): siRNA sense strand
gaccauaaacccagcaaag

SEQ ID NO: 761000 - RNA, 19 nt, Homo sapiens
  misc_RNA (1)...(19): siRNA sense strand
gcggggagcuguuugaaga

SEQ ID NO: 761001 - RNA, 19 nt, Homo sapiens
  misc_RNA (1)...(19): siRNA sense strand
gcgccuccaugacaguauu

SEQ ID NO: 761002 - RNA, 19 nt, Homo sapiens
  misc_RNA (1)...(19): siRNA sense strand
aaccagaugcugaccauaa

SEQ ID NO: 761003 - RNA, 19 nt, Homo sapiens
  misc_RNA (1)...(19): siRNA sense strand
aggagacuguggaguguuu

SEQ ID NO: 761004 - RNA, 19 nt, Homo sapiens
  misc_RNA (1)...(19): siRNA sense strand
ggagaucauuaagauuaca

SEQ ID NO: 761005 - RNA, 19 nt, Homo sapiens
  misc_RNA (1)...(19): siRNA sense strand
uaugucgacuucugaaaca

SEQ ID NO: 761006 - RNA, 19 nt, Homo sapiens
  misc_RNA (1)...(19): siRNA sense strand
gaaaaccuguggauaucug

SEQ ID NO: 761007 - RNA, 19 nt, Homo sapiens
  misc_RNA (1)...(19): siRNA sense strand
ccgcaggugugugaagaaa

SEQ ID NO: 761008 - RNA, 19 nt, Homo sapiens
  misc_RNA (1)...(19): siRNA sense strand
ccugaggucuugaggaaag

SEQ ID NO: 761009 - RNA, 19 nt, Homo sapiens
  misc_RNA (1)...(19): siRNA sense strand
gcagcaggcuugguuuggu

SEQ ID NO: 761010 - RNA, 19 nt, Homo sapiens
  misc_RNA (1)...(19): siRNA sense strand
gagcagcaggcuugguuug

SEQ ID NO: 761011 - RNA, 19 nt, Homo sapiens
  misc_RNA (1)...(19): siRNA sense strand
gggaugaggaucagcacaa

SEQ ID NO: 761012 - RNA, 19 nt, Homo sapiens
  misc_RNA (1)...(19): siRNA sense strand
ggaugaggaucagcacaag

SEQ ID NO: 761013 - RNA, 19 nt, Homo sapiens
  misc_RNA (1)...(19): siRNA sense strand
gauaugucgacuucugaaa

SEQ ID NO: 761014 - RNA, 19 nt, Homo sapiens
  misc_RNA (1)...(19): siRNA sense strand
gccagccacuguauacauc

SEQ ID NO: 761015 - RNA, 19 nt, Homo sapiens
  misc_RNA (1)...(19): siRNA sense strand
uggcaagggugcuuucucu

SEQ ID NO: 761016 - RNA, 19 nt, Homo sapiens
  misc_RNA (1)...(19): siRNA sense strand
ggauaugucgacuucugaa

SEQ ID NO: 761017 - RNA, 19 nt, Homo sapiens
  misc_RNA (1)...(19): siRNA sense strand
ucaggagacuguggagugu

SEQ ID NO: 761018 - RNA, 19 nt, Homo sapiens
  misc_RNA (1)...(19): siRNA sense strand
accagaugcugaccauaaa

SEQ ID NO: 761019 - RNA, 19 nt, Homo sapiens
  misc_RNA (1)...(19): siRNA sense strand
gauuucccaucaccagaau

SEQ ID NO: 761020 - RNA, 19 nt, Homo sapiens
  misc_RNA (1)...(19): siRNA sense strand
uucacuaccucguguuuga

SEQ ID NO: 761021 - RNA, 19 nt, Homo sapiens
  misc_RNA (1)...(19): siRNA sense strand
ucaaccagaugcugaccau

SEQ ID NO: 761022 - RNA, 19 nt, Homo sapiens
  misc_RNA (1)...(19): siRNA sense strand
aaucaucaauaccaagaag

SEQ ID NO: 761023 - RNA, 19 nt, Homo sapiens
  misc_RNA (1)...(19): siRNA sense strand
aucaagggcuccacagaga

SEQ ID NO: 761024 - RNA, 19 nt, Homo sapiens
  misc_RNA (1)...(19): siRNA sense strand
ggaucaagggcuccacaga

SEQ ID NO: 761025 - RNA, 19 nt, Homo sapiens
  misc_RNA (1)...(19): siRNA sense strand
gggaucaccagaaacuaga

SEQ ID NO: 761026 - RNA, 19 nt, Homo sapiens
  misc_RNA (1)...(19): siRNA sense strand
ggccagagaguacuacagu

SEQ ID NO: 761027 - RNA, 19 nt, Homo sapiens
  misc_RNA (1)...(19): siRNA sense strand
ccaugacaguauuucugaa

SEQ ID NO: 761028 - RNA, 19 nt, Homo sapiens
  misc_RNA (1)...(19): siRNA sense strand
ccucguguuugaccuuguu

SEQ ID NO: 761029 - RNA, 19 nt, Homo sapiens
  misc_RNA (1)...(19): siRNA sense strand
ucggauaugucgacuucug

SEQ ID NO: 761030 - RNA, 19 nt, Homo sapiens
  misc_RNA (1)...(19): siRNA sense strand
cgaaaacaggagaucauua

SEQ ID NO: 761031 - RNA, 19 nt, Homo sapiens
  misc_RNA (1)...(19): siRNA sense strand
gccaaaagccuauugaaca

SEQ ID NO: 761032 - RNA, 19 nt, Homo sapiens
  misc_RNA (1)...(19): siRNA sense strand
ucaucaauaccaagaaguu

SEQ ID NO: 761033 - RNA, 19 nt, Homo sapiens
  misc_RNA (1)...(19): siRNA sense strand
gaugccagccacuguauac

SEQ ID NO: 761034 - RNA, 19 nt, Homo sapiens
  misc_RNA (1)...(19): siRNA sense strand
agaacuugaucaaccagau

SEQ ID NO: 761035 - RNA, 19 nt, Homo sapiens
  misc_RNA (1)...(19): siRNA sense strand
agagaguacuacagugaag

SEQ ID NO: 761036 - RNA, 19 nt, Homo sapiens
  misc_RNA (1)...(19): siRNA sense strand
cagagaguacuacagugaa

SEQ ID NO: 761037 - RNA, 19 nt, Homo sapiens
  misc_RNA (1)...(19): siRNA sense strand
caucaauaccaagaaguug

SEQ ID NO: 761038 - RNA, 19 nt, Homo sapiens
  misc_RNA (1)...(19): siRNA sense strand
guccgcaggugugugaaga

SEQ ID NO: 761039 - RNA, 19 nt, Homo sapiens
  misc_RNA (1)...(19): siRNA sense strand
ggacacgguaacuccugaa

SEQ ID NO: 761040 - RNA, 19 nt, Homo sapiens
  misc_RNA (1)...(19): siRNA sense strand
gcaggugugugaagaaaac

SEQ ID NO: 761041 - RNA, 19 nt, Homo sapiens
  misc_RNA (1)...(19): siRNA sense strand
ugaaacauccaaacaucgu

SEQ ID NO: 761042 - RNA, 19 nt, Homo sapiens
  misc_RNA (1)...(19): siRNA sense strand
gcugcaacaccaccacaga

SEQ ID NO: 761043 - RNA, 19 nt, Homo sapiens
  misc_RNA (1)...(19): siRNA sense strand
aaaagccuauugaacaaga

SEQ ID NO: 761044 - RNA, 19 nt, Homo sapiens
  misc_RNA (1)...(19): siRNA sense strand
ccagaaugggacacgguaa

SEQ ID NO: 761045 - RNA, 19 nt, Homo sapiens
  misc_RNA (1)...(19): siRNA sense strand
ugaggaaagaucccuaugg

SEQ ID NO: 761046 - RNA, 19 nt, Homo sapiens
  misc_RNA (1)...(19): siRNA sense strand
ggaaagaucccuauggaaa

SEQ ID NO: 761047 - RNA, 19 nt, Homo sapiens
  misc_RNA (1)...(19): siRNA sense strand
gaggaaagaucccuaugga

SEQ ID NO: 761048 - RNA, 19 nt, Homo sapiens
  misc_RNA (1)...(19): siRNA sense strand
caggagaucauuaagauua

SEQ ID NO: 761049 - RNA, 19 nt, Homo sapiens
  misc_RNA (1)...(19): siRNA sense strand
gcucggauaugucgacuuc

SEQ ID NO: 761050 - RNA, 19 nt, Homo sapiens
  misc_RNA (1)...(19): siRNA sense strand
gaaaacaggagaucauuaa

SEQ ID NO: 761051 - RNA, 19 nt, Homo sapiens
  misc_RNA (1)...(19): siRNA sense strand
ggagcuguuugaagacauu

SEQ ID NO: 761052 - RNA, 19 nt, Homo sapiens
  misc_RNA (1)...(19): siRNA sense strand
guacuacagugaagcagau

SEQ ID NO: 761053 - RNA, 19 nt, Homo sapiens
  misc_RNA (1)...(19): siRNA sense strand
gaacgugaggcucggauau

SEQ ID NO: 761054 - RNA, 19 nt, Homo sapiens
  misc_RNA (1)...(19): siRNA sense strand
uuacagaacagcugauuga

SEQ ID NO: 761055 - RNA, 19 nt, Homo sapiens
  misc_RNA (1)...(19): siRNA sense strand
guacacaacgcuacagaug

SEQ ID NO: 761056 - RNA, 19 nt, Homo sapiens
  misc_RNA (1)...(19): siRNA sense strand
gcagaugccagccacugua

SEQ ID NO: 761057 - RNA, 19 nt, Homo sapiens
  misc_RNA (1)...(19): siRNA sense strand
ccgucaagcuggcugauuu

SEQ ID NO: 761058 - RNA, 19 nt, Homo sapiens
  misc_RNA (1)...(19): siRNA sense strand
gauggcaaguggcucaaug

SEQ ID NO: 761059 - RNA, 19 nt, Homo sapiens
  misc_RNA (1)...(19): siRNA sense strand
gagagcagcaggcuugguu

SEQ ID NO: 761060 - RNA, 19 nt, Homo sapiens
  misc_RNA (1)...(19): siRNA sense strand
aacaggagaucauuaagau

SEQ ID NO: 761061 - RNA, 19 nt, Homo sapiens
  misc_RNA (1)...(19): siRNA sense strand
aaacaggagaucauuaaga

SEQ ID NO: 761062 - RNA, 19 nt, Homo sapiens
  misc_RNA (1)...(19): siRNA sense strand
gcaagggugcuuucucugu

SEQ ID NO: 761063 - RNA, 19 nt, Homo sapiens
  misc_RNA (1)...(19): siRNA sense strand
ccagagaguacuacaguga

SEQ ID NO: 761064 - RNA, 19 nt, Homo sapiens
  misc_RNA (1)...(19): siRNA sense strand
gaacuugaucaaccagaug

SEQ ID NO: 761065 - RNA, 19 nt, Homo sapiens
  misc_RNA (1)...(19): siRNA sense strand
gaacagcaagccuauccau

SEQ ID NO: 761066 - RNA, 19 nt, Homo sapiens
  misc_RNA (1)...(19): siRNA sense strand
ggagaguguuaaccacauc

SEQ ID NO: 761067 - RNA, 19 nt, Homo sapiens
  misc_RNA (1)...(19): siRNA sense strand
agaaucuccuguccaagaa

SEQ ID NO: 761068 - RNA, 19 nt, Homo sapiens
  misc_RNA (1)...(19): siRNA sense strand
gaaagaucccuauggaaaa

SEQ ID NO: 761069 - RNA, 19 nt, Homo sapiens
  misc_RNA (1)...(19): siRNA sense strand
cagcaggcuugguuugguu

SEQ ID NO: 761070 - RNA, 19 nt, Homo sapiens
  misc_RNA (1)...(19): siRNA sense strand
ccaaaagccuauugaacaa

SEQ ID NO: 761071 - RNA, 19 nt, Homo sapiens
  misc_RNA (1)...(19): siRNA sense strand
ucugaaacauccaaacauc

SEQ ID NO: 761072 - RNA, 19 nt, Homo sapiens
  misc_RNA (1)...(19): siRNA sense strand
caacaccaccacagaagau

SEQ ID NO: 761073 - RNA, 19 nt, Homo sapiens
  misc_RNA (1)...(19): siRNA sense strand
gcaacaccaccacagaaga

SEQ ID NO: 761074 - RNA, 19 nt, Homo sapiens
  misc_RNA (1)...(19): siRNA sense strand
gaccauaaacccagcaaag

SEQ ID NO: 761075 - RNA, 19 nt, Homo sapiens
  misc_RNA (1)...(19): siRNA sense strand
gcggggagcuguuugaaga

SEQ ID NO: 761076 - RNA, 19 nt, Homo sapiens
  misc_RNA (1)...(19): siRNA sense strand
gcgccuccaugacaguauu

SEQ ID NO: 761077 - RNA, 19 nt, Homo sapiens
  misc_RNA (1)...(19): siRNA sense strand
gcaccagccagucagaaga

SEQ ID NO: 761078 - RNA, 19 nt, Homo sapiens
  misc_RNA (1)...(19): siRNA sense strand
aaccagaugcugaccauaa

SEQ ID NO: 761079 - RNA, 19 nt, Homo sapiens
  misc_RNA (1)...(19): siRNA sense strand
aggagacuguggaguguuu

SEQ ID NO: 761080 - RNA, 19 nt, Homo sapiens
  misc_RNA (1)...(19): siRNA sense strand
ggagaucauuaagauuaca

SEQ ID NO: 761081 - RNA, 19 nt, Homo sapiens
  misc_RNA (1)...(19): siRNA sense strand
uaugucgacuucugaaaca

SEQ ID NO: 761082 - RNA, 19 nt, Homo sapiens
  misc_RNA (1)...(19): siRNA sense strand
ccaagaacagcaagccuau

SEQ ID NO: 761083 - RNA, 19 nt, Homo sapiens
  misc_RNA (1)...(19): siRNA sense strand
gaaaaccuguggauaucug

SEQ ID NO: 761084 - RNA, 19 nt, Homo sapiens
  misc_RNA (1)...(19): siRNA sense strand
ccugaggucuugaggaaag

SEQ ID NO: 761085 - RNA, 19 nt, Homo sapiens
  misc_RNA (1)...(19): siRNA sense strand
gcagcaggcuugguuuggu

SEQ ID NO: 761086 - RNA, 19 nt, Homo sapiens
  misc_RNA (1)...(19): siRNA sense strand
gagcagcaggcuugguuug

SEQ ID NO: 761087 - RNA, 19 nt, Homo sapiens
  misc_RNA (1)...(19): siRNA sense strand
ccgcaggugugugaagaaa

SEQ ID NO: 761088 - RNA, 19 nt, Homo sapiens
  misc_RNA (1)...(19): siRNA sense strand
gggaugaggaucagcacaa

SEQ ID NO: 761089 - RNA, 19 nt, Homo sapiens
  misc_RNA (1)...(19): siRNA sense strand
ggaugaggaucagcacaag

SEQ ID NO: 761090 - RNA, 19 nt, Homo sapiens
  misc_RNA (1)...(19): siRNA sense strand
gauaugucgacuucugaaa

SEQ ID NO: 761091 - RNA, 19 nt, Homo sapiens
  misc_RNA (1)...(19): siRNA sense strand
gccagccacuguauacauc

SEQ ID NO: 761092 - RNA, 19 nt, Homo sapiens
  misc_RNA (1)...(19): siRNA sense strand
uggcaagggugcuuucucu

SEQ ID NO: 761093 - RNA, 19 nt, Homo sapiens
  misc_RNA (1)...(19): siRNA sense strand
gauuucccaucaccagaau

SEQ ID NO: 761094 - RNA, 19 nt, Homo sapiens
  misc_RNA (1)...(19): siRNA sense strand
ucaggagacuguggagugu

SEQ ID NO: 761095 - RNA, 19 nt, Homo sapiens
  misc_RNA (1)...(19): siRNA sense strand
accagaugcugaccauaaa

SEQ ID NO: 761096 - RNA, 19 nt, Homo sapiens
  misc_RNA (1)...(19): siRNA sense strand
ggauaugucgacuucugaa

SEQ ID NO: 761097 - RNA, 19 nt, Homo sapiens
  misc_RNA (1)...(19): siRNA sense strand
uucacuaccucguguuuga

SEQ ID NO: 761098 - RNA, 19 nt, Homo sapiens
  misc_RNA (1)...(19): siRNA sense strand
ucaaccagaugcugaccau

SEQ ID NO: 761099 - RNA, 19 nt, Homo sapiens
  misc_RNA (1)...(19): siRNA sense strand
ggccagagaguacuacagu

SEQ ID NO: 761100 - RNA, 19 nt, Homo sapiens
  misc_RNA (1)...(19): siRNA sense strand
ggcucaauguccacuauca

SEQ ID NO: 761101 - RNA, 19 nt, Homo sapiens
  misc_RNA (1)...(19): siRNA sense strand
gauuacagaacagcugauu

SEQ ID NO: 761102 - RNA, 19 nt, Homo sapiens
  misc_RNA (1)...(19): siRNA sense strand
aucaagggcuccacagaga

SEQ ID NO: 761103 - RNA, 19 nt, Homo sapiens
  misc_RNA (1)...(19): siRNA sense strand
ggaucaagggcuccacaga

SEQ ID NO: 761104 - RNA, 19 nt, Homo sapiens
  misc_RNA (1)...(19): siRNA sense strand
aaucaucaauaccaagaag

SEQ ID NO: 761105 - RNA, 19 nt, Homo sapiens
  misc_RNA (1)...(19): siRNA sense strand
gggaucaccagaaacuaga

SEQ ID NO: 761106 - RNA, 19 nt, Homo sapiens
  misc_RNA (1)...(19): siRNA sense strand
cagcgugcaucgccuacau

SEQ ID NO: 761107 - RNA, 19 nt, Homo sapiens
  misc_RNA (1)...(19): siRNA sense strand
ccaugacaguauuucugaa

SEQ ID NO: 761108 - RNA, 19 nt, Homo sapiens
  misc_RNA (1)...(19): siRNA sense strand
ccucguguuugaccuuguu

SEQ ID NO: 761109 - RNA, 19 nt, Homo sapiens
  misc_RNA (1)...(19): siRNA sense strand
ucggauaugucgacuucug

SEQ ID NO: 761110 - RNA, 19 nt, Homo sapiens
  misc_RNA (1)...(19): siRNA sense strand
cgaaaacaggagaucauua

SEQ ID NO: 761111 - RNA, 19 nt, Homo sapiens
  misc_RNA (1)...(19): siRNA sense strand
ucaucaauaccaagaaguu

SEQ ID NO: 761112 - RNA, 19 nt, Homo sapiens
  misc_RNA (1)...(19): siRNA sense strand
gccaaaagccuauugaaca

SEQ ID NO: 761113 - RNA, 19 nt, Homo sapiens
  misc_RNA (1)...(19): siRNA sense strand
gaugccagccacuguauac

SEQ ID NO: 761114 - RNA, 19 nt, Homo sapiens
  misc_RNA (1)...(19): siRNA sense strand
agaacuugaucaaccagau

SEQ ID NO: 761115 - RNA, 19 nt, Homo sapiens
  misc_RNA (1)...(19): siRNA sense strand
acagcaagccuauccauac

SEQ ID NO: 761116 - RNA, 19 nt, Homo sapiens
  misc_RNA (1)...(19): siRNA sense strand
caucaacaauggggacuuu

SEQ ID NO: 761117 - RNA, 19 nt, Homo sapiens
  misc_RNA (1)...(19): siRNA sense strand
agagaguacuacagugaag

SEQ ID NO: 761118 - RNA, 19 nt, Homo sapiens
  misc_RNA (1)...(19): siRNA sense strand
cagagaguacuacagugaa

SEQ ID NO: 761119 - RNA, 19 nt, Homo sapiens
  misc_RNA (1)...(19): siRNA sense strand
caucaauaccaagaaguug

SEQ ID NO: 761120 - RNA, 19 nt, Homo sapiens
  misc_RNA (1)...(19): siRNA sense strand
guccgcaggugugugaaga

SEQ ID NO: 761121 - RNA, 19 nt, Homo sapiens
  misc_RNA (1)...(19): siRNA sense strand
gcaggugugugaagaaaac

SEQ ID NO: 761122 - RNA, 19 nt, Homo sapiens
  misc_RNA (1)...(19): siRNA sense strand
uuugaggccuacacgaaga

SEQ ID NO: 761123 - RNA, 19 nt, Homo sapiens
  misc_RNA (1)...(19): siRNA sense strand
ggacacgguaacuccugaa

SEQ ID NO: 761124 - RNA, 19 nt, Homo sapiens
  misc_RNA (1)...(19): siRNA sense strand
ccagaaugggacacgguaa

SEQ ID NO: 761125 - RNA, 19 nt, Homo sapiens
  misc_RNA (1)...(19): siRNA sense strand
acauccgccucacccagua

SEQ ID NO: 761126 - RNA, 19 nt, Homo sapiens
  misc_RNA (1)...(19): siRNA sense strand
ugaaacauccaaacaucgu

SEQ ID NO: 761127 - RNA, 19 nt, Homo sapiens
  misc_RNA (1)...(19): siRNA sense strand
gcugcaacaccaccacaga

SEQ ID NO: 761128 - RNA, 19 nt, Homo sapiens
  misc_RNA (1)...(19): siRNA sense strand
aaaagccuauugaacaaga

SEQ ID NO: 761129 - RNA, 19 nt, Homo sapiens
  misc_RNA (1)...(19): siRNA sense strand
ugaggaaagaucccuaugg

SEQ ID NO: 761130 - RNA, 19 nt, Homo sapiens
  misc_RNA (1)...(19): siRNA sense strand
ccuacacgaagauuuguga

SEQ ID NO: 761131 - RNA, 19 nt, Homo sapiens
  misc_RNA (1)...(19): siRNA sense strand
gaacucagauuacuacuug

SEQ ID NO: 761132 - RNA, 19 nt, Homo sapiens
  misc_RNA (1)...(19): siRNA sense strand
gccaagaaauucauugaua

SEQ ID NO: 761133 - RNA, 19 nt, Homo sapiens
  misc_RNA (1)...(19): siRNA sense strand
uaaagcagcuggcaaucaa

SEQ ID NO: 761134 - RNA, 19 nt, Homo sapiens
  misc_RNA (1)...(19): siRNA sense strand
ccgagaagcucaaggcuaa

SEQ ID NO: 761135 - RNA, 19 nt, Homo sapiens
  misc_RNA (1)...(19): siRNA sense strand
caacauaacccagauagaa

SEQ ID NO: 761136 - RNA, 19 nt, Homo sapiens
  misc_RNA (1)...(19): siRNA sense strand
gcagcacauugacaacaua

SEQ ID NO: 761137 - RNA, 19 nt, Homo sapiens
  misc_RNA (1)...(19): siRNA sense strand
gagagcaacuugacaucau

SEQ ID NO: 761138 - RNA, 19 nt, Homo sapiens
  misc_RNA (1)...(19): siRNA sense strand
gaaacucagccaagaaugu

SEQ ID NO: 761139 - RNA, 19 nt, Homo sapiens
  misc_RNA (1)...(19): siRNA sense strand
ugaaugaucucuccaacag

SEQ ID NO: 761140 - RNA, 19 nt, Homo sapiens
  misc_RNA (1)...(19): siRNA sense strand
aggaagcgcuggccaagaa

SEQ ID NO: 761141 - RNA, 19 nt, Homo sapiens
  misc_RNA (1)...(19): siRNA sense strand
caacuugacaucaugaaug

SEQ ID NO: 761142 - RNA, 19 nt, Homo sapiens
  misc_RNA (1)...(19): siRNA sense strand
gcagaaacucagccaagaa

SEQ ID NO: 761143 - RNA, 19 nt, Homo sapiens
  misc_RNA (1)...(19): siRNA sense strand
uccagaggcuucaggcaua

SEQ ID NO: 761144 - RNA, 19 nt, Homo sapiens
  misc_RNA (1)...(19): siRNA sense strand
gauuacuacuugacgaaga

SEQ ID NO: 761145 - RNA, 19 nt, Homo sapiens
  misc_RNA (1)...(19): siRNA sense strand
gcagagagcaacuugacau

SEQ ID NO: 761146 - RNA, 19 nt, Homo sapiens
  misc_RNA (1)...(19): siRNA sense strand
gcuaaugcagagucaagua

SEQ ID NO: 761147 - RNA, 19 nt, Homo sapiens
  misc_RNA (1)...(19): siRNA sense strand
agaagcagcagcacauuga

SEQ ID NO: 761148 - RNA, 19 nt, Homo sapiens
  misc_RNA (1)...(19): siRNA sense strand
guacauuacagacgccauu

SEQ ID NO: 761149 - RNA, 19 nt, Homo sapiens
  misc_RNA (1)...(19): siRNA sense strand
ccaacagggucuggaguau

SEQ ID NO: 761150 - RNA, 19 nt, Homo sapiens
  misc_RNA (1)...(19): siRNA sense strand
uagaagaugccaccgagaa

SEQ ID NO: 761151 - RNA, 19 nt, Homo sapiens
  misc_RNA (1)...(19): siRNA sense strand
aacagggucuggaguauca

SEQ ID NO: 761152 - RNA, 19 nt, Homo sapiens
  misc_RNA (1)...(19): siRNA sense strand
cuaaugcagagucaaguaa

SEQ ID NO: 761153 - RNA, 19 nt, Homo sapiens
  misc_RNA (1)...(19): siRNA sense strand
gagaugcagcagcagauga

SEQ ID NO: 761154 - RNA, 19 nt, Homo sapiens
  misc_RNA (1)...(19): siRNA sense strand
cagaaacucagccaagaau

SEQ ID NO: 761155 - RNA, 19 nt, Homo sapiens
  misc_RNA (1)...(19): siRNA sense strand
ucaagaagcagcagcacau

SEQ ID NO: 761156 - RNA, 19 nt, Homo sapiens
  misc_RNA (1)...(19): siRNA sense strand
gagcaacuugacaucauga

SEQ ID NO: 761157 - RNA, 19 nt, Homo sapiens
  misc_RNA (1)...(19): siRNA sense strand
gagaagcucaaggcuaaug

SEQ ID NO: 761158 - RNA, 19 nt, Homo sapiens
  misc_RNA (1)...(19): siRNA sense strand
ugacaacauaacccagaua

SEQ ID NO: 761159 - RNA, 19 nt, Homo sapiens
  misc_RNA (1)...(19): siRNA sense strand
aaacucagccaagaauguu

SEQ ID NO: 761160 - RNA, 19 nt, Homo sapiens
  misc_RNA (1)...(19): siRNA sense strand
caaggcuaaugcagaguca

SEQ ID NO: 761161 - RNA, 19 nt, Homo sapiens
  misc_RNA (1)...(19): siRNA sense strand
gacaacauaacccagauag

SEQ ID NO: 761162 - RNA, 19 nt, Homo sapiens
  misc_RNA (1)...(19): siRNA sense strand
gcaacuugacaucaugaau

SEQ ID NO: 761163 - RNA, 19 nt, Homo sapiens
  misc_RNA (1)...(19): siRNA sense strand
uaaugcagagucaaguaaa

SEQ ID NO: 761164 - RNA, 19 nt, Homo sapiens
  misc_RNA (1)...(19): siRNA sense strand
caagaagcagcagcacauu

SEQ ID NO: 761165 - RNA, 19 nt, Homo sapiens
  misc_RNA (1)...(19): siRNA sense strand
cagccaagaauguuuaaag

SEQ ID NO: 761166 - RNA, 19 nt, Homo sapiens
  misc_RNA (1)...(19): siRNA sense strand
agagcaacuugacaucaug

SEQ ID NO: 761167 - RNA, 19 nt, Homo sapiens
  misc_RNA (1)...(19): siRNA sense strand
ugcagaaacucagccaaga

SEQ ID NO: 761168 - RNA, 19 nt, Homo sapiens
  misc_RNA (1)...(19): siRNA sense strand
cagcacauugacaacauaa

SEQ ID NO: 761169 - RNA, 19 nt, Homo sapiens
  misc_RNA (1)...(19): siRNA sense strand
guggagaguacauuacaga

SEQ ID NO: 761170 - RNA, 19 nt, Homo sapiens
  misc_RNA (1)...(19): siRNA sense strand
acucagccaagaauguuua

SEQ ID NO: 761171 - RNA, 19 nt, Homo sapiens
  misc_RNA (1)...(19): siRNA sense strand
gaagcgcuggccaagaaau

SEQ ID NO: 761172 - RNA, 19 nt, Homo sapiens
  misc_RNA (1)...(19): siRNA sense strand
guuuaaagcagcuggcaau

SEQ ID NO: 761173 - RNA, 19 nt, Homo sapiens
  misc_RNA (1)...(19): siRNA sense strand
cagauuacuacuugacgaa

SEQ ID NO: 761174 - RNA, 19 nt, Homo sapiens
  misc_RNA (1)...(19): siRNA sense strand
ggaagcgcuggccaagaaa

SEQ ID NO: 761175 - RNA, 19 nt, Homo sapiens
  misc_RNA (1)...(19): siRNA sense strand
gcacauugacaacauaacc

SEQ ID NO: 761176 - RNA, 19 nt, Homo sapiens
  misc_RNA (1)...(19): siRNA sense strand
ggagaugcagcagcagaug

SEQ ID NO: 761177 - RNA, 19 nt, Homo sapiens
  misc_RNA (1)...(19): siRNA sense strand
ccaccgagcaggagaugca

SEQ ID NO: 761178 - RNA, 19 nt, Homo sapiens
  misc_RNA (1)...(19): siRNA sense strand
acauaacccagauagaaga

SEQ ID NO: 761179 - RNA, 19 nt, Homo sapiens
  misc_RNA (1)...(19): siRNA sense strand
uggaagccguggagaguac

SEQ ID NO: 761180 - RNA, 19 nt, Homo sapiens
  misc_RNA (1)...(19): siRNA sense strand
gccaagaauguuuaaagca

SEQ ID NO: 761181 - RNA, 19 nt, Homo sapiens
  misc_RNA (1)...(19): siRNA sense strand
gcagcuggcaaucaagaag

SEQ ID NO: 761182 - RNA, 19 nt, Homo sapiens
  misc_RNA (1)...(19): siRNA sense strand
caacagggucuggaguauc

SEQ ID NO: 761183 - RNA, 19 nt, Homo sapiens
  misc_RNA (1)...(19): siRNA sense strand
gcgcuggccaagaaauuca

SEQ ID NO: 761184 - RNA, 19 nt, Homo sapiens
  misc_RNA (1)...(19): siRNA sense strand
uuaaagcagcuggcaauca

SEQ ID NO: 761185 - RNA, 19 nt, Homo sapiens
  misc_RNA (1)...(19): siRNA sense strand
gaggaagcgcuggccaaga

SEQ ID NO: 761186 - RNA, 19 nt, Homo sapiens
  misc_RNA (1)...(19): siRNA sense strand
cauuacagacgccauugga

SEQ ID NO: 761187 - RNA, 19 nt, Homo sapiens
  misc_RNA (1)...(19): siRNA sense strand
gaacucagauuacuacuug

SEQ ID NO: 761188 - RNA, 19 nt, Homo sapiens
  misc_RNA (1)...(19): siRNA sense strand
gccaagaaauucauugaua

SEQ ID NO: 761189 - RNA, 19 nt, Homo sapiens
  misc_RNA (1)...(19): siRNA sense strand
uaaagcagcuggcaaucaa

SEQ ID NO: 761190 - RNA, 19 nt, Homo sapiens
  misc_RNA (1)...(19): siRNA sense strand
ccgagaagcucaaggcuaa

SEQ ID NO: 761191 - RNA, 19 nt, Homo sapiens
  misc_RNA (1)...(19): siRNA sense strand
caacauaacccagauagaa

SEQ ID NO: 761192 - RNA, 19 nt, Homo sapiens
  misc_RNA (1)...(19): siRNA sense strand
gcagcacauugacaacaua

SEQ ID NO: 761193 - RNA, 19 nt, Homo sapiens
  misc_RNA (1)...(19): siRNA sense strand
gagagcaacuugacaucau

SEQ ID NO: 761194 - RNA, 19 nt, Homo sapiens
  misc_RNA (1)...(19): siRNA sense strand
gaaacucagccaagaaugu

SEQ ID NO: 761195 - RNA, 19 nt, Homo sapiens
  misc_RNA (1)...(19): siRNA sense strand
ugaaugaucucuccaacag

SEQ ID NO: 761196 - RNA, 19 nt, Homo sapiens
  misc_RNA (1)...(19): siRNA sense strand
aggaagcgcuggccaagaa

SEQ ID NO: 761197 - RNA, 19 nt, Homo sapiens
  misc_RNA (1)...(19): siRNA sense strand
caacuugacaucaugaaug

SEQ ID NO: 761198 - RNA, 19 nt, Homo sapiens
  misc_RNA (1)...(19): siRNA sense strand
gcagaaacucagccaagaa

SEQ ID NO: 761199 - RNA, 19 nt, Homo sapiens
  misc_RNA (1)...(19): siRNA sense strand
uccagaggcuucaggcaua

SEQ ID NO: 761200 - RNA, 19 nt, Homo sapiens
  misc_RNA (1)...(19): siRNA sense strand
gauuacuacuugacgaaga

SEQ ID NO: 761201 - RNA, 19 nt, Homo sapiens
  misc_RNA (1)...(19): siRNA sense strand
gcagagagcaacuugacau

SEQ ID NO: 761202 - RNA, 19 nt, Homo sapiens
  misc_RNA (1)...(19): siRNA sense strand
gcuaaugcagagucaagua

SEQ ID NO: 761203 - RNA, 19 nt, Homo sapiens
  misc_RNA (1)...(19): siRNA sense strand
agaagcagcagcacauuga

SEQ ID NO: 761204 - RNA, 19 nt, Homo sapiens
  misc_RNA (1)...(19): siRNA sense strand
guacauuacagacgccauu

SEQ ID NO: 761205 - RNA, 19 nt, Homo sapiens
  misc_RNA (1)...(19): siRNA sense strand
ccaacagggucuggaguau

SEQ ID NO: 761206 - RNA, 19 nt, Homo sapiens
  misc_RNA (1)...(19): siRNA sense strand
uagaagaugccaccgagaa

SEQ ID NO: 761207 - RNA, 19 nt, Homo sapiens
  misc_RNA (1)...(19): siRNA sense strand
aacagggucuggaguauca

SEQ ID NO: 761208 - RNA, 19 nt, Homo sapiens
  misc_RNA (1)...(19): siRNA sense strand
cuaaugcagagucaaguaa

SEQ ID NO: 761209 - RNA, 19 nt, Homo sapiens
  misc_RNA (1)...(19): siRNA sense strand
gagaugcagcagcagauga

SEQ ID NO: 761210 - RNA, 19 nt, Homo sapiens
  misc_RNA (1)...(19): siRNA sense strand
cagaaacucagccaagaau

SEQ ID NO: 761211 - RNA, 19 nt, Homo sapiens
  misc_RNA (1)...(19): siRNA sense strand
ucaagaagcagcagcacau

SEQ ID NO: 761212 - RNA, 19 nt, Homo sapiens
  misc_RNA (1)...(19): siRNA sense strand
gagcaacuugacaucauga

SEQ ID NO: 761213 - RNA, 19 nt, Homo sapiens
  misc_RNA (1)...(19): siRNA sense strand
gagaagcucaaggcuaaug

SEQ ID NO: 761214 - RNA, 19 nt, Homo sapiens
  misc_RNA (1)...(19): siRNA sense strand
ugacaacauaacccagaua

SEQ ID NO: 761215 - RNA, 19 nt, Homo sapiens
  misc_RNA (1)...(19): siRNA sense strand
aaacucagccaagaauguu

SEQ ID NO: 761216 - RNA, 19 nt, Homo sapiens
  misc_RNA (1)...(19): siRNA sense strand
caaggcuaaugcagaguca

SEQ ID NO: 761217 - RNA, 19 nt, Homo sapiens
  misc_RNA (1)...(19): siRNA sense strand
gacaacauaacccagauag

SEQ ID NO: 761218 - RNA, 19 nt, Homo sapiens
  misc_RNA (1)...(19): siRNA sense strand
gcaacuugacaucaugaau

SEQ ID NO: 761219 - RNA, 19 nt, Homo sapiens
  misc_RNA (1)...(19): siRNA sense strand
uaaugcagagucaaguaaa

SEQ ID NO: 761220 - RNA, 19 nt, Homo sapiens
  misc_RNA (1)...(19): siRNA sense strand
caagaagcagcagcacauu

SEQ ID NO: 761221 - RNA, 19 nt, Homo sapiens
  misc_RNA (1)...(19): siRNA sense strand
cagccaagaauguuuaaag

SEQ ID NO: 761222 - RNA, 19 nt, Homo sapiens
  misc_RNA (1)...(19): siRNA sense strand
agagcaacuugacaucaug

SEQ ID NO: 761223 - RNA, 19 nt, Homo sapiens
  misc_RNA (1)...(19): siRNA sense strand
ugcagaaacucagccaaga

SEQ ID NO: 761224 - RNA, 19 nt, Homo sapiens
  misc_RNA (1)...(19): siRNA sense strand
cagcacauugacaacauaa

SEQ ID NO: 761225 - RNA, 19 nt, Homo sapiens
  misc_RNA (1)...(19): siRNA sense strand
guggagaguacauuacaga

SEQ ID NO: 761226 - RNA, 19 nt, Homo sapiens
  misc_RNA (1)...(19): siRNA sense strand
acucagccaagaauguuua

SEQ ID NO: 761227 - RNA, 19 nt, Homo sapiens
  misc_RNA (1)...(19): siRNA sense strand
gaagcgcuggccaagaaau

SEQ ID NO: 761228 - RNA, 19 nt, Homo sapiens
  misc_RNA (1)...(19): siRNA sense strand
guuuaaagcagcuggcaau

SEQ ID NO: 761229 - RNA, 19 nt, Homo sapiens
  misc_RNA (1)...(19): siRNA sense strand
cagauuacuacuugacgaa

SEQ ID NO: 761230 - RNA, 19 nt, Homo sapiens
  misc_RNA (1)...(19): siRNA sense strand
ggaagcgcuggccaagaaa

SEQ ID NO: 761231 - RNA, 19 nt, Homo sapiens
  misc_RNA (1)...(19): siRNA sense strand
gcacauugacaacauaacc

SEQ ID NO: 761232 - RNA, 19 nt, Homo sapiens
  misc_RNA (1)...(19): siRNA sense strand
ggagaugcagcagcagaug

SEQ ID NO: 761233 - RNA, 19 nt, Homo sapiens
  misc_RNA (1)...(19): siRNA sense strand
ccaccgagcaggagaugca

SEQ ID NO: 761234 - RNA, 19 nt, Homo sapiens
  misc_RNA (1)...(19): siRNA sense strand
acauaacccagauagaaga

SEQ ID NO: 761235 - RNA, 19 nt, Homo sapiens
  misc_RNA (1)...(19): siRNA sense strand
uggaagccguggagaguac

SEQ ID NO: 761236 - RNA, 19 nt, Homo sapiens
  misc_RNA (1)...(19): siRNA sense strand
gccaagaauguuuaaagca

SEQ ID NO: 761237 - RNA, 19 nt, Homo sapiens
  misc_RNA (1)...(19): siRNA sense strand
gcagcuggcaaucaagaag

SEQ ID NO: 761238 - RNA, 19 nt, Homo sapiens
  misc_RNA (1)...(19): siRNA sense strand
caacagggucuggaguauc

SEQ ID NO: 761239 - RNA, 19 nt, Homo sapiens
  misc_RNA (1)...(19): siRNA sense strand
gcgcuggccaagaaauuca

SEQ ID NO: 761240 - RNA, 19 nt, Homo sapiens
  misc_RNA (1)...(19): siRNA sense strand
uuaaagcagcuggcaauca

SEQ ID NO: 761241 - RNA, 19 nt, Homo sapiens
  misc_RNA (1)...(19): siRNA sense strand
gaggaagcgcuggccaaga

SEQ ID NO: 761242 - RNA, 19 nt, Homo sapiens
  misc_RNA (1)...(19): siRNA sense strand
cauuacagacgccauugga

SEQ ID NO: 761243 - RNA, 19 nt, Homo sapiens
  misc_RNA (1)...(19): siRNA sense strand
gaacucagauuacuacuug

SEQ ID NO: 761244 - RNA, 19 nt, Homo sapiens
  misc_RNA (1)...(19): siRNA sense strand
gccaagaaauucauugaua

SEQ ID NO: 761245 - RNA, 19 nt, Homo sapiens
  misc_RNA (1)...(19): siRNA sense strand
uaaagcagcuggcaaucaa

SEQ ID NO: 761246 - RNA, 19 nt, Homo sapiens
  misc_RNA (1)...(19): siRNA sense strand
ccgagaagcucaaggcuaa

SEQ ID NO: 761247 - RNA, 19 nt, Homo sapiens
  misc_RNA (1)...(19): siRNA sense strand
caacauaacccagauagaa

SEQ ID NO: 761248 - RNA, 19 nt, Homo sapiens
  misc_RNA (1)...(19): siRNA sense strand
gcagcacauugacaacaua

SEQ ID NO: 761249 - RNA, 19 nt, Homo sapiens
  misc_RNA (1)...(19): siRNA sense strand
gagagcaacuugacaucau

SEQ ID NO: 761250 - RNA, 19 nt, Homo sapiens
  misc_RNA (1)...(19): siRNA sense strand
gaaacucagccaagaaugu

SEQ ID NO: 761251 - RNA, 19 nt, Homo sapiens
  misc_RNA (1)...(19): siRNA sense strand
ugaaugaucucuccaacag

SEQ ID NO: 761252 - RNA, 19 nt, Homo sapiens
  misc_RNA (1)...(19): siRNA sense strand
aggaagcgcuggccaagaa

SEQ ID NO: 761253 - RNA, 19 nt, Homo sapiens
  misc_RNA (1)...(19): siRNA sense strand
caacuugacaucaugaaug

SEQ ID NO: 761254 - RNA, 19 nt, Homo sapiens
  misc_RNA (1)...(19): siRNA sense strand
gcagaaacucagccaagaa

SEQ ID NO: 761255 - RNA, 19 nt, Homo sapiens
  misc_RNA (1)...(19): siRNA sense strand
uccagaggcuucaggcaua

SEQ ID NO: 761256 - RNA, 19 nt, Homo sapiens
  misc_RNA (1)...(19): siRNA sense strand
gauuacuacuugacgaaga

SEQ ID NO: 761257 - RNA, 19 nt, Homo sapiens
  misc_RNA (1)...(19): siRNA sense strand
gcagagagcaacuugacau

SEQ ID NO: 761258 - RNA, 19 nt, Homo sapiens
  misc_RNA (1)...(19): siRNA sense strand
gcuaaugcagagucaagua

SEQ ID NO: 761259 - RNA, 19 nt, Homo sapiens
  misc_RNA (1)...(19): siRNA sense strand
agaagcagcagcacauuga

SEQ ID NO: 761260 - RNA, 19 nt, Homo sapiens
  misc_RNA (1)...(19): siRNA sense strand
guacauuacagacgccauu

SEQ ID NO: 761261 - RNA, 19 nt, Homo sapiens
  misc_RNA (1)...(19): siRNA sense strand
ccaacagggucuggaguau

SEQ ID NO: 761262 - RNA, 19 nt, Homo sapiens
  misc_RNA (1)...(19): siRNA sense strand
uagaagaugccaccgagaa

SEQ ID NO: 761263 - RNA, 19 nt, Homo sapiens
  misc_RNA (1)...(19): siRNA sense strand
aacagggucuggaguauca

SEQ ID NO: 761264 - RNA, 19 nt, Homo sapiens
  misc_RNA (1)...(19): siRNA sense strand
cuaaugcagagucaaguaa

SEQ ID NO: 761265 - RNA, 19 nt, Homo sapiens
  misc_RNA (1)...(19): siRNA sense strand
gagaugcagcagcagauga

SEQ ID NO: 761266 - RNA, 19 nt, Homo sapiens
  misc_RNA (1)...(19): siRNA sense strand
cagaaacucagccaagaau

SEQ ID NO: 761267 - RNA, 19 nt, Homo sapiens
  misc_RNA (1)...(19): siRNA sense strand
ucaagaagcagcagcacau

SEQ ID NO: 761268 - RNA, 19 nt, Homo sapiens
  misc_RNA (1)...(19): siRNA sense strand
gagcaacuugacaucauga

SEQ ID NO: 761269 - RNA, 19 nt, Homo sapiens
  misc_RNA (1)...(19): siRNA sense strand
gagaagcucaaggcuaaug

SEQ ID NO: 761270 - RNA, 19 nt, Homo sapiens
  misc_RNA (1)...(19): siRNA sense strand
ugacaacauaacccagaua

SEQ ID NO: 761271 - RNA, 19 nt, Homo sapiens
  misc_RNA (1)...(19): siRNA sense strand
aaacucagccaagaauguu

SEQ ID NO: 761272 - RNA, 19 nt, Homo sapiens
  misc_RNA (1)...(19): siRNA sense strand
caaggcuaaugcagaguca

SEQ ID NO: 761273 - RNA, 19 nt, Homo sapiens
  misc_RNA (1)...(19): siRNA sense strand
gacaacauaacccagauag

SEQ ID NO: 761274 - RNA, 19 nt, Homo sapiens
  misc_RNA (1)...(19): siRNA sense strand
gcaacuugacaucaugaau

SEQ ID NO: 761275 - RNA, 19 nt, Homo sapiens
  misc_RNA (1)...(19): siRNA sense strand
uaaugcagagucaaguaaa

SEQ ID NO: 761276 - RNA, 19 nt, Homo sapiens
  misc_RNA (1)...(19): siRNA sense strand
caagaagcagcagcacauu

SEQ ID NO: 761277 - RNA, 19 nt, Homo sapiens
  misc_RNA (1)...(19): siRNA sense strand
cagccaagaauguuuaaag

SEQ ID NO: 761278 - RNA, 19 nt, Homo sapiens
  misc_RNA (1)...(19): siRNA sense strand
agagcaacuugacaucaug

SEQ ID NO: 761279 - RNA, 19 nt, Homo sapiens
  misc_RNA (1)...(19): siRNA sense strand
ugcagaaacucagccaaga

SEQ ID NO: 761280 - RNA, 19 nt, Homo sapiens
  misc_RNA (1)...(19): siRNA sense strand
cagcacauugacaacauaa

SEQ ID NO: 761281 - RNA, 19 nt, Homo sapiens
  misc_RNA (1)...(19): siRNA sense strand
guggagaguacauuacaga

SEQ ID NO: 761282 - RNA, 19 nt, Homo sapiens
  misc_RNA (1)...(19): siRNA sense strand
acucagccaagaauguuua

SEQ ID NO: 761283 - RNA, 19 nt, Homo sapiens
  misc_RNA (1)...(19): siRNA sense strand
gaagcgcuggccaagaaau

SEQ ID NO: 761284 - RNA, 19 nt, Homo sapiens
  misc_RNA (1)...(19): siRNA sense strand
guuuaaagcagcuggcaau

SEQ ID NO: 761285 - RNA, 19 nt, Homo sapiens
  misc_RNA (1)...(19): siRNA sense strand
cagauuacuacuugacgaa

SEQ ID NO: 761286 - RNA, 19 nt, Homo sapiens
  misc_RNA (1)...(19): siRNA sense strand
ggaagcgcuggccaagaaa

SEQ ID NO: 761287 - RNA, 19 nt, Homo sapiens
  misc_RNA (1)...(19): siRNA sense strand
gcacauugacaacauaacc

SEQ ID NO: 761288 - RNA, 19 nt, Homo sapiens
  misc_RNA (1)...(19): siRNA sense strand
ggagaugcagcagcagaug

SEQ ID NO: 761289 - RNA, 19 nt, Homo sapiens
  misc_RNA (1)...(19): siRNA sense strand
ccaccgagcaggagaugca

SEQ ID NO: 761290 - RNA, 19 nt, Homo sapiens
  misc_RNA (1)...(19): siRNA sense strand
acauaacccagauagaaga

SEQ ID NO: 761291 - RNA, 19 nt, Homo sapiens
  misc_RNA (1)...(19): siRNA sense strand
uggaagccguggagaguac

SEQ ID NO: 761292 - RNA, 19 nt, Homo sapiens
  misc_RNA (1)...(19): siRNA sense strand
gccaagaauguuuaaagca

SEQ ID NO: 761293 - RNA, 19 nt, Homo sapiens
  misc_RNA (1)...(19): siRNA sense strand
gcagcuggcaaucaagaag

SEQ ID NO: 761294 - RNA, 19 nt, Homo sapiens
  misc_RNA (1)...(19): siRNA sense strand
caacagggucuggaguauc

SEQ ID NO: 761295 - RNA, 19 nt, Homo sapiens
  misc_RNA (1)...(19): siRNA sense strand
gcgcuggccaagaaauuca

SEQ ID NO: 761296 - RNA, 19 nt, Homo sapiens
  misc_RNA (1)...(19): siRNA sense strand
uuaaagcagcuggcaauca

SEQ ID NO: 761297 - RNA, 19 nt, Homo sapiens
  misc_RNA (1)...(19): siRNA sense strand
gaggaagcgcuggccaaga

SEQ ID NO: 761298 - RNA, 19 nt, Homo sapiens
  misc_RNA (1)...(19): siRNA sense strand
cauuacagacgccauugga

SEQ ID NO: 761299 - RNA, 19 nt, Homo sapiens
  misc_RNA (1)...(19): siRNA sense strand
gaacucagauuacuacuug

SEQ ID NO: 761300 - RNA, 19 nt, Homo sapiens
  misc_RNA (1)...(19): siRNA sense strand
gccaagaaauucauugaua

SEQ ID NO: 761301 - RNA, 19 nt, Homo sapiens
  misc_RNA (1)...(19): siRNA sense strand
uaaagcagcuggcaaucaa

SEQ ID NO: 761302 - RNA, 19 nt, Homo sapiens
  misc_RNA (1)...(19): siRNA sense strand
ccgagaagcucaaggcuaa

SEQ ID NO: 761303 - RNA, 19 nt, Homo sapiens
  misc_RNA (1)...(19): siRNA sense strand
caacauaacccagauagaa

SEQ ID NO: 761304 - RNA, 19 nt, Homo sapiens
  misc_RNA (1)...(19): siRNA sense strand
gcagcacauugacaacaua

SEQ ID NO: 761305 - RNA, 19 nt, Homo sapiens
  misc_RNA (1)...(19): siRNA sense strand
gagagcaacuugacaucau

SEQ ID NO: 761306 - RNA, 19 nt, Homo sapiens
  misc_RNA (1)...(19): siRNA sense strand
gaaacucagccaagaaugu

SEQ ID NO: 761307 - RNA, 19 nt, Homo sapiens
  misc_RNA (1)...(19): siRNA sense strand
ugaaugaucucuccaacag

SEQ ID NO: 761308 - RNA, 19 nt, Homo sapiens
  misc_RNA (1)...(19): siRNA sense strand
aggaagcgcuggccaagaa

SEQ ID NO: 761309 - RNA, 19 nt, Homo sapiens
  misc_RNA (1)...(19): siRNA sense strand
caacuugacaucaugaaug

SEQ ID NO: 761310 - RNA, 19 nt, Homo sapiens
  misc_RNA (1)...(19): siRNA sense strand
gcagaaacucagccaagaa

SEQ ID NO: 761311 - RNA, 19 nt, Homo sapiens
  misc_RNA (1)...(19): siRNA sense strand
uccagaggcuucaggcaua

SEQ ID NO: 761312 - RNA, 19 nt, Homo sapiens
  misc_RNA (1)...(19): siRNA sense strand
gauuacuacuugacgaaga

SEQ ID NO: 761313 - RNA, 19 nt, Homo sapiens
  misc_RNA (1)...(19): siRNA sense strand
gcagagagcaacuugacau

SEQ ID NO: 761314 - RNA, 19 nt, Homo sapiens
  misc_RNA (1)...(19): siRNA sense strand
gcuaaugcagagucaagua

SEQ ID NO: 761315 - RNA, 19 nt, Homo sapiens
  misc_RNA (1)...(19): siRNA sense strand
agaagcagcagcacauuga

SEQ ID NO: 761316 - RNA, 19 nt, Homo sapiens
  misc_RNA (1)...(19): siRNA sense strand
guacauuacagacgccauu

SEQ ID NO: 761317 - RNA, 19 nt, Homo sapiens
  misc_RNA (1)...(19): siRNA sense strand
ccaacagggucuggaguau

SEQ ID NO: 761318 - RNA, 19 nt, Homo sapiens
  misc_RNA (1)...(19): siRNA sense strand
uagaagaugccaccgagaa

SEQ ID NO: 761319 - RNA, 19 nt, Homo sapiens
  misc_RNA (1)...(19): siRNA sense strand
aacagggucuggaguauca

SEQ ID NO: 761320 - RNA, 19 nt, Homo sapiens
  misc_RNA (1)...(19): siRNA sense strand
cuaaugcagagucaaguaa

SEQ ID NO: 761321 - RNA, 19 nt, Homo sapiens
  misc_RNA (1)...(19): siRNA sense strand
gagaugcagcagcagauga

SEQ ID NO: 761322 - RNA, 19 nt, Homo sapiens
  misc_RNA (1)...(19): siRNA sense strand
cagaaacucagccaagaau

SEQ ID NO: 761323 - RNA, 19 nt, Homo sapiens
  misc_RNA (1)...(19): siRNA sense strand
ucaagaagcagcagcacau

SEQ ID NO: 761324 - RNA, 19 nt, Homo sapiens
  misc_RNA (1)...(19): siRNA sense strand
gagcaacuugacaucauga

SEQ ID NO: 761325 - RNA, 19 nt, Homo sapiens
  misc_RNA (1)...(19): siRNA sense strand
gagaagcucaaggcuaaug

SEQ ID NO: 761326 - RNA, 19 nt, Homo sapiens
  misc_RNA (1)...(19): siRNA sense strand
ugacaacauaacccagaua

SEQ ID NO: 761327 - RNA, 19 nt, Homo sapiens
  misc_RNA (1)...(19): siRNA sense strand
aaacucagccaagaauguu

SEQ ID NO: 761328 - RNA, 19 nt, Homo sapiens
  misc_RNA (1)...(19): siRNA sense strand
caaggcuaaugcagaguca

SEQ ID NO: 761329 - RNA, 19 nt, Homo sapiens
  misc_RNA (1)...(19): siRNA sense strand
gacaacauaacccagauag

SEQ ID NO: 761330 - RNA, 19 nt, Homo sapiens
  misc_RNA (1)...(19): siRNA sense strand
gcaacuugacaucaugaau

SEQ ID NO: 761331 - RNA, 19 nt, Homo sapiens
  misc_RNA (1)...(19): siRNA sense strand
uaaugcagagucaaguaaa

SEQ ID NO: 761332 - RNA, 19 nt, Homo sapiens
  misc_RNA (1)...(19): siRNA sense strand
caagaagcagcagcacauu

SEQ ID NO: 761333 - RNA, 19 nt, Homo sapiens
  misc_RNA (1)...(19): siRNA sense strand
cagccaagaauguuuaaag

SEQ ID NO: 761334 - RNA, 19 nt, Homo sapiens
  misc_RNA (1)...(19): siRNA sense strand
agagcaacuugacaucaug

SEQ ID NO: 761335 - RNA, 19 nt, Homo sapiens
  misc_RNA (1)...(19): siRNA sense strand
ugcagaaacucagccaaga

SEQ ID NO: 761336 - RNA, 19 nt, Homo sapiens
  misc_RNA (1)...(19): siRNA sense strand
cagcacauugacaacauaa

SEQ ID NO: 761337 - RNA, 19 nt, Homo sapiens
  misc_RNA (1)...(19): siRNA sense strand
guggagaguacauuacaga

SEQ ID NO: 761338 - RNA, 19 nt, Homo sapiens
  misc_RNA (1)...(19): siRNA sense strand
acucagccaagaauguuua

SEQ ID NO: 761339 - RNA, 19 nt, Homo sapiens
  misc_RNA (1)...(19): siRNA sense strand
gaagcgcuggccaagaaau

SEQ ID NO: 761340 - RNA, 19 nt, Homo sapiens
  misc_RNA (1)...(19): siRNA sense strand
guuuaaagcagcuggcaau

SEQ ID NO: 761341 - RNA, 19 nt, Homo sapiens
  misc_RNA (1)...(19): siRNA sense strand
cagauuacuacuugacgaa

SEQ ID NO: 761342 - RNA, 19 nt, Homo sapiens
  misc_RNA (1)...(19): siRNA sense strand
ggaagcgcuggccaagaaa

SEQ ID NO: 761343 - RNA, 19 nt, Homo sapiens
  misc_RNA (1)...(19): siRNA sense strand
gcacauugacaacauaacc

SEQ ID NO: 761344 - RNA, 19 nt, Homo sapiens
  misc_RNA (1)...(19): siRNA sense strand
ggagaugcagcagcagaug

SEQ ID NO: 761345 - RNA, 19 nt, Homo sapiens
  misc_RNA (1)...(19): siRNA sense strand
ccaccgagcaggagaugca

SEQ ID NO: 761346 - RNA, 19 nt, Homo sapiens
  misc_RNA (1)...(19): siRNA sense strand
acauaacccagauagaaga

SEQ ID NO: 761347 - RNA, 19 nt, Homo sapiens
  misc_RNA (1)...(19): siRNA sense strand
uggaagccguggagaguac

SEQ ID NO: 761348 - RNA, 19 nt, Homo sapiens
  misc_RNA (1)...(19): siRNA sense strand
gccaagaauguuuaaagca

SEQ ID NO: 761349 - RNA, 19 nt, Homo sapiens
  misc_RNA (1)...(19): siRNA sense strand
gcagcuggcaaucaagaag

SEQ ID NO: 761350 - RNA, 19 nt, Homo sapiens
  misc_RNA (1)...(19): siRNA sense strand
caacagggucuggaguauc

SEQ ID NO: 761351 - RNA, 19 nt, Homo sapiens
  misc_RNA (1)...(19): siRNA sense strand
gcgcuggccaagaaauuca

SEQ ID NO: 761352 - RNA, 19 nt, Homo sapiens
  misc_RNA (1)...(19): siRNA sense strand
uuaaagcagcuggcaauca

SEQ ID NO: 761353 - RNA, 19 nt, Homo sapiens
  misc_RNA (1)...(19): siRNA sense strand
gaggaagcgcuggccaaga

SEQ ID NO: 761354 - RNA, 19 nt, Homo sapiens
  misc_RNA (1)...(19): siRNA sense strand
cauuacagacgccauugga

SEQ ID NO: 761355 - RNA, 19 nt, Homo sapiens
  misc_RNA (1)...(19): siRNA sense strand
gaacucagauuacuacuug

SEQ ID NO: 761356 - RNA, 19 nt, Homo sapiens
  misc_RNA (1)...(19): siRNA sense strand
gccaagaaauucauugaua

SEQ ID NO: 761357 - RNA, 19 nt, Homo sapiens
  misc_RNA (1)...(19): siRNA sense strand
uaaagcagcuggcaaucaa

SEQ ID NO: 761358 - RNA, 19 nt, Homo sapiens
  misc_RNA (1)...(19): siRNA sense strand
ccgagaagcucaaggcuaa

SEQ ID NO: 761359 - RNA, 19 nt, Homo sapiens
  misc_RNA (1)...(19): siRNA sense strand
caacauaacccagauagaa

SEQ ID NO: 761360 - RNA, 19 nt, Homo sapiens
  misc_RNA (1)...(19): siRNA sense strand
gcagcacauugacaacaua

SEQ ID NO: 761361 - RNA, 19 nt, Homo sapiens
  misc_RNA (1)...(19): siRNA sense strand
gagagcaacuugacaucau

SEQ ID NO: 761362 - RNA, 19 nt, Homo sapiens
  misc_RNA (1)...(19): siRNA sense strand
gaaacucagccaagaaugu

SEQ ID NO: 761363 - RNA, 19 nt, Homo sapiens
  misc_RNA (1)...(19): siRNA sense strand
ugaaugaucucuccaacag

SEQ ID NO: 761364 - RNA, 19 nt, Homo sapiens
  misc_RNA (1)...(19): siRNA sense strand
aggaagcgcuggccaagaa

SEQ ID NO: 761365 - RNA, 19 nt, Homo sapiens
  misc_RNA (1)...(19): siRNA sense strand
caacuugacaucaugaaug

SEQ ID NO: 761366 - RNA, 19 nt, Homo sapiens
  misc_RNA (1)...(19): siRNA sense strand
gcagaaacucagccaagaa

SEQ ID NO: 761367 - RNA, 19 nt, Homo sapiens
  misc_RNA (1)...(19): siRNA sense strand
uccagaggcuucaggcaua

SEQ ID NO: 761368 - RNA, 19 nt, Homo sapiens
  misc_RNA (1)...(19): siRNA sense strand
gauuacuacuugacgaaga

SEQ ID NO: 761369 - RNA, 19 nt, Homo sapiens
  misc_RNA (1)...(19): siRNA sense strand
gcagagagcaacuugacau

SEQ ID NO: 761370 - RNA, 19 nt, Homo sapiens
  misc_RNA (1)...(19): siRNA sense strand
gcuaaugcagagucaagua

SEQ ID NO: 761371 - RNA, 19 nt, Homo sapiens
  misc_RNA (1)...(19): siRNA sense strand
agaagcagcagcacauuga

SEQ ID NO: 761372 - RNA, 19 nt, Homo sapiens
  misc_RNA (1)...(19): siRNA sense strand
guacauuacagacgccauu

SEQ ID NO: 761373 - RNA, 19 nt, Homo sapiens
  misc_RNA (1)...(19): siRNA sense strand
ccaacagggucuggaguau

SEQ ID NO: 761374 - RNA, 19 nt, Homo sapiens
  misc_RNA (1)...(19): siRNA sense strand
uagaagaugccaccgagaa

SEQ ID NO: 761375 - RNA, 19 nt, Homo sapiens
  misc_RNA (1)...(19): siRNA sense strand
aacagggucuggaguauca

SEQ ID NO: 761376 - RNA, 19 nt, Homo sapiens
  misc_RNA (1)...(19): siRNA sense strand
cuaaugcagagucaaguaa

SEQ ID NO: 761377 - RNA, 19 nt, Homo sapiens
  misc_RNA (1)...(19): siRNA sense strand
gagaugcagcagcagauga

SEQ ID NO: 761378 - RNA, 19 nt, Homo sapiens
  misc_RNA (1)...(19): siRNA sense strand
cagaaacucagccaagaau

SEQ ID NO: 761379 - RNA, 19 nt, Homo sapiens
  misc_RNA (1)...(19): siRNA sense strand
ucaagaagcagcagcacau

SEQ ID NO: 761380 - RNA, 19 nt, Homo sapiens
  misc_RNA (1)...(19): siRNA sense strand
gagcaacuugacaucauga

SEQ ID NO: 761381 - RNA, 19 nt, Homo sapiens
  misc_RNA (1)...(19): siRNA sense strand
gagaagcucaaggcuaaug

SEQ ID NO: 761382 - RNA, 19 nt, Homo sapiens
  misc_RNA (1)...(19): siRNA sense strand
ugacaacauaacccagaua

SEQ ID NO: 761383 - RNA, 19 nt, Homo sapiens
  misc_RNA (1)...(19): siRNA sense strand
aaacucagccaagaauguu

SEQ ID NO: 761384 - RNA, 19 nt, Homo sapiens
  misc_RNA (1)...(19): siRNA sense strand
caaggcuaaugcagaguca

SEQ ID NO: 761385 - RNA, 19 nt, Homo sapiens
  misc_RNA (1)...(19): siRNA sense strand
gacaacauaacccagauag

SEQ ID NO: 761386 - RNA, 19 nt, Homo sapiens
  misc_RNA (1)...(19): siRNA sense strand
gcaacuugacaucaugaau

SEQ ID NO: 761387 - RNA, 19 nt, Homo sapiens
  misc_RNA (1)...(19): siRNA sense strand
uaaugcagagucaaguaaa

SEQ ID NO: 761388 - RNA, 19 nt, Homo sapiens
  misc_RNA (1)...(19): siRNA sense strand
caagaagcagcagcacauu

SEQ ID NO: 761389 - RNA, 19 nt, Homo sapiens
  misc_RNA (1)...(19): siRNA sense strand
cagccaagaauguuuaaag

SEQ ID NO: 761390 - RNA, 19 nt, Homo sapiens
  misc_RNA (1)...(19): siRNA sense strand
agagcaacuugacaucaug

SEQ ID NO: 761391 - RNA, 19 nt, Homo sapiens
  misc_RNA (1)...(19): siRNA sense strand
ugcagaaacucagccaaga

SEQ ID NO: 761392 - RNA, 19 nt, Homo sapiens
  misc_RNA (1)...(19): siRNA sense strand
cagcacauugacaacauaa

SEQ ID NO: 761393 - RNA, 19 nt, Homo sapiens
  misc_RNA (1)...(19): siRNA sense strand
guggagaguacauuacaga

SEQ ID NO: 761394 - RNA, 19 nt, Homo sapiens
  misc_RNA (1)...(19): siRNA sense strand
acucagccaagaauguuua

SEQ ID NO: 761395 - RNA, 19 nt, Homo sapiens
  misc_RNA (1)...(19): siRNA sense strand
gaagcgcuggccaagaaau

SEQ ID NO: 761396 - RNA, 19 nt, Homo sapiens
  misc_RNA (1)...(19): siRNA sense strand
guuuaaagcagcuggcaau

SEQ ID NO: 761397 - RNA, 19 nt, Homo sapiens
  misc_RNA (1)...(19): siRNA sense strand
cagauuacuacuugacgaa

SEQ ID NO: 761398 - RNA, 19 nt, Homo sapiens
  misc_RNA (1)...(19): siRNA sense strand
ggaagcgcuggccaagaaa

SEQ ID NO: 761399 - RNA, 19 nt, Homo sapiens
  misc_RNA (1)...(19): siRNA sense strand
gcacauugacaacauaacc

SEQ ID NO: 761400 - RNA, 19 nt, Homo sapiens
  misc_RNA (1)...(19): siRNA sense strand
ggagaugcagcagcagaug

SEQ ID NO: 761401 - RNA, 19 nt, Homo sapiens
  misc_RNA (1)...(19): siRNA sense strand
ccaccgagcaggagaugca

SEQ ID NO: 761402 - RNA, 19 nt, Homo sapiens
  misc_RNA (1)...(19): siRNA sense strand
acauaacccagauagaaga

SEQ ID NO: 761403 - RNA, 19 nt, Homo sapiens
  misc_RNA (1)...(19): siRNA sense strand
uggaagccguggagaguac

SEQ ID NO: 761404 - RNA, 19 nt, Homo sapiens
  misc_RNA (1)...(19): siRNA sense strand
gccaagaauguuuaaagca

SEQ ID NO: 761405 - RNA, 19 nt, Homo sapiens
  misc_RNA (1)...(19): siRNA sense strand
gcagcuggcaaucaagaag

SEQ ID NO: 761406 - RNA, 19 nt, Homo sapiens
  misc_RNA (1)...(19): siRNA sense strand
caacagggucuggaguauc

SEQ ID NO: 761407 - RNA, 19 nt, Homo sapiens
  misc_RNA (1)...(19): siRNA sense strand
gcgcuggccaagaaauuca

SEQ ID NO: 761408 - RNA, 19 nt, Homo sapiens
  misc_RNA (1)...(19): siRNA sense strand
uuaaagcagcuggcaauca

SEQ ID NO: 761409 - RNA, 19 nt, Homo sapiens
  misc_RNA (1)...(19): siRNA sense strand
gaggaagcgcuggccaaga

SEQ ID NO: 761410 - RNA, 19 nt, Homo sapiens
  misc_RNA (1)...(19): siRNA sense strand
cauuacagacgccauugga

SEQ ID NO: 761411 - RNA, 19 nt, Homo sapiens
  misc_RNA (1)...(19): siRNA sense strand
gaacucagauuacuacuug

SEQ ID NO: 761412 - RNA, 19 nt, Homo sapiens
  misc_RNA (1)...(19): siRNA sense strand
gccaagaaauucauugaua

SEQ ID NO: 761413 - RNA, 19 nt, Homo sapiens
  misc_RNA (1)...(19): siRNA sense strand
uaaagcagcuggcaaucaa

SEQ ID NO: 761414 - RNA, 19 nt, Homo sapiens
  misc_RNA (1)...(19): siRNA sense strand
ccgagaagcucaaggcuaa

SEQ ID NO: 761415 - RNA, 19 nt, Homo sapiens
  misc_RNA (1)...(19): siRNA sense strand
caacauaacccagauagaa

SEQ ID NO: 761416 - RNA, 19 nt, Homo sapiens
  misc_RNA (1)...(19): siRNA sense strand
gcagcacauugacaacaua

SEQ ID NO: 761417 - RNA, 19 nt, Homo sapiens
  misc_RNA (1)...(19): siRNA sense strand
gagagcaacuugacaucau

SEQ ID NO: 761418 - RNA, 19 nt, Homo sapiens
  misc_RNA (1)...(19): siRNA sense strand
gaaacucagccaagaaugu

SEQ ID NO: 761419 - RNA, 19 nt, Homo sapiens
  misc_RNA (1)...(19): siRNA sense strand
ugaaugaucucuccaacag

SEQ ID NO: 761420 - RNA, 19 nt, Homo sapiens
  misc_RNA (1)...(19): siRNA sense strand
aggaagcgcuggccaagaa

SEQ ID NO: 761421 - RNA, 19 nt, Homo sapiens
  misc_RNA (1)...(19): siRNA sense strand
caacuugacaucaugaaug

SEQ ID NO: 761422 - RNA, 19 nt, Homo sapiens
  misc_RNA (1)...(19): siRNA sense strand
gcagaaacucagccaagaa

SEQ ID NO: 761423 - RNA, 19 nt, Homo sapiens
  misc_RNA (1)...(19): siRNA sense strand
uccagaggcuucaggcaua

SEQ ID NO: 761424 - RNA, 19 nt, Homo sapiens
  misc_RNA (1)...(19): siRNA sense strand
gauuacuacuugacgaaga

SEQ ID NO: 761425 - RNA, 19 nt, Homo sapiens
  misc_RNA (1)...(19): siRNA sense strand
gcagagagcaacuugacau

SEQ ID NO: 761426 - RNA, 19 nt, Homo sapiens
  misc_RNA (1)...(19): siRNA sense strand
gcuaaugcagagucaagua

SEQ ID NO: 761427 - RNA, 19 nt, Homo sapiens
  misc_RNA (1)...(19): siRNA sense strand
agaagcagcagcacauuga

SEQ ID NO: 761428 - RNA, 19 nt, Homo sapiens
  misc_RNA (1)...(19): siRNA sense strand
guacauuacagacgccauu

SEQ ID NO: 761429 - RNA, 19 nt, Homo sapiens
  misc_RNA (1)...(19): siRNA sense strand
ccaacagggucuggaguau

SEQ ID NO: 761430 - RNA, 19 nt, Homo sapiens
  misc_RNA (1)...(19): siRNA sense strand
uagaagaugccaccgagaa

SEQ ID NO: 761431 - RNA, 19 nt, Homo sapiens
  misc_RNA (1)...(19): siRNA sense strand
aacagggucuggaguauca

SEQ ID NO: 761432 - RNA, 19 nt, Homo sapiens
  misc_RNA (1)...(19): siRNA sense strand
cuaaugcagagucaaguaa

SEQ ID NO: 761433 - RNA, 19 nt, Homo sapiens
  misc_RNA (1)...(19): siRNA sense strand
gagaugcagcagcagauga

SEQ ID NO: 761434 - RNA, 19 nt, Homo sapiens
  misc_RNA (1)...(19): siRNA sense strand
cagaaacucagccaagaau

SEQ ID NO: 761435 - RNA, 19 nt, Homo sapiens
  misc_RNA (1)...(19): siRNA sense strand
ucaagaagcagcagcacau

SEQ ID NO: 761436 - RNA, 19 nt, Homo sapiens
  misc_RNA (1)...(19): siRNA sense strand
gagcaacuugacaucauga

SEQ ID NO: 761437 - RNA, 19 nt, Homo sapiens
  misc_RNA (1)...(19): siRNA sense strand
gagaagcucaaggcuaaug

SEQ ID NO: 761438 - RNA, 19 nt, Homo sapiens
  misc_RNA (1)...(19): siRNA sense strand
ugacaacauaacccagaua

SEQ ID NO: 761439 - RNA, 19 nt, Homo sapiens
  misc_RNA (1)...(19): siRNA sense strand
aaacucagccaagaauguu

SEQ ID NO: 761440 - RNA, 19 nt, Homo sapiens
  misc_RNA (1)...(19): siRNA sense strand
caaggcuaaugcagaguca

SEQ ID NO: 761441 - RNA, 19 nt, Homo sapiens
  misc_RNA (1)...(19): siRNA sense strand
gacaacauaacccagauag

SEQ ID NO: 761442 - RNA, 19 nt, Homo sapiens
  misc_RNA (1)...(19): siRNA sense strand
gcaacuugacaucaugaau

SEQ ID NO: 761443 - RNA, 19 nt, Homo sapiens
  misc_RNA (1)...(19): siRNA sense strand
uaaugcagagucaaguaaa

SEQ ID NO: 761444 - RNA, 19 nt, Homo sapiens
  misc_RNA (1)...(19): siRNA sense strand
caagaagcagcagcacauu

SEQ ID NO: 761445 - RNA, 19 nt, Homo sapiens
  misc_RNA (1)...(19): siRNA sense strand
cagccaagaauguuuaaag

SEQ ID NO: 761446 - RNA, 19 nt, Homo sapiens
  misc_RNA (1)...(19): siRNA sense strand
agagcaacuugacaucaug

SEQ ID NO: 761447 - RNA, 19 nt, Homo sapiens
  misc_RNA (1)...(19): siRNA sense strand
ugcagaaacucagccaaga

SEQ ID NO: 761448 - RNA, 19 nt, Homo sapiens
  misc_RNA (1)...(19): siRNA sense strand
cagcacauugacaacauaa

SEQ ID NO: 761449 - RNA, 19 nt, Homo sapiens
  misc_RNA (1)...(19): siRNA sense strand
guggagaguacauuacaga

SEQ ID NO: 761450 - RNA, 19 nt, Homo sapiens
  misc_RNA (1)...(19): siRNA sense strand
acucagccaagaauguuua

SEQ ID NO: 761451 - RNA, 19 nt, Homo sapiens
  misc_RNA (1)...(19): siRNA sense strand
gaagcgcuggccaagaaau

SEQ ID NO: 761452 - RNA, 19 nt, Homo sapiens
  misc_RNA (1)...(19): siRNA sense strand
guuuaaagcagcuggcaau

SEQ ID NO: 761453 - RNA, 19 nt, Homo sapiens
  misc_RNA (1)...(19): siRNA sense strand
cagauuacuacuugacgaa

SEQ ID NO: 761454 - RNA, 19 nt, Homo sapiens
  misc_RNA (1)...(19): siRNA sense strand
ggaagcgcuggccaagaaa

SEQ ID NO: 761455 - RNA, 19 nt, Homo sapiens
  misc_RNA (1)...(19): siRNA sense strand
gcacauugacaacauaacc

SEQ ID NO: 761456 - RNA, 19 nt, Homo sapiens
  misc_RNA (1)...(19): siRNA sense strand
ggagaugcagcagcagaug

SEQ ID NO: 761457 - RNA, 19 nt, Homo sapiens
  misc_RNA (1)...(19): siRNA sense strand
ccaccgagcaggagaugca

SEQ ID NO: 761458 - RNA, 19 nt, Homo sapiens
  misc_RNA (1)...(19): siRNA sense strand
acauaacccagauagaaga

SEQ ID NO: 761459 - RNA, 19 nt, Homo sapiens
  misc_RNA (1)...(19): siRNA sense strand
uggaagccguggagaguac

SEQ ID NO: 761460 - RNA, 19 nt, Homo sapiens
  misc_RNA (1)...(19): siRNA sense strand
gccaagaauguuuaaagca

SEQ ID NO: 761461 - RNA, 19 nt, Homo sapiens
  misc_RNA (1)...(19): siRNA sense strand
gcagcuggcaaucaagaag

SEQ ID NO: 761462 - RNA, 19 nt, Homo sapiens
  misc_RNA (1)...(19): siRNA sense strand
caacagggucuggaguauc

SEQ ID NO: 761463 - RNA, 19 nt, Homo sapiens
  misc_RNA (1)...(19): siRNA sense strand
gcgcuggccaagaaauuca

SEQ ID NO: 761464 - RNA, 19 nt, Homo sapiens
  misc_RNA (1)...(19): siRNA sense strand
uuaaagcagcuggcaauca

SEQ ID NO: 761465 - RNA, 19 nt, Homo sapiens
  misc_RNA (1)...(19): siRNA sense strand
gaggaagcgcuggccaaga

SEQ ID NO: 761466 - RNA, 19 nt, Homo sapiens
  misc_RNA (1)...(19): siRNA sense strand
cauuacagacgccauugga

SEQ ID NO: 761467 - RNA, 19 nt, Homo sapiens
  misc_RNA (1)...(19): siRNA sense strand
gaacucagauuacuacuug

SEQ ID NO: 761468 - RNA, 19 nt, Homo sapiens
  misc_RNA (1)...(19): siRNA sense strand
gccaagaaauucauugaua

SEQ ID NO: 761469 - RNA, 19 nt, Homo sapiens
  misc_RNA (1)...(19): siRNA sense strand
uaaagcagcuggcaaucaa

SEQ ID NO: 761470 - RNA, 19 nt, Homo sapiens
  misc_RNA (1)...(19): siRNA sense strand
ccgagaagcucaaggcuaa

SEQ ID NO: 761471 - RNA, 19 nt, Homo sapiens
  misc_RNA (1)...(19): siRNA sense strand
caacauaacccagauagaa

SEQ ID NO: 761472 - RNA, 19 nt, Homo sapiens
  misc_RNA (1)...(19): siRNA sense strand
gcagcacauugacaacaua

SEQ ID NO: 761473 - RNA, 19 nt, Homo sapiens
  misc_RNA (1)...(19): siRNA sense strand
gagagcaacuugacaucau

SEQ ID NO: 761474 - RNA, 19 nt, Homo sapiens
  misc_RNA (1)...(19): siRNA sense strand
gaaacucagccaagaaugu

SEQ ID NO: 761475 - RNA, 19 nt, Homo sapiens
  misc_RNA (1)...(19): siRNA sense strand
ugaaugaucucuccaacag

SEQ ID NO: 761476 - RNA, 19 nt, Homo sapiens
  misc_RNA (1)...(19): siRNA sense strand
aggaagcgcuggccaagaa

SEQ ID NO: 761477 - RNA, 19 nt, Homo sapiens
  misc_RNA (1)...(19): siRNA sense strand
caacuugacaucaugaaug

SEQ ID NO: 761478 - RNA, 19 nt, Homo sapiens
  misc_RNA (1)...(19): siRNA sense strand
gcagaaacucagccaagaa

SEQ ID NO: 761479 - RNA, 19 nt, Homo sapiens
  misc_RNA (1)...(19): siRNA sense strand
uccagaggcuucaggcaua

SEQ ID NO: 761480 - RNA, 19 nt, Homo sapiens
  misc_RNA (1)...(19): siRNA sense strand
gauuacuacuugacgaaga

SEQ ID NO: 761481 - RNA, 19 nt, Homo sapiens
  misc_RNA (1)...(19): siRNA sense strand
gcagagagcaacuugacau

SEQ ID NO: 761482 - RNA, 19 nt, Homo sapiens
  misc_RNA (1)...(19): siRNA sense strand
gcuaaugcagagucaagua

SEQ ID NO: 761483 - RNA, 19 nt, Homo sapiens
  misc_RNA (1)...(19): siRNA sense strand
agaagcagcagcacauuga

SEQ ID NO: 761484 - RNA, 19 nt, Homo sapiens
  misc_RNA (1)...(19): siRNA sense strand
guacauuacagacgccauu

SEQ ID NO: 761485 - RNA, 19 nt, Homo sapiens
  misc_RNA (1)...(19): siRNA sense strand
ccaacagggucuggaguau

SEQ ID NO: 761486 - RNA, 19 nt, Homo sapiens
  misc_RNA (1)...(19): siRNA sense strand
uagaagaugccaccgagaa

SEQ ID NO: 761487 - RNA, 19 nt, Homo sapiens
  misc_RNA (1)...(19): siRNA sense strand
aacagggucuggaguauca

SEQ ID NO: 761488 - RNA, 19 nt, Homo sapiens
  misc_RNA (1)...(19): siRNA sense strand
cuaaugcagagucaaguaa

SEQ ID NO: 761489 - RNA, 19 nt, Homo sapiens
  misc_RNA (1)...(19): siRNA sense strand
gagaugcagcagcagauga

SEQ ID NO: 761490 - RNA, 19 nt, Homo sapiens
  misc_RNA (1)...(19): siRNA sense strand
cagaaacucagccaagaau

SEQ ID NO: 761491 - RNA, 19 nt, Homo sapiens
  misc_RNA (1)...(19): siRNA sense strand
ucaagaagcagcagcacau

SEQ ID NO: 761492 - RNA, 19 nt, Homo sapiens
  misc_RNA (1)...(19): siRNA sense strand
gagcaacuugacaucauga

SEQ ID NO: 761493 - RNA, 19 nt, Homo sapiens
  misc_RNA (1)...(19): siRNA sense strand
gagaagcucaaggcuaaug

SEQ ID NO: 761494 - RNA, 19 nt, Homo sapiens
  misc_RNA (1)...(19): siRNA sense strand
ugacaacauaacccagaua

SEQ ID NO: 761495 - RNA, 19 nt, Homo sapiens
  misc_RNA (1)...(19): siRNA sense strand
aaacucagccaagaauguu

SEQ ID NO: 761496 - RNA, 19 nt, Homo sapiens
  misc_RNA (1)...(19): siRNA sense strand
caaggcuaaugcagaguca

SEQ ID NO: 761497 - RNA, 19 nt, Homo sapiens
  misc_RNA (1)...(19): siRNA sense strand
gacaacauaacccagauag

SEQ ID NO: 761498 - RNA, 19 nt, Homo sapiens
  misc_RNA (1)...(19): siRNA sense strand
gcaacuugacaucaugaau

SEQ ID NO: 761499 - RNA, 19 nt, Homo sapiens
  misc_RNA (1)...(19): siRNA sense strand
uaaugcagagucaaguaaa

SEQ ID NO: 761500 - RNA, 19 nt, Homo sapiens
  misc_RNA (1)...(19): siRNA sense strand
caagaagcagcagcacauu

SEQ ID NO: 761501 - RNA, 19 nt, Homo sapiens
  misc_RNA (1)...(19): siRNA sense strand
cagccaagaauguuuaaag

SEQ ID NO: 761502 - RNA, 19 nt, Homo sapiens
  misc_RNA (1)...(19): siRNA sense strand
agagcaacuugacaucaug

SEQ ID NO: 761503 - RNA, 19 nt, Homo sapiens
  misc_RNA (1)...(19): siRNA sense strand
ugcagaaacucagccaaga

SEQ ID NO: 761504 - RNA, 19 nt, Homo sapiens
  misc_RNA (1)...(19): siRNA sense strand
cagcacauugacaacauaa

SEQ ID NO: 761505 - RNA, 19 nt, Homo sapiens
  misc_RNA (1)...(19): siRNA sense strand
guggagaguacauuacaga

SEQ ID NO: 761506 - RNA, 19 nt, Homo sapiens
  misc_RNA (1)...(19): siRNA sense strand
acucagccaagaauguuua

SEQ ID NO: 761507 - RNA, 19 nt, Homo sapiens
  misc_RNA (1)...(19): siRNA sense strand
gaagcgcuggccaagaaau

SEQ ID NO: 761508 - RNA, 19 nt, Homo sapiens
  misc_RNA (1)...(19): siRNA sense strand
guuuaaagcagcuggcaau

SEQ ID NO: 761509 - RNA, 19 nt, Homo sapiens
  misc_RNA (1)...(19): siRNA sense strand
cagauuacuacuugacgaa

SEQ ID NO: 761510 - RNA, 19 nt, Homo sapiens
  misc_RNA (1)...(19): siRNA sense strand
ggaagcgcuggccaagaaa

SEQ ID NO: 761511 - RNA, 19 nt, Homo sapiens
  misc_RNA (1)...(19): siRNA sense strand
gcacauugacaacauaacc

SEQ ID NO: 761512 - RNA, 19 nt, Homo sapiens
  misc_RNA (1)...(19): siRNA sense strand
ggagaugcagcagcagaug

SEQ ID NO: 761513 - RNA, 19 nt, Homo sapiens
  misc_RNA (1)...(19): siRNA sense strand
ccaccgagcaggagaugca

SEQ ID NO: 761514 - RNA, 19 nt, Homo sapiens
  misc_RNA (1)...(19): siRNA sense strand
acauaacccagauagaaga

SEQ ID NO: 761515 - RNA, 19 nt, Homo sapiens
  misc_RNA (1)...(19): siRNA sense strand
uggaagccguggagaguac

SEQ ID NO: 761516 - RNA, 19 nt, Homo sapiens
  misc_RNA (1)...(19): siRNA sense strand
gccaagaauguuuaaagca

SEQ ID NO: 761517 - RNA, 19 nt, Homo sapiens
  misc_RNA (1)...(19): siRNA sense strand
gcagcuggcaaucaagaag

SEQ ID NO: 761518 - RNA, 19 nt, Homo sapiens
  misc_RNA (1)...(19): siRNA sense strand
caacagggucuggaguauc

SEQ ID NO: 761519 - RNA, 19 nt, Homo sapiens
  misc_RNA (1)...(19): siRNA sense strand
gcgcuggccaagaaauuca

SEQ ID NO: 761520 - RNA, 19 nt, Homo sapiens
  misc_RNA (1)...(19): siRNA sense strand
uuaaagcagcuggcaauca

SEQ ID NO: 761521 - RNA, 19 nt, Homo sapiens
  misc_RNA (1)...(19): siRNA sense strand
gaggaagcgcuggccaaga

SEQ ID NO: 761522 - RNA, 19 nt, Homo sapiens
  misc_RNA (1)...(19): siRNA sense strand
cauuacagacgccauugga

SEQ ID NO: 761523 - RNA, 19 nt, Homo sapiens
  misc_RNA (1)...(19): siRNA sense strand
gaacucagauuacuacuug

SEQ ID NO: 761524 - RNA, 19 nt, Homo sapiens
  misc_RNA (1)...(19): siRNA sense strand
gccaagaaauucauugaua

SEQ ID NO: 761525 - RNA, 19 nt, Homo sapiens
  misc_RNA (1)...(19): siRNA sense strand
uaaagcagcuggcaaucaa

SEQ ID NO: 761526 - RNA, 19 nt, Homo sapiens
  misc_RNA (1)...(19): siRNA sense strand
ccgagaagcucaaggcuaa

SEQ ID NO: 761527 - RNA, 19 nt, Homo sapiens
  misc_RNA (1)...(19): siRNA sense strand
caacauaacccagauagaa

SEQ ID NO: 761528 - RNA, 19 nt, Homo sapiens
  misc_RNA (1)...(19): siRNA sense strand
gcagcacauugacaacaua

SEQ ID NO: 761529 - RNA, 19 nt, Homo sapiens
  misc_RNA (1)...(19): siRNA sense strand
gagagcaacuugacaucau

SEQ ID NO: 761530 - RNA, 19 nt, Homo sapiens
  misc_RNA (1)...(19): siRNA sense strand
gaaacucagccaagaaugu

SEQ ID NO: 761531 - RNA, 19 nt, Homo sapiens
  misc_RNA (1)...(19): siRNA sense strand
ugaaugaucucuccaacag

SEQ ID NO: 761532 - RNA, 19 nt, Homo sapiens
  misc_RNA (1)...(19): siRNA sense strand
aggaagcgcuggccaagaa

SEQ ID NO: 761533 - RNA, 19 nt, Homo sapiens
  misc_RNA (1)...(19): siRNA sense strand
caacuugacaucaugaaug

SEQ ID NO: 761534 - RNA, 19 nt, Homo sapiens
  misc_RNA (1)...(19): siRNA sense strand
gcagaaacucagccaagaa

SEQ ID NO: 761535 - RNA, 19 nt, Homo sapiens
  misc_RNA (1)...(19): siRNA sense strand
uccagaggcuucaggcaua

SEQ ID NO: 761536 - RNA, 19 nt, Homo sapiens
  misc_RNA (1)...(19): siRNA sense strand
gauuacuacuugacgaaga

SEQ ID NO: 761537 - RNA, 19 nt, Homo sapiens
  misc_RNA (1)...(19): siRNA sense strand
gcagagagcaacuugacau

SEQ ID NO: 761538 - RNA, 19 nt, Homo sapiens
  misc_RNA (1)...(19): siRNA sense strand
gcuaaugcagagucaagua

SEQ ID NO: 761539 - RNA, 19 nt, Homo sapiens
  misc_RNA (1)...(19): siRNA sense strand
agaagcagcagcacauuga

SEQ ID NO: 761540 - RNA, 19 nt, Homo sapiens
  misc_RNA (1)...(19): siRNA sense strand
guacauuacagacgccauu

SEQ ID NO: 761541 - RNA, 19 nt, Homo sapiens
  misc_RNA (1)...(19): siRNA sense strand
ccaacagggucuggaguau

SEQ ID NO: 761542 - RNA, 19 nt, Homo sapiens
  misc_RNA (1)...(19): siRNA sense strand
uagaagaugccaccgagaa

SEQ ID NO: 761543 - RNA, 19 nt, Homo sapiens
  misc_RNA (1)...(19): siRNA sense strand
aacagggucuggaguauca

SEQ ID NO: 761544 - RNA, 19 nt, Homo sapiens
  misc_RNA (1)...(19): siRNA sense strand
cuaaugcagagucaaguaa

SEQ ID NO: 761545 - RNA, 19 nt, Homo sapiens
  misc_RNA (1)...(19): siRNA sense strand
gagaugcagcagcagauga

SEQ ID NO: 761546 - RNA, 19 nt, Homo sapiens
  misc_RNA (1)...(19): siRNA sense strand
cagaaacucagccaagaau

SEQ ID NO: 761547 - RNA, 19 nt, Homo sapiens
  misc_RNA (1)...(19): siRNA sense strand
ucaagaagcagcagcacau

SEQ ID NO: 761548 - RNA, 19 nt, Homo sapiens
  misc_RNA (1)...(19): siRNA sense strand
gagcaacuugacaucauga

SEQ ID NO: 761549 - RNA, 19 nt, Homo sapiens
  misc_RNA (1)...(19): siRNA sense strand
gagaagcucaaggcuaaug

SEQ ID NO: 761550 - RNA, 19 nt, Homo sapiens
  misc_RNA (1)...(19): siRNA sense strand
ugacaacauaacccagaua

SEQ ID NO: 761551 - RNA, 19 nt, Homo sapiens
  misc_RNA (1)...(19): siRNA sense strand
aaacucagccaagaauguu

SEQ ID NO: 761552 - RNA, 19 nt, Homo sapiens
  misc_RNA (1)...(19): siRNA sense strand
caaggcuaaugcagaguca

SEQ ID NO: 761553 - RNA, 19 nt, Homo sapiens
  misc_RNA (1)...(19): siRNA sense strand
gacaacauaacccagauag

SEQ ID NO: 761554 - RNA, 19 nt, Homo sapiens
  misc_RNA (1)...(19): siRNA sense strand
gcaacuugacaucaugaau

SEQ ID NO: 761555 - RNA, 19 nt, Homo sapiens
  misc_RNA (1)...(19): siRNA sense strand
uaaugcagagucaaguaaa

SEQ ID NO: 761556 - RNA, 19 nt, Homo sapiens
  misc_RNA (1)...(19): siRNA sense strand
caagaagcagcagcacauu

SEQ ID NO: 761557 - RNA, 19 nt, Homo sapiens
  misc_RNA (1)...(19): siRNA sense strand
cagccaagaauguuuaaag

SEQ ID NO: 761558 - RNA, 19 nt, Homo sapiens
  misc_RNA (1)...(19): siRNA sense strand
agagcaacuugacaucaug

SEQ ID NO: 761559 - RNA, 19 nt, Homo sapiens
  misc_RNA (1)...(19): siRNA sense strand
ugcagaaacucagccaaga

SEQ ID NO: 761560 - RNA, 19 nt, Homo sapiens
  misc_RNA (1)...(19): siRNA sense strand
cagcacauugacaacauaa

SEQ ID NO: 761561 - RNA, 19 nt, Homo sapiens
  misc_RNA (1)...(19): siRNA sense strand
guggagaguacauuacaga

SEQ ID NO: 761562 - RNA, 19 nt, Homo sapiens
  misc_RNA (1)...(19): siRNA sense strand
acucagccaagaauguuua

SEQ ID NO: 761563 - RNA, 19 nt, Homo sapiens
  misc_RNA (1)...(19): siRNA sense strand
gaagcgcuggccaagaaau

SEQ ID NO: 761564 - RNA, 19 nt, Homo sapiens
  misc_RNA (1)...(19): siRNA sense strand
guuuaaagcagcuggcaau

SEQ ID NO: 761565 - RNA, 19 nt, Homo sapiens
  misc_RNA (1)...(19): siRNA sense strand
cagauuacuacuugacgaa

SEQ ID NO: 761566 - RNA, 19 nt, Homo sapiens
  misc_RNA (1)...(19): siRNA sense strand
ggaagcgcuggccaagaaa

SEQ ID NO: 761567 - RNA, 19 nt, Homo sapiens
  misc_RNA (1)...(19): siRNA sense strand
gcacauugacaacauaacc

SEQ ID NO: 761568 - RNA, 19 nt, Homo sapiens
  misc_RNA (1)...(19): siRNA sense strand
ggagaugcagcagcagaug

SEQ ID NO: 761569 - RNA, 19 nt, Homo sapiens
  misc_RNA (1)...(19): siRNA sense strand
ccaccgagcaggagaugca

SEQ ID NO: 761570 - RNA, 19 nt, Homo sapiens
  misc_RNA (1)...(19): siRNA sense strand
acauaacccagauagaaga

SEQ ID NO: 761571 - RNA, 19 nt, Homo sapiens
  misc_RNA (1)...(19): siRNA sense strand
uggaagccguggagaguac

SEQ ID NO: 761572 - RNA, 19 nt, Homo sapiens
  misc_RNA (1)...(19): siRNA sense strand
gccaagaauguuuaaagca

SEQ ID NO: 761573 - RNA, 19 nt, Homo sapiens
  misc_RNA (1)...(19): siRNA sense strand
gcagcuggcaaucaagaag

SEQ ID NO: 761574 - RNA, 19 nt, Homo sapiens
  misc_RNA (1)...(19): siRNA sense strand
caacagggucuggaguauc

SEQ ID NO: 761575 - RNA, 19 nt, Homo sapiens
  misc_RNA (1)...(19): siRNA sense strand
gcgcuggccaagaaauuca

SEQ ID NO: 761576 - RNA, 19 nt, Homo sapiens
  misc_RNA (1)...(19): siRNA sense strand
uuaaagcagcuggcaauca

SEQ ID NO: 761577 - RNA, 19 nt, Homo sapiens
  misc_RNA (1)...(19): siRNA sense strand
gaggaagcgcuggccaaga

SEQ ID NO: 761578 - RNA, 19 nt, Homo sapiens
  misc_RNA (1)...(19): siRNA sense strand
cauuacagacgccauugga

SEQ ID NO: 761579 - RNA, 19 nt, Homo sapiens
  misc_RNA (1)...(19): siRNA sense strand
gaucauccuuccuggcaaa

SEQ ID NO: 761580 - RNA, 19 nt, Homo sapiens
  misc_RNA (1)...(19): siRNA sense strand
cauccuuccuggcaaauaa

SEQ ID NO: 761581 - RNA, 19 nt, Homo sapiens
  misc_RNA (1)...(19): siRNA sense strand
uaaaggugcgggaguauga

SEQ ID NO: 761582 - RNA, 19 nt, Homo sapiens
  misc_RNA (1)...(19): siRNA sense strand
gaacuucgcauccgcaaac

SEQ ID NO: 761583 - RNA, 19 nt, Homo sapiens
  misc_RNA (1)...(19): siRNA sense strand
gggaguaugaguuaagaaa

SEQ ID NO: 761584 - RNA, 19 nt, Homo sapiens
  misc_RNA (1)...(19): siRNA sense strand
aaagcuagauacacuguca

SEQ ID NO: 761585 - RNA, 19 nt, Homo sapiens
  misc_RNA (1)...(19): siRNA sense strand
gagaguggagacagacuga

SEQ ID NO: 761586 - RNA, 19 nt, Homo sapiens
  misc_RNA (1)...(19): siRNA sense strand
gcgggaguaugaguuaaga

SEQ ID NO: 761587 - RNA, 19 nt, Homo sapiens
  misc_RNA (1)...(19): siRNA sense strand
ggugcgggaguaugaguua

SEQ ID NO: 761588 - RNA, 19 nt, Homo sapiens
  misc_RNA (1)...(19): siRNA sense strand
gucuaaaggugcgggagua

SEQ ID NO: 761589 - RNA, 19 nt, Homo sapiens
  misc_RNA (1)...(19): siRNA sense strand
gauacacugucagauccuu

SEQ ID NO: 761590 - RNA, 19 nt, Homo sapiens
  misc_RNA (1)...(19): siRNA sense strand
cuagauacacugucagauc

SEQ ID NO: 761591 - RNA, 19 nt, Homo sapiens
  misc_RNA (1)...(19): siRNA sense strand
gguuccagcagaaguauga

SEQ ID NO: 761592 - RNA, 19 nt, Homo sapiens
  misc_RNA (1)...(19): siRNA sense strand
ccggagaaaugaaaagauu

SEQ ID NO: 761593 - RNA, 19 nt, Homo sapiens
  misc_RNA (1)...(19): siRNA sense strand
ucagauacuggaaacuuug

SEQ ID NO: 761594 - RNA, 19 nt, Homo sapiens
  misc_RNA (1)...(19): siRNA sense strand
gugcgggaguaugaguuaa

SEQ ID NO: 761595 - RNA, 19 nt, Homo sapiens
  misc_RNA (1)...(19): siRNA sense strand
ccaaacacagaaucagcaa

SEQ ID NO: 761596 - RNA, 19 nt, Homo sapiens
  misc_RNA (1)...(19): siRNA sense strand
caaacacagaaucagcaaa

SEQ ID NO: 761597 - RNA, 19 nt, Homo sapiens
  misc_RNA (1)...(19): siRNA sense strand
ggcgcaggaucaaggugaa

SEQ ID NO: 761598 - RNA, 19 nt, Homo sapiens
  misc_RNA (1)...(19): siRNA sense strand
ggcauccggagaaaugaaa

SEQ ID NO: 761599 - RNA, 19 nt, Homo sapiens
  misc_RNA (1)...(19): siRNA sense strand
gaacaagcgcuucuacuua

SEQ ID NO: 761600 - RNA, 19 nt, Homo sapiens
  misc_RNA (1)...(19): siRNA sense strand
gaugugggcugcaacaaau

SEQ ID NO: 761601 - RNA, 19 nt, Homo sapiens
  misc_RNA (1)...(19): siRNA sense strand
ggagguggaugaggauuga

SEQ ID NO: 761602 - RNA, 19 nt, Homo sapiens
  misc_RNA (1)...(19): siRNA sense strand
cggaugagaugaaagaaau

SEQ ID NO: 761603 - RNA, 19 nt, Homo sapiens
  misc_RNA (1)...(19): siRNA sense strand
cgacagagggauaagcuuu

SEQ ID NO: 761604 - RNA, 19 nt, Homo sapiens
  misc_RNA (1)...(19): siRNA sense strand
gacagagggauaagcuuua

SEQ ID NO: 761605 - RNA, 19 nt, Homo sapiens
  misc_RNA (1)...(19): siRNA sense strand
gaugaaagaaauccaggaa

SEQ ID NO: 761606 - RNA, 19 nt, Homo sapiens
  misc_RNA (1)...(19): siRNA sense strand
gugagaaccgcaaguacua

SEQ ID NO: 761607 - RNA, 19 nt, Homo sapiens
  misc_RNA (1)...(19): siRNA sense strand
aacaagcgcuucuacuuag

SEQ ID NO: 761608 - RNA, 19 nt, Homo sapiens
  misc_RNA (1)...(19): siRNA sense strand
gaaagaaauccaggaacga

SEQ ID NO: 761609 - RNA, 19 nt, Homo sapiens
  misc_RNA (1)...(19): siRNA sense strand
gcugggcgacuucauagaa

SEQ ID NO: 761610 - RNA, 19 nt, Homo sapiens
  misc_RNA (1)...(19): siRNA sense strand
caaguucggaggcgccuuu

SEQ ID NO: 761611 - RNA, 19 nt, Homo sapiens
  misc_RNA (1)...(19): siRNA sense strand
guaugcggaugagaugaaa

SEQ ID NO: 761612 - RNA, 19 nt, Homo sapiens
  misc_RNA (1)...(19): siRNA sense strand
gcggaugagaugaaagaaa

SEQ ID NO: 761613 - RNA, 19 nt, Homo sapiens
  misc_RNA (1)...(19): siRNA sense strand
gguaugcggaugagaugaa

SEQ ID NO: 761614 - RNA, 19 nt, Homo sapiens
  misc_RNA (1)...(19): siRNA sense strand
caggaacgacagagggaua

SEQ ID NO: 761615 - RNA, 19 nt, Homo sapiens
  misc_RNA (1)...(19): siRNA sense strand
gaaauccaggaacgacaga

SEQ ID NO: 761616 - RNA, 19 nt, Homo sapiens
  misc_RNA (1)...(19): siRNA sense strand
cgaugugggcugcaacaaa

SEQ ID NO: 761617 - RNA, 19 nt, Homo sapiens
  misc_RNA (1)...(19): siRNA sense strand
acuuagaugugaagcagaa

SEQ ID NO: 761618 - RNA, 19 nt, Homo sapiens
  misc_RNA (1)...(19): siRNA sense strand
cgcagggccucaucgaguu

SEQ ID NO: 761619 - RNA, 19 nt, Homo sapiens
  misc_RNA (1)...(19): siRNA sense strand
cgaagcucauagacgacua

SEQ ID NO: 761620 - RNA, 19 nt, Homo sapiens
  misc_RNA (1)...(19): siRNA sense strand
gcgacuucauagaacacua

SEQ ID NO: 761621 - RNA, 19 nt, Homo sapiens
  misc_RNA (1)...(19): siRNA sense strand
ggacuccaagcgcuucuuc

SEQ ID NO: 761622 - RNA, 19 nt, Homo sapiens
  misc_RNA (1)...(19): siRNA sense strand
gaagccguccuaccgcaau

SEQ ID NO: 761623 - RNA, 19 nt, Homo sapiens
  misc_RNA (1)...(19): siRNA sense strand
caucaccguacccuucaaa

SEQ ID NO: 761624 - RNA, 19 nt, Homo sapiens
  misc_RNA (1)...(19): siRNA sense strand
aguacuaccuggaccucaa

SEQ ID NO: 761625 - RNA, 19 nt, Homo sapiens
  misc_RNA (1)...(19): siRNA sense strand
ccaagcgcuucuucuucga

SEQ ID NO: 761626 - RNA, 19 nt, Homo sapiens
  misc_RNA (1)...(19): siRNA sense strand
gagcugaugcugcagauga

SEQ ID NO: 761627 - RNA, 19 nt, Homo sapiens
  misc_RNA (1)...(19): siRNA sense strand
ggagcgacacuaccaguug

SEQ ID NO: 761628 - RNA, 19 nt, Homo sapiens
  misc_RNA (1)...(19): siRNA sense strand
gcagcccugucccaccaua

SEQ ID NO: 761629 - RNA, 19 nt, Homo sapiens
  misc_RNA (1)...(19): siRNA sense strand
uacagagccuggugaagga

SEQ ID NO: 761630 - RNA, 19 nt, Homo sapiens
  misc_RNA (1)...(19): siRNA sense strand
ggaguugcccagcucuuuc

SEQ ID NO: 761631 - RNA, 19 nt, Homo sapiens
  misc_RNA (1)...(19): siRNA sense strand
cagcagcgccuguccuaca

SEQ ID NO: 761632 - RNA, 19 nt, Homo sapiens
  misc_RNA (1)...(19): siRNA sense strand
gcgauggaccagaagauca

SEQ ID NO: 761633 - RNA, 19 nt, Homo sapiens
  misc_RNA (1)...(19): siRNA sense strand
agaugaaccugcuggaacu

SEQ ID NO: 761634 - RNA, 19 nt, Homo sapiens
  misc_RNA (1)...(19): siRNA sense strand
gcuucuacgugaccaccaa

SEQ ID NO: 761635 - RNA, 19 nt, Homo sapiens
  misc_RNA (1)...(19): siRNA sense strand
ugcuggaacucauccgaaa

SEQ ID NO: 761636 - RNA, 19 nt, Homo sapiens
  misc_RNA (1)...(19): siRNA sense strand
gcagagcacacuggagaag

SEQ ID NO: 761637 - RNA, 19 nt, Homo sapiens
  misc_RNA (1)...(19): siRNA sense strand
agaacuagaggccguggaa

SEQ ID NO: 761638 - RNA, 19 nt, Homo sapiens
  misc_RNA (1)...(19): siRNA sense strand
gaaccugcuggaacucauc

SEQ ID NO: 761639 - RNA, 19 nt, Homo sapiens
  misc_RNA (1)...(19): siRNA sense strand
gcaccguguucgaaaucgu

SEQ ID NO: 761640 - RNA, 19 nt, Homo sapiens
  misc_RNA (1)...(19): siRNA sense strand
aaaagagccuguacaacca

SEQ ID NO: 761641 - RNA, 19 nt, Homo sapiens
  misc_RNA (1)...(19): siRNA sense strand
cccugaaggugguccauga

SEQ ID NO: 761642 - RNA, 19 nt, Homo sapiens
  misc_RNA (1)...(19): siRNA sense strand
gcgagaacgaugccgaguu

SEQ ID NO: 761643 - RNA, 19 nt, Homo sapiens
  misc_RNA (1)...(19): siRNA sense strand
gagcacggcgagaagaucu

SEQ ID NO: 761644 - RNA, 19 nt, Homo sapiens
  misc_RNA (1)...(19): siRNA sense strand
gaggagcacggcgagaaga

SEQ ID NO: 761645 - RNA, 19 nt, Homo sapiens
  misc_RNA (1)...(19): siRNA sense strand
cccugaaggugguccauga

SEQ ID NO: 761646 - RNA, 19 nt, Homo sapiens
  misc_RNA (1)...(19): siRNA sense strand
gcgagaacgaugccgaguu

SEQ ID NO: 761647 - RNA, 19 nt, Homo sapiens
  misc_RNA (1)...(19): siRNA sense strand
gagcacggcgagaagaucu

SEQ ID NO: 761648 - RNA, 19 nt, Homo sapiens
  misc_RNA (1)...(19): siRNA sense strand
gaggagcacggcgagaaga

SEQ ID NO: 761649 - RNA, 19 nt, Homo sapiens
  misc_RNA (1)...(19): siRNA sense strand
ggcaagagcuucacucaaa

SEQ ID NO: 761650 - RNA, 19 nt, Homo sapiens
  misc_RNA (1)...(19): siRNA sense strand
agagaaaccuuacaaauga

SEQ ID NO: 761651 - RNA, 19 nt, Homo sapiens
  misc_RNA (1)...(19): siRNA sense strand
gagagaagccuuacaaaug

SEQ ID NO: 761652 - RNA, 19 nt, Homo sapiens
  misc_RNA (1)...(19): siRNA sense strand
gagagaagccuuacaaaug

SEQ ID NO: 761653 - RNA, 19 nt, Homo sapiens
  misc_RNA (1)...(19): siRNA sense strand
gcucaaacaucacaacuug

SEQ ID NO: 761654 - RNA, 19 nt, Homo sapiens
  misc_RNA (1)...(19): siRNA sense strand
gcaaaucaccgaagaauuc

SEQ ID NO: 761655 - RNA, 19 nt, Homo sapiens
  misc_RNA (1)...(19): siRNA sense strand
ucacagauaucccuccuaa

SEQ ID NO: 761656 - RNA, 19 nt, Homo sapiens
  misc_RNA (1)...(19): siRNA sense strand
agagaaaccuuacaaaugu

SEQ ID NO: 761657 - RNA, 19 nt, Homo sapiens
  misc_RNA (1)...(19): siRNA sense strand
guucaaaucuugcaaguca

SEQ ID NO: 761658 - RNA, 19 nt, Homo sapiens
  misc_RNA (1)...(19): siRNA sense strand
agagaaaccuuacaaaugu

SEQ ID NO: 761659 - RNA, 19 nt, Homo sapiens
  misc_RNA (1)...(19): siRNA sense strand
cgaaagcccugacauugaa

SEQ ID NO: 761660 - RNA, 19 nt, Homo sapiens
  misc_RNA (1)...(19): siRNA sense strand
gagagaaaccuuacaaaug

SEQ ID NO: 761661 - RNA, 19 nt, Homo sapiens
  misc_RNA (1)...(19): siRNA sense strand
gagagaaaccuuacaaaug

SEQ ID NO: 761662 - RNA, 19 nt, Homo sapiens
  misc_RNA (1)...(19): siRNA sense strand
gagagaaaccuuacaaaug

SEQ ID NO: 761663 - RNA, 19 nt, Homo sapiens
  misc_RNA (1)...(19): siRNA sense strand
ggaguaagcuuucauucuc

SEQ ID NO: 761664 - RNA, 19 nt, Homo sapiens
  misc_RNA (1)...(19): siRNA sense strand
gaacaaaaccuuucaaaug

SEQ ID NO: 761665 - RNA, 19 nt, Homo sapiens
  misc_RNA (1)...(19): siRNA sense strand
cagguacgguugacauuua

SEQ ID NO: 761666 - RNA, 19 nt, Homo sapiens
  misc_RNA (1)...(19): siRNA sense strand
ugagaaaccuuacaagugu

SEQ ID NO: 761667 - RNA, 19 nt, Homo sapiens
  misc_RNA (1)...(19): siRNA sense strand
ggcaaggucuuuacucaaa

SEQ ID NO: 761668 - RNA, 19 nt, Homo sapiens
  misc_RNA (1)...(19): siRNA sense strand
gcaaggcguucacucagaa

SEQ ID NO: 761669 - RNA, 19 nt, Homo sapiens
  misc_RNA (1)...(19): siRNA sense strand
gggaaagccuucaguguuc

SEQ ID NO: 761670 - RNA, 19 nt, Homo sapiens
  misc_RNA (1)...(19): siRNA sense strand
gggaaagccuucaguguuc

SEQ ID NO: 761671 - RNA, 19 nt, Homo sapiens
  misc_RNA (1)...(19): siRNA sense strand
ggcaagcucuucacucaaa

SEQ ID NO: 761672 - RNA, 19 nt, Homo sapiens
  misc_RNA (1)...(19): siRNA sense strand
gguaaagucuucgcucaaa

SEQ ID NO: 761673 - RNA, 19 nt, Homo sapiens
  misc_RNA (1)...(19): siRNA sense strand
ggaaagagcccuggacugu

SEQ ID NO: 761674 - RNA, 19 nt, Homo sapiens
  misc_RNA (1)...(19): siRNA sense strand
agagaaaccuuacaagugu

SEQ ID NO: 761675 - RNA, 19 nt, Homo sapiens
  misc_RNA (1)...(19): siRNA sense strand
agagaaaccuuacaagugu

SEQ ID NO: 761676 - RNA, 19 nt, Homo sapiens
  misc_RNA (1)...(19): siRNA sense strand
agagaaaccuuacaagugu

SEQ ID NO: 761677 - RNA, 19 nt, Homo sapiens
  misc_RNA (1)...(19): siRNA sense strand
agagaaaccuuacaagugu

SEQ ID NO: 761678 - RNA, 19 nt, Homo sapiens
  misc_RNA (1)...(19): siRNA sense strand
aaagagcccuggacuguga

SEQ ID NO: 761679 - RNA, 19 nt, Homo sapiens
  misc_RNA (1)...(19): siRNA sense strand
gagagaaaccuuacaagug

SEQ ID NO: 761680 - RNA, 19 nt, Homo sapiens
  misc_RNA (1)...(19): siRNA sense strand
gagagaaaccuuacaagug

SEQ ID NO: 761681 - RNA, 19 nt, Homo sapiens
  misc_RNA (1)...(19): siRNA sense strand
gagagaaaccuuacaagug

SEQ ID NO: 761682 - RNA, 19 nt, Homo sapiens
  misc_RNA (1)...(19): siRNA sense strand
gagagaaaccuuacaagug

SEQ ID NO: 761683 - RNA, 19 nt, Homo sapiens
  misc_RNA (1)...(19): siRNA sense strand
gagagaaaccuuacaagug

SEQ ID NO: 761684 - RNA, 19 nt, Homo sapiens
  misc_RNA (1)...(19): siRNA sense strand
gaagagcugugugaaaaua

SEQ ID NO: 761685 - RNA, 19 nt, Homo sapiens
  misc_RNA (1)...(19): siRNA sense strand
ggagagaaaccuuacaaau

SEQ ID NO: 761686 - RNA, 19 nt, Homo sapiens
  misc_RNA (1)...(19): siRNA sense strand
ggagagaaaccuuacaaau

SEQ ID NO: 761687 - RNA, 19 nt, Homo sapiens
  misc_RNA (1)...(19): siRNA sense strand
ggagagaaaccuuacaaau

SEQ ID NO: 761688 - RNA, 19 nt, Homo sapiens
  misc_RNA (1)...(19): siRNA sense strand
gagaugacacaggaaauua

SEQ ID NO: 761689 - RNA, 19 nt, Homo sapiens
  misc_RNA (1)...(19): siRNA sense strand
gcaaaucaucgaagaauuc

SEQ ID NO: 761690 - RNA, 19 nt, Homo sapiens
  misc_RNA (1)...(19): siRNA sense strand
agagaagccuuacaaaugu

SEQ ID NO: 761691 - RNA, 19 nt, Homo sapiens
  misc_RNA (1)...(19): siRNA sense strand
gaacaaucagcuuggagua

SEQ ID NO: 761692 - RNA, 19 nt, Homo sapiens
  misc_RNA (1)...(19): siRNA sense strand
uuacaaaugucaugagugu

SEQ ID NO: 761693 - RNA, 19 nt, Homo sapiens
  misc_RNA (1)...(19): siRNA sense strand
gagaagagcaguacagaag

SEQ ID NO: 761694 - RNA, 19 nt, Homo sapiens
  misc_RNA (1)...(19): siRNA sense strand
ggagagaagccuuacaaau

SEQ ID NO: 761695 - RNA, 19 nt, Homo sapiens
  misc_RNA (1)...(19): siRNA sense strand
ggagagaagccuuacaaau

SEQ ID NO: 761696 - RNA, 19 nt, Homo sapiens
  misc_RNA (1)...(19): siRNA sense strand
gaagagcaguacagaagca

SEQ ID NO: 761697 - RNA, 19 nt, Homo sapiens
  misc_RNA (1)...(19): siRNA sense strand
caacaaauuccuucuagug

SEQ ID NO: 761698 - RNA, 19 nt, Homo sapiens
  misc_RNA (1)...(19): siRNA sense strand
ggcaaggucuucacucaga

SEQ ID NO: 761699 - RNA, 19 nt, Homo sapiens
  misc_RNA (1)...(19): siRNA sense strand
caagaacgccggaaugugu

SEQ ID NO: 761700 - RNA, 19 nt, Homo sapiens
  misc_RNA (1)...(19): siRNA sense strand
gaacucacaccuugcaaau

SEQ ID NO: 761701 - RNA, 19 nt, Homo sapiens
  misc_RNA (1)...(19): siRNA sense strand
gcaaggcauuggagaguuc

SEQ ID NO: 761702 - RNA, 19 nt, Homo sapiens
  misc_RNA (1)...(19): siRNA sense strand
uagaggacauucaaaccua

SEQ ID NO: 761703 - RNA, 19 nt, Homo sapiens
  misc_RNA (1)...(19): siRNA sense strand
gaagagacauagaaaacaa

SEQ ID NO: 761704 - RNA, 19 nt, Homo sapiens
  misc_RNA (1)...(19): siRNA sense strand
acucagaauucgaaccuua

SEQ ID NO: 761705 - RNA, 19 nt, Homo sapiens
  misc_RNA (1)...(19): siRNA sense strand
gaaagaagguaaaagagau

SEQ ID NO: 761706 - RNA, 19 nt, Homo sapiens
  misc_RNA (1)...(19): siRNA sense strand
cgacagaagagacauagaa

SEQ ID NO: 761707 - RNA, 19 nt, Homo sapiens
  misc_RNA (1)...(19): siRNA sense strand
aggguaagaucaagucuaa

SEQ ID NO: 761708 - RNA, 19 nt, Homo sapiens
  misc_RNA (1)...(19): siRNA sense strand
ucaaaggcguggucacaga

SEQ ID NO: 761709 - RNA, 19 nt, Homo sapiens
  misc_RNA (1)...(19): siRNA sense strand
ggagagaaaccuuacaagu

SEQ ID NO: 761710 - RNA, 19 nt, Homo sapiens
  misc_RNA (1)...(19): siRNA sense strand
uuacaaaugucaugaaugc

SEQ ID NO: 761711 - RNA, 19 nt, Homo sapiens
  misc_RNA (1)...(19): siRNA sense strand
ggagagaaaccuuacaagu

SEQ ID NO: 761712 - RNA, 19 nt, Homo sapiens
  misc_RNA (1)...(19): siRNA sense strand
ggagagaaaccuuacaagu

SEQ ID NO: 761713 - RNA, 19 nt, Homo sapiens
  misc_RNA (1)...(19): siRNA sense strand
ggagagaaaccuuacaagu

SEQ ID NO: 761714 - RNA, 19 nt, Homo sapiens
  misc_RNA (1)...(19): siRNA sense strand
ggagagaaaccuuacaagu

SEQ ID NO: 761715 - RNA, 19 nt, Homo sapiens
  misc_RNA (1)...(19): siRNA sense strand
ggagagaugacacaggaaa

SEQ ID NO: 761716 - RNA, 19 nt, Homo sapiens
  misc_RNA (1)...(19): siRNA sense strand
gagaaaagcguuacaaaug

SEQ ID NO: 761717 - RNA, 19 nt, Homo sapiens
  misc_RNA (1)...(19): siRNA sense strand
acagauaucccuccuaaau

SEQ ID NO: 761718 - RNA, 19 nt, Homo sapiens
  misc_RNA (1)...(19): siRNA sense strand
aggcagaguucaaaucuug

SEQ ID NO: 761719 - RNA, 19 nt, Homo sapiens
  misc_RNA (1)...(19): siRNA sense strand
gaacugcagcuauuucaag

SEQ ID NO: 761720 - RNA, 19 nt, Homo sapiens
  misc_RNA (1)...(19): siRNA sense strand
agauaucccuccuaaaugu

SEQ ID NO: 761721 - RNA, 19 nt, Homo sapiens
  misc_RNA (1)...(19): siRNA sense strand
ugagaagucuaccaacaau

SEQ ID NO: 761722 - RNA, 19 nt, Homo sapiens
  misc_RNA (1)...(19): siRNA sense strand
acucacaccuugcaaauca

SEQ ID NO: 761723 - RNA, 19 nt, Homo sapiens
  misc_RNA (1)...(19): siRNA sense strand
gagcaguacagaagcagua

SEQ ID NO: 761724 - RNA, 19 nt, Homo sapiens
  misc_RNA (1)...(19): siRNA sense strand
gcaaggucuucacucagaa

SEQ ID NO: 761725 - RNA, 19 nt, Homo sapiens
  misc_RNA (1)...(19): siRNA sense strand
uaaugaaugugguaaaguc

SEQ ID NO: 761726 - RNA, 19 nt, Homo sapiens
  misc_RNA (1)...(19): siRNA sense strand
agucauaggagaauucaua

SEQ ID NO: 761727 - RNA, 19 nt, Homo sapiens
  misc_RNA (1)...(19): siRNA sense strand
ggauguggccauagaauuc

SEQ ID NO: 761728 - RNA, 19 nt, Homo sapiens
  misc_RNA (1)...(19): siRNA sense strand
guggcaagcucuucacuca

SEQ ID NO: 761729 - RNA, 19 nt, Homo sapiens
  misc_RNA (1)...(19): siRNA sense strand
ccuccuaaauguacaauca

SEQ ID NO: 761730 - RNA, 19 nt, Homo sapiens
  misc_RNA (1)...(19): siRNA sense strand
gaauguggcaaggucuuua

SEQ ID NO: 761731 - RNA, 19 nt, Homo sapiens
  misc_RNA (1)...(19): siRNA sense strand
ggucuucacucagaacuca

SEQ ID NO: 761732 - RNA, 19 nt, Homo sapiens
  misc_RNA (1)...(19): siRNA sense strand
ggcaaagccuucaguaugc

SEQ ID NO: 761733 - RNA, 19 nt, Homo sapiens
  misc_RNA (1)...(19): siRNA sense strand
acccaucaguuaauucaua

SEQ ID NO: 761734 - RNA, 19 nt, Homo sapiens
  misc_RNA (1)...(19): siRNA sense strand
auucauaccuugcaacuca

SEQ ID NO: 761735 - RNA, 19 nt, Homo sapiens
  misc_RNA (1)...(19): siRNA sense strand
auucauaccuugcaacuca

SEQ ID NO: 761736 - RNA, 19 nt, Homo sapiens
  misc_RNA (1)...(19): siRNA sense strand
uaaugaauguggcaaaguc

SEQ ID NO: 761737 - RNA, 19 nt, Homo sapiens
  misc_RNA (1)...(19): siRNA sense strand
gaguaagcuuucauucuca

SEQ ID NO: 761738 - RNA, 19 nt, Homo sapiens
  misc_RNA (1)...(19): siRNA sense strand
aaaccuaacuacccauaag

SEQ ID NO: 761739 - RNA, 19 nt, Homo sapiens
  misc_RNA (1)...(19): siRNA sense strand
agucuucgcucaaacauca

SEQ ID NO: 761740 - RNA, 19 nt, Homo sapiens
  misc_RNA (1)...(19): siRNA sense strand
auucacaacuugcaaauca

SEQ ID NO: 761741 - RNA, 19 nt, Homo sapiens
  misc_RNA (1)...(19): siRNA sense strand
gugagaaaccuuacaagug

SEQ ID NO: 761742 - RNA, 19 nt, Homo sapiens
  misc_RNA (1)...(19): siRNA sense strand
agagaagccuuacaaaugc

SEQ ID NO: 761743 - RNA, 19 nt, Homo sapiens
  misc_RNA (1)...(19): siRNA sense strand
gcccugacauugaagacuu

SEQ ID NO: 761744 - RNA, 19 nt, Homo sapiens
  misc_RNA (1)...(19): siRNA sense strand
caguaugcauucaaaccua

SEQ ID NO: 761745 - RNA, 19 nt, Homo sapiens
  misc_RNA (1)...(19): siRNA sense strand
gugaagagcugugugaaaa

SEQ ID NO: 761746 - RNA, 19 nt, Homo sapiens
  misc_RNA (1)...(19): siRNA sense strand
gcucagaggaucuuauaca

SEQ ID NO: 761747 - RNA, 19 nt, Homo sapiens
  misc_RNA (1)...(19): siRNA sense strand
ggcaaggcguucacucaga

SEQ ID NO: 761748 - RNA, 19 nt, Homo sapiens
  misc_RNA (1)...(19): siRNA sense strand
gacagaagagacauagaaa

SEQ ID NO: 761749 - RNA, 19 nt, Homo sapiens
  misc_RNA (1)...(19): siRNA sense strand
ggcaagagcuucacucaaa

SEQ ID NO: 761750 - RNA, 19 nt, Homo sapiens
  misc_RNA (1)...(19): siRNA sense strand
agagaaaccuuacaaauga

SEQ ID NO: 761751 - RNA, 19 nt, Homo sapiens
  misc_RNA (1)...(19): siRNA sense strand
gagagaagccuuacaaaug

SEQ ID NO: 761752 - RNA, 19 nt, Homo sapiens
  misc_RNA (1)...(19): siRNA sense strand
gagagaagccuuacaaaug

SEQ ID NO: 761753 - RNA, 19 nt, Homo sapiens
  misc_RNA (1)...(19): siRNA sense strand
gcucaaacaucacaacuug

SEQ ID NO: 761754 - RNA, 19 nt, Homo sapiens
  misc_RNA (1)...(19): siRNA sense strand
gcaaaucaccgaagaauuc

SEQ ID NO: 761755 - RNA, 19 nt, Homo sapiens
  misc_RNA (1)...(19): siRNA sense strand
ucacagauaucccuccuaa

SEQ ID NO: 761756 - RNA, 19 nt, Homo sapiens
  misc_RNA (1)...(19): siRNA sense strand
agagaaaccuuacaaaugu

SEQ ID NO: 761757 - RNA, 19 nt, Homo sapiens
  misc_RNA (1)...(19): siRNA sense strand
guucaaaucuugcaaguca

SEQ ID NO: 761758 - RNA, 19 nt, Homo sapiens
  misc_RNA (1)...(19): siRNA sense strand
agagaaaccuuacaaaugu

SEQ ID NO: 761759 - RNA, 19 nt, Homo sapiens
  misc_RNA (1)...(19): siRNA sense strand
cgaaagcccugacauugaa

SEQ ID NO: 761760 - RNA, 19 nt, Homo sapiens
  misc_RNA (1)...(19): siRNA sense strand
gagagaaaccuuacaaaug

SEQ ID NO: 761761 - RNA, 19 nt, Homo sapiens
  misc_RNA (1)...(19): siRNA sense strand
gagagaaaccuuacaaaug

SEQ ID NO: 761762 - RNA, 19 nt, Homo sapiens
  misc_RNA (1)...(19): siRNA sense strand
gagagaaaccuuacaaaug

SEQ ID NO: 761763 - RNA, 19 nt, Homo sapiens
  misc_RNA (1)...(19): siRNA sense strand
ggaguaagcuuucauucuc

SEQ ID NO: 761764 - RNA, 19 nt, Homo sapiens
  misc_RNA (1)...(19): siRNA sense strand
gaacaaaaccuuucaaaug

SEQ ID NO: 761765 - RNA, 19 nt, Homo sapiens
  misc_RNA (1)...(19): siRNA sense strand
cagguacgguugacauuua

SEQ ID NO: 761766 - RNA, 19 nt, Homo sapiens
  misc_RNA (1)...(19): siRNA sense strand
ugagaaaccuuacaagugu

SEQ ID NO: 761767 - RNA, 19 nt, Homo sapiens
  misc_RNA (1)...(19): siRNA sense strand
ggcaaggucuuuacucaaa

SEQ ID NO: 761768 - RNA, 19 nt, Homo sapiens
  misc_RNA (1)...(19): siRNA sense strand
gcaaggcguucacucagaa

SEQ ID NO: 761769 - RNA, 19 nt, Homo sapiens
  misc_RNA (1)...(19): siRNA sense strand
gggaaagccuucaguguuc

SEQ ID NO: 761770 - RNA, 19 nt, Homo sapiens
  misc_RNA (1)...(19): siRNA sense strand
gggaaagccuucaguguuc

SEQ ID NO: 761771 - RNA, 19 nt, Homo sapiens
  misc_RNA (1)...(19): siRNA sense strand
ggcaagcucuucacucaaa

SEQ ID NO: 761772 - RNA, 19 nt, Homo sapiens
  misc_RNA (1)...(19): siRNA sense strand
gguaaagucuucgcucaaa

SEQ ID NO: 761773 - RNA, 19 nt, Homo sapiens
  misc_RNA (1)...(19): siRNA sense strand
ggaaagagcccuggacugu

SEQ ID NO: 761774 - RNA, 19 nt, Homo sapiens
  misc_RNA (1)...(19): siRNA sense strand
agagaaaccuuacaagugu

SEQ ID NO: 761775 - RNA, 19 nt, Homo sapiens
  misc_RNA (1)...(19): siRNA sense strand
agagaaaccuuacaagugu

SEQ ID NO: 761776 - RNA, 19 nt, Homo sapiens
  misc_RNA (1)...(19): siRNA sense strand
agagaaaccuuacaagugu

SEQ ID NO: 761777 - RNA, 19 nt, Homo sapiens
  misc_RNA (1)...(19): siRNA sense strand
agagaaaccuuacaagugu

SEQ ID NO: 761778 - RNA, 19 nt, Homo sapiens
  misc_RNA (1)...(19): siRNA sense strand
aaagagcccuggacuguga

SEQ ID NO: 761779 - RNA, 19 nt, Homo sapiens
  misc_RNA (1)...(19): siRNA sense strand
gagagaaaccuuacaagug

SEQ ID NO: 761780 - RNA, 19 nt, Homo sapiens
  misc_RNA (1)...(19): siRNA sense strand
gagagaaaccuuacaagug

SEQ ID NO: 761781 - RNA, 19 nt, Homo sapiens
  misc_RNA (1)...(19): siRNA sense strand
gagagaaaccuuacaagug

SEQ ID NO: 761782 - RNA, 19 nt, Homo sapiens
  misc_RNA (1)...(19): siRNA sense strand
gagagaaaccuuacaagug

SEQ ID NO: 761783 - RNA, 19 nt, Homo sapiens
  misc_RNA (1)...(19): siRNA sense strand
gagagaaaccuuacaagug

SEQ ID NO: 761784 - RNA, 19 nt, Homo sapiens
  misc_RNA (1)...(19): siRNA sense strand
gaagagcugugugaaaaua

SEQ ID NO: 761785 - RNA, 19 nt, Homo sapiens
  misc_RNA (1)...(19): siRNA sense strand
ggagagaaaccuuacaaau

SEQ ID NO: 761786 - RNA, 19 nt, Homo sapiens
  misc_RNA (1)...(19): siRNA sense strand
ggagagaaaccuuacaaau

SEQ ID NO: 761787 - RNA, 19 nt, Homo sapiens
  misc_RNA (1)...(19): siRNA sense strand
ggagagaaaccuuacaaau

SEQ ID NO: 761788 - RNA, 19 nt, Homo sapiens
  misc_RNA (1)...(19): siRNA sense strand
gagaugacacaggaaauua

SEQ ID NO: 761789 - RNA, 19 nt, Homo sapiens
  misc_RNA (1)...(19): siRNA sense strand
gcaaaucaucgaagaauuc

SEQ ID NO: 761790 - RNA, 19 nt, Homo sapiens
  misc_RNA (1)...(19): siRNA sense strand
agagaagccuuacaaaugu

SEQ ID NO: 761791 - RNA, 19 nt, Homo sapiens
  misc_RNA (1)...(19): siRNA sense strand
gaacaaucagcuuggagua

SEQ ID NO: 761792 - RNA, 19 nt, Homo sapiens
  misc_RNA (1)...(19): siRNA sense strand
uuacaaaugucaugagugu

SEQ ID NO: 761793 - RNA, 19 nt, Homo sapiens
  misc_RNA (1)...(19): siRNA sense strand
gagaagagcaguacagaag

SEQ ID NO: 761794 - RNA, 19 nt, Homo sapiens
  misc_RNA (1)...(19): siRNA sense strand
ggagagaagccuuacaaau

SEQ ID NO: 761795 - RNA, 19 nt, Homo sapiens
  misc_RNA (1)...(19): siRNA sense strand
ggagagaagccuuacaaau

SEQ ID NO: 761796 - RNA, 19 nt, Homo sapiens
  misc_RNA (1)...(19): siRNA sense strand
gaagagcaguacagaagca

SEQ ID NO: 761797 - RNA, 19 nt, Homo sapiens
  misc_RNA (1)...(19): siRNA sense strand
caacaaauuccuucuagug

SEQ ID NO: 761798 - RNA, 19 nt, Homo sapiens
  misc_RNA (1)...(19): siRNA sense strand
ggcaaggucuucacucaga

SEQ ID NO: 761799 - RNA, 19 nt, Homo sapiens
  misc_RNA (1)...(19): siRNA sense strand
caagaacgccggaaugugu

SEQ ID NO: 761800 - RNA, 19 nt, Homo sapiens
  misc_RNA (1)...(19): siRNA sense strand
gaacucacaccuugcaaau

SEQ ID NO: 761801 - RNA, 19 nt, Homo sapiens
  misc_RNA (1)...(19): siRNA sense strand
gcaaggcauuggagaguuc

SEQ ID NO: 761802 - RNA, 19 nt, Homo sapiens
  misc_RNA (1)...(19): siRNA sense strand
uagaggacauucaaaccua

SEQ ID NO: 761803 - RNA, 19 nt, Homo sapiens
  misc_RNA (1)...(19): siRNA sense strand
gaagagacauagaaaacaa

SEQ ID NO: 761804 - RNA, 19 nt, Homo sapiens
  misc_RNA (1)...(19): siRNA sense strand
acucagaauucgaaccuua

SEQ ID NO: 761805 - RNA, 19 nt, Homo sapiens
  misc_RNA (1)...(19): siRNA sense strand
gaaagaagguaaaagagau

SEQ ID NO: 761806 - RNA, 19 nt, Homo sapiens
  misc_RNA (1)...(19): siRNA sense strand
cgacagaagagacauagaa

SEQ ID NO: 761807 - RNA, 19 nt, Homo sapiens
  misc_RNA (1)...(19): siRNA sense strand
aggguaagaucaagucuaa

SEQ ID NO: 761808 - RNA, 19 nt, Homo sapiens
  misc_RNA (1)...(19): siRNA sense strand
ucaaaggcguggucacaga

SEQ ID NO: 761809 - RNA, 19 nt, Homo sapiens
  misc_RNA (1)...(19): siRNA sense strand
ggagagaaaccuuacaagu

SEQ ID NO: 761810 - RNA, 19 nt, Homo sapiens
  misc_RNA (1)...(19): siRNA sense strand
uuacaaaugucaugaaugc

SEQ ID NO: 761811 - RNA, 19 nt, Homo sapiens
  misc_RNA (1)...(19): siRNA sense strand
ggagagaaaccuuacaagu

SEQ ID NO: 761812 - RNA, 19 nt, Homo sapiens
  misc_RNA (1)...(19): siRNA sense strand
ggagagaaaccuuacaagu

SEQ ID NO: 761813 - RNA, 19 nt, Homo sapiens
  misc_RNA (1)...(19): siRNA sense strand
ggagagaaaccuuacaagu

SEQ ID NO: 761814 - RNA, 19 nt, Homo sapiens
  misc_RNA (1)...(19): siRNA sense strand
ggagagaaaccuuacaagu

SEQ ID NO: 761815 - RNA, 19 nt, Homo sapiens
  misc_RNA (1)...(19): siRNA sense strand
ggagagaugacacaggaaa

SEQ ID NO: 761816 - RNA, 19 nt, Homo sapiens
  misc_RNA (1)...(19): siRNA sense strand
gagaaaagcguuacaaaug

SEQ ID NO: 761817 - RNA, 19 nt, Homo sapiens
  misc_RNA (1)...(19): siRNA sense strand
acagauaucccuccuaaau

SEQ ID NO: 761818 - RNA, 19 nt, Homo sapiens
  misc_RNA (1)...(19): siRNA sense strand
aggcagaguucaaaucuug

SEQ ID NO: 761819 - RNA, 19 nt, Homo sapiens
  misc_RNA (1)...(19): siRNA sense strand
gaacugcagcuauuucaag

SEQ ID NO: 761820 - RNA, 19 nt, Homo sapiens
  misc_RNA (1)...(19): siRNA sense strand
agauaucccuccuaaaugu

SEQ ID NO: 761821 - RNA, 19 nt, Homo sapiens
  misc_RNA (1)...(19): siRNA sense strand
ugagaagucuaccaacaau

SEQ ID NO: 761822 - RNA, 19 nt, Homo sapiens
  misc_RNA (1)...(19): siRNA sense strand
acucacaccuugcaaauca

SEQ ID NO: 761823 - RNA, 19 nt, Homo sapiens
  misc_RNA (1)...(19): siRNA sense strand
gagcaguacagaagcagua

SEQ ID NO: 761824 - RNA, 19 nt, Homo sapiens
  misc_RNA (1)...(19): siRNA sense strand
gcaaggucuucacucagaa

SEQ ID NO: 761825 - RNA, 19 nt, Homo sapiens
  misc_RNA (1)...(19): siRNA sense strand
uaaugaaugugguaaaguc

SEQ ID NO: 761826 - RNA, 19 nt, Homo sapiens
  misc_RNA (1)...(19): siRNA sense strand
agucauaggagaauucaua

SEQ ID NO: 761827 - RNA, 19 nt, Homo sapiens
  misc_RNA (1)...(19): siRNA sense strand
ggauguggccauagaauuc

SEQ ID NO: 761828 - RNA, 19 nt, Homo sapiens
  misc_RNA (1)...(19): siRNA sense strand
guggcaagcucuucacuca

SEQ ID NO: 761829 - RNA, 19 nt, Homo sapiens
  misc_RNA (1)...(19): siRNA sense strand
ccuccuaaauguacaauca

SEQ ID NO: 761830 - RNA, 19 nt, Homo sapiens
  misc_RNA (1)...(19): siRNA sense strand
gaauguggcaaggucuuua

SEQ ID NO: 761831 - RNA, 19 nt, Homo sapiens
  misc_RNA (1)...(19): siRNA sense strand
ggucuucacucagaacuca

SEQ ID NO: 761832 - RNA, 19 nt, Homo sapiens
  misc_RNA (1)...(19): siRNA sense strand
ggcaaagccuucaguaugc

SEQ ID NO: 761833 - RNA, 19 nt, Homo sapiens
  misc_RNA (1)...(19): siRNA sense strand
acccaucaguuaauucaua

SEQ ID NO: 761834 - RNA, 19 nt, Homo sapiens
  misc_RNA (1)...(19): siRNA sense strand
auucauaccuugcaacuca

SEQ ID NO: 761835 - RNA, 19 nt, Homo sapiens
  misc_RNA (1)...(19): siRNA sense strand
auucauaccuugcaacuca

SEQ ID NO: 761836 - RNA, 19 nt, Homo sapiens
  misc_RNA (1)...(19): siRNA sense strand
uaaugaauguggcaaaguc

SEQ ID NO: 761837 - RNA, 19 nt, Homo sapiens
  misc_RNA (1)...(19): siRNA sense strand
gaguaagcuuucauucuca

SEQ ID NO: 761838 - RNA, 19 nt, Homo sapiens
  misc_RNA (1)...(19): siRNA sense strand
aaaccuaacuacccauaag

SEQ ID NO: 761839 - RNA, 19 nt, Homo sapiens
  misc_RNA (1)...(19): siRNA sense strand
agucuucgcucaaacauca

SEQ ID NO: 761840 - RNA, 19 nt, Homo sapiens
  misc_RNA (1)...(19): siRNA sense strand
auucacaacuugcaaauca

SEQ ID NO: 761841 - RNA, 19 nt, Homo sapiens
  misc_RNA (1)...(19): siRNA sense strand
gugagaaaccuuacaagug

SEQ ID NO: 761842 - RNA, 19 nt, Homo sapiens
  misc_RNA (1)...(19): siRNA sense strand
agagaagccuuacaaaugc

SEQ ID NO: 761843 - RNA, 19 nt, Homo sapiens
  misc_RNA (1)...(19): siRNA sense strand
gcccugacauugaagacuu

SEQ ID NO: 761844 - RNA, 19 nt, Homo sapiens
  misc_RNA (1)...(19): siRNA sense strand
caguaugcauucaaaccua

SEQ ID NO: 761845 - RNA, 19 nt, Homo sapiens
  misc_RNA (1)...(19): siRNA sense strand
gugaagagcugugugaaaa

SEQ ID NO: 761846 - RNA, 19 nt, Homo sapiens
  misc_RNA (1)...(19): siRNA sense strand
gcucagaggaucuuauaca

SEQ ID NO: 761847 - RNA, 19 nt, Homo sapiens
  misc_RNA (1)...(19): siRNA sense strand
ggcaaggcguucacucaga

SEQ ID NO: 761848 - RNA, 19 nt, Homo sapiens
  misc_RNA (1)...(19): siRNA sense strand
gacagaagagacauagaaa

SEQ ID NO: 761849 - RNA, 19 nt, Homo sapiens
  misc_RNA (1)...(19): siRNA sense strand
ugaagaagaugguggauaa

SEQ ID NO: 761850 - RNA, 19 nt, Homo sapiens
  misc_RNA (1)...(19): siRNA sense strand
gaaauuucaugaggaggua

SEQ ID NO: 761851 - RNA, 19 nt, Homo sapiens
  misc_RNA (1)...(19): siRNA sense strand
ccagagaaguguuuccaau

SEQ ID NO: 761852 - RNA, 19 nt, Homo sapiens
  misc_RNA (1)...(19): siRNA sense strand
ggaccugucugacgauagu

SEQ ID NO: 761853 - RNA, 19 nt, Homo sapiens
  misc_RNA (1)...(19): siRNA sense strand
gauaagcccacccagagaa

SEQ ID NO: 761854 - RNA, 19 nt, Homo sapiens
  misc_RNA (1)...(19): siRNA sense strand
ggagguaucagucuagagu

SEQ ID NO: 761855 - RNA, 19 nt, Homo sapiens
  misc_RNA (1)...(19): siRNA sense strand
agguaucagucuagaguua

SEQ ID NO: 761856 - RNA, 19 nt, Homo sapiens
  misc_RNA (1)...(19): siRNA sense strand
gaggagguaucagucuaga

SEQ ID NO: 761857 - RNA, 19 nt, Homo sapiens
  misc_RNA (1)...(19): siRNA sense strand
ggauaagcccacccagaga

SEQ ID NO: 761858 - RNA, 19 nt, Homo sapiens
  misc_RNA (1)...(19): siRNA sense strand
cgcgacgucugcagaaauu

SEQ ID NO: 761859 - RNA, 19 nt, Homo sapiens
  misc_RNA (1)...(19): siRNA sense strand
agagaaguguuuccaaugc

SEQ ID NO: 761860 - RNA, 19 nt, Homo sapiens
  misc_RNA (1)...(19): siRNA sense strand
gagaaguguuuccaaugcu

SEQ ID NO: 761861 - RNA, 19 nt, Homo sapiens
  misc_RNA (1)...(19): siRNA sense strand
cagagaaguguuuccaaug

SEQ ID NO: 761862 - RNA, 19 nt, Homo sapiens
  misc_RNA (1)...(19): siRNA sense strand
agggugaccuguugaccaa

SEQ ID NO: 761863 - RNA, 19 nt, Homo sapiens
  misc_RNA (1)...(19): siRNA sense strand
cgacgucugcagaaauuuc

SEQ ID NO: 761864 - RNA, 19 nt, Homo sapiens
  misc_RNA (1)...(19): siRNA sense strand
gagcugggccgugacuaca

SEQ ID NO: 761865 - RNA, 19 nt, Homo sapiens
  misc_RNA (1)...(19): siRNA sense strand
gcgcgacgucugcagaaau

SEQ ID NO: 761866 - RNA, 19 nt, Homo sapiens
  misc_RNA (1)...(19): siRNA sense strand
augaggagguaucagucua

SEQ ID NO: 761867 - RNA, 19 nt, Homo sapiens
  misc_RNA (1)...(19): siRNA sense strand
gaagaagaugguggauaag

SEQ ID NO: 761868 - RNA, 19 nt, Homo sapiens
  misc_RNA (1)...(19): siRNA sense strand
ggugaccuguugaccaaaa

SEQ ID NO: 761869 - RNA, 19 nt, Homo sapiens
  misc_RNA (1)...(19): siRNA sense strand
ugaagaagaugguggauaa

SEQ ID NO: 761870 - RNA, 19 nt, Homo sapiens
  misc_RNA (1)...(19): siRNA sense strand
gaaauuucaugaggaggua

SEQ ID NO: 761871 - RNA, 19 nt, Homo sapiens
  misc_RNA (1)...(19): siRNA sense strand
ccagagaaguguuuccaau

SEQ ID NO: 761872 - RNA, 19 nt, Homo sapiens
  misc_RNA (1)...(19): siRNA sense strand
ggaccugucugacgauagu

SEQ ID NO: 761873 - RNA, 19 nt, Homo sapiens
  misc_RNA (1)...(19): siRNA sense strand
gauaagcccacccagagaa

SEQ ID NO: 761874 - RNA, 19 nt, Homo sapiens
  misc_RNA (1)...(19): siRNA sense strand
ggagguaucagucuagagu

SEQ ID NO: 761875 - RNA, 19 nt, Homo sapiens
  misc_RNA (1)...(19): siRNA sense strand
agguaucagucuagaguua

SEQ ID NO: 761876 - RNA, 19 nt, Homo sapiens
  misc_RNA (1)...(19): siRNA sense strand
gaggagguaucagucuaga

SEQ ID NO: 761877 - RNA, 19 nt, Homo sapiens
  misc_RNA (1)...(19): siRNA sense strand
ggauaagcccacccagaga

SEQ ID NO: 761878 - RNA, 19 nt, Homo sapiens
  misc_RNA (1)...(19): siRNA sense strand
cgcgacgucugcagaaauu

SEQ ID NO: 761879 - RNA, 19 nt, Homo sapiens
  misc_RNA (1)...(19): siRNA sense strand
agagaaguguuuccaaugc

SEQ ID NO: 761880 - RNA, 19 nt, Homo sapiens
  misc_RNA (1)...(19): siRNA sense strand
gagaaguguuuccaaugcu

SEQ ID NO: 761881 - RNA, 19 nt, Homo sapiens
  misc_RNA (1)...(19): siRNA sense strand
cagagaaguguuuccaaug

SEQ ID NO: 761882 - RNA, 19 nt, Homo sapiens
  misc_RNA (1)...(19): siRNA sense strand
agggugaccuguugaccaa

SEQ ID NO: 761883 - RNA, 19 nt, Homo sapiens
  misc_RNA (1)...(19): siRNA sense strand
cgacgucugcagaaauuuc

SEQ ID NO: 761884 - RNA, 19 nt, Homo sapiens
  misc_RNA (1)...(19): siRNA sense strand
gagcugggccgugacuaca

SEQ ID NO: 761885 - RNA, 19 nt, Homo sapiens
  misc_RNA (1)...(19): siRNA sense strand
gcgcgacgucugcagaaau

SEQ ID NO: 761886 - RNA, 19 nt, Homo sapiens
  misc_RNA (1)...(19): siRNA sense strand
augaggagguaucagucua

SEQ ID NO: 761887 - RNA, 19 nt, Homo sapiens
  misc_RNA (1)...(19): siRNA sense strand
gaagaagaugguggauaag

SEQ ID NO: 761888 - RNA, 19 nt, Homo sapiens
  misc_RNA (1)...(19): siRNA sense strand
ggugaccuguugaccaaaa

SEQ ID NO: 761889 - RNA, 19 nt, Homo sapiens
  misc_RNA (1)...(19): siRNA sense strand
ggaugagcuugauaaauua

SEQ ID NO: 761890 - RNA, 19 nt, Homo sapiens
  misc_RNA (1)...(19): siRNA sense strand
gcaacaagagaaagaauua

SEQ ID NO: 761891 - RNA, 19 nt, Homo sapiens
  misc_RNA (1)...(19): siRNA sense strand
uggaugagcuugauaaauu

SEQ ID NO: 761892 - RNA, 19 nt, Homo sapiens
  misc_RNA (1)...(19): siRNA sense strand
gagcucaaaucaagaauau

SEQ ID NO: 761893 - RNA, 19 nt, Homo sapiens
  misc_RNA (1)...(19): siRNA sense strand
aaacaucucucucugcaaa

SEQ ID NO: 761894 - RNA, 19 nt, Homo sapiens
  misc_RNA (1)...(19): siRNA sense strand
ugaaagcuauaaagcguua

SEQ ID NO: 761895 - RNA, 19 nt, Homo sapiens
  misc_RNA (1)...(19): siRNA sense strand
gaauaaaguucuagguauc

SEQ ID NO: 761896 - RNA, 19 nt, Homo sapiens
  misc_RNA (1)...(19): siRNA sense strand
gaccaggacuaaugaacua

SEQ ID NO: 761897 - RNA, 19 nt, Homo sapiens
  misc_RNA (1)...(19): siRNA sense strand
gcaaagccuugaagauguu

SEQ ID NO: 761898 - RNA, 19 nt, Homo sapiens
  misc_RNA (1)...(19): siRNA sense strand
gaggaagaauuaaagcaaa

SEQ ID NO: 761899 - RNA, 19 nt, Homo sapiens
  misc_RNA (1)...(19): siRNA sense strand
gaacucaucauuacaggaa

SEQ ID NO: 761900 - RNA, 19 nt, Homo sapiens
  misc_RNA (1)...(19): siRNA sense strand
caagaggaauugaauaaag

SEQ ID NO: 761901 - RNA, 19 nt, Homo sapiens
  misc_RNA (1)...(19): siRNA sense strand
cgaagagucucaagggaaa

SEQ ID NO: 761902 - RNA, 19 nt, Homo sapiens
  misc_RNA (1)...(19): siRNA sense strand
gaauagagaacacaacgaa

SEQ ID NO: 761903 - RNA, 19 nt, Homo sapiens
  misc_RNA (1)...(19): siRNA sense strand
gauacuaccuugccugcuu

SEQ ID NO: 761904 - RNA, 19 nt, Homo sapiens
  misc_RNA (1)...(19): siRNA sense strand
ugaaagagaagaaugauga

SEQ ID NO: 761905 - RNA, 19 nt, Homo sapiens
  misc_RNA (1)...(19): siRNA sense strand
ggaauacaucgaagaaauu

SEQ ID NO: 761906 - RNA, 19 nt, Homo sapiens
  misc_RNA (1)...(19): siRNA sense strand
gaauugaccaggacuaaug

SEQ ID NO: 761907 - RNA, 19 nt, Homo sapiens
  misc_RNA (1)...(19): siRNA sense strand
gaaaauagccaacucaaau

SEQ ID NO: 761908 - RNA, 19 nt, Homo sapiens
  misc_RNA (1)...(19): siRNA sense strand
aucuagagcugaagaauua

SEQ ID NO: 761909 - RNA, 19 nt, Homo sapiens
  misc_RNA (1)...(19): siRNA sense strand
ggaccaguauccuuucaga

SEQ ID NO: 761910 - RNA, 19 nt, Homo sapiens
  misc_RNA (1)...(19): siRNA sense strand
guuaacagccagugagaua

SEQ ID NO: 761911 - RNA, 19 nt, Homo sapiens
  misc_RNA (1)...(19): siRNA sense strand
ucaagcauguugugaaguu

SEQ ID NO: 761912 - RNA, 19 nt, Homo sapiens
  misc_RNA (1)...(19): siRNA sense strand
gcuaaaugcugcacuaagg

SEQ ID NO: 761913 - RNA, 19 nt, Homo sapiens
  misc_RNA (1)...(19): siRNA sense strand
caacucaaaucggaaguau

SEQ ID NO: 761914 - RNA, 19 nt, Homo sapiens
  misc_RNA (1)...(19): siRNA sense strand
gcuagauauugcccaguua

SEQ ID NO: 761915 - RNA, 19 nt, Homo sapiens
  misc_RNA (1)...(19): siRNA sense strand
gcucaggaacagcuaaaua

SEQ ID NO: 761916 - RNA, 19 nt, Homo sapiens
  misc_RNA (1)...(19): siRNA sense strand
gaaauuaguugugcuucag

SEQ ID NO: 761917 - RNA, 19 nt, Homo sapiens
  misc_RNA (1)...(19): siRNA sense strand
gcacuaaaggaaacagaaa

SEQ ID NO: 761918 - RNA, 19 nt, Homo sapiens
  misc_RNA (1)...(19): siRNA sense strand
gcucaaaucaagaauaugu

SEQ ID NO: 761919 - RNA, 19 nt, Homo sapiens
  misc_RNA (1)...(19): siRNA sense strand
caaguggcgucuccucuau

SEQ ID NO: 761920 - RNA, 19 nt, Homo sapiens
  misc_RNA (1)...(19): siRNA sense strand
gcaacaggaggaagacuuu

SEQ ID NO: 761921 - RNA, 19 nt, Homo sapiens
  misc_RNA (1)...(19): siRNA sense strand
uggaauacaucgaagaaau

SEQ ID NO: 761922 - RNA, 19 nt, Homo sapiens
  misc_RNA (1)...(19): siRNA sense strand
cugaagaaauuaacaagug

SEQ ID NO: 761923 - RNA, 19 nt, Homo sapiens
  misc_RNA (1)...(19): siRNA sense strand
gaacacaacgaaaaucuaa

SEQ ID NO: 761924 - RNA, 19 nt, Homo sapiens
  misc_RNA (1)...(19): siRNA sense strand
gaagaaauuaguugugcuu

SEQ ID NO: 761925 - RNA, 19 nt, Homo sapiens
  misc_RNA (1)...(19): siRNA sense strand
gcuggagaacucaucauua

SEQ ID NO: 761926 - RNA, 19 nt, Homo sapiens
  misc_RNA (1)...(19): siRNA sense strand
aaaguuaagucuucggaau

SEQ ID NO: 761927 - RNA, 19 nt, Homo sapiens
  misc_RNA (1)...(19): siRNA sense strand
cagcagaauuaacugaaga

SEQ ID NO: 761928 - RNA, 19 nt, Homo sapiens
  misc_RNA (1)...(19): siRNA sense strand
caagucagcacuaaaggaa

SEQ ID NO: 761929 - RNA, 19 nt, Homo sapiens
  misc_RNA (1)...(19): siRNA sense strand
agauguuacugcucaauuu

SEQ ID NO: 761930 - RNA, 19 nt, Homo sapiens
  misc_RNA (1)...(19): siRNA sense strand
gaccaugucaacaggaaua

SEQ ID NO: 761931 - RNA, 19 nt, Homo sapiens
  misc_RNA (1)...(19): siRNA sense strand
ggacuaaugaacuacuaaa

SEQ ID NO: 761932 - RNA, 19 nt, Homo sapiens
  misc_RNA (1)...(19): siRNA sense strand
ccaaaggagucucgaagag

SEQ ID NO: 761933 - RNA, 19 nt, Homo sapiens
  misc_RNA (1)...(19): siRNA sense strand
ucaagaaucauggaaguaa

SEQ ID NO: 761934 - RNA, 19 nt, Homo sapiens
  misc_RNA (1)...(19): siRNA sense strand
uaaggaugcuucuagaucu

SEQ ID NO: 761935 - RNA, 19 nt, Homo sapiens
  misc_RNA (1)...(19): siRNA sense strand
gaaagagaagaaugaugaa

SEQ ID NO: 761936 - RNA, 19 nt, Homo sapiens
  misc_RNA (1)...(19): siRNA sense strand
caagaaggcauggagauga

SEQ ID NO: 761937 - RNA, 19 nt, Homo sapiens
  misc_RNA (1)...(19): siRNA sense strand
guugugaaguugaaagaug

SEQ ID NO: 761938 - RNA, 19 nt, Homo sapiens
  misc_RNA (1)...(19): siRNA sense strand
aaauaaugcuacacuggaa

SEQ ID NO: 761939 - RNA, 19 nt, Homo sapiens
  misc_RNA (1)...(19): siRNA sense strand
uaacugauuugcagaacca

SEQ ID NO: 761940 - RNA, 19 nt, Homo sapiens
  misc_RNA (1)...(19): siRNA sense strand
uaugauggcuaagcaagaa

SEQ ID NO: 761941 - RNA, 19 nt, Homo sapiens
  misc_RNA (1)...(19): siRNA sense strand
caacagcagaauuaacuga

SEQ ID NO: 761942 - RNA, 19 nt, Homo sapiens
  misc_RNA (1)...(19): siRNA sense strand
ggaaaaguaugacaguaug

SEQ ID NO: 761943 - RNA, 19 nt, Homo sapiens
  misc_RNA (1)...(19): siRNA sense strand
gugcaaagccuugaagaug

SEQ ID NO: 761944 - RNA, 19 nt, Homo sapiens
  misc_RNA (1)...(19): siRNA sense strand
guaaggaugcuucuagauc

SEQ ID NO: 761945 - RNA, 19 nt, Homo sapiens
  misc_RNA (1)...(19): siRNA sense strand
caaugacccuucugguugu

SEQ ID NO: 761946 - RNA, 19 nt, Homo sapiens
  misc_RNA (1)...(19): siRNA sense strand
gaauuaucuucgagucuuc

SEQ ID NO: 761947 - RNA, 19 nt, Homo sapiens
  misc_RNA (1)...(19): siRNA sense strand
ggaggaagacuuuagaaaa

SEQ ID NO: 761948 - RNA, 19 nt, Homo sapiens
  misc_RNA (1)...(19): siRNA sense strand
agaauuaucuucgagucuu

SEQ ID NO: 761949 - RNA, 19 nt, Homo sapiens
  misc_RNA (1)...(19): siRNA sense strand
gcaagaaggcauggagaug

SEQ ID NO: 761950 - RNA, 19 nt, Homo sapiens
  misc_RNA (1)...(19): siRNA sense strand
ucaaaucggaaguaucaaa

SEQ ID NO: 761951 - RNA, 19 nt, Homo sapiens
  misc_RNA (1)...(19): siRNA sense strand
cugaaaggcuggucaagca

SEQ ID NO: 761952 - RNA, 19 nt, Homo sapiens
  misc_RNA (1)...(19): siRNA sense strand
ugaaaugucagcugcuuga

SEQ ID NO: 761953 - RNA, 19 nt, Homo sapiens
  misc_RNA (1)...(19): siRNA sense strand
aagaaggcauggagaugaa

SEQ ID NO: 761954 - RNA, 19 nt, Homo sapiens
  misc_RNA (1)...(19): siRNA sense strand
acaaauugauucacuucug

SEQ ID NO: 761955 - RNA, 19 nt, Homo sapiens
  misc_RNA (1)...(19): siRNA sense strand
ccaggugcuuaugauguua

SEQ ID NO: 761956 - RNA, 19 nt, Homo sapiens
  misc_RNA (1)...(19): siRNA sense strand
uauggagugucaagaauca

SEQ ID NO: 761957 - RNA, 19 nt, Homo sapiens
  misc_RNA (1)...(19): siRNA sense strand
gaaaggcuggucaagcaau

SEQ ID NO: 761958 - RNA, 19 nt, Homo sapiens
  misc_RNA (1)...(19): siRNA sense strand
uaaagcaaacacuggauga

SEQ ID NO: 761959 - RNA, 19 nt, Homo sapiens
  misc_RNA (1)...(19): siRNA sense strand
cuucgagucuucaucagaa

SEQ ID NO: 761960 - RNA, 19 nt, Homo sapiens
  misc_RNA (1)...(19): siRNA sense strand
acaucucucucugcaaaua

SEQ ID NO: 761961 - RNA, 19 nt, Homo sapiens
  misc_RNA (1)...(19): siRNA sense strand
caacaggaggaagacuuua

SEQ ID NO: 761962 - RNA, 19 nt, Homo sapiens
  misc_RNA (1)...(19): siRNA sense strand
uaacagccagugagauaga

SEQ ID NO: 761963 - RNA, 19 nt, Homo sapiens
  misc_RNA (1)...(19): siRNA sense strand
gaaucuguuugaggaagaa

SEQ ID NO: 761964 - RNA, 19 nt, Homo sapiens
  misc_RNA (1)...(19): siRNA sense strand
caacaggaauagagaacac

SEQ ID NO: 761965 - RNA, 19 nt, Homo sapiens
  misc_RNA (1)...(19): siRNA sense strand
caggacuaaugaacuacua

SEQ ID NO: 761966 - RNA, 19 nt, Homo sapiens
  misc_RNA (1)...(19): siRNA sense strand
ggagaacucaucauuacag

SEQ ID NO: 761967 - RNA, 19 nt, Homo sapiens
  misc_RNA (1)...(19): siRNA sense strand
cuggagaacucaucauuac

SEQ ID NO: 761968 - RNA, 19 nt, Homo sapiens
  misc_RNA (1)...(19): siRNA sense strand
ugcaaagccuugaagaugu

SEQ ID NO: 761969 - RNA, 19 nt, Homo sapiens
  misc_RNA (1)...(19): siRNA sense strand
aagagaagaaucuguuuga

SEQ ID NO: 761970 - RNA, 19 nt, Homo sapiens
  misc_RNA (1)...(19): siRNA sense strand
cuaaacaaguagaagaucu

SEQ ID NO: 761971 - RNA, 19 nt, Homo sapiens
  misc_RNA (1)...(19): siRNA sense strand
agaaauuaguugugcuuca

SEQ ID NO: 761972 - RNA, 19 nt, Homo sapiens
  misc_RNA (1)...(19): siRNA sense strand
aaaggcuggucaagcaauu

SEQ ID NO: 761973 - RNA, 19 nt, Homo sapiens
  misc_RNA (1)...(19): siRNA sense strand
ucaggaacagcuaaauaaa

SEQ ID NO: 761974 - RNA, 19 nt, Homo sapiens
  misc_RNA (1)...(19): siRNA sense strand
agaaccaacucaagcaaca

SEQ ID NO: 761975 - RNA, 19 nt, Homo sapiens
  misc_RNA (1)...(19): siRNA sense strand
gauguuacugcucaauuug

SEQ ID NO: 761976 - RNA, 19 nt, Homo sapiens
  misc_RNA (1)...(19): siRNA sense strand
uagcccaacuggagggaaa

SEQ ID NO: 761977 - RNA, 19 nt, Homo sapiens
  misc_RNA (1)...(19): siRNA sense strand
acucaaaucggaaguauca

SEQ ID NO: 761978 - RNA, 19 nt, Homo sapiens
  misc_RNA (1)...(19): siRNA sense strand
gaccaagucagcacuaaag

SEQ ID NO: 761979 - RNA, 19 nt, Homo sapiens
  misc_RNA (1)...(19): siRNA sense strand
gaagaaucuguuugaggaa

SEQ ID NO: 761980 - RNA, 19 nt, Homo sapiens
  misc_RNA (1)...(19): siRNA sense strand
caacgaaaaucuaaaugca

SEQ ID NO: 761981 - RNA, 19 nt, Homo sapiens
  misc_RNA (1)...(19): siRNA sense strand
auucuaagcuuggaguuga

SEQ ID NO: 761982 - RNA, 19 nt, Homo sapiens
  misc_RNA (1)...(19): siRNA sense strand
ccuauggagugucaagaau

SEQ ID NO: 761983 - RNA, 19 nt, Homo sapiens
  misc_RNA (1)...(19): siRNA sense strand
gacaaaacuucaagaggaa

SEQ ID NO: 761984 - RNA, 19 nt, Homo sapiens
  misc_RNA (1)...(19): siRNA sense strand
aaucaagcauguugugaag

SEQ ID NO: 761985 - RNA, 19 nt, Homo sapiens
  misc_RNA (1)...(19): siRNA sense strand
ucuccucuaugaagaacua

SEQ ID NO: 761986 - RNA, 19 nt, Homo sapiens
  misc_RNA (1)...(19): siRNA sense strand
gaggaagacuuuagaaaac

SEQ ID NO: 761987 - RNA, 19 nt, Homo sapiens
  misc_RNA (1)...(19): siRNA sense strand
gcagaaccaacucaagcaa

SEQ ID NO: 761988 - RNA, 19 nt, Homo sapiens
  misc_RNA (1)...(19): siRNA sense strand
aaacaaagaugagggguau

SEQ ID NO: 761989 - RNA, 19 nt, Homo sapiens
  misc_RNA (1)...(19): siRNA sense strand
ggaugagcuugauaaauua

SEQ ID NO: 761990 - RNA, 19 nt, Homo sapiens
  misc_RNA (1)...(19): siRNA sense strand
gcaacaagagaaagaauua

SEQ ID NO: 761991 - RNA, 19 nt, Homo sapiens
  misc_RNA (1)...(19): siRNA sense strand
uggaugagcuugauaaauu

SEQ ID NO: 761992 - RNA, 19 nt, Homo sapiens
  misc_RNA (1)...(19): siRNA sense strand
gagcucaaaucaagaauau

SEQ ID NO: 761993 - RNA, 19 nt, Homo sapiens
  misc_RNA (1)...(19): siRNA sense strand
aaacaucucucucugcaaa

SEQ ID NO: 761994 - RNA, 19 nt, Homo sapiens
  misc_RNA (1)...(19): siRNA sense strand
ugaaagcuauaaagcguua

SEQ ID NO: 761995 - RNA, 19 nt, Homo sapiens
  misc_RNA (1)...(19): siRNA sense strand
gaauaaaguucuagguauc

SEQ ID NO: 761996 - RNA, 19 nt, Homo sapiens
  misc_RNA (1)...(19): siRNA sense strand
gaccaggacuaaugaacua

SEQ ID NO: 761997 - RNA, 19 nt, Homo sapiens
  misc_RNA (1)...(19): siRNA sense strand
gcaaagccuugaagauguu

SEQ ID NO: 761998 - RNA, 19 nt, Homo sapiens
  misc_RNA (1)...(19): siRNA sense strand
gaggaagaauuaaagcaaa

SEQ ID NO: 761999 - RNA, 19 nt, Homo sapiens
  misc_RNA (1)...(19): siRNA sense strand
gaacucaucauuacaggaa

SEQ ID NO: 762000 - RNA, 19 nt, Homo sapiens
  misc_RNA (1)...(19): siRNA sense strand
caagaggaauugaauaaag

SEQ ID NO: 762001 - RNA, 19 nt, Homo sapiens
  misc_RNA (1)...(19): siRNA sense strand
cgaagagucucaagggaaa

SEQ ID NO: 762002 - RNA, 19 nt, Homo sapiens
  misc_RNA (1)...(19): siRNA sense strand
gaauagagaacacaacgaa

SEQ ID NO: 762003 - RNA, 19 nt, Homo sapiens
  misc_RNA (1)...(19): siRNA sense strand
gauacuaccuugccugcuu

SEQ ID NO: 762004 - RNA, 19 nt, Homo sapiens
  misc_RNA (1)...(19): siRNA sense strand
ugaaagagaagaaugauga

SEQ ID NO: 762005 - RNA, 19 nt, Homo sapiens
  misc_RNA (1)...(19): siRNA sense strand
ggaauacaucgaagaaauu

SEQ ID NO: 762006 - RNA, 19 nt, Homo sapiens
  misc_RNA (1)...(19): siRNA sense strand
gaauugaccaggacuaaug

SEQ ID NO: 762007 - RNA, 19 nt, Homo sapiens
  misc_RNA (1)...(19): siRNA sense strand
gaaaauagccaacucaaau

SEQ ID NO: 762008 - RNA, 19 nt, Homo sapiens
  misc_RNA (1)...(19): siRNA sense strand
aucuagagcugaagaauua

SEQ ID NO: 762009 - RNA, 19 nt, Homo sapiens
  misc_RNA (1)...(19): siRNA sense strand
ggaccaguauccuuucaga

SEQ ID NO: 762010 - RNA, 19 nt, Homo sapiens
  misc_RNA (1)...(19): siRNA sense strand
guuaacagccagugagaua

SEQ ID NO: 762011 - RNA, 19 nt, Homo sapiens
  misc_RNA (1)...(19): siRNA sense strand
ucaagcauguugugaaguu

SEQ ID NO: 762012 - RNA, 19 nt, Homo sapiens
  misc_RNA (1)...(19): siRNA sense strand
gcuaaaugcugcacuaagg

SEQ ID NO: 762013 - RNA, 19 nt, Homo sapiens
  misc_RNA (1)...(19): siRNA sense strand
caacucaaaucggaaguau

SEQ ID NO: 762014 - RNA, 19 nt, Homo sapiens
  misc_RNA (1)...(19): siRNA sense strand
gcuagauauugcccaguua

SEQ ID NO: 762015 - RNA, 19 nt, Homo sapiens
  misc_RNA (1)...(19): siRNA sense strand
gcucaggaacagcuaaaua

SEQ ID NO: 762016 - RNA, 19 nt, Homo sapiens
  misc_RNA (1)...(19): siRNA sense strand
gaaauuaguugugcuucag

SEQ ID NO: 762017 - RNA, 19 nt, Homo sapiens
  misc_RNA (1)...(19): siRNA sense strand
gcacuaaaggaaacagaaa

SEQ ID NO: 762018 - RNA, 19 nt, Homo sapiens
  misc_RNA (1)...(19): siRNA sense strand
gcucaaaucaagaauaugu

SEQ ID NO: 762019 - RNA, 19 nt, Homo sapiens
  misc_RNA (1)...(19): siRNA sense strand
caaguggcgucuccucuau

SEQ ID NO: 762020 - RNA, 19 nt, Homo sapiens
  misc_RNA (1)...(19): siRNA sense strand
gcaacaggaggaagacuuu

SEQ ID NO: 762021 - RNA, 19 nt, Homo sapiens
  misc_RNA (1)...(19): siRNA sense strand
uggaauacaucgaagaaau

SEQ ID NO: 762022 - RNA, 19 nt, Homo sapiens
  misc_RNA (1)...(19): siRNA sense strand
cugaagaaauuaacaagug

SEQ ID NO: 762023 - RNA, 19 nt, Homo sapiens
  misc_RNA (1)...(19): siRNA sense strand
gaacacaacgaaaaucuaa

SEQ ID NO: 762024 - RNA, 19 nt, Homo sapiens
  misc_RNA (1)...(19): siRNA sense strand
gaagaaauuaguugugcuu

SEQ ID NO: 762025 - RNA, 19 nt, Homo sapiens
  misc_RNA (1)...(19): siRNA sense strand
gcuggagaacucaucauua

SEQ ID NO: 762026 - RNA, 19 nt, Homo sapiens
  misc_RNA (1)...(19): siRNA sense strand
aaaguuaagucuucggaau

SEQ ID NO: 762027 - RNA, 19 nt, Homo sapiens
  misc_RNA (1)...(19): siRNA sense strand
cagcagaauuaacugaaga

SEQ ID NO: 762028 - RNA, 19 nt, Homo sapiens
  misc_RNA (1)...(19): siRNA sense strand
caagucagcacuaaaggaa

SEQ ID NO: 762029 - RNA, 19 nt, Homo sapiens
  misc_RNA (1)...(19): siRNA sense strand
agauguuacugcucaauuu

SEQ ID NO: 762030 - RNA, 19 nt, Homo sapiens
  misc_RNA (1)...(19): siRNA sense strand
gaccaugucaacaggaaua

SEQ ID NO: 762031 - RNA, 19 nt, Homo sapiens
  misc_RNA (1)...(19): siRNA sense strand
ggacuaaugaacuacuaaa

SEQ ID NO: 762032 - RNA, 19 nt, Homo sapiens
  misc_RNA (1)...(19): siRNA sense strand
ccaaaggagucucgaagag

SEQ ID NO: 762033 - RNA, 19 nt, Homo sapiens
  misc_RNA (1)...(19): siRNA sense strand
ucaagaaucauggaaguaa

SEQ ID NO: 762034 - RNA, 19 nt, Homo sapiens
  misc_RNA (1)...(19): siRNA sense strand
uaaggaugcuucuagaucu

SEQ ID NO: 762035 - RNA, 19 nt, Homo sapiens
  misc_RNA (1)...(19): siRNA sense strand
gaaagagaagaaugaugaa

SEQ ID NO: 762036 - RNA, 19 nt, Homo sapiens
  misc_RNA (1)...(19): siRNA sense strand
caagaaggcauggagauga

SEQ ID NO: 762037 - RNA, 19 nt, Homo sapiens
  misc_RNA (1)...(19): siRNA sense strand
guugugaaguugaaagaug

SEQ ID NO: 762038 - RNA, 19 nt, Homo sapiens
  misc_RNA (1)...(19): siRNA sense strand
aaauaaugcuacacuggaa

SEQ ID NO: 762039 - RNA, 19 nt, Homo sapiens
  misc_RNA (1)...(19): siRNA sense strand
uaacugauuugcagaacca

SEQ ID NO: 762040 - RNA, 19 nt, Homo sapiens
  misc_RNA (1)...(19): siRNA sense strand
uaugauggcuaagcaagaa

SEQ ID NO: 762041 - RNA, 19 nt, Homo sapiens
  misc_RNA (1)...(19): siRNA sense strand
caacagcagaauuaacuga

SEQ ID NO: 762042 - RNA, 19 nt, Homo sapiens
  misc_RNA (1)...(19): siRNA sense strand
ggaaaaguaugacaguaug

SEQ ID NO: 762043 - RNA, 19 nt, Homo sapiens
  misc_RNA (1)...(19): siRNA sense strand
gugcaaagccuugaagaug

SEQ ID NO: 762044 - RNA, 19 nt, Homo sapiens
  misc_RNA (1)...(19): siRNA sense strand
guaaggaugcuucuagauc

SEQ ID NO: 762045 - RNA, 19 nt, Homo sapiens
  misc_RNA (1)...(19): siRNA sense strand
caaugacccuucugguugu

SEQ ID NO: 762046 - RNA, 19 nt, Homo sapiens
  misc_RNA (1)...(19): siRNA sense strand
gaauuaucuucgagucuuc

SEQ ID NO: 762047 - RNA, 19 nt, Homo sapiens
  misc_RNA (1)...(19): siRNA sense strand
ggaggaagacuuuagaaaa

SEQ ID NO: 762048 - RNA, 19 nt, Homo sapiens
  misc_RNA (1)...(19): siRNA sense strand
agaauuaucuucgagucuu

SEQ ID NO: 762049 - RNA, 19 nt, Homo sapiens
  misc_RNA (1)...(19): siRNA sense strand
gcaagaaggcauggagaug

SEQ ID NO: 762050 - RNA, 19 nt, Homo sapiens
  misc_RNA (1)...(19): siRNA sense strand
ucaaaucggaaguaucaaa

SEQ ID NO: 762051 - RNA, 19 nt, Homo sapiens
  misc_RNA (1)...(19): siRNA sense strand
cugaaaggcuggucaagca

SEQ ID NO: 762052 - RNA, 19 nt, Homo sapiens
  misc_RNA (1)...(19): siRNA sense strand
ugaaaugucagcugcuuga

SEQ ID NO: 762053 - RNA, 19 nt, Homo sapiens
  misc_RNA (1)...(19): siRNA sense strand
aagaaggcauggagaugaa

SEQ ID NO: 762054 - RNA, 19 nt, Homo sapiens
  misc_RNA (1)...(19): siRNA sense strand
acaaauugauucacuucug

SEQ ID NO: 762055 - RNA, 19 nt, Homo sapiens
  misc_RNA (1)...(19): siRNA sense strand
ccaggugcuuaugauguua

SEQ ID NO: 762056 - RNA, 19 nt, Homo sapiens
  misc_RNA (1)...(19): siRNA sense strand
uauggagugucaagaauca

SEQ ID NO: 762057 - RNA, 19 nt, Homo sapiens
  misc_RNA (1)...(19): siRNA sense strand
gaaaggcuggucaagcaau

SEQ ID NO: 762058 - RNA, 19 nt, Homo sapiens
  misc_RNA (1)...(19): siRNA sense strand
uaaagcaaacacuggauga

SEQ ID NO: 762059 - RNA, 19 nt, Homo sapiens
  misc_RNA (1)...(19): siRNA sense strand
cuucgagucuucaucagaa

SEQ ID NO: 762060 - RNA, 19 nt, Homo sapiens
  misc_RNA (1)...(19): siRNA sense strand
acaucucucucugcaaaua

SEQ ID NO: 762061 - RNA, 19 nt, Homo sapiens
  misc_RNA (1)...(19): siRNA sense strand
caacaggaggaagacuuua

SEQ ID NO: 762062 - RNA, 19 nt, Homo sapiens
  misc_RNA (1)...(19): siRNA sense strand
uaacagccagugagauaga

SEQ ID NO: 762063 - RNA, 19 nt, Homo sapiens
  misc_RNA (1)...(19): siRNA sense strand
gaaucuguuugaggaagaa

SEQ ID NO: 762064 - RNA, 19 nt, Homo sapiens
  misc_RNA (1)...(19): siRNA sense strand
caacaggaauagagaacac

SEQ ID NO: 762065 - RNA, 19 nt, Homo sapiens
  misc_RNA (1)...(19): siRNA sense strand
caggacuaaugaacuacua

SEQ ID NO: 762066 - RNA, 19 nt, Homo sapiens
  misc_RNA (1)...(19): siRNA sense strand
ggagaacucaucauuacag

SEQ ID NO: 762067 - RNA, 19 nt, Homo sapiens
  misc_RNA (1)...(19): siRNA sense strand
cuggagaacucaucauuac

SEQ ID NO: 762068 - RNA, 19 nt, Homo sapiens
  misc_RNA (1)...(19): siRNA sense strand
ugcaaagccuugaagaugu

SEQ ID NO: 762069 - RNA, 19 nt, Homo sapiens
  misc_RNA (1)...(19): siRNA sense strand
aagagaagaaucuguuuga

SEQ ID NO: 762070 - RNA, 19 nt, Homo sapiens
  misc_RNA (1)...(19): siRNA sense strand
cuaaacaaguagaagaucu

SEQ ID NO: 762071 - RNA, 19 nt, Homo sapiens
  misc_RNA (1)...(19): siRNA sense strand
agaaauuaguugugcuuca

SEQ ID NO: 762072 - RNA, 19 nt, Homo sapiens
  misc_RNA (1)...(19): siRNA sense strand
aaaggcuggucaagcaauu

SEQ ID NO: 762073 - RNA, 19 nt, Homo sapiens
  misc_RNA (1)...(19): siRNA sense strand
ucaggaacagcuaaauaaa

SEQ ID NO: 762074 - RNA, 19 nt, Homo sapiens
  misc_RNA (1)...(19): siRNA sense strand
agaaccaacucaagcaaca

SEQ ID NO: 762075 - RNA, 19 nt, Homo sapiens
  misc_RNA (1)...(19): siRNA sense strand
gauguuacugcucaauuug

SEQ ID NO: 762076 - RNA, 19 nt, Homo sapiens
  misc_RNA (1)...(19): siRNA sense strand
uagcccaacuggagggaaa

SEQ ID NO: 762077 - RNA, 19 nt, Homo sapiens
  misc_RNA (1)...(19): siRNA sense strand
acucaaaucggaaguauca

SEQ ID NO: 762078 - RNA, 19 nt, Homo sapiens
  misc_RNA (1)...(19): siRNA sense strand
gaccaagucagcacuaaag

SEQ ID NO: 762079 - RNA, 19 nt, Homo sapiens
  misc_RNA (1)...(19): siRNA sense strand
gaagaaucuguuugaggaa

SEQ ID NO: 762080 - RNA, 19 nt, Homo sapiens
  misc_RNA (1)...(19): siRNA sense strand
caacgaaaaucuaaaugca

SEQ ID NO: 762081 - RNA, 19 nt, Homo sapiens
  misc_RNA (1)...(19): siRNA sense strand
auucuaagcuuggaguuga

SEQ ID NO: 762082 - RNA, 19 nt, Homo sapiens
  misc_RNA (1)...(19): siRNA sense strand
ccuauggagugucaagaau

SEQ ID NO: 762083 - RNA, 19 nt, Homo sapiens
  misc_RNA (1)...(19): siRNA sense strand
gacaaaacuucaagaggaa

SEQ ID NO: 762084 - RNA, 19 nt, Homo sapiens
  misc_RNA (1)...(19): siRNA sense strand
aaucaagcauguugugaag

SEQ ID NO: 762085 - RNA, 19 nt, Homo sapiens
  misc_RNA (1)...(19): siRNA sense strand
ucuccucuaugaagaacua

SEQ ID NO: 762086 - RNA, 19 nt, Homo sapiens
  misc_RNA (1)...(19): siRNA sense strand
gaggaagacuuuagaaaac

SEQ ID NO: 762087 - RNA, 19 nt, Homo sapiens
  misc_RNA (1)...(19): siRNA sense strand
gcagaaccaacucaagcaa

SEQ ID NO: 762088 - RNA, 19 nt, Homo sapiens
  misc_RNA (1)...(19): siRNA sense strand
aaacaaagaugagggguau

SEQ ID NO: 762089 - RNA, 19 nt, Homo sapiens
  misc_RNA (1)...(19): siRNA sense strand
gaaacaggcucagaauuug

SEQ ID NO: 762090 - RNA, 19 nt, Homo sapiens
  misc_RNA (1)...(19): siRNA sense strand
gaaccaagcugacugugau

SEQ ID NO: 762091 - RNA, 19 nt, Homo sapiens
  misc_RNA (1)...(19): siRNA sense strand
gacaagggcucacggauga

SEQ ID NO: 762092 - RNA, 19 nt, Homo sapiens
  misc_RNA (1)...(19): siRNA sense strand
gggaagaucuugggaauau

SEQ ID NO: 762093 - RNA, 19 nt, Homo sapiens
  misc_RNA (1)...(19): siRNA sense strand
gagaauggauguccucaug

SEQ ID NO: 762094 - RNA, 19 nt, Homo sapiens
  misc_RNA (1)...(19): siRNA sense strand
ggaaggugauugaguuuga

SEQ ID NO: 762095 - RNA, 19 nt, Homo sapiens
  misc_RNA (1)...(19): siRNA sense strand
ggagagcccugcugagaga

SEQ ID NO: 762096 - RNA, 19 nt, Homo sapiens
  misc_RNA (1)...(19): siRNA sense strand
gaauggauguccucaugaa

SEQ ID NO: 762097 - RNA, 19 nt, Homo sapiens
  misc_RNA (1)...(19): siRNA sense strand
ucaagaagguggagaaugu

SEQ ID NO: 762098 - RNA, 19 nt, Homo sapiens
  misc_RNA (1)...(19): siRNA sense strand
gcgaaugucucucuaagga

SEQ ID NO: 762099 - RNA, 19 nt, Homo sapiens
  misc_RNA (1)...(19): siRNA sense strand
ugaaacaggcucagaauuu

SEQ ID NO: 762100 - RNA, 19 nt, Homo sapiens
  misc_RNA (1)...(19): siRNA sense strand
ggaaagucaucguuaggaa

SEQ ID NO: 762101 - RNA, 19 nt, Homo sapiens
  misc_RNA (1)...(19): siRNA sense strand
guuugaagcugccuuguuu

SEQ ID NO: 762102 - RNA, 19 nt, Homo sapiens
  misc_RNA (1)...(19): siRNA sense strand
gggcagaggcagaggauua

SEQ ID NO: 762103 - RNA, 19 nt, Homo sapiens
  misc_RNA (1)...(19): siRNA sense strand
ucaauauacugucaaguga

SEQ ID NO: 762104 - RNA, 19 nt, Homo sapiens
  misc_RNA (1)...(19): siRNA sense strand
guggauaucugcauucuca

SEQ ID NO: 762105 - RNA, 19 nt, Homo sapiens
  misc_RNA (1)...(19): siRNA sense strand
gacccuaccuuaucucaga

SEQ ID NO: 762106 - RNA, 19 nt, Homo sapiens
  misc_RNA (1)...(19): siRNA sense strand
cagcagaagucagauugua

SEQ ID NO: 762107 - RNA, 19 nt, Homo sapiens
  misc_RNA (1)...(19): siRNA sense strand
caagugauagcuauucuuu

SEQ ID NO: 762108 - RNA, 19 nt, Homo sapiens
  misc_RNA (1)...(19): siRNA sense strand
ugacaagccugaaguccuu

SEQ ID NO: 762109 - RNA, 19 nt, Homo sapiens
  misc_RNA (1)...(19): siRNA sense strand
caucaguacuucauccaaa

SEQ ID NO: 762110 - RNA, 19 nt, Homo sapiens
  misc_RNA (1)...(19): siRNA sense strand
ggcaaaggcugaccguaga

SEQ ID NO: 762111 - RNA, 19 nt, Homo sapiens
  misc_RNA (1)...(19): siRNA sense strand
caaagaucauucuccuuga

SEQ ID NO: 762112 - RNA, 19 nt, Homo sapiens
  misc_RNA (1)...(19): siRNA sense strand
gauauaagaaggagggaaa

SEQ ID NO: 762113 - RNA, 19 nt, Homo sapiens
  misc_RNA (1)...(19): siRNA sense strand
gugaaaggcuaccggcaaa

SEQ ID NO: 762114 - RNA, 19 nt, Homo sapiens
  misc_RNA (1)...(19): siRNA sense strand
ccaaaggccugucauuguc

SEQ ID NO: 762115 - RNA, 19 nt, Homo sapiens
  misc_RNA (1)...(19): siRNA sense strand
caaagaaauugcagaacca

SEQ ID NO: 762116 - RNA, 19 nt, Homo sapiens
  misc_RNA (1)...(19): siRNA sense strand
gcaacaggaccauguguga

SEQ ID NO: 762117 - RNA, 19 nt, Homo sapiens
  misc_RNA (1)...(19): siRNA sense strand
ggucagaggcauacaguga

SEQ ID NO: 762118 - RNA, 19 nt, Homo sapiens
  misc_RNA (1)...(19): siRNA sense strand
gaaauugcagaaccagaaa

SEQ ID NO: 762119 - RNA, 19 nt, Homo sapiens
  misc_RNA (1)...(19): siRNA sense strand
gcaaagugacagccucaaa

SEQ ID NO: 762120 - RNA, 19 nt, Homo sapiens
  misc_RNA (1)...(19): siRNA sense strand
ugagaaagaugaaggaaaa

SEQ ID NO: 762121 - RNA, 19 nt, Homo sapiens
  misc_RNA (1)...(19): siRNA sense strand
ugacucaucugacaccaau

SEQ ID NO: 762122 - RNA, 19 nt, Homo sapiens
  misc_RNA (1)...(19): siRNA sense strand
gagaucaccuucagagacu

SEQ ID NO: 762123 - RNA, 19 nt, Homo sapiens
  misc_RNA (1)...(19): siRNA sense strand
gcggagauccuuugcagaa

SEQ ID NO: 762124 - RNA, 19 nt, Homo sapiens
  misc_RNA (1)...(19): siRNA sense strand
gaaagucuggguuggcauu

SEQ ID NO: 762125 - RNA, 19 nt, Homo sapiens
  misc_RNA (1)...(19): siRNA sense strand
gaacauccuuaccuucacu

SEQ ID NO: 762126 - RNA, 19 nt, Homo sapiens
  misc_RNA (1)...(19): siRNA sense strand
gaagaucuugggaauaugu

SEQ ID NO: 762127 - RNA, 19 nt, Homo sapiens
  misc_RNA (1)...(19): siRNA sense strand
gcaugaagccagcaggaaa

SEQ ID NO: 762128 - RNA, 19 nt, Homo sapiens
  misc_RNA (1)...(19): siRNA sense strand
gaagcgaaugucucucuaa

SEQ ID NO: 762129 - RNA, 19 nt, Homo sapiens
  misc_RNA (1)...(19): siRNA sense strand
uaagaaggagggaaagaaa

SEQ ID NO: 762130 - RNA, 19 nt, Homo sapiens
  misc_RNA (1)...(19): siRNA sense strand
ccaccgaguuuaccaaagu

SEQ ID NO: 762131 - RNA, 19 nt, Homo sapiens
  misc_RNA (1)...(19): siRNA sense strand
gcaagaaacagaggucaga

SEQ ID NO: 762132 - RNA, 19 nt, Homo sapiens
  misc_RNA (1)...(19): siRNA sense strand
aaacauacucuuuggagaa

SEQ ID NO: 762133 - RNA, 19 nt, Homo sapiens
  misc_RNA (1)...(19): siRNA sense strand
agugauagcuauucuuugu

SEQ ID NO: 762134 - RNA, 19 nt, Homo sapiens
  misc_RNA (1)...(19): siRNA sense strand
gaacgucagcugcuuugug

SEQ ID NO: 762135 - RNA, 19 nt, Homo sapiens
  misc_RNA (1)...(19): siRNA sense strand
cagaugagauacagagaca

SEQ ID NO: 762136 - RNA, 19 nt, Homo sapiens
  misc_RNA (1)...(19): siRNA sense strand
aaacauaucacacguacau

SEQ ID NO: 762137 - RNA, 19 nt, Homo sapiens
  misc_RNA (1)...(19): siRNA sense strand
gaacuuuggccuacguuuc

SEQ ID NO: 762138 - RNA, 19 nt, Homo sapiens
  misc_RNA (1)...(19): siRNA sense strand
gggaauaugugggaaugug

SEQ ID NO: 762139 - RNA, 19 nt, Homo sapiens
  misc_RNA (1)...(19): siRNA sense strand
gaaaaguaccccaaagaaa

SEQ ID NO: 762140 - RNA, 19 nt, Homo sapiens
  misc_RNA (1)...(19): siRNA sense strand
acauaucacacguacauua

SEQ ID NO: 762141 - RNA, 19 nt, Homo sapiens
  misc_RNA (1)...(19): siRNA sense strand
cauaucacacguacauuaa

SEQ ID NO: 762142 - RNA, 19 nt, Homo sapiens
  misc_RNA (1)...(19): siRNA sense strand
gcacggccauccgguugaa

SEQ ID NO: 762143 - RNA, 19 nt, Homo sapiens
  misc_RNA (1)...(19): siRNA sense strand
auuagaagauggagagauu

SEQ ID NO: 762144 - RNA, 19 nt, Homo sapiens
  misc_RNA (1)...(19): siRNA sense strand
gaagauggagagauuugug

SEQ ID NO: 762145 - RNA, 19 nt, Homo sapiens
  misc_RNA (1)...(19): siRNA sense strand
gaaagucaucguuaggaau

SEQ ID NO: 762146 - RNA, 19 nt, Homo sapiens
  misc_RNA (1)...(19): siRNA sense strand
gacauuauccugccacauc

SEQ ID NO: 762147 - RNA, 19 nt, Homo sapiens
  misc_RNA (1)...(19): siRNA sense strand
gcgaucacguccugguuau

SEQ ID NO: 762148 - RNA, 19 nt, Homo sapiens
  misc_RNA (1)...(19): siRNA sense strand
uaaugaaacucccagaaaa

SEQ ID NO: 762149 - RNA, 19 nt, Homo sapiens
  misc_RNA (1)...(19): siRNA sense strand
gggcaucauucacgccuau

SEQ ID NO: 762150 - RNA, 19 nt, Homo sapiens
  misc_RNA (1)...(19): siRNA sense strand
caaagugacagccucaaau

SEQ ID NO: 762151 - RNA, 19 nt, Homo sapiens
  misc_RNA (1)...(19): siRNA sense strand
gcgacccugugcaagguua

SEQ ID NO: 762152 - RNA, 19 nt, Homo sapiens
  misc_RNA (1)...(19): siRNA sense strand
gaggagugcauuaagaaga

SEQ ID NO: 762153 - RNA, 19 nt, Homo sapiens
  misc_RNA (1)...(19): siRNA sense strand
caaaugccaccuugacaug

SEQ ID NO: 762154 - RNA, 19 nt, Homo sapiens
  misc_RNA (1)...(19): siRNA sense strand
gcaaaugccaccuugacau

SEQ ID NO: 762155 - RNA, 19 nt, Homo sapiens
  misc_RNA (1)...(19): siRNA sense strand
gcccagaggagcaaaguga

SEQ ID NO: 762156 - RNA, 19 nt, Homo sapiens
  misc_RNA (1)...(19): siRNA sense strand
cuuagagucuugugaugaa

SEQ ID NO: 762157 - RNA, 19 nt, Homo sapiens
  misc_RNA (1)...(19): siRNA sense strand
cagcaggcauggaucuuuc

SEQ ID NO: 762158 - RNA, 19 nt, Homo sapiens
  misc_RNA (1)...(19): siRNA sense strand
ggauaucaguguaugucau

SEQ ID NO: 762159 - RNA, 19 nt, Homo sapiens
  misc_RNA (1)...(19): siRNA sense strand
ugagguggauaucugcauu

SEQ ID NO: 762160 - RNA, 19 nt, Homo sapiens
  misc_RNA (1)...(19): siRNA sense strand
cgaccuguguuccugaaug

SEQ ID NO: 762161 - RNA, 19 nt, Homo sapiens
  misc_RNA (1)...(19): siRNA sense strand
ggcagucaauggaacuuug

SEQ ID NO: 762162 - RNA, 19 nt, Homo sapiens
  misc_RNA (1)...(19): siRNA sense strand
cagaagacccagauacugu

SEQ ID NO: 762163 - RNA, 19 nt, Homo sapiens
  misc_RNA (1)...(19): siRNA sense strand
ugauugccauguuuaaugu

SEQ ID NO: 762164 - RNA, 19 nt, Homo sapiens
  misc_RNA (1)...(19): siRNA sense strand
caaaagauuucgaguccuu

SEQ ID NO: 762165 - RNA, 19 nt, Homo sapiens
  misc_RNA (1)...(19): siRNA sense strand
gagcucuucuccguaauuc

SEQ ID NO: 762166 - RNA, 19 nt, Homo sapiens
  misc_RNA (1)...(19): siRNA sense strand
caggaaaugagaaagauga

SEQ ID NO: 762167 - RNA, 19 nt, Homo sapiens
  misc_RNA (1)...(19): siRNA sense strand
gaggauugcaguucaagga

SEQ ID NO: 762168 - RNA, 19 nt, Homo sapiens
  misc_RNA (1)...(19): siRNA sense strand
ccaaagguaucagcacaca

SEQ ID NO: 762169 - RNA, 19 nt, Homo sapiens
  misc_RNA (1)...(19): siRNA sense strand
uuacaucacccaaccagaa

SEQ ID NO: 762170 - RNA, 19 nt, Homo sapiens
  misc_RNA (1)...(19): siRNA sense strand
caagcgaguucagacaaug

SEQ ID NO: 762171 - RNA, 19 nt, Homo sapiens
  misc_RNA (1)...(19): siRNA sense strand
ggacugugcauagcccuuu

SEQ ID NO: 762172 - RNA, 19 nt, Homo sapiens
  misc_RNA (1)...(19): siRNA sense strand
gcucuucuccguaauucaa

SEQ ID NO: 762173 - RNA, 19 nt, Homo sapiens
  misc_RNA (1)...(19): siRNA sense strand
cccgagcucuucuccguaa

SEQ ID NO: 762174 - RNA, 19 nt, Homo sapiens
  misc_RNA (1)...(19): siRNA sense strand
caccaaaggcuucgucuuc

SEQ ID NO: 762175 - RNA, 19 nt, Homo sapiens
  misc_RNA (1)...(19): siRNA sense strand
guaccuccuuucucucuuc

SEQ ID NO: 762176 - RNA, 19 nt, Homo sapiens
  misc_RNA (1)...(19): siRNA sense strand
ggaaagaaaauuacuggaa

SEQ ID NO: 762177 - RNA, 19 nt, Homo sapiens
  misc_RNA (1)...(19): siRNA sense strand
gcgaggugcucaauauacu

SEQ ID NO: 762178 - RNA, 19 nt, Homo sapiens
  misc_RNA (1)...(19): siRNA sense strand
uaccaacacuauccaagau

SEQ ID NO: 762179 - RNA, 19 nt, Homo sapiens
  misc_RNA (1)...(19): siRNA sense strand
uggaagaccucagaaccaa

SEQ ID NO: 762180 - RNA, 19 nt, Homo sapiens
  misc_RNA (1)...(19): siRNA sense strand
cagagacgcaagccaaauu

SEQ ID NO: 762181 - RNA, 19 nt, Homo sapiens
  misc_RNA (1)...(19): siRNA sense strand
ucaugaacauccuuaccuu

SEQ ID NO: 762182 - RNA, 19 nt, Homo sapiens
  misc_RNA (1)...(19): siRNA sense strand
uaagcuuuguggugagaaa

SEQ ID NO: 762183 - RNA, 19 nt, Homo sapiens
  misc_RNA (1)...(19): siRNA sense strand
ucagaggcauacagugaga

SEQ ID NO: 762184 - RNA, 19 nt, Homo sapiens
  misc_RNA (1)...(19): siRNA sense strand
ggaaaaguaccccaaagaa

SEQ ID NO: 762185 - RNA, 19 nt, Homo sapiens
  misc_RNA (1)...(19): siRNA sense strand
gaagccagcaggaaaagua

SEQ ID NO: 762186 - RNA, 19 nt, Homo sapiens
  misc_RNA (1)...(19): siRNA sense strand
ccagauacugucuugcuuu

SEQ ID NO: 762187 - RNA, 19 nt, Homo sapiens
  misc_RNA (1)...(19): siRNA sense strand
ccuuugggaugaagaggua

SEQ ID NO: 762188 - RNA, 19 nt, Homo sapiens
  misc_RNA (1)...(19): siRNA sense strand
auaaugaaacucccagaaa

SEQ ID NO: 762189 - RNA, 19 nt, Homo sapiens
  misc_RNA (1)...(19): siRNA sense strand
gaaacaggcucagaauuug

SEQ ID NO: 762190 - RNA, 19 nt, Homo sapiens
  misc_RNA (1)...(19): siRNA sense strand
gacaagggcucacggauga

SEQ ID NO: 762191 - RNA, 19 nt, Homo sapiens
  misc_RNA (1)...(19): siRNA sense strand
gggaagaucuugggaauau

SEQ ID NO: 762192 - RNA, 19 nt, Homo sapiens
  misc_RNA (1)...(19): siRNA sense strand
ggagagcccugcugagaga

SEQ ID NO: 762193 - RNA, 19 nt, Homo sapiens
  misc_RNA (1)...(19): siRNA sense strand
ucaagaagguggagaaugu

SEQ ID NO: 762194 - RNA, 19 nt, Homo sapiens
  misc_RNA (1)...(19): siRNA sense strand
gcgaaugucucucuaagga

SEQ ID NO: 762195 - RNA, 19 nt, Homo sapiens
  misc_RNA (1)...(19): siRNA sense strand
ugaaacaggcucagaauuu

SEQ ID NO: 762196 - RNA, 19 nt, Homo sapiens
  misc_RNA (1)...(19): siRNA sense strand
guuugaagcugccuuguuu

SEQ ID NO: 762197 - RNA, 19 nt, Homo sapiens
  misc_RNA (1)...(19): siRNA sense strand
gggcagaggcagaggauua

SEQ ID NO: 762198 - RNA, 19 nt, Homo sapiens
  misc_RNA (1)...(19): siRNA sense strand
ucaauauacugucaaguga

SEQ ID NO: 762199 - RNA, 19 nt, Homo sapiens
  misc_RNA (1)...(19): siRNA sense strand
gacccuaccuuaucucaga

SEQ ID NO: 762200 - RNA, 19 nt, Homo sapiens
  misc_RNA (1)...(19): siRNA sense strand
caagugauagcuauucuuu

SEQ ID NO: 762201 - RNA, 19 nt, Homo sapiens
  misc_RNA (1)...(19): siRNA sense strand
ggcaaaggcugaccguaga

SEQ ID NO: 762202 - RNA, 19 nt, Homo sapiens
  misc_RNA (1)...(19): siRNA sense strand
gauauaagaaggagggaaa

SEQ ID NO: 762203 - RNA, 19 nt, Homo sapiens
  misc_RNA (1)...(19): siRNA sense strand
gugaaaggcuaccggcaaa

SEQ ID NO: 762204 - RNA, 19 nt, Homo sapiens
  misc_RNA (1)...(19): siRNA sense strand
caaagaaauugcagaacca

SEQ ID NO: 762205 - RNA, 19 nt, Homo sapiens
  misc_RNA (1)...(19): siRNA sense strand
gcaacaggaccauguguga

SEQ ID NO: 762206 - RNA, 19 nt, Homo sapiens
  misc_RNA (1)...(19): siRNA sense strand
ggucagaggcauacaguga

SEQ ID NO: 762207 - RNA, 19 nt, Homo sapiens
  misc_RNA (1)...(19): siRNA sense strand
gaaauugcagaaccagaaa

SEQ ID NO: 762208 - RNA, 19 nt, Homo sapiens
  misc_RNA (1)...(19): siRNA sense strand
gcaaagugacagccucaaa

SEQ ID NO: 762209 - RNA, 19 nt, Homo sapiens
  misc_RNA (1)...(19): siRNA sense strand
ugagaaagaugaaggaaaa

SEQ ID NO: 762210 - RNA, 19 nt, Homo sapiens
  misc_RNA (1)...(19): siRNA sense strand
ugacucaucugacaccaau

SEQ ID NO: 762211 - RNA, 19 nt, Homo sapiens
  misc_RNA (1)...(19): siRNA sense strand
gcggagauccuuugcagaa

SEQ ID NO: 762212 - RNA, 19 nt, Homo sapiens
  misc_RNA (1)...(19): siRNA sense strand
gaaagucuggguuggcauu

SEQ ID NO: 762213 - RNA, 19 nt, Homo sapiens
  misc_RNA (1)...(19): siRNA sense strand
gaagaucuugggaauaugu

SEQ ID NO: 762214 - RNA, 19 nt, Homo sapiens
  misc_RNA (1)...(19): siRNA sense strand
gcaugaagccagcaggaaa

SEQ ID NO: 762215 - RNA, 19 nt, Homo sapiens
  misc_RNA (1)...(19): siRNA sense strand
gaagcgaaugucucucuaa

SEQ ID NO: 762216 - RNA, 19 nt, Homo sapiens
  misc_RNA (1)...(19): siRNA sense strand
uaagaaggagggaaagaaa

SEQ ID NO: 762217 - RNA, 19 nt, Homo sapiens
  misc_RNA (1)...(19): siRNA sense strand
ccaccgaguuuaccaaagu

SEQ ID NO: 762218 - RNA, 19 nt, Homo sapiens
  misc_RNA (1)...(19): siRNA sense strand
gcaagaaacagaggucaga

SEQ ID NO: 762219 - RNA, 19 nt, Homo sapiens
  misc_RNA (1)...(19): siRNA sense strand
aaacauacucuuuggagaa

SEQ ID NO: 762220 - RNA, 19 nt, Homo sapiens
  misc_RNA (1)...(19): siRNA sense strand
agugauagcuauucuuugu

SEQ ID NO: 762221 - RNA, 19 nt, Homo sapiens
  misc_RNA (1)...(19): siRNA sense strand
aaacauaucacacguacau

SEQ ID NO: 762222 - RNA, 19 nt, Homo sapiens
  misc_RNA (1)...(19): siRNA sense strand
gaacuuuggccuacguuuc

SEQ ID NO: 762223 - RNA, 19 nt, Homo sapiens
  misc_RNA (1)...(19): siRNA sense strand
gggaauaugugggaaugug

SEQ ID NO: 762224 - RNA, 19 nt, Homo sapiens
  misc_RNA (1)...(19): siRNA sense strand
gaaaaguaccccaaagaaa

SEQ ID NO: 762225 - RNA, 19 nt, Homo sapiens
  misc_RNA (1)...(19): siRNA sense strand
acauaucacacguacauua

SEQ ID NO: 762226 - RNA, 19 nt, Homo sapiens
  misc_RNA (1)...(19): siRNA sense strand
cauaucacacguacauuaa

SEQ ID NO: 762227 - RNA, 19 nt, Homo sapiens
  misc_RNA (1)...(19): siRNA sense strand
gcacggccauccgguugaa

SEQ ID NO: 762228 - RNA, 19 nt, Homo sapiens
  misc_RNA (1)...(19): siRNA sense strand
auuagaagauggagagauu

SEQ ID NO: 762229 - RNA, 19 nt, Homo sapiens
  misc_RNA (1)...(19): siRNA sense strand
gaagauggagagauuugug

SEQ ID NO: 762230 - RNA, 19 nt, Homo sapiens
  misc_RNA (1)...(19): siRNA sense strand
gacauuauccugccacauc

SEQ ID NO: 762231 - RNA, 19 nt, Homo sapiens
  misc_RNA (1)...(19): siRNA sense strand
gggcaucauucacgccuau

SEQ ID NO: 762232 - RNA, 19 nt, Homo sapiens
  misc_RNA (1)...(19): siRNA sense strand
caaagugacagccucaaau

SEQ ID NO: 762233 - RNA, 19 nt, Homo sapiens
  misc_RNA (1)...(19): siRNA sense strand
gcaaaugccaccuugacau

SEQ ID NO: 762234 - RNA, 19 nt, Homo sapiens
  misc_RNA (1)...(19): siRNA sense strand
gcgacccugugcaagguua

SEQ ID NO: 762235 - RNA, 19 nt, Homo sapiens
  misc_RNA (1)...(19): siRNA sense strand
gaggagugcauuaagaaga

SEQ ID NO: 762236 - RNA, 19 nt, Homo sapiens
  misc_RNA (1)...(19): siRNA sense strand
caaaugccaccuugacaug

SEQ ID NO: 762237 - RNA, 19 nt, Homo sapiens
  misc_RNA (1)...(19): siRNA sense strand
gcccagaggagcaaaguga

SEQ ID NO: 762238 - RNA, 19 nt, Homo sapiens
  misc_RNA (1)...(19): siRNA sense strand
cuuagagucuugugaugaa

SEQ ID NO: 762239 - RNA, 19 nt, Homo sapiens
  misc_RNA (1)...(19): siRNA sense strand
cagcaggcauggaucuuuc

SEQ ID NO: 762240 - RNA, 19 nt, Homo sapiens
  misc_RNA (1)...(19): siRNA sense strand
ggauaucaguguaugucau

SEQ ID NO: 762241 - RNA, 19 nt, Homo sapiens
  misc_RNA (1)...(19): siRNA sense strand
ggcagucaauggaacuuug

SEQ ID NO: 762242 - RNA, 19 nt, Homo sapiens
  misc_RNA (1)...(19): siRNA sense strand
cagaagacccagauacugu

SEQ ID NO: 762243 - RNA, 19 nt, Homo sapiens
  misc_RNA (1)...(19): siRNA sense strand
ugauugccauguuuaaugu

SEQ ID NO: 762244 - RNA, 19 nt, Homo sapiens
  misc_RNA (1)...(19): siRNA sense strand
caaaagauuucgaguccuu

SEQ ID NO: 762245 - RNA, 19 nt, Homo sapiens
  misc_RNA (1)...(19): siRNA sense strand
caggaaaugagaaagauga

SEQ ID NO: 762246 - RNA, 19 nt, Homo sapiens
  misc_RNA (1)...(19): siRNA sense strand
gaggauugcaguucaagga

SEQ ID NO: 762247 - RNA, 19 nt, Homo sapiens
  misc_RNA (1)...(19): siRNA sense strand
ccaaagguaucagcacaca

SEQ ID NO: 762248 - RNA, 19 nt, Homo sapiens
  misc_RNA (1)...(19): siRNA sense strand
uuacaucacccaaccagaa

SEQ ID NO: 762249 - RNA, 19 nt, Homo sapiens
  misc_RNA (1)...(19): siRNA sense strand
caagcgaguucagacaaug

SEQ ID NO: 762250 - RNA, 19 nt, Homo sapiens
  misc_RNA (1)...(19): siRNA sense strand
ggacugugcauagcccuuu

SEQ ID NO: 762251 - RNA, 19 nt, Homo sapiens
  misc_RNA (1)...(19): siRNA sense strand
caccaaaggcuucgucuuc

SEQ ID NO: 762252 - RNA, 19 nt, Homo sapiens
  misc_RNA (1)...(19): siRNA sense strand
guaccuccuuucucucuuc

SEQ ID NO: 762253 - RNA, 19 nt, Homo sapiens
  misc_RNA (1)...(19): siRNA sense strand
ggaaagaaaauuacuggaa

SEQ ID NO: 762254 - RNA, 19 nt, Homo sapiens
  misc_RNA (1)...(19): siRNA sense strand
gcgaggugcucaauauacu

SEQ ID NO: 762255 - RNA, 19 nt, Homo sapiens
  misc_RNA (1)...(19): siRNA sense strand
uaccaacacuauccaagau

SEQ ID NO: 762256 - RNA, 19 nt, Homo sapiens
  misc_RNA (1)...(19): siRNA sense strand
ccuuugggaugaagaggua

SEQ ID NO: 762257 - RNA, 19 nt, Homo sapiens
  misc_RNA (1)...(19): siRNA sense strand
uaagcuuuguggugagaaa

SEQ ID NO: 762258 - RNA, 19 nt, Homo sapiens
  misc_RNA (1)...(19): siRNA sense strand
ucagaggcauacagugaga

SEQ ID NO: 762259 - RNA, 19 nt, Homo sapiens
  misc_RNA (1)...(19): siRNA sense strand
ggaaaaguaccccaaagaa

SEQ ID NO: 762260 - RNA, 19 nt, Homo sapiens
  misc_RNA (1)...(19): siRNA sense strand
gaagccagcaggaaaagua

SEQ ID NO: 762261 - RNA, 19 nt, Homo sapiens
  misc_RNA (1)...(19): siRNA sense strand
ccagauacugucuugcuuu

SEQ ID NO: 762262 - RNA, 19 nt, Homo sapiens
  misc_RNA (1)...(19): siRNA sense strand
gauagcuauucuuuguuug

SEQ ID NO: 762263 - RNA, 19 nt, Homo sapiens
  misc_RNA (1)...(19): siRNA sense strand
cugaacaccuuuacaaugc

SEQ ID NO: 762264 - RNA, 19 nt, Homo sapiens
  misc_RNA (1)...(19): siRNA sense strand
gccaacauccugugcauca

SEQ ID NO: 762265 - RNA, 19 nt, Homo sapiens
  misc_RNA (1)...(19): siRNA sense strand
gagagagggcgcuaugcaa

SEQ ID NO: 762266 - RNA, 19 nt, Homo sapiens
  misc_RNA (1)...(19): siRNA sense strand
ggagagagggcgcuaugca

SEQ ID NO: 762267 - RNA, 19 nt, Homo sapiens
  misc_RNA (1)...(19): siRNA sense strand
gaacccacaaggaguuaau

SEQ ID NO: 762268 - RNA, 19 nt, Homo sapiens
  misc_RNA (1)...(19): siRNA sense strand
cagcuacaguucuuagagu

SEQ ID NO: 762269 - RNA, 19 nt, Homo sapiens
  misc_RNA (1)...(19): siRNA sense strand
ggacaucguggccaacauc

SEQ ID NO: 762270 - RNA, 19 nt, Homo sapiens
  misc_RNA (1)...(19): siRNA sense strand
ugaagcgaaugucucucua

SEQ ID NO: 762271 - RNA, 19 nt, Homo sapiens
  misc_RNA (1)...(19): siRNA sense strand
agaaauugcagaaccagaa

SEQ ID NO: 762272 - RNA, 19 nt, Homo sapiens
  misc_RNA (1)...(19): siRNA sense strand
uccaggagcucaagaaggu

SEQ ID NO: 762273 - RNA, 19 nt, Homo sapiens
  misc_RNA (1)...(19): siRNA sense strand
gauggagagauuugugaaa

SEQ ID NO: 762274 - RNA, 19 nt, Homo sapiens
  misc_RNA (1)...(19): siRNA sense strand
ggaagaucuugggaauaug

SEQ ID NO: 762275 - RNA, 19 nt, Homo sapiens
  misc_RNA (1)...(19): siRNA sense strand
uuccgaaggucagcaauuu

SEQ ID NO: 762276 - RNA, 19 nt, Homo sapiens
  misc_RNA (1)...(19): siRNA sense strand
gaggagagagggcgcuaug

SEQ ID NO: 762277 - RNA, 19 nt, Homo sapiens
  misc_RNA (1)...(19): siRNA sense strand
gugauugccauguuuaaug

SEQ ID NO: 762278 - RNA, 19 nt, Homo sapiens
  misc_RNA (1)...(19): siRNA sense strand
gacaaugaaugaguuucug

SEQ ID NO: 762279 - RNA, 19 nt, Homo sapiens
  misc_RNA (1)...(19): siRNA sense strand
gcaaggguggguccugaga

SEQ ID NO: 762280 - RNA, 19 nt, Homo sapiens
  misc_RNA (1)...(19): siRNA sense strand
aaaguaugaucaccaaagg

SEQ ID NO: 762281 - RNA, 19 nt, Homo sapiens
  misc_RNA (1)...(19): siRNA sense strand
aacauacucuuuggagaaa

SEQ ID NO: 762282 - RNA, 19 nt, Homo sapiens
  misc_RNA (1)...(19): siRNA sense strand
gacaagcgaguucagacaa

SEQ ID NO: 762283 - RNA, 19 nt, Homo sapiens
  misc_RNA (1)...(19): siRNA sense strand
aguaugaucaccaaaggua

SEQ ID NO: 762284 - RNA, 19 nt, Homo sapiens
  misc_RNA (1)...(19): siRNA sense strand
gagaaaacauacucuuugg

SEQ ID NO: 762285 - RNA, 19 nt, Homo sapiens
  misc_RNA (1)...(19): siRNA sense strand
ccuugcagcucuccuagga

SEQ ID NO: 762286 - RNA, 19 nt, Homo sapiens
  misc_RNA (1)...(19): siRNA sense strand
cauaagcuuuguggugaga

SEQ ID NO: 762287 - RNA, 19 nt, Homo sapiens
  misc_RNA (1)...(19): siRNA sense strand
agagagggcgcuaugcaaa

SEQ ID NO: 762288 - RNA, 19 nt, Homo sapiens
  misc_RNA (1)...(19): siRNA sense strand
gaaagaugaaggaaaagaa

SEQ ID NO: 762289 - RNA, 19 nt, Homo sapiens
  misc_RNA (1)...(19): siRNA sense strand
gaaacaggcucagaauuug

SEQ ID NO: 762290 - RNA, 19 nt, Homo sapiens
  misc_RNA (1)...(19): siRNA sense strand
gacaagggcucacggauga

SEQ ID NO: 762291 - RNA, 19 nt, Homo sapiens
  misc_RNA (1)...(19): siRNA sense strand
gggaagaucuugggaauau

SEQ ID NO: 762292 - RNA, 19 nt, Homo sapiens
  misc_RNA (1)...(19): siRNA sense strand
ggagagcccugcugagaga

SEQ ID NO: 762293 - RNA, 19 nt, Homo sapiens
  misc_RNA (1)...(19): siRNA sense strand
ucaagaagguggagaaugu

SEQ ID NO: 762294 - RNA, 19 nt, Homo sapiens
  misc_RNA (1)...(19): siRNA sense strand
gcgaaugucucucuaagga

SEQ ID NO: 762295 - RNA, 19 nt, Homo sapiens
  misc_RNA (1)...(19): siRNA sense strand
ugaaacaggcucagaauuu

SEQ ID NO: 762296 - RNA, 19 nt, Homo sapiens
  misc_RNA (1)...(19): siRNA sense strand
guuugaagcugccuuguuu

SEQ ID NO: 762297 - RNA, 19 nt, Homo sapiens
  misc_RNA (1)...(19): siRNA sense strand
gggcagaggcagaggauua

SEQ ID NO: 762298 - RNA, 19 nt, Homo sapiens
  misc_RNA (1)...(19): siRNA sense strand
ucaauauacugucaaguga

SEQ ID NO: 762299 - RNA, 19 nt, Homo sapiens
  misc_RNA (1)...(19): siRNA sense strand
gacccuaccuuaucucaga

SEQ ID NO: 762300 - RNA, 19 nt, Homo sapiens
  misc_RNA (1)...(19): siRNA sense strand
caagugauagcuauucuuu

SEQ ID NO: 762301 - RNA, 19 nt, Homo sapiens
  misc_RNA (1)...(19): siRNA sense strand
ggcaaaggcugaccguaga

SEQ ID NO: 762302 - RNA, 19 nt, Homo sapiens
  misc_RNA (1)...(19): siRNA sense strand
gauauaagaaggagggaaa

SEQ ID NO: 762303 - RNA, 19 nt, Homo sapiens
  misc_RNA (1)...(19): siRNA sense strand
gugaaaggcuaccggcaaa

SEQ ID NO: 762304 - RNA, 19 nt, Homo sapiens
  misc_RNA (1)...(19): siRNA sense strand
caaagaaauugcagaacca

SEQ ID NO: 762305 - RNA, 19 nt, Homo sapiens
  misc_RNA (1)...(19): siRNA sense strand
gcaacaggaccauguguga

SEQ ID NO: 762306 - RNA, 19 nt, Homo sapiens
  misc_RNA (1)...(19): siRNA sense strand
ggucagaggcauacaguga

SEQ ID NO: 762307 - RNA, 19 nt, Homo sapiens
  misc_RNA (1)...(19): siRNA sense strand
gaaauugcagaaccagaaa

SEQ ID NO: 762308 - RNA, 19 nt, Homo sapiens
  misc_RNA (1)...(19): siRNA sense strand
gcaaagugacagccucaaa

SEQ ID NO: 762309 - RNA, 19 nt, Homo sapiens
  misc_RNA (1)...(19): siRNA sense strand
ugagaaagaugaaggaaaa

SEQ ID NO: 762310 - RNA, 19 nt, Homo sapiens
  misc_RNA (1)...(19): siRNA sense strand
ugacucaucugacaccaau

SEQ ID NO: 762311 - RNA, 19 nt, Homo sapiens
  misc_RNA (1)...(19): siRNA sense strand
gcggagauccuuugcagaa

SEQ ID NO: 762312 - RNA, 19 nt, Homo sapiens
  misc_RNA (1)...(19): siRNA sense strand
gaaagucuggguuggcauu

SEQ ID NO: 762313 - RNA, 19 nt, Homo sapiens
  misc_RNA (1)...(19): siRNA sense strand
gaagaucuugggaauaugu

SEQ ID NO: 762314 - RNA, 19 nt, Homo sapiens
  misc_RNA (1)...(19): siRNA sense strand
gcaugaagccagcaggaaa

SEQ ID NO: 762315 - RNA, 19 nt, Homo sapiens
  misc_RNA (1)...(19): siRNA sense strand
gaagcgaaugucucucuaa

SEQ ID NO: 762316 - RNA, 19 nt, Homo sapiens
  misc_RNA (1)...(19): siRNA sense strand
uaagaaggagggaaagaaa

SEQ ID NO: 762317 - RNA, 19 nt, Homo sapiens
  misc_RNA (1)...(19): siRNA sense strand
ccaccgaguuuaccaaagu

SEQ ID NO: 762318 - RNA, 19 nt, Homo sapiens
  misc_RNA (1)...(19): siRNA sense strand
gcaagaaacagaggucaga

SEQ ID NO: 762319 - RNA, 19 nt, Homo sapiens
  misc_RNA (1)...(19): siRNA sense strand
aaacauacucuuuggagaa

SEQ ID NO: 762320 - RNA, 19 nt, Homo sapiens
  misc_RNA (1)...(19): siRNA sense strand
agugauagcuauucuuugu

SEQ ID NO: 762321 - RNA, 19 nt, Homo sapiens
  misc_RNA (1)...(19): siRNA sense strand
aaacauaucacacguacau

SEQ ID NO: 762322 - RNA, 19 nt, Homo sapiens
  misc_RNA (1)...(19): siRNA sense strand
gaacuuuggccuacguuuc

SEQ ID NO: 762323 - RNA, 19 nt, Homo sapiens
  misc_RNA (1)...(19): siRNA sense strand
gggaauaugugggaaugug

SEQ ID NO: 762324 - RNA, 19 nt, Homo sapiens
  misc_RNA (1)...(19): siRNA sense strand
gaaaaguaccccaaagaaa

SEQ ID NO: 762325 - RNA, 19 nt, Homo sapiens
  misc_RNA (1)...(19): siRNA sense strand
acauaucacacguacauua

SEQ ID NO: 762326 - RNA, 19 nt, Homo sapiens
  misc_RNA (1)...(19): siRNA sense strand
cauaucacacguacauuaa

SEQ ID NO: 762327 - RNA, 19 nt, Homo sapiens
  misc_RNA (1)...(19): siRNA sense strand
gcacggccauccgguugaa

SEQ ID NO: 762328 - RNA, 19 nt, Homo sapiens
  misc_RNA (1)...(19): siRNA sense strand
auuagaagauggagagauu

SEQ ID NO: 762329 - RNA, 19 nt, Homo sapiens
  misc_RNA (1)...(19): siRNA sense strand
gaagauggagagauuugug

SEQ ID NO: 762330 - RNA, 19 nt, Homo sapiens
  misc_RNA (1)...(19): siRNA sense strand
gacauuauccugccacauc

SEQ ID NO: 762331 - RNA, 19 nt, Homo sapiens
  misc_RNA (1)...(19): siRNA sense strand
gggcaucauucacgccuau

SEQ ID NO: 762332 - RNA, 19 nt, Homo sapiens
  misc_RNA (1)...(19): siRNA sense strand
caaagugacagccucaaau

SEQ ID NO: 762333 - RNA, 19 nt, Homo sapiens
  misc_RNA (1)...(19): siRNA sense strand
gcaaaugccaccuugacau

SEQ ID NO: 762334 - RNA, 19 nt, Homo sapiens
  misc_RNA (1)...(19): siRNA sense strand
gcgacccugugcaagguua

SEQ ID NO: 762335 - RNA, 19 nt, Homo sapiens
  misc_RNA (1)...(19): siRNA sense strand
gaggagugcauuaagaaga

SEQ ID NO: 762336 - RNA, 19 nt, Homo sapiens
  misc_RNA (1)...(19): siRNA sense strand
caaaugccaccuugacaug

SEQ ID NO: 762337 - RNA, 19 nt, Homo sapiens
  misc_RNA (1)...(19): siRNA sense strand
gcccagaggagcaaaguga

SEQ ID NO: 762338 - RNA, 19 nt, Homo sapiens
  misc_RNA (1)...(19): siRNA sense strand
cuuagagucuugugaugaa

SEQ ID NO: 762339 - RNA, 19 nt, Homo sapiens
  misc_RNA (1)...(19): siRNA sense strand
cagcaggcauggaucuuuc

SEQ ID NO: 762340 - RNA, 19 nt, Homo sapiens
  misc_RNA (1)...(19): siRNA sense strand
ggauaucaguguaugucau

SEQ ID NO: 762341 - RNA, 19 nt, Homo sapiens
  misc_RNA (1)...(19): siRNA sense strand
ggcagucaauggaacuuug

SEQ ID NO: 762342 - RNA, 19 nt, Homo sapiens
  misc_RNA (1)...(19): siRNA sense strand
cagaagacccagauacugu

SEQ ID NO: 762343 - RNA, 19 nt, Homo sapiens
  misc_RNA (1)...(19): siRNA sense strand
ugauugccauguuuaaugu

SEQ ID NO: 762344 - RNA, 19 nt, Homo sapiens
  misc_RNA (1)...(19): siRNA sense strand
caaaagauuucgaguccuu

SEQ ID NO: 762345 - RNA, 19 nt, Homo sapiens
  misc_RNA (1)...(19): siRNA sense strand
caggaaaugagaaagauga

SEQ ID NO: 762346 - RNA, 19 nt, Homo sapiens
  misc_RNA (1)...(19): siRNA sense strand
gaggauugcaguucaagga

SEQ ID NO: 762347 - RNA, 19 nt, Homo sapiens
  misc_RNA (1)...(19): siRNA sense strand
ccaaagguaucagcacaca

SEQ ID NO: 762348 - RNA, 19 nt, Homo sapiens
  misc_RNA (1)...(19): siRNA sense strand
uuacaucacccaaccagaa

SEQ ID NO: 762349 - RNA, 19 nt, Homo sapiens
  misc_RNA (1)...(19): siRNA sense strand
caagcgaguucagacaaug

SEQ ID NO: 762350 - RNA, 19 nt, Homo sapiens
  misc_RNA (1)...(19): siRNA sense strand
ggacugugcauagcccuuu

SEQ ID NO: 762351 - RNA, 19 nt, Homo sapiens
  misc_RNA (1)...(19): siRNA sense strand
caccaaaggcuucgucuuc

SEQ ID NO: 762352 - RNA, 19 nt, Homo sapiens
  misc_RNA (1)...(19): siRNA sense strand
guaccuccuuucucucuuc

SEQ ID NO: 762353 - RNA, 19 nt, Homo sapiens
  misc_RNA (1)...(19): siRNA sense strand
ggaaagaaaauuacuggaa

SEQ ID NO: 762354 - RNA, 19 nt, Homo sapiens
  misc_RNA (1)...(19): siRNA sense strand
gcgaggugcucaauauacu

SEQ ID NO: 762355 - RNA, 19 nt, Homo sapiens
  misc_RNA (1)...(19): siRNA sense strand
uaccaacacuauccaagau

SEQ ID NO: 762356 - RNA, 19 nt, Homo sapiens
  misc_RNA (1)...(19): siRNA sense strand
ccuuugggaugaagaggua

SEQ ID NO: 762357 - RNA, 19 nt, Homo sapiens
  misc_RNA (1)...(19): siRNA sense strand
uaagcuuuguggugagaaa

SEQ ID NO: 762358 - RNA, 19 nt, Homo sapiens
  misc_RNA (1)...(19): siRNA sense strand
ucagaggcauacagugaga

SEQ ID NO: 762359 - RNA, 19 nt, Homo sapiens
  misc_RNA (1)...(19): siRNA sense strand
ggaaaaguaccccaaagaa

SEQ ID NO: 762360 - RNA, 19 nt, Homo sapiens
  misc_RNA (1)...(19): siRNA sense strand
gaagccagcaggaaaagua

SEQ ID NO: 762361 - RNA, 19 nt, Homo sapiens
  misc_RNA (1)...(19): siRNA sense strand
ccagauacugucuugcuuu

SEQ ID NO: 762362 - RNA, 19 nt, Homo sapiens
  misc_RNA (1)...(19): siRNA sense strand
gauagcuauucuuuguuug

SEQ ID NO: 762363 - RNA, 19 nt, Homo sapiens
  misc_RNA (1)...(19): siRNA sense strand
cugaacaccuuuacaaugc

SEQ ID NO: 762364 - RNA, 19 nt, Homo sapiens
  misc_RNA (1)...(19): siRNA sense strand
gccaacauccugugcauca

SEQ ID NO: 762365 - RNA, 19 nt, Homo sapiens
  misc_RNA (1)...(19): siRNA sense strand
gagagagggcgcuaugcaa

SEQ ID NO: 762366 - RNA, 19 nt, Homo sapiens
  misc_RNA (1)...(19): siRNA sense strand
ggagagagggcgcuaugca

SEQ ID NO: 762367 - RNA, 19 nt, Homo sapiens
  misc_RNA (1)...(19): siRNA sense strand
gaacccacaaggaguuaau

SEQ ID NO: 762368 - RNA, 19 nt, Homo sapiens
  misc_RNA (1)...(19): siRNA sense strand
cagcuacaguucuuagagu

SEQ ID NO: 762369 - RNA, 19 nt, Homo sapiens
  misc_RNA (1)...(19): siRNA sense strand
ggacaucguggccaacauc

SEQ ID NO: 762370 - RNA, 19 nt, Homo sapiens
  misc_RNA (1)...(19): siRNA sense strand
ugaagcgaaugucucucua

SEQ ID NO: 762371 - RNA, 19 nt, Homo sapiens
  misc_RNA (1)...(19): siRNA sense strand
agaaauugcagaaccagaa

SEQ ID NO: 762372 - RNA, 19 nt, Homo sapiens
  misc_RNA (1)...(19): siRNA sense strand
uccaggagcucaagaaggu

SEQ ID NO: 762373 - RNA, 19 nt, Homo sapiens
  misc_RNA (1)...(19): siRNA sense strand
gauggagagauuugugaaa

SEQ ID NO: 762374 - RNA, 19 nt, Homo sapiens
  misc_RNA (1)...(19): siRNA sense strand
ggaagaucuugggaauaug

SEQ ID NO: 762375 - RNA, 19 nt, Homo sapiens
  misc_RNA (1)...(19): siRNA sense strand
uuccgaaggucagcaauuu

SEQ ID NO: 762376 - RNA, 19 nt, Homo sapiens
  misc_RNA (1)...(19): siRNA sense strand
gaggagagagggcgcuaug

SEQ ID NO: 762377 - RNA, 19 nt, Homo sapiens
  misc_RNA (1)...(19): siRNA sense strand
gugauugccauguuuaaug

SEQ ID NO: 762378 - RNA, 19 nt, Homo sapiens
  misc_RNA (1)...(19): siRNA sense strand
gacaaugaaugaguuucug

SEQ ID NO: 762379 - RNA, 19 nt, Homo sapiens
  misc_RNA (1)...(19): siRNA sense strand
gcaaggguggguccugaga

SEQ ID NO: 762380 - RNA, 19 nt, Homo sapiens
  misc_RNA (1)...(19): siRNA sense strand
aaaguaugaucaccaaagg

SEQ ID NO: 762381 - RNA, 19 nt, Homo sapiens
  misc_RNA (1)...(19): siRNA sense strand
aacauacucuuuggagaaa

SEQ ID NO: 762382 - RNA, 19 nt, Homo sapiens
  misc_RNA (1)...(19): siRNA sense strand
gacaagcgaguucagacaa

SEQ ID NO: 762383 - RNA, 19 nt, Homo sapiens
  misc_RNA (1)...(19): siRNA sense strand
aguaugaucaccaaaggua

SEQ ID NO: 762384 - RNA, 19 nt, Homo sapiens
  misc_RNA (1)...(19): siRNA sense strand
gagaaaacauacucuuugg

SEQ ID NO: 762385 - RNA, 19 nt, Homo sapiens
  misc_RNA (1)...(19): siRNA sense strand
ccuugcagcucuccuagga

SEQ ID NO: 762386 - RNA, 19 nt, Homo sapiens
  misc_RNA (1)...(19): siRNA sense strand
cauaagcuuuguggugaga

SEQ ID NO: 762387 - RNA, 19 nt, Homo sapiens
  misc_RNA (1)...(19): siRNA sense strand
agagagggcgcuaugcaaa

SEQ ID NO: 762388 - RNA, 19 nt, Homo sapiens
  misc_RNA (1)...(19): siRNA sense strand
gaaagaugaaggaaaagaa

SEQ ID NO: 762389 - RNA, 19 nt, Homo sapiens
  misc_RNA (1)...(19): siRNA sense strand
gaaacaggcucagaauuug

SEQ ID NO: 762390 - RNA, 19 nt, Homo sapiens
  misc_RNA (1)...(19): siRNA sense strand
gacaagggcucacggauga

SEQ ID NO: 762391 - RNA, 19 nt, Homo sapiens
  misc_RNA (1)...(19): siRNA sense strand
gggaagaucuugggaauau

SEQ ID NO: 762392 - RNA, 19 nt, Homo sapiens
  misc_RNA (1)...(19): siRNA sense strand
ggagagcccugcugagaga

SEQ ID NO: 762393 - RNA, 19 nt, Homo sapiens
  misc_RNA (1)...(19): siRNA sense strand
ucaagaagguggagaaugu

SEQ ID NO: 762394 - RNA, 19 nt, Homo sapiens
  misc_RNA (1)...(19): siRNA sense strand
gcgaaugucucucuaagga

SEQ ID NO: 762395 - RNA, 19 nt, Homo sapiens
  misc_RNA (1)...(19): siRNA sense strand
ugaaacaggcucagaauuu

SEQ ID NO: 762396 - RNA, 19 nt, Homo sapiens
  misc_RNA (1)...(19): siRNA sense strand
guuugaagcugccuuguuu

SEQ ID NO: 762397 - RNA, 19 nt, Homo sapiens
  misc_RNA (1)...(19): siRNA sense strand
gggcagaggcagaggauua

SEQ ID NO: 762398 - RNA, 19 nt, Homo sapiens
  misc_RNA (1)...(19): siRNA sense strand
ucaauauacugucaaguga

SEQ ID NO: 762399 - RNA, 19 nt, Homo sapiens
  misc_RNA (1)...(19): siRNA sense strand
gacccuaccuuaucucaga

SEQ ID NO: 762400 - RNA, 19 nt, Homo sapiens
  misc_RNA (1)...(19): siRNA sense strand
caagugauagcuauucuuu

SEQ ID NO: 762401 - RNA, 19 nt, Homo sapiens
  misc_RNA (1)...(19): siRNA sense strand
ggcaaaggcugaccguaga

SEQ ID NO: 762402 - RNA, 19 nt, Homo sapiens
  misc_RNA (1)...(19): siRNA sense strand
gauauaagaaggagggaaa

SEQ ID NO: 762403 - RNA, 19 nt, Homo sapiens
  misc_RNA (1)...(19): siRNA sense strand
gugaaaggcuaccggcaaa

SEQ ID NO: 762404 - RNA, 19 nt, Homo sapiens
  misc_RNA (1)...(19): siRNA sense strand
caaagaaauugcagaacca

SEQ ID NO: 762405 - RNA, 19 nt, Homo sapiens
  misc_RNA (1)...(19): siRNA sense strand
gcaacaggaccauguguga

SEQ ID NO: 762406 - RNA, 19 nt, Homo sapiens
  misc_RNA (1)...(19): siRNA sense strand
ggucagaggcauacaguga

SEQ ID NO: 762407 - RNA, 19 nt, Homo sapiens
  misc_RNA (1)...(19): siRNA sense strand
gaaauugcagaaccagaaa

SEQ ID NO: 762408 - RNA, 19 nt, Homo sapiens
  misc_RNA (1)...(19): siRNA sense strand
gcaaagugacagccucaaa

SEQ ID NO: 762409 - RNA, 19 nt, Homo sapiens
  misc_RNA (1)...(19): siRNA sense strand
ugagaaagaugaaggaaaa

SEQ ID NO: 762410 - RNA, 19 nt, Homo sapiens
  misc_RNA (1)...(19): siRNA sense strand
ugacucaucugacaccaau

SEQ ID NO: 762411 - RNA, 19 nt, Homo sapiens
  misc_RNA (1)...(19): siRNA sense strand
gcggagauccuuugcagaa

SEQ ID NO: 762412 - RNA, 19 nt, Homo sapiens
  misc_RNA (1)...(19): siRNA sense strand
gaaagucuggguuggcauu

SEQ ID NO: 762413 - RNA, 19 nt, Homo sapiens
  misc_RNA (1)...(19): siRNA sense strand
gaagaucuugggaauaugu

SEQ ID NO: 762414 - RNA, 19 nt, Homo sapiens
  misc_RNA (1)...(19): siRNA sense strand
gcaugaagccagcaggaaa

SEQ ID NO: 762415 - RNA, 19 nt, Homo sapiens
  misc_RNA (1)...(19): siRNA sense strand
gaagcgaaugucucucuaa

SEQ ID NO: 762416 - RNA, 19 nt, Homo sapiens
  misc_RNA (1)...(19): siRNA sense strand
uaagaaggagggaaagaaa

SEQ ID NO: 762417 - RNA, 19 nt, Homo sapiens
  misc_RNA (1)...(19): siRNA sense strand
ccaccgaguuuaccaaagu

SEQ ID NO: 762418 - RNA, 19 nt, Homo sapiens
  misc_RNA (1)...(19): siRNA sense strand
gcaagaaacagaggucaga

SEQ ID NO: 762419 - RNA, 19 nt, Homo sapiens
  misc_RNA (1)...(19): siRNA sense strand
aaacauacucuuuggagaa

SEQ ID NO: 762420 - RNA, 19 nt, Homo sapiens
  misc_RNA (1)...(19): siRNA sense strand
agugauagcuauucuuugu

SEQ ID NO: 762421 - RNA, 19 nt, Homo sapiens
  misc_RNA (1)...(19): siRNA sense strand
aaacauaucacacguacau

SEQ ID NO: 762422 - RNA, 19 nt, Homo sapiens
  misc_RNA (1)...(19): siRNA sense strand
gaacuuuggccuacguuuc

SEQ ID NO: 762423 - RNA, 19 nt, Homo sapiens
  misc_RNA (1)...(19): siRNA sense strand
gggaauaugugggaaugug

SEQ ID NO: 762424 - RNA, 19 nt, Homo sapiens
  misc_RNA (1)...(19): siRNA sense strand
gaaaaguaccccaaagaaa

SEQ ID NO: 762425 - RNA, 19 nt, Homo sapiens
  misc_RNA (1)...(19): siRNA sense strand
acauaucacacguacauua

SEQ ID NO: 762426 - RNA, 19 nt, Homo sapiens
  misc_RNA (1)...(19): siRNA sense strand
cauaucacacguacauuaa

SEQ ID NO: 762427 - RNA, 19 nt, Homo sapiens
  misc_RNA (1)...(19): siRNA sense strand
gcacggccauccgguugaa

SEQ ID NO: 762428 - RNA, 19 nt, Homo sapiens
  misc_RNA (1)...(19): siRNA sense strand
auuagaagauggagagauu

SEQ ID NO: 762429 - RNA, 19 nt, Homo sapiens
  misc_RNA (1)...(19): siRNA sense strand
gaagauggagagauuugug

SEQ ID NO: 762430 - RNA, 19 nt, Homo sapiens
  misc_RNA (1)...(19): siRNA sense strand
gacauuauccugccacauc

SEQ ID NO: 762431 - RNA, 19 nt, Homo sapiens
  misc_RNA (1)...(19): siRNA sense strand
gggcaucauucacgccuau

SEQ ID NO: 762432 - RNA, 19 nt, Homo sapiens
  misc_RNA (1)...(19): siRNA sense strand
caaagugacagccucaaau

SEQ ID NO: 762433 - RNA, 19 nt, Homo sapiens
  misc_RNA (1)...(19): siRNA sense strand
gcaaaugccaccuugacau

SEQ ID NO: 762434 - RNA, 19 nt, Homo sapiens
  misc_RNA (1)...(19): siRNA sense strand
gcgacccugugcaagguua

SEQ ID NO: 762435 - RNA, 19 nt, Homo sapiens
  misc_RNA (1)...(19): siRNA sense strand
gaggagugcauuaagaaga

SEQ ID NO: 762436 - RNA, 19 nt, Homo sapiens
  misc_RNA (1)...(19): siRNA sense strand
caaaugccaccuugacaug

SEQ ID NO: 762437 - RNA, 19 nt, Homo sapiens
  misc_RNA (1)...(19): siRNA sense strand
gcccagaggagcaaaguga

SEQ ID NO: 762438 - RNA, 19 nt, Homo sapiens
  misc_RNA (1)...(19): siRNA sense strand
cuuagagucuugugaugaa

SEQ ID NO: 762439 - RNA, 19 nt, Homo sapiens
  misc_RNA (1)...(19): siRNA sense strand
cagcaggcauggaucuuuc

SEQ ID NO: 762440 - RNA, 19 nt, Homo sapiens
  misc_RNA (1)...(19): siRNA sense strand
ggauaucaguguaugucau

SEQ ID NO: 762441 - RNA, 19 nt, Homo sapiens
  misc_RNA (1)...(19): siRNA sense strand
ggcagucaauggaacuuug

SEQ ID NO: 762442 - RNA, 19 nt, Homo sapiens
  misc_RNA (1)...(19): siRNA sense strand
cagaagacccagauacugu

SEQ ID NO: 762443 - RNA, 19 nt, Homo sapiens
  misc_RNA (1)...(19): siRNA sense strand
ugauugccauguuuaaugu

SEQ ID NO: 762444 - RNA, 19 nt, Homo sapiens
  misc_RNA (1)...(19): siRNA sense strand
caaaagauuucgaguccuu

SEQ ID NO: 762445 - RNA, 19 nt, Homo sapiens
  misc_RNA (1)...(19): siRNA sense strand
caggaaaugagaaagauga

SEQ ID NO: 762446 - RNA, 19 nt, Homo sapiens
  misc_RNA (1)...(19): siRNA sense strand
gaggauugcaguucaagga

SEQ ID NO: 762447 - RNA, 19 nt, Homo sapiens
  misc_RNA (1)...(19): siRNA sense strand
ccaaagguaucagcacaca

SEQ ID NO: 762448 - RNA, 19 nt, Homo sapiens
  misc_RNA (1)...(19): siRNA sense strand
uuacaucacccaaccagaa

SEQ ID NO: 762449 - RNA, 19 nt, Homo sapiens
  misc_RNA (1)...(19): siRNA sense strand
caagcgaguucagacaaug

SEQ ID NO: 762450 - RNA, 19 nt, Homo sapiens
  misc_RNA (1)...(19): siRNA sense strand
ggacugugcauagcccuuu

SEQ ID NO: 762451 - RNA, 19 nt, Homo sapiens
  misc_RNA (1)...(19): siRNA sense strand
caccaaaggcuucgucuuc

SEQ ID NO: 762452 - RNA, 19 nt, Homo sapiens
  misc_RNA (1)...(19): siRNA sense strand
guaccuccuuucucucuuc

SEQ ID NO: 762453 - RNA, 19 nt, Homo sapiens
  misc_RNA (1)...(19): siRNA sense strand
ggaaagaaaauuacuggaa

SEQ ID NO: 762454 - RNA, 19 nt, Homo sapiens
  misc_RNA (1)...(19): siRNA sense strand
gcgaggugcucaauauacu

SEQ ID NO: 762455 - RNA, 19 nt, Homo sapiens
  misc_RNA (1)...(19): siRNA sense strand
uaccaacacuauccaagau

SEQ ID NO: 762456 - RNA, 19 nt, Homo sapiens
  misc_RNA (1)...(19): siRNA sense strand
ccuuugggaugaagaggua

SEQ ID NO: 762457 - RNA, 19 nt, Homo sapiens
  misc_RNA (1)...(19): siRNA sense strand
uaagcuuuguggugagaaa

SEQ ID NO: 762458 - RNA, 19 nt, Homo sapiens
  misc_RNA (1)...(19): siRNA sense strand
ucagaggcauacagugaga

SEQ ID NO: 762459 - RNA, 19 nt, Homo sapiens
  misc_RNA (1)...(19): siRNA sense strand
ggaaaaguaccccaaagaa

SEQ ID NO: 762460 - RNA, 19 nt, Homo sapiens
  misc_RNA (1)...(19): siRNA sense strand
gaagccagcaggaaaagua

SEQ ID NO: 762461 - RNA, 19 nt, Homo sapiens
  misc_RNA (1)...(19): siRNA sense strand
ccagauacugucuugcuuu

SEQ ID NO: 762462 - RNA, 19 nt, Homo sapiens
  misc_RNA (1)...(19): siRNA sense strand
gauagcuauucuuuguuug

SEQ ID NO: 762463 - RNA, 19 nt, Homo sapiens
  misc_RNA (1)...(19): siRNA sense strand
cugaacaccuuuacaaugc

SEQ ID NO: 762464 - RNA, 19 nt, Homo sapiens
  misc_RNA (1)...(19): siRNA sense strand
gccaacauccugugcauca

SEQ ID NO: 762465 - RNA, 19 nt, Homo sapiens
  misc_RNA (1)...(19): siRNA sense strand
gagagagggcgcuaugcaa

SEQ ID NO: 762466 - RNA, 19 nt, Homo sapiens
  misc_RNA (1)...(19): siRNA sense strand
ggagagagggcgcuaugca

SEQ ID NO: 762467 - RNA, 19 nt, Homo sapiens
  misc_RNA (1)...(19): siRNA sense strand
gaacccacaaggaguuaau

SEQ ID NO: 762468 - RNA, 19 nt, Homo sapiens
  misc_RNA (1)...(19): siRNA sense strand
cagcuacaguucuuagagu

SEQ ID NO: 762469 - RNA, 19 nt, Homo sapiens
  misc_RNA (1)...(19): siRNA sense strand
ggacaucguggccaacauc

SEQ ID NO: 762470 - RNA, 19 nt, Homo sapiens
  misc_RNA (1)...(19): siRNA sense strand
ugaagcgaaugucucucua

SEQ ID NO: 762471 - RNA, 19 nt, Homo sapiens
  misc_RNA (1)...(19): siRNA sense strand
agaaauugcagaaccagaa

SEQ ID NO: 762472 - RNA, 19 nt, Homo sapiens
  misc_RNA (1)...(19): siRNA sense strand
uccaggagcucaagaaggu

SEQ ID NO: 762473 - RNA, 19 nt, Homo sapiens
  misc_RNA (1)...(19): siRNA sense strand
gauggagagauuugugaaa

SEQ ID NO: 762474 - RNA, 19 nt, Homo sapiens
  misc_RNA (1)...(19): siRNA sense strand
ggaagaucuugggaauaug

SEQ ID NO: 762475 - RNA, 19 nt, Homo sapiens
  misc_RNA (1)...(19): siRNA sense strand
uuccgaaggucagcaauuu

SEQ ID NO: 762476 - RNA, 19 nt, Homo sapiens
  misc_RNA (1)...(19): siRNA sense strand
gaggagagagggcgcuaug

SEQ ID NO: 762477 - RNA, 19 nt, Homo sapiens
  misc_RNA (1)...(19): siRNA sense strand
gugauugccauguuuaaug

SEQ ID NO: 762478 - RNA, 19 nt, Homo sapiens
  misc_RNA (1)...(19): siRNA sense strand
gacaaugaaugaguuucug

SEQ ID NO: 762479 - RNA, 19 nt, Homo sapiens
  misc_RNA (1)...(19): siRNA sense strand
gcaaggguggguccugaga

SEQ ID NO: 762480 - RNA, 19 nt, Homo sapiens
  misc_RNA (1)...(19): siRNA sense strand
aaaguaugaucaccaaagg

SEQ ID NO: 762481 - RNA, 19 nt, Homo sapiens
  misc_RNA (1)...(19): siRNA sense strand
aacauacucuuuggagaaa

SEQ ID NO: 762482 - RNA, 19 nt, Homo sapiens
  misc_RNA (1)...(19): siRNA sense strand
gacaagcgaguucagacaa

SEQ ID NO: 762483 - RNA, 19 nt, Homo sapiens
  misc_RNA (1)...(19): siRNA sense strand
aguaugaucaccaaaggua

SEQ ID NO: 762484 - RNA, 19 nt, Homo sapiens
  misc_RNA (1)...(19): siRNA sense strand
gagaaaacauacucuuugg

SEQ ID NO: 762485 - RNA, 19 nt, Homo sapiens
  misc_RNA (1)...(19): siRNA sense strand
ccuugcagcucuccuagga

SEQ ID NO: 762486 - RNA, 19 nt, Homo sapiens
  misc_RNA (1)...(19): siRNA sense strand
cauaagcuuuguggugaga

SEQ ID NO: 762487 - RNA, 19 nt, Homo sapiens
  misc_RNA (1)...(19): siRNA sense strand
agagagggcgcuaugcaaa

SEQ ID NO: 762488 - RNA, 19 nt, Homo sapiens
  misc_RNA (1)...(19): siRNA sense strand
gaaagaugaaggaaaagaa

SEQ ID NO: 762489 - RNA, 19 nt, Homo sapiens
  misc_RNA (1)...(19): siRNA sense strand
gaaacaggcucagaauuug

SEQ ID NO: 762490 - RNA, 19 nt, Homo sapiens
  misc_RNA (1)...(19): siRNA sense strand
gacaagggcucacggauga

SEQ ID NO: 762491 - RNA, 19 nt, Homo sapiens
  misc_RNA (1)...(19): siRNA sense strand
gggaagaucuugggaauau

SEQ ID NO: 762492 - RNA, 19 nt, Homo sapiens
  misc_RNA (1)...(19): siRNA sense strand
ggagagcccugcugagaga

SEQ ID NO: 762493 - RNA, 19 nt, Homo sapiens
  misc_RNA (1)...(19): siRNA sense strand
ucaagaagguggagaaugu

SEQ ID NO: 762494 - RNA, 19 nt, Homo sapiens
  misc_RNA (1)...(19): siRNA sense strand
gcgaaugucucucuaagga

SEQ ID NO: 762495 - RNA, 19 nt, Homo sapiens
  misc_RNA (1)...(19): siRNA sense strand
ugaaacaggcucagaauuu

SEQ ID NO: 762496 - RNA, 19 nt, Homo sapiens
  misc_RNA (1)...(19): siRNA sense strand
guuugaagcugccuuguuu

SEQ ID NO: 762497 - RNA, 19 nt, Homo sapiens
  misc_RNA (1)...(19): siRNA sense strand
gggcagaggcagaggauua

SEQ ID NO: 762498 - RNA, 19 nt, Homo sapiens
  misc_RNA (1)...(19): siRNA sense strand
ucaauauacugucaaguga

SEQ ID NO: 762499 - RNA, 19 nt, Homo sapiens
  misc_RNA (1)...(19): siRNA sense strand
gacccuaccuuaucucaga

SEQ ID NO: 762500 - RNA, 19 nt, Homo sapiens
  misc_RNA (1)...(19): siRNA sense strand
caagugauagcuauucuuu

SEQ ID NO: 762501 - RNA, 19 nt, Homo sapiens
  misc_RNA (1)...(19): siRNA sense strand
ggcaaaggcugaccguaga

SEQ ID NO: 762502 - RNA, 19 nt, Homo sapiens
  misc_RNA (1)...(19): siRNA sense strand
gauauaagaaggagggaaa

SEQ ID NO: 762503 - RNA, 19 nt, Homo sapiens
  misc_RNA (1)...(19): siRNA sense strand
gugaaaggcuaccggcaaa

SEQ ID NO: 762504 - RNA, 19 nt, Homo sapiens
  misc_RNA (1)...(19): siRNA sense strand
caaagaaauugcagaacca

SEQ ID NO: 762505 - RNA, 19 nt, Homo sapiens
  misc_RNA (1)...(19): siRNA sense strand
gcaacaggaccauguguga

SEQ ID NO: 762506 - RNA, 19 nt, Homo sapiens
  misc_RNA (1)...(19): siRNA sense strand
ggucagaggcauacaguga

SEQ ID NO: 762507 - RNA, 19 nt, Homo sapiens
  misc_RNA (1)...(19): siRNA sense strand
gaaauugcagaaccagaaa

SEQ ID NO: 762508 - RNA, 19 nt, Homo sapiens
  misc_RNA (1)...(19): siRNA sense strand
gcaaagugacagccucaaa

SEQ ID NO: 762509 - RNA, 19 nt, Homo sapiens
  misc_RNA (1)...(19): siRNA sense strand
ugagaaagaugaaggaaaa

SEQ ID NO: 762510 - RNA, 19 nt, Homo sapiens
  misc_RNA (1)...(19): siRNA sense strand
ugacucaucugacaccaau

SEQ ID NO: 762511 - RNA, 19 nt, Homo sapiens
  misc_RNA (1)...(19): siRNA sense strand
gcggagauccuuugcagaa

SEQ ID NO: 762512 - RNA, 19 nt, Homo sapiens
  misc_RNA (1)...(19): siRNA sense strand
gaaagucuggguuggcauu

SEQ ID NO: 762513 - RNA, 19 nt, Homo sapiens
  misc_RNA (1)...(19): siRNA sense strand
gaagaucuugggaauaugu

SEQ ID NO: 762514 - RNA, 19 nt, Homo sapiens
  misc_RNA (1)...(19): siRNA sense strand
gcaugaagccagcaggaaa

SEQ ID NO: 762515 - RNA, 19 nt, Homo sapiens
  misc_RNA (1)...(19): siRNA sense strand
gaagcgaaugucucucuaa

SEQ ID NO: 762516 - RNA, 19 nt, Homo sapiens
  misc_RNA (1)...(19): siRNA sense strand
uaagaaggagggaaagaaa

SEQ ID NO: 762517 - RNA, 19 nt, Homo sapiens
  misc_RNA (1)...(19): siRNA sense strand
ccaccgaguuuaccaaagu

SEQ ID NO: 762518 - RNA, 19 nt, Homo sapiens
  misc_RNA (1)...(19): siRNA sense strand
gcaagaaacagaggucaga

SEQ ID NO: 762519 - RNA, 19 nt, Homo sapiens
  misc_RNA (1)...(19): siRNA sense strand
aaacauacucuuuggagaa

SEQ ID NO: 762520 - RNA, 19 nt, Homo sapiens
  misc_RNA (1)...(19): siRNA sense strand
agugauagcuauucuuugu

SEQ ID NO: 762521 - RNA, 19 nt, Homo sapiens
  misc_RNA (1)...(19): siRNA sense strand
aaacauaucacacguacau

SEQ ID NO: 762522 - RNA, 19 nt, Homo sapiens
  misc_RNA (1)...(19): siRNA sense strand
gaacuuuggccuacguuuc

SEQ ID NO: 762523 - RNA, 19 nt, Homo sapiens
  misc_RNA (1)...(19): siRNA sense strand
gggaauaugugggaaugug

SEQ ID NO: 762524 - RNA, 19 nt, Homo sapiens
  misc_RNA (1)...(19): siRNA sense strand
gaaaaguaccccaaagaaa

SEQ ID NO: 762525 - RNA, 19 nt, Homo sapiens
  misc_RNA (1)...(19): siRNA sense strand
acauaucacacguacauua

SEQ ID NO: 762526 - RNA, 19 nt, Homo sapiens
  misc_RNA (1)...(19): siRNA sense strand
cauaucacacguacauuaa

SEQ ID NO: 762527 - RNA, 19 nt, Homo sapiens
  misc_RNA (1)...(19): siRNA sense strand
gcacggccauccgguugaa

SEQ ID NO: 762528 - RNA, 19 nt, Homo sapiens
  misc_RNA (1)...(19): siRNA sense strand
auuagaagauggagagauu

SEQ ID NO: 762529 - RNA, 19 nt, Homo sapiens
  misc_RNA (1)...(19): siRNA sense strand
gaagauggagagauuugug

SEQ ID NO: 762530 - RNA, 19 nt, Homo sapiens
  misc_RNA (1)...(19): siRNA sense strand
gacauuauccugccacauc

SEQ ID NO: 762531 - RNA, 19 nt, Homo sapiens
  misc_RNA (1)...(19): siRNA sense strand
gggcaucauucacgccuau

SEQ ID NO: 762532 - RNA, 19 nt, Homo sapiens
  misc_RNA (1)...(19): siRNA sense strand
caaagugacagccucaaau

SEQ ID NO: 762533 - RNA, 19 nt, Homo sapiens
  misc_RNA (1)...(19): siRNA sense strand
gcaaaugccaccuugacau

SEQ ID NO: 762534 - RNA, 19 nt, Homo sapiens
  misc_RNA (1)...(19): siRNA sense strand
gcgacccugugcaagguua

SEQ ID NO: 762535 - RNA, 19 nt, Homo sapiens
  misc_RNA (1)...(19): siRNA sense strand
gaggagugcauuaagaaga

SEQ ID NO: 762536 - RNA, 19 nt, Homo sapiens
  misc_RNA (1)...(19): siRNA sense strand
caaaugccaccuugacaug

SEQ ID NO: 762537 - RNA, 19 nt, Homo sapiens
  misc_RNA (1)...(19): siRNA sense strand
gcccagaggagcaaaguga

SEQ ID NO: 762538 - RNA, 19 nt, Homo sapiens
  misc_RNA (1)...(19): siRNA sense strand
cuuagagucuugugaugaa

SEQ ID NO: 762539 - RNA, 19 nt, Homo sapiens
  misc_RNA (1)...(19): siRNA sense strand
cagcaggcauggaucuuuc

SEQ ID NO: 762540 - RNA, 19 nt, Homo sapiens
  misc_RNA (1)...(19): siRNA sense strand
ggauaucaguguaugucau

SEQ ID NO: 762541 - RNA, 19 nt, Homo sapiens
  misc_RNA (1)...(19): siRNA sense strand
ggcagucaauggaacuuug

SEQ ID NO: 762542 - RNA, 19 nt, Homo sapiens
  misc_RNA (1)...(19): siRNA sense strand
cagaagacccagauacugu

SEQ ID NO: 762543 - RNA, 19 nt, Homo sapiens
  misc_RNA (1)...(19): siRNA sense strand
ugauugccauguuuaaugu

SEQ ID NO: 762544 - RNA, 19 nt, Homo sapiens
  misc_RNA (1)...(19): siRNA sense strand
caaaagauuucgaguccuu

SEQ ID NO: 762545 - RNA, 19 nt, Homo sapiens
  misc_RNA (1)...(19): siRNA sense strand
caggaaaugagaaagauga

SEQ ID NO: 762546 - RNA, 19 nt, Homo sapiens
  misc_RNA (1)...(19): siRNA sense strand
gaggauugcaguucaagga

SEQ ID NO: 762547 - RNA, 19 nt, Homo sapiens
  misc_RNA (1)...(19): siRNA sense strand
ccaaagguaucagcacaca

SEQ ID NO: 762548 - RNA, 19 nt, Homo sapiens
  misc_RNA (1)...(19): siRNA sense strand
uuacaucacccaaccagaa

SEQ ID NO: 762549 - RNA, 19 nt, Homo sapiens
  misc_RNA (1)...(19): siRNA sense strand
caagcgaguucagacaaug

SEQ ID NO: 762550 - RNA, 19 nt, Homo sapiens
  misc_RNA (1)...(19): siRNA sense strand
ggacugugcauagcccuuu

SEQ ID NO: 762551 - RNA, 19 nt, Homo sapiens
  misc_RNA (1)...(19): siRNA sense strand
caccaaaggcuucgucuuc

SEQ ID NO: 762552 - RNA, 19 nt, Homo sapiens
  misc_RNA (1)...(19): siRNA sense strand
guaccuccuuucucucuuc

SEQ ID NO: 762553 - RNA, 19 nt, Homo sapiens
  misc_RNA (1)...(19): siRNA sense strand
ggaaagaaaauuacuggaa

SEQ ID NO: 762554 - RNA, 19 nt, Homo sapiens
  misc_RNA (1)...(19): siRNA sense strand
gcgaggugcucaauauacu

SEQ ID NO: 762555 - RNA, 19 nt, Homo sapiens
  misc_RNA (1)...(19): siRNA sense strand
uaccaacacuauccaagau

SEQ ID NO: 762556 - RNA, 19 nt, Homo sapiens
  misc_RNA (1)...(19): siRNA sense strand
ccuuugggaugaagaggua

SEQ ID NO: 762557 - RNA, 19 nt, Homo sapiens
  misc_RNA (1)...(19): siRNA sense strand
uaagcuuuguggugagaaa

SEQ ID NO: 762558 - RNA, 19 nt, Homo sapiens
  misc_RNA (1)...(19): siRNA sense strand
ucagaggcauacagugaga

SEQ ID NO: 762559 - RNA, 19 nt, Homo sapiens
  misc_RNA (1)...(19): siRNA sense strand
ggaaaaguaccccaaagaa

SEQ ID NO: 762560 - RNA, 19 nt, Homo sapiens
  misc_RNA (1)...(19): siRNA sense strand
gaagccagcaggaaaagua

SEQ ID NO: 762561 - RNA, 19 nt, Homo sapiens
  misc_RNA (1)...(19): siRNA sense strand
ccagauacugucuugcuuu

SEQ ID NO: 762562 - RNA, 19 nt, Homo sapiens
  misc_RNA (1)...(19): siRNA sense strand
gauagcuauucuuuguuug

SEQ ID NO: 762563 - RNA, 19 nt, Homo sapiens
  misc_RNA (1)...(19): siRNA sense strand
cugaacaccuuuacaaugc

SEQ ID NO: 762564 - RNA, 19 nt, Homo sapiens
  misc_RNA (1)...(19): siRNA sense strand
gccaacauccugugcauca

SEQ ID NO: 762565 - RNA, 19 nt, Homo sapiens
  misc_RNA (1)...(19): siRNA sense strand
gagagagggcgcuaugcaa

SEQ ID NO: 762566 - RNA, 19 nt, Homo sapiens
  misc_RNA (1)...(19): siRNA sense strand
ggagagagggcgcuaugca

SEQ ID NO: 762567 - RNA, 19 nt, Homo sapiens
  misc_RNA (1)...(19): siRNA sense strand
gaacccacaaggaguuaau

SEQ ID NO: 762568 - RNA, 19 nt, Homo sapiens
  misc_RNA (1)...(19): siRNA sense strand
cagcuacaguucuuagagu

SEQ ID NO: 762569 - RNA, 19 nt, Homo sapiens
  misc_RNA (1)...(19): siRNA sense strand
ggacaucguggccaacauc

SEQ ID NO: 762570 - RNA, 19 nt, Homo sapiens
  misc_RNA (1)...(19): siRNA sense strand
ugaagcgaaugucucucua

SEQ ID NO: 762571 - RNA, 19 nt, Homo sapiens
  misc_RNA (1)...(19): siRNA sense strand
agaaauugcagaaccagaa

SEQ ID NO: 762572 - RNA, 19 nt, Homo sapiens
  misc_RNA (1)...(19): siRNA sense strand
uccaggagcucaagaaggu

SEQ ID NO: 762573 - RNA, 19 nt, Homo sapiens
  misc_RNA (1)...(19): siRNA sense strand
gauggagagauuugugaaa

SEQ ID NO: 762574 - RNA, 19 nt, Homo sapiens
  misc_RNA (1)...(19): siRNA sense strand
ggaagaucuugggaauaug

SEQ ID NO: 762575 - RNA, 19 nt, Homo sapiens
  misc_RNA (1)...(19): siRNA sense strand
uuccgaaggucagcaauuu

SEQ ID NO: 762576 - RNA, 19 nt, Homo sapiens
  misc_RNA (1)...(19): siRNA sense strand
gaggagagagggcgcuaug

SEQ ID NO: 762577 - RNA, 19 nt, Homo sapiens
  misc_RNA (1)...(19): siRNA sense strand
gugauugccauguuuaaug

SEQ ID NO: 762578 - RNA, 19 nt, Homo sapiens
  misc_RNA (1)...(19): siRNA sense strand
gacaaugaaugaguuucug

SEQ ID NO: 762579 - RNA, 19 nt, Homo sapiens
  misc_RNA (1)...(19): siRNA sense strand
gcaaggguggguccugaga

SEQ ID NO: 762580 - RNA, 19 nt, Homo sapiens
  misc_RNA (1)...(19): siRNA sense strand
aaaguaugaucaccaaagg

SEQ ID NO: 762581 - RNA, 19 nt, Homo sapiens
  misc_RNA (1)...(19): siRNA sense strand
aacauacucuuuggagaaa

SEQ ID NO: 762582 - RNA, 19 nt, Homo sapiens
  misc_RNA (1)...(19): siRNA sense strand
gacaagcgaguucagacaa

SEQ ID NO: 762583 - RNA, 19 nt, Homo sapiens
  misc_RNA (1)...(19): siRNA sense strand
aguaugaucaccaaaggua

SEQ ID NO: 762584 - RNA, 19 nt, Homo sapiens
  misc_RNA (1)...(19): siRNA sense strand
gagaaaacauacucuuugg

SEQ ID NO: 762585 - RNA, 19 nt, Homo sapiens
  misc_RNA (1)...(19): siRNA sense strand
ccuugcagcucuccuagga

SEQ ID NO: 762586 - RNA, 19 nt, Homo sapiens
  misc_RNA (1)...(19): siRNA sense strand
cauaagcuuuguggugaga

SEQ ID NO: 762587 - RNA, 19 nt, Homo sapiens
  misc_RNA (1)...(19): siRNA sense strand
agagagggcgcuaugcaaa

SEQ ID NO: 762588 - RNA, 19 nt, Homo sapiens
  misc_RNA (1)...(19): siRNA sense strand
gaaagaugaaggaaaagaa

SEQ ID NO: 762589 - RNA, 19 nt, Homo sapiens
  misc_RNA (1)...(19): siRNA sense strand
gaagaagguugucaaacua

SEQ ID NO: 762590 - RNA, 19 nt, Homo sapiens
  misc_RNA (1)...(19): siRNA sense strand
ggaagaagguugucaaacu

SEQ ID NO: 762591 - RNA, 19 nt, Homo sapiens
  misc_RNA (1)...(19): siRNA sense strand
guauggagcugcagaagaa

SEQ ID NO: 762592 - RNA, 19 nt, Homo sapiens
  misc_RNA (1)...(19): siRNA sense strand
ugauaaaccucaugagaaa

SEQ ID NO: 762593 - RNA, 19 nt, Homo sapiens
  misc_RNA (1)...(19): siRNA sense strand
gaacuacucagucuccaua

SEQ ID NO: 762594 - RNA, 19 nt, Homo sapiens
  misc_RNA (1)...(19): siRNA sense strand
ucacaagcauucaguauug

SEQ ID NO: 762595 - RNA, 19 nt, Homo sapiens
  misc_RNA (1)...(19): siRNA sense strand
gcaaaguuguuaacggaaa

SEQ ID NO: 762596 - RNA, 19 nt, Homo sapiens
  misc_RNA (1)...(19): siRNA sense strand
ggagagagcaucauucguu

SEQ ID NO: 762597 - RNA, 19 nt, Homo sapiens
  misc_RNA (1)...(19): siRNA sense strand
gagaacaaaucguggaaga

SEQ ID NO: 762598 - RNA, 19 nt, Homo sapiens
  misc_RNA (1)...(19): siRNA sense strand
gaacaaaucguggaagaug

SEQ ID NO: 762599 - RNA, 19 nt, Homo sapiens
  misc_RNA (1)...(19): siRNA sense strand
agaaauggcucuaaguguu

SEQ ID NO: 762600 - RNA, 19 nt, Homo sapiens
  misc_RNA (1)...(19): siRNA sense strand
gagaaugcccggucaugua

SEQ ID NO: 762601 - RNA, 19 nt, Homo sapiens
  misc_RNA (1)...(19): siRNA sense strand
ggucauguauucgagcuua

SEQ ID NO: 762602 - RNA, 19 nt, Homo sapiens
  misc_RNA (1)...(19): siRNA sense strand
caagguuacuggaaacauu

SEQ ID NO: 762603 - RNA, 19 nt, Homo sapiens
  misc_RNA (1)...(19): siRNA sense strand
cguggaaacuguagaauau

SEQ ID NO: 762604 - RNA, 19 nt, Homo sapiens
  misc_RNA (1)...(19): siRNA sense strand
uaacagaccuaggugauuc

SEQ ID NO: 762605 - RNA, 19 nt, Homo sapiens
  misc_RNA (1)...(19): siRNA sense strand
gaagaaauggcucuaagug

SEQ ID NO: 762606 - RNA, 19 nt, Homo sapiens
  misc_RNA (1)...(19): siRNA sense strand
gauaaucgaguucacauug

SEQ ID NO: 762607 - RNA, 19 nt, Homo sapiens
  misc_RNA (1)...(19): siRNA sense strand
gcaggaugauuguagaguu

SEQ ID NO: 762608 - RNA, 19 nt, Homo sapiens
  misc_RNA (1)...(19): siRNA sense strand
caaacuagcccacucaugu

SEQ ID NO: 762609 - RNA, 19 nt, Homo sapiens
  misc_RNA (1)...(19): siRNA sense strand
gaaauggcucuaaguguug

SEQ ID NO: 762610 - RNA, 19 nt, Homo sapiens
  misc_RNA (1)...(19): siRNA sense strand
uuacagaaguugcagauca

SEQ ID NO: 762611 - RNA, 19 nt, Homo sapiens
  misc_RNA (1)...(19): siRNA sense strand
uggaauggcucacacagaa

SEQ ID NO: 762612 - RNA, 19 nt, Homo sapiens
  misc_RNA (1)...(19): siRNA sense strand
gaaacucugugucgucaag

SEQ ID NO: 762613 - RNA, 19 nt, Homo sapiens
  misc_RNA (1)...(19): siRNA sense strand
gcaaagcacaggcgaguuc

SEQ ID NO: 762614 - RNA, 19 nt, Homo sapiens
  misc_RNA (1)...(19): siRNA sense strand
gcagcaggaugauuguaga

SEQ ID NO: 762615 - RNA, 19 nt, Homo sapiens
  misc_RNA (1)...(19): siRNA sense strand
ggacagcuguagugaaggu

SEQ ID NO: 762616 - RNA, 19 nt, Homo sapiens
  misc_RNA (1)...(19): siRNA sense strand
guagauagcagucauagag

SEQ ID NO: 762617 - RNA, 19 nt, Homo sapiens
  misc_RNA (1)...(19): siRNA sense strand
agucauagagacagaauua

SEQ ID NO: 762618 - RNA, 19 nt, Homo sapiens
  misc_RNA (1)...(19): siRNA sense strand
agaaaucacugaacuacuc

SEQ ID NO: 762619 - RNA, 19 nt, Homo sapiens
  misc_RNA (1)...(19): siRNA sense strand
gaagaaaucacugaacuac

SEQ ID NO: 762620 - RNA, 19 nt, Homo sapiens
  misc_RNA (1)...(19): siRNA sense strand
cuacaaagacauuagcaaa

SEQ ID NO: 762621 - RNA, 19 nt, Homo sapiens
  misc_RNA (1)...(19): siRNA sense strand
gcacacagcgaacuugcaa

SEQ ID NO: 762622 - RNA, 19 nt, Homo sapiens
  misc_RNA (1)...(19): siRNA sense strand
acaggaaauuacaagguua

SEQ ID NO: 762623 - RNA, 19 nt, Homo sapiens
  misc_RNA (1)...(19): siRNA sense strand
caacucauuugugcucuga

SEQ ID NO: 762624 - RNA, 19 nt, Homo sapiens
  misc_RNA (1)...(19): siRNA sense strand
gagaugcucugcuccugau

SEQ ID NO: 762625 - RNA, 19 nt, Homo sapiens
  misc_RNA (1)...(19): siRNA sense strand
guagaguugucuuggcaaa

SEQ ID NO: 762626 - RNA, 19 nt, Homo sapiens
  misc_RNA (1)...(19): siRNA sense strand
gauccgagcaucaauuuua

SEQ ID NO: 762627 - RNA, 19 nt, Homo sapiens
  misc_RNA (1)...(19): siRNA sense strand
gaguuccucuagcugauaa

SEQ ID NO: 762628 - RNA, 19 nt, Homo sapiens
  misc_RNA (1)...(19): siRNA sense strand
gaccauuguggaaacauua

SEQ ID NO: 762629 - RNA, 19 nt, Homo sapiens
  misc_RNA (1)...(19): siRNA sense strand
uacucaagcuguuguguuu

SEQ ID NO: 762630 - RNA, 19 nt, Homo sapiens
  misc_RNA (1)...(19): siRNA sense strand
gcacauugaaggaggagaa

SEQ ID NO: 762631 - RNA, 19 nt, Homo sapiens
  misc_RNA (1)...(19): siRNA sense strand
gcuagaguguggaguuugu

SEQ ID NO: 762632 - RNA, 19 nt, Homo sapiens
  misc_RNA (1)...(19): siRNA sense strand
guucucaaguuacucauuc

SEQ ID NO: 762633 - RNA, 19 nt, Homo sapiens
  misc_RNA (1)...(19): siRNA sense strand
caacaagaagauaugacua

SEQ ID NO: 762634 - RNA, 19 nt, Homo sapiens
  misc_RNA (1)...(19): siRNA sense strand
gcugauaaaccucaugaga

SEQ ID NO: 762635 - RNA, 19 nt, Homo sapiens
  misc_RNA (1)...(19): siRNA sense strand
ccauugaguuuguuugcuu

SEQ ID NO: 762636 - RNA, 19 nt, Homo sapiens
  misc_RNA (1)...(19): siRNA sense strand
uagaagaaaucacugaacu

SEQ ID NO: 762637 - RNA, 19 nt, Homo sapiens
  misc_RNA (1)...(19): siRNA sense strand
caggaugauuguagaguug

SEQ ID NO: 762638 - RNA, 19 nt, Homo sapiens
  misc_RNA (1)...(19): siRNA sense strand
gaaccagaagcuaaucaga

SEQ ID NO: 762639 - RNA, 19 nt, Homo sapiens
  misc_RNA (1)...(19): siRNA sense strand
cagccugccuccacuguga

SEQ ID NO: 762640 - RNA, 19 nt, Homo sapiens
  misc_RNA (1)...(19): siRNA sense strand
gaagauggaauuggaaugg

SEQ ID NO: 762641 - RNA, 19 nt, Homo sapiens
  misc_RNA (1)...(19): siRNA sense strand
cccauuugaucgacaagua

SEQ ID NO: 762642 - RNA, 19 nt, Homo sapiens
  misc_RNA (1)...(19): siRNA sense strand
uacaaaggauaaucgaguu

SEQ ID NO: 762643 - RNA, 19 nt, Homo sapiens
  misc_RNA (1)...(19): siRNA sense strand
cagcagcaguuuacagaag

SEQ ID NO: 762644 - RNA, 19 nt, Homo sapiens
  misc_RNA (1)...(19): siRNA sense strand
caaagacauuagcaaagca

SEQ ID NO: 762645 - RNA, 19 nt, Homo sapiens
  misc_RNA (1)...(19): siRNA sense strand
cagaucacauucaguugga

SEQ ID NO: 762646 - RNA, 19 nt, Homo sapiens
  misc_RNA (1)...(19): siRNA sense strand
gcagcaguuuacagaaguu

SEQ ID NO: 762647 - RNA, 19 nt, Homo sapiens
  misc_RNA (1)...(19): siRNA sense strand
agaaacagcagcagcaguu

SEQ ID NO: 762648 - RNA, 19 nt, Homo sapiens
  misc_RNA (1)...(19): siRNA sense strand
cguggaagauggaauugga

SEQ ID NO: 762649 - RNA, 19 nt, Homo sapiens
  misc_RNA (1)...(19): siRNA sense strand
ucaaguuacucauucuaca

SEQ ID NO: 762650 - RNA, 19 nt, Homo sapiens
  misc_RNA (1)...(19): siRNA sense strand
aacaggaaauuacaagguu

SEQ ID NO: 762651 - RNA, 19 nt, Homo sapiens
  misc_RNA (1)...(19): siRNA sense strand
caagaagaaauggcucuaa

SEQ ID NO: 762652 - RNA, 19 nt, Homo sapiens
  misc_RNA (1)...(19): siRNA sense strand
ugaaggaggagaacaaauc

SEQ ID NO: 762653 - RNA, 19 nt, Homo sapiens
  misc_RNA (1)...(19): siRNA sense strand
ucacagaggaaaucucaga

SEQ ID NO: 762654 - RNA, 19 nt, Homo sapiens
  misc_RNA (1)...(19): siRNA sense strand
gcacaggcgaguuccucua

SEQ ID NO: 762655 - RNA, 19 nt, Homo sapiens
  misc_RNA (1)...(19): siRNA sense strand
caccuugccucuguauauu

SEQ ID NO: 762656 - RNA, 19 nt, Homo sapiens
  misc_RNA (1)...(19): siRNA sense strand
ccucaauacucaagcuguu

SEQ ID NO: 762657 - RNA, 19 nt, Homo sapiens
  misc_RNA (1)...(19): siRNA sense strand
uaacguggaaacuguagaa

SEQ ID NO: 762658 - RNA, 19 nt, Homo sapiens
  misc_RNA (1)...(19): siRNA sense strand
cagcaucccugucacuuuu

SEQ ID NO: 762659 - RNA, 19 nt, Homo sapiens
  misc_RNA (1)...(19): siRNA sense strand
gugcuagaguguggaguuu

SEQ ID NO: 762660 - RNA, 19 nt, Homo sapiens
  misc_RNA (1)...(19): siRNA sense strand
ccacucaugugcugugucu

SEQ ID NO: 762661 - RNA, 19 nt, Homo sapiens
  misc_RNA (1)...(19): siRNA sense strand
ucaccuugccucuguauau

SEQ ID NO: 762662 - RNA, 19 nt, Homo sapiens
  misc_RNA (1)...(19): siRNA sense strand
agacagaauuagugaagca

SEQ ID NO: 762663 - RNA, 19 nt, Homo sapiens
  misc_RNA (1)...(19): siRNA sense strand
gcagcccauuccaacaauu

SEQ ID NO: 762664 - RNA, 19 nt, Homo sapiens
  misc_RNA (1)...(19): siRNA sense strand
aagaagaaauggcucuaag

SEQ ID NO: 762665 - RNA, 19 nt, Homo sapiens
  misc_RNA (1)...(19): siRNA sense strand
cagauccgagcaucaauuu

SEQ ID NO: 762666 - RNA, 19 nt, Homo sapiens
  misc_RNA (1)...(19): siRNA sense strand
guuacucauucuacaaaga

SEQ ID NO: 762667 - RNA, 19 nt, Homo sapiens
  misc_RNA (1)...(19): siRNA sense strand
uaaucgaguucacauugga

SEQ ID NO: 762668 - RNA, 19 nt, Homo sapiens
  misc_RNA (1)...(19): siRNA sense strand
gcaacaagaagauaugacu

SEQ ID NO: 762669 - RNA, 19 nt, Homo sapiens
  misc_RNA (1)...(19): siRNA sense strand
ggccauaccgucugucaug

SEQ ID NO: 762670 - RNA, 19 nt, Homo sapiens
  misc_RNA (1)...(19): siRNA sense strand
gcauacggaccuucacaga

SEQ ID NO: 762671 - RNA, 19 nt, Homo sapiens
  misc_RNA (1)...(19): siRNA sense strand
caugugcugugucugcaaa

SEQ ID NO: 762672 - RNA, 19 nt, Homo sapiens
  misc_RNA (1)...(19): siRNA sense strand
aagcucaccuugccucugu

SEQ ID NO: 762673 - RNA, 19 nt, Homo sapiens
  misc_RNA (1)...(19): siRNA sense strand
gaaaucacugaacuacuca

SEQ ID NO: 762674 - RNA, 19 nt, Homo sapiens
  misc_RNA (1)...(19): siRNA sense strand
ggaaacauuauuaccucaa

SEQ ID NO: 762675 - RNA, 19 nt, Homo sapiens
  misc_RNA (1)...(19): siRNA sense strand
gcucaggcagcaacaagaa

SEQ ID NO: 762676 - RNA, 19 nt, Homo sapiens
  misc_RNA (1)...(19): siRNA sense strand
ggucacaagcauucaguau

SEQ ID NO: 762677 - RNA, 19 nt, Homo sapiens
  misc_RNA (1)...(19): siRNA sense strand
gagagcaucauucguugug

SEQ ID NO: 762678 - RNA, 19 nt, Homo sapiens
  misc_RNA (1)...(19): siRNA sense strand
gaugcucugcuccugauuu

SEQ ID NO: 762679 - RNA, 19 nt, Homo sapiens
  misc_RNA (1)...(19): siRNA sense strand
gaaguugcagaucacauuc

SEQ ID NO: 762680 - RNA, 19 nt, Homo sapiens
  misc_RNA (1)...(19): siRNA sense strand
gcagcaacaagaagauaug

SEQ ID NO: 762681 - RNA, 19 nt, Homo sapiens
  misc_RNA (1)...(19): siRNA sense strand
guaacagaccuaggugauu

SEQ ID NO: 762682 - RNA, 19 nt, Homo sapiens
  misc_RNA (1)...(19): siRNA sense strand
caaguuacucauucuacaa

SEQ ID NO: 762683 - RNA, 19 nt, Homo sapiens
  misc_RNA (1)...(19): siRNA sense strand
acaaagacauuagcaaagc

SEQ ID NO: 762684 - RNA, 19 nt, Homo sapiens
  misc_RNA (1)...(19): siRNA sense strand
gaauggcucacacagaaca

SEQ ID NO: 762685 - RNA, 19 nt, Homo sapiens
  misc_RNA (1)...(19): siRNA sense strand
ugaguuuguuugcuuggaa

SEQ ID NO: 762686 - RNA, 19 nt, Homo sapiens
  misc_RNA (1)...(19): siRNA sense strand
cugauaaaccucaugagaa

SEQ ID NO: 762687 - RNA, 19 nt, Homo sapiens
  misc_RNA (1)...(19): siRNA sense strand
aaauucgggucguuacguu

SEQ ID NO: 762688 - RNA, 19 nt, Homo sapiens
  misc_RNA (1)...(19): siRNA sense strand
cauagagacagaauuagug

SEQ ID NO: 762689 - RNA, 19 nt, Homo sapiens
  misc_RNA (1)...(19): siRNA sense strand
gaagaagguugucaaacua

SEQ ID NO: 762690 - RNA, 19 nt, Homo sapiens
  misc_RNA (1)...(19): siRNA sense strand
ggaaagagguagucacaga

SEQ ID NO: 762691 - RNA, 19 nt, Homo sapiens
  misc_RNA (1)...(19): siRNA sense strand
ggaagaagguugucaaacu

SEQ ID NO: 762692 - RNA, 19 nt, Homo sapiens
  misc_RNA (1)...(19): siRNA sense strand
guauggagcugcagaagaa

SEQ ID NO: 762693 - RNA, 19 nt, Homo sapiens
  misc_RNA (1)...(19): siRNA sense strand
ugauaaaccucaugagaaa

SEQ ID NO: 762694 - RNA, 19 nt, Homo sapiens
  misc_RNA (1)...(19): siRNA sense strand
gaacuacucagucuccaua

SEQ ID NO: 762695 - RNA, 19 nt, Homo sapiens
  misc_RNA (1)...(19): siRNA sense strand
ucacaagcauucaguauug

SEQ ID NO: 762696 - RNA, 19 nt, Homo sapiens
  misc_RNA (1)...(19): siRNA sense strand
gcaaaguuguuaacggaaa

SEQ ID NO: 762697 - RNA, 19 nt, Homo sapiens
  misc_RNA (1)...(19): siRNA sense strand
ggagagagcaucauucguu

SEQ ID NO: 762698 - RNA, 19 nt, Homo sapiens
  misc_RNA (1)...(19): siRNA sense strand
gagaacaaaucguggaaga

SEQ ID NO: 762699 - RNA, 19 nt, Homo sapiens
  misc_RNA (1)...(19): siRNA sense strand
gaacaaaucguggaagaug

SEQ ID NO: 762700 - RNA, 19 nt, Homo sapiens
  misc_RNA (1)...(19): siRNA sense strand
agaaauggcucuaaguguu

SEQ ID NO: 762701 - RNA, 19 nt, Homo sapiens
  misc_RNA (1)...(19): siRNA sense strand
gagaaugcccggucaugua

SEQ ID NO: 762702 - RNA, 19 nt, Homo sapiens
  misc_RNA (1)...(19): siRNA sense strand
ggucauguauucgagcuua

SEQ ID NO: 762703 - RNA, 19 nt, Homo sapiens
  misc_RNA (1)...(19): siRNA sense strand
caagguuacuggaaacauu

SEQ ID NO: 762704 - RNA, 19 nt, Homo sapiens
  misc_RNA (1)...(19): siRNA sense strand
cguggaaacuguagaauau

SEQ ID NO: 762705 - RNA, 19 nt, Homo sapiens
  misc_RNA (1)...(19): siRNA sense strand
uaacagaccuaggugauuc

SEQ ID NO: 762706 - RNA, 19 nt, Homo sapiens
  misc_RNA (1)...(19): siRNA sense strand
gaagaaauggcucuaagug

SEQ ID NO: 762707 - RNA, 19 nt, Homo sapiens
  misc_RNA (1)...(19): siRNA sense strand
gauaaucgaguucacauug

SEQ ID NO: 762708 - RNA, 19 nt, Homo sapiens
  misc_RNA (1)...(19): siRNA sense strand
gcaggaugauuguagaguu

SEQ ID NO: 762709 - RNA, 19 nt, Homo sapiens
  misc_RNA (1)...(19): siRNA sense strand
caaacuagcccacucaugu

SEQ ID NO: 762710 - RNA, 19 nt, Homo sapiens
  misc_RNA (1)...(19): siRNA sense strand
gaaauggcucuaaguguug

SEQ ID NO: 762711 - RNA, 19 nt, Homo sapiens
  misc_RNA (1)...(19): siRNA sense strand
uuacagaaguugcagauca

SEQ ID NO: 762712 - RNA, 19 nt, Homo sapiens
  misc_RNA (1)...(19): siRNA sense strand
uggaauggcucacacagaa

SEQ ID NO: 762713 - RNA, 19 nt, Homo sapiens
  misc_RNA (1)...(19): siRNA sense strand
gaaacucugugucgucaag

SEQ ID NO: 762714 - RNA, 19 nt, Homo sapiens
  misc_RNA (1)...(19): siRNA sense strand
gcaaagcacaggcgaguuc

SEQ ID NO: 762715 - RNA, 19 nt, Homo sapiens
  misc_RNA (1)...(19): siRNA sense strand
gcagcaggaugauuguaga

SEQ ID NO: 762716 - RNA, 19 nt, Homo sapiens
  misc_RNA (1)...(19): siRNA sense strand
ggacagcuguagugaaggu

SEQ ID NO: 762717 - RNA, 19 nt, Homo sapiens
  misc_RNA (1)...(19): siRNA sense strand
guagauagcagucauagag

SEQ ID NO: 762718 - RNA, 19 nt, Homo sapiens
  misc_RNA (1)...(19): siRNA sense strand
agucauagagacagaauua

SEQ ID NO: 762719 - RNA, 19 nt, Homo sapiens
  misc_RNA (1)...(19): siRNA sense strand
agaaaucacugaacuacuc

SEQ ID NO: 762720 - RNA, 19 nt, Homo sapiens
  misc_RNA (1)...(19): siRNA sense strand
gaagaaaucacugaacuac

SEQ ID NO: 762721 - RNA, 19 nt, Homo sapiens
  misc_RNA (1)...(19): siRNA sense strand
cuacaaagacauuagcaaa

SEQ ID NO: 762722 - RNA, 19 nt, Homo sapiens
  misc_RNA (1)...(19): siRNA sense strand
gcacacagcgaacuugcaa

SEQ ID NO: 762723 - RNA, 19 nt, Homo sapiens
  misc_RNA (1)...(19): siRNA sense strand
acaggaaauuacaagguua

SEQ ID NO: 762724 - RNA, 19 nt, Homo sapiens
  misc_RNA (1)...(19): siRNA sense strand
caacucauuugugcucuga

SEQ ID NO: 762725 - RNA, 19 nt, Homo sapiens
  misc_RNA (1)...(19): siRNA sense strand
gagaugcucugcuccugau

SEQ ID NO: 762726 - RNA, 19 nt, Homo sapiens
  misc_RNA (1)...(19): siRNA sense strand
guagaguugucuuggcaaa

SEQ ID NO: 762727 - RNA, 19 nt, Homo sapiens
  misc_RNA (1)...(19): siRNA sense strand
gauccgagcaucaauuuua

SEQ ID NO: 762728 - RNA, 19 nt, Homo sapiens
  misc_RNA (1)...(19): siRNA sense strand
gaguuccucuagcugauaa

SEQ ID NO: 762729 - RNA, 19 nt, Homo sapiens
  misc_RNA (1)...(19): siRNA sense strand
gaccauuguggaaacauua

SEQ ID NO: 762730 - RNA, 19 nt, Homo sapiens
  misc_RNA (1)...(19): siRNA sense strand
uacucaagcuguuguguuu

SEQ ID NO: 762731 - RNA, 19 nt, Homo sapiens
  misc_RNA (1)...(19): siRNA sense strand
gcacauugaaggaggagaa

SEQ ID NO: 762732 - RNA, 19 nt, Homo sapiens
  misc_RNA (1)...(19): siRNA sense strand
gcuagaguguggaguuugu

SEQ ID NO: 762733 - RNA, 19 nt, Homo sapiens
  misc_RNA (1)...(19): siRNA sense strand
guucucaaguuacucauuc

SEQ ID NO: 762734 - RNA, 19 nt, Homo sapiens
  misc_RNA (1)...(19): siRNA sense strand
caacaagaagauaugacua

SEQ ID NO: 762735 - RNA, 19 nt, Homo sapiens
  misc_RNA (1)...(19): siRNA sense strand
gcugauaaaccucaugaga

SEQ ID NO: 762736 - RNA, 19 nt, Homo sapiens
  misc_RNA (1)...(19): siRNA sense strand
ccauugaguuuguuugcuu

SEQ ID NO: 762737 - RNA, 19 nt, Homo sapiens
  misc_RNA (1)...(19): siRNA sense strand
uagaagaaaucacugaacu

SEQ ID NO: 762738 - RNA, 19 nt, Homo sapiens
  misc_RNA (1)...(19): siRNA sense strand
caggaugauuguagaguug

SEQ ID NO: 762739 - RNA, 19 nt, Homo sapiens
  misc_RNA (1)...(19): siRNA sense strand
gaaccagaagcuaaucaga

SEQ ID NO: 762740 - RNA, 19 nt, Homo sapiens
  misc_RNA (1)...(19): siRNA sense strand
ugaccaauauacugggaaa

SEQ ID NO: 762741 - RNA, 19 nt, Homo sapiens
  misc_RNA (1)...(19): siRNA sense strand
cagccugccuccacuguga

SEQ ID NO: 762742 - RNA, 19 nt, Homo sapiens
  misc_RNA (1)...(19): siRNA sense strand
gaagauggaauuggaaugg

SEQ ID NO: 762743 - RNA, 19 nt, Homo sapiens
  misc_RNA (1)...(19): siRNA sense strand
cccauuugaucgacaagua

SEQ ID NO: 762744 - RNA, 19 nt, Homo sapiens
  misc_RNA (1)...(19): siRNA sense strand
uacaaaggauaaucgaguu

SEQ ID NO: 762745 - RNA, 19 nt, Homo sapiens
  misc_RNA (1)...(19): siRNA sense strand
cagcagcaguuuacagaag

SEQ ID NO: 762746 - RNA, 19 nt, Homo sapiens
  misc_RNA (1)...(19): siRNA sense strand
caaagacauuagcaaagca

SEQ ID NO: 762747 - RNA, 19 nt, Homo sapiens
  misc_RNA (1)...(19): siRNA sense strand
cagaucacauucaguugga

SEQ ID NO: 762748 - RNA, 19 nt, Homo sapiens
  misc_RNA (1)...(19): siRNA sense strand
gcagcaguuuacagaaguu

SEQ ID NO: 762749 - RNA, 19 nt, Homo sapiens
  misc_RNA (1)...(19): siRNA sense strand
agaaacagcagcagcaguu

SEQ ID NO: 762750 - RNA, 19 nt, Homo sapiens
  misc_RNA (1)...(19): siRNA sense strand
cguggaagauggaauugga

SEQ ID NO: 762751 - RNA, 19 nt, Homo sapiens
  misc_RNA (1)...(19): siRNA sense strand
ucaaguuacucauucuaca

SEQ ID NO: 762752 - RNA, 19 nt, Homo sapiens
  misc_RNA (1)...(19): siRNA sense strand
aacaggaaauuacaagguu

SEQ ID NO: 762753 - RNA, 19 nt, Homo sapiens
  misc_RNA (1)...(19): siRNA sense strand
caagaagaaauggcucuaa

SEQ ID NO: 762754 - RNA, 19 nt, Homo sapiens
  misc_RNA (1)...(19): siRNA sense strand
ugaaggaggagaacaaauc

SEQ ID NO: 762755 - RNA, 19 nt, Homo sapiens
  misc_RNA (1)...(19): siRNA sense strand
ucacagaggaaaucucaga

SEQ ID NO: 762756 - RNA, 19 nt, Homo sapiens
  misc_RNA (1)...(19): siRNA sense strand
gcacaggcgaguuccucua

SEQ ID NO: 762757 - RNA, 19 nt, Homo sapiens
  misc_RNA (1)...(19): siRNA sense strand
caccuugccucuguauauu

SEQ ID NO: 762758 - RNA, 19 nt, Homo sapiens
  misc_RNA (1)...(19): siRNA sense strand
cagauaauaugugaccaau

SEQ ID NO: 762759 - RNA, 19 nt, Homo sapiens
  misc_RNA (1)...(19): siRNA sense strand
ccucaauacucaagcuguu

SEQ ID NO: 762760 - RNA, 19 nt, Homo sapiens
  misc_RNA (1)...(19): siRNA sense strand
uaacguggaaacuguagaa

SEQ ID NO: 762761 - RNA, 19 nt, Homo sapiens
  misc_RNA (1)...(19): siRNA sense strand
cagcaucccugucacuuuu

SEQ ID NO: 762762 - RNA, 19 nt, Homo sapiens
  misc_RNA (1)...(19): siRNA sense strand
gugcuagaguguggaguuu

SEQ ID NO: 762763 - RNA, 19 nt, Homo sapiens
  misc_RNA (1)...(19): siRNA sense strand
ccacucaugugcugugucu

SEQ ID NO: 762764 - RNA, 19 nt, Homo sapiens
  misc_RNA (1)...(19): siRNA sense strand
ucaccuugccucuguauau

SEQ ID NO: 762765 - RNA, 19 nt, Homo sapiens
  misc_RNA (1)...(19): siRNA sense strand
agacagaauuagugaagca

SEQ ID NO: 762766 - RNA, 19 nt, Homo sapiens
  misc_RNA (1)...(19): siRNA sense strand
gcagcccauuccaacaauu

SEQ ID NO: 762767 - RNA, 19 nt, Homo sapiens
  misc_RNA (1)...(19): siRNA sense strand
aagaagaaauggcucuaag

SEQ ID NO: 762768 - RNA, 19 nt, Homo sapiens
  misc_RNA (1)...(19): siRNA sense strand
cagauccgagcaucaauuu

SEQ ID NO: 762769 - RNA, 19 nt, Homo sapiens
  misc_RNA (1)...(19): siRNA sense strand
guuacucauucuacaaaga

SEQ ID NO: 762770 - RNA, 19 nt, Homo sapiens
  misc_RNA (1)...(19): siRNA sense strand
uaaucgaguucacauugga

SEQ ID NO: 762771 - RNA, 19 nt, Homo sapiens
  misc_RNA (1)...(19): siRNA sense strand
ggccauaccgucugucaug

SEQ ID NO: 762772 - RNA, 19 nt, Homo sapiens
  misc_RNA (1)...(19): siRNA sense strand
gcaacaagaagauaugacu

SEQ ID NO: 762773 - RNA, 19 nt, Homo sapiens
  misc_RNA (1)...(19): siRNA sense strand
gcauacggaccuucacaga

SEQ ID NO: 762774 - RNA, 19 nt, Homo sapiens
  misc_RNA (1)...(19): siRNA sense strand
caugugcugugucugcaaa

SEQ ID NO: 762775 - RNA, 19 nt, Homo sapiens
  misc_RNA (1)...(19): siRNA sense strand
aagcucaccuugccucugu

SEQ ID NO: 762776 - RNA, 19 nt, Homo sapiens
  misc_RNA (1)...(19): siRNA sense strand
gaaaucacugaacuacuca

SEQ ID NO: 762777 - RNA, 19 nt, Homo sapiens
  misc_RNA (1)...(19): siRNA sense strand
ggaaacauuauuaccucaa

SEQ ID NO: 762778 - RNA, 19 nt, Homo sapiens
  misc_RNA (1)...(19): siRNA sense strand
gcucaggcagcaacaagaa

SEQ ID NO: 762779 - RNA, 19 nt, Homo sapiens
  misc_RNA (1)...(19): siRNA sense strand
ggucacaagcauucaguau

SEQ ID NO: 762780 - RNA, 19 nt, Homo sapiens
  misc_RNA (1)...(19): siRNA sense strand
gagagcaucauucguugug

SEQ ID NO: 762781 - RNA, 19 nt, Homo sapiens
  misc_RNA (1)...(19): siRNA sense strand
gaugcucugcuccugauuu

SEQ ID NO: 762782 - RNA, 19 nt, Homo sapiens
  misc_RNA (1)...(19): siRNA sense strand
gaaguugcagaucacauuc

SEQ ID NO: 762783 - RNA, 19 nt, Homo sapiens
  misc_RNA (1)...(19): siRNA sense strand
gcagcaacaagaagauaug

SEQ ID NO: 762784 - RNA, 19 nt, Homo sapiens
  misc_RNA (1)...(19): siRNA sense strand
caaguuacucauucuacaa

SEQ ID NO: 762785 - RNA, 19 nt, Homo sapiens
  misc_RNA (1)...(19): siRNA sense strand
guaacagaccuaggugauu

SEQ ID NO: 762786 - RNA, 19 nt, Homo sapiens
  misc_RNA (1)...(19): siRNA sense strand
cugauaaaccucaugagaa

SEQ ID NO: 762787 - RNA, 19 nt, Homo sapiens
  misc_RNA (1)...(19): siRNA sense strand
gaauggcucacacagaaca

SEQ ID NO: 762788 - RNA, 19 nt, Homo sapiens
  misc_RNA (1)...(19): siRNA sense strand
ugaguuuguuugcuuggaa

SEQ ID NO: 762789 - RNA, 19 nt, Homo sapiens
  misc_RNA (1)...(19): siRNA sense strand
gaagaagguugucaaacua

SEQ ID NO: 762790 - RNA, 19 nt, Homo sapiens
  misc_RNA (1)...(19): siRNA sense strand
ggaagaagguugucaaacu

SEQ ID NO: 762791 - RNA, 19 nt, Homo sapiens
  misc_RNA (1)...(19): siRNA sense strand
guauggagcugcagaagaa

SEQ ID NO: 762792 - RNA, 19 nt, Homo sapiens
  misc_RNA (1)...(19): siRNA sense strand
ugauaaaccucaugagaaa

SEQ ID NO: 762793 - RNA, 19 nt, Homo sapiens
  misc_RNA (1)...(19): siRNA sense strand
gaacuacucagucuccaua

SEQ ID NO: 762794 - RNA, 19 nt, Homo sapiens
  misc_RNA (1)...(19): siRNA sense strand
ucacaagcauucaguauug

SEQ ID NO: 762795 - RNA, 19 nt, Homo sapiens
  misc_RNA (1)...(19): siRNA sense strand
gcaaaguuguuaacggaaa

SEQ ID NO: 762796 - RNA, 19 nt, Homo sapiens
  misc_RNA (1)...(19): siRNA sense strand
ggagagagcaucauucguu

SEQ ID NO: 762797 - RNA, 19 nt, Homo sapiens
  misc_RNA (1)...(19): siRNA sense strand
gagaacaaaucguggaaga

SEQ ID NO: 762798 - RNA, 19 nt, Homo sapiens
  misc_RNA (1)...(19): siRNA sense strand
gaacaaaucguggaagaug

SEQ ID NO: 762799 - RNA, 19 nt, Homo sapiens
  misc_RNA (1)...(19): siRNA sense strand
agaaauggcucuaaguguu

SEQ ID NO: 762800 - RNA, 19 nt, Homo sapiens
  misc_RNA (1)...(19): siRNA sense strand
gagaaugcccggucaugua

SEQ ID NO: 762801 - RNA, 19 nt, Homo sapiens
  misc_RNA (1)...(19): siRNA sense strand
ggucauguauucgagcuua

SEQ ID NO: 762802 - RNA, 19 nt, Homo sapiens
  misc_RNA (1)...(19): siRNA sense strand
caagguuacuggaaacauu

SEQ ID NO: 762803 - RNA, 19 nt, Homo sapiens
  misc_RNA (1)...(19): siRNA sense strand
cguggaaacuguagaauau

SEQ ID NO: 762804 - RNA, 19 nt, Homo sapiens
  misc_RNA (1)...(19): siRNA sense strand
uaacagaccuaggugauuc

SEQ ID NO: 762805 - RNA, 19 nt, Homo sapiens
  misc_RNA (1)...(19): siRNA sense strand
gaagaaauggcucuaagug

SEQ ID NO: 762806 - RNA, 19 nt, Homo sapiens
  misc_RNA (1)...(19): siRNA sense strand
gauaaucgaguucacauug

SEQ ID NO: 762807 - RNA, 19 nt, Homo sapiens
  misc_RNA (1)...(19): siRNA sense strand
gcaggaugauuguagaguu

SEQ ID NO: 762808 - RNA, 19 nt, Homo sapiens
  misc_RNA (1)...(19): siRNA sense strand
caaacuagcccacucaugu

SEQ ID NO: 762809 - RNA, 19 nt, Homo sapiens
  misc_RNA (1)...(19): siRNA sense strand
gaaauggcucuaaguguug

SEQ ID NO: 762810 - RNA, 19 nt, Homo sapiens
  misc_RNA (1)...(19): siRNA sense strand
uuacagaaguugcagauca

SEQ ID NO: 762811 - RNA, 19 nt, Homo sapiens
  misc_RNA (1)...(19): siRNA sense strand
uggaauggcucacacagaa

SEQ ID NO: 762812 - RNA, 19 nt, Homo sapiens
  misc_RNA (1)...(19): siRNA sense strand
gaaacucugugucgucaag

SEQ ID NO: 762813 - RNA, 19 nt, Homo sapiens
  misc_RNA (1)...(19): siRNA sense strand
gcaaagcacaggcgaguuc

SEQ ID NO: 762814 - RNA, 19 nt, Homo sapiens
  misc_RNA (1)...(19): siRNA sense strand
gcagcaggaugauuguaga

SEQ ID NO: 762815 - RNA, 19 nt, Homo sapiens
  misc_RNA (1)...(19): siRNA sense strand
ggacagcuguagugaaggu

SEQ ID NO: 762816 - RNA, 19 nt, Homo sapiens
  misc_RNA (1)...(19): siRNA sense strand
guagauagcagucauagag

SEQ ID NO: 762817 - RNA, 19 nt, Homo sapiens
  misc_RNA (1)...(19): siRNA sense strand
agucauagagacagaauua

SEQ ID NO: 762818 - RNA, 19 nt, Homo sapiens
  misc_RNA (1)...(19): siRNA sense strand
agaaaucacugaacuacuc

SEQ ID NO: 762819 - RNA, 19 nt, Homo sapiens
  misc_RNA (1)...(19): siRNA sense strand
gaagaaaucacugaacuac

SEQ ID NO: 762820 - RNA, 19 nt, Homo sapiens
  misc_RNA (1)...(19): siRNA sense strand
cuacaaagacauuagcaaa

SEQ ID NO: 762821 - RNA, 19 nt, Homo sapiens
  misc_RNA (1)...(19): siRNA sense strand
gcacacagcgaacuugcaa

SEQ ID NO: 762822 - RNA, 19 nt, Homo sapiens
  misc_RNA (1)...(19): siRNA sense strand
acaggaaauuacaagguua

SEQ ID NO: 762823 - RNA, 19 nt, Homo sapiens
  misc_RNA (1)...(19): siRNA sense strand
caacucauuugugcucuga

SEQ ID NO: 762824 - RNA, 19 nt, Homo sapiens
  misc_RNA (1)...(19): siRNA sense strand
gagaugcucugcuccugau

SEQ ID NO: 762825 - RNA, 19 nt, Homo sapiens
  misc_RNA (1)...(19): siRNA sense strand
guagaguugucuuggcaaa

SEQ ID NO: 762826 - RNA, 19 nt, Homo sapiens
  misc_RNA (1)...(19): siRNA sense strand
gauccgagcaucaauuuua

SEQ ID NO: 762827 - RNA, 19 nt, Homo sapiens
  misc_RNA (1)...(19): siRNA sense strand
gaguuccucuagcugauaa

SEQ ID NO: 762828 - RNA, 19 nt, Homo sapiens
  misc_RNA (1)...(19): siRNA sense strand
gaccauuguggaaacauua

SEQ ID NO: 762829 - RNA, 19 nt, Homo sapiens
  misc_RNA (1)...(19): siRNA sense strand
uacucaagcuguuguguuu

SEQ ID NO: 762830 - RNA, 19 nt, Homo sapiens
  misc_RNA (1)...(19): siRNA sense strand
gcacauugaaggaggagaa

SEQ ID NO: 762831 - RNA, 19 nt, Homo sapiens
  misc_RNA (1)...(19): siRNA sense strand
gcuagaguguggaguuugu

SEQ ID NO: 762832 - RNA, 19 nt, Homo sapiens
  misc_RNA (1)...(19): siRNA sense strand
guucucaaguuacucauuc

SEQ ID NO: 762833 - RNA, 19 nt, Homo sapiens
  misc_RNA (1)...(19): siRNA sense strand
caacaagaagauaugacua

SEQ ID NO: 762834 - RNA, 19 nt, Homo sapiens
  misc_RNA (1)...(19): siRNA sense strand
gcugauaaaccucaugaga

SEQ ID NO: 762835 - RNA, 19 nt, Homo sapiens
  misc_RNA (1)...(19): siRNA sense strand
ccauugaguuuguuugcuu

SEQ ID NO: 762836 - RNA, 19 nt, Homo sapiens
  misc_RNA (1)...(19): siRNA sense strand
uagaagaaaucacugaacu

SEQ ID NO: 762837 - RNA, 19 nt, Homo sapiens
  misc_RNA (1)...(19): siRNA sense strand
caggaugauuguagaguug

SEQ ID NO: 762838 - RNA, 19 nt, Homo sapiens
  misc_RNA (1)...(19): siRNA sense strand
gaaccagaagcuaaucaga

SEQ ID NO: 762839 - RNA, 19 nt, Homo sapiens
  misc_RNA (1)...(19): siRNA sense strand
cagccugccuccacuguga

SEQ ID NO: 762840 - RNA, 19 nt, Homo sapiens
  misc_RNA (1)...(19): siRNA sense strand
gaagauggaauuggaaugg

SEQ ID NO: 762841 - RNA, 19 nt, Homo sapiens
  misc_RNA (1)...(19): siRNA sense strand
cccauuugaucgacaagua

SEQ ID NO: 762842 - RNA, 19 nt, Homo sapiens
  misc_RNA (1)...(19): siRNA sense strand
uacaaaggauaaucgaguu

SEQ ID NO: 762843 - RNA, 19 nt, Homo sapiens
  misc_RNA (1)...(19): siRNA sense strand
cagcagcaguuuacagaag

SEQ ID NO: 762844 - RNA, 19 nt, Homo sapiens
  misc_RNA (1)...(19): siRNA sense strand
caaagacauuagcaaagca

SEQ ID NO: 762845 - RNA, 19 nt, Homo sapiens
  misc_RNA (1)...(19): siRNA sense strand
cagaucacauucaguugga

SEQ ID NO: 762846 - RNA, 19 nt, Homo sapiens
  misc_RNA (1)...(19): siRNA sense strand
gcagcaguuuacagaaguu

SEQ ID NO: 762847 - RNA, 19 nt, Homo sapiens
  misc_RNA (1)...(19): siRNA sense strand
agaaacagcagcagcaguu

SEQ ID NO: 762848 - RNA, 19 nt, Homo sapiens
  misc_RNA (1)...(19): siRNA sense strand
cguggaagauggaauugga

SEQ ID NO: 762849 - RNA, 19 nt, Homo sapiens
  misc_RNA (1)...(19): siRNA sense strand
ucaaguuacucauucuaca

SEQ ID NO: 762850 - RNA, 19 nt, Homo sapiens
  misc_RNA (1)...(19): siRNA sense strand
aacaggaaauuacaagguu

SEQ ID NO: 762851 - RNA, 19 nt, Homo sapiens
  misc_RNA (1)...(19): siRNA sense strand
caagaagaaauggcucuaa

SEQ ID NO: 762852 - RNA, 19 nt, Homo sapiens
  misc_RNA (1)...(19): siRNA sense strand
ugaaggaggagaacaaauc

SEQ ID NO: 762853 - RNA, 19 nt, Homo sapiens
  misc_RNA (1)...(19): siRNA sense strand
ucacagaggaaaucucaga

SEQ ID NO: 762854 - RNA, 19 nt, Homo sapiens
  misc_RNA (1)...(19): siRNA sense strand
gcacaggcgaguuccucua

SEQ ID NO: 762855 - RNA, 19 nt, Homo sapiens
  misc_RNA (1)...(19): siRNA sense strand
caccuugccucuguauauu

SEQ ID NO: 762856 - RNA, 19 nt, Homo sapiens
  misc_RNA (1)...(19): siRNA sense strand
ccucaauacucaagcuguu

SEQ ID NO: 762857 - RNA, 19 nt, Homo sapiens
  misc_RNA (1)...(19): siRNA sense strand
uaacguggaaacuguagaa

SEQ ID NO: 762858 - RNA, 19 nt, Homo sapiens
  misc_RNA (1)...(19): siRNA sense strand
cagcaucccugucacuuuu

SEQ ID NO: 762859 - RNA, 19 nt, Homo sapiens
  misc_RNA (1)...(19): siRNA sense strand
gugcuagaguguggaguuu

SEQ ID NO: 762860 - RNA, 19 nt, Homo sapiens
  misc_RNA (1)...(19): siRNA sense strand
ccacucaugugcugugucu

SEQ ID NO: 762861 - RNA, 19 nt, Homo sapiens
  misc_RNA (1)...(19): siRNA sense strand
ucaccuugccucuguauau

SEQ ID NO: 762862 - RNA, 19 nt, Homo sapiens
  misc_RNA (1)...(19): siRNA sense strand
agacagaauuagugaagca

SEQ ID NO: 762863 - RNA, 19 nt, Homo sapiens
  misc_RNA (1)...(19): siRNA sense strand
gcagcccauuccaacaauu

SEQ ID NO: 762864 - RNA, 19 nt, Homo sapiens
  misc_RNA (1)...(19): siRNA sense strand
aagaagaaauggcucuaag

SEQ ID NO: 762865 - RNA, 19 nt, Homo sapiens
  misc_RNA (1)...(19): siRNA sense strand
cagauccgagcaucaauuu

SEQ ID NO: 762866 - RNA, 19 nt, Homo sapiens
  misc_RNA (1)...(19): siRNA sense strand
guuacucauucuacaaaga

SEQ ID NO: 762867 - RNA, 19 nt, Homo sapiens
  misc_RNA (1)...(19): siRNA sense strand
uaaucgaguucacauugga

SEQ ID NO: 762868 - RNA, 19 nt, Homo sapiens
  misc_RNA (1)...(19): siRNA sense strand
gcaacaagaagauaugacu

SEQ ID NO: 762869 - RNA, 19 nt, Homo sapiens
  misc_RNA (1)...(19): siRNA sense strand
ggccauaccgucugucaug

SEQ ID NO: 762870 - RNA, 19 nt, Homo sapiens
  misc_RNA (1)...(19): siRNA sense strand
gcauacggaccuucacaga

SEQ ID NO: 762871 - RNA, 19 nt, Homo sapiens
  misc_RNA (1)...(19): siRNA sense strand
caugugcugugucugcaaa

SEQ ID NO: 762872 - RNA, 19 nt, Homo sapiens
  misc_RNA (1)...(19): siRNA sense strand
aagcucaccuugccucugu

SEQ ID NO: 762873 - RNA, 19 nt, Homo sapiens
  misc_RNA (1)...(19): siRNA sense strand
gaaaucacugaacuacuca

SEQ ID NO: 762874 - RNA, 19 nt, Homo sapiens
  misc_RNA (1)...(19): siRNA sense strand
ggaaacauuauuaccucaa

SEQ ID NO: 762875 - RNA, 19 nt, Homo sapiens
  misc_RNA (1)...(19): siRNA sense strand
gcucaggcagcaacaagaa

SEQ ID NO: 762876 - RNA, 19 nt, Homo sapiens
  misc_RNA (1)...(19): siRNA sense strand
ggucacaagcauucaguau

SEQ ID NO: 762877 - RNA, 19 nt, Homo sapiens
  misc_RNA (1)...(19): siRNA sense strand
gagagcaucauucguugug

SEQ ID NO: 762878 - RNA, 19 nt, Homo sapiens
  misc_RNA (1)...(19): siRNA sense strand
gaugcucugcuccugauuu

SEQ ID NO: 762879 - RNA, 19 nt, Homo sapiens
  misc_RNA (1)...(19): siRNA sense strand
gaaguugcagaucacauuc

SEQ ID NO: 762880 - RNA, 19 nt, Homo sapiens
  misc_RNA (1)...(19): siRNA sense strand
gcagcaacaagaagauaug

SEQ ID NO: 762881 - RNA, 19 nt, Homo sapiens
  misc_RNA (1)...(19): siRNA sense strand
guaacagaccuaggugauu

SEQ ID NO: 762882 - RNA, 19 nt, Homo sapiens
  misc_RNA (1)...(19): siRNA sense strand
caaguuacucauucuacaa

SEQ ID NO: 762883 - RNA, 19 nt, Homo sapiens
  misc_RNA (1)...(19): siRNA sense strand
acaaagacauuagcaaagc

SEQ ID NO: 762884 - RNA, 19 nt, Homo sapiens
  misc_RNA (1)...(19): siRNA sense strand
gaauggcucacacagaaca

SEQ ID NO: 762885 - RNA, 19 nt, Homo sapiens
  misc_RNA (1)...(19): siRNA sense strand
ugaguuuguuugcuuggaa

SEQ ID NO: 762886 - RNA, 19 nt, Homo sapiens
  misc_RNA (1)...(19): siRNA sense strand
cugauaaaccucaugagaa

SEQ ID NO: 762887 - RNA, 19 nt, Homo sapiens
  misc_RNA (1)...(19): siRNA sense strand
aaauucgggucguuacguu

SEQ ID NO: 762888 - RNA, 19 nt, Homo sapiens
  misc_RNA (1)...(19): siRNA sense strand
cauagagacagaauuagug

SEQ ID NO: 762889 - RNA, 19 nt, Homo sapiens
  misc_RNA (1)...(19): siRNA sense strand
gaagaagguugucaaacua

SEQ ID NO: 762890 - RNA, 19 nt, Homo sapiens
  misc_RNA (1)...(19): siRNA sense strand
ggaagaagguugucaaacu

SEQ ID NO: 762891 - RNA, 19 nt, Homo sapiens
  misc_RNA (1)...(19): siRNA sense strand
guauggagcugcagaagaa

SEQ ID NO: 762892 - RNA, 19 nt, Homo sapiens
  misc_RNA (1)...(19): siRNA sense strand
ugauaaaccucaugagaaa

SEQ ID NO: 762893 - RNA, 19 nt, Homo sapiens
  misc_RNA (1)...(19): siRNA sense strand
gaacuacucagucuccaua

SEQ ID NO: 762894 - RNA, 19 nt, Homo sapiens
  misc_RNA (1)...(19): siRNA sense strand
ucacaagcauucaguauug

SEQ ID NO: 762895 - RNA, 19 nt, Homo sapiens
  misc_RNA (1)...(19): siRNA sense strand
gcaaaguuguuaacggaaa

SEQ ID NO: 762896 - RNA, 19 nt, Homo sapiens
  misc_RNA (1)...(19): siRNA sense strand
ggagagagcaucauucguu

SEQ ID NO: 762897 - RNA, 19 nt, Homo sapiens
  misc_RNA (1)...(19): siRNA sense strand
gagaacaaaucguggaaga

SEQ ID NO: 762898 - RNA, 19 nt, Homo sapiens
  misc_RNA (1)...(19): siRNA sense strand
gaacaaaucguggaagaug

SEQ ID NO: 762899 - RNA, 19 nt, Homo sapiens
  misc_RNA (1)...(19): siRNA sense strand
agaaauggcucuaaguguu

SEQ ID NO: 762900 - RNA, 19 nt, Homo sapiens
  misc_RNA (1)...(19): siRNA sense strand
gagaaugcccggucaugua

SEQ ID NO: 762901 - RNA, 19 nt, Homo sapiens
  misc_RNA (1)...(19): siRNA sense strand
ggucauguauucgagcuua

SEQ ID NO: 762902 - RNA, 19 nt, Homo sapiens
  misc_RNA (1)...(19): siRNA sense strand
caagguuacuggaaacauu

SEQ ID NO: 762903 - RNA, 19 nt, Homo sapiens
  misc_RNA (1)...(19): siRNA sense strand
cguggaaacuguagaauau

SEQ ID NO: 762904 - RNA, 19 nt, Homo sapiens
  misc_RNA (1)...(19): siRNA sense strand
uaacagaccuaggugauuc

SEQ ID NO: 762905 - RNA, 19 nt, Homo sapiens
  misc_RNA (1)...(19): siRNA sense strand
gaagaaauggcucuaagug

SEQ ID NO: 762906 - RNA, 19 nt, Homo sapiens
  misc_RNA (1)...(19): siRNA sense strand
gauaaucgaguucacauug

SEQ ID NO: 762907 - RNA, 19 nt, Homo sapiens
  misc_RNA (1)...(19): siRNA sense strand
gcaggaugauuguagaguu

SEQ ID NO: 762908 - RNA, 19 nt, Homo sapiens
  misc_RNA (1)...(19): siRNA sense strand
caaacuagcccacucaugu

SEQ ID NO: 762909 - RNA, 19 nt, Homo sapiens
  misc_RNA (1)...(19): siRNA sense strand
gaaauggcucuaaguguug

SEQ ID NO: 762910 - RNA, 19 nt, Homo sapiens
  misc_RNA (1)...(19): siRNA sense strand
uuacagaaguugcagauca

SEQ ID NO: 762911 - RNA, 19 nt, Homo sapiens
  misc_RNA (1)...(19): siRNA sense strand
uggaauggcucacacagaa

SEQ ID NO: 762912 - RNA, 19 nt, Homo sapiens
  misc_RNA (1)...(19): siRNA sense strand
gaaacucugugucgucaag

SEQ ID NO: 762913 - RNA, 19 nt, Homo sapiens
  misc_RNA (1)...(19): siRNA sense strand
gcaaagcacaggcgaguuc

SEQ ID NO: 762914 - RNA, 19 nt, Homo sapiens
  misc_RNA (1)...(19): siRNA sense strand
gcagcaggaugauuguaga

SEQ ID NO: 762915 - RNA, 19 nt, Homo sapiens
  misc_RNA (1)...(19): siRNA sense strand
ggacagcuguagugaaggu

SEQ ID NO: 762916 - RNA, 19 nt, Homo sapiens
  misc_RNA (1)...(19): siRNA sense strand
guagauagcagucauagag

SEQ ID NO: 762917 - RNA, 19 nt, Homo sapiens
  misc_RNA (1)...(19): siRNA sense strand
agucauagagacagaauua

SEQ ID NO: 762918 - RNA, 19 nt, Homo sapiens
  misc_RNA (1)...(19): siRNA sense strand
agaaaucacugaacuacuc

SEQ ID NO: 762919 - RNA, 19 nt, Homo sapiens
  misc_RNA (1)...(19): siRNA sense strand
gaagaaaucacugaacuac

SEQ ID NO: 762920 - RNA, 19 nt, Homo sapiens
  misc_RNA (1)...(19): siRNA sense strand
cuacaaagacauuagcaaa

SEQ ID NO: 762921 - RNA, 19 nt, Homo sapiens
  misc_RNA (1)...(19): siRNA sense strand
gcacacagcgaacuugcaa

SEQ ID NO: 762922 - RNA, 19 nt, Homo sapiens
  misc_RNA (1)...(19): siRNA sense strand
acaggaaauuacaagguua

SEQ ID NO: 762923 - RNA, 19 nt, Homo sapiens
  misc_RNA (1)...(19): siRNA sense strand
caacucauuugugcucuga

SEQ ID NO: 762924 - RNA, 19 nt, Homo sapiens
  misc_RNA (1)...(19): siRNA sense strand
gagaugcucugcuccugau

SEQ ID NO: 762925 - RNA, 19 nt, Homo sapiens
  misc_RNA (1)...(19): siRNA sense strand
guagaguugucuuggcaaa

SEQ ID NO: 762926 - RNA, 19 nt, Homo sapiens
  misc_RNA (1)...(19): siRNA sense strand
gauccgagcaucaauuuua

SEQ ID NO: 762927 - RNA, 19 nt, Homo sapiens
  misc_RNA (1)...(19): siRNA sense strand
gaguuccucuagcugauaa

SEQ ID NO: 762928 - RNA, 19 nt, Homo sapiens
  misc_RNA (1)...(19): siRNA sense strand
gaccauuguggaaacauua

SEQ ID NO: 762929 - RNA, 19 nt, Homo sapiens
  misc_RNA (1)...(19): siRNA sense strand
uacucaagcuguuguguuu

SEQ ID NO: 762930 - RNA, 19 nt, Homo sapiens
  misc_RNA (1)...(19): siRNA sense strand
gcacauugaaggaggagaa

SEQ ID NO: 762931 - RNA, 19 nt, Homo sapiens
  misc_RNA (1)...(19): siRNA sense strand
gcuagaguguggaguuugu

SEQ ID NO: 762932 - RNA, 19 nt, Homo sapiens
  misc_RNA (1)...(19): siRNA sense strand
guucucaaguuacucauuc

SEQ ID NO: 762933 - RNA, 19 nt, Homo sapiens
  misc_RNA (1)...(19): siRNA sense strand
caacaagaagauaugacua

SEQ ID NO: 762934 - RNA, 19 nt, Homo sapiens
  misc_RNA (1)...(19): siRNA sense strand
gcugauaaaccucaugaga

SEQ ID NO: 762935 - RNA, 19 nt, Homo sapiens
  misc_RNA (1)...(19): siRNA sense strand
ccauugaguuuguuugcuu

SEQ ID NO: 762936 - RNA, 19 nt, Homo sapiens
  misc_RNA (1)...(19): siRNA sense strand
uagaagaaaucacugaacu

SEQ ID NO: 762937 - RNA, 19 nt, Homo sapiens
  misc_RNA (1)...(19): siRNA sense strand
caggaugauuguagaguug

SEQ ID NO: 762938 - RNA, 19 nt, Homo sapiens
  misc_RNA (1)...(19): siRNA sense strand
gaaccagaagcuaaucaga

SEQ ID NO: 762939 - RNA, 19 nt, Homo sapiens
  misc_RNA (1)...(19): siRNA sense strand
cagccugccuccacuguga

SEQ ID NO: 762940 - RNA, 19 nt, Homo sapiens
  misc_RNA (1)...(19): siRNA sense strand
gaagauggaauuggaaugg

SEQ ID NO: 762941 - RNA, 19 nt, Homo sapiens
  misc_RNA (1)...(19): siRNA sense strand
cccauuugaucgacaagua

SEQ ID NO: 762942 - RNA, 19 nt, Homo sapiens
  misc_RNA (1)...(19): siRNA sense strand
uacaaaggauaaucgaguu

SEQ ID NO: 762943 - RNA, 19 nt, Homo sapiens
  misc_RNA (1)...(19): siRNA sense strand
cagcagcaguuuacagaag

SEQ ID NO: 762944 - RNA, 19 nt, Homo sapiens
  misc_RNA (1)...(19): siRNA sense strand
caaagacauuagcaaagca

SEQ ID NO: 762945 - RNA, 19 nt, Homo sapiens
  misc_RNA (1)...(19): siRNA sense strand
cagaucacauucaguugga

SEQ ID NO: 762946 - RNA, 19 nt, Homo sapiens
  misc_RNA (1)...(19): siRNA sense strand
gcagcaguuuacagaaguu

SEQ ID NO: 762947 - RNA, 19 nt, Homo sapiens
  misc_RNA (1)...(19): siRNA sense strand
agaaacagcagcagcaguu

SEQ ID NO: 762948 - RNA, 19 nt, Homo sapiens
  misc_RNA (1)...(19): siRNA sense strand
cguggaagauggaauugga

SEQ ID NO: 762949 - RNA, 19 nt, Homo sapiens
  misc_RNA (1)...(19): siRNA sense strand
ucaaguuacucauucuaca

SEQ ID NO: 762950 - RNA, 19 nt, Homo sapiens
  misc_RNA (1)...(19): siRNA sense strand
aacaggaaauuacaagguu

SEQ ID NO: 762951 - RNA, 19 nt, Homo sapiens
  misc_RNA (1)...(19): siRNA sense strand
caagaagaaauggcucuaa

SEQ ID NO: 762952 - RNA, 19 nt, Homo sapiens
  misc_RNA (1)...(19): siRNA sense strand
ugaaggaggagaacaaauc

SEQ ID NO: 762953 - RNA, 19 nt, Homo sapiens
  misc_RNA (1)...(19): siRNA sense strand
ucacagaggaaaucucaga

SEQ ID NO: 762954 - RNA, 19 nt, Homo sapiens
  misc_RNA (1)...(19): siRNA sense strand
gcacaggcgaguuccucua

SEQ ID NO: 762955 - RNA, 19 nt, Homo sapiens
  misc_RNA (1)...(19): siRNA sense strand
caccuugccucuguauauu

SEQ ID NO: 762956 - RNA, 19 nt, Homo sapiens
  misc_RNA (1)...(19): siRNA sense strand
ccucaauacucaagcuguu

SEQ ID NO: 762957 - RNA, 19 nt, Homo sapiens
  misc_RNA (1)...(19): siRNA sense strand
uaacguggaaacuguagaa

SEQ ID NO: 762958 - RNA, 19 nt, Homo sapiens
  misc_RNA (1)...(19): siRNA sense strand
cagcaucccugucacuuuu

SEQ ID NO: 762959 - RNA, 19 nt, Homo sapiens
  misc_RNA (1)...(19): siRNA sense strand
gugcuagaguguggaguuu

SEQ ID NO: 762960 - RNA, 19 nt, Homo sapiens
  misc_RNA (1)...(19): siRNA sense strand
ccacucaugugcugugucu

SEQ ID NO: 762961 - RNA, 19 nt, Homo sapiens
  misc_RNA (1)...(19): siRNA sense strand
ucaccuugccucuguauau

SEQ ID NO: 762962 - RNA, 19 nt, Homo sapiens
  misc_RNA (1)...(19): siRNA sense strand
agacagaauuagugaagca

SEQ ID NO: 762963 - RNA, 19 nt, Homo sapiens
  misc_RNA (1)...(19): siRNA sense strand
gcagcccauuccaacaauu

SEQ ID NO: 762964 - RNA, 19 nt, Homo sapiens
  misc_RNA (1)...(19): siRNA sense strand
aagaagaaauggcucuaag

SEQ ID NO: 762965 - RNA, 19 nt, Homo sapiens
  misc_RNA (1)...(19): siRNA sense strand
cagauccgagcaucaauuu

SEQ ID NO: 762966 - RNA, 19 nt, Homo sapiens
  misc_RNA (1)...(19): siRNA sense strand
guuacucauucuacaaaga

SEQ ID NO: 762967 - RNA, 19 nt, Homo sapiens
  misc_RNA (1)...(19): siRNA sense strand
uaaucgaguucacauugga

SEQ ID NO: 762968 - RNA, 19 nt, Homo sapiens
  misc_RNA (1)...(19): siRNA sense strand
gcaacaagaagauaugacu

SEQ ID NO: 762969 - RNA, 19 nt, Homo sapiens
  misc_RNA (1)...(19): siRNA sense strand
ggccauaccgucugucaug

SEQ ID NO: 762970 - RNA, 19 nt, Homo sapiens
  misc_RNA (1)...(19): siRNA sense strand
gcauacggaccuucacaga

SEQ ID NO: 762971 - RNA, 19 nt, Homo sapiens
  misc_RNA (1)...(19): siRNA sense strand
caugugcugugucugcaaa

SEQ ID NO: 762972 - RNA, 19 nt, Homo sapiens
  misc_RNA (1)...(19): siRNA sense strand
aagcucaccuugccucugu

SEQ ID NO: 762973 - RNA, 19 nt, Homo sapiens
  misc_RNA (1)...(19): siRNA sense strand
gaaaucacugaacuacuca

SEQ ID NO: 762974 - RNA, 19 nt, Homo sapiens
  misc_RNA (1)...(19): siRNA sense strand
ggaaacauuauuaccucaa

SEQ ID NO: 762975 - RNA, 19 nt, Homo sapiens
  misc_RNA (1)...(19): siRNA sense strand
gcucaggcagcaacaagaa

SEQ ID NO: 762976 - RNA, 19 nt, Homo sapiens
  misc_RNA (1)...(19): siRNA sense strand
ggucacaagcauucaguau

SEQ ID NO: 762977 - RNA, 19 nt, Homo sapiens
  misc_RNA (1)...(19): siRNA sense strand
gagagcaucauucguugug

SEQ ID NO: 762978 - RNA, 19 nt, Homo sapiens
  misc_RNA (1)...(19): siRNA sense strand
gaugcucugcuccugauuu

SEQ ID NO: 762979 - RNA, 19 nt, Homo sapiens
  misc_RNA (1)...(19): siRNA sense strand
gaaguugcagaucacauuc

SEQ ID NO: 762980 - RNA, 19 nt, Homo sapiens
  misc_RNA (1)...(19): siRNA sense strand
gcagcaacaagaagauaug

SEQ ID NO: 762981 - RNA, 19 nt, Homo sapiens
  misc_RNA (1)...(19): siRNA sense strand
guaacagaccuaggugauu

SEQ ID NO: 762982 - RNA, 19 nt, Homo sapiens
  misc_RNA (1)...(19): siRNA sense strand
caaguuacucauucuacaa

SEQ ID NO: 762983 - RNA, 19 nt, Homo sapiens
  misc_RNA (1)...(19): siRNA sense strand
acaaagacauuagcaaagc

SEQ ID NO: 762984 - RNA, 19 nt, Homo sapiens
  misc_RNA (1)...(19): siRNA sense strand
gaauggcucacacagaaca

SEQ ID NO: 762985 - RNA, 19 nt, Homo sapiens
  misc_RNA (1)...(19): siRNA sense strand
ugaguuuguuugcuuggaa

SEQ ID NO: 762986 - RNA, 19 nt, Homo sapiens
  misc_RNA (1)...(19): siRNA sense strand
cugauaaaccucaugagaa

SEQ ID NO: 762987 - RNA, 19 nt, Homo sapiens
  misc_RNA (1)...(19): siRNA sense strand
aaauucgggucguuacguu

SEQ ID NO: 762988 - RNA, 19 nt, Homo sapiens
  misc_RNA (1)...(19): siRNA sense strand
cauagagacagaauuagug

SEQ ID NO: 762989 - RNA, 19 nt, Homo sapiens
  misc_RNA (1)...(19): siRNA sense strand
gaagaagguugucaaacua

SEQ ID NO: 762990 - RNA, 19 nt, Homo sapiens
  misc_RNA (1)...(19): siRNA sense strand
ggaaagagguagucacaga

SEQ ID NO: 762991 - RNA, 19 nt, Homo sapiens
  misc_RNA (1)...(19): siRNA sense strand
ggaagaagguugucaaacu

SEQ ID NO: 762992 - RNA, 19 nt, Homo sapiens
  misc_RNA (1)...(19): siRNA sense strand
guauggagcugcagaagaa

SEQ ID NO: 762993 - RNA, 19 nt, Homo sapiens
  misc_RNA (1)...(19): siRNA sense strand
ugauaaaccucaugagaaa

SEQ ID NO: 762994 - RNA, 19 nt, Homo sapiens
  misc_RNA (1)...(19): siRNA sense strand
gaacuacucagucuccaua

SEQ ID NO: 762995 - RNA, 19 nt, Homo sapiens
  misc_RNA (1)...(19): siRNA sense strand
ucacaagcauucaguauug

SEQ ID NO: 762996 - RNA, 19 nt, Homo sapiens
  misc_RNA (1)...(19): siRNA sense strand
gcaaaguuguuaacggaaa

SEQ ID NO: 762997 - RNA, 19 nt, Homo sapiens
  misc_RNA (1)...(19): siRNA sense strand
ggagagagcaucauucguu

SEQ ID NO: 762998 - RNA, 19 nt, Homo sapiens
  misc_RNA (1)...(19): siRNA sense strand
gagaacaaaucguggaaga

SEQ ID NO: 762999 - RNA, 19 nt, Homo sapiens
  misc_RNA (1)...(19): siRNA sense strand
gaacaaaucguggaagaug

SEQ ID NO: 763000 - RNA, 19 nt, Homo sapiens
  misc_RNA (1)...(19): siRNA sense strand
agaaauggcucuaaguguu

SEQ ID NO: 763001 - RNA, 19 nt, Homo sapiens
  misc_RNA (1)...(19): siRNA sense strand
gagaaugcccggucaugua

SEQ ID NO: 763002 - RNA, 19 nt, Homo sapiens
  misc_RNA (1)...(19): siRNA sense strand
ggucauguauucgagcuua

SEQ ID NO: 763003 - RNA, 19 nt, Homo sapiens
  misc_RNA (1)...(19): siRNA sense strand
caagguuacuggaaacauu

SEQ ID NO: 763004 - RNA, 19 nt, Homo sapiens
  misc_RNA (1)...(19): siRNA sense strand
cguggaaacuguagaauau

SEQ ID NO: 763005 - RNA, 19 nt, Homo sapiens
  misc_RNA (1)...(19): siRNA sense strand
uaacagaccuaggugauuc

SEQ ID NO: 763006 - RNA, 19 nt, Homo sapiens
  misc_RNA (1)...(19): siRNA sense strand
gaagaaauggcucuaagug

SEQ ID NO: 763007 - RNA, 19 nt, Homo sapiens
  misc_RNA (1)...(19): siRNA sense strand
gauaaucgaguucacauug

SEQ ID NO: 763008 - RNA, 19 nt, Homo sapiens
  misc_RNA (1)...(19): siRNA sense strand
gcaggaugauuguagaguu

SEQ ID NO: 763009 - RNA, 19 nt, Homo sapiens
  misc_RNA (1)...(19): siRNA sense strand
caaacuagcccacucaugu

SEQ ID NO: 763010 - RNA, 19 nt, Homo sapiens
  misc_RNA (1)...(19): siRNA sense strand
gaaauggcucuaaguguug

SEQ ID NO: 763011 - RNA, 19 nt, Homo sapiens
  misc_RNA (1)...(19): siRNA sense strand
uuacagaaguugcagauca

SEQ ID NO: 763012 - RNA, 19 nt, Homo sapiens
  misc_RNA (1)...(19): siRNA sense strand
uggaauggcucacacagaa

SEQ ID NO: 763013 - RNA, 19 nt, Homo sapiens
  misc_RNA (1)...(19): siRNA sense strand
gaaacucugugucgucaag

SEQ ID NO: 763014 - RNA, 19 nt, Homo sapiens
  misc_RNA (1)...(19): siRNA sense strand
gcaaagcacaggcgaguuc

SEQ ID NO: 763015 - RNA, 19 nt, Homo sapiens
  misc_RNA (1)...(19): siRNA sense strand
gcagcaggaugauuguaga

SEQ ID NO: 763016 - RNA, 19 nt, Homo sapiens
  misc_RNA (1)...(19): siRNA sense strand
ggacagcuguagugaaggu

SEQ ID NO: 763017 - RNA, 19 nt, Homo sapiens
  misc_RNA (1)...(19): siRNA sense strand
guagauagcagucauagag

SEQ ID NO: 763018 - RNA, 19 nt, Homo sapiens
  misc_RNA (1)...(19): siRNA sense strand
agucauagagacagaauua

SEQ ID NO: 763019 - RNA, 19 nt, Homo sapiens
  misc_RNA (1)...(19): siRNA sense strand
agaaaucacugaacuacuc

SEQ ID NO: 763020 - RNA, 19 nt, Homo sapiens
  misc_RNA (1)...(19): siRNA sense strand
gaagaaaucacugaacuac

SEQ ID NO: 763021 - RNA, 19 nt, Homo sapiens
  misc_RNA (1)...(19): siRNA sense strand
cuacaaagacauuagcaaa

SEQ ID NO: 763022 - RNA, 19 nt, Homo sapiens
  misc_RNA (1)...(19): siRNA sense strand
gcacacagcgaacuugcaa

SEQ ID NO: 763023 - RNA, 19 nt, Homo sapiens
  misc_RNA (1)...(19): siRNA sense strand
acaggaaauuacaagguua

SEQ ID NO: 763024 - RNA, 19 nt, Homo sapiens
  misc_RNA (1)...(19): siRNA sense strand
caacucauuugugcucuga

SEQ ID NO: 763025 - RNA, 19 nt, Homo sapiens
  misc_RNA (1)...(19): siRNA sense strand
gagaugcucugcuccugau

SEQ ID NO: 763026 - RNA, 19 nt, Homo sapiens
  misc_RNA (1)...(19): siRNA sense strand
guagaguugucuuggcaaa

SEQ ID NO: 763027 - RNA, 19 nt, Homo sapiens
  misc_RNA (1)...(19): siRNA sense strand
gauccgagcaucaauuuua

SEQ ID NO: 763028 - RNA, 19 nt, Homo sapiens
  misc_RNA (1)...(19): siRNA sense strand
gaguuccucuagcugauaa

SEQ ID NO: 763029 - RNA, 19 nt, Homo sapiens
  misc_RNA (1)...(19): siRNA sense strand
gaccauuguggaaacauua

SEQ ID NO: 763030 - RNA, 19 nt, Homo sapiens
  misc_RNA (1)...(19): siRNA sense strand
uacucaagcuguuguguuu

SEQ ID NO: 763031 - RNA, 19 nt, Homo sapiens
  misc_RNA (1)...(19): siRNA sense strand
gcacauugaaggaggagaa

SEQ ID NO: 763032 - RNA, 19 nt, Homo sapiens
  misc_RNA (1)...(19): siRNA sense strand
gcuagaguguggaguuugu

SEQ ID NO: 763033 - RNA, 19 nt, Homo sapiens
  misc_RNA (1)...(19): siRNA sense strand
guucucaaguuacucauuc

SEQ ID NO: 763034 - RNA, 19 nt, Homo sapiens
  misc_RNA (1)...(19): siRNA sense strand
caacaagaagauaugacua

SEQ ID NO: 763035 - RNA, 19 nt, Homo sapiens
  misc_RNA (1)...(19): siRNA sense strand
gcugauaaaccucaugaga

SEQ ID NO: 763036 - RNA, 19 nt, Homo sapiens
  misc_RNA (1)...(19): siRNA sense strand
ccauugaguuuguuugcuu

SEQ ID NO: 763037 - RNA, 19 nt, Homo sapiens
  misc_RNA (1)...(19): siRNA sense strand
uagaagaaaucacugaacu

SEQ ID NO: 763038 - RNA, 19 nt, Homo sapiens
  misc_RNA (1)...(19): siRNA sense strand
caggaugauuguagaguug

SEQ ID NO: 763039 - RNA, 19 nt, Homo sapiens
  misc_RNA (1)...(19): siRNA sense strand
gaaccagaagcuaaucaga

SEQ ID NO: 763040 - RNA, 19 nt, Homo sapiens
  misc_RNA (1)...(19): siRNA sense strand
ugaccaauauacugggaaa

SEQ ID NO: 763041 - RNA, 19 nt, Homo sapiens
  misc_RNA (1)...(19): siRNA sense strand
cagccugccuccacuguga

SEQ ID NO: 763042 - RNA, 19 nt, Homo sapiens
  misc_RNA (1)...(19): siRNA sense strand
gaagauggaauuggaaugg

SEQ ID NO: 763043 - RNA, 19 nt, Homo sapiens
  misc_RNA (1)...(19): siRNA sense strand
cccauuugaucgacaagua

SEQ ID NO: 763044 - RNA, 19 nt, Homo sapiens
  misc_RNA (1)...(19): siRNA sense strand
uacaaaggauaaucgaguu

SEQ ID NO: 763045 - RNA, 19 nt, Homo sapiens
  misc_RNA (1)...(19): siRNA sense strand
cagcagcaguuuacagaag

SEQ ID NO: 763046 - RNA, 19 nt, Homo sapiens
  misc_RNA (1)...(19): siRNA sense strand
caaagacauuagcaaagca

SEQ ID NO: 763047 - RNA, 19 nt, Homo sapiens
  misc_RNA (1)...(19): siRNA sense strand
cagaucacauucaguugga

SEQ ID NO: 763048 - RNA, 19 nt, Homo sapiens
  misc_RNA (1)...(19): siRNA sense strand
gcagcaguuuacagaaguu

SEQ ID NO: 763049 - RNA, 19 nt, Homo sapiens
  misc_RNA (1)...(19): siRNA sense strand
agaaacagcagcagcaguu

SEQ ID NO: 763050 - RNA, 19 nt, Homo sapiens
  misc_RNA (1)...(19): siRNA sense strand
cguggaagauggaauugga

SEQ ID NO: 763051 - RNA, 19 nt, Homo sapiens
  misc_RNA (1)...(19): siRNA sense strand
ucaaguuacucauucuaca

SEQ ID NO: 763052 - RNA, 19 nt, Homo sapiens
  misc_RNA (1)...(19): siRNA sense strand
aacaggaaauuacaagguu

SEQ ID NO: 763053 - RNA, 19 nt, Homo sapiens
  misc_RNA (1)...(19): siRNA sense strand
caagaagaaauggcucuaa

SEQ ID NO: 763054 - RNA, 19 nt, Homo sapiens
  misc_RNA (1)...(19): siRNA sense strand
ugaaggaggagaacaaauc

SEQ ID NO: 763055 - RNA, 19 nt, Homo sapiens
  misc_RNA (1)...(19): siRNA sense strand
ucacagaggaaaucucaga

SEQ ID NO: 763056 - RNA, 19 nt, Homo sapiens
  misc_RNA (1)...(19): siRNA sense strand
gcacaggcgaguuccucua

SEQ ID NO: 763057 - RNA, 19 nt, Homo sapiens
  misc_RNA (1)...(19): siRNA sense strand
caccuugccucuguauauu

SEQ ID NO: 763058 - RNA, 19 nt, Homo sapiens
  misc_RNA (1)...(19): siRNA sense strand
cagauaauaugugaccaau

SEQ ID NO: 763059 - RNA, 19 nt, Homo sapiens
  misc_RNA (1)...(19): siRNA sense strand
ccucaauacucaagcuguu

SEQ ID NO: 763060 - RNA, 19 nt, Homo sapiens
  misc_RNA (1)...(19): siRNA sense strand
uaacguggaaacuguagaa

SEQ ID NO: 763061 - RNA, 19 nt, Homo sapiens
  misc_RNA (1)...(19): siRNA sense strand
cagcaucccugucacuuuu

SEQ ID NO: 763062 - RNA, 19 nt, Homo sapiens
  misc_RNA (1)...(19): siRNA sense strand
gugcuagaguguggaguuu

SEQ ID NO: 763063 - RNA, 19 nt, Homo sapiens
  misc_RNA (1)...(19): siRNA sense strand
ccacucaugugcugugucu

SEQ ID NO: 763064 - RNA, 19 nt, Homo sapiens
  misc_RNA (1)...(19): siRNA sense strand
ucaccuugccucuguauau

SEQ ID NO: 763065 - RNA, 19 nt, Homo sapiens
  misc_RNA (1)...(19): siRNA sense strand
agacagaauuagugaagca

SEQ ID NO: 763066 - RNA, 19 nt, Homo sapiens
  misc_RNA (1)...(19): siRNA sense strand
gcagcccauuccaacaauu

SEQ ID NO: 763067 - RNA, 19 nt, Homo sapiens
  misc_RNA (1)...(19): siRNA sense strand
aagaagaaauggcucuaag

SEQ ID NO: 763068 - RNA, 19 nt, Homo sapiens
  misc_RNA (1)...(19): siRNA sense strand
cagauccgagcaucaauuu

SEQ ID NO: 763069 - RNA, 19 nt, Homo sapiens
  misc_RNA (1)...(19): siRNA sense strand
guuacucauucuacaaaga

SEQ ID NO: 763070 - RNA, 19 nt, Homo sapiens
  misc_RNA (1)...(19): siRNA sense strand
uaaucgaguucacauugga

SEQ ID NO: 763071 - RNA, 19 nt, Homo sapiens
  misc_RNA (1)...(19): siRNA sense strand
ggccauaccgucugucaug

SEQ ID NO: 763072 - RNA, 19 nt, Homo sapiens
  misc_RNA (1)...(19): siRNA sense strand
gcaacaagaagauaugacu

SEQ ID NO: 763073 - RNA, 19 nt, Homo sapiens
  misc_RNA (1)...(19): siRNA sense strand
gcauacggaccuucacaga

SEQ ID NO: 763074 - RNA, 19 nt, Homo sapiens
  misc_RNA (1)...(19): siRNA sense strand
caugugcugugucugcaaa

SEQ ID NO: 763075 - RNA, 19 nt, Homo sapiens
  misc_RNA (1)...(19): siRNA sense strand
aagcucaccuugccucugu

SEQ ID NO: 763076 - RNA, 19 nt, Homo sapiens
  misc_RNA (1)...(19): siRNA sense strand
gaaaucacugaacuacuca

SEQ ID NO: 763077 - RNA, 19 nt, Homo sapiens
  misc_RNA (1)...(19): siRNA sense strand
ggaaacauuauuaccucaa

SEQ ID NO: 763078 - RNA, 19 nt, Homo sapiens
  misc_RNA (1)...(19): siRNA sense strand
gcucaggcagcaacaagaa

SEQ ID NO: 763079 - RNA, 19 nt, Homo sapiens
  misc_RNA (1)...(19): siRNA sense strand
ggucacaagcauucaguau

SEQ ID NO: 763080 - RNA, 19 nt, Homo sapiens
  misc_RNA (1)...(19): siRNA sense strand
gagagcaucauucguugug

SEQ ID NO: 763081 - RNA, 19 nt, Homo sapiens
  misc_RNA (1)...(19): siRNA sense strand
gaugcucugcuccugauuu

SEQ ID NO: 763082 - RNA, 19 nt, Homo sapiens
  misc_RNA (1)...(19): siRNA sense strand
gaaguugcagaucacauuc

SEQ ID NO: 763083 - RNA, 19 nt, Homo sapiens
  misc_RNA (1)...(19): siRNA sense strand
gcagcaacaagaagauaug

SEQ ID NO: 763084 - RNA, 19 nt, Homo sapiens
  misc_RNA (1)...(19): siRNA sense strand
caaguuacucauucuacaa

SEQ ID NO: 763085 - RNA, 19 nt, Homo sapiens
  misc_RNA (1)...(19): siRNA sense strand
guaacagaccuaggugauu

SEQ ID NO: 763086 - RNA, 19 nt, Homo sapiens
  misc_RNA (1)...(19): siRNA sense strand
cugauaaaccucaugagaa

SEQ ID NO: 763087 - RNA, 19 nt, Homo sapiens
  misc_RNA (1)...(19): siRNA sense strand
gaauggcucacacagaaca

SEQ ID NO: 763088 - RNA, 19 nt, Homo sapiens
  misc_RNA (1)...(19): siRNA sense strand
ugaguuuguuugcuuggaa

SEQ ID NO: 763089 - RNA, 19 nt, Homo sapiens
  misc_RNA (1)...(19): siRNA sense strand
gaagaagguugucaaacua

SEQ ID NO: 763090 - RNA, 19 nt, Homo sapiens
  misc_RNA (1)...(19): siRNA sense strand
ggaagaagguugucaaacu

SEQ ID NO: 763091 - RNA, 19 nt, Homo sapiens
  misc_RNA (1)...(19): siRNA sense strand
guauggagcugcagaagaa

SEQ ID NO: 763092 - RNA, 19 nt, Homo sapiens
  misc_RNA (1)...(19): siRNA sense strand
ugauaaaccucaugagaaa

SEQ ID NO: 763093 - RNA, 19 nt, Homo sapiens
  misc_RNA (1)...(19): siRNA sense strand
gaacuacucagucuccaua

SEQ ID NO: 763094 - RNA, 19 nt, Homo sapiens
  misc_RNA (1)...(19): siRNA sense strand
ucacaagcauucaguauug

SEQ ID NO: 763095 - RNA, 19 nt, Homo sapiens
  misc_RNA (1)...(19): siRNA sense strand
gcaaaguuguuaacggaaa

SEQ ID NO: 763096 - RNA, 19 nt, Homo sapiens
  misc_RNA (1)...(19): siRNA sense strand
ggagagagcaucauucguu

SEQ ID NO: 763097 - RNA, 19 nt, Homo sapiens
  misc_RNA (1)...(19): siRNA sense strand
gagaacaaaucguggaaga

SEQ ID NO: 763098 - RNA, 19 nt, Homo sapiens
  misc_RNA (1)...(19): siRNA sense strand
gaacaaaucguggaagaug

SEQ ID NO: 763099 - RNA, 19 nt, Homo sapiens
  misc_RNA (1)...(19): siRNA sense strand
agaaauggcucuaaguguu

SEQ ID NO: 763100 - RNA, 19 nt, Homo sapiens
  misc_RNA (1)...(19): siRNA sense strand
gagaaugcccggucaugua

SEQ ID NO: 763101 - RNA, 19 nt, Homo sapiens
  misc_RNA (1)...(19): siRNA sense strand
ggucauguauucgagcuua

SEQ ID NO: 763102 - RNA, 19 nt, Homo sapiens
  misc_RNA (1)...(19): siRNA sense strand
caagguuacuggaaacauu

SEQ ID NO: 763103 - RNA, 19 nt, Homo sapiens
  misc_RNA (1)...(19): siRNA sense strand
cguggaaacuguagaauau

SEQ ID NO: 763104 - RNA, 19 nt, Homo sapiens
  misc_RNA (1)...(19): siRNA sense strand
uaacagaccuaggugauuc

SEQ ID NO: 763105 - RNA, 19 nt, Homo sapiens
  misc_RNA (1)...(19): siRNA sense strand
gaagaaauggcucuaagug

SEQ ID NO: 763106 - RNA, 19 nt, Homo sapiens
  misc_RNA (1)...(19): siRNA sense strand
gauaaucgaguucacauug

SEQ ID NO: 763107 - RNA, 19 nt, Homo sapiens
  misc_RNA (1)...(19): siRNA sense strand
gcaggaugauuguagaguu

SEQ ID NO: 763108 - RNA, 19 nt, Homo sapiens
  misc_RNA (1)...(19): siRNA sense strand
caaacuagcccacucaugu

SEQ ID NO: 763109 - RNA, 19 nt, Homo sapiens
  misc_RNA (1)...(19): siRNA sense strand
gaaauggcucuaaguguug

SEQ ID NO: 763110 - RNA, 19 nt, Homo sapiens
  misc_RNA (1)...(19): siRNA sense strand
uuacagaaguugcagauca

SEQ ID NO: 763111 - RNA, 19 nt, Homo sapiens
  misc_RNA (1)...(19): siRNA sense strand
uggaauggcucacacagaa

SEQ ID NO: 763112 - RNA, 19 nt, Homo sapiens
  misc_RNA (1)...(19): siRNA sense strand
gaaacucugugucgucaag

SEQ ID NO: 763113 - RNA, 19 nt, Homo sapiens
  misc_RNA (1)...(19): siRNA sense strand
gcaaagcacaggcgaguuc

SEQ ID NO: 763114 - RNA, 19 nt, Homo sapiens
  misc_RNA (1)...(19): siRNA sense strand
gcagcaggaugauuguaga

SEQ ID NO: 763115 - RNA, 19 nt, Homo sapiens
  misc_RNA (1)...(19): siRNA sense strand
ggacagcuguagugaaggu

SEQ ID NO: 763116 - RNA, 19 nt, Homo sapiens
  misc_RNA (1)...(19): siRNA sense strand
guagauagcagucauagag

SEQ ID NO: 763117 - RNA, 19 nt, Homo sapiens
  misc_RNA (1)...(19): siRNA sense strand
agucauagagacagaauua

SEQ ID NO: 763118 - RNA, 19 nt, Homo sapiens
  misc_RNA (1)...(19): siRNA sense strand
agaaaucacugaacuacuc

SEQ ID NO: 763119 - RNA, 19 nt, Homo sapiens
  misc_RNA (1)...(19): siRNA sense strand
gaagaaaucacugaacuac

SEQ ID NO: 763120 - RNA, 19 nt, Homo sapiens
  misc_RNA (1)...(19): siRNA sense strand
cuacaaagacauuagcaaa

SEQ ID NO: 763121 - RNA, 19 nt, Homo sapiens
  misc_RNA (1)...(19): siRNA sense strand
gcacacagcgaacuugcaa

SEQ ID NO: 763122 - RNA, 19 nt, Homo sapiens
  misc_RNA (1)...(19): siRNA sense strand
acaggaaauuacaagguua

SEQ ID NO: 763123 - RNA, 19 nt, Homo sapiens
  misc_RNA (1)...(19): siRNA sense strand
caacucauuugugcucuga

SEQ ID NO: 763124 - RNA, 19 nt, Homo sapiens
  misc_RNA (1)...(19): siRNA sense strand
gagaugcucugcuccugau

SEQ ID NO: 763125 - RNA, 19 nt, Homo sapiens
  misc_RNA (1)...(19): siRNA sense strand
guagaguugucuuggcaaa

SEQ ID NO: 763126 - RNA, 19 nt, Homo sapiens
  misc_RNA (1)...(19): siRNA sense strand
gauccgagcaucaauuuua

SEQ ID NO: 763127 - RNA, 19 nt, Homo sapiens
  misc_RNA (1)...(19): siRNA sense strand
gaguuccucuagcugauaa

SEQ ID NO: 763128 - RNA, 19 nt, Homo sapiens
  misc_RNA (1)...(19): siRNA sense strand
gaccauuguggaaacauua

SEQ ID NO: 763129 - RNA, 19 nt, Homo sapiens
  misc_RNA (1)...(19): siRNA sense strand
uacucaagcuguuguguuu

SEQ ID NO: 763130 - RNA, 19 nt, Homo sapiens
  misc_RNA (1)...(19): siRNA sense strand
gcacauugaaggaggagaa

SEQ ID NO: 763131 - RNA, 19 nt, Homo sapiens
  misc_RNA (1)...(19): siRNA sense strand
gcuagaguguggaguuugu

SEQ ID NO: 763132 - RNA, 19 nt, Homo sapiens
  misc_RNA (1)...(19): siRNA sense strand
guucucaaguuacucauuc

SEQ ID NO: 763133 - RNA, 19 nt, Homo sapiens
  misc_RNA (1)...(19): siRNA sense strand
caacaagaagauaugacua

SEQ ID NO: 763134 - RNA, 19 nt, Homo sapiens
  misc_RNA (1)...(19): siRNA sense strand
gcugauaaaccucaugaga

SEQ ID NO: 763135 - RNA, 19 nt, Homo sapiens
  misc_RNA (1)...(19): siRNA sense strand
ccauugaguuuguuugcuu

SEQ ID NO: 763136 - RNA, 19 nt, Homo sapiens
  misc_RNA (1)...(19): siRNA sense strand
uagaagaaaucacugaacu

SEQ ID NO: 763137 - RNA, 19 nt, Homo sapiens
  misc_RNA (1)...(19): siRNA sense strand
caggaugauuguagaguug

SEQ ID NO: 763138 - RNA, 19 nt, Homo sapiens
  misc_RNA (1)...(19): siRNA sense strand
gaaccagaagcuaaucaga

SEQ ID NO: 763139 - RNA, 19 nt, Homo sapiens
  misc_RNA (1)...(19): siRNA sense strand
cagccugccuccacuguga

SEQ ID NO: 763140 - RNA, 19 nt, Homo sapiens
  misc_RNA (1)...(19): siRNA sense strand
gaagauggaauuggaaugg

SEQ ID NO: 763141 - RNA, 19 nt, Homo sapiens
  misc_RNA (1)...(19): siRNA sense strand
cccauuugaucgacaagua

SEQ ID NO: 763142 - RNA, 19 nt, Homo sapiens
  misc_RNA (1)...(19): siRNA sense strand
uacaaaggauaaucgaguu

SEQ ID NO: 763143 - RNA, 19 nt, Homo sapiens
  misc_RNA (1)...(19): siRNA sense strand
cagcagcaguuuacagaag

SEQ ID NO: 763144 - RNA, 19 nt, Homo sapiens
  misc_RNA (1)...(19): siRNA sense strand
caaagacauuagcaaagca

SEQ ID NO: 763145 - RNA, 19 nt, Homo sapiens
  misc_RNA (1)...(19): siRNA sense strand
cagaucacauucaguugga

SEQ ID NO: 763146 - RNA, 19 nt, Homo sapiens
  misc_RNA (1)...(19): siRNA sense strand
gcagcaguuuacagaaguu

SEQ ID NO: 763147 - RNA, 19 nt, Homo sapiens
  misc_RNA (1)...(19): siRNA sense strand
agaaacagcagcagcaguu

SEQ ID NO: 763148 - RNA, 19 nt, Homo sapiens
  misc_RNA (1)...(19): siRNA sense strand
cguggaagauggaauugga

SEQ ID NO: 763149 - RNA, 19 nt, Homo sapiens
  misc_RNA (1)...(19): siRNA sense strand
ucaaguuacucauucuaca

SEQ ID NO: 763150 - RNA, 19 nt, Homo sapiens
  misc_RNA (1)...(19): siRNA sense strand
aacaggaaauuacaagguu

SEQ ID NO: 763151 - RNA, 19 nt, Homo sapiens
  misc_RNA (1)...(19): siRNA sense strand
caagaagaaauggcucuaa

SEQ ID NO: 763152 - RNA, 19 nt, Homo sapiens
  misc_RNA (1)...(19): siRNA sense strand
ugaaggaggagaacaaauc

SEQ ID NO: 763153 - RNA, 19 nt, Homo sapiens
  misc_RNA (1)...(19): siRNA sense strand
ucacagaggaaaucucaga

SEQ ID NO: 763154 - RNA, 19 nt, Homo sapiens
  misc_RNA (1)...(19): siRNA sense strand
gcacaggcgaguuccucua

SEQ ID NO: 763155 - RNA, 19 nt, Homo sapiens
  misc_RNA (1)...(19): siRNA sense strand
caccuugccucuguauauu

SEQ ID NO: 763156 - RNA, 19 nt, Homo sapiens
  misc_RNA (1)...(19): siRNA sense strand
ccucaauacucaagcuguu

SEQ ID NO: 763157 - RNA, 19 nt, Homo sapiens
  misc_RNA (1)...(19): siRNA sense strand
uaacguggaaacuguagaa

SEQ ID NO: 763158 - RNA, 19 nt, Homo sapiens
  misc_RNA (1)...(19): siRNA sense strand
cagcaucccugucacuuuu

SEQ ID NO: 763159 - RNA, 19 nt, Homo sapiens
  misc_RNA (1)...(19): siRNA sense strand
gugcuagaguguggaguuu

SEQ ID NO: 763160 - RNA, 19 nt, Homo sapiens
  misc_RNA (1)...(19): siRNA sense strand
ccacucaugugcugugucu

SEQ ID NO: 763161 - RNA, 19 nt, Homo sapiens
  misc_RNA (1)...(19): siRNA sense strand
ucaccuugccucuguauau

SEQ ID NO: 763162 - RNA, 19 nt, Homo sapiens
  misc_RNA (1)...(19): siRNA sense strand
agacagaauuagugaagca

SEQ ID NO: 763163 - RNA, 19 nt, Homo sapiens
  misc_RNA (1)...(19): siRNA sense strand
gcagcccauuccaacaauu

SEQ ID NO: 763164 - RNA, 19 nt, Homo sapiens
  misc_RNA (1)...(19): siRNA sense strand
aagaagaaauggcucuaag

SEQ ID NO: 763165 - RNA, 19 nt, Homo sapiens
  misc_RNA (1)...(19): siRNA sense strand
cagauccgagcaucaauuu

SEQ ID NO: 763166 - RNA, 19 nt, Homo sapiens
  misc_RNA (1)...(19): siRNA sense strand
guuacucauucuacaaaga

SEQ ID NO: 763167 - RNA, 19 nt, Homo sapiens
  misc_RNA (1)...(19): siRNA sense strand
uaaucgaguucacauugga

SEQ ID NO: 763168 - RNA, 19 nt, Homo sapiens
  misc_RNA (1)...(19): siRNA sense strand
gcaacaagaagauaugacu

SEQ ID NO: 763169 - RNA, 19 nt, Homo sapiens
  misc_RNA (1)...(19): siRNA sense strand
ggccauaccgucugucaug

SEQ ID NO: 763170 - RNA, 19 nt, Homo sapiens
  misc_RNA (1)...(19): siRNA sense strand
gcauacggaccuucacaga

SEQ ID NO: 763171 - RNA, 19 nt, Homo sapiens
  misc_RNA (1)...(19): siRNA sense strand
caugugcugugucugcaaa

SEQ ID NO: 763172 - RNA, 19 nt, Homo sapiens
  misc_RNA (1)...(19): siRNA sense strand
aagcucaccuugccucugu

SEQ ID NO: 763173 - RNA, 19 nt, Homo sapiens
  misc_RNA (1)...(19): siRNA sense strand
gaaaucacugaacuacuca

SEQ ID NO: 763174 - RNA, 19 nt, Homo sapiens
  misc_RNA (1)...(19): siRNA sense strand
ggaaacauuauuaccucaa

SEQ ID NO: 763175 - RNA, 19 nt, Homo sapiens
  misc_RNA (1)...(19): siRNA sense strand
gcucaggcagcaacaagaa

SEQ ID NO: 763176 - RNA, 19 nt, Homo sapiens
  misc_RNA (1)...(19): siRNA sense strand
ggucacaagcauucaguau

SEQ ID NO: 763177 - RNA, 19 nt, Homo sapiens
  misc_RNA (1)...(19): siRNA sense strand
gagagcaucauucguugug

SEQ ID NO: 763178 - RNA, 19 nt, Homo sapiens
  misc_RNA (1)...(19): siRNA sense strand
gaugcucugcuccugauuu

SEQ ID NO: 763179 - RNA, 19 nt, Homo sapiens
  misc_RNA (1)...(19): siRNA sense strand
gaaguugcagaucacauuc

SEQ ID NO: 763180 - RNA, 19 nt, Homo sapiens
  misc_RNA (1)...(19): siRNA sense strand
gcagcaacaagaagauaug

SEQ ID NO: 763181 - RNA, 19 nt, Homo sapiens
  misc_RNA (1)...(19): siRNA sense strand
guaacagaccuaggugauu

SEQ ID NO: 763182 - RNA, 19 nt, Homo sapiens
  misc_RNA (1)...(19): siRNA sense strand
caaguuacucauucuacaa

SEQ ID NO: 763183 - RNA, 19 nt, Homo sapiens
  misc_RNA (1)...(19): siRNA sense strand
acaaagacauuagcaaagc

SEQ ID NO: 763184 - RNA, 19 nt, Homo sapiens
  misc_RNA (1)...(19): siRNA sense strand
gaauggcucacacagaaca

SEQ ID NO: 763185 - RNA, 19 nt, Homo sapiens
  misc_RNA (1)...(19): siRNA sense strand
ugaguuuguuugcuuggaa

SEQ ID NO: 763186 - RNA, 19 nt, Homo sapiens
  misc_RNA (1)...(19): siRNA sense strand
cugauaaaccucaugagaa

SEQ ID NO: 763187 - RNA, 19 nt, Homo sapiens
  misc_RNA (1)...(19): siRNA sense strand
aaauucgggucguuacguu

SEQ ID NO: 763188 - RNA, 19 nt, Homo sapiens
  misc_RNA (1)...(19): siRNA sense strand
cauagagacagaauuagug

SEQ ID NO: 763189 - RNA, 19 nt, Homo sapiens
  misc_RNA (1)...(19): siRNA sense strand
caagauggccuucuacaau

SEQ ID NO: 763190 - RNA, 19 nt, Homo sapiens
  misc_RNA (1)...(19): siRNA sense strand
augaagaucuugcgucuaa

SEQ ID NO: 763191 - RNA, 19 nt, Homo sapiens
  misc_RNA (1)...(19): siRNA sense strand
cgggaaaucuccacugaug

SEQ ID NO: 763192 - RNA, 19 nt, Homo sapiens
  misc_RNA (1)...(19): siRNA sense strand
gaagaucuugcgucuaaug

SEQ ID NO: 763193 - RNA, 19 nt, Homo sapiens
  misc_RNA (1)...(19): siRNA sense strand
gaacgagaaaccacaaugg

SEQ ID NO: 763194 - RNA, 19 nt, Homo sapiens
  misc_RNA (1)...(19): siRNA sense strand
aagauggccuucuacaaug

SEQ ID NO: 763195 - RNA, 19 nt, Homo sapiens
  misc_RNA (1)...(19): siRNA sense strand
gguggugacuaucugaaga

SEQ ID NO: 763196 - RNA, 19 nt, Homo sapiens
  misc_RNA (1)...(19): siRNA sense strand
caagacuucuacugcaaga

SEQ ID NO: 763197 - RNA, 19 nt, Homo sapiens
  misc_RNA (1)...(19): siRNA sense strand
ggaacgagaaaccacaaug

SEQ ID NO: 763198 - RNA, 19 nt, Homo sapiens
  misc_RNA (1)...(19): siRNA sense strand
ucgagaacaugaagaucuu

SEQ ID NO: 763199 - RNA, 19 nt, Homo sapiens
  misc_RNA (1)...(19): siRNA sense strand
gcuccaugcugcccuucaa

SEQ ID NO: 763200 - RNA, 19 nt, Homo sapiens
  misc_RNA (1)...(19): siRNA sense strand
ccauagucauguccuccua

SEQ ID NO: 763201 - RNA, 19 nt, Homo sapiens
  misc_RNA (1)...(19): siRNA sense strand
gaagggcugacaccagaug

SEQ ID NO: 763202 - RNA, 19 nt, Homo sapiens
  misc_RNA (1)...(19): siRNA sense strand
uaaugcugcuccacaucaa

SEQ ID NO: 763203 - RNA, 19 nt, Homo sapiens
  misc_RNA (1)...(19): siRNA sense strand
ucaagauggccuucuacaa

SEQ ID NO: 763204 - RNA, 19 nt, Homo sapiens
  misc_RNA (1)...(19): siRNA sense strand
ucgcagcccuauguuguug

SEQ ID NO: 763205 - RNA, 19 nt, Homo sapiens
  misc_RNA (1)...(19): siRNA sense strand
ccacaucaaauaccuguac

SEQ ID NO: 763206 - RNA, 19 nt, Homo sapiens
  misc_RNA (1)...(19): siRNA sense strand
cguggcgccuuccaucuug

SEQ ID NO: 763207 - RNA, 19 nt, Homo sapiens
  misc_RNA (1)...(19): siRNA sense strand
uccgggaaaucuccacuga

SEQ ID NO: 763208 - RNA, 19 nt, Homo sapiens
  misc_RNA (1)...(19): siRNA sense strand
caacgucgagaacaugaag

SEQ ID NO: 763209 - RNA, 19 nt, Homo sapiens
  misc_RNA (1)...(19): siRNA sense strand
gugagggucuggguguuuc

SEQ ID NO: 763210 - RNA, 19 nt, Homo sapiens
  misc_RNA (1)...(19): siRNA sense strand
gcagcccuauguuguuguc

SEQ ID NO: 763211 - RNA, 19 nt, Homo sapiens
  misc_RNA (1)...(19): siRNA sense strand
cuaaugcugcuccacauca

SEQ ID NO: 763212 - RNA, 19 nt, Homo sapiens
  misc_RNA (1)...(19): siRNA sense strand
ggcacuccaugcucacugu

SEQ ID NO: 763213 - RNA, 19 nt, Homo sapiens
  misc_RNA (1)...(19): siRNA sense strand
ccucgcagcccuauguugu

SEQ ID NO: 763214 - RNA, 19 nt, Homo sapiens
  misc_RNA (1)...(19): siRNA sense strand
ccuauguuguugucuccaa

SEQ ID NO: 763215 - RNA, 19 nt, Homo sapiens
  misc_RNA (1)...(19): siRNA sense strand
gccaagcgcgagcuacugu

SEQ ID NO: 763216 - RNA, 19 nt, Homo sapiens
  misc_RNA (1)...(19): siRNA sense strand
gcaacgucgagaacaugaa

SEQ ID NO: 763217 - RNA, 19 nt, Homo sapiens
  misc_RNA (1)...(19): siRNA sense strand
accaagacuucuacugcaa

SEQ ID NO: 763218 - RNA, 19 nt, Homo sapiens
  misc_RNA (1)...(19): siRNA sense strand
caggagucaucuucaucga

SEQ ID NO: 763219 - RNA, 19 nt, Homo sapiens
  misc_RNA (1)...(19): siRNA sense strand
uggcaggagucaucuucau

SEQ ID NO: 763220 - RNA, 19 nt, Homo sapiens
  misc_RNA (1)...(19): siRNA sense strand
gcuggcaggagucaucuuc

SEQ ID NO: 763221 - RNA, 19 nt, Homo sapiens
  misc_RNA (1)...(19): siRNA sense strand
caagauggccuucuacaau

SEQ ID NO: 763222 - RNA, 19 nt, Homo sapiens
  misc_RNA (1)...(19): siRNA sense strand
augaagaucuugcgucuaa

SEQ ID NO: 763223 - RNA, 19 nt, Homo sapiens
  misc_RNA (1)...(19): siRNA sense strand
cgggaaaucuccacugaug

SEQ ID NO: 763224 - RNA, 19 nt, Homo sapiens
  misc_RNA (1)...(19): siRNA sense strand
gaagaucuugcgucuaaug

SEQ ID NO: 763225 - RNA, 19 nt, Homo sapiens
  misc_RNA (1)...(19): siRNA sense strand
gaacgagaaaccacaaugg

SEQ ID NO: 763226 - RNA, 19 nt, Homo sapiens
  misc_RNA (1)...(19): siRNA sense strand
aagauggccuucuacaaug

SEQ ID NO: 763227 - RNA, 19 nt, Homo sapiens
  misc_RNA (1)...(19): siRNA sense strand
gguggugacuaucugaaga

SEQ ID NO: 763228 - RNA, 19 nt, Homo sapiens
  misc_RNA (1)...(19): siRNA sense strand
caagacuucuacugcaaga

SEQ ID NO: 763229 - RNA, 19 nt, Homo sapiens
  misc_RNA (1)...(19): siRNA sense strand
ggaacgagaaaccacaaug

SEQ ID NO: 763230 - RNA, 19 nt, Homo sapiens
  misc_RNA (1)...(19): siRNA sense strand
ucgagaacaugaagaucuu

SEQ ID NO: 763231 - RNA, 19 nt, Homo sapiens
  misc_RNA (1)...(19): siRNA sense strand
gcuccaugcugcccuucaa

SEQ ID NO: 763232 - RNA, 19 nt, Homo sapiens
  misc_RNA (1)...(19): siRNA sense strand
ccauagucauguccuccua

SEQ ID NO: 763233 - RNA, 19 nt, Homo sapiens
  misc_RNA (1)...(19): siRNA sense strand
gaagggcugacaccagaug

SEQ ID NO: 763234 - RNA, 19 nt, Homo sapiens
  misc_RNA (1)...(19): siRNA sense strand
uaaugcugcuccacaucaa

SEQ ID NO: 763235 - RNA, 19 nt, Homo sapiens
  misc_RNA (1)...(19): siRNA sense strand
ucaagauggccuucuacaa

SEQ ID NO: 763236 - RNA, 19 nt, Homo sapiens
  misc_RNA (1)...(19): siRNA sense strand
ucgcagcccuauguuguug

SEQ ID NO: 763237 - RNA, 19 nt, Homo sapiens
  misc_RNA (1)...(19): siRNA sense strand
ccacaucaaauaccuguac

SEQ ID NO: 763238 - RNA, 19 nt, Homo sapiens
  misc_RNA (1)...(19): siRNA sense strand
cguggcgccuuccaucuug

SEQ ID NO: 763239 - RNA, 19 nt, Homo sapiens
  misc_RNA (1)...(19): siRNA sense strand
uccgggaaaucuccacuga

SEQ ID NO: 763240 - RNA, 19 nt, Homo sapiens
  misc_RNA (1)...(19): siRNA sense strand
caacgucgagaacaugaag

SEQ ID NO: 763241 - RNA, 19 nt, Homo sapiens
  misc_RNA (1)...(19): siRNA sense strand
gugagggucuggguguuuc

SEQ ID NO: 763242 - RNA, 19 nt, Homo sapiens
  misc_RNA (1)...(19): siRNA sense strand
gcagcccuauguuguuguc

SEQ ID NO: 763243 - RNA, 19 nt, Homo sapiens
  misc_RNA (1)...(19): siRNA sense strand
cuaaugcugcuccacauca

SEQ ID NO: 763244 - RNA, 19 nt, Homo sapiens
  misc_RNA (1)...(19): siRNA sense strand
ggcacuccaugcucacugu

SEQ ID NO: 763245 - RNA, 19 nt, Homo sapiens
  misc_RNA (1)...(19): siRNA sense strand
ccucgcagcccuauguugu

SEQ ID NO: 763246 - RNA, 19 nt, Homo sapiens
  misc_RNA (1)...(19): siRNA sense strand
ccuauguuguugucuccaa

SEQ ID NO: 763247 - RNA, 19 nt, Homo sapiens
  misc_RNA (1)...(19): siRNA sense strand
gccaagcgcgagcuacugu

SEQ ID NO: 763248 - RNA, 19 nt, Homo sapiens
  misc_RNA (1)...(19): siRNA sense strand
gcaacgucgagaacaugaa

SEQ ID NO: 763249 - RNA, 19 nt, Homo sapiens
  misc_RNA (1)...(19): siRNA sense strand
accaagacuucuacugcaa

SEQ ID NO: 763250 - RNA, 19 nt, Homo sapiens
  misc_RNA (1)...(19): siRNA sense strand
caggagucaucuucaucga

SEQ ID NO: 763251 - RNA, 19 nt, Homo sapiens
  misc_RNA (1)...(19): siRNA sense strand
uggcaggagucaucuucau

SEQ ID NO: 763252 - RNA, 19 nt, Homo sapiens
  misc_RNA (1)...(19): siRNA sense strand
gcuggcaggagucaucuuc

SEQ ID NO: 763253 - RNA, 19 nt, Homo sapiens
  misc_RNA (1)...(19): siRNA sense strand
gaccucagcucuugcauca

SEQ ID NO: 763254 - RNA, 19 nt, Homo sapiens
  misc_RNA (1)...(19): siRNA sense strand
ggagcaggauagugccuuu

SEQ ID NO: 763255 - RNA, 19 nt, Homo sapiens
  misc_RNA (1)...(19): siRNA sense strand
ggaggaggaguuccaguuu

SEQ ID NO: 763256 - RNA, 19 nt, Homo sapiens
  misc_RNA (1)...(19): siRNA sense strand
gaggaggaguuccaguuuc

SEQ ID NO: 763257 - RNA, 19 nt, Homo sapiens
  misc_RNA (1)...(19): siRNA sense strand
ggaaagaugcagcuguauc

SEQ ID NO: 763258 - RNA, 19 nt, Homo sapiens
  misc_RNA (1)...(19): siRNA sense strand
gagcucaagugcgacauca

SEQ ID NO: 763259 - RNA, 19 nt, Homo sapiens
  misc_RNA (1)...(19): siRNA sense strand
gcagcuguauccaagaaag

SEQ ID NO: 763260 - RNA, 19 nt, Homo sapiens
  misc_RNA (1)...(19): siRNA sense strand
ggggaaagaugcagcugua

SEQ ID NO: 763261 - RNA, 19 nt, Homo sapiens
  misc_RNA (1)...(19): siRNA sense strand
gaaagaugcagcuguaucc

SEQ ID NO: 763262 - RNA, 19 nt, Homo sapiens
  misc_RNA (1)...(19): siRNA sense strand
cgaagcugcugccuugucu

SEQ ID NO: 763263 - RNA, 19 nt, Homo sapiens
  misc_RNA (1)...(19): siRNA sense strand
ugcagaggaugaagugcua

SEQ ID NO: 763264 - RNA, 19 nt, Homo sapiens
  misc_RNA (1)...(19): siRNA sense strand
cgacaucagcgcagagauc

SEQ ID NO: 763265 - RNA, 19 nt, Homo sapiens
  misc_RNA (1)...(19): siRNA sense strand
gggacccuauugacguuga

SEQ ID NO: 763266 - RNA, 19 nt, Homo sapiens
  misc_RNA (1)...(19): siRNA sense strand
ugcaggaccucagcucuug

SEQ ID NO: 763267 - RNA, 19 nt, Homo sapiens
  misc_RNA (1)...(19): siRNA sense strand
cgcccuggauaacgucuuu

SEQ ID NO: 763268 - RNA, 19 nt, Homo sapiens
  misc_RNA (1)...(19): siRNA sense strand
gccgacuucuggugcuuug

SEQ ID NO: 763269 - RNA, 19 nt, Homo sapiens
  misc_RNA (1)...(19): siRNA sense strand
gcgcuggugcagaggauga

SEQ ID NO: 763270 - RNA, 19 nt, Homo sapiens
  misc_RNA (1)...(19): siRNA sense strand
cggaggaggaguuccaguu

SEQ ID NO: 763271 - RNA, 19 nt, Homo sapiens
  misc_RNA (1)...(19): siRNA sense strand
ccgauggcuucgacgaguu

SEQ ID NO: 763272 - RNA, 19 nt, Homo sapiens
  misc_RNA (1)...(19): siRNA sense strand
aggaggaguuccaguuucu

SEQ ID NO: 763273 - RNA, 19 nt, Homo sapiens
  misc_RNA (1)...(19): siRNA sense strand
augcagcuguauccaagaa

SEQ ID NO: 763274 - RNA, 19 nt, Homo sapiens
  misc_RNA (1)...(19): siRNA sense strand
gguaccagcgcgacuacga

SEQ ID NO: 763275 - RNA, 19 nt, Homo sapiens
  misc_RNA (1)...(19): siRNA sense strand
gaccucagcucuugcauca

SEQ ID NO: 763276 - RNA, 19 nt, Homo sapiens
  misc_RNA (1)...(19): siRNA sense strand
ggagcaggauagugccuuu

SEQ ID NO: 763277 - RNA, 19 nt, Homo sapiens
  misc_RNA (1)...(19): siRNA sense strand
ggaggaggaguuccaguuu

SEQ ID NO: 763278 - RNA, 19 nt, Homo sapiens
  misc_RNA (1)...(19): siRNA sense strand
gaggaggaguuccaguuuc

SEQ ID NO: 763279 - RNA, 19 nt, Homo sapiens
  misc_RNA (1)...(19): siRNA sense strand
ggaaagaugcagcuguauc

SEQ ID NO: 763280 - RNA, 19 nt, Homo sapiens
  misc_RNA (1)...(19): siRNA sense strand
gagcucaagugcgacauca

SEQ ID NO: 763281 - RNA, 19 nt, Homo sapiens
  misc_RNA (1)...(19): siRNA sense strand
gcagcuguauccaagaaag

SEQ ID NO: 763282 - RNA, 19 nt, Homo sapiens
  misc_RNA (1)...(19): siRNA sense strand
ggggaaagaugcagcugua

SEQ ID NO: 763283 - RNA, 19 nt, Homo sapiens
  misc_RNA (1)...(19): siRNA sense strand
gaaagaugcagcuguaucc

SEQ ID NO: 763284 - RNA, 19 nt, Homo sapiens
  misc_RNA (1)...(19): siRNA sense strand
cgaagcugcugccuugucu

SEQ ID NO: 763285 - RNA, 19 nt, Homo sapiens
  misc_RNA (1)...(19): siRNA sense strand
ugcagaggaugaagugcua

SEQ ID NO: 763286 - RNA, 19 nt, Homo sapiens
  misc_RNA (1)...(19): siRNA sense strand
cgacaucagcgcagagauc

SEQ ID NO: 763287 - RNA, 19 nt, Homo sapiens
  misc_RNA (1)...(19): siRNA sense strand
gggacccuauugacguuga

SEQ ID NO: 763288 - RNA, 19 nt, Homo sapiens
  misc_RNA (1)...(19): siRNA sense strand
ugcaggaccucagcucuug

SEQ ID NO: 763289 - RNA, 19 nt, Homo sapiens
  misc_RNA (1)...(19): siRNA sense strand
cgcccuggauaacgucuuu

SEQ ID NO: 763290 - RNA, 19 nt, Homo sapiens
  misc_RNA (1)...(19): siRNA sense strand
gccgacuucuggugcuuug

SEQ ID NO: 763291 - RNA, 19 nt, Homo sapiens
  misc_RNA (1)...(19): siRNA sense strand
gcgcuggugcagaggauga

SEQ ID NO: 763292 - RNA, 19 nt, Homo sapiens
  misc_RNA (1)...(19): siRNA sense strand
cggaggaggaguuccaguu

SEQ ID NO: 763293 - RNA, 19 nt, Homo sapiens
  misc_RNA (1)...(19): siRNA sense strand
ccgauggcuucgacgaguu

SEQ ID NO: 763294 - RNA, 19 nt, Homo sapiens
  misc_RNA (1)...(19): siRNA sense strand
aggaggaguuccaguuucu

SEQ ID NO: 763295 - RNA, 19 nt, Homo sapiens
  misc_RNA (1)...(19): siRNA sense strand
augcagcuguauccaagaa

SEQ ID NO: 763296 - RNA, 19 nt, Homo sapiens
  misc_RNA (1)...(19): siRNA sense strand
gguaccagcgcgacuacga

SEQ ID NO: 763297 - RNA, 19 nt, Homo sapiens
  misc_RNA (1)...(19): siRNA sense strand
gaccucagcucuugcauca

SEQ ID NO: 763298 - RNA, 19 nt, Homo sapiens
  misc_RNA (1)...(19): siRNA sense strand
ggagcaggauagugccuuu

SEQ ID NO: 763299 - RNA, 19 nt, Homo sapiens
  misc_RNA (1)...(19): siRNA sense strand
ggaggaggaguuccaguuu

SEQ ID NO: 763300 - RNA, 19 nt, Homo sapiens
  misc_RNA (1)...(19): siRNA sense strand
gaggaggaguuccaguuuc

SEQ ID NO: 763301 - RNA, 19 nt, Homo sapiens
  misc_RNA (1)...(19): siRNA sense strand
ggaaagaugcagcuguauc

SEQ ID NO: 763302 - RNA, 19 nt, Homo sapiens
  misc_RNA (1)...(19): siRNA sense strand
gagcucaagugcgacauca

SEQ ID NO: 763303 - RNA, 19 nt, Homo sapiens
  misc_RNA (1)...(19): siRNA sense strand
gcagcuguauccaagaaag

SEQ ID NO: 763304 - RNA, 19 nt, Homo sapiens
  misc_RNA (1)...(19): siRNA sense strand
ggggaaagaugcagcugua

SEQ ID NO: 763305 - RNA, 19 nt, Homo sapiens
  misc_RNA (1)...(19): siRNA sense strand
gaaagaugcagcuguaucc

SEQ ID NO: 763306 - RNA, 19 nt, Homo sapiens
  misc_RNA (1)...(19): siRNA sense strand
cgaagcugcugccuugucu

SEQ ID NO: 763307 - RNA, 19 nt, Homo sapiens
  misc_RNA (1)...(19): siRNA sense strand
ugcagaggaugaagugcua

SEQ ID NO: 763308 - RNA, 19 nt, Homo sapiens
  misc_RNA (1)...(19): siRNA sense strand
cgacaucagcgcagagauc

SEQ ID NO: 763309 - RNA, 19 nt, Homo sapiens
  misc_RNA (1)...(19): siRNA sense strand
gggacccuauugacguuga

SEQ ID NO: 763310 - RNA, 19 nt, Homo sapiens
  misc_RNA (1)...(19): siRNA sense strand
ugcaggaccucagcucuug

SEQ ID NO: 763311 - RNA, 19 nt, Homo sapiens
  misc_RNA (1)...(19): siRNA sense strand
cgcccuggauaacgucuuu

SEQ ID NO: 763312 - RNA, 19 nt, Homo sapiens
  misc_RNA (1)...(19): siRNA sense strand
gccgacuucuggugcuuug

SEQ ID NO: 763313 - RNA, 19 nt, Homo sapiens
  misc_RNA (1)...(19): siRNA sense strand
gcgcuggugcagaggauga

SEQ ID NO: 763314 - RNA, 19 nt, Homo sapiens
  misc_RNA (1)...(19): siRNA sense strand
cggaggaggaguuccaguu

SEQ ID NO: 763315 - RNA, 19 nt, Homo sapiens
  misc_RNA (1)...(19): siRNA sense strand
ccgauggcuucgacgaguu

SEQ ID NO: 763316 - RNA, 19 nt, Homo sapiens
  misc_RNA (1)...(19): siRNA sense strand
aggaggaguuccaguuucu

SEQ ID NO: 763317 - RNA, 19 nt, Homo sapiens
  misc_RNA (1)...(19): siRNA sense strand
augcagcuguauccaagaa

SEQ ID NO: 763318 - RNA, 19 nt, Homo sapiens
  misc_RNA (1)...(19): siRNA sense strand
gguaccagcgcgacuacga

SEQ ID NO: 763319 - RNA, 19 nt, Homo sapiens
  misc_RNA (1)...(19): siRNA sense strand
gaccucagcucuugcauca

SEQ ID NO: 763320 - RNA, 19 nt, Homo sapiens
  misc_RNA (1)...(19): siRNA sense strand
ggagcaggauagugccuuu

SEQ ID NO: 763321 - RNA, 19 nt, Homo sapiens
  misc_RNA (1)...(19): siRNA sense strand
ggaggaggaguuccaguuu

SEQ ID NO: 763322 - RNA, 19 nt, Homo sapiens
  misc_RNA (1)...(19): siRNA sense strand
gaggaggaguuccaguuuc

SEQ ID NO: 763323 - RNA, 19 nt, Homo sapiens
  misc_RNA (1)...(19): siRNA sense strand
ggaaagaugcagcuguauc

SEQ ID NO: 763324 - RNA, 19 nt, Homo sapiens
  misc_RNA (1)...(19): siRNA sense strand
gagcucaagugcgacauca

SEQ ID NO: 763325 - RNA, 19 nt, Homo sapiens
  misc_RNA (1)...(19): siRNA sense strand
gcagcuguauccaagaaag

SEQ ID NO: 763326 - RNA, 19 nt, Homo sapiens
  misc_RNA (1)...(19): siRNA sense strand
ggggaaagaugcagcugua

SEQ ID NO: 763327 - RNA, 19 nt, Homo sapiens
  misc_RNA (1)...(19): siRNA sense strand
gaaagaugcagcuguaucc

SEQ ID NO: 763328 - RNA, 19 nt, Homo sapiens
  misc_RNA (1)...(19): siRNA sense strand
cgaagcugcugccuugucu

SEQ ID NO: 763329 - RNA, 19 nt, Homo sapiens
  misc_RNA (1)...(19): siRNA sense strand
ugcagaggaugaagugcua

SEQ ID NO: 763330 - RNA, 19 nt, Homo sapiens
  misc_RNA (1)...(19): siRNA sense strand
cgacaucagcgcagagauc

SEQ ID NO: 763331 - RNA, 19 nt, Homo sapiens
  misc_RNA (1)...(19): siRNA sense strand
gggacccuauugacguuga

SEQ ID NO: 763332 - RNA, 19 nt, Homo sapiens
  misc_RNA (1)...(19): siRNA sense strand
ugcaggaccucagcucuug

SEQ ID NO: 763333 - RNA, 19 nt, Homo sapiens
  misc_RNA (1)...(19): siRNA sense strand
cgcccuggauaacgucuuu

SEQ ID NO: 763334 - RNA, 19 nt, Homo sapiens
  misc_RNA (1)...(19): siRNA sense strand
gccgacuucuggugcuuug

SEQ ID NO: 763335 - RNA, 19 nt, Homo sapiens
  misc_RNA (1)...(19): siRNA sense strand
gcgcuggugcagaggauga

SEQ ID NO: 763336 - RNA, 19 nt, Homo sapiens
  misc_RNA (1)...(19): siRNA sense strand
cggaggaggaguuccaguu

SEQ ID NO: 763337 - RNA, 19 nt, Homo sapiens
  misc_RNA (1)...(19): siRNA sense strand
ccgauggcuucgacgaguu

SEQ ID NO: 763338 - RNA, 19 nt, Homo sapiens
  misc_RNA (1)...(19): siRNA sense strand
aggaggaguuccaguuucu

SEQ ID NO: 763339 - RNA, 19 nt, Homo sapiens
  misc_RNA (1)...(19): siRNA sense strand
augcagcuguauccaagaa

SEQ ID NO: 763340 - RNA, 19 nt, Homo sapiens
  misc_RNA (1)...(19): siRNA sense strand
gguaccagcgcgacuacga

SEQ ID NO: 763341 - RNA, 19 nt, Homo sapiens
  misc_RNA (1)...(19): siRNA sense strand
gaccucagcucuugcauca

SEQ ID NO: 763342 - RNA, 19 nt, Homo sapiens
  misc_RNA (1)...(19): siRNA sense strand
ggagcaggauagugccuuu

SEQ ID NO: 763343 - RNA, 19 nt, Homo sapiens
  misc_RNA (1)...(19): siRNA sense strand
ggaggaggaguuccaguuu

SEQ ID NO: 763344 - RNA, 19 nt, Homo sapiens
  misc_RNA (1)...(19): siRNA sense strand
gaggaggaguuccaguuuc

SEQ ID NO: 763345 - RNA, 19 nt, Homo sapiens
  misc_RNA (1)...(19): siRNA sense strand
ggaaagaugcagcuguauc

SEQ ID NO: 763346 - RNA, 19 nt, Homo sapiens
  misc_RNA (1)...(19): siRNA sense strand
gagcucaagugcgacauca

SEQ ID NO: 763347 - RNA, 19 nt, Homo sapiens
  misc_RNA (1)...(19): siRNA sense strand
gcagcuguauccaagaaag

SEQ ID NO: 763348 - RNA, 19 nt, Homo sapiens
  misc_RNA (1)...(19): siRNA sense strand
ggggaaagaugcagcugua

SEQ ID NO: 763349 - RNA, 19 nt, Homo sapiens
  misc_RNA (1)...(19): siRNA sense strand
gaaagaugcagcuguaucc

SEQ ID NO: 763350 - RNA, 19 nt, Homo sapiens
  misc_RNA (1)...(19): siRNA sense strand
cgaagcugcugccuugucu

SEQ ID NO: 763351 - RNA, 19 nt, Homo sapiens
  misc_RNA (1)...(19): siRNA sense strand
ugcagaggaugaagugcua

SEQ ID NO: 763352 - RNA, 19 nt, Homo sapiens
  misc_RNA (1)...(19): siRNA sense strand
cgacaucagcgcagagauc

SEQ ID NO: 763353 - RNA, 19 nt, Homo sapiens
  misc_RNA (1)...(19): siRNA sense strand
gggacccuauugacguuga

SEQ ID NO: 763354 - RNA, 19 nt, Homo sapiens
  misc_RNA (1)...(19): siRNA sense strand
ugcaggaccucagcucuug

SEQ ID NO: 763355 - RNA, 19 nt, Homo sapiens
  misc_RNA (1)...(19): siRNA sense strand
cgcccuggauaacgucuuu

SEQ ID NO: 763356 - RNA, 19 nt, Homo sapiens
  misc_RNA (1)...(19): siRNA sense strand
gccgacuucuggugcuuug

SEQ ID NO: 763357 - RNA, 19 nt, Homo sapiens
  misc_RNA (1)...(19): siRNA sense strand
gcgcuggugcagaggauga

SEQ ID NO: 763358 - RNA, 19 nt, Homo sapiens
  misc_RNA (1)...(19): siRNA sense strand
cggaggaggaguuccaguu

SEQ ID NO: 763359 - RNA, 19 nt, Homo sapiens
  misc_RNA (1)...(19): siRNA sense strand
ccgauggcuucgacgaguu

SEQ ID NO: 763360 - RNA, 19 nt, Homo sapiens
  misc_RNA (1)...(19): siRNA sense strand
aggaggaguuccaguuucu

SEQ ID NO: 763361 - RNA, 19 nt, Homo sapiens
  misc_RNA (1)...(19): siRNA sense strand
augcagcuguauccaagaa

SEQ ID NO: 763362 - RNA, 19 nt, Homo sapiens
  misc_RNA (1)...(19): siRNA sense strand
gguaccagcgcgacuacga

SEQ ID NO: 763363 - RNA, 19 nt, Homo sapiens
  misc_RNA (1)...(19): siRNA sense strand
gaccucagcucuugcauca

SEQ ID NO: 763364 - RNA, 19 nt, Homo sapiens
  misc_RNA (1)...(19): siRNA sense strand
ggagcaggauagugccuuu

SEQ ID NO: 763365 - RNA, 19 nt, Homo sapiens
  misc_RNA (1)...(19): siRNA sense strand
ggaggaggaguuccaguuu

SEQ ID NO: 763366 - RNA, 19 nt, Homo sapiens
  misc_RNA (1)...(19): siRNA sense strand
gaggaggaguuccaguuuc

SEQ ID NO: 763367 - RNA, 19 nt, Homo sapiens
  misc_RNA (1)...(19): siRNA sense strand
ggaaagaugcagcuguauc

SEQ ID NO: 763368 - RNA, 19 nt, Homo sapiens
  misc_RNA (1)...(19): siRNA sense strand
gagcucaagugcgacauca

SEQ ID NO: 763369 - RNA, 19 nt, Homo sapiens
  misc_RNA (1)...(19): siRNA sense strand
gcagcuguauccaagaaag

SEQ ID NO: 763370 - RNA, 19 nt, Homo sapiens
  misc_RNA (1)...(19): siRNA sense strand
ggggaaagaugcagcugua

SEQ ID NO: 763371 - RNA, 19 nt, Homo sapiens
  misc_RNA (1)...(19): siRNA sense strand
gaaagaugcagcuguaucc

SEQ ID NO: 763372 - RNA, 19 nt, Homo sapiens
  misc_RNA (1)...(19): siRNA sense strand
cgaagcugcugccuugucu

SEQ ID NO: 763373 - RNA, 19 nt, Homo sapiens
  misc_RNA (1)...(19): siRNA sense strand
ugcagaggaugaagugcua

SEQ ID NO: 763374 - RNA, 19 nt, Homo sapiens
  misc_RNA (1)...(19): siRNA sense strand
cgacaucagcgcagagauc

SEQ ID NO: 763375 - RNA, 19 nt, Homo sapiens
  misc_RNA (1)...(19): siRNA sense strand
gggacccuauugacguuga

SEQ ID NO: 763376 - RNA, 19 nt, Homo sapiens
  misc_RNA (1)...(19): siRNA sense strand
ugcaggaccucagcucuug

SEQ ID NO: 763377 - RNA, 19 nt, Homo sapiens
  misc_RNA (1)...(19): siRNA sense strand
cgcccuggauaacgucuuu

SEQ ID NO: 763378 - RNA, 19 nt, Homo sapiens
  misc_RNA (1)...(19): siRNA sense strand
gccgacuucuggugcuuug

SEQ ID NO: 763379 - RNA, 19 nt, Homo sapiens
  misc_RNA (1)...(19): siRNA sense strand
gcgcuggugcagaggauga

SEQ ID NO: 763380 - RNA, 19 nt, Homo sapiens
  misc_RNA (1)...(19): siRNA sense strand
cggaggaggaguuccaguu

SEQ ID NO: 763381 - RNA, 19 nt, Homo sapiens
  misc_RNA (1)...(19): siRNA sense strand
ccgauggcuucgacgaguu

SEQ ID NO: 763382 - RNA, 19 nt, Homo sapiens
  misc_RNA (1)...(19): siRNA sense strand
aggaggaguuccaguuucu

SEQ ID NO: 763383 - RNA, 19 nt, Homo sapiens
  misc_RNA (1)...(19): siRNA sense strand
augcagcuguauccaagaa

SEQ ID NO: 763384 - RNA, 19 nt, Homo sapiens
  misc_RNA (1)...(19): siRNA sense strand
gguaccagcgcgacuacga

SEQ ID NO: 763385 - RNA, 19 nt, Homo sapiens
  misc_RNA (1)...(19): siRNA sense strand
gaccucagcucuugcauca

SEQ ID NO: 763386 - RNA, 19 nt, Homo sapiens
  misc_RNA (1)...(19): siRNA sense strand
ggagcaggauagugccuuu

SEQ ID NO: 763387 - RNA, 19 nt, Homo sapiens
  misc_RNA (1)...(19): siRNA sense strand
ggaggaggaguuccaguuu

SEQ ID NO: 763388 - RNA, 19 nt, Homo sapiens
  misc_RNA (1)...(19): siRNA sense strand
gaggaggaguuccaguuuc

SEQ ID NO: 763389 - RNA, 19 nt, Homo sapiens
  misc_RNA (1)...(19): siRNA sense strand
ggaaagaugcagcuguauc

SEQ ID NO: 763390 - RNA, 19 nt, Homo sapiens
  misc_RNA (1)...(19): siRNA sense strand
gagcucaagugcgacauca

SEQ ID NO: 763391 - RNA, 19 nt, Homo sapiens
  misc_RNA (1)...(19): siRNA sense strand
gcagcuguauccaagaaag

SEQ ID NO: 763392 - RNA, 19 nt, Homo sapiens
  misc_RNA (1)...(19): siRNA sense strand
ggggaaagaugcagcugua

SEQ ID NO: 763393 - RNA, 19 nt, Homo sapiens
  misc_RNA (1)...(19): siRNA sense strand
gaaagaugcagcuguaucc

SEQ ID NO: 763394 - RNA, 19 nt, Homo sapiens
  misc_RNA (1)...(19): siRNA sense strand
cgaagcugcugccuugucu

SEQ ID NO: 763395 - RNA, 19 nt, Homo sapiens
  misc_RNA (1)...(19): siRNA sense strand
ugcagaggaugaagugcua

SEQ ID NO: 763396 - RNA, 19 nt, Homo sapiens
  misc_RNA (1)...(19): siRNA sense strand
cgacaucagcgcagagauc

SEQ ID NO: 763397 - RNA, 19 nt, Homo sapiens
  misc_RNA (1)...(19): siRNA sense strand
gggacccuauugacguuga

SEQ ID NO: 763398 - RNA, 19 nt, Homo sapiens
  misc_RNA (1)...(19): siRNA sense strand
ugcaggaccucagcucuug

SEQ ID NO: 763399 - RNA, 19 nt, Homo sapiens
  misc_RNA (1)...(19): siRNA sense strand
cgcccuggauaacgucuuu

SEQ ID NO: 763400 - RNA, 19 nt, Homo sapiens
  misc_RNA (1)...(19): siRNA sense strand
gccgacuucuggugcuuug

SEQ ID NO: 763401 - RNA, 19 nt, Homo sapiens
  misc_RNA (1)...(19): siRNA sense strand
gcgcuggugcagaggauga

SEQ ID NO: 763402 - RNA, 19 nt, Homo sapiens
  misc_RNA (1)...(19): siRNA sense strand
cggaggaggaguuccaguu

SEQ ID NO: 763403 - RNA, 19 nt, Homo sapiens
  misc_RNA (1)...(19): siRNA sense strand
ccgauggcuucgacgaguu

SEQ ID NO: 763404 - RNA, 19 nt, Homo sapiens
  misc_RNA (1)...(19): siRNA sense strand
aggaggaguuccaguuucu

SEQ ID NO: 763405 - RNA, 19 nt, Homo sapiens
  misc_RNA (1)...(19): siRNA sense strand
augcagcuguauccaagaa

SEQ ID NO: 763406 - RNA, 19 nt, Homo sapiens
  misc_RNA (1)...(19): siRNA sense strand
gguaccagcgcgacuacga

SEQ ID NO: 763407 - RNA, 19 nt, Homo sapiens
  misc_RNA (1)...(19): siRNA sense strand
gaccucagcucuugcauca

SEQ ID NO: 763408 - RNA, 19 nt, Homo sapiens
  misc_RNA (1)...(19): siRNA sense strand
ggagcaggauagugccuuu

SEQ ID NO: 763409 - RNA, 19 nt, Homo sapiens
  misc_RNA (1)...(19): siRNA sense strand
ggaggaggaguuccaguuu

SEQ ID NO: 763410 - RNA, 19 nt, Homo sapiens
  misc_RNA (1)...(19): siRNA sense strand
gaggaggaguuccaguuuc

SEQ ID NO: 763411 - RNA, 19 nt, Homo sapiens
  misc_RNA (1)...(19): siRNA sense strand
ggaaagaugcagcuguauc

SEQ ID NO: 763412 - RNA, 19 nt, Homo sapiens
  misc_RNA (1)...(19): siRNA sense strand
gagcucaagugcgacauca

SEQ ID NO: 763413 - RNA, 19 nt, Homo sapiens
  misc_RNA (1)...(19): siRNA sense strand
gcagcuguauccaagaaag

SEQ ID NO: 763414 - RNA, 19 nt, Homo sapiens
  misc_RNA (1)...(19): siRNA sense strand
ggggaaagaugcagcugua

SEQ ID NO: 763415 - RNA, 19 nt, Homo sapiens
  misc_RNA (1)...(19): siRNA sense strand
gaaagaugcagcuguaucc

SEQ ID NO: 763416 - RNA, 19 nt, Homo sapiens
  misc_RNA (1)...(19): siRNA sense strand
cgaagcugcugccuugucu

SEQ ID NO: 763417 - RNA, 19 nt, Homo sapiens
  misc_RNA (1)...(19): siRNA sense strand
ugcagaggaugaagugcua

SEQ ID NO: 763418 - RNA, 19 nt, Homo sapiens
  misc_RNA (1)...(19): siRNA sense strand
cgacaucagcgcagagauc

SEQ ID NO: 763419 - RNA, 19 nt, Homo sapiens
  misc_RNA (1)...(19): siRNA sense strand
gggacccuauugacguuga

SEQ ID NO: 763420 - RNA, 19 nt, Homo sapiens
  misc_RNA (1)...(19): siRNA sense strand
ugcaggaccucagcucuug

SEQ ID NO: 763421 - RNA, 19 nt, Homo sapiens
  misc_RNA (1)...(19): siRNA sense strand
cgcccuggauaacgucuuu

SEQ ID NO: 763422 - RNA, 19 nt, Homo sapiens
  misc_RNA (1)...(19): siRNA sense strand
gccgacuucuggugcuuug

SEQ ID NO: 763423 - RNA, 19 nt, Homo sapiens
  misc_RNA (1)...(19): siRNA sense strand
gcgcuggugcagaggauga

SEQ ID NO: 763424 - RNA, 19 nt, Homo sapiens
  misc_RNA (1)...(19): siRNA sense strand
cggaggaggaguuccaguu

SEQ ID NO: 763425 - RNA, 19 nt, Homo sapiens
  misc_RNA (1)...(19): siRNA sense strand
ccgauggcuucgacgaguu

SEQ ID NO: 763426 - RNA, 19 nt, Homo sapiens
  misc_RNA (1)...(19): siRNA sense strand
aggaggaguuccaguuucu

SEQ ID NO: 763427 - RNA, 19 nt, Homo sapiens
  misc_RNA (1)...(19): siRNA sense strand
augcagcuguauccaagaa

SEQ ID NO: 763428 - RNA, 19 nt, Homo sapiens
  misc_RNA (1)...(19): siRNA sense strand
gguaccagcgcgacuacga

SEQ ID NO: 763429 - RNA, 19 nt, Homo sapiens
  misc_RNA (1)...(19): siRNA sense strand
gaccucagcucuugcauca

SEQ ID NO: 763430 - RNA, 19 nt, Homo sapiens
  misc_RNA (1)...(19): siRNA sense strand
ggagcaggauagugccuuu

SEQ ID NO: 763431 - RNA, 19 nt, Homo sapiens
  misc_RNA (1)...(19): siRNA sense strand
ggaggaggaguuccaguuu

SEQ ID NO: 763432 - RNA, 19 nt, Homo sapiens
  misc_RNA (1)...(19): siRNA sense strand
gaggaggaguuccaguuuc

SEQ ID NO: 763433 - RNA, 19 nt, Homo sapiens
  misc_RNA (1)...(19): siRNA sense strand
ggaaagaugcagcuguauc

SEQ ID NO: 763434 - RNA, 19 nt, Homo sapiens
  misc_RNA (1)...(19): siRNA sense strand
gagcucaagugcgacauca

SEQ ID NO: 763435 - RNA, 19 nt, Homo sapiens
  misc_RNA (1)...(19): siRNA sense strand
gcagcuguauccaagaaag

SEQ ID NO: 763436 - RNA, 19 nt, Homo sapiens
  misc_RNA (1)...(19): siRNA sense strand
ggggaaagaugcagcugua

SEQ ID NO: 763437 - RNA, 19 nt, Homo sapiens
  misc_RNA (1)...(19): siRNA sense strand
gaaagaugcagcuguaucc

SEQ ID NO: 763438 - RNA, 19 nt, Homo sapiens
  misc_RNA (1)...(19): siRNA sense strand
cgaagcugcugccuugucu

SEQ ID NO: 763439 - RNA, 19 nt, Homo sapiens
  misc_RNA (1)...(19): siRNA sense strand
ugcagaggaugaagugcua

SEQ ID NO: 763440 - RNA, 19 nt, Homo sapiens
  misc_RNA (1)...(19): siRNA sense strand
cgacaucagcgcagagauc

SEQ ID NO: 763441 - RNA, 19 nt, Homo sapiens
  misc_RNA (1)...(19): siRNA sense strand
gggacccuauugacguuga

SEQ ID NO: 763442 - RNA, 19 nt, Homo sapiens
  misc_RNA (1)...(19): siRNA sense strand
ugcaggaccucagcucuug

SEQ ID NO: 763443 - RNA, 19 nt, Homo sapiens
  misc_RNA (1)...(19): siRNA sense strand
cgcccuggauaacgucuuu

SEQ ID NO: 763444 - RNA, 19 nt, Homo sapiens
  misc_RNA (1)...(19): siRNA sense strand
gccgacuucuggugcuuug

SEQ ID NO: 763445 - RNA, 19 nt, Homo sapiens
  misc_RNA (1)...(19): siRNA sense strand
gcgcuggugcagaggauga

SEQ ID NO: 763446 - RNA, 19 nt, Homo sapiens
  misc_RNA (1)...(19): siRNA sense strand
cggaggaggaguuccaguu

SEQ ID NO: 763447 - RNA, 19 nt, Homo sapiens
  misc_RNA (1)...(19): siRNA sense strand
ccgauggcuucgacgaguu

SEQ ID NO: 763448 - RNA, 19 nt, Homo sapiens
  misc_RNA (1)...(19): siRNA sense strand
aggaggaguuccaguuucu

SEQ ID NO: 763449 - RNA, 19 nt, Homo sapiens
  misc_RNA (1)...(19): siRNA sense strand
augcagcuguauccaagaa

SEQ ID NO: 763450 - RNA, 19 nt, Homo sapiens
  misc_RNA (1)...(19): siRNA sense strand
gguaccagcgcgacuacga

SEQ ID NO: 763451 - RNA, 19 nt, Homo sapiens
  misc_RNA (1)...(19): siRNA sense strand
gaccucagcucuugcauca

SEQ ID NO: 763452 - RNA, 19 nt, Homo sapiens
  misc_RNA (1)...(19): siRNA sense strand
ggagcaggauagugccuuu

SEQ ID NO: 763453 - RNA, 19 nt, Homo sapiens
  misc_RNA (1)...(19): siRNA sense strand
ggaggaggaguuccaguuu

SEQ ID NO: 763454 - RNA, 19 nt, Homo sapiens
  misc_RNA (1)...(19): siRNA sense strand
gaggaggaguuccaguuuc

SEQ ID NO: 763455 - RNA, 19 nt, Homo sapiens
  misc_RNA (1)...(19): siRNA sense strand
ggaaagaugcagcuguauc

SEQ ID NO: 763456 - RNA, 19 nt, Homo sapiens
  misc_RNA (1)...(19): siRNA sense strand
gagcucaagugcgacauca

SEQ ID NO: 763457 - RNA, 19 nt, Homo sapiens
  misc_RNA (1)...(19): siRNA sense strand
gcagcuguauccaagaaag

SEQ ID NO: 763458 - RNA, 19 nt, Homo sapiens
  misc_RNA (1)...(19): siRNA sense strand
ggggaaagaugcagcugua

SEQ ID NO: 763459 - RNA, 19 nt, Homo sapiens
  misc_RNA (1)...(19): siRNA sense strand
gaaagaugcagcuguaucc

SEQ ID NO: 763460 - RNA, 19 nt, Homo sapiens
  misc_RNA (1)...(19): siRNA sense strand
cgaagcugcugccuugucu

SEQ ID NO: 763461 - RNA, 19 nt, Homo sapiens
  misc_RNA (1)...(19): siRNA sense strand
ugcagaggaugaagugcua

SEQ ID NO: 763462 - RNA, 19 nt, Homo sapiens
  misc_RNA (1)...(19): siRNA sense strand
cgacaucagcgcagagauc

SEQ ID NO: 763463 - RNA, 19 nt, Homo sapiens
  misc_RNA (1)...(19): siRNA sense strand
gggacccuauugacguuga

SEQ ID NO: 763464 - RNA, 19 nt, Homo sapiens
  misc_RNA (1)...(19): siRNA sense strand
ugcaggaccucagcucuug

SEQ ID NO: 763465 - RNA, 19 nt, Homo sapiens
  misc_RNA (1)...(19): siRNA sense strand
cgcccuggauaacgucuuu

SEQ ID NO: 763466 - RNA, 19 nt, Homo sapiens
  misc_RNA (1)...(19): siRNA sense strand
gccgacuucuggugcuuug

SEQ ID NO: 763467 - RNA, 19 nt, Homo sapiens
  misc_RNA (1)...(19): siRNA sense strand
gcgcuggugcagaggauga

SEQ ID NO: 763468 - RNA, 19 nt, Homo sapiens
  misc_RNA (1)...(19): siRNA sense strand
cggaggaggaguuccaguu

SEQ ID NO: 763469 - RNA, 19 nt, Homo sapiens
  misc_RNA (1)...(19): siRNA sense strand
ccgauggcuucgacgaguu

SEQ ID NO: 763470 - RNA, 19 nt, Homo sapiens
  misc_RNA (1)...(19): siRNA sense strand
aggaggaguuccaguuucu

SEQ ID NO: 763471 - RNA, 19 nt, Homo sapiens
  misc_RNA (1)...(19): siRNA sense strand
augcagcuguauccaagaa

SEQ ID NO: 763472 - RNA, 19 nt, Homo sapiens
  misc_RNA (1)...(19): siRNA sense strand
gguaccagcgcgacuacga

SEQ ID NO: 763473 - RNA, 19 nt, Homo sapiens
  misc_RNA (1)...(19): siRNA sense strand
gaccucagcucuugcauca

SEQ ID NO: 763474 - RNA, 19 nt, Homo sapiens
  misc_RNA (1)...(19): siRNA sense strand
ggagcaggauagugccuuu

SEQ ID NO: 763475 - RNA, 19 nt, Homo sapiens
  misc_RNA (1)...(19): siRNA sense strand
ggaggaggaguuccaguuu

SEQ ID NO: 763476 - RNA, 19 nt, Homo sapiens
  misc_RNA (1)...(19): siRNA sense strand
gaggaggaguuccaguuuc

SEQ ID NO: 763477 - RNA, 19 nt, Homo sapiens
  misc_RNA (1)...(19): siRNA sense strand
ggaaagaugcagcuguauc

SEQ ID NO: 763478 - RNA, 19 nt, Homo sapiens
  misc_RNA (1)...(19): siRNA sense strand
gagcucaagugcgacauca

SEQ ID NO: 763479 - RNA, 19 nt, Homo sapiens
  misc_RNA (1)...(19): siRNA sense strand
gcagcuguauccaagaaag

SEQ ID NO: 763480 - RNA, 19 nt, Homo sapiens
  misc_RNA (1)...(19): siRNA sense strand
ggggaaagaugcagcugua

SEQ ID NO: 763481 - RNA, 19 nt, Homo sapiens
  misc_RNA (1)...(19): siRNA sense strand
gaaagaugcagcuguaucc

SEQ ID NO: 763482 - RNA, 19 nt, Homo sapiens
  misc_RNA (1)...(19): siRNA sense strand
cgaagcugcugccuugucu

SEQ ID NO: 763483 - RNA, 19 nt, Homo sapiens
  misc_RNA (1)...(19): siRNA sense strand
ugcagaggaugaagugcua

SEQ ID NO: 763484 - RNA, 19 nt, Homo sapiens
  misc_RNA (1)...(19): siRNA sense strand
cgacaucagcgcagagauc

SEQ ID NO: 763485 - RNA, 19 nt, Homo sapiens
  misc_RNA (1)...(19): siRNA sense strand
gggacccuauugacguuga

SEQ ID NO: 763486 - RNA, 19 nt, Homo sapiens
  misc_RNA (1)...(19): siRNA sense strand
ugcaggaccucagcucuug

SEQ ID NO: 763487 - RNA, 19 nt, Homo sapiens
  misc_RNA (1)...(19): siRNA sense strand
cgcccuggauaacgucuuu

SEQ ID NO: 763488 - RNA, 19 nt, Homo sapiens
  misc_RNA (1)...(19): siRNA sense strand
gccgacuucuggugcuuug

SEQ ID NO: 763489 - RNA, 19 nt, Homo sapiens
  misc_RNA (1)...(19): siRNA sense strand
gcgcuggugcagaggauga

SEQ ID NO: 763490 - RNA, 19 nt, Homo sapiens
  misc_RNA (1)...(19): siRNA sense strand
cggaggaggaguuccaguu

SEQ ID NO: 763491 - RNA, 19 nt, Homo sapiens
  misc_RNA (1)...(19): siRNA sense strand
ccgauggcuucgacgaguu

SEQ ID NO: 763492 - RNA, 19 nt, Homo sapiens
  misc_RNA (1)...(19): siRNA sense strand
aggaggaguuccaguuucu

SEQ ID NO: 763493 - RNA, 19 nt, Homo sapiens
  misc_RNA (1)...(19): siRNA sense strand
augcagcuguauccaagaa

SEQ ID NO: 763494 - RNA, 19 nt, Homo sapiens
  misc_RNA (1)...(19): siRNA sense strand
gguaccagcgcgacuacga

SEQ ID NO: 763495 - RNA, 19 nt, Homo sapiens
  misc_RNA (1)...(19): siRNA sense strand
gaccucagcucuugcauca

SEQ ID NO: 763496 - RNA, 19 nt, Homo sapiens
  misc_RNA (1)...(19): siRNA sense strand
ggagcaggauagugccuuu

SEQ ID NO: 763497 - RNA, 19 nt, Homo sapiens
  misc_RNA (1)...(19): siRNA sense strand
ggaggaggaguuccaguuu

SEQ ID NO: 763498 - RNA, 19 nt, Homo sapiens
  misc_RNA (1)...(19): siRNA sense strand
gaggaggaguuccaguuuc

SEQ ID NO: 763499 - RNA, 19 nt, Homo sapiens
  misc_RNA (1)...(19): siRNA sense strand
ggaaagaugcagcuguauc

SEQ ID NO: 763500 - RNA, 19 nt, Homo sapiens
  misc_RNA (1)...(19): siRNA sense strand
gagcucaagugcgacauca

SEQ ID NO: 763501 - RNA, 19 nt, Homo sapiens
  misc_RNA (1)...(19): siRNA sense strand
gcagcuguauccaagaaag

SEQ ID NO: 763502 - RNA, 19 nt, Homo sapiens
  misc_RNA (1)...(19): siRNA sense strand
ggggaaagaugcagcugua

SEQ ID NO: 763503 - RNA, 19 nt, Homo sapiens
  misc_RNA (1)...(19): siRNA sense strand
gaaagaugcagcuguaucc

SEQ ID NO: 763504 - RNA, 19 nt, Homo sapiens
  misc_RNA (1)...(19): siRNA sense strand
cgaagcugcugccuugucu

SEQ ID NO: 763505 - RNA, 19 nt, Homo sapiens
  misc_RNA (1)...(19): siRNA sense strand
ugcagaggaugaagugcua

SEQ ID NO: 763506 - RNA, 19 nt, Homo sapiens
  misc_RNA (1)...(19): siRNA sense strand
cgacaucagcgcagagauc

SEQ ID NO: 763507 - RNA, 19 nt, Homo sapiens
  misc_RNA (1)...(19): siRNA sense strand
gggacccuauugacguuga

SEQ ID NO: 763508 - RNA, 19 nt, Homo sapiens
  misc_RNA (1)...(19): siRNA sense strand
ugcaggaccucagcucuug

SEQ ID NO: 763509 - RNA, 19 nt, Homo sapiens
  misc_RNA (1)...(19): siRNA sense strand
cgcccuggauaacgucuuu

SEQ ID NO: 763510 - RNA, 19 nt, Homo sapiens
  misc_RNA (1)...(19): siRNA sense strand
gccgacuucuggugcuuug

SEQ ID NO: 763511 - RNA, 19 nt, Homo sapiens
  misc_RNA (1)...(19): siRNA sense strand
gcgcuggugcagaggauga

SEQ ID NO: 763512 - RNA, 19 nt, Homo sapiens
  misc_RNA (1)...(19): siRNA sense strand
cggaggaggaguuccaguu

SEQ ID NO: 763513 - RNA, 19 nt, Homo sapiens
  misc_RNA (1)...(19): siRNA sense strand
ccgauggcuucgacgaguu

SEQ ID NO: 763514 - RNA, 19 nt, Homo sapiens
  misc_RNA (1)...(19): siRNA sense strand
aggaggaguuccaguuucu

SEQ ID NO: 763515 - RNA, 19 nt, Homo sapiens
  misc_RNA (1)...(19): siRNA sense strand
augcagcuguauccaagaa

SEQ ID NO: 763516 - RNA, 19 nt, Homo sapiens
  misc_RNA (1)...(19): siRNA sense strand
gguaccagcgcgacuacga

SEQ ID NO: 763517 - RNA, 19 nt, Homo sapiens
  misc_RNA (1)...(19): siRNA sense strand
gaccucagcucuugcauca

SEQ ID NO: 763518 - RNA, 19 nt, Homo sapiens
  misc_RNA (1)...(19): siRNA sense strand
ggagcaggauagugccuuu

SEQ ID NO: 763519 - RNA, 19 nt, Homo sapiens
  misc_RNA (1)...(19): siRNA sense strand
ggaggaggaguuccaguuu

SEQ ID NO: 763520 - RNA, 19 nt, Homo sapiens
  misc_RNA (1)...(19): siRNA sense strand
gaggaggaguuccaguuuc

SEQ ID NO: 763521 - RNA, 19 nt, Homo sapiens
  misc_RNA (1)...(19): siRNA sense strand
ggaaagaugcagcuguauc

SEQ ID NO: 763522 - RNA, 19 nt, Homo sapiens
  misc_RNA (1)...(19): siRNA sense strand
gagcucaagugcgacauca

SEQ ID NO: 763523 - RNA, 19 nt, Homo sapiens
  misc_RNA (1)...(19): siRNA sense strand
gcagcuguauccaagaaag

SEQ ID NO: 763524 - RNA, 19 nt, Homo sapiens
  misc_RNA (1)...(19): siRNA sense strand
ggggaaagaugcagcugua

SEQ ID NO: 763525 - RNA, 19 nt, Homo sapiens
  misc_RNA (1)...(19): siRNA sense strand
gaaagaugcagcuguaucc

SEQ ID NO: 763526 - RNA, 19 nt, Homo sapiens
  misc_RNA (1)...(19): siRNA sense strand
cgaagcugcugccuugucu

SEQ ID NO: 763527 - RNA, 19 nt, Homo sapiens
  misc_RNA (1)...(19): siRNA sense strand
ugcagaggaugaagugcua

SEQ ID NO: 763528 - RNA, 19 nt, Homo sapiens
  misc_RNA (1)...(19): siRNA sense strand
cgacaucagcgcagagauc

SEQ ID NO: 763529 - RNA, 19 nt, Homo sapiens
  misc_RNA (1)...(19): siRNA sense strand
gggacccuauugacguuga

SEQ ID NO: 763530 - RNA, 19 nt, Homo sapiens
  misc_RNA (1)...(19): siRNA sense strand
ugcaggaccucagcucuug

SEQ ID NO: 763531 - RNA, 19 nt, Homo sapiens
  misc_RNA (1)...(19): siRNA sense strand
cgcccuggauaacgucuuu

SEQ ID NO: 763532 - RNA, 19 nt, Homo sapiens
  misc_RNA (1)...(19): siRNA sense strand
gccgacuucuggugcuuug

SEQ ID NO: 763533 - RNA, 19 nt, Homo sapiens
  misc_RNA (1)...(19): siRNA sense strand
gcgcuggugcagaggauga

SEQ ID NO: 763534 - RNA, 19 nt, Homo sapiens
  misc_RNA (1)...(19): siRNA sense strand
cggaggaggaguuccaguu

SEQ ID NO: 763535 - RNA, 19 nt, Homo sapiens
  misc_RNA (1)...(19): siRNA sense strand
ccgauggcuucgacgaguu

SEQ ID NO: 763536 - RNA, 19 nt, Homo sapiens
  misc_RNA (1)...(19): siRNA sense strand
aggaggaguuccaguuucu

SEQ ID NO: 763537 - RNA, 19 nt, Homo sapiens
  misc_RNA (1)...(19): siRNA sense strand
augcagcuguauccaagaa

SEQ ID NO: 763538 - RNA, 19 nt, Homo sapiens
  misc_RNA (1)...(19): siRNA sense strand
gguaccagcgcgacuacga

SEQ ID NO: 763539 - RNA, 19 nt, Homo sapiens
  misc_RNA (1)...(19): siRNA sense strand
gaccucagcucuugcauca

SEQ ID NO: 763540 - RNA, 19 nt, Homo sapiens
  misc_RNA (1)...(19): siRNA sense strand
ggagcaggauagugccuuu

SEQ ID NO: 763541 - RNA, 19 nt, Homo sapiens
  misc_RNA (1)...(19): siRNA sense strand
ggaggaggaguuccaguuu

SEQ ID NO: 763542 - RNA, 19 nt, Homo sapiens
  misc_RNA (1)...(19): siRNA sense strand
gaggaggaguuccaguuuc

SEQ ID NO: 763543 - RNA, 19 nt, Homo sapiens
  misc_RNA (1)...(19): siRNA sense strand
ggaaagaugcagcuguauc

SEQ ID NO: 763544 - RNA, 19 nt, Homo sapiens
  misc_RNA (1)...(19): siRNA sense strand
gagcucaagugcgacauca

SEQ ID NO: 763545 - RNA, 19 nt, Homo sapiens
  misc_RNA (1)...(19): siRNA sense strand
gcagcuguauccaagaaag

SEQ ID NO: 763546 - RNA, 19 nt, Homo sapiens
  misc_RNA (1)...(19): siRNA sense strand
ggggaaagaugcagcugua

SEQ ID NO: 763547 - RNA, 19 nt, Homo sapiens
  misc_RNA (1)...(19): siRNA sense strand
gaaagaugcagcuguaucc

SEQ ID NO: 763548 - RNA, 19 nt, Homo sapiens
  misc_RNA (1)...(19): siRNA sense strand
cgaagcugcugccuugucu

SEQ ID NO: 763549 - RNA, 19 nt, Homo sapiens
  misc_RNA (1)...(19): siRNA sense strand
ugcagaggaugaagugcua

SEQ ID NO: 763550 - RNA, 19 nt, Homo sapiens
  misc_RNA (1)...(19): siRNA sense strand
cgacaucagcgcagagauc

SEQ ID NO: 763551 - RNA, 19 nt, Homo sapiens
  misc_RNA (1)...(19): siRNA sense strand
gggacccuauugacguuga

SEQ ID NO: 763552 - RNA, 19 nt, Homo sapiens
  misc_RNA (1)...(19): siRNA sense strand
ugcaggaccucagcucuug

SEQ ID NO: 763553 - RNA, 19 nt, Homo sapiens
  misc_RNA (1)...(19): siRNA sense strand
cgcccuggauaacgucuuu

SEQ ID NO: 763554 - RNA, 19 nt, Homo sapiens
  misc_RNA (1)...(19): siRNA sense strand
gccgacuucuggugcuuug

SEQ ID NO: 763555 - RNA, 19 nt, Homo sapiens
  misc_RNA (1)...(19): siRNA sense strand
gcgcuggugcagaggauga

SEQ ID NO: 763556 - RNA, 19 nt, Homo sapiens
  misc_RNA (1)...(19): siRNA sense strand
cggaggaggaguuccaguu

SEQ ID NO: 763557 - RNA, 19 nt, Homo sapiens
  misc_RNA (1)...(19): siRNA sense strand
ccgauggcuucgacgaguu

SEQ ID NO: 763558 - RNA, 19 nt, Homo sapiens
  misc_RNA (1)...(19): siRNA sense strand
aggaggaguuccaguuucu

SEQ ID NO: 763559 - RNA, 19 nt, Homo sapiens
  misc_RNA (1)...(19): siRNA sense strand
augcagcuguauccaagaa

SEQ ID NO: 763560 - RNA, 19 nt, Homo sapiens
  misc_RNA (1)...(19): siRNA sense strand
gguaccagcgcgacuacga

SEQ ID NO: 763561 - RNA, 19 nt, Homo sapiens
  misc_RNA (1)...(19): siRNA sense strand
gaccucagcucuugcauca

SEQ ID NO: 763562 - RNA, 19 nt, Homo sapiens
  misc_RNA (1)...(19): siRNA sense strand
ggagcaggauagugccuuu

SEQ ID NO: 763563 - RNA, 19 nt, Homo sapiens
  misc_RNA (1)...(19): siRNA sense strand
ggaggaggaguuccaguuu

SEQ ID NO: 763564 - RNA, 19 nt, Homo sapiens
  misc_RNA (1)...(19): siRNA sense strand
gaggaggaguuccaguuuc

SEQ ID NO: 763565 - RNA, 19 nt, Homo sapiens
  misc_RNA (1)...(19): siRNA sense strand
ggaaagaugcagcuguauc

SEQ ID NO: 763566 - RNA, 19 nt, Homo sapiens
  misc_RNA (1)...(19): siRNA sense strand
gagcucaagugcgacauca

SEQ ID NO: 763567 - RNA, 19 nt, Homo sapiens
  misc_RNA (1)...(19): siRNA sense strand
gcagcuguauccaagaaag

SEQ ID NO: 763568 - RNA, 19 nt, Homo sapiens
  misc_RNA (1)...(19): siRNA sense strand
ggggaaagaugcagcugua

SEQ ID NO: 763569 - RNA, 19 nt, Homo sapiens
  misc_RNA (1)...(19): siRNA sense strand
gaaagaugcagcuguaucc

SEQ ID NO: 763570 - RNA, 19 nt, Homo sapiens
  misc_RNA (1)...(19): siRNA sense strand
cgaagcugcugccuugucu

SEQ ID NO: 763571 - RNA, 19 nt, Homo sapiens
  misc_RNA (1)...(19): siRNA sense strand
ugcagaggaugaagugcua

SEQ ID NO: 763572 - RNA, 19 nt, Homo sapiens
  misc_RNA (1)...(19): siRNA sense strand
cgacaucagcgcagagauc

SEQ ID NO: 763573 - RNA, 19 nt, Homo sapiens
  misc_RNA (1)...(19): siRNA sense strand
gggacccuauugacguuga

SEQ ID NO: 763574 - RNA, 19 nt, Homo sapiens
  misc_RNA (1)...(19): siRNA sense strand
ugcaggaccucagcucuug

SEQ ID NO: 763575 - RNA, 19 nt, Homo sapiens
  misc_RNA (1)...(19): siRNA sense strand
cgcccuggauaacgucuuu

SEQ ID NO: 763576 - RNA, 19 nt, Homo sapiens
  misc_RNA (1)...(19): siRNA sense strand
gccgacuucuggugcuuug

SEQ ID NO: 763577 - RNA, 19 nt, Homo sapiens
  misc_RNA (1)...(19): siRNA sense strand
gcgcuggugcagaggauga

SEQ ID NO: 763578 - RNA, 19 nt, Homo sapiens
  misc_RNA (1)...(19): siRNA sense strand
cggaggaggaguuccaguu

SEQ ID NO: 763579 - RNA, 19 nt, Homo sapiens
  misc_RNA (1)...(19): siRNA sense strand
ccgauggcuucgacgaguu

SEQ ID NO: 763580 - RNA, 19 nt, Homo sapiens
  misc_RNA (1)...(19): siRNA sense strand
aggaggaguuccaguuucu

SEQ ID NO: 763581 - RNA, 19 nt, Homo sapiens
  misc_RNA (1)...(19): siRNA sense strand
augcagcuguauccaagaa

SEQ ID NO: 763582 - RNA, 19 nt, Homo sapiens
  misc_RNA (1)...(19): siRNA sense strand
gguaccagcgcgacuacga

SEQ ID NO: 763583 - RNA, 19 nt, Homo sapiens
  misc_RNA (1)...(19): siRNA sense strand
gaccucagcucuugcauca

SEQ ID NO: 763584 - RNA, 19 nt, Homo sapiens
  misc_RNA (1)...(19): siRNA sense strand
ggagcaggauagugccuuu

SEQ ID NO: 763585 - RNA, 19 nt, Homo sapiens
  misc_RNA (1)...(19): siRNA sense strand
ggaggaggaguuccaguuu

SEQ ID NO: 763586 - RNA, 19 nt, Homo sapiens
  misc_RNA (1)...(19): siRNA sense strand
gaggaggaguuccaguuuc

SEQ ID NO: 763587 - RNA, 19 nt, Homo sapiens
  misc_RNA (1)...(19): siRNA sense strand
ggaaagaugcagcuguauc

SEQ ID NO: 763588 - RNA, 19 nt, Homo sapiens
  misc_RNA (1)...(19): siRNA sense strand
gagcucaagugcgacauca

SEQ ID NO: 763589 - RNA, 19 nt, Homo sapiens
  misc_RNA (1)...(19): siRNA sense strand
gcagcuguauccaagaaag

SEQ ID NO: 763590 - RNA, 19 nt, Homo sapiens
  misc_RNA (1)...(19): siRNA sense strand
ggggaaagaugcagcugua

SEQ ID NO: 763591 - RNA, 19 nt, Homo sapiens
  misc_RNA (1)...(19): siRNA sense strand
gaaagaugcagcuguaucc

SEQ ID NO: 763592 - RNA, 19 nt, Homo sapiens
  misc_RNA (1)...(19): siRNA sense strand
cgaagcugcugccuugucu

SEQ ID NO: 763593 - RNA, 19 nt, Homo sapiens
  misc_RNA (1)...(19): siRNA sense strand
ugcagaggaugaagugcua

SEQ ID NO: 763594 - RNA, 19 nt, Homo sapiens
  misc_RNA (1)...(19): siRNA sense strand
cgacaucagcgcagagauc

SEQ ID NO: 763595 - RNA, 19 nt, Homo sapiens
  misc_RNA (1)...(19): siRNA sense strand
gggacccuauugacguuga

SEQ ID NO: 763596 - RNA, 19 nt, Homo sapiens
  misc_RNA (1)...(19): siRNA sense strand
ugcaggaccucagcucuug

SEQ ID NO: 763597 - RNA, 19 nt, Homo sapiens
  misc_RNA (1)...(19): siRNA sense strand
cgcccuggauaacgucuuu

SEQ ID NO: 763598 - RNA, 19 nt, Homo sapiens
  misc_RNA (1)...(19): siRNA sense strand
gccgacuucuggugcuuug

SEQ ID NO: 763599 - RNA, 19 nt, Homo sapiens
  misc_RNA (1)...(19): siRNA sense strand
gcgcuggugcagaggauga

SEQ ID NO: 763600 - RNA, 19 nt, Homo sapiens
  misc_RNA (1)...(19): siRNA sense strand
cggaggaggaguuccaguu

SEQ ID NO: 763601 - RNA, 19 nt, Homo sapiens
  misc_RNA (1)...(19): siRNA sense strand
ccgauggcuucgacgaguu

SEQ ID NO: 763602 - RNA, 19 nt, Homo sapiens
  misc_RNA (1)...(19): siRNA sense strand
aggaggaguuccaguuucu

SEQ ID NO: 763603 - RNA, 19 nt, Homo sapiens
  misc_RNA (1)...(19): siRNA sense strand
augcagcuguauccaagaa

SEQ ID NO: 763604 - RNA, 19 nt, Homo sapiens
  misc_RNA (1)...(19): siRNA sense strand
gguaccagcgcgacuacga

SEQ ID NO: 763605 - RNA, 19 nt, Homo sapiens
  misc_RNA (1)...(19): siRNA sense strand
gaccucagcucuugcauca

SEQ ID NO: 763606 - RNA, 19 nt, Homo sapiens
  misc_RNA (1)...(19): siRNA sense strand
ggagcaggauagugccuuu

SEQ ID NO: 763607 - RNA, 19 nt, Homo sapiens
  misc_RNA (1)...(19): siRNA sense strand
ggaggaggaguuccaguuu

SEQ ID NO: 763608 - RNA, 19 nt, Homo sapiens
  misc_RNA (1)...(19): siRNA sense strand
gaggaggaguuccaguuuc

SEQ ID NO: 763609 - RNA, 19 nt, Homo sapiens
  misc_RNA (1)...(19): siRNA sense strand
ggaaagaugcagcuguauc

SEQ ID NO: 763610 - RNA, 19 nt, Homo sapiens
  misc_RNA (1)...(19): siRNA sense strand
gagcucaagugcgacauca

SEQ ID NO: 763611 - RNA, 19 nt, Homo sapiens
  misc_RNA (1)...(19): siRNA sense strand
gcagcuguauccaagaaag

SEQ ID NO: 763612 - RNA, 19 nt, Homo sapiens
  misc_RNA (1)...(19): siRNA sense strand
ggggaaagaugcagcugua

SEQ ID NO: 763613 - RNA, 19 nt, Homo sapiens
  misc_RNA (1)...(19): siRNA sense strand
gaaagaugcagcuguaucc

SEQ ID NO: 763614 - RNA, 19 nt, Homo sapiens
  misc_RNA (1)...(19): siRNA sense strand
cgaagcugcugccuugucu

SEQ ID NO: 763615 - RNA, 19 nt, Homo sapiens
  misc_RNA (1)...(19): siRNA sense strand
ugcagaggaugaagugcua

SEQ ID NO: 763616 - RNA, 19 nt, Homo sapiens
  misc_RNA (1)...(19): siRNA sense strand
cgacaucagcgcagagauc

SEQ ID NO: 763617 - RNA, 19 nt, Homo sapiens
  misc_RNA (1)...(19): siRNA sense strand
gggacccuauugacguuga

SEQ ID NO: 763618 - RNA, 19 nt, Homo sapiens
  misc_RNA (1)...(19): siRNA sense strand
ugcaggaccucagcucuug

SEQ ID NO: 763619 - RNA, 19 nt, Homo sapiens
  misc_RNA (1)...(19): siRNA sense strand
cgcccuggauaacgucuuu

SEQ ID NO: 763620 - RNA, 19 nt, Homo sapiens
  misc_RNA (1)...(19): siRNA sense strand
gccgacuucuggugcuuug

SEQ ID NO: 763621 - RNA, 19 nt, Homo sapiens
  misc_RNA (1)...(19): siRNA sense strand
gcgcuggugcagaggauga

SEQ ID NO: 763622 - RNA, 19 nt, Homo sapiens
  misc_RNA (1)...(19): siRNA sense strand
cggaggaggaguuccaguu

SEQ ID NO: 763623 - RNA, 19 nt, Homo sapiens
  misc_RNA (1)...(19): siRNA sense strand
ccgauggcuucgacgaguu

SEQ ID NO: 763624 - RNA, 19 nt, Homo sapiens
  misc_RNA (1)...(19): siRNA sense strand
aggaggaguuccaguuucu

SEQ ID NO: 763625 - RNA, 19 nt, Homo sapiens
  misc_RNA (1)...(19): siRNA sense strand
augcagcuguauccaagaa

SEQ ID NO: 763626 - RNA, 19 nt, Homo sapiens
  misc_RNA (1)...(19): siRNA sense strand
gguaccagcgcgacuacga

SEQ ID NO: 763627 - RNA, 19 nt, Homo sapiens
  misc_RNA (1)...(19): siRNA sense strand
gaccucagcucuugcauca

SEQ ID NO: 763628 - RNA, 19 nt, Homo sapiens
  misc_RNA (1)...(19): siRNA sense strand
ggagcaggauagugccuuu

SEQ ID NO: 763629 - RNA, 19 nt, Homo sapiens
  misc_RNA (1)...(19): siRNA sense strand
ggaggaggaguuccaguuu

SEQ ID NO: 763630 - RNA, 19 nt, Homo sapiens
  misc_RNA (1)...(19): siRNA sense strand
gaggaggaguuccaguuuc

SEQ ID NO: 763631 - RNA, 19 nt, Homo sapiens
  misc_RNA (1)...(19): siRNA sense strand
ggaaagaugcagcuguauc

SEQ ID NO: 763632 - RNA, 19 nt, Homo sapiens
  misc_RNA (1)...(19): siRNA sense strand
gagcucaagugcgacauca

SEQ ID NO: 763633 - RNA, 19 nt, Homo sapiens
  misc_RNA (1)...(19): siRNA sense strand
gcagcuguauccaagaaag

SEQ ID NO: 763634 - RNA, 19 nt, Homo sapiens
  misc_RNA (1)...(19): siRNA sense strand
ggggaaagaugcagcugua

SEQ ID NO: 763635 - RNA, 19 nt, Homo sapiens
  misc_RNA (1)...(19): siRNA sense strand
gaaagaugcagcuguaucc

SEQ ID NO: 763636 - RNA, 19 nt, Homo sapiens
  misc_RNA (1)...(19): siRNA sense strand
cgaagcugcugccuugucu

SEQ ID NO: 763637 - RNA, 19 nt, Homo sapiens
  misc_RNA (1)...(19): siRNA sense strand
ugcagaggaugaagugcua

SEQ ID NO: 763638 - RNA, 19 nt, Homo sapiens
  misc_RNA (1)...(19): siRNA sense strand
cgacaucagcgcagagauc

SEQ ID NO: 763639 - RNA, 19 nt, Homo sapiens
  misc_RNA (1)...(19): siRNA sense strand
gggacccuauugacguuga

SEQ ID NO: 763640 - RNA, 19 nt, Homo sapiens
  misc_RNA (1)...(19): siRNA sense strand
ugcaggaccucagcucuug

SEQ ID NO: 763641 - RNA, 19 nt, Homo sapiens
  misc_RNA (1)...(19): siRNA sense strand
cgcccuggauaacgucuuu

SEQ ID NO: 763642 - RNA, 19 nt, Homo sapiens
  misc_RNA (1)...(19): siRNA sense strand
gccgacuucuggugcuuug

SEQ ID NO: 763643 - RNA, 19 nt, Homo sapiens
  misc_RNA (1)...(19): siRNA sense strand
gcgcuggugcagaggauga

SEQ ID NO: 763644 - RNA, 19 nt, Homo sapiens
  misc_RNA (1)...(19): siRNA sense strand
cggaggaggaguuccaguu

SEQ ID NO: 763645 - RNA, 19 nt, Homo sapiens
  misc_RNA (1)...(19): siRNA sense strand
ccgauggcuucgacgaguu

SEQ ID NO: 763646 - RNA, 19 nt, Homo sapiens
  misc_RNA (1)...(19): siRNA sense strand
aggaggaguuccaguuucu

SEQ ID NO: 763647 - RNA, 19 nt, Homo sapiens
  misc_RNA (1)...(19): siRNA sense strand
augcagcuguauccaagaa

SEQ ID NO: 763648 - RNA, 19 nt, Homo sapiens
  misc_RNA (1)...(19): siRNA sense strand
gguaccagcgcgacuacga

SEQ ID NO: 763649 - RNA, 19 nt, Homo sapiens
  misc_RNA (1)...(19): siRNA sense strand
gaccucagcucuugcauca

SEQ ID NO: 763650 - RNA, 19 nt, Homo sapiens
  misc_RNA (1)...(19): siRNA sense strand
ggagcaggauagugccuuu

SEQ ID NO: 763651 - RNA, 19 nt, Homo sapiens
  misc_RNA (1)...(19): siRNA sense strand
ggaggaggaguuccaguuu

SEQ ID NO: 763652 - RNA, 19 nt, Homo sapiens
  misc_RNA (1)...(19): siRNA sense strand
gaggaggaguuccaguuuc

SEQ ID NO: 763653 - RNA, 19 nt, Homo sapiens
  misc_RNA (1)...(19): siRNA sense strand
ggaaagaugcagcuguauc

SEQ ID NO: 763654 - RNA, 19 nt, Homo sapiens
  misc_RNA (1)...(19): siRNA sense strand
gagcucaagugcgacauca

SEQ ID NO: 763655 - RNA, 19 nt, Homo sapiens
  misc_RNA (1)...(19): siRNA sense strand
gcagcuguauccaagaaag

SEQ ID NO: 763656 - RNA, 19 nt, Homo sapiens
  misc_RNA (1)...(19): siRNA sense strand
ggggaaagaugcagcugua

SEQ ID NO: 763657 - RNA, 19 nt, Homo sapiens
  misc_RNA (1)...(19): siRNA sense strand
gaaagaugcagcuguaucc

SEQ ID NO: 763658 - RNA, 19 nt, Homo sapiens
  misc_RNA (1)...(19): siRNA sense strand
cgaagcugcugccuugucu

SEQ ID NO: 763659 - RNA, 19 nt, Homo sapiens
  misc_RNA (1)...(19): siRNA sense strand
ugcagaggaugaagugcua

SEQ ID NO: 763660 - RNA, 19 nt, Homo sapiens
  misc_RNA (1)...(19): siRNA sense strand
cgacaucagcgcagagauc

SEQ ID NO: 763661 - RNA, 19 nt, Homo sapiens
  misc_RNA (1)...(19): siRNA sense strand
gggacccuauugacguuga

SEQ ID NO: 763662 - RNA, 19 nt, Homo sapiens
  misc_RNA (1)...(19): siRNA sense strand
ugcaggaccucagcucuug

SEQ ID NO: 763663 - RNA, 19 nt, Homo sapiens
  misc_RNA (1)...(19): siRNA sense strand
cgcccuggauaacgucuuu

SEQ ID NO: 763664 - RNA, 19 nt, Homo sapiens
  misc_RNA (1)...(19): siRNA sense strand
gccgacuucuggugcuuug

SEQ ID NO: 763665 - RNA, 19 nt, Homo sapiens
  misc_RNA (1)...(19): siRNA sense strand
gcgcuggugcagaggauga

SEQ ID NO: 763666 - RNA, 19 nt, Homo sapiens
  misc_RNA (1)...(19): siRNA sense strand
cggaggaggaguuccaguu

SEQ ID NO: 763667 - RNA, 19 nt, Homo sapiens
  misc_RNA (1)...(19): siRNA sense strand
ccgauggcuucgacgaguu

SEQ ID NO: 763668 - RNA, 19 nt, Homo sapiens
  misc_RNA (1)...(19): siRNA sense strand
aggaggaguuccaguuucu

SEQ ID NO: 763669 - RNA, 19 nt, Homo sapiens
  misc_RNA (1)...(19): siRNA sense strand
augcagcuguauccaagaa

SEQ ID NO: 763670 - RNA, 19 nt, Homo sapiens
  misc_RNA (1)...(19): siRNA sense strand
gguaccagcgcgacuacga

SEQ ID NO: 763671 - RNA, 19 nt, Homo sapiens
  misc_RNA (1)...(19): siRNA sense strand
gaccucagcucuugcauca

SEQ ID NO: 763672 - RNA, 19 nt, Homo sapiens
  misc_RNA (1)...(19): siRNA sense strand
ggagcaggauagugccuuu

SEQ ID NO: 763673 - RNA, 19 nt, Homo sapiens
  misc_RNA (1)...(19): siRNA sense strand
ggaggaggaguuccaguuu

SEQ ID NO: 763674 - RNA, 19 nt, Homo sapiens
  misc_RNA (1)...(19): siRNA sense strand
gaggaggaguuccaguuuc

SEQ ID NO: 763675 - RNA, 19 nt, Homo sapiens
  misc_RNA (1)...(19): siRNA sense strand
ggaaagaugcagcuguauc

SEQ ID NO: 763676 - RNA, 19 nt, Homo sapiens
  misc_RNA (1)...(19): siRNA sense strand
gagcucaagugcgacauca

SEQ ID NO: 763677 - RNA, 19 nt, Homo sapiens
  misc_RNA (1)...(19): siRNA sense strand
gcagcuguauccaagaaag

SEQ ID NO: 763678 - RNA, 19 nt, Homo sapiens
  misc_RNA (1)...(19): siRNA sense strand
ggggaaagaugcagcugua

SEQ ID NO: 763679 - RNA, 19 nt, Homo sapiens
  misc_RNA (1)...(19): siRNA sense strand
gaaagaugcagcuguaucc

SEQ ID NO: 763680 - RNA, 19 nt, Homo sapiens
  misc_RNA (1)...(19): siRNA sense strand
cgaagcugcugccuugucu

SEQ ID NO: 763681 - RNA, 19 nt, Homo sapiens
  misc_RNA (1)...(19): siRNA sense strand
ugcagaggaugaagugcua

SEQ ID NO: 763682 - RNA, 19 nt, Homo sapiens
  misc_RNA (1)...(19): siRNA sense strand
cgacaucagcgcagagauc

SEQ ID NO: 763683 - RNA, 19 nt, Homo sapiens
  misc_RNA (1)...(19): siRNA sense strand
gggacccuauugacguuga

SEQ ID NO: 763684 - RNA, 19 nt, Homo sapiens
  misc_RNA (1)...(19): siRNA sense strand
ugcaggaccucagcucuug

SEQ ID NO: 763685 - RNA, 19 nt, Homo sapiens
  misc_RNA (1)...(19): siRNA sense strand
cgcccuggauaacgucuuu

SEQ ID NO: 763686 - RNA, 19 nt, Homo sapiens
  misc_RNA (1)...(19): siRNA sense strand
gccgacuucuggugcuuug

SEQ ID NO: 763687 - RNA, 19 nt, Homo sapiens
  misc_RNA (1)...(19): siRNA sense strand
gcgcuggugcagaggauga

SEQ ID NO: 763688 - RNA, 19 nt, Homo sapiens
  misc_RNA (1)...(19): siRNA sense strand
cggaggaggaguuccaguu

SEQ ID NO: 763689 - RNA, 19 nt, Homo sapiens
  misc_RNA (1)...(19): siRNA sense strand
ccgauggcuucgacgaguu

SEQ ID NO: 763690 - RNA, 19 nt, Homo sapiens
  misc_RNA (1)...(19): siRNA sense strand
aggaggaguuccaguuucu

SEQ ID NO: 763691 - RNA, 19 nt, Homo sapiens
  misc_RNA (1)...(19): siRNA sense strand
augcagcuguauccaagaa

SEQ ID NO: 763692 - RNA, 19 nt, Homo sapiens
  misc_RNA (1)...(19): siRNA sense strand
gguaccagcgcgacuacga

SEQ ID NO: 763693 - RNA, 19 nt, Homo sapiens
  misc_RNA (1)...(19): siRNA sense strand
gaccucagcucuugcauca

SEQ ID NO: 763694 - RNA, 19 nt, Homo sapiens
  misc_RNA (1)...(19): siRNA sense strand
ggagcaggauagugccuuu

SEQ ID NO: 763695 - RNA, 19 nt, Homo sapiens
  misc_RNA (1)...(19): siRNA sense strand
ggaggaggaguuccaguuu

SEQ ID NO: 763696 - RNA, 19 nt, Homo sapiens
  misc_RNA (1)...(19): siRNA sense strand
gaggaggaguuccaguuuc

SEQ ID NO: 763697 - RNA, 19 nt, Homo sapiens
  misc_RNA (1)...(19): siRNA sense strand
ggaaagaugcagcuguauc

SEQ ID NO: 763698 - RNA, 19 nt, Homo sapiens
  misc_RNA (1)...(19): siRNA sense strand
gagcucaagugcgacauca

SEQ ID NO: 763699 - RNA, 19 nt, Homo sapiens
  misc_RNA (1)...(19): siRNA sense strand
gcagcuguauccaagaaag

SEQ ID NO: 763700 - RNA, 19 nt, Homo sapiens
  misc_RNA (1)...(19): siRNA sense strand
ggggaaagaugcagcugua

SEQ ID NO: 763701 - RNA, 19 nt, Homo sapiens
  misc_RNA (1)...(19): siRNA sense strand
gaaagaugcagcuguaucc

SEQ ID NO: 763702 - RNA, 19 nt, Homo sapiens
  misc_RNA (1)...(19): siRNA sense strand
cgaagcugcugccuugucu

SEQ ID NO: 763703 - RNA, 19 nt, Homo sapiens
  misc_RNA (1)...(19): siRNA sense strand
ugcagaggaugaagugcua

SEQ ID NO: 763704 - RNA, 19 nt, Homo sapiens
  misc_RNA (1)...(19): siRNA sense strand
cgacaucagcgcagagauc

SEQ ID NO: 763705 - RNA, 19 nt, Homo sapiens
  misc_RNA (1)...(19): siRNA sense strand
gggacccuauugacguuga

SEQ ID NO: 763706 - RNA, 19 nt, Homo sapiens
  misc_RNA (1)...(19): siRNA sense strand
ugcaggaccucagcucuug

SEQ ID NO: 763707 - RNA, 19 nt, Homo sapiens
  misc_RNA (1)...(19): siRNA sense strand
cgcccuggauaacgucuuu

SEQ ID NO: 763708 - RNA, 19 nt, Homo sapiens
  misc_RNA (1)...(19): siRNA sense strand
gccgacuucuggugcuuug

SEQ ID NO: 763709 - RNA, 19 nt, Homo sapiens
  misc_RNA (1)...(19): siRNA sense strand
gcgcuggugcagaggauga

SEQ ID NO: 763710 - RNA, 19 nt, Homo sapiens
  misc_RNA (1)...(19): siRNA sense strand
cggaggaggaguuccaguu

SEQ ID NO: 763711 - RNA, 19 nt, Homo sapiens
  misc_RNA (1)...(19): siRNA sense strand
ccgauggcuucgacgaguu

SEQ ID NO: 763712 - RNA, 19 nt, Homo sapiens
  misc_RNA (1)...(19): siRNA sense strand
aggaggaguuccaguuucu

SEQ ID NO: 763713 - RNA, 19 nt, Homo sapiens
  misc_RNA (1)...(19): siRNA sense strand
augcagcuguauccaagaa

SEQ ID NO: 763714 - RNA, 19 nt, Homo sapiens
  misc_RNA (1)...(19): siRNA sense strand
gguaccagcgcgacuacga

SEQ ID NO: 763715 - RNA, 19 nt, Homo sapiens
  misc_RNA (1)...(19): siRNA sense strand
gaccucagcucuugcauca

SEQ ID NO: 763716 - RNA, 19 nt, Homo sapiens
  misc_RNA (1)...(19): siRNA sense strand
ggagcaggauagugccuuu

SEQ ID NO: 763717 - RNA, 19 nt, Homo sapiens
  misc_RNA (1)...(19): siRNA sense strand
ggaggaggaguuccaguuu

SEQ ID NO: 763718 - RNA, 19 nt, Homo sapiens
  misc_RNA (1)...(19): siRNA sense strand
gaggaggaguuccaguuuc

SEQ ID NO: 763719 - RNA, 19 nt, Homo sapiens
  misc_RNA (1)...(19): siRNA sense strand
ggaaagaugcagcuguauc

SEQ ID NO: 763720 - RNA, 19 nt, Homo sapiens
  misc_RNA (1)...(19): siRNA sense strand
gagcucaagugcgacauca

SEQ ID NO: 763721 - RNA, 19 nt, Homo sapiens
  misc_RNA (1)...(19): siRNA sense strand
gcagcuguauccaagaaag

SEQ ID NO: 763722 - RNA, 19 nt, Homo sapiens
  misc_RNA (1)...(19): siRNA sense strand
ggggaaagaugcagcugua

SEQ ID NO: 763723 - RNA, 19 nt, Homo sapiens
  misc_RNA (1)...(19): siRNA sense strand
gaaagaugcagcuguaucc

SEQ ID NO: 763724 - RNA, 19 nt, Homo sapiens
  misc_RNA (1)...(19): siRNA sense strand
cgaagcugcugccuugucu

SEQ ID NO: 763725 - RNA, 19 nt, Homo sapiens
  misc_RNA (1)...(19): siRNA sense strand
ugcagaggaugaagugcua

SEQ ID NO: 763726 - RNA, 19 nt, Homo sapiens
  misc_RNA (1)...(19): siRNA sense strand
cgacaucagcgcagagauc

SEQ ID NO: 763727 - RNA, 19 nt, Homo sapiens
  misc_RNA (1)...(19): siRNA sense strand
gggacccuauugacguuga

SEQ ID NO: 763728 - RNA, 19 nt, Homo sapiens
  misc_RNA (1)...(19): siRNA sense strand
ugcaggaccucagcucuug

SEQ ID NO: 763729 - RNA, 19 nt, Homo sapiens
  misc_RNA (1)...(19): siRNA sense strand
cgcccuggauaacgucuuu

SEQ ID NO: 763730 - RNA, 19 nt, Homo sapiens
  misc_RNA (1)...(19): siRNA sense strand
gccgacuucuggugcuuug

SEQ ID NO: 763731 - RNA, 19 nt, Homo sapiens
  misc_RNA (1)...(19): siRNA sense strand
gcgcuggugcagaggauga

SEQ ID NO: 763732 - RNA, 19 nt, Homo sapiens
  misc_RNA (1)...(19): siRNA sense strand
cggaggaggaguuccaguu

SEQ ID NO: 763733 - RNA, 19 nt, Homo sapiens
  misc_RNA (1)...(19): siRNA sense strand
ccgauggcuucgacgaguu

SEQ ID NO: 763734 - RNA, 19 nt, Homo sapiens
  misc_RNA (1)...(19): siRNA sense strand
aggaggaguuccaguuucu

SEQ ID NO: 763735 - RNA, 19 nt, Homo sapiens
  misc_RNA (1)...(19): siRNA sense strand
augcagcuguauccaagaa

SEQ ID NO: 763736 - RNA, 19 nt, Homo sapiens
  misc_RNA (1)...(19): siRNA sense strand
gguaccagcgcgacuacga

SEQ ID NO: 763737 - RNA, 19 nt, Homo sapiens
  misc_RNA (1)...(19): siRNA sense strand
gaccucagcucuugcauca

SEQ ID NO: 763738 - RNA, 19 nt, Homo sapiens
  misc_RNA (1)...(19): siRNA sense strand
ggagcaggauagugccuuu

SEQ ID NO: 763739 - RNA, 19 nt, Homo sapiens
  misc_RNA (1)...(19): siRNA sense strand
ggaggaggaguuccaguuu

SEQ ID NO: 763740 - RNA, 19 nt, Homo sapiens
  misc_RNA (1)...(19): siRNA sense strand
gaggaggaguuccaguuuc

SEQ ID NO: 763741 - RNA, 19 nt, Homo sapiens
  misc_RNA (1)...(19): siRNA sense strand
ggaaagaugcagcuguauc

SEQ ID NO: 763742 - RNA, 19 nt, Homo sapiens
  misc_RNA (1)...(19): siRNA sense strand
gagcucaagugcgacauca

SEQ ID NO: 763743 - RNA, 19 nt, Homo sapiens
  misc_RNA (1)...(19): siRNA sense strand
gcagcuguauccaagaaag

SEQ ID NO: 763744 - RNA, 19 nt, Homo sapiens
  misc_RNA (1)...(19): siRNA sense strand
ggggaaagaugcagcugua

SEQ ID NO: 763745 - RNA, 19 nt, Homo sapiens
  misc_RNA (1)...(19): siRNA sense strand
gaaagaugcagcuguaucc

SEQ ID NO: 763746 - RNA, 19 nt, Homo sapiens
  misc_RNA (1)...(19): siRNA sense strand
cgaagcugcugccuugucu

SEQ ID NO: 763747 - RNA, 19 nt, Homo sapiens
  misc_RNA (1)...(19): siRNA sense strand
ugcagaggaugaagugcua

SEQ ID NO: 763748 - RNA, 19 nt, Homo sapiens
  misc_RNA (1)...(19): siRNA sense strand
cgacaucagcgcagagauc

SEQ ID NO: 763749 - RNA, 19 nt, Homo sapiens
  misc_RNA (1)...(19): siRNA sense strand
gggacccuauugacguuga

SEQ ID NO: 763750 - RNA, 19 nt, Homo sapiens
  misc_RNA (1)...(19): siRNA sense strand
ugcaggaccucagcucuug

SEQ ID NO: 763751 - RNA, 19 nt, Homo sapiens
  misc_RNA (1)...(19): siRNA sense strand
cgcccuggauaacgucuuu

SEQ ID NO: 763752 - RNA, 19 nt, Homo sapiens
  misc_RNA (1)...(19): siRNA sense strand
gccgacuucuggugcuuug

SEQ ID NO: 763753 - RNA, 19 nt, Homo sapiens
  misc_RNA (1)...(19): siRNA sense strand
gcgcuggugcagaggauga

SEQ ID NO: 763754 - RNA, 19 nt, Homo sapiens
  misc_RNA (1)...(19): siRNA sense strand
cggaggaggaguuccaguu

SEQ ID NO: 763755 - RNA, 19 nt, Homo sapiens
  misc_RNA (1)...(19): siRNA sense strand
ccgauggcuucgacgaguu

SEQ ID NO: 763756 - RNA, 19 nt, Homo sapiens
  misc_RNA (1)...(19): siRNA sense strand
aggaggaguuccaguuucu

SEQ ID NO: 763757 - RNA, 19 nt, Homo sapiens
  misc_RNA (1)...(19): siRNA sense strand
augcagcuguauccaagaa

SEQ ID NO: 763758 - RNA, 19 nt, Homo sapiens
  misc_RNA (1)...(19): siRNA sense strand
gguaccagcgcgacuacga

SEQ ID NO: 763759 - RNA, 19 nt, Homo sapiens
  misc_RNA (1)...(19): siRNA sense strand
gaccucagcucuugcauca

SEQ ID NO: 763760 - RNA, 19 nt, Homo sapiens
  misc_RNA (1)...(19): siRNA sense strand
ggagcaggauagugccuuu

SEQ ID NO: 763761 - RNA, 19 nt, Homo sapiens
  misc_RNA (1)...(19): siRNA sense strand
ggaggaggaguuccaguuu

SEQ ID NO: 763762 - RNA, 19 nt, Homo sapiens
  misc_RNA (1)...(19): siRNA sense strand
gaggaggaguuccaguuuc

SEQ ID NO: 763763 - RNA, 19 nt, Homo sapiens
  misc_RNA (1)...(19): siRNA sense strand
ggaaagaugcagcuguauc

SEQ ID NO: 763764 - RNA, 19 nt, Homo sapiens
  misc_RNA (1)...(19): siRNA sense strand
gagcucaagugcgacauca

SEQ ID NO: 763765 - RNA, 19 nt, Homo sapiens
  misc_RNA (1)...(19): siRNA sense strand
gcagcuguauccaagaaag

SEQ ID NO: 763766 - RNA, 19 nt, Homo sapiens
  misc_RNA (1)...(19): siRNA sense strand
ggggaaagaugcagcugua

SEQ ID NO: 763767 - RNA, 19 nt, Homo sapiens
  misc_RNA (1)...(19): siRNA sense strand
gaaagaugcagcuguaucc

SEQ ID NO: 763768 - RNA, 19 nt, Homo sapiens
  misc_RNA (1)...(19): siRNA sense strand
cgaagcugcugccuugucu

SEQ ID NO: 763769 - RNA, 19 nt, Homo sapiens
  misc_RNA (1)...(19): siRNA sense strand
ugcagaggaugaagugcua

SEQ ID NO: 763770 - RNA, 19 nt, Homo sapiens
  misc_RNA (1)...(19): siRNA sense strand
cgacaucagcgcagagauc

SEQ ID NO: 763771 - RNA, 19 nt, Homo sapiens
  misc_RNA (1)...(19): siRNA sense strand
gggacccuauugacguuga

SEQ ID NO: 763772 - RNA, 19 nt, Homo sapiens
  misc_RNA (1)...(19): siRNA sense strand
ugcaggaccucagcucuug

SEQ ID NO: 763773 - RNA, 19 nt, Homo sapiens
  misc_RNA (1)...(19): siRNA sense strand
cgcccuggauaacgucuuu

SEQ ID NO: 763774 - RNA, 19 nt, Homo sapiens
  misc_RNA (1)...(19): siRNA sense strand
gccgacuucuggugcuuug

SEQ ID NO: 763775 - RNA, 19 nt, Homo sapiens
  misc_RNA (1)...(19): siRNA sense strand
gcgcuggugcagaggauga

SEQ ID NO: 763776 - RNA, 19 nt, Homo sapiens
  misc_RNA (1)...(19): siRNA sense strand
cggaggaggaguuccaguu

SEQ ID NO: 763777 - RNA, 19 nt, Homo sapiens
  misc_RNA (1)...(19): siRNA sense strand
ccgauggcuucgacgaguu

SEQ ID NO: 763778 - RNA, 19 nt, Homo sapiens
  misc_RNA (1)...(19): siRNA sense strand
aggaggaguuccaguuucu

SEQ ID NO: 763779 - RNA, 19 nt, Homo sapiens
  misc_RNA (1)...(19): siRNA sense strand
augcagcuguauccaagaa

SEQ ID NO: 763780 - RNA, 19 nt, Homo sapiens
  misc_RNA (1)...(19): siRNA sense strand
gguaccagcgcgacuacga

SEQ ID NO: 763781 - RNA, 19 nt, Homo sapiens
  misc_RNA (1)...(19): siRNA sense strand
gaccucagcucuugcauca

SEQ ID NO: 763782 - RNA, 19 nt, Homo sapiens
  misc_RNA (1)...(19): siRNA sense strand
ggagcaggauagugccuuu

SEQ ID NO: 763783 - RNA, 19 nt, Homo sapiens
  misc_RNA (1)...(19): siRNA sense strand
ggaggaggaguuccaguuu

SEQ ID NO: 763784 - RNA, 19 nt, Homo sapiens
  misc_RNA (1)...(19): siRNA sense strand
gaggaggaguuccaguuuc

SEQ ID NO: 763785 - RNA, 19 nt, Homo sapiens
  misc_RNA (1)...(19): siRNA sense strand
ggaaagaugcagcuguauc

SEQ ID NO: 763786 - RNA, 19 nt, Homo sapiens
  misc_RNA (1)...(19): siRNA sense strand
gagcucaagugcgacauca

SEQ ID NO: 763787 - RNA, 19 nt, Homo sapiens
  misc_RNA (1)...(19): siRNA sense strand
gcagcuguauccaagaaag

SEQ ID NO: 763788 - RNA, 19 nt, Homo sapiens
  misc_RNA (1)...(19): siRNA sense strand
ggggaaagaugcagcugua

SEQ ID NO: 763789 - RNA, 19 nt, Homo sapiens
  misc_RNA (1)...(19): siRNA sense strand
gaaagaugcagcuguaucc

SEQ ID NO: 763790 - RNA, 19 nt, Homo sapiens
  misc_RNA (1)...(19): siRNA sense strand
cgaagcugcugccuugucu

SEQ ID NO: 763791 - RNA, 19 nt, Homo sapiens
  misc_RNA (1)...(19): siRNA sense strand
ugcagaggaugaagugcua

SEQ ID NO: 763792 - RNA, 19 nt, Homo sapiens
  misc_RNA (1)...(19): siRNA sense strand
cgacaucagcgcagagauc

SEQ ID NO: 763793 - RNA, 19 nt, Homo sapiens
  misc_RNA (1)...(19): siRNA sense strand
gggacccuauugacguuga

SEQ ID NO: 763794 - RNA, 19 nt, Homo sapiens
  misc_RNA (1)...(19): siRNA sense strand
ugcaggaccucagcucuug

SEQ ID NO: 763795 - RNA, 19 nt, Homo sapiens
  misc_RNA (1)...(19): siRNA sense strand
cgcccuggauaacgucuuu

SEQ ID NO: 763796 - RNA, 19 nt, Homo sapiens
  misc_RNA (1)...(19): siRNA sense strand
gccgacuucuggugcuuug

SEQ ID NO: 763797 - RNA, 19 nt, Homo sapiens
  misc_RNA (1)...(19): siRNA sense strand
gcgcuggugcagaggauga

SEQ ID NO: 763798 - RNA, 19 nt, Homo sapiens
  misc_RNA (1)...(19): siRNA sense strand
cggaggaggaguuccaguu

SEQ ID NO: 763799 - RNA, 19 nt, Homo sapiens
  misc_RNA (1)...(19): siRNA sense strand
ccgauggcuucgacgaguu

SEQ ID NO: 763800 - RNA, 19 nt, Homo sapiens
  misc_RNA (1)...(19): siRNA sense strand
aggaggaguuccaguuucu

SEQ ID NO: 763801 - RNA, 19 nt, Homo sapiens
  misc_RNA (1)...(19): siRNA sense strand
augcagcuguauccaagaa

SEQ ID NO: 763802 - RNA, 19 nt, Homo sapiens
  misc_RNA (1)...(19): siRNA sense strand
gguaccagcgcgacuacga

SEQ ID NO: 763803 - RNA, 19 nt, Homo sapiens
  misc_RNA (1)...(19): siRNA sense strand
gaccucagcucuugcauca

SEQ ID NO: 763804 - RNA, 19 nt, Homo sapiens
  misc_RNA (1)...(19): siRNA sense strand
ggagcaggauagugccuuu

SEQ ID NO: 763805 - RNA, 19 nt, Homo sapiens
  misc_RNA (1)...(19): siRNA sense strand
ggaggaggaguuccaguuu

SEQ ID NO: 763806 - RNA, 19 nt, Homo sapiens
  misc_RNA (1)...(19): siRNA sense strand
gaggaggaguuccaguuuc

SEQ ID NO: 763807 - RNA, 19 nt, Homo sapiens
  misc_RNA (1)...(19): siRNA sense strand
ggaaagaugcagcuguauc

SEQ ID NO: 763808 - RNA, 19 nt, Homo sapiens
  misc_RNA (1)...(19): siRNA sense strand
gagcucaagugcgacauca

SEQ ID NO: 763809 - RNA, 19 nt, Homo sapiens
  misc_RNA (1)...(19): siRNA sense strand
gcagcuguauccaagaaag

SEQ ID NO: 763810 - RNA, 19 nt, Homo sapiens
  misc_RNA (1)...(19): siRNA sense strand
ggggaaagaugcagcugua

SEQ ID NO: 763811 - RNA, 19 nt, Homo sapiens
  misc_RNA (1)...(19): siRNA sense strand
gaaagaugcagcuguaucc

SEQ ID NO: 763812 - RNA, 19 nt, Homo sapiens
  misc_RNA (1)...(19): siRNA sense strand
cgaagcugcugccuugucu

SEQ ID NO: 763813 - RNA, 19 nt, Homo sapiens
  misc_RNA (1)...(19): siRNA sense strand
ugcagaggaugaagugcua

SEQ ID NO: 763814 - RNA, 19 nt, Homo sapiens
  misc_RNA (1)...(19): siRNA sense strand
cgacaucagcgcagagauc

SEQ ID NO: 763815 - RNA, 19 nt, Homo sapiens
  misc_RNA (1)...(19): siRNA sense strand
gggacccuauugacguuga

SEQ ID NO: 763816 - RNA, 19 nt, Homo sapiens
  misc_RNA (1)...(19): siRNA sense strand
ugcaggaccucagcucuug

SEQ ID NO: 763817 - RNA, 19 nt, Homo sapiens
  misc_RNA (1)...(19): siRNA sense strand
cgcccuggauaacgucuuu

SEQ ID NO: 763818 - RNA, 19 nt, Homo sapiens
  misc_RNA (1)...(19): siRNA sense strand
gccgacuucuggugcuuug

SEQ ID NO: 763819 - RNA, 19 nt, Homo sapiens
  misc_RNA (1)...(19): siRNA sense strand
gcgcuggugcagaggauga

SEQ ID NO: 763820 - RNA, 19 nt, Homo sapiens
  misc_RNA (1)...(19): siRNA sense strand
cggaggaggaguuccaguu

SEQ ID NO: 763821 - RNA, 19 nt, Homo sapiens
  misc_RNA (1)...(19): siRNA sense strand
ccgauggcuucgacgaguu

SEQ ID NO: 763822 - RNA, 19 nt, Homo sapiens
  misc_RNA (1)...(19): siRNA sense strand
aggaggaguuccaguuucu

SEQ ID NO: 763823 - RNA, 19 nt, Homo sapiens
  misc_RNA (1)...(19): siRNA sense strand
augcagcuguauccaagaa

SEQ ID NO: 763824 - RNA, 19 nt, Homo sapiens
  misc_RNA (1)...(19): siRNA sense strand
gguaccagcgcgacuacga

SEQ ID NO: 763825 - RNA, 19 nt, Homo sapiens
  misc_RNA (1)...(19): siRNA sense strand
gaccucagcucuugcauca

SEQ ID NO: 763826 - RNA, 19 nt, Homo sapiens
  misc_RNA (1)...(19): siRNA sense strand
ggagcaggauagugccuuu

SEQ ID NO: 763827 - RNA, 19 nt, Homo sapiens
  misc_RNA (1)...(19): siRNA sense strand
ggaggaggaguuccaguuu

SEQ ID NO: 763828 - RNA, 19 nt, Homo sapiens
  misc_RNA (1)...(19): siRNA sense strand
gaggaggaguuccaguuuc

SEQ ID NO: 763829 - RNA, 19 nt, Homo sapiens
  misc_RNA (1)...(19): siRNA sense strand
ggaaagaugcagcuguauc

SEQ ID NO: 763830 - RNA, 19 nt, Homo sapiens
  misc_RNA (1)...(19): siRNA sense strand
gagcucaagugcgacauca

SEQ ID NO: 763831 - RNA, 19 nt, Homo sapiens
  misc_RNA (1)...(19): siRNA sense strand
gcagcuguauccaagaaag

SEQ ID NO: 763832 - RNA, 19 nt, Homo sapiens
  misc_RNA (1)...(19): siRNA sense strand
ggggaaagaugcagcugua

SEQ ID NO: 763833 - RNA, 19 nt, Homo sapiens
  misc_RNA (1)...(19): siRNA sense strand
gaaagaugcagcuguaucc

SEQ ID NO: 763834 - RNA, 19 nt, Homo sapiens
  misc_RNA (1)...(19): siRNA sense strand
cgaagcugcugccuugucu

SEQ ID NO: 763835 - RNA, 19 nt, Homo sapiens
  misc_RNA (1)...(19): siRNA sense strand
ugcagaggaugaagugcua

SEQ ID NO: 763836 - RNA, 19 nt, Homo sapiens
  misc_RNA (1)...(19): siRNA sense strand
cgacaucagcgcagagauc

SEQ ID NO: 763837 - RNA, 19 nt, Homo sapiens
  misc_RNA (1)...(19): siRNA sense strand
gggacccuauugacguuga

SEQ ID NO: 763838 - RNA, 19 nt, Homo sapiens
  misc_RNA (1)...(19): siRNA sense strand
ugcaggaccucagcucuug

SEQ ID NO: 763839 - RNA, 19 nt, Homo sapiens
  misc_RNA (1)...(19): siRNA sense strand
cgcccuggauaacgucuuu

SEQ ID NO: 763840 - RNA, 19 nt, Homo sapiens
  misc_RNA (1)...(19): siRNA sense strand
gccgacuucuggugcuuug

SEQ ID NO: 763841 - RNA, 19 nt, Homo sapiens
  misc_RNA (1)...(19): siRNA sense strand
gcgcuggugcagaggauga

SEQ ID NO: 763842 - RNA, 19 nt, Homo sapiens
  misc_RNA (1)...(19): siRNA sense strand
cggaggaggaguuccaguu

SEQ ID NO: 763843 - RNA, 19 nt, Homo sapiens
  misc_RNA (1)...(19): siRNA sense strand
ccgauggcuucgacgaguu

SEQ ID NO: 763844 - RNA, 19 nt, Homo sapiens
  misc_RNA (1)...(19): siRNA sense strand
aggaggaguuccaguuucu

SEQ ID NO: 763845 - RNA, 19 nt, Homo sapiens
  misc_RNA (1)...(19): siRNA sense strand
augcagcuguauccaagaa

SEQ ID NO: 763846 - RNA, 19 nt, Homo sapiens
  misc_RNA (1)...(19): siRNA sense strand
gguaccagcgcgacuacga

SEQ ID NO: 763847 - RNA, 19 nt, Homo sapiens
  misc_RNA (1)...(19): siRNA sense strand
gaccucagcucuugcauca

SEQ ID NO: 763848 - RNA, 19 nt, Homo sapiens
  misc_RNA (1)...(19): siRNA sense strand
ggagcaggauagugccuuu

SEQ ID NO: 763849 - RNA, 19 nt, Homo sapiens
  misc_RNA (1)...(19): siRNA sense strand
ggaggaggaguuccaguuu

SEQ ID NO: 763850 - RNA, 19 nt, Homo sapiens
  misc_RNA (1)...(19): siRNA sense strand
gaggaggaguuccaguuuc

SEQ ID NO: 763851 - RNA, 19 nt, Homo sapiens
  misc_RNA (1)...(19): siRNA sense strand
ggaaagaugcagcuguauc

SEQ ID NO: 763852 - RNA, 19 nt, Homo sapiens
  misc_RNA (1)...(19): siRNA sense strand
gagcucaagugcgacauca

SEQ ID NO: 763853 - RNA, 19 nt, Homo sapiens
  misc_RNA (1)...(19): siRNA sense strand
gcagcuguauccaagaaag

SEQ ID NO: 763854 - RNA, 19 nt, Homo sapiens
  misc_RNA (1)...(19): siRNA sense strand
ggggaaagaugcagcugua

SEQ ID NO: 763855 - RNA, 19 nt, Homo sapiens
  misc_RNA (1)...(19): siRNA sense strand
gaaagaugcagcuguaucc

SEQ ID NO: 763856 - RNA, 19 nt, Homo sapiens
  misc_RNA (1)...(19): siRNA sense strand
cgaagcugcugccuugucu

SEQ ID NO: 763857 - RNA, 19 nt, Homo sapiens
  misc_RNA (1)...(19): siRNA sense strand
ugcagaggaugaagugcua

SEQ ID NO: 763858 - RNA, 19 nt, Homo sapiens
  misc_RNA (1)...(19): siRNA sense strand
cgacaucagcgcagagauc

SEQ ID NO: 763859 - RNA, 19 nt, Homo sapiens
  misc_RNA (1)...(19): siRNA sense strand
gggacccuauugacguuga

SEQ ID NO: 763860 - RNA, 19 nt, Homo sapiens
  misc_RNA (1)...(19): siRNA sense strand
ugcaggaccucagcucuug

SEQ ID NO: 763861 - RNA, 19 nt, Homo sapiens
  misc_RNA (1)...(19): siRNA sense strand
cgcccuggauaacgucuuu

SEQ ID NO: 763862 - RNA, 19 nt, Homo sapiens
  misc_RNA (1)...(19): siRNA sense strand
gccgacuucuggugcuuug

SEQ ID NO: 763863 - RNA, 19 nt, Homo sapiens
  misc_RNA (1)...(19): siRNA sense strand
gcgcuggugcagaggauga

SEQ ID NO: 763864 - RNA, 19 nt, Homo sapiens
  misc_RNA (1)...(19): siRNA sense strand
cggaggaggaguuccaguu

SEQ ID NO: 763865 - RNA, 19 nt, Homo sapiens
  misc_RNA (1)...(19): siRNA sense strand
ccgauggcuucgacgaguu

SEQ ID NO: 763866 - RNA, 19 nt, Homo sapiens
  misc_RNA (1)...(19): siRNA sense strand
aggaggaguuccaguuucu

SEQ ID NO: 763867 - RNA, 19 nt, Homo sapiens
  misc_RNA (1)...(19): siRNA sense strand
augcagcuguauccaagaa

SEQ ID NO: 763868 - RNA, 19 nt, Homo sapiens
  misc_RNA (1)...(19): siRNA sense strand
gguaccagcgcgacuacga

SEQ ID NO: 763869 - RNA, 19 nt, Homo sapiens
  misc_RNA (1)...(19): siRNA sense strand
gaccucagcucuugcauca

SEQ ID NO: 763870 - RNA, 19 nt, Homo sapiens
  misc_RNA (1)...(19): siRNA sense strand
ggagcaggauagugccuuu

SEQ ID NO: 763871 - RNA, 19 nt, Homo sapiens
  misc_RNA (1)...(19): siRNA sense strand
ggaggaggaguuccaguuu

SEQ ID NO: 763872 - RNA, 19 nt, Homo sapiens
  misc_RNA (1)...(19): siRNA sense strand
gaggaggaguuccaguuuc

SEQ ID NO: 763873 - RNA, 19 nt, Homo sapiens
  misc_RNA (1)...(19): siRNA sense strand
ggaaagaugcagcuguauc

SEQ ID NO: 763874 - RNA, 19 nt, Homo sapiens
  misc_RNA (1)...(19): siRNA sense strand
gagcucaagugcgacauca

SEQ ID NO: 763875 - RNA, 19 nt, Homo sapiens
  misc_RNA (1)...(19): siRNA sense strand
gcagcuguauccaagaaag

SEQ ID NO: 763876 - RNA, 19 nt, Homo sapiens
  misc_RNA (1)...(19): siRNA sense strand
ggggaaagaugcagcugua

SEQ ID NO: 763877 - RNA, 19 nt, Homo sapiens
  misc_RNA (1)...(19): siRNA sense strand
gaaagaugcagcuguaucc

SEQ ID NO: 763878 - RNA, 19 nt, Homo sapiens
  misc_RNA (1)...(19): siRNA sense strand
cgaagcugcugccuugucu

SEQ ID NO: 763879 - RNA, 19 nt, Homo sapiens
  misc_RNA (1)...(19): siRNA sense strand
ugcagaggaugaagugcua

SEQ ID NO: 763880 - RNA, 19 nt, Homo sapiens
  misc_RNA (1)...(19): siRNA sense strand
cgacaucagcgcagagauc

SEQ ID NO: 763881 - RNA, 19 nt, Homo sapiens
  misc_RNA (1)...(19): siRNA sense strand
gggacccuauugacguuga

SEQ ID NO: 763882 - RNA, 19 nt, Homo sapiens
  misc_RNA (1)...(19): siRNA sense strand
ugcaggaccucagcucuug

SEQ ID NO: 763883 - RNA, 19 nt, Homo sapiens
  misc_RNA (1)...(19): siRNA sense strand
cgcccuggauaacgucuuu

SEQ ID NO: 763884 - RNA, 19 nt, Homo sapiens
  misc_RNA (1)...(19): siRNA sense strand
gccgacuucuggugcuuug

SEQ ID NO: 763885 - RNA, 19 nt, Homo sapiens
  misc_RNA (1)...(19): siRNA sense strand
gcgcuggugcagaggauga

SEQ ID NO: 763886 - RNA, 19 nt, Homo sapiens
  misc_RNA (1)...(19): siRNA sense strand
cggaggaggaguuccaguu

SEQ ID NO: 763887 - RNA, 19 nt, Homo sapiens
  misc_RNA (1)...(19): siRNA sense strand
ccgauggcuucgacgaguu

SEQ ID NO: 763888 - RNA, 19 nt, Homo sapiens
  misc_RNA (1)...(19): siRNA sense strand
aggaggaguuccaguuucu

SEQ ID NO: 763889 - RNA, 19 nt, Homo sapiens
  misc_RNA (1)...(19): siRNA sense strand
augcagcuguauccaagaa

SEQ ID NO: 763890 - RNA, 19 nt, Homo sapiens
  misc_RNA (1)...(19): siRNA sense strand
gguaccagcgcgacuacga

SEQ ID NO: 763891 - RNA, 19 nt, Homo sapiens
  misc_RNA (1)...(19): siRNA sense strand
gaccucagcucuugcauca

SEQ ID NO: 763892 - RNA, 19 nt, Homo sapiens
  misc_RNA (1)...(19): siRNA sense strand
ggagcaggauagugccuuu

SEQ ID NO: 763893 - RNA, 19 nt, Homo sapiens
  misc_RNA (1)...(19): siRNA sense strand
ggaggaggaguuccaguuu

SEQ ID NO: 763894 - RNA, 19 nt, Homo sapiens
  misc_RNA (1)...(19): siRNA sense strand
gaggaggaguuccaguuuc

SEQ ID NO: 763895 - RNA, 19 nt, Homo sapiens
  misc_RNA (1)...(19): siRNA sense strand
ggaaagaugcagcuguauc

SEQ ID NO: 763896 - RNA, 19 nt, Homo sapiens
  misc_RNA (1)...(19): siRNA sense strand
gagcucaagugcgacauca

SEQ ID NO: 763897 - RNA, 19 nt, Homo sapiens
  misc_RNA (1)...(19): siRNA sense strand
gcagcuguauccaagaaag

SEQ ID NO: 763898 - RNA, 19 nt, Homo sapiens
  misc_RNA (1)...(19): siRNA sense strand
ggggaaagaugcagcugua

SEQ ID NO: 763899 - RNA, 19 nt, Homo sapiens
  misc_RNA (1)...(19): siRNA sense strand
gaaagaugcagcuguaucc

SEQ ID NO: 763900 - RNA, 19 nt, Homo sapiens
  misc_RNA (1)...(19): siRNA sense strand
cgaagcugcugccuugucu

SEQ ID NO: 763901 - RNA, 19 nt, Homo sapiens
  misc_RNA (1)...(19): siRNA sense strand
ugcagaggaugaagugcua

SEQ ID NO: 763902 - RNA, 19 nt, Homo sapiens
  misc_RNA (1)...(19): siRNA sense strand
cgacaucagcgcagagauc

SEQ ID NO: 763903 - RNA, 19 nt, Homo sapiens
  misc_RNA (1)...(19): siRNA sense strand
gggacccuauugacguuga

SEQ ID NO: 763904 - RNA, 19 nt, Homo sapiens
  misc_RNA (1)...(19): siRNA sense strand
ugcaggaccucagcucuug

SEQ ID NO: 763905 - RNA, 19 nt, Homo sapiens
  misc_RNA (1)...(19): siRNA sense strand
cgcccuggauaacgucuuu

SEQ ID NO: 763906 - RNA, 19 nt, Homo sapiens
  misc_RNA (1)...(19): siRNA sense strand
gccgacuucuggugcuuug

SEQ ID NO: 763907 - RNA, 19 nt, Homo sapiens
  misc_RNA (1)...(19): siRNA sense strand
gcgcuggugcagaggauga

SEQ ID NO: 763908 - RNA, 19 nt, Homo sapiens
  misc_RNA (1)...(19): siRNA sense strand
cggaggaggaguuccaguu

SEQ ID NO: 763909 - RNA, 19 nt, Homo sapiens
  misc_RNA (1)...(19): siRNA sense strand
ccgauggcuucgacgaguu

SEQ ID NO: 763910 - RNA, 19 nt, Homo sapiens
  misc_RNA (1)...(19): siRNA sense strand
aggaggaguuccaguuucu

SEQ ID NO: 763911 - RNA, 19 nt, Homo sapiens
  misc_RNA (1)...(19): siRNA sense strand
augcagcuguauccaagaa

SEQ ID NO: 763912 - RNA, 19 nt, Homo sapiens
  misc_RNA (1)...(19): siRNA sense strand
gguaccagcgcgacuacga

SEQ ID NO: 763913 - RNA, 19 nt, Homo sapiens
  misc_RNA (1)...(19): siRNA sense strand
gaccucagcucuugcauca

SEQ ID NO: 763914 - RNA, 19 nt, Homo sapiens
  misc_RNA (1)...(19): siRNA sense strand
ggagcaggauagugccuuu

SEQ ID NO: 763915 - RNA, 19 nt, Homo sapiens
  misc_RNA (1)...(19): siRNA sense strand
ggaggaggaguuccaguuu

SEQ ID NO: 763916 - RNA, 19 nt, Homo sapiens
  misc_RNA (1)...(19): siRNA sense strand
gaggaggaguuccaguuuc

SEQ ID NO: 763917 - RNA, 19 nt, Homo sapiens
  misc_RNA (1)...(19): siRNA sense strand
ggaaagaugcagcuguauc

SEQ ID NO: 763918 - RNA, 19 nt, Homo sapiens
  misc_RNA (1)...(19): siRNA sense strand
gagcucaagugcgacauca

SEQ ID NO: 763919 - RNA, 19 nt, Homo sapiens
  misc_RNA (1)...(19): siRNA sense strand
gcagcuguauccaagaaag

SEQ ID NO: 763920 - RNA, 19 nt, Homo sapiens
  misc_RNA (1)...(19): siRNA sense strand
ggggaaagaugcagcugua

SEQ ID NO: 763921 - RNA, 19 nt, Homo sapiens
  misc_RNA (1)...(19): siRNA sense strand
gaaagaugcagcuguaucc

SEQ ID NO: 763922 - RNA, 19 nt, Homo sapiens
  misc_RNA (1)...(19): siRNA sense strand
cgaagcugcugccuugucu

SEQ ID NO: 763923 - RNA, 19 nt, Homo sapiens
  misc_RNA (1)...(19): siRNA sense strand
ugcagaggaugaagugcua

SEQ ID NO: 763924 - RNA, 19 nt, Homo sapiens
  misc_RNA (1)...(19): siRNA sense strand
cgacaucagcgcagagauc

SEQ ID NO: 763925 - RNA, 19 nt, Homo sapiens
  misc_RNA (1)...(19): siRNA sense strand
gggacccuauugacguuga

SEQ ID NO: 763926 - RNA, 19 nt, Homo sapiens
  misc_RNA (1)...(19): siRNA sense strand
ugcaggaccucagcucuug

SEQ ID NO: 763927 - RNA, 19 nt, Homo sapiens
  misc_RNA (1)...(19): siRNA sense strand
cgcccuggauaacgucuuu

SEQ ID NO: 763928 - RNA, 19 nt, Homo sapiens
  misc_RNA (1)...(19): siRNA sense strand
gccgacuucuggugcuuug

SEQ ID NO: 763929 - RNA, 19 nt, Homo sapiens
  misc_RNA (1)...(19): siRNA sense strand
gcgcuggugcagaggauga

SEQ ID NO: 763930 - RNA, 19 nt, Homo sapiens
  misc_RNA (1)...(19): siRNA sense strand
cggaggaggaguuccaguu

SEQ ID NO: 763931 - RNA, 19 nt, Homo sapiens
  misc_RNA (1)...(19): siRNA sense strand
ccgauggcuucgacgaguu

SEQ ID NO: 763932 - RNA, 19 nt, Homo sapiens
  misc_RNA (1)...(19): siRNA sense strand
aggaggaguuccaguuucu

SEQ ID NO: 763933 - RNA, 19 nt, Homo sapiens
  misc_RNA (1)...(19): siRNA sense strand
augcagcuguauccaagaa

SEQ ID NO: 763934 - RNA, 19 nt, Homo sapiens
  misc_RNA (1)...(19): siRNA sense strand
gguaccagcgcgacuacga

SEQ ID NO: 763935 - RNA, 19 nt, Homo sapiens
  misc_RNA (1)...(19): siRNA sense strand
gaccucagcucuugcauca

SEQ ID NO: 763936 - RNA, 19 nt, Homo sapiens
  misc_RNA (1)...(19): siRNA sense strand
ggagcaggauagugccuuu

SEQ ID NO: 763937 - RNA, 19 nt, Homo sapiens
  misc_RNA (1)...(19): siRNA sense strand
ggaggaggaguuccaguuu

SEQ ID NO: 763938 - RNA, 19 nt, Homo sapiens
  misc_RNA (1)...(19): siRNA sense strand
gaggaggaguuccaguuuc

SEQ ID NO: 763939 - RNA, 19 nt, Homo sapiens
  misc_RNA (1)...(19): siRNA sense strand
ggaaagaugcagcuguauc

SEQ ID NO: 763940 - RNA, 19 nt, Homo sapiens
  misc_RNA (1)...(19): siRNA sense strand
gagcucaagugcgacauca

SEQ ID NO: 763941 - RNA, 19 nt, Homo sapiens
  misc_RNA (1)...(19): siRNA sense strand
gcagcuguauccaagaaag

SEQ ID NO: 763942 - RNA, 19 nt, Homo sapiens
  misc_RNA (1)...(19): siRNA sense strand
ggggaaagaugcagcugua

SEQ ID NO: 763943 - RNA, 19 nt, Homo sapiens
  misc_RNA (1)...(19): siRNA sense strand
gaaagaugcagcuguaucc

SEQ ID NO: 763944 - RNA, 19 nt, Homo sapiens
  misc_RNA (1)...(19): siRNA sense strand
cgaagcugcugccuugucu

SEQ ID NO: 763945 - RNA, 19 nt, Homo sapiens
  misc_RNA (1)...(19): siRNA sense strand
ugcagaggaugaagugcua

SEQ ID NO: 763946 - RNA, 19 nt, Homo sapiens
  misc_RNA (1)...(19): siRNA sense strand
cgacaucagcgcagagauc

SEQ ID NO: 763947 - RNA, 19 nt, Homo sapiens
  misc_RNA (1)...(19): siRNA sense strand
gggacccuauugacguuga

SEQ ID NO: 763948 - RNA, 19 nt, Homo sapiens
  misc_RNA (1)...(19): siRNA sense strand
ugcaggaccucagcucuug

SEQ ID NO: 763949 - RNA, 19 nt, Homo sapiens
  misc_RNA (1)...(19): siRNA sense strand
cgcccuggauaacgucuuu

SEQ ID NO: 763950 - RNA, 19 nt, Homo sapiens
  misc_RNA (1)...(19): siRNA sense strand
gccgacuucuggugcuuug

SEQ ID NO: 763951 - RNA, 19 nt, Homo sapiens
  misc_RNA (1)...(19): siRNA sense strand
gcgcuggugcagaggauga

SEQ ID NO: 763952 - RNA, 19 nt, Homo sapiens
  misc_RNA (1)...(19): siRNA sense strand
cggaggaggaguuccaguu

SEQ ID NO: 763953 - RNA, 19 nt, Homo sapiens
  misc_RNA (1)...(19): siRNA sense strand
ccgauggcuucgacgaguu

SEQ ID NO: 763954 - RNA, 19 nt, Homo sapiens
  misc_RNA (1)...(19): siRNA sense strand
aggaggaguuccaguuucu

SEQ ID NO: 763955 - RNA, 19 nt, Homo sapiens
  misc_RNA (1)...(19): siRNA sense strand
augcagcuguauccaagaa

SEQ ID NO: 763956 - RNA, 19 nt, Homo sapiens
  misc_RNA (1)...(19): siRNA sense strand
gguaccagcgcgacuacga

SEQ ID NO: 763957 - RNA, 19 nt, Homo sapiens
  misc_RNA (1)...(19): siRNA sense strand
gaccucagcucuugcauca

SEQ ID NO: 763958 - RNA, 19 nt, Homo sapiens
  misc_RNA (1)...(19): siRNA sense strand
ggagcaggauagugccuuu

SEQ ID NO: 763959 - RNA, 19 nt, Homo sapiens
  misc_RNA (1)...(19): siRNA sense strand
ggaggaggaguuccaguuu

SEQ ID NO: 763960 - RNA, 19 nt, Homo sapiens
  misc_RNA (1)...(19): siRNA sense strand
gaggaggaguuccaguuuc

SEQ ID NO: 763961 - RNA, 19 nt, Homo sapiens
  misc_RNA (1)...(19): siRNA sense strand
ggaaagaugcagcuguauc

SEQ ID NO: 763962 - RNA, 19 nt, Homo sapiens
  misc_RNA (1)...(19): siRNA sense strand
gagcucaagugcgacauca

SEQ ID NO: 763963 - RNA, 19 nt, Homo sapiens
  misc_RNA (1)...(19): siRNA sense strand
gcagcuguauccaagaaag

SEQ ID NO: 763964 - RNA, 19 nt, Homo sapiens
  misc_RNA (1)...(19): siRNA sense strand
ggggaaagaugcagcugua

SEQ ID NO: 763965 - RNA, 19 nt, Homo sapiens
  misc_RNA (1)...(19): siRNA sense strand
gaaagaugcagcuguaucc

SEQ ID NO: 763966 - RNA, 19 nt, Homo sapiens
  misc_RNA (1)...(19): siRNA sense strand
cgaagcugcugccuugucu

SEQ ID NO: 763967 - RNA, 19 nt, Homo sapiens
  misc_RNA (1)...(19): siRNA sense strand
ugcagaggaugaagugcua

SEQ ID NO: 763968 - RNA, 19 nt, Homo sapiens
  misc_RNA (1)...(19): siRNA sense strand
cgacaucagcgcagagauc

SEQ ID NO: 763969 - RNA, 19 nt, Homo sapiens
  misc_RNA (1)...(19): siRNA sense strand
gggacccuauugacguuga

SEQ ID NO: 763970 - RNA, 19 nt, Homo sapiens
  misc_RNA (1)...(19): siRNA sense strand
ugcaggaccucagcucuug

SEQ ID NO: 763971 - RNA, 19 nt, Homo sapiens
  misc_RNA (1)...(19): siRNA sense strand
cgcccuggauaacgucuuu

SEQ ID NO: 763972 - RNA, 19 nt, Homo sapiens
  misc_RNA (1)...(19): siRNA sense strand
gccgacuucuggugcuuug

SEQ ID NO: 763973 - RNA, 19 nt, Homo sapiens
  misc_RNA (1)...(19): siRNA sense strand
gcgcuggugcagaggauga

SEQ ID NO: 763974 - RNA, 19 nt, Homo sapiens
  misc_RNA (1)...(19): siRNA sense strand
cggaggaggaguuccaguu

SEQ ID NO: 763975 - RNA, 19 nt, Homo sapiens
  misc_RNA (1)...(19): siRNA sense strand
ccgauggcuucgacgaguu

SEQ ID NO: 763976 - RNA, 19 nt, Homo sapiens
  misc_RNA (1)...(19): siRNA sense strand
aggaggaguuccaguuucu

SEQ ID NO: 763977 - RNA, 19 nt, Homo sapiens
  misc_RNA (1)...(19): siRNA sense strand
augcagcuguauccaagaa

SEQ ID NO: 763978 - RNA, 19 nt, Homo sapiens
  misc_RNA (1)...(19): siRNA sense strand
gguaccagcgcgacuacga

SEQ ID NO: 763979 - RNA, 19 nt, Homo sapiens
  misc_RNA (1)...(19): siRNA sense strand
gaaggaaucucaauuugua

SEQ ID NO: 763980 - RNA, 19 nt, Homo sapiens
  misc_RNA (1)...(19): siRNA sense strand
uagcaaaggugaaaguuua

SEQ ID NO: 763981 - RNA, 19 nt, Homo sapiens
  misc_RNA (1)...(19): siRNA sense strand
ggugaaaguuuauggcuaa

SEQ ID NO: 763982 - RNA, 19 nt, Homo sapiens
  misc_RNA (1)...(19): siRNA sense strand
gacuuuagcccaauuaaua

SEQ ID NO: 763983 - RNA, 19 nt, Homo sapiens
  misc_RNA (1)...(19): siRNA sense strand
ccagaacacugccaaguau

SEQ ID NO: 763984 - RNA, 19 nt, Homo sapiens
  misc_RNA (1)...(19): siRNA sense strand
caaucugacuguaaucuaa

SEQ ID NO: 763985 - RNA, 19 nt, Homo sapiens
  misc_RNA (1)...(19): siRNA sense strand
gcaucgugcucuuguuuaa

SEQ ID NO: 763986 - RNA, 19 nt, Homo sapiens
  misc_RNA (1)...(19): siRNA sense strand
gaacaucaaaggaggugua

SEQ ID NO: 763987 - RNA, 19 nt, Homo sapiens
  misc_RNA (1)...(19): siRNA sense strand
uaacagagacgcacgcauu

SEQ ID NO: 763988 - RNA, 19 nt, Homo sapiens
  misc_RNA (1)...(19): siRNA sense strand
gcacaccagucuucucaau

SEQ ID NO: 763989 - RNA, 19 nt, Homo sapiens
  misc_RNA (1)...(19): siRNA sense strand
caucaaaggagguguauga

SEQ ID NO: 763990 - RNA, 19 nt, Homo sapiens
  misc_RNA (1)...(19): siRNA sense strand
ccacuuggcaucucuguuu

SEQ ID NO: 763991 - RNA, 19 nt, Homo sapiens
  misc_RNA (1)...(19): siRNA sense strand
ggagggcucuguacaaugc

SEQ ID NO: 763992 - RNA, 19 nt, Homo sapiens
  misc_RNA (1)...(19): siRNA sense strand
ggagccucaucucaucuua

SEQ ID NO: 763993 - RNA, 19 nt, Homo sapiens
  misc_RNA (1)...(19): siRNA sense strand
gagaucaacuccaccuucu

SEQ ID NO: 763994 - RNA, 19 nt, Homo sapiens
  misc_RNA (1)...(19): siRNA sense strand
gcagauggccacccaguca

SEQ ID NO: 763995 - RNA, 19 nt, Homo sapiens
  misc_RNA (1)...(19): siRNA sense strand
ccuuacaggcuuaaacuua

SEQ ID NO: 763996 - RNA, 19 nt, Homo sapiens
  misc_RNA (1)...(19): siRNA sense strand
gaucaacuccaccuucugu

SEQ ID NO: 763997 - RNA, 19 nt, Homo sapiens
  misc_RNA (1)...(19): siRNA sense strand
cugaaggaaucucaauuug

SEQ ID NO: 763998 - RNA, 19 nt, Homo sapiens
  misc_RNA (1)...(19): siRNA sense strand
uggcaucucuguuucugaa

SEQ ID NO: 763999 - RNA, 19 nt, Homo sapiens
  misc_RNA (1)...(19): siRNA sense strand
gguuggaccugaaggaauc

SEQ ID NO: 764000 - RNA, 19 nt, Homo sapiens
  misc_RNA (1)...(19): siRNA sense strand
gcaucucuguuucugaaug

SEQ ID NO: 764001 - RNA, 19 nt, Homo sapiens
  misc_RNA (1)...(19): siRNA sense strand
gcgccgugaugaugcagua

SEQ ID NO: 764002 - RNA, 19 nt, Homo sapiens
  misc_RNA (1)...(19): siRNA sense strand
caggagggcucuguacaau

SEQ ID NO: 764003 - RNA, 19 nt, Homo sapiens
  misc_RNA (1)...(19): siRNA sense strand
guagcaaaggugaaaguuu

SEQ ID NO: 764004 - RNA, 19 nt, Homo sapiens
  misc_RNA (1)...(19): siRNA sense strand
caucucuguuucugaauga

SEQ ID NO: 764005 - RNA, 19 nt, Homo sapiens
  misc_RNA (1)...(19): siRNA sense strand
ccugaaggaaucucaauuu

SEQ ID NO: 764006 - RNA, 19 nt, Homo sapiens
  misc_RNA (1)...(19): siRNA sense strand
acaccagucuucucaaucu

SEQ ID NO: 764007 - RNA, 19 nt, Homo sapiens
  misc_RNA (1)...(19): siRNA sense strand
agaacacugccaaguauaa

SEQ ID NO: 764008 - RNA, 19 nt, Homo sapiens
  misc_RNA (1)...(19): siRNA sense strand
guauagccgugacuugaag

SEQ ID NO: 764009 - RNA, 19 nt, Homo sapiens
  misc_RNA (1)...(19): siRNA sense strand
ucagcugaauaccaaguuu

SEQ ID NO: 764010 - RNA, 19 nt, Homo sapiens
  misc_RNA (1)...(19): siRNA sense strand
gcagacuaggcauaucuuu

SEQ ID NO: 764011 - RNA, 19 nt, Homo sapiens
  misc_RNA (1)...(19): siRNA sense strand
cagagacgcacgcauucua

SEQ ID NO: 764012 - RNA, 19 nt, Homo sapiens
  misc_RNA (1)...(19): siRNA sense strand
gaugacuuuagcccaauua

SEQ ID NO: 764013 - RNA, 19 nt, Homo sapiens
  misc_RNA (1)...(19): siRNA sense strand
gaccagcgccgugaugaug

SEQ ID NO: 764014 - RNA, 19 nt, Homo sapiens
  misc_RNA (1)...(19): siRNA sense strand
uuacaggcuuaaacuuaga

SEQ ID NO: 764015 - RNA, 19 nt, Homo sapiens
  misc_RNA (1)...(19): siRNA sense strand
gcaguuuacggguagcaaa

SEQ ID NO: 764016 - RNA, 19 nt, Homo sapiens
  misc_RNA (1)...(19): siRNA sense strand
gcaguauagccgugacuug

SEQ ID NO: 764017 - RNA, 19 nt, Homo sapiens
  misc_RNA (1)...(19): siRNA sense strand
ugaaggaaucucaauuugu

SEQ ID NO: 764018 - RNA, 19 nt, Homo sapiens
  misc_RNA (1)...(19): siRNA sense strand
gagcagacuaggcauaucu

SEQ ID NO: 764019 - RNA, 19 nt, Homo sapiens
  misc_RNA (1)...(19): siRNA sense strand
ucagaaagcagcaugaacu

SEQ ID NO: 764020 - RNA, 19 nt, Homo sapiens
  misc_RNA (1)...(19): siRNA sense strand
caguauagccgugacuuga

SEQ ID NO: 764021 - RNA, 19 nt, Homo sapiens
  misc_RNA (1)...(19): siRNA sense strand
cuuacaggcuuaaacuuag

SEQ ID NO: 764022 - RNA, 19 nt, Homo sapiens
  misc_RNA (1)...(19): siRNA sense strand
caggccaccucuuguguuc

SEQ ID NO: 764023 - RNA, 19 nt, Homo sapiens
  misc_RNA (1)...(19): siRNA sense strand
gcaggccaccucuuguguu

SEQ ID NO: 764024 - RNA, 19 nt, Homo sapiens
  misc_RNA (1)...(19): siRNA sense strand
gcaaaggugaaaguuuaug

SEQ ID NO: 764025 - RNA, 19 nt, Homo sapiens
  misc_RNA (1)...(19): siRNA sense strand
ccaggagggcucuguacaa

SEQ ID NO: 764026 - RNA, 19 nt, Homo sapiens
  misc_RNA (1)...(19): siRNA sense strand
ggauagcgaagggcagaaa

SEQ ID NO: 764027 - RNA, 19 nt, Homo sapiens
  misc_RNA (1)...(19): siRNA sense strand
cagaacacugccaaguaua

SEQ ID NO: 764028 - RNA, 19 nt, Homo sapiens
  misc_RNA (1)...(19): siRNA sense strand
ggucgcguguggagcaugu

SEQ ID NO: 764029 - RNA, 19 nt, Homo sapiens
  misc_RNA (1)...(19): siRNA sense strand
ccaauuaauaggauagcuu

SEQ ID NO: 764030 - RNA, 19 nt, Homo sapiens
  misc_RNA (1)...(19): siRNA sense strand
acacugccaaguauaacua

SEQ ID NO: 764031 - RNA, 19 nt, Homo sapiens
  misc_RNA (1)...(19): siRNA sense strand
gcuuaaacuuagagucaag

SEQ ID NO: 764032 - RNA, 19 nt, Homo sapiens
  misc_RNA (1)...(19): siRNA sense strand
uagcccaauuaauaggaua

SEQ ID NO: 764033 - RNA, 19 nt, Homo sapiens
  misc_RNA (1)...(19): siRNA sense strand
ggagcagacuaggcauauc

SEQ ID NO: 764034 - RNA, 19 nt, Homo sapiens
  misc_RNA (1)...(19): siRNA sense strand
ucaaucugacuguaaucua

SEQ ID NO: 764035 - RNA, 19 nt, Homo sapiens
  misc_RNA (1)...(19): siRNA sense strand
ccgcccagcuacagucaug

SEQ ID NO: 764036 - RNA, 19 nt, Homo sapiens
  misc_RNA (1)...(19): siRNA sense strand
cguggagccucaucucauc

SEQ ID NO: 764037 - RNA, 19 nt, Homo sapiens
  misc_RNA (1)...(19): siRNA sense strand
gaacacugccaaguauaac

SEQ ID NO: 764038 - RNA, 19 nt, Homo sapiens
  misc_RNA (1)...(19): siRNA sense strand
cgacugggaaucauagaag

SEQ ID NO: 764039 - RNA, 19 nt, Homo sapiens
  misc_RNA (1)...(19): siRNA sense strand
gccgugaugaugcaguaua

SEQ ID NO: 764040 - RNA, 19 nt, Homo sapiens
  misc_RNA (1)...(19): siRNA sense strand
caggagcagacuaggcaua

SEQ ID NO: 764041 - RNA, 19 nt, Homo sapiens
  misc_RNA (1)...(19): siRNA sense strand
gcauguccagcacgucuau

SEQ ID NO: 764042 - RNA, 19 nt, Homo sapiens
  misc_RNA (1)...(19): siRNA sense strand
gacugggaaucauagaagu

SEQ ID NO: 764043 - RNA, 19 nt, Homo sapiens
  misc_RNA (1)...(19): siRNA sense strand
ugacuugaagggccacuug

SEQ ID NO: 764044 - RNA, 19 nt, Homo sapiens
  misc_RNA (1)...(19): siRNA sense strand
caaaggugaaaguuuaugg

SEQ ID NO: 764045 - RNA, 19 nt, Homo sapiens
  misc_RNA (1)...(19): siRNA sense strand
gcaggcgacugggaaucau

SEQ ID NO: 764046 - RNA, 19 nt, Homo sapiens
  misc_RNA (1)...(19): siRNA sense strand
ggaaucucaauuuguaaag

SEQ ID NO: 764047 - RNA, 19 nt, Homo sapiens
  misc_RNA (1)...(19): siRNA sense strand
ggcuuaaacuuagagucaa

SEQ ID NO: 764048 - RNA, 19 nt, Homo sapiens
  misc_RNA (1)...(19): siRNA sense strand
agucaggaaagaauguaua

SEQ ID NO: 764049 - RNA, 19 nt, Homo sapiens
  misc_RNA (1)...(19): siRNA sense strand
gcgaggaggagaucaacuc

SEQ ID NO: 764050 - RNA, 19 nt, Homo sapiens
  misc_RNA (1)...(19): siRNA sense strand
accagaacacugccaagua

SEQ ID NO: 764051 - RNA, 19 nt, Homo sapiens
  misc_RNA (1)...(19): siRNA sense strand
ccaacgcacaccagucuuc

SEQ ID NO: 764052 - RNA, 19 nt, Homo sapiens
  misc_RNA (1)...(19): siRNA sense strand
ccuucacacucgccucuga

SEQ ID NO: 764053 - RNA, 19 nt, Homo sapiens
  misc_RNA (1)...(19): siRNA sense strand
guggaccucguuucaagaa

SEQ ID NO: 764054 - RNA, 19 nt, Homo sapiens
  misc_RNA (1)...(19): siRNA sense strand
gucaggaaagaauguauau

SEQ ID NO: 764055 - RNA, 19 nt, Homo sapiens
  misc_RNA (1)...(19): siRNA sense strand
gaccugaaggaaucucaau

SEQ ID NO: 764056 - RNA, 19 nt, Homo sapiens
  misc_RNA (1)...(19): siRNA sense strand
ugacuuuagcccaauuaau

SEQ ID NO: 764057 - RNA, 19 nt, Homo sapiens
  misc_RNA (1)...(19): siRNA sense strand
gagcaggcaguggaacuca

SEQ ID NO: 764058 - RNA, 19 nt, Homo sapiens
  misc_RNA (1)...(19): siRNA sense strand
gcgacugggaaucauagaa

SEQ ID NO: 764059 - RNA, 19 nt, Homo sapiens
  misc_RNA (1)...(19): siRNA sense strand
aggcuuaaacuuagaguca

SEQ ID NO: 764060 - RNA, 19 nt, Homo sapiens
  misc_RNA (1)...(19): siRNA sense strand
gguagcaaaggugaaaguu

SEQ ID NO: 764061 - RNA, 19 nt, Homo sapiens
  misc_RNA (1)...(19): siRNA sense strand
ggaccugaaggaaucucaa

SEQ ID NO: 764062 - RNA, 19 nt, Homo sapiens
  misc_RNA (1)...(19): siRNA sense strand
gcaggcaguggaacucagu

SEQ ID NO: 764063 - RNA, 19 nt, Homo sapiens
  misc_RNA (1)...(19): siRNA sense strand
agccucaucucaucuuaca

SEQ ID NO: 764064 - RNA, 19 nt, Homo sapiens
  misc_RNA (1)...(19): siRNA sense strand
cagaaagcagcaugaacug

SEQ ID NO: 764065 - RNA, 19 nt, Homo sapiens
  misc_RNA (1)...(19): siRNA sense strand
aaccagagcccuucacacu

SEQ ID NO: 764066 - RNA, 19 nt, Homo sapiens
  misc_RNA (1)...(19): siRNA sense strand
ccgugaugaugcaguauag

SEQ ID NO: 764067 - RNA, 19 nt, Homo sapiens
  misc_RNA (1)...(19): siRNA sense strand
ggcauucugugcgggauag

SEQ ID NO: 764068 - RNA, 19 nt, Homo sapiens
  misc_RNA (1)...(19): siRNA sense strand
gcagcgagcuuccaucauu

SEQ ID NO: 764069 - RNA, 19 nt, Homo sapiens
  misc_RNA (1)...(19): siRNA sense strand
gaacuuugaucucccugua

SEQ ID NO: 764070 - RNA, 19 nt, Homo sapiens
  misc_RNA (1)...(19): siRNA sense strand
gagaggagccggacuauga

SEQ ID NO: 764071 - RNA, 19 nt, Homo sapiens
  misc_RNA (1)...(19): siRNA sense strand
cgacaucacuaaacagauu

SEQ ID NO: 764072 - RNA, 19 nt, Homo sapiens
  misc_RNA (1)...(19): siRNA sense strand
gcaccgacaucacuaaaca

SEQ ID NO: 764073 - RNA, 19 nt, Homo sapiens
  misc_RNA (1)...(19): siRNA sense strand
agacauggaugaaauugaa

SEQ ID NO: 764074 - RNA, 19 nt, Homo sapiens
  misc_RNA (1)...(19): siRNA sense strand
caacaugauugaaguagau

SEQ ID NO: 764075 - RNA, 19 nt, Homo sapiens
  misc_RNA (1)...(19): siRNA sense strand
gaucauaguauucguauuc

SEQ ID NO: 764076 - RNA, 19 nt, Homo sapiens
  misc_RNA (1)...(19): siRNA sense strand
aagcagaugugaugauuga

SEQ ID NO: 764077 - RNA, 19 nt, Homo sapiens
  misc_RNA (1)...(19): siRNA sense strand
caaggauucucagaucaua

SEQ ID NO: 764078 - RNA, 19 nt, Homo sapiens
  misc_RNA (1)...(19): siRNA sense strand
caagcucugugcaacauuu

SEQ ID NO: 764079 - RNA, 19 nt, Homo sapiens
  misc_RNA (1)...(19): siRNA sense strand
gcaauguuaagcagaguua

SEQ ID NO: 764080 - RNA, 19 nt, Homo sapiens
  misc_RNA (1)...(19): siRNA sense strand
ggccuugccuucaacauga

SEQ ID NO: 764081 - RNA, 19 nt, Homo sapiens
  misc_RNA (1)...(19): siRNA sense strand
uaacagcaguauuaagcaa

SEQ ID NO: 764082 - RNA, 19 nt, Homo sapiens
  misc_RNA (1)...(19): siRNA sense strand
aagaggagcucacacugaa

SEQ ID NO: 764083 - RNA, 19 nt, Homo sapiens
  misc_RNA (1)...(19): siRNA sense strand
ugaagcaggucacaauugu

SEQ ID NO: 764084 - RNA, 19 nt, Homo sapiens
  misc_RNA (1)...(19): siRNA sense strand
aauauuacgugcuguguga

SEQ ID NO: 764085 - RNA, 19 nt, Homo sapiens
  misc_RNA (1)...(19): siRNA sense strand
gaacaacauccggcaauau

SEQ ID NO: 764086 - RNA, 19 nt, Homo sapiens
  misc_RNA (1)...(19): siRNA sense strand
gaaagacagcggcauuugu

SEQ ID NO: 764087 - RNA, 19 nt, Homo sapiens
  misc_RNA (1)...(19): siRNA sense strand
ugaagcagaugugaugauu

SEQ ID NO: 764088 - RNA, 19 nt, Homo sapiens
  misc_RNA (1)...(19): siRNA sense strand
ggaugaagcagaugugaug

SEQ ID NO: 764089 - RNA, 19 nt, Homo sapiens
  misc_RNA (1)...(19): siRNA sense strand
ugaacaacauccggcaaua

SEQ ID NO: 764090 - RNA, 19 nt, Homo sapiens
  misc_RNA (1)...(19): siRNA sense strand
gcacuuugcugagcgaauc

SEQ ID NO: 764091 - RNA, 19 nt, Homo sapiens
  misc_RNA (1)...(19): siRNA sense strand
ugacuaagauucguguguu

SEQ ID NO: 764092 - RNA, 19 nt, Homo sapiens
  misc_RNA (1)...(19): siRNA sense strand
acucaacgcugaagacaug

SEQ ID NO: 764093 - RNA, 19 nt, Homo sapiens
  misc_RNA (1)...(19): siRNA sense strand
ggaaagacagcggcauuug

SEQ ID NO: 764094 - RNA, 19 nt, Homo sapiens
  misc_RNA (1)...(19): siRNA sense strand
gacuaagauucguguguuu

SEQ ID NO: 764095 - RNA, 19 nt, Homo sapiens
  misc_RNA (1)...(19): siRNA sense strand
gcacaggaaagacaaauac

SEQ ID NO: 764096 - RNA, 19 nt, Homo sapiens
  misc_RNA (1)...(19): siRNA sense strand
cacuuuaacagcaguauua

SEQ ID NO: 764097 - RNA, 19 nt, Homo sapiens
  misc_RNA (1)...(19): siRNA sense strand
caauuguugugaacuuuga

SEQ ID NO: 764098 - RNA, 19 nt, Homo sapiens
  misc_RNA (1)...(19): siRNA sense strand
guuaaugccuuggaauugu

SEQ ID NO: 764099 - RNA, 19 nt, Homo sapiens
  misc_RNA (1)...(19): siRNA sense strand
gauuuaauaggccaucuaa

SEQ ID NO: 764100 - RNA, 19 nt, Homo sapiens
  misc_RNA (1)...(19): siRNA sense strand
gcaaagaggagcucacacu

SEQ ID NO: 764101 - RNA, 19 nt, Homo sapiens
  misc_RNA (1)...(19): siRNA sense strand
cugaagacauggaugaaau

SEQ ID NO: 764102 - RNA, 19 nt, Homo sapiens
  misc_RNA (1)...(19): siRNA sense strand
gaagacauggaugaaauug

SEQ ID NO: 764103 - RNA, 19 nt, Homo sapiens
  misc_RNA (1)...(19): siRNA sense strand
gaguuaaugccuuggaauu

SEQ ID NO: 764104 - RNA, 19 nt, Homo sapiens
  misc_RNA (1)...(19): siRNA sense strand
gaaaauccaggaccacuuu

SEQ ID NO: 764105 - RNA, 19 nt, Homo sapiens
  misc_RNA (1)...(19): siRNA sense strand
ugaauuggcucugcaaacu

SEQ ID NO: 764106 - RNA, 19 nt, Homo sapiens
  misc_RNA (1)...(19): siRNA sense strand
caagugauguaugccauuc

SEQ ID NO: 764107 - RNA, 19 nt, Homo sapiens
  misc_RNA (1)...(19): siRNA sense strand
aaucaucccugacccuaau

SEQ ID NO: 764108 - RNA, 19 nt, Homo sapiens
  misc_RNA (1)...(19): siRNA sense strand
gagcagcgagcuuccauca

SEQ ID NO: 764109 - RNA, 19 nt, Homo sapiens
  misc_RNA (1)...(19): siRNA sense strand
cugccuagcuccuacuuau

SEQ ID NO: 764110 - RNA, 19 nt, Homo sapiens
  misc_RNA (1)...(19): siRNA sense strand
gcaaacuggccgugugguu

SEQ ID NO: 764111 - RNA, 19 nt, Homo sapiens
  misc_RNA (1)...(19): siRNA sense strand
acaacauccggcaauauua

SEQ ID NO: 764112 - RNA, 19 nt, Homo sapiens
  misc_RNA (1)...(19): siRNA sense strand
acccuaauguuaucaaguu

SEQ ID NO: 764113 - RNA, 19 nt, Homo sapiens
  misc_RNA (1)...(19): siRNA sense strand
aaagaggagcucacacuga

SEQ ID NO: 764114 - RNA, 19 nt, Homo sapiens
  misc_RNA (1)...(19): siRNA sense strand
gccuagcuccuacuuauga

SEQ ID NO: 764115 - RNA, 19 nt, Homo sapiens
  misc_RNA (1)...(19): siRNA sense strand
gaaucaucccugacccuaa

SEQ ID NO: 764116 - RNA, 19 nt, Homo sapiens
  misc_RNA (1)...(19): siRNA sense strand
cagaguuaaugccuuggaa

SEQ ID NO: 764117 - RNA, 19 nt, Homo sapiens
  misc_RNA (1)...(19): siRNA sense strand
gaaagacaaauaccaagcu

SEQ ID NO: 764118 - RNA, 19 nt, Homo sapiens
  misc_RNA (1)...(19): siRNA sense strand
guuaucaaguuacgcaaag

SEQ ID NO: 764119 - RNA, 19 nt, Homo sapiens
  misc_RNA (1)...(19): siRNA sense strand
acucaaggauucucagauc

SEQ ID NO: 764120 - RNA, 19 nt, Homo sapiens
  misc_RNA (1)...(19): siRNA sense strand
gcagaugugaugauugaca

SEQ ID NO: 764121 - RNA, 19 nt, Homo sapiens
  misc_RNA (1)...(19): siRNA sense strand
gacaucacuaaacagauua

SEQ ID NO: 764122 - RNA, 19 nt, Homo sapiens
  misc_RNA (1)...(19): siRNA sense strand
uuaaugccuuggaauuguu

SEQ ID NO: 764123 - RNA, 19 nt, Homo sapiens
  misc_RNA (1)...(19): siRNA sense strand
aaagacagcggcauuugug

SEQ ID NO: 764124 - RNA, 19 nt, Homo sapiens
  misc_RNA (1)...(19): siRNA sense strand
caacauccggcaauauuac

SEQ ID NO: 764125 - RNA, 19 nt, Homo sapiens
  misc_RNA (1)...(19): siRNA sense strand
gacagcggcauuuguguug

SEQ ID NO: 764126 - RNA, 19 nt, Homo sapiens
  misc_RNA (1)...(19): siRNA sense strand
caggaaagacaaauaccaa

SEQ ID NO: 764127 - RNA, 19 nt, Homo sapiens
  misc_RNA (1)...(19): siRNA sense strand
gaagcagaugugaugauug

SEQ ID NO: 764128 - RNA, 19 nt, Homo sapiens
  misc_RNA (1)...(19): siRNA sense strand
ggauuuaauaggccaucua

SEQ ID NO: 764129 - RNA, 19 nt, Homo sapiens
  misc_RNA (1)...(19): siRNA sense strand
gagcucacacugaacaaca

SEQ ID NO: 764130 - RNA, 19 nt, Homo sapiens
  misc_RNA (1)...(19): siRNA sense strand
ugaagacauggaugaaauu

SEQ ID NO: 764131 - RNA, 19 nt, Homo sapiens
  misc_RNA (1)...(19): siRNA sense strand
acuuugaucucccuguaaa

SEQ ID NO: 764132 - RNA, 19 nt, Homo sapiens
  misc_RNA (1)...(19): siRNA sense strand
aagcaggucacaauuguug

SEQ ID NO: 764133 - RNA, 19 nt, Homo sapiens
  misc_RNA (1)...(19): siRNA sense strand
gaagcaggucacaauuguu

SEQ ID NO: 764134 - RNA, 19 nt, Homo sapiens
  misc_RNA (1)...(19): siRNA sense strand
cagcgagcuuccaucauuc

SEQ ID NO: 764135 - RNA, 19 nt, Homo sapiens
  misc_RNA (1)...(19): siRNA sense strand
aacaacauccggcaauauu

SEQ ID NO: 764136 - RNA, 19 nt, Homo sapiens
  misc_RNA (1)...(19): siRNA sense strand
aaacuggccgugugguuga

SEQ ID NO: 764137 - RNA, 19 nt, Homo sapiens
  misc_RNA (1)...(19): siRNA sense strand
gaggagcucacacugaaca

SEQ ID NO: 764138 - RNA, 19 nt, Homo sapiens
  misc_RNA (1)...(19): siRNA sense strand
caggaaagacagcggcauu

SEQ ID NO: 764139 - RNA, 19 nt, Homo sapiens
  misc_RNA (1)...(19): siRNA sense strand
ucagaucauaguauucgua

SEQ ID NO: 764140 - RNA, 19 nt, Homo sapiens
  misc_RNA (1)...(19): siRNA sense strand
gcugaagacauggaugaaa

SEQ ID NO: 764141 - RNA, 19 nt, Homo sapiens
  misc_RNA (1)...(19): siRNA sense strand
cccuaauguuaucaaguua

SEQ ID NO: 764142 - RNA, 19 nt, Homo sapiens
  misc_RNA (1)...(19): siRNA sense strand
guucucauaacaacuaaug

SEQ ID NO: 764143 - RNA, 19 nt, Homo sapiens
  misc_RNA (1)...(19): siRNA sense strand
gccaaaugcuccucuuuuc

SEQ ID NO: 764144 - RNA, 19 nt, Homo sapiens
  misc_RNA (1)...(19): siRNA sense strand
gaccuaccuccaccgcaua

SEQ ID NO: 764145 - RNA, 19 nt, Homo sapiens
  misc_RNA (1)...(19): siRNA sense strand
cccgagggauugaugugaa

SEQ ID NO: 764146 - RNA, 19 nt, Homo sapiens
  misc_RNA (1)...(19): siRNA sense strand
ccaggugucuuuguuaagc

SEQ ID NO: 764147 - RNA, 19 nt, Homo sapiens
  misc_RNA (1)...(19): siRNA sense strand
aagguucucauaacaacua

SEQ ID NO: 764148 - RNA, 19 nt, Homo sapiens
  misc_RNA (1)...(19): siRNA sense strand
gaggcaccgacaucacuaa

SEQ ID NO: 764149 - RNA, 19 nt, Homo sapiens
  misc_RNA (1)...(19): siRNA sense strand
caacucaacgcugaagaca

SEQ ID NO: 764150 - RNA, 19 nt, Homo sapiens
  misc_RNA (1)...(19): siRNA sense strand
gcaauauuacgugcugugu

SEQ ID NO: 764151 - RNA, 19 nt, Homo sapiens
  misc_RNA (1)...(19): siRNA sense strand
gaauuggcucugcaaacug

SEQ ID NO: 764152 - RNA, 19 nt, Homo sapiens
  misc_RNA (1)...(19): siRNA sense strand
gauguucaagugauguaug

SEQ ID NO: 764153 - RNA, 19 nt, Homo sapiens
  misc_RNA (1)...(19): siRNA sense strand
gcucugugcaacauuuaug

SEQ ID NO: 764154 - RNA, 19 nt, Homo sapiens
  misc_RNA (1)...(19): siRNA sense strand
agauggcucucccuaugau

SEQ ID NO: 764155 - RNA, 19 nt, Homo sapiens
  misc_RNA (1)...(19): siRNA sense strand
gagcacaggaaagacaaau

SEQ ID NO: 764156 - RNA, 19 nt, Homo sapiens
  misc_RNA (1)...(19): siRNA sense strand
gcagaguuaaugccuugga

SEQ ID NO: 764157 - RNA, 19 nt, Homo sapiens
  misc_RNA (1)...(19): siRNA sense strand
gagcucuacccuccgaaug

SEQ ID NO: 764158 - RNA, 19 nt, Homo sapiens
  misc_RNA (1)...(19): siRNA sense strand
cagaucauaguauucguau

SEQ ID NO: 764159 - RNA, 19 nt, Homo sapiens
  misc_RNA (1)...(19): siRNA sense strand
uagcuccuacuuaugaauu

SEQ ID NO: 764160 - RNA, 19 nt, Homo sapiens
  misc_RNA (1)...(19): siRNA sense strand
agacagcggcauuuguguu

SEQ ID NO: 764161 - RNA, 19 nt, Homo sapiens
  misc_RNA (1)...(19): siRNA sense strand
cggcauuuguguuggcaau

SEQ ID NO: 764162 - RNA, 19 nt, Homo sapiens
  misc_RNA (1)...(19): siRNA sense strand
uaagauucguguguuuguc

SEQ ID NO: 764163 - RNA, 19 nt, Homo sapiens
  misc_RNA (1)...(19): siRNA sense strand
aaauccaggaccacuuuaa

SEQ ID NO: 764164 - RNA, 19 nt, Homo sapiens
  misc_RNA (1)...(19): siRNA sense strand
gucgaaacgcuaagugguu

SEQ ID NO: 764165 - RNA, 19 nt, Homo sapiens
  misc_RNA (1)...(19): siRNA sense strand
aaggagaggagccggacua

SEQ ID NO: 764166 - RNA, 19 nt, Homo sapiens
  misc_RNA (1)...(19): siRNA sense strand
gcaacucaacgcugaagac

SEQ ID NO: 764167 - RNA, 19 nt, Homo sapiens
  misc_RNA (1)...(19): siRNA sense strand
ggagaggagccggacuaug

SEQ ID NO: 764168 - RNA, 19 nt, Homo sapiens
  misc_RNA (1)...(19): siRNA sense strand
gaucaaguauggacacuga

SEQ ID NO: 764169 - RNA, 19 nt, Homo sapiens
  misc_RNA (1)...(19): siRNA sense strand
agagguggcucagaaauuc

SEQ ID NO: 764170 - RNA, 19 nt, Homo sapiens
  misc_RNA (1)...(19): siRNA sense strand
uccaagagguggcucagaa

SEQ ID NO: 764171 - RNA, 19 nt, Homo sapiens
  misc_RNA (1)...(19): siRNA sense strand
gaaugccuuuucucuuuua

SEQ ID NO: 764172 - RNA, 19 nt, Homo sapiens
  misc_RNA (1)...(19): siRNA sense strand
uacccuggcucaacuguau

SEQ ID NO: 764173 - RNA, 19 nt, Homo sapiens
  misc_RNA (1)...(19): siRNA sense strand
ucgaaugccuuuucucuuu

SEQ ID NO: 764174 - RNA, 19 nt, Homo sapiens
  misc_RNA (1)...(19): siRNA sense strand
cagcuccacugcacugugu

SEQ ID NO: 764175 - RNA, 19 nt, Homo sapiens
  misc_RNA (1)...(19): siRNA sense strand
ccaagagguggcucagaaa

SEQ ID NO: 764176 - RNA, 19 nt, Homo sapiens
  misc_RNA (1)...(19): siRNA sense strand
caagagguggcucagaaau

SEQ ID NO: 764177 - RNA, 19 nt, Homo sapiens
  misc_RNA (1)...(19): siRNA sense strand
cgaaugccuuuucucuuuu

SEQ ID NO: 764178 - RNA, 19 nt, Homo sapiens
  misc_RNA (1)...(19): siRNA sense strand
gacaagaccccaucgaaug

SEQ ID NO: 764179 - RNA, 19 nt, Homo sapiens
  misc_RNA (1)...(19): siRNA sense strand
gguucugccuucuggacaa

SEQ ID NO: 764180 - RNA, 19 nt, Homo sapiens
  misc_RNA (1)...(19): siRNA sense strand
ggacucccacuuccaagag

SEQ ID NO: 764181 - RNA, 19 nt, Homo sapiens
  misc_RNA (1)...(19): siRNA sense strand
aagagguggcucagaaauu

SEQ ID NO: 764182 - RNA, 19 nt, Homo sapiens
  misc_RNA (1)...(19): siRNA sense strand
gagcaaaguccugcacacu

SEQ ID NO: 764183 - RNA, 19 nt, Homo sapiens
  misc_RNA (1)...(19): siRNA sense strand
ggaccugguucugccuucu

SEQ ID NO: 764184 - RNA, 19 nt, Homo sapiens
  misc_RNA (1)...(19): siRNA sense strand
acuagcggaucaaguaugg

SEQ ID NO: 764185 - RNA, 19 nt, Homo sapiens
  misc_RNA (1)...(19): siRNA sense strand
gauguuacccuggcucaac

SEQ ID NO: 764186 - RNA, 19 nt, Homo sapiens
  misc_RNA (1)...(19): siRNA sense strand
gaucaaguauggacacuga

SEQ ID NO: 764187 - RNA, 19 nt, Homo sapiens
  misc_RNA (1)...(19): siRNA sense strand
agagguggcucagaaauuc

SEQ ID NO: 764188 - RNA, 19 nt, Homo sapiens
  misc_RNA (1)...(19): siRNA sense strand
uccaagagguggcucagaa

SEQ ID NO: 764189 - RNA, 19 nt, Homo sapiens
  misc_RNA (1)...(19): siRNA sense strand
gaaugccuuuucucuuuua

SEQ ID NO: 764190 - RNA, 19 nt, Homo sapiens
  misc_RNA (1)...(19): siRNA sense strand
uacccuggcucaacuguau

SEQ ID NO: 764191 - RNA, 19 nt, Homo sapiens
  misc_RNA (1)...(19): siRNA sense strand
ucgaaugccuuuucucuuu

SEQ ID NO: 764192 - RNA, 19 nt, Homo sapiens
  misc_RNA (1)...(19): siRNA sense strand
cagcuccacugcacugugu

SEQ ID NO: 764193 - RNA, 19 nt, Homo sapiens
  misc_RNA (1)...(19): siRNA sense strand
ccaagagguggcucagaaa

SEQ ID NO: 764194 - RNA, 19 nt, Homo sapiens
  misc_RNA (1)...(19): siRNA sense strand
caagagguggcucagaaau

SEQ ID NO: 764195 - RNA, 19 nt, Homo sapiens
  misc_RNA (1)...(19): siRNA sense strand
cgaaugccuuuucucuuuu

SEQ ID NO: 764196 - RNA, 19 nt, Homo sapiens
  misc_RNA (1)...(19): siRNA sense strand
gacaagaccccaucgaaug

SEQ ID NO: 764197 - RNA, 19 nt, Homo sapiens
  misc_RNA (1)...(19): siRNA sense strand
gguucugccuucuggacaa

SEQ ID NO: 764198 - RNA, 19 nt, Homo sapiens
  misc_RNA (1)...(19): siRNA sense strand
ggacucccacuuccaagag

SEQ ID NO: 764199 - RNA, 19 nt, Homo sapiens
  misc_RNA (1)...(19): siRNA sense strand
aagagguggcucagaaauu

SEQ ID NO: 764200 - RNA, 19 nt, Homo sapiens
  misc_RNA (1)...(19): siRNA sense strand
gagcaaaguccugcacacu

SEQ ID NO: 764201 - RNA, 19 nt, Homo sapiens
  misc_RNA (1)...(19): siRNA sense strand
ggaccugguucugccuucu

SEQ ID NO: 764202 - RNA, 19 nt, Homo sapiens
  misc_RNA (1)...(19): siRNA sense strand
acuagcggaucaaguaugg

SEQ ID NO: 764203 - RNA, 19 nt, Homo sapiens
  misc_RNA (1)...(19): siRNA sense strand
gauguuacccuggcucaac

SEQ ID NO: 764204 - RNA, 19 nt, Homo sapiens
  misc_RNA (1)...(19): siRNA sense strand
gaucaaguauggacacuga

SEQ ID NO: 764205 - RNA, 19 nt, Homo sapiens
  misc_RNA (1)...(19): siRNA sense strand
agagguggcucagaaauuc

SEQ ID NO: 764206 - RNA, 19 nt, Homo sapiens
  misc_RNA (1)...(19): siRNA sense strand
uccaagagguggcucagaa

SEQ ID NO: 764207 - RNA, 19 nt, Homo sapiens
  misc_RNA (1)...(19): siRNA sense strand
gaaugccuuuucucuuuua

SEQ ID NO: 764208 - RNA, 19 nt, Homo sapiens
  misc_RNA (1)...(19): siRNA sense strand
uacccuggcucaacuguau

SEQ ID NO: 764209 - RNA, 19 nt, Homo sapiens
  misc_RNA (1)...(19): siRNA sense strand
ucgaaugccuuuucucuuu

SEQ ID NO: 764210 - RNA, 19 nt, Homo sapiens
  misc_RNA (1)...(19): siRNA sense strand
cagcuccacugcacugugu

SEQ ID NO: 764211 - RNA, 19 nt, Homo sapiens
  misc_RNA (1)...(19): siRNA sense strand
ccaagagguggcucagaaa

SEQ ID NO: 764212 - RNA, 19 nt, Homo sapiens
  misc_RNA (1)...(19): siRNA sense strand
caagagguggcucagaaau

SEQ ID NO: 764213 - RNA, 19 nt, Homo sapiens
  misc_RNA (1)...(19): siRNA sense strand
cgaaugccuuuucucuuuu

SEQ ID NO: 764214 - RNA, 19 nt, Homo sapiens
  misc_RNA (1)...(19): siRNA sense strand
gacaagaccccaucgaaug

SEQ ID NO: 764215 - RNA, 19 nt, Homo sapiens
  misc_RNA (1)...(19): siRNA sense strand
gguucugccuucuggacaa

SEQ ID NO: 764216 - RNA, 19 nt, Homo sapiens
  misc_RNA (1)...(19): siRNA sense strand
ggacucccacuuccaagag

SEQ ID NO: 764217 - RNA, 19 nt, Homo sapiens
  misc_RNA (1)...(19): siRNA sense strand
aagagguggcucagaaauu

SEQ ID NO: 764218 - RNA, 19 nt, Homo sapiens
  misc_RNA (1)...(19): siRNA sense strand
gagcaaaguccugcacacu

SEQ ID NO: 764219 - RNA, 19 nt, Homo sapiens
  misc_RNA (1)...(19): siRNA sense strand
ggaccugguucugccuucu

SEQ ID NO: 764220 - RNA, 19 nt, Homo sapiens
  misc_RNA (1)...(19): siRNA sense strand
acuagcggaucaaguaugg

SEQ ID NO: 764221 - RNA, 19 nt, Homo sapiens
  misc_RNA (1)...(19): siRNA sense strand
gauguuacccuggcucaac

SEQ ID NO: 764222 - RNA, 19 nt, Homo sapiens
  misc_RNA (1)...(19): siRNA sense strand
gaucaaguauggacacuga

SEQ ID NO: 764223 - RNA, 19 nt, Homo sapiens
  misc_RNA (1)...(19): siRNA sense strand
agagguggcucagaaauuc

SEQ ID NO: 764224 - RNA, 19 nt, Homo sapiens
  misc_RNA (1)...(19): siRNA sense strand
uccaagagguggcucagaa

SEQ ID NO: 764225 - RNA, 19 nt, Homo sapiens
  misc_RNA (1)...(19): siRNA sense strand
gaaugccuuuucucuuuua

SEQ ID NO: 764226 - RNA, 19 nt, Homo sapiens
  misc_RNA (1)...(19): siRNA sense strand
uacccuggcucaacuguau

SEQ ID NO: 764227 - RNA, 19 nt, Homo sapiens
  misc_RNA (1)...(19): siRNA sense strand
ucgaaugccuuuucucuuu

SEQ ID NO: 764228 - RNA, 19 nt, Homo sapiens
  misc_RNA (1)...(19): siRNA sense strand
cagcuccacugcacugugu

SEQ ID NO: 764229 - RNA, 19 nt, Homo sapiens
  misc_RNA (1)...(19): siRNA sense strand
ccaagagguggcucagaaa

SEQ ID NO: 764230 - RNA, 19 nt, Homo sapiens
  misc_RNA (1)...(19): siRNA sense strand
caagagguggcucagaaau

SEQ ID NO: 764231 - RNA, 19 nt, Homo sapiens
  misc_RNA (1)...(19): siRNA sense strand
cgaaugccuuuucucuuuu

SEQ ID NO: 764232 - RNA, 19 nt, Homo sapiens
  misc_RNA (1)...(19): siRNA sense strand
gacaagaccccaucgaaug

SEQ ID NO: 764233 - RNA, 19 nt, Homo sapiens
  misc_RNA (1)...(19): siRNA sense strand
gguucugccuucuggacaa

SEQ ID NO: 764234 - RNA, 19 nt, Homo sapiens
  misc_RNA (1)...(19): siRNA sense strand
ggacucccacuuccaagag

SEQ ID NO: 764235 - RNA, 19 nt, Homo sapiens
  misc_RNA (1)...(19): siRNA sense strand
aagagguggcucagaaauu

SEQ ID NO: 764236 - RNA, 19 nt, Homo sapiens
  misc_RNA (1)...(19): siRNA sense strand
gagcaaaguccugcacacu

SEQ ID NO: 764237 - RNA, 19 nt, Homo sapiens
  misc_RNA (1)...(19): siRNA sense strand
ggaccugguucugccuucu

SEQ ID NO: 764238 - RNA, 19 nt, Homo sapiens
  misc_RNA (1)...(19): siRNA sense strand
acuagcggaucaaguaugg

SEQ ID NO: 764239 - RNA, 19 nt, Homo sapiens
  misc_RNA (1)...(19): siRNA sense strand
gauguuacccuggcucaac

SEQ ID NO: 764240 - RNA, 19 nt, Homo sapiens
  misc_RNA (1)...(19): siRNA sense strand
gaucaaguauggacacuga

SEQ ID NO: 764241 - RNA, 19 nt, Homo sapiens
  misc_RNA (1)...(19): siRNA sense strand
agagguggcucagaaauuc

SEQ ID NO: 764242 - RNA, 19 nt, Homo sapiens
  misc_RNA (1)...(19): siRNA sense strand
uccaagagguggcucagaa

SEQ ID NO: 764243 - RNA, 19 nt, Homo sapiens
  misc_RNA (1)...(19): siRNA sense strand
gaaugccuuuucucuuuua

SEQ ID NO: 764244 - RNA, 19 nt, Homo sapiens
  misc_RNA (1)...(19): siRNA sense strand
uacccuggcucaacuguau

SEQ ID NO: 764245 - RNA, 19 nt, Homo sapiens
  misc_RNA (1)...(19): siRNA sense strand
ucgaaugccuuuucucuuu

SEQ ID NO: 764246 - RNA, 19 nt, Homo sapiens
  misc_RNA (1)...(19): siRNA sense strand
cagcuccacugcacugugu

SEQ ID NO: 764247 - RNA, 19 nt, Homo sapiens
  misc_RNA (1)...(19): siRNA sense strand
ccaagagguggcucagaaa

SEQ ID NO: 764248 - RNA, 19 nt, Homo sapiens
  misc_RNA (1)...(19): siRNA sense strand
caagagguggcucagaaau

SEQ ID NO: 764249 - RNA, 19 nt, Homo sapiens
  misc_RNA (1)...(19): siRNA sense strand
cgaaugccuuuucucuuuu

SEQ ID NO: 764250 - RNA, 19 nt, Homo sapiens
  misc_RNA (1)...(19): siRNA sense strand
gacaagaccccaucgaaug

SEQ ID NO: 764251 - RNA, 19 nt, Homo sapiens
  misc_RNA (1)...(19): siRNA sense strand
gguucugccuucuggacaa

SEQ ID NO: 764252 - RNA, 19 nt, Homo sapiens
  misc_RNA (1)...(19): siRNA sense strand
ggacucccacuuccaagag

SEQ ID NO: 764253 - RNA, 19 nt, Homo sapiens
  misc_RNA (1)...(19): siRNA sense strand
aagagguggcucagaaauu

SEQ ID NO: 764254 - RNA, 19 nt, Homo sapiens
  misc_RNA (1)...(19): siRNA sense strand
gagcaaaguccugcacacu

SEQ ID NO: 764255 - RNA, 19 nt, Homo sapiens
  misc_RNA (1)...(19): siRNA sense strand
ggaccugguucugccuucu

SEQ ID NO: 764256 - RNA, 19 nt, Homo sapiens
  misc_RNA (1)...(19): siRNA sense strand
acuagcggaucaaguaugg

SEQ ID NO: 764257 - RNA, 19 nt, Homo sapiens
  misc_RNA (1)...(19): siRNA sense strand
gauguuacccuggcucaac

SEQ ID NO: 764258 - RNA, 19 nt, Homo sapiens
  misc_RNA (1)...(19): siRNA sense strand
gaucaaguauggacacuga

SEQ ID NO: 764259 - RNA, 19 nt, Homo sapiens
  misc_RNA (1)...(19): siRNA sense strand
agagguggcucagaaauuc

SEQ ID NO: 764260 - RNA, 19 nt, Homo sapiens
  misc_RNA (1)...(19): siRNA sense strand
uccaagagguggcucagaa

SEQ ID NO: 764261 - RNA, 19 nt, Homo sapiens
  misc_RNA (1)...(19): siRNA sense strand
gaaugccuuuucucuuuua

SEQ ID NO: 764262 - RNA, 19 nt, Homo sapiens
  misc_RNA (1)...(19): siRNA sense strand
uacccuggcucaacuguau

SEQ ID NO: 764263 - RNA, 19 nt, Homo sapiens
  misc_RNA (1)...(19): siRNA sense strand
ucgaaugccuuuucucuuu

SEQ ID NO: 764264 - RNA, 19 nt, Homo sapiens
  misc_RNA (1)...(19): siRNA sense strand
cagcuccacugcacugugu

SEQ ID NO: 764265 - RNA, 19 nt, Homo sapiens
  misc_RNA (1)...(19): siRNA sense strand
ccaagagguggcucagaaa

SEQ ID NO: 764266 - RNA, 19 nt, Homo sapiens
  misc_RNA (1)...(19): siRNA sense strand
caagagguggcucagaaau

SEQ ID NO: 764267 - RNA, 19 nt, Homo sapiens
  misc_RNA (1)...(19): siRNA sense strand
cgaaugccuuuucucuuuu

SEQ ID NO: 764268 - RNA, 19 nt, Homo sapiens
  misc_RNA (1)...(19): siRNA sense strand
gacaagaccccaucgaaug

SEQ ID NO: 764269 - RNA, 19 nt, Homo sapiens
  misc_RNA (1)...(19): siRNA sense strand
gguucugccuucuggacaa

SEQ ID NO: 764270 - RNA, 19 nt, Homo sapiens
  misc_RNA (1)...(19): siRNA sense strand
ggacucccacuuccaagag

SEQ ID NO: 764271 - RNA, 19 nt, Homo sapiens
  misc_RNA (1)...(19): siRNA sense strand
aagagguggcucagaaauu

SEQ ID NO: 764272 - RNA, 19 nt, Homo sapiens
  misc_RNA (1)...(19): siRNA sense strand
gagcaaaguccugcacacu

SEQ ID NO: 764273 - RNA, 19 nt, Homo sapiens
  misc_RNA (1)...(19): siRNA sense strand
ggaccugguucugccuucu

SEQ ID NO: 764274 - RNA, 19 nt, Homo sapiens
  misc_RNA (1)...(19): siRNA sense strand
acuagcggaucaaguaugg

SEQ ID NO: 764275 - RNA, 19 nt, Homo sapiens
  misc_RNA (1)...(19): siRNA sense strand
gauguuacccuggcucaac

SEQ ID NO: 764276 - RNA, 19 nt, Homo sapiens
  misc_RNA (1)...(19): siRNA sense strand
gaucaaguauggacacuga

SEQ ID NO: 764277 - RNA, 19 nt, Homo sapiens
  misc_RNA (1)...(19): siRNA sense strand
agagguggcucagaaauuc

SEQ ID NO: 764278 - RNA, 19 nt, Homo sapiens
  misc_RNA (1)...(19): siRNA sense strand
uccaagagguggcucagaa

SEQ ID NO: 764279 - RNA, 19 nt, Homo sapiens
  misc_RNA (1)...(19): siRNA sense strand
gaaugccuuuucucuuuua

SEQ ID NO: 764280 - RNA, 19 nt, Homo sapiens
  misc_RNA (1)...(19): siRNA sense strand
uacccuggcucaacuguau

SEQ ID NO: 764281 - RNA, 19 nt, Homo sapiens
  misc_RNA (1)...(19): siRNA sense strand
ucgaaugccuuuucucuuu

SEQ ID NO: 764282 - RNA, 19 nt, Homo sapiens
  misc_RNA (1)...(19): siRNA sense strand
cagcuccacugcacugugu

SEQ ID NO: 764283 - RNA, 19 nt, Homo sapiens
  misc_RNA (1)...(19): siRNA sense strand
ccaagagguggcucagaaa

SEQ ID NO: 764284 - RNA, 19 nt, Homo sapiens
  misc_RNA (1)...(19): siRNA sense strand
caagagguggcucagaaau

SEQ ID NO: 764285 - RNA, 19 nt, Homo sapiens
  misc_RNA (1)...(19): siRNA sense strand
cgaaugccuuuucucuuuu

SEQ ID NO: 764286 - RNA, 19 nt, Homo sapiens
  misc_RNA (1)...(19): siRNA sense strand
gacaagaccccaucgaaug

SEQ ID NO: 764287 - RNA, 19 nt, Homo sapiens
  misc_RNA (1)...(19): siRNA sense strand
gguucugccuucuggacaa

SEQ ID NO: 764288 - RNA, 19 nt, Homo sapiens
  misc_RNA (1)...(19): siRNA sense strand
ggacucccacuuccaagag

SEQ ID NO: 764289 - RNA, 19 nt, Homo sapiens
  misc_RNA (1)...(19): siRNA sense strand
aagagguggcucagaaauu

SEQ ID NO: 764290 - RNA, 19 nt, Homo sapiens
  misc_RNA (1)...(19): siRNA sense strand
gagcaaaguccugcacacu

SEQ ID NO: 764291 - RNA, 19 nt, Homo sapiens
  misc_RNA (1)...(19): siRNA sense strand
ggaccugguucugccuucu

SEQ ID NO: 764292 - RNA, 19 nt, Homo sapiens
  misc_RNA (1)...(19): siRNA sense strand
acuagcggaucaaguaugg

SEQ ID NO: 764293 - RNA, 19 nt, Homo sapiens
  misc_RNA (1)...(19): siRNA sense strand
gauguuacccuggcucaac

SEQ ID NO: 764294 - RNA, 19 nt, Homo sapiens
  misc_RNA (1)...(19): siRNA sense strand
gaucaaguauggacacuga

SEQ ID NO: 764295 - RNA, 19 nt, Homo sapiens
  misc_RNA (1)...(19): siRNA sense strand
agagguggcucagaaauuc

SEQ ID NO: 764296 - RNA, 19 nt, Homo sapiens
  misc_RNA (1)...(19): siRNA sense strand
uccaagagguggcucagaa

SEQ ID NO: 764297 - RNA, 19 nt, Homo sapiens
  misc_RNA (1)...(19): siRNA sense strand
gaaugccuuuucucuuuua

SEQ ID NO: 764298 - RNA, 19 nt, Homo sapiens
  misc_RNA (1)...(19): siRNA sense strand
uacccuggcucaacuguau

SEQ ID NO: 764299 - RNA, 19 nt, Homo sapiens
  misc_RNA (1)...(19): siRNA sense strand
ucgaaugccuuuucucuuu

SEQ ID NO: 764300 - RNA, 19 nt, Homo sapiens
  misc_RNA (1)...(19): siRNA sense strand
cagcuccacugcacugugu

SEQ ID NO: 764301 - RNA, 19 nt, Homo sapiens
  misc_RNA (1)...(19): siRNA sense strand
ccaagagguggcucagaaa

SEQ ID NO: 764302 - RNA, 19 nt, Homo sapiens
  misc_RNA (1)...(19): siRNA sense strand
caagagguggcucagaaau

SEQ ID NO: 764303 - RNA, 19 nt, Homo sapiens
  misc_RNA (1)...(19): siRNA sense strand
cgaaugccuuuucucuuuu

SEQ ID NO: 764304 - RNA, 19 nt, Homo sapiens
  misc_RNA (1)...(19): siRNA sense strand
gacaagaccccaucgaaug

SEQ ID NO: 764305 - RNA, 19 nt, Homo sapiens
  misc_RNA (1)...(19): siRNA sense strand
gguucugccuucuggacaa

SEQ ID NO: 764306 - RNA, 19 nt, Homo sapiens
  misc_RNA (1)...(19): siRNA sense strand
ggacucccacuuccaagag

SEQ ID NO: 764307 - RNA, 19 nt, Homo sapiens
  misc_RNA (1)...(19): siRNA sense strand
aagagguggcucagaaauu

SEQ ID NO: 764308 - RNA, 19 nt, Homo sapiens
  misc_RNA (1)...(19): siRNA sense strand
gagcaaaguccugcacacu

SEQ ID NO: 764309 - RNA, 19 nt, Homo sapiens
  misc_RNA (1)...(19): siRNA sense strand
ggaccugguucugccuucu

SEQ ID NO: 764310 - RNA, 19 nt, Homo sapiens
  misc_RNA (1)...(19): siRNA sense strand
acuagcggaucaaguaugg

SEQ ID NO: 764311 - RNA, 19 nt, Homo sapiens
  misc_RNA (1)...(19): siRNA sense strand
gauguuacccuggcucaac

SEQ ID NO: 764312 - RNA, 19 nt, Homo sapiens
  misc_RNA (1)...(19): siRNA sense strand
gagcaguccucgugccuua

SEQ ID NO: 764313 - RNA, 19 nt, Homo sapiens
  misc_RNA (1)...(19): siRNA sense strand
uaccagagcuacauccuua

SEQ ID NO: 764314 - RNA, 19 nt, Homo sapiens
  misc_RNA (1)...(19): siRNA sense strand
ggucaacgcuaucuuggaa

SEQ ID NO: 764315 - RNA, 19 nt, Homo sapiens
  misc_RNA (1)...(19): siRNA sense strand
gacgaaagccuucuucuga

SEQ ID NO: 764316 - RNA, 19 nt, Homo sapiens
  misc_RNA (1)...(19): siRNA sense strand
gccgagaacuuccugauga

SEQ ID NO: 764317 - RNA, 19 nt, Homo sapiens
  misc_RNA (1)...(19): siRNA sense strand
gaagagcggcagaagauug

SEQ ID NO: 764318 - RNA, 19 nt, Homo sapiens
  misc_RNA (1)...(19): siRNA sense strand
gagaaggugucagauguga

SEQ ID NO: 764319 - RNA, 19 nt, Homo sapiens
  misc_RNA (1)...(19): siRNA sense strand
uggaacagcugguacagaa

SEQ ID NO: 764320 - RNA, 19 nt, Homo sapiens
  misc_RNA (1)...(19): siRNA sense strand
gaacagcugguacagaaug

SEQ ID NO: 764321 - RNA, 19 nt, Homo sapiens
  misc_RNA (1)...(19): siRNA sense strand
gcacccaggcucucuauug

SEQ ID NO: 764322 - RNA, 19 nt, Homo sapiens
  misc_RNA (1)...(19): siRNA sense strand
ggaauuugcgcuugaguau

SEQ ID NO: 764323 - RNA, 19 nt, Homo sapiens
  misc_RNA (1)...(19): siRNA sense strand
gagaagcuacugaccauga

SEQ ID NO: 764324 - RNA, 19 nt, Homo sapiens
  misc_RNA (1)...(19): siRNA sense strand
gcaaggauggcauugagaa

SEQ ID NO: 764325 - RNA, 19 nt, Homo sapiens
  misc_RNA (1)...(19): siRNA sense strand
gugccaagguggacuuuga

SEQ ID NO: 764326 - RNA, 19 nt, Homo sapiens
  misc_RNA (1)...(19): siRNA sense strand
ccuucaagcuggacuauga

SEQ ID NO: 764327 - RNA, 19 nt, Homo sapiens
  misc_RNA (1)...(19): siRNA sense strand
cgagaacgcccugaaauug

SEQ ID NO: 764328 - RNA, 19 nt, Homo sapiens
  misc_RNA (1)...(19): siRNA sense strand
gagaggagcaucuacaaag

SEQ ID NO: 764329 - RNA, 19 nt, Homo sapiens
  misc_RNA (1)...(19): siRNA sense strand
uugaacagcugacugagaa

SEQ ID NO: 764330 - RNA, 19 nt, Homo sapiens
  misc_RNA (1)...(19): siRNA sense strand
gaauguggcggcagcagaa

SEQ ID NO: 764331 - RNA, 19 nt, Homo sapiens
  misc_RNA (1)...(19): siRNA sense strand
gcgcugacccugaguuguu

SEQ ID NO: 764332 - RNA, 19 nt, Homo sapiens
  misc_RNA (1)...(19): siRNA sense strand
gcacgaacgccaucaacau

SEQ ID NO: 764333 - RNA, 19 nt, Homo sapiens
  misc_RNA (1)...(19): siRNA sense strand
gcucagcccuccccacuaa

SEQ ID NO: 764334 - RNA, 19 nt, Homo sapiens
  misc_RNA (1)...(19): siRNA sense strand
uggagaaggugucagaugu

SEQ ID NO: 764335 - RNA, 19 nt, Homo sapiens
  misc_RNA (1)...(19): siRNA sense strand
gaaaguggguauggaacag

SEQ ID NO: 764336 - RNA, 19 nt, Homo sapiens
  misc_RNA (1)...(19): siRNA sense strand
ugaguccucugaccucuau

SEQ ID NO: 764337 - RNA, 19 nt, Homo sapiens
  misc_RNA (1)...(19): siRNA sense strand
ggacggagagccgguauca

SEQ ID NO: 764338 - RNA, 19 nt, Homo sapiens
  misc_RNA (1)...(19): siRNA sense strand
gcccaaggagccacugaua

SEQ ID NO: 764339 - RNA, 19 nt, Homo sapiens
  misc_RNA (1)...(19): siRNA sense strand
ggauugugcucugcaagug

SEQ ID NO: 764340 - RNA, 19 nt, Homo sapiens
  misc_RNA (1)...(19): siRNA sense strand
ugaccucuauucagaaauc

SEQ ID NO: 764341 - RNA, 19 nt, Homo sapiens
  misc_RNA (1)...(19): siRNA sense strand
gaaggugucagaugugaag

SEQ ID NO: 764342 - RNA, 19 nt, Homo sapiens
  misc_RNA (1)...(19): siRNA sense strand
cauccuggcuacccuccua

SEQ ID NO: 764343 - RNA, 19 nt, Homo sapiens
  misc_RNA (1)...(19): siRNA sense strand
cagcaaggauggcauugag

SEQ ID NO: 764344 - RNA, 19 nt, Homo sapiens
  misc_RNA (1)...(19): siRNA sense strand
agagugggcucggagauga

SEQ ID NO: 764345 - RNA, 19 nt, Homo sapiens
  misc_RNA (1)...(19): siRNA sense strand
gaacgacgaaagccuucuu

SEQ ID NO: 764346 - RNA, 19 nt, Homo sapiens
  misc_RNA (1)...(19): siRNA sense strand
gcaccgccgugucugcaau

SEQ ID NO: 764347 - RNA, 19 nt, Homo sapiens
  misc_RNA (1)...(19): siRNA sense strand
gugggcaacuuccucaaug

SEQ ID NO: 764348 - RNA, 19 nt, Homo sapiens
  misc_RNA (1)...(19): siRNA sense strand
ggaggauugugcucugcaa

SEQ ID NO: 764349 - RNA, 19 nt, Homo sapiens
  misc_RNA (1)...(19): siRNA sense strand
gggccaaucugguguccau

SEQ ID NO: 764350 - RNA, 19 nt, Homo sapiens
  misc_RNA (1)...(19): siRNA sense strand
gggaauuugcgcuugagua

SEQ ID NO: 764351 - RNA, 19 nt, Homo sapiens
  misc_RNA (1)...(19): siRNA sense strand
ugaagcugcuguugguguu

SEQ ID NO: 764352 - RNA, 19 nt, Homo sapiens
  misc_RNA (1)...(19): siRNA sense strand
cuucgcaugugccaacuuu

SEQ ID NO: 764353 - RNA, 19 nt, Homo sapiens
  misc_RNA (1)...(19): siRNA sense strand
uucaguggcuguacacauu

SEQ ID NO: 764354 - RNA, 19 nt, Homo sapiens
  misc_RNA (1)...(19): siRNA sense strand
cuacaacucugggccuuca

SEQ ID NO: 764355 - RNA, 19 nt, Homo sapiens
  misc_RNA (1)...(19): siRNA sense strand
gaccaggacaugcugaaug

SEQ ID NO: 764356 - RNA, 19 nt, Homo sapiens
  misc_RNA (1)...(19): siRNA sense strand
gagggucaacgcuaucuug

SEQ ID NO: 764357 - RNA, 19 nt, Homo sapiens
  misc_RNA (1)...(19): siRNA sense strand
ccacuaagaggaagacagu

SEQ ID NO: 764358 - RNA, 19 nt, Homo sapiens
  misc_RNA (1)...(19): siRNA sense strand
agaacgcccugaaauugga

SEQ ID NO: 764359 - RNA, 19 nt, Homo sapiens
  misc_RNA (1)...(19): siRNA sense strand
gagaacgcccugaaauugg

SEQ ID NO: 764360 - RNA, 19 nt, Homo sapiens
  misc_RNA (1)...(19): siRNA sense strand
gugcugcccuccaagaaag

SEQ ID NO: 764361 - RNA, 19 nt, Homo sapiens
  misc_RNA (1)...(19): siRNA sense strand
gaggaagagcggcagaaga

SEQ ID NO: 764362 - RNA, 19 nt, Homo sapiens
  misc_RNA (1)...(19): siRNA sense strand
ggaugaagaccaggacaug

SEQ ID NO: 764363 - RNA, 19 nt, Homo sapiens
  misc_RNA (1)...(19): siRNA sense strand
gccacacgcugcgggaauu

SEQ ID NO: 764364 - RNA, 19 nt, Homo sapiens
  misc_RNA (1)...(19): siRNA sense strand
ucaccgagacagagaaguu

SEQ ID NO: 764365 - RNA, 19 nt, Homo sapiens
  misc_RNA (1)...(19): siRNA sense strand
cgagaggagcaucuacaaa

SEQ ID NO: 764366 - RNA, 19 nt, Homo sapiens
  misc_RNA (1)...(19): siRNA sense strand
gaggacaccacacacaauc

SEQ ID NO: 764367 - RNA, 19 nt, Homo sapiens
  misc_RNA (1)...(19): siRNA sense strand
ggagaaggugucagaugug

SEQ ID NO: 764368 - RNA, 19 nt, Homo sapiens
  misc_RNA (1)...(19): siRNA sense strand
ggauggcauugagaagcua

SEQ ID NO: 764369 - RNA, 19 nt, Homo sapiens
  misc_RNA (1)...(19): siRNA sense strand
acuaagaggaagacaguaa

SEQ ID NO: 764370 - RNA, 19 nt, Homo sapiens
  misc_RNA (1)...(19): siRNA sense strand
gacuggaacaccucuuuga

SEQ ID NO: 764371 - RNA, 19 nt, Homo sapiens
  misc_RNA (1)...(19): siRNA sense strand
gaagagugggcucggagau

SEQ ID NO: 764372 - RNA, 19 nt, Homo sapiens
  misc_RNA (1)...(19): siRNA sense strand
gcgcuugaguaucggacuu

SEQ ID NO: 764373 - RNA, 19 nt, Homo sapiens
  misc_RNA (1)...(19): siRNA sense strand
gcauggagcgggaaauugc

SEQ ID NO: 764374 - RNA, 19 nt, Homo sapiens
  misc_RNA (1)...(19): siRNA sense strand
ggaagagcggcagaagauu

SEQ ID NO: 764375 - RNA, 19 nt, Homo sapiens
  misc_RNA (1)...(19): siRNA sense strand
gcuggagggcuucuaugaa

SEQ ID NO: 764376 - RNA, 19 nt, Homo sapiens
  misc_RNA (1)...(19): siRNA sense strand
aggcugcucugcucaacuu

SEQ ID NO: 764377 - RNA, 19 nt, Homo sapiens
  misc_RNA (1)...(19): siRNA sense strand
caccugugcaugucauuaa

SEQ ID NO: 764378 - RNA, 19 nt, Homo sapiens
  misc_RNA (1)...(19): siRNA sense strand
cuaagaggaagacaguaaa

SEQ ID NO: 764379 - RNA, 19 nt, Homo sapiens
  misc_RNA (1)...(19): siRNA sense strand
gcgagaggagcaucuacaa

SEQ ID NO: 764380 - RNA, 19 nt, Homo sapiens
  misc_RNA (1)...(19): siRNA sense strand
ccuggugccugaauuugug

SEQ ID NO: 764381 - RNA, 19 nt, Homo sapiens
  misc_RNA (1)...(19): siRNA sense strand
agcagaagcaggccacaua

SEQ ID NO: 764382 - RNA, 19 nt, Homo sapiens
  misc_RNA (1)...(19): siRNA sense strand
gccacuguuugaccugaaa

SEQ ID NO: 764383 - RNA, 19 nt, Homo sapiens
  misc_RNA (1)...(19): siRNA sense strand
cagcauggagcgggaaauu

SEQ ID NO: 764384 - RNA, 19 nt, Homo sapiens
  misc_RNA (1)...(19): siRNA sense strand
cuacgagaacgcccugaaa

SEQ ID NO: 764385 - RNA, 19 nt, Homo sapiens
  misc_RNA (1)...(19): siRNA sense strand
caaccccucugucccagua

SEQ ID NO: 764386 - RNA, 19 nt, Homo sapiens
  misc_RNA (1)...(19): siRNA sense strand
gaaauugcugagccacugu

SEQ ID NO: 764387 - RNA, 19 nt, Homo sapiens
  misc_RNA (1)...(19): siRNA sense strand
ccucgcugcucgucuacaa

SEQ ID NO: 764388 - RNA, 19 nt, Homo sapiens
  misc_RNA (1)...(19): siRNA sense strand
gaugacucuugccuccauu

SEQ ID NO: 764389 - RNA, 19 nt, Homo sapiens
  misc_RNA (1)...(19): siRNA sense strand
cacccaggcucucuauugg

SEQ ID NO: 764390 - RNA, 19 nt, Homo sapiens
  misc_RNA (1)...(19): siRNA sense strand
cgacgaaagccuucuucug

SEQ ID NO: 764391 - RNA, 19 nt, Homo sapiens
  misc_RNA (1)...(19): siRNA sense strand
acccugaguuguuggugua

SEQ ID NO: 764392 - RNA, 19 nt, Homo sapiens
  misc_RNA (1)...(19): siRNA sense strand
gagaaggacguugaagagu

SEQ ID NO: 764393 - RNA, 19 nt, Homo sapiens
  misc_RNA (1)...(19): siRNA sense strand
ugagaaggacguugaagag

SEQ ID NO: 764394 - RNA, 19 nt, Homo sapiens
  misc_RNA (1)...(19): siRNA sense strand
gcuccaguuuacccaguga

SEQ ID NO: 764395 - RNA, 19 nt, Homo sapiens
  misc_RNA (1)...(19): siRNA sense strand
caagguggacuuugaacag

SEQ ID NO: 764396 - RNA, 19 nt, Homo sapiens
  misc_RNA (1)...(19): siRNA sense strand
aggaagagcggcagaagau

SEQ ID NO: 764397 - RNA, 19 nt, Homo sapiens
  misc_RNA (1)...(19): siRNA sense strand
gcuguugguguuuguagaa

SEQ ID NO: 764398 - RNA, 19 nt, Homo sapiens
  misc_RNA (1)...(19): siRNA sense strand
caaccgcaagucuuugaga

SEQ ID NO: 764399 - RNA, 19 nt, Homo sapiens
  misc_RNA (1)...(19): siRNA sense strand
gcagaagcaggccacauac

SEQ ID NO: 764400 - RNA, 19 nt, Homo sapiens
  misc_RNA (1)...(19): siRNA sense strand
uugcugagccacuguuuga

SEQ ID NO: 764401 - RNA, 19 nt, Homo sapiens
  misc_RNA (1)...(19): siRNA sense strand
ggugcugcccuccaagaaa

SEQ ID NO: 764402 - RNA, 19 nt, Homo sapiens
  misc_RNA (1)...(19): siRNA sense strand
acgagaacgcccugaaauu

SEQ ID NO: 764403 - RNA, 19 nt, Homo sapiens
  misc_RNA (1)...(19): siRNA sense strand
ccagagcuacauccuuaga

SEQ ID NO: 764404 - RNA, 19 nt, Homo sapiens
  misc_RNA (1)...(19): siRNA sense strand
aaccgcaagucuuugagaa

SEQ ID NO: 764405 - RNA, 19 nt, Homo sapiens
  misc_RNA (1)...(19): siRNA sense strand
ggcaaccgcaagucuuuga

SEQ ID NO: 764406 - RNA, 19 nt, Homo sapiens
  misc_RNA (1)...(19): siRNA sense strand
gcuggccaacccugacaua

SEQ ID NO: 764407 - RNA, 19 nt, Homo sapiens
  misc_RNA (1)...(19): siRNA sense strand
ccaccugugcaugucauua

SEQ ID NO: 764408 - RNA, 19 nt, Homo sapiens
  misc_RNA (1)...(19): siRNA sense strand
cagcagaaacagagaagca

SEQ ID NO: 764409 - RNA, 19 nt, Homo sapiens
  misc_RNA (1)...(19): siRNA sense strand
gaucuuccaggaggacaaa

SEQ ID NO: 764410 - RNA, 19 nt, Homo sapiens
  misc_RNA (1)...(19): siRNA sense strand
guugguguuuguagaauac

SEQ ID NO: 764411 - RNA, 19 nt, Homo sapiens
  misc_RNA (1)...(19): siRNA sense strand
uguugguguuuguagaaua

SEQ ID NO: 764412 - RNA, 19 nt, Homo sapiens
  misc_RNA (1)...(19): siRNA sense strand
gaacguagauuagcuuaua

SEQ ID NO: 764413 - RNA, 19 nt, Homo sapiens
  misc_RNA (1)...(19): siRNA sense strand
ggaaauaucaugcguguua

SEQ ID NO: 764414 - RNA, 19 nt, Homo sapiens
  misc_RNA (1)...(19): siRNA sense strand
gcaaaugucuuucguggaa

SEQ ID NO: 764415 - RNA, 19 nt, Homo sapiens
  misc_RNA (1)...(19): siRNA sense strand
ugacagagauuuacuauca

SEQ ID NO: 764416 - RNA, 19 nt, Homo sapiens
  misc_RNA (1)...(19): siRNA sense strand
gaagaaauauggagcaaca

SEQ ID NO: 764417 - RNA, 19 nt, Homo sapiens
  misc_RNA (1)...(19): siRNA sense strand
gagagaauuugaaguguug

SEQ ID NO: 764418 - RNA, 19 nt, Homo sapiens
  misc_RNA (1)...(19): siRNA sense strand
caaagcagaacguagauua

SEQ ID NO: 764419 - RNA, 19 nt, Homo sapiens
  misc_RNA (1)...(19): siRNA sense strand
ccaaggagcuacugcaaau

SEQ ID NO: 764420 - RNA, 19 nt, Homo sapiens
  misc_RNA (1)...(19): siRNA sense strand
uaaaguacauccacguuau

SEQ ID NO: 764421 - RNA, 19 nt, Homo sapiens
  misc_RNA (1)...(19): siRNA sense strand
ugacagcucauaagauuua

SEQ ID NO: 764422 - RNA, 19 nt, Homo sapiens
  misc_RNA (1)...(19): siRNA sense strand
gaaauuaaaggaagagaug

SEQ ID NO: 764423 - RNA, 19 nt, Homo sapiens
  misc_RNA (1)...(19): siRNA sense strand
ggaaaacccuauauuugua

SEQ ID NO: 764424 - RNA, 19 nt, Homo sapiens
  misc_RNA (1)...(19): siRNA sense strand
ggauaucgacagcagauua

SEQ ID NO: 764425 - RNA, 19 nt, Homo sapiens
  misc_RNA (1)...(19): siRNA sense strand
ccacaaauuugauaagcaa

SEQ ID NO: 764426 - RNA, 19 nt, Homo sapiens
  misc_RNA (1)...(19): siRNA sense strand
gcagagcacuucuaaucau

SEQ ID NO: 764427 - RNA, 19 nt, Homo sapiens
  misc_RNA (1)...(19): siRNA sense strand
gaaaugacucuugguauga

SEQ ID NO: 764428 - RNA, 19 nt, Homo sapiens
  misc_RNA (1)...(19): siRNA sense strand
gaaaagaucaucagaagaa

SEQ ID NO: 764429 - RNA, 19 nt, Homo sapiens
  misc_RNA (1)...(19): siRNA sense strand
cuacaaguccuguuaaauu

SEQ ID NO: 764430 - RNA, 19 nt, Homo sapiens
  misc_RNA (1)...(19): siRNA sense strand
gggauacgauggcugauug

SEQ ID NO: 764431 - RNA, 19 nt, Homo sapiens
  misc_RNA (1)...(19): siRNA sense strand
ucagaagaauggauaagaa

SEQ ID NO: 764432 - RNA, 19 nt, Homo sapiens
  misc_RNA (1)...(19): siRNA sense strand
uguacaaacucacagauuu

SEQ ID NO: 764433 - RNA, 19 nt, Homo sapiens
  misc_RNA (1)...(19): siRNA sense strand
gaagaauggauaagaaaga

SEQ ID NO: 764434 - RNA, 19 nt, Homo sapiens
  misc_RNA (1)...(19): siRNA sense strand
gaaaccagucuucaggaua

SEQ ID NO: 764435 - RNA, 19 nt, Homo sapiens
  misc_RNA (1)...(19): siRNA sense strand
ggaauaaagaagugaugua

SEQ ID NO: 764436 - RNA, 19 nt, Homo sapiens
  misc_RNA (1)...(19): siRNA sense strand
guacauccacguuaugauu

SEQ ID NO: 764437 - RNA, 19 nt, Homo sapiens
  misc_RNA (1)...(19): siRNA sense strand
agaaaugacucuugguaug

SEQ ID NO: 764438 - RNA, 19 nt, Homo sapiens
  misc_RNA (1)...(19): siRNA sense strand
aaaccagucuucaggauau

SEQ ID NO: 764439 - RNA, 19 nt, Homo sapiens
  misc_RNA (1)...(19): siRNA sense strand
uacgauggcugauugaauu

SEQ ID NO: 764440 - RNA, 19 nt, Homo sapiens
  misc_RNA (1)...(19): siRNA sense strand
gcaguuuguuucucuguau

SEQ ID NO: 764441 - RNA, 19 nt, Homo sapiens
  misc_RNA (1)...(19): siRNA sense strand
guaccuuacugcuuuauca

SEQ ID NO: 764442 - RNA, 19 nt, Homo sapiens
  misc_RNA (1)...(19): siRNA sense strand
gcacaacauuucccuaaaa

SEQ ID NO: 764443 - RNA, 19 nt, Homo sapiens
  misc_RNA (1)...(19): siRNA sense strand
guagaaaugacucuuggua

SEQ ID NO: 764444 - RNA, 19 nt, Homo sapiens
  misc_RNA (1)...(19): siRNA sense strand
gaaauaucaugcguguuau

SEQ ID NO: 764445 - RNA, 19 nt, Homo sapiens
  misc_RNA (1)...(19): siRNA sense strand
uacaaguccuguuaaauug

SEQ ID NO: 764446 - RNA, 19 nt, Homo sapiens
  misc_RNA (1)...(19): siRNA sense strand
gauaucaagccaggaaaua

SEQ ID NO: 764447 - RNA, 19 nt, Homo sapiens
  misc_RNA (1)...(19): siRNA sense strand
gaaagacagaaauguagaa

SEQ ID NO: 764448 - RNA, 19 nt, Homo sapiens
  misc_RNA (1)...(19): siRNA sense strand
ugcagaaacuagugauaua

SEQ ID NO: 764449 - RNA, 19 nt, Homo sapiens
  misc_RNA (1)...(19): siRNA sense strand
gaagggccucguaggaaua

SEQ ID NO: 764450 - RNA, 19 nt, Homo sapiens
  misc_RNA (1)...(19): siRNA sense strand
gagacaacaacaagacaua

SEQ ID NO: 764451 - RNA, 19 nt, Homo sapiens
  misc_RNA (1)...(19): siRNA sense strand
ggaaucaaacauaccauga

SEQ ID NO: 764452 - RNA, 19 nt, Homo sapiens
  misc_RNA (1)...(19): siRNA sense strand
gaagaacaaauccacaaau

SEQ ID NO: 764453 - RNA, 19 nt, Homo sapiens
  misc_RNA (1)...(19): siRNA sense strand
uaaauugcaugacagagau

SEQ ID NO: 764454 - RNA, 19 nt, Homo sapiens
  misc_RNA (1)...(19): siRNA sense strand
gcuauaauacugcuacuau

SEQ ID NO: 764455 - RNA, 19 nt, Homo sapiens
  misc_RNA (1)...(19): siRNA sense strand
uggugcagcuagagaauua

SEQ ID NO: 764456 - RNA, 19 nt, Homo sapiens
  misc_RNA (1)...(19): siRNA sense strand
agaaggcacucauccgaaa

SEQ ID NO: 764457 - RNA, 19 nt, Homo sapiens
  misc_RNA (1)...(19): siRNA sense strand
gaauaagucagaagaaugg

SEQ ID NO: 764458 - RNA, 19 nt, Homo sapiens
  misc_RNA (1)...(19): siRNA sense strand
gaagaggagacaacaacaa

SEQ ID NO: 764459 - RNA, 19 nt, Homo sapiens
  misc_RNA (1)...(19): siRNA sense strand
cagaauugccaguaccuua

SEQ ID NO: 764460 - RNA, 19 nt, Homo sapiens
  misc_RNA (1)...(19): siRNA sense strand
gaaauauggagcaacaguu

SEQ ID NO: 764461 - RNA, 19 nt, Homo sapiens
  misc_RNA (1)...(19): siRNA sense strand
cuagagaauuagaagauga

SEQ ID NO: 764462 - RNA, 19 nt, Homo sapiens
  misc_RNA (1)...(19): siRNA sense strand
ggucuucagguucuacuua

SEQ ID NO: 764463 - RNA, 19 nt, Homo sapiens
  misc_RNA (1)...(19): siRNA sense strand
ugagagaauuugaaguguu

SEQ ID NO: 764464 - RNA, 19 nt, Homo sapiens
  misc_RNA (1)...(19): siRNA sense strand
gaugaugagcaguuuguuu

SEQ ID NO: 764465 - RNA, 19 nt, Homo sapiens
  misc_RNA (1)...(19): siRNA sense strand
uccaaguucuaacacauua

SEQ ID NO: 764466 - RNA, 19 nt, Homo sapiens
  misc_RNA (1)...(19): siRNA sense strand
gcacuuuacagaugaaugu

SEQ ID NO: 764467 - RNA, 19 nt, Homo sapiens
  misc_RNA (1)...(19): siRNA sense strand
ugacgcacuuuacagauga

SEQ ID NO: 764468 - RNA, 19 nt, Homo sapiens
  misc_RNA (1)...(19): siRNA sense strand
gagauuuacuaucaguuca

SEQ ID NO: 764469 - RNA, 19 nt, Homo sapiens
  misc_RNA (1)...(19): siRNA sense strand
agacauacacaccaaauug

SEQ ID NO: 764470 - RNA, 19 nt, Homo sapiens
  misc_RNA (1)...(19): siRNA sense strand
ccuggaagcggcagaguua

SEQ ID NO: 764471 - RNA, 19 nt, Homo sapiens
  misc_RNA (1)...(19): siRNA sense strand
gaaacuagugauauacuuc

SEQ ID NO: 764472 - RNA, 19 nt, Homo sapiens
  misc_RNA (1)...(19): siRNA sense strand
gcauugggguaacauuuua

SEQ ID NO: 764473 - RNA, 19 nt, Homo sapiens
  misc_RNA (1)...(19): siRNA sense strand
gaauauuugcacccugaua

SEQ ID NO: 764474 - RNA, 19 nt, Homo sapiens
  misc_RNA (1)...(19): siRNA sense strand
gggaguuuauacacuguuu

SEQ ID NO: 764475 - RNA, 19 nt, Homo sapiens
  misc_RNA (1)...(19): siRNA sense strand
uaagucagaagaauggaua

SEQ ID NO: 764476 - RNA, 19 nt, Homo sapiens
  misc_RNA (1)...(19): siRNA sense strand
agacaaagcagaacguaga

SEQ ID NO: 764477 - RNA, 19 nt, Homo sapiens
  misc_RNA (1)...(19): siRNA sense strand
ucaagaacuuaucuacgaa

SEQ ID NO: 764478 - RNA, 19 nt, Homo sapiens
  misc_RNA (1)...(19): siRNA sense strand
cuacgaagggcgacgcuua

SEQ ID NO: 764479 - RNA, 19 nt, Homo sapiens
  misc_RNA (1)...(19): siRNA sense strand
cuaaaguacauccacguua

SEQ ID NO: 764480 - RNA, 19 nt, Homo sapiens
  misc_RNA (1)...(19): siRNA sense strand
uguuaugccugcagaauug

SEQ ID NO: 764481 - RNA, 19 nt, Homo sapiens
  misc_RNA (1)...(19): siRNA sense strand
gacaacaacaagacauaaa

SEQ ID NO: 764482 - RNA, 19 nt, Homo sapiens
  misc_RNA (1)...(19): siRNA sense strand
acauccacguuaugauuua

SEQ ID NO: 764483 - RNA, 19 nt, Homo sapiens
  misc_RNA (1)...(19): siRNA sense strand
ggaaggcuggcacaacauu

SEQ ID NO: 764484 - RNA, 19 nt, Homo sapiens
  misc_RNA (1)...(19): siRNA sense strand
gagacaugccuguuucuug

SEQ ID NO: 764485 - RNA, 19 nt, Homo sapiens
  misc_RNA (1)...(19): siRNA sense strand
ggaaagccuucuggugcaa

SEQ ID NO: 764486 - RNA, 19 nt, Homo sapiens
  misc_RNA (1)...(19): siRNA sense strand
ugaagggccucguaggaau

SEQ ID NO: 764487 - RNA, 19 nt, Homo sapiens
  misc_RNA (1)...(19): siRNA sense strand
ugacuggaguggagacaug

SEQ ID NO: 764488 - RNA, 19 nt, Homo sapiens
  misc_RNA (1)...(19): siRNA sense strand
aaauuucccucccuaaagu

SEQ ID NO: 764489 - RNA, 19 nt, Homo sapiens
  misc_RNA (1)...(19): siRNA sense strand
ggcacaacauuucccuaaa

SEQ ID NO: 764490 - RNA, 19 nt, Homo sapiens
  misc_RNA (1)...(19): siRNA sense strand
ugauauacuucaccgaaug

SEQ ID NO: 764491 - RNA, 19 nt, Homo sapiens
  misc_RNA (1)...(19): siRNA sense strand
aaacauccuugaagcagau

SEQ ID NO: 764492 - RNA, 19 nt, Homo sapiens
  misc_RNA (1)...(19): siRNA sense strand
gcuagagaauuagaagaug

SEQ ID NO: 764493 - RNA, 19 nt, Homo sapiens
  misc_RNA (1)...(19): siRNA sense strand
gggaaccucugaauaccau

SEQ ID NO: 764494 - RNA, 19 nt, Homo sapiens
  misc_RNA (1)...(19): siRNA sense strand
gaggaaaacccuauauuug

SEQ ID NO: 764495 - RNA, 19 nt, Homo sapiens
  misc_RNA (1)...(19): siRNA sense strand
gcuacuauauuucaugaac

SEQ ID NO: 764496 - RNA, 19 nt, Homo sapiens
  misc_RNA (1)...(19): siRNA sense strand
agaagaugaugagcaguuu

SEQ ID NO: 764497 - RNA, 19 nt, Homo sapiens
  misc_RNA (1)...(19): siRNA sense strand
ccaugcagcuacuggauca

SEQ ID NO: 764498 - RNA, 19 nt, Homo sapiens
  misc_RNA (1)...(19): siRNA sense strand
cagaagaauggauaagaaa

SEQ ID NO: 764499 - RNA, 19 nt, Homo sapiens
  misc_RNA (1)...(19): siRNA sense strand
gauggcugauugaauuaau

SEQ ID NO: 764500 - RNA, 19 nt, Homo sapiens
  misc_RNA (1)...(19): siRNA sense strand
ugaaucaucuacgagagaa

SEQ ID NO: 764501 - RNA, 19 nt, Homo sapiens
  misc_RNA (1)...(19): siRNA sense strand
gcagaguuaggugaaauuu

SEQ ID NO: 764502 - RNA, 19 nt, Homo sapiens
  misc_RNA (1)...(19): siRNA sense strand
gggcgacgcuuagucuuag

SEQ ID NO: 764503 - RNA, 19 nt, Homo sapiens
  misc_RNA (1)...(19): siRNA sense strand
gaagggcgacgcuuagucu

SEQ ID NO: 764504 - RNA, 19 nt, Homo sapiens
  misc_RNA (1)...(19): siRNA sense strand
guugaucuuuggagcauug

SEQ ID NO: 764505 - RNA, 19 nt, Homo sapiens
  misc_RNA (1)...(19): siRNA sense strand
gcacagaagaauauuugca

SEQ ID NO: 764506 - RNA, 19 nt, Homo sapiens
  misc_RNA (1)...(19): siRNA sense strand
gauaucgacagcagauuau

SEQ ID NO: 764507 - RNA, 19 nt, Homo sapiens
  misc_RNA (1)...(19): siRNA sense strand
gaaggcuggcacaacauuu

SEQ ID NO: 764508 - RNA, 19 nt, Homo sapiens
  misc_RNA (1)...(19): siRNA sense strand
guggagacaugccuguuuc

SEQ ID NO: 764509 - RNA, 19 nt, Homo sapiens
  misc_RNA (1)...(19): siRNA sense strand
aaagccuucuggugcaaua

SEQ ID NO: 764510 - RNA, 19 nt, Homo sapiens
  misc_RNA (1)...(19): siRNA sense strand
ccaguggaaucaaacauac

SEQ ID NO: 764511 - RNA, 19 nt, Homo sapiens
  misc_RNA (1)...(19): siRNA sense strand
caacguugacugucuuuag

SEQ ID NO: 764512 - RNA, 19 nt, Homo sapiens
  misc_RNA (1)...(19): siRNA sense strand
gaccucagcucuugcauca

SEQ ID NO: 764513 - RNA, 19 nt, Homo sapiens
  misc_RNA (1)...(19): siRNA sense strand
ggagcaggauagugccuuu

SEQ ID NO: 764514 - RNA, 19 nt, Homo sapiens
  misc_RNA (1)...(19): siRNA sense strand
ggaggaggaguuccaguuu

SEQ ID NO: 764515 - RNA, 19 nt, Homo sapiens
  misc_RNA (1)...(19): siRNA sense strand
gaggaggaguuccaguuuc

SEQ ID NO: 764516 - RNA, 19 nt, Homo sapiens
  misc_RNA (1)...(19): siRNA sense strand
ggaaagaugcagcuguauc

SEQ ID NO: 764517 - RNA, 19 nt, Homo sapiens
  misc_RNA (1)...(19): siRNA sense strand
gagcucaagugcgacauca

SEQ ID NO: 764518 - RNA, 19 nt, Homo sapiens
  misc_RNA (1)...(19): siRNA sense strand
gcagcuguauccaagaaag

SEQ ID NO: 764519 - RNA, 19 nt, Homo sapiens
  misc_RNA (1)...(19): siRNA sense strand
ggggaaagaugcagcugua

SEQ ID NO: 764520 - RNA, 19 nt, Homo sapiens
  misc_RNA (1)...(19): siRNA sense strand
gaaagaugcagcuguaucc

SEQ ID NO: 764521 - RNA, 19 nt, Homo sapiens
  misc_RNA (1)...(19): siRNA sense strand
cgaagcugcugccuugucu

SEQ ID NO: 764522 - RNA, 19 nt, Homo sapiens
  misc_RNA (1)...(19): siRNA sense strand
ugcagaggaugaagugcua

SEQ ID NO: 764523 - RNA, 19 nt, Homo sapiens
  misc_RNA (1)...(19): siRNA sense strand
cgacaucagcgcagagauc

SEQ ID NO: 764524 - RNA, 19 nt, Homo sapiens
  misc_RNA (1)...(19): siRNA sense strand
gggacccuauugacguuga

SEQ ID NO: 764525 - RNA, 19 nt, Homo sapiens
  misc_RNA (1)...(19): siRNA sense strand
ugcaggaccucagcucuug

SEQ ID NO: 764526 - RNA, 19 nt, Homo sapiens
  misc_RNA (1)...(19): siRNA sense strand
cgcccuggauaacgucuuu

SEQ ID NO: 764527 - RNA, 19 nt, Homo sapiens
  misc_RNA (1)...(19): siRNA sense strand
gccgacuucuggugcuuug

SEQ ID NO: 764528 - RNA, 19 nt, Homo sapiens
  misc_RNA (1)...(19): siRNA sense strand
gcgcuggugcagaggauga

SEQ ID NO: 764529 - RNA, 19 nt, Homo sapiens
  misc_RNA (1)...(19): siRNA sense strand
cggaggaggaguuccaguu

SEQ ID NO: 764530 - RNA, 19 nt, Homo sapiens
  misc_RNA (1)...(19): siRNA sense strand
ccgauggcuucgacgaguu

SEQ ID NO: 764531 - RNA, 19 nt, Homo sapiens
  misc_RNA (1)...(19): siRNA sense strand
aggaggaguuccaguuucu

SEQ ID NO: 764532 - RNA, 19 nt, Homo sapiens
  misc_RNA (1)...(19): siRNA sense strand
augcagcuguauccaagaa

SEQ ID NO: 764533 - RNA, 19 nt, Homo sapiens
  misc_RNA (1)...(19): siRNA sense strand
gguaccagcgcgacuacga

SEQ ID NO: 764534 - RNA, 19 nt, Homo sapiens
  misc_RNA (1)...(19): siRNA sense strand
gaccucagcucuugcauca

SEQ ID NO: 764535 - RNA, 19 nt, Homo sapiens
  misc_RNA (1)...(19): siRNA sense strand
ggagcaggauagugccuuu

SEQ ID NO: 764536 - RNA, 19 nt, Homo sapiens
  misc_RNA (1)...(19): siRNA sense strand
ggaggaggaguuccaguuu

SEQ ID NO: 764537 - RNA, 19 nt, Homo sapiens
  misc_RNA (1)...(19): siRNA sense strand
gaggaggaguuccaguuuc

SEQ ID NO: 764538 - RNA, 19 nt, Homo sapiens
  misc_RNA (1)...(19): siRNA sense strand
ggaaagaugcagcuguauc

SEQ ID NO: 764539 - RNA, 19 nt, Homo sapiens
  misc_RNA (1)...(19): siRNA sense strand
gagcucaagugcgacauca

SEQ ID NO: 764540 - RNA, 19 nt, Homo sapiens
  misc_RNA (1)...(19): siRNA sense strand
gcagcuguauccaagaaag

SEQ ID NO: 764541 - RNA, 19 nt, Homo sapiens
  misc_RNA (1)...(19): siRNA sense strand
ggggaaagaugcagcugua

SEQ ID NO: 764542 - RNA, 19 nt, Homo sapiens
  misc_RNA (1)...(19): siRNA sense strand
gaaagaugcagcuguaucc

SEQ ID NO: 764543 - RNA, 19 nt, Homo sapiens
  misc_RNA (1)...(19): siRNA sense strand
cgaagcugcugccuugucu

SEQ ID NO: 764544 - RNA, 19 nt, Homo sapiens
  misc_RNA (1)...(19): siRNA sense strand
ugcagaggaugaagugcua

SEQ ID NO: 764545 - RNA, 19 nt, Homo sapiens
  misc_RNA (1)...(19): siRNA sense strand
cgacaucagcgcagagauc

SEQ ID NO: 764546 - RNA, 19 nt, Homo sapiens
  misc_RNA (1)...(19): siRNA sense strand
gggacccuauugacguuga

SEQ ID NO: 764547 - RNA, 19 nt, Homo sapiens
  misc_RNA (1)...(19): siRNA sense strand
ugcaggaccucagcucuug

SEQ ID NO: 764548 - RNA, 19 nt, Homo sapiens
  misc_RNA (1)...(19): siRNA sense strand
cgcccuggauaacgucuuu

SEQ ID NO: 764549 - RNA, 19 nt, Homo sapiens
  misc_RNA (1)...(19): siRNA sense strand
gccgacuucuggugcuuug

SEQ ID NO: 764550 - RNA, 19 nt, Homo sapiens
  misc_RNA (1)...(19): siRNA sense strand
gcgcuggugcagaggauga

SEQ ID NO: 764551 - RNA, 19 nt, Homo sapiens
  misc_RNA (1)...(19): siRNA sense strand
cggaggaggaguuccaguu

SEQ ID NO: 764552 - RNA, 19 nt, Homo sapiens
  misc_RNA (1)...(19): siRNA sense strand
ccgauggcuucgacgaguu

SEQ ID NO: 764553 - RNA, 19 nt, Homo sapiens
  misc_RNA (1)...(19): siRNA sense strand
aggaggaguuccaguuucu

SEQ ID NO: 764554 - RNA, 19 nt, Homo sapiens
  misc_RNA (1)...(19): siRNA sense strand
augcagcuguauccaagaa

SEQ ID NO: 764555 - RNA, 19 nt, Homo sapiens
  misc_RNA (1)...(19): siRNA sense strand
gguaccagcgcgacuacga

SEQ ID NO: 764556 - RNA, 19 nt, Homo sapiens
  misc_RNA (1)...(19): siRNA sense strand
gaccucagcucuugcauca

SEQ ID NO: 764557 - RNA, 19 nt, Homo sapiens
  misc_RNA (1)...(19): siRNA sense strand
ggagcaggauagugccuuu

SEQ ID NO: 764558 - RNA, 19 nt, Homo sapiens
  misc_RNA (1)...(19): siRNA sense strand
ggaggaggaguuccaguuu

SEQ ID NO: 764559 - RNA, 19 nt, Homo sapiens
  misc_RNA (1)...(19): siRNA sense strand
gaggaggaguuccaguuuc

SEQ ID NO: 764560 - RNA, 19 nt, Homo sapiens
  misc_RNA (1)...(19): siRNA sense strand
ggaaagaugcagcuguauc

SEQ ID NO: 764561 - RNA, 19 nt, Homo sapiens
  misc_RNA (1)...(19): siRNA sense strand
gagcucaagugcgacauca

SEQ ID NO: 764562 - RNA, 19 nt, Homo sapiens
  misc_RNA (1)...(19): siRNA sense strand
gcagcuguauccaagaaag

SEQ ID NO: 764563 - RNA, 19 nt, Homo sapiens
  misc_RNA (1)...(19): siRNA sense strand
ggggaaagaugcagcugua

SEQ ID NO: 764564 - RNA, 19 nt, Homo sapiens
  misc_RNA (1)...(19): siRNA sense strand
gaaagaugcagcuguaucc

SEQ ID NO: 764565 - RNA, 19 nt, Homo sapiens
  misc_RNA (1)...(19): siRNA sense strand
cgaagcugcugccuugucu

SEQ ID NO: 764566 - RNA, 19 nt, Homo sapiens
  misc_RNA (1)...(19): siRNA sense strand
ugcagaggaugaagugcua

SEQ ID NO: 764567 - RNA, 19 nt, Homo sapiens
  misc_RNA (1)...(19): siRNA sense strand
cgacaucagcgcagagauc

SEQ ID NO: 764568 - RNA, 19 nt, Homo sapiens
  misc_RNA (1)...(19): siRNA sense strand
gggacccuauugacguuga

SEQ ID NO: 764569 - RNA, 19 nt, Homo sapiens
  misc_RNA (1)...(19): siRNA sense strand
ugcaggaccucagcucuug

SEQ ID NO: 764570 - RNA, 19 nt, Homo sapiens
  misc_RNA (1)...(19): siRNA sense strand
cgcccuggauaacgucuuu

SEQ ID NO: 764571 - RNA, 19 nt, Homo sapiens
  misc_RNA (1)...(19): siRNA sense strand
gccgacuucuggugcuuug

SEQ ID NO: 764572 - RNA, 19 nt, Homo sapiens
  misc_RNA (1)...(19): siRNA sense strand
gcgcuggugcagaggauga

SEQ ID NO: 764573 - RNA, 19 nt, Homo sapiens
  misc_RNA (1)...(19): siRNA sense strand
cggaggaggaguuccaguu

SEQ ID NO: 764574 - RNA, 19 nt, Homo sapiens
  misc_RNA (1)...(19): siRNA sense strand
ccgauggcuucgacgaguu

SEQ ID NO: 764575 - RNA, 19 nt, Homo sapiens
  misc_RNA (1)...(19): siRNA sense strand
aggaggaguuccaguuucu

SEQ ID NO: 764576 - RNA, 19 nt, Homo sapiens
  misc_RNA (1)...(19): siRNA sense strand
augcagcuguauccaagaa

SEQ ID NO: 764577 - RNA, 19 nt, Homo sapiens
  misc_RNA (1)...(19): siRNA sense strand
gguaccagcgcgacuacga

SEQ ID NO: 764578 - RNA, 19 nt, Homo sapiens
  misc_RNA (1)...(19): siRNA sense strand
gaccucagcucuugcauca

SEQ ID NO: 764579 - RNA, 19 nt, Homo sapiens
  misc_RNA (1)...(19): siRNA sense strand
ggagcaggauagugccuuu

SEQ ID NO: 764580 - RNA, 19 nt, Homo sapiens
  misc_RNA (1)...(19): siRNA sense strand
ggaggaggaguuccaguuu

SEQ ID NO: 764581 - RNA, 19 nt, Homo sapiens
  misc_RNA (1)...(19): siRNA sense strand
gaggaggaguuccaguuuc

SEQ ID NO: 764582 - RNA, 19 nt, Homo sapiens
  misc_RNA (1)...(19): siRNA sense strand
ggaaagaugcagcuguauc

SEQ ID NO: 764583 - RNA, 19 nt, Homo sapiens
  misc_RNA (1)...(19): siRNA sense strand
gagcucaagugcgacauca

SEQ ID NO: 764584 - RNA, 19 nt, Homo sapiens
  misc_RNA (1)...(19): siRNA sense strand
gcagcuguauccaagaaag

SEQ ID NO: 764585 - RNA, 19 nt, Homo sapiens
  misc_RNA (1)...(19): siRNA sense strand
ggggaaagaugcagcugua

SEQ ID NO: 764586 - RNA, 19 nt, Homo sapiens
  misc_RNA (1)...(19): siRNA sense strand
gaaagaugcagcuguaucc

SEQ ID NO: 764587 - RNA, 19 nt, Homo sapiens
  misc_RNA (1)...(19): siRNA sense strand
cgaagcugcugccuugucu

SEQ ID NO: 764588 - RNA, 19 nt, Homo sapiens
  misc_RNA (1)...(19): siRNA sense strand
ugcagaggaugaagugcua

SEQ ID NO: 764589 - RNA, 19 nt, Homo sapiens
  misc_RNA (1)...(19): siRNA sense strand
cgacaucagcgcagagauc

SEQ ID NO: 764590 - RNA, 19 nt, Homo sapiens
  misc_RNA (1)...(19): siRNA sense strand
gggacccuauugacguuga

SEQ ID NO: 764591 - RNA, 19 nt, Homo sapiens
  misc_RNA (1)...(19): siRNA sense strand
ugcaggaccucagcucuug

SEQ ID NO: 764592 - RNA, 19 nt, Homo sapiens
  misc_RNA (1)...(19): siRNA sense strand
cgcccuggauaacgucuuu

SEQ ID NO: 764593 - RNA, 19 nt, Homo sapiens
  misc_RNA (1)...(19): siRNA sense strand
gccgacuucuggugcuuug

SEQ ID NO: 764594 - RNA, 19 nt, Homo sapiens
  misc_RNA (1)...(19): siRNA sense strand
gcgcuggugcagaggauga

SEQ ID NO: 764595 - RNA, 19 nt, Homo sapiens
  misc_RNA (1)...(19): siRNA sense strand
cggaggaggaguuccaguu

SEQ ID NO: 764596 - RNA, 19 nt, Homo sapiens
  misc_RNA (1)...(19): siRNA sense strand
ccgauggcuucgacgaguu

SEQ ID NO: 764597 - RNA, 19 nt, Homo sapiens
  misc_RNA (1)...(19): siRNA sense strand
aggaggaguuccaguuucu

SEQ ID NO: 764598 - RNA, 19 nt, Homo sapiens
  misc_RNA (1)...(19): siRNA sense strand
augcagcuguauccaagaa

SEQ ID NO: 764599 - RNA, 19 nt, Homo sapiens
  misc_RNA (1)...(19): siRNA sense strand
gguaccagcgcgacuacga

SEQ ID NO: 764600 - RNA, 19 nt, Homo sapiens
  misc_RNA (1)...(19): siRNA sense strand
gaccucagcucuugcauca

SEQ ID NO: 764601 - RNA, 19 nt, Homo sapiens
  misc_RNA (1)...(19): siRNA sense strand
ggagcaggauagugccuuu

SEQ ID NO: 764602 - RNA, 19 nt, Homo sapiens
  misc_RNA (1)...(19): siRNA sense strand
ggaggaggaguuccaguuu

SEQ ID NO: 764603 - RNA, 19 nt, Homo sapiens
  misc_RNA (1)...(19): siRNA sense strand
gaggaggaguuccaguuuc

SEQ ID NO: 764604 - RNA, 19 nt, Homo sapiens
  misc_RNA (1)...(19): siRNA sense strand
ggaaagaugcagcuguauc

SEQ ID NO: 764605 - RNA, 19 nt, Homo sapiens
  misc_RNA (1)...(19): siRNA sense strand
gagcucaagugcgacauca

SEQ ID NO: 764606 - RNA, 19 nt, Homo sapiens
  misc_RNA (1)...(19): siRNA sense strand
gcagcuguauccaagaaag

SEQ ID NO: 764607 - RNA, 19 nt, Homo sapiens
  misc_RNA (1)...(19): siRNA sense strand
ggggaaagaugcagcugua

SEQ ID NO: 764608 - RNA, 19 nt, Homo sapiens
  misc_RNA (1)...(19): siRNA sense strand
gaaagaugcagcuguaucc

SEQ ID NO: 764609 - RNA, 19 nt, Homo sapiens
  misc_RNA (1)...(19): siRNA sense strand
cgaagcugcugccuugucu

SEQ ID NO: 764610 - RNA, 19 nt, Homo sapiens
  misc_RNA (1)...(19): siRNA sense strand
ugcagaggaugaagugcua

SEQ ID NO: 764611 - RNA, 19 nt, Homo sapiens
  misc_RNA (1)...(19): siRNA sense strand
cgacaucagcgcagagauc

SEQ ID NO: 764612 - RNA, 19 nt, Homo sapiens
  misc_RNA (1)...(19): siRNA sense strand
gggacccuauugacguuga

SEQ ID NO: 764613 - RNA, 19 nt, Homo sapiens
  misc_RNA (1)...(19): siRNA sense strand
ugcaggaccucagcucuug

SEQ ID NO: 764614 - RNA, 19 nt, Homo sapiens
  misc_RNA (1)...(19): siRNA sense strand
cgcccuggauaacgucuuu

SEQ ID NO: 764615 - RNA, 19 nt, Homo sapiens
  misc_RNA (1)...(19): siRNA sense strand
gccgacuucuggugcuuug

SEQ ID NO: 764616 - RNA, 19 nt, Homo sapiens
  misc_RNA (1)...(19): siRNA sense strand
gcgcuggugcagaggauga

SEQ ID NO: 764617 - RNA, 19 nt, Homo sapiens
  misc_RNA (1)...(19): siRNA sense strand
cggaggaggaguuccaguu

SEQ ID NO: 764618 - RNA, 19 nt, Homo sapiens
  misc_RNA (1)...(19): siRNA sense strand
ccgauggcuucgacgaguu

SEQ ID NO: 764619 - RNA, 19 nt, Homo sapiens
  misc_RNA (1)...(19): siRNA sense strand
aggaggaguuccaguuucu

SEQ ID NO: 764620 - RNA, 19 nt, Homo sapiens
  misc_RNA (1)...(19): siRNA sense strand
augcagcuguauccaagaa

SEQ ID NO: 764621 - RNA, 19 nt, Homo sapiens
  misc_RNA (1)...(19): siRNA sense strand
gguaccagcgcgacuacga

SEQ ID NO: 764622 - RNA, 19 nt, Homo sapiens
  misc_RNA (1)...(19): siRNA sense strand
gaccucagcucuugcauca

SEQ ID NO: 764623 - RNA, 19 nt, Homo sapiens
  misc_RNA (1)...(19): siRNA sense strand
ggagcaggauagugccuuu

SEQ ID NO: 764624 - RNA, 19 nt, Homo sapiens
  misc_RNA (1)...(19): siRNA sense strand
ggaggaggaguuccaguuu

SEQ ID NO: 764625 - RNA, 19 nt, Homo sapiens
  misc_RNA (1)...(19): siRNA sense strand
gaggaggaguuccaguuuc

SEQ ID NO: 764626 - RNA, 19 nt, Homo sapiens
  misc_RNA (1)...(19): siRNA sense strand
ggaaagaugcagcuguauc

SEQ ID NO: 764627 - RNA, 19 nt, Homo sapiens
  misc_RNA (1)...(19): siRNA sense strand
gagcucaagugcgacauca

SEQ ID NO: 764628 - RNA, 19 nt, Homo sapiens
  misc_RNA (1)...(19): siRNA sense strand
gcagcuguauccaagaaag

SEQ ID NO: 764629 - RNA, 19 nt, Homo sapiens
  misc_RNA (1)...(19): siRNA sense strand
ggggaaagaugcagcugua

SEQ ID NO: 764630 - RNA, 19 nt, Homo sapiens
  misc_RNA (1)...(19): siRNA sense strand
gaaagaugcagcuguaucc

SEQ ID NO: 764631 - RNA, 19 nt, Homo sapiens
  misc_RNA (1)...(19): siRNA sense strand
cgaagcugcugccuugucu

SEQ ID NO: 764632 - RNA, 19 nt, Homo sapiens
  misc_RNA (1)...(19): siRNA sense strand
ugcagaggaugaagugcua

SEQ ID NO: 764633 - RNA, 19 nt, Homo sapiens
  misc_RNA (1)...(19): siRNA sense strand
cgacaucagcgcagagauc

SEQ ID NO: 764634 - RNA, 19 nt, Homo sapiens
  misc_RNA (1)...(19): siRNA sense strand
gggacccuauugacguuga

SEQ ID NO: 764635 - RNA, 19 nt, Homo sapiens
  misc_RNA (1)...(19): siRNA sense strand
ugcaggaccucagcucuug

SEQ ID NO: 764636 - RNA, 19 nt, Homo sapiens
  misc_RNA (1)...(19): siRNA sense strand
cgcccuggauaacgucuuu

SEQ ID NO: 764637 - RNA, 19 nt, Homo sapiens
  misc_RNA (1)...(19): siRNA sense strand
gccgacuucuggugcuuug

SEQ ID NO: 764638 - RNA, 19 nt, Homo sapiens
  misc_RNA (1)...(19): siRNA sense strand
gcgcuggugcagaggauga

SEQ ID NO: 764639 - RNA, 19 nt, Homo sapiens
  misc_RNA (1)...(19): siRNA sense strand
cggaggaggaguuccaguu

SEQ ID NO: 764640 - RNA, 19 nt, Homo sapiens
  misc_RNA (1)...(19): siRNA sense strand
ccgauggcuucgacgaguu

SEQ ID NO: 764641 - RNA, 19 nt, Homo sapiens
  misc_RNA (1)...(19): siRNA sense strand
aggaggaguuccaguuucu

SEQ ID NO: 764642 - RNA, 19 nt, Homo sapiens
  misc_RNA (1)...(19): siRNA sense strand
augcagcuguauccaagaa

SEQ ID NO: 764643 - RNA, 19 nt, Homo sapiens
  misc_RNA (1)...(19): siRNA sense strand
gguaccagcgcgacuacga

SEQ ID NO: 764644 - RNA, 19 nt, Homo sapiens
  misc_RNA (1)...(19): siRNA sense strand
gaccucagcucuugcauca

SEQ ID NO: 764645 - RNA, 19 nt, Homo sapiens
  misc_RNA (1)...(19): siRNA sense strand
ggagcaggauagugccuuu

SEQ ID NO: 764646 - RNA, 19 nt, Homo sapiens
  misc_RNA (1)...(19): siRNA sense strand
ggaggaggaguuccaguuu

SEQ ID NO: 764647 - RNA, 19 nt, Homo sapiens
  misc_RNA (1)...(19): siRNA sense strand
gaggaggaguuccaguuuc

SEQ ID NO: 764648 - RNA, 19 nt, Homo sapiens
  misc_RNA (1)...(19): siRNA sense strand
ggaaagaugcagcuguauc

SEQ ID NO: 764649 - RNA, 19 nt, Homo sapiens
  misc_RNA (1)...(19): siRNA sense strand
gagcucaagugcgacauca

SEQ ID NO: 764650 - RNA, 19 nt, Homo sapiens
  misc_RNA (1)...(19): siRNA sense strand
gcagcuguauccaagaaag

SEQ ID NO: 764651 - RNA, 19 nt, Homo sapiens
  misc_RNA (1)...(19): siRNA sense strand
ggggaaagaugcagcugua

SEQ ID NO: 764652 - RNA, 19 nt, Homo sapiens
  misc_RNA (1)...(19): siRNA sense strand
gaaagaugcagcuguaucc

SEQ ID NO: 764653 - RNA, 19 nt, Homo sapiens
  misc_RNA (1)...(19): siRNA sense strand
cgaagcugcugccuugucu

SEQ ID NO: 764654 - RNA, 19 nt, Homo sapiens
  misc_RNA (1)...(19): siRNA sense strand
ugcagaggaugaagugcua

SEQ ID NO: 764655 - RNA, 19 nt, Homo sapiens
  misc_RNA (1)...(19): siRNA sense strand
cgacaucagcgcagagauc

SEQ ID NO: 764656 - RNA, 19 nt, Homo sapiens
  misc_RNA (1)...(19): siRNA sense strand
gggacccuauugacguuga

SEQ ID NO: 764657 - RNA, 19 nt, Homo sapiens
  misc_RNA (1)...(19): siRNA sense strand
ugcaggaccucagcucuug

SEQ ID NO: 764658 - RNA, 19 nt, Homo sapiens
  misc_RNA (1)...(19): siRNA sense strand
cgcccuggauaacgucuuu

SEQ ID NO: 764659 - RNA, 19 nt, Homo sapiens
  misc_RNA (1)...(19): siRNA sense strand
gccgacuucuggugcuuug

SEQ ID NO: 764660 - RNA, 19 nt, Homo sapiens
  misc_RNA (1)...(19): siRNA sense strand
gcgcuggugcagaggauga

SEQ ID NO: 764661 - RNA, 19 nt, Homo sapiens
  misc_RNA (1)...(19): siRNA sense strand
cggaggaggaguuccaguu

SEQ ID NO: 764662 - RNA, 19 nt, Homo sapiens
  misc_RNA (1)...(19): siRNA sense strand
ccgauggcuucgacgaguu

SEQ ID NO: 764663 - RNA, 19 nt, Homo sapiens
  misc_RNA (1)...(19): siRNA sense strand
aggaggaguuccaguuucu

SEQ ID NO: 764664 - RNA, 19 nt, Homo sapiens
  misc_RNA (1)...(19): siRNA sense strand
augcagcuguauccaagaa

SEQ ID NO: 764665 - RNA, 19 nt, Homo sapiens
  misc_RNA (1)...(19): siRNA sense strand
gguaccagcgcgacuacga

SEQ ID NO: 764666 - RNA, 19 nt, Homo sapiens
  misc_RNA (1)...(19): siRNA sense strand
gaccucagcucuugcauca

SEQ ID NO: 764667 - RNA, 19 nt, Homo sapiens
  misc_RNA (1)...(19): siRNA sense strand
ggagcaggauagugccuuu

SEQ ID NO: 764668 - RNA, 19 nt, Homo sapiens
  misc_RNA (1)...(19): siRNA sense strand
ggaggaggaguuccaguuu

SEQ ID NO: 764669 - RNA, 19 nt, Homo sapiens
  misc_RNA (1)...(19): siRNA sense strand
gaggaggaguuccaguuuc

SEQ ID NO: 764670 - RNA, 19 nt, Homo sapiens
  misc_RNA (1)...(19): siRNA sense strand
ggaaagaugcagcuguauc

SEQ ID NO: 764671 - RNA, 19 nt, Homo sapiens
  misc_RNA (1)...(19): siRNA sense strand
gagcucaagugcgacauca

SEQ ID NO: 764672 - RNA, 19 nt, Homo sapiens
  misc_RNA (1)...(19): siRNA sense strand
gcagcuguauccaagaaag

SEQ ID NO: 764673 - RNA, 19 nt, Homo sapiens
  misc_RNA (1)...(19): siRNA sense strand
ggggaaagaugcagcugua

SEQ ID NO: 764674 - RNA, 19 nt, Homo sapiens
  misc_RNA (1)...(19): siRNA sense strand
gaaagaugcagcuguaucc

SEQ ID NO: 764675 - RNA, 19 nt, Homo sapiens
  misc_RNA (1)...(19): siRNA sense strand
cgaagcugcugccuugucu

SEQ ID NO: 764676 - RNA, 19 nt, Homo sapiens
  misc_RNA (1)...(19): siRNA sense strand
ugcagaggaugaagugcua

SEQ ID NO: 764677 - RNA, 19 nt, Homo sapiens
  misc_RNA (1)...(19): siRNA sense strand
cgacaucagcgcagagauc

SEQ ID NO: 764678 - RNA, 19 nt, Homo sapiens
  misc_RNA (1)...(19): siRNA sense strand
gggacccuauugacguuga

SEQ ID NO: 764679 - RNA, 19 nt, Homo sapiens
  misc_RNA (1)...(19): siRNA sense strand
ugcaggaccucagcucuug

SEQ ID NO: 764680 - RNA, 19 nt, Homo sapiens
  misc_RNA (1)...(19): siRNA sense strand
cgcccuggauaacgucuuu

SEQ ID NO: 764681 - RNA, 19 nt, Homo sapiens
  misc_RNA (1)...(19): siRNA sense strand
gccgacuucuggugcuuug

SEQ ID NO: 764682 - RNA, 19 nt, Homo sapiens
  misc_RNA (1)...(19): siRNA sense strand
gcgcuggugcagaggauga

SEQ ID NO: 764683 - RNA, 19 nt, Homo sapiens
  misc_RNA (1)...(19): siRNA sense strand
cggaggaggaguuccaguu

SEQ ID NO: 764684 - RNA, 19 nt, Homo sapiens
  misc_RNA (1)...(19): siRNA sense strand
ccgauggcuucgacgaguu

SEQ ID NO: 764685 - RNA, 19 nt, Homo sapiens
  misc_RNA (1)...(19): siRNA sense strand
aggaggaguuccaguuucu

SEQ ID NO: 764686 - RNA, 19 nt, Homo sapiens
  misc_RNA (1)...(19): siRNA sense strand
augcagcuguauccaagaa

SEQ ID NO: 764687 - RNA, 19 nt, Homo sapiens
  misc_RNA (1)...(19): siRNA sense strand
gguaccagcgcgacuacga

SEQ ID NO: 764688 - RNA, 19 nt, Homo sapiens
  misc_RNA (1)...(19): siRNA sense strand
gaccucagcucuugcauca

SEQ ID NO: 764689 - RNA, 19 nt, Homo sapiens
  misc_RNA (1)...(19): siRNA sense strand
ggagcaggauagugccuuu

SEQ ID NO: 764690 - RNA, 19 nt, Homo sapiens
  misc_RNA (1)...(19): siRNA sense strand
ggaggaggaguuccaguuu

SEQ ID NO: 764691 - RNA, 19 nt, Homo sapiens
  misc_RNA (1)...(19): siRNA sense strand
gaggaggaguuccaguuuc

SEQ ID NO: 764692 - RNA, 19 nt, Homo sapiens
  misc_RNA (1)...(19): siRNA sense strand
ggaaagaugcagcuguauc

SEQ ID NO: 764693 - RNA, 19 nt, Homo sapiens
  misc_RNA (1)...(19): siRNA sense strand
gagcucaagugcgacauca

SEQ ID NO: 764694 - RNA, 19 nt, Homo sapiens
  misc_RNA (1)...(19): siRNA sense strand
gcagcuguauccaagaaag

SEQ ID NO: 764695 - RNA, 19 nt, Homo sapiens
  misc_RNA (1)...(19): siRNA sense strand
ggggaaagaugcagcugua

SEQ ID NO: 764696 - RNA, 19 nt, Homo sapiens
  misc_RNA (1)...(19): siRNA sense strand
gaaagaugcagcuguaucc

SEQ ID NO: 764697 - RNA, 19 nt, Homo sapiens
  misc_RNA (1)...(19): siRNA sense strand
cgaagcugcugccuugucu

SEQ ID NO: 764698 - RNA, 19 nt, Homo sapiens
  misc_RNA (1)...(19): siRNA sense strand
ugcagaggaugaagugcua

SEQ ID NO: 764699 - RNA, 19 nt, Homo sapiens
  misc_RNA (1)...(19): siRNA sense strand
cgacaucagcgcagagauc

SEQ ID NO: 764700 - RNA, 19 nt, Homo sapiens
  misc_RNA (1)...(19): siRNA sense strand
gggacccuauugacguuga

SEQ ID NO: 764701 - RNA, 19 nt, Homo sapiens
  misc_RNA (1)...(19): siRNA sense strand
ugcaggaccucagcucuug

SEQ ID NO: 764702 - RNA, 19 nt, Homo sapiens
  misc_RNA (1)...(19): siRNA sense strand
cgcccuggauaacgucuuu

SEQ ID NO: 764703 - RNA, 19 nt, Homo sapiens
  misc_RNA (1)...(19): siRNA sense strand
gccgacuucuggugcuuug

SEQ ID NO: 764704 - RNA, 19 nt, Homo sapiens
  misc_RNA (1)...(19): siRNA sense strand
gcgcuggugcagaggauga

SEQ ID NO: 764705 - RNA, 19 nt, Homo sapiens
  misc_RNA (1)...(19): siRNA sense strand
cggaggaggaguuccaguu

SEQ ID NO: 764706 - RNA, 19 nt, Homo sapiens
  misc_RNA (1)...(19): siRNA sense strand
ccgauggcuucgacgaguu

SEQ ID NO: 764707 - RNA, 19 nt, Homo sapiens
  misc_RNA (1)...(19): siRNA sense strand
aggaggaguuccaguuucu

SEQ ID NO: 764708 - RNA, 19 nt, Homo sapiens
  misc_RNA (1)...(19): siRNA sense strand
augcagcuguauccaagaa

SEQ ID NO: 764709 - RNA, 19 nt, Homo sapiens
  misc_RNA (1)...(19): siRNA sense strand
gguaccagcgcgacuacga

SEQ ID NO: 764710 - RNA, 19 nt, Homo sapiens
  misc_RNA (1)...(19): siRNA sense strand
gaccucagcucuugcauca

SEQ ID NO: 764711 - RNA, 19 nt, Homo sapiens
  misc_RNA (1)...(19): siRNA sense strand
ggagcaggauagugccuuu

SEQ ID NO: 764712 - RNA, 19 nt, Homo sapiens
  misc_RNA (1)...(19): siRNA sense strand
ggaggaggaguuccaguuu

SEQ ID NO: 764713 - RNA, 19 nt, Homo sapiens
  misc_RNA (1)...(19): siRNA sense strand
gaggaggaguuccaguuuc

SEQ ID NO: 764714 - RNA, 19 nt, Homo sapiens
  misc_RNA (1)...(19): siRNA sense strand
ggaaagaugcagcuguauc

SEQ ID NO: 764715 - RNA, 19 nt, Homo sapiens
  misc_RNA (1)...(19): siRNA sense strand
gagcucaagugcgacauca

SEQ ID NO: 764716 - RNA, 19 nt, Homo sapiens
  misc_RNA (1)...(19): siRNA sense strand
gcagcuguauccaagaaag

SEQ ID NO: 764717 - RNA, 19 nt, Homo sapiens
  misc_RNA (1)...(19): siRNA sense strand
ggggaaagaugcagcugua

SEQ ID NO: 764718 - RNA, 19 nt, Homo sapiens
  misc_RNA (1)...(19): siRNA sense strand
gaaagaugcagcuguaucc

SEQ ID NO: 764719 - RNA, 19 nt, Homo sapiens
  misc_RNA (1)...(19): siRNA sense strand
cgaagcugcugccuugucu

SEQ ID NO: 764720 - RNA, 19 nt, Homo sapiens
  misc_RNA (1)...(19): siRNA sense strand
ugcagaggaugaagugcua

SEQ ID NO: 764721 - RNA, 19 nt, Homo sapiens
  misc_RNA (1)...(19): siRNA sense strand
cgacaucagcgcagagauc

SEQ ID NO: 764722 - RNA, 19 nt, Homo sapiens
  misc_RNA (1)...(19): siRNA sense strand
gggacccuauugacguuga

SEQ ID NO: 764723 - RNA, 19 nt, Homo sapiens
  misc_RNA (1)...(19): siRNA sense strand
ugcaggaccucagcucuug

SEQ ID NO: 764724 - RNA, 19 nt, Homo sapiens
  misc_RNA (1)...(19): siRNA sense strand
cgcccuggauaacgucuuu

SEQ ID NO: 764725 - RNA, 19 nt, Homo sapiens
  misc_RNA (1)...(19): siRNA sense strand
gccgacuucuggugcuuug

SEQ ID NO: 764726 - RNA, 19 nt, Homo sapiens
  misc_RNA (1)...(19): siRNA sense strand
gcgcuggugcagaggauga

SEQ ID NO: 764727 - RNA, 19 nt, Homo sapiens
  misc_RNA (1)...(19): siRNA sense strand
cggaggaggaguuccaguu

SEQ ID NO: 764728 - RNA, 19 nt, Homo sapiens
  misc_RNA (1)...(19): siRNA sense strand
ccgauggcuucgacgaguu

SEQ ID NO: 764729 - RNA, 19 nt, Homo sapiens
  misc_RNA (1)...(19): siRNA sense strand
aggaggaguuccaguuucu

SEQ ID NO: 764730 - RNA, 19 nt, Homo sapiens
  misc_RNA (1)...(19): siRNA sense strand
augcagcuguauccaagaa

SEQ ID NO: 764731 - RNA, 19 nt, Homo sapiens
  misc_RNA (1)...(19): siRNA sense strand
gguaccagcgcgacuacga

SEQ ID NO: 764732 - RNA, 19 nt, Homo sapiens
  misc_RNA (1)...(19): siRNA sense strand
gaccucagcucuugcauca

SEQ ID NO: 764733 - RNA, 19 nt, Homo sapiens
  misc_RNA (1)...(19): siRNA sense strand
ggagcaggauagugccuuu

SEQ ID NO: 764734 - RNA, 19 nt, Homo sapiens
  misc_RNA (1)...(19): siRNA sense strand
ggaggaggaguuccaguuu

SEQ ID NO: 764735 - RNA, 19 nt, Homo sapiens
  misc_RNA (1)...(19): siRNA sense strand
gaggaggaguuccaguuuc

SEQ ID NO: 764736 - RNA, 19 nt, Homo sapiens
  misc_RNA (1)...(19): siRNA sense strand
ggaaagaugcagcuguauc

SEQ ID NO: 764737 - RNA, 19 nt, Homo sapiens
  misc_RNA (1)...(19): siRNA sense strand
gagcucaagugcgacauca

SEQ ID NO: 764738 - RNA, 19 nt, Homo sapiens
  misc_RNA (1)...(19): siRNA sense strand
gcagcuguauccaagaaag

SEQ ID NO: 764739 - RNA, 19 nt, Homo sapiens
  misc_RNA (1)...(19): siRNA sense strand
ggggaaagaugcagcugua

SEQ ID NO: 764740 - RNA, 19 nt, Homo sapiens
  misc_RNA (1)...(19): siRNA sense strand
gaaagaugcagcuguaucc

SEQ ID NO: 764741 - RNA, 19 nt, Homo sapiens
  misc_RNA (1)...(19): siRNA sense strand
cgaagcugcugccuugucu

SEQ ID NO: 764742 - RNA, 19 nt, Homo sapiens
  misc_RNA (1)...(19): siRNA sense strand
ugcagaggaugaagugcua

SEQ ID NO: 764743 - RNA, 19 nt, Homo sapiens
  misc_RNA (1)...(19): siRNA sense strand
cgacaucagcgcagagauc

SEQ ID NO: 764744 - RNA, 19 nt, Homo sapiens
  misc_RNA (1)...(19): siRNA sense strand
gggacccuauugacguuga

SEQ ID NO: 764745 - RNA, 19 nt, Homo sapiens
  misc_RNA (1)...(19): siRNA sense strand
ugcaggaccucagcucuug

SEQ ID NO: 764746 - RNA, 19 nt, Homo sapiens
  misc_RNA (1)...(19): siRNA sense strand
cgcccuggauaacgucuuu

SEQ ID NO: 764747 - RNA, 19 nt, Homo sapiens
  misc_RNA (1)...(19): siRNA sense strand
gccgacuucuggugcuuug

SEQ ID NO: 764748 - RNA, 19 nt, Homo sapiens
  misc_RNA (1)...(19): siRNA sense strand
gcgcuggugcagaggauga

SEQ ID NO: 764749 - RNA, 19 nt, Homo sapiens
  misc_RNA (1)...(19): siRNA sense strand
cggaggaggaguuccaguu

SEQ ID NO: 764750 - RNA, 19 nt, Homo sapiens
  misc_RNA (1)...(19): siRNA sense strand
ccgauggcuucgacgaguu

SEQ ID NO: 764751 - RNA, 19 nt, Homo sapiens
  misc_RNA (1)...(19): siRNA sense strand
aggaggaguuccaguuucu

SEQ ID NO: 764752 - RNA, 19 nt, Homo sapiens
  misc_RNA (1)...(19): siRNA sense strand
augcagcuguauccaagaa

SEQ ID NO: 764753 - RNA, 19 nt, Homo sapiens
  misc_RNA (1)...(19): siRNA sense strand
gguaccagcgcgacuacga

SEQ ID NO: 764754 - RNA, 19 nt, Homo sapiens
  misc_RNA (1)...(19): siRNA sense strand
gaccucagcucuugcauca

SEQ ID NO: 764755 - RNA, 19 nt, Homo sapiens
  misc_RNA (1)...(19): siRNA sense strand
ggagcaggauagugccuuu

SEQ ID NO: 764756 - RNA, 19 nt, Homo sapiens
  misc_RNA (1)...(19): siRNA sense strand
ggaggaggaguuccaguuu

SEQ ID NO: 764757 - RNA, 19 nt, Homo sapiens
  misc_RNA (1)...(19): siRNA sense strand
gaggaggaguuccaguuuc

SEQ ID NO: 764758 - RNA, 19 nt, Homo sapiens
  misc_RNA (1)...(19): siRNA sense strand
ggaaagaugcagcuguauc

SEQ ID NO: 764759 - RNA, 19 nt, Homo sapiens
  misc_RNA (1)...(19): siRNA sense strand
gagcucaagugcgacauca

SEQ ID NO: 764760 - RNA, 19 nt, Homo sapiens
  misc_RNA (1)...(19): siRNA sense strand
gcagcuguauccaagaaag

SEQ ID NO: 764761 - RNA, 19 nt, Homo sapiens
  misc_RNA (1)...(19): siRNA sense strand
ggggaaagaugcagcugua

SEQ ID NO: 764762 - RNA, 19 nt, Homo sapiens
  misc_RNA (1)...(19): siRNA sense strand
gaaagaugcagcuguaucc

SEQ ID NO: 764763 - RNA, 19 nt, Homo sapiens
  misc_RNA (1)...(19): siRNA sense strand
cgaagcugcugccuugucu

SEQ ID NO: 764764 - RNA, 19 nt, Homo sapiens
  misc_RNA (1)...(19): siRNA sense strand
ugcagaggaugaagugcua

SEQ ID NO: 764765 - RNA, 19 nt, Homo sapiens
  misc_RNA (1)...(19): siRNA sense strand
cgacaucagcgcagagauc

SEQ ID NO: 764766 - RNA, 19 nt, Homo sapiens
  misc_RNA (1)...(19): siRNA sense strand
gggacccuauugacguuga

SEQ ID NO: 764767 - RNA, 19 nt, Homo sapiens
  misc_RNA (1)...(19): siRNA sense strand
ugcaggaccucagcucuug

SEQ ID NO: 764768 - RNA, 19 nt, Homo sapiens
  misc_RNA (1)...(19): siRNA sense strand
cgcccuggauaacgucuuu

SEQ ID NO: 764769 - RNA, 19 nt, Homo sapiens
  misc_RNA (1)...(19): siRNA sense strand
gccgacuucuggugcuuug

SEQ ID NO: 764770 - RNA, 19 nt, Homo sapiens
  misc_RNA (1)...(19): siRNA sense strand
gcgcuggugcagaggauga

SEQ ID NO: 764771 - RNA, 19 nt, Homo sapiens
  misc_RNA (1)...(19): siRNA sense strand
cggaggaggaguuccaguu

SEQ ID NO: 764772 - RNA, 19 nt, Homo sapiens
  misc_RNA (1)...(19): siRNA sense strand
ccgauggcuucgacgaguu

SEQ ID NO: 764773 - RNA, 19 nt, Homo sapiens
  misc_RNA (1)...(19): siRNA sense strand
aggaggaguuccaguuucu

SEQ ID NO: 764774 - RNA, 19 nt, Homo sapiens
  misc_RNA (1)...(19): siRNA sense strand
augcagcuguauccaagaa

SEQ ID NO: 764775 - RNA, 19 nt, Homo sapiens
  misc_RNA (1)...(19): siRNA sense strand
gguaccagcgcgacuacga

SEQ ID NO: 764776 - RNA, 19 nt, Homo sapiens
  misc_RNA (1)...(19): siRNA sense strand
gaccucagcucuugcauca

SEQ ID NO: 764777 - RNA, 19 nt, Homo sapiens
  misc_RNA (1)...(19): siRNA sense strand
ggagcaggauagugccuuu

SEQ ID NO: 764778 - RNA, 19 nt, Homo sapiens
  misc_RNA (1)...(19): siRNA sense strand
ggaggaggaguuccaguuu

SEQ ID NO: 764779 - RNA, 19 nt, Homo sapiens
  misc_RNA (1)...(19): siRNA sense strand
gaggaggaguuccaguuuc

SEQ ID NO: 764780 - RNA, 19 nt, Homo sapiens
  misc_RNA (1)...(19): siRNA sense strand
ggaaagaugcagcuguauc

SEQ ID NO: 764781 - RNA, 19 nt, Homo sapiens
  misc_RNA (1)...(19): siRNA sense strand
gagcucaagugcgacauca

SEQ ID NO: 764782 - RNA, 19 nt, Homo sapiens
  misc_RNA (1)...(19): siRNA sense strand
gcagcuguauccaagaaag

SEQ ID NO: 764783 - RNA, 19 nt, Homo sapiens
  misc_RNA (1)...(19): siRNA sense strand
ggggaaagaugcagcugua

SEQ ID NO: 764784 - RNA, 19 nt, Homo sapiens
  misc_RNA (1)...(19): siRNA sense strand
gaaagaugcagcuguaucc

SEQ ID NO: 764785 - RNA, 19 nt, Homo sapiens
  misc_RNA (1)...(19): siRNA sense strand
cgaagcugcugccuugucu

SEQ ID NO: 764786 - RNA, 19 nt, Homo sapiens
  misc_RNA (1)...(19): siRNA sense strand
ugcagaggaugaagugcua

SEQ ID NO: 764787 - RNA, 19 nt, Homo sapiens
  misc_RNA (1)...(19): siRNA sense strand
cgacaucagcgcagagauc

SEQ ID NO: 764788 - RNA, 19 nt, Homo sapiens
  misc_RNA (1)...(19): siRNA sense strand
gggacccuauugacguuga

SEQ ID NO: 764789 - RNA, 19 nt, Homo sapiens
  misc_RNA (1)...(19): siRNA sense strand
ugcaggaccucagcucuug

SEQ ID NO: 764790 - RNA, 19 nt, Homo sapiens
  misc_RNA (1)...(19): siRNA sense strand
cgcccuggauaacgucuuu

SEQ ID NO: 764791 - RNA, 19 nt, Homo sapiens
  misc_RNA (1)...(19): siRNA sense strand
gccgacuucuggugcuuug

SEQ ID NO: 764792 - RNA, 19 nt, Homo sapiens
  misc_RNA (1)...(19): siRNA sense strand
gcgcuggugcagaggauga

SEQ ID NO: 764793 - RNA, 19 nt, Homo sapiens
  misc_RNA (1)...(19): siRNA sense strand
cggaggaggaguuccaguu

SEQ ID NO: 764794 - RNA, 19 nt, Homo sapiens
  misc_RNA (1)...(19): siRNA sense strand
ccgauggcuucgacgaguu

SEQ ID NO: 764795 - RNA, 19 nt, Homo sapiens
  misc_RNA (1)...(19): siRNA sense strand
aggaggaguuccaguuucu

SEQ ID NO: 764796 - RNA, 19 nt, Homo sapiens
  misc_RNA (1)...(19): siRNA sense strand
augcagcuguauccaagaa

SEQ ID NO: 764797 - RNA, 19 nt, Homo sapiens
  misc_RNA (1)...(19): siRNA sense strand
gguaccagcgcgacuacga

SEQ ID NO: 764798 - RNA, 19 nt, Homo sapiens
  misc_RNA (1)...(19): siRNA sense strand
gaccucagcucuugcauca

SEQ ID NO: 764799 - RNA, 19 nt, Homo sapiens
  misc_RNA (1)...(19): siRNA sense strand
ggagcaggauagugccuuu

SEQ ID NO: 764800 - RNA, 19 nt, Homo sapiens
  misc_RNA (1)...(19): siRNA sense strand
ggaggaggaguuccaguuu

SEQ ID NO: 764801 - RNA, 19 nt, Homo sapiens
  misc_RNA (1)...(19): siRNA sense strand
gaggaggaguuccaguuuc

SEQ ID NO: 764802 - RNA, 19 nt, Homo sapiens
  misc_RNA (1)...(19): siRNA sense strand
ggaaagaugcagcuguauc

SEQ ID NO: 764803 - RNA, 19 nt, Homo sapiens
  misc_RNA (1)...(19): siRNA sense strand
gagcucaagugcgacauca

SEQ ID NO: 764804 - RNA, 19 nt, Homo sapiens
  misc_RNA (1)...(19): siRNA sense strand
gcagcuguauccaagaaag

SEQ ID NO: 764805 - RNA, 19 nt, Homo sapiens
  misc_RNA (1)...(19): siRNA sense strand
ggggaaagaugcagcugua

SEQ ID NO: 764806 - RNA, 19 nt, Homo sapiens
  misc_RNA (1)...(19): siRNA sense strand
gaaagaugcagcuguaucc

SEQ ID NO: 764807 - RNA, 19 nt, Homo sapiens
  misc_RNA (1)...(19): siRNA sense strand
cgaagcugcugccuugucu

SEQ ID NO: 764808 - RNA, 19 nt, Homo sapiens
  misc_RNA (1)...(19): siRNA sense strand
ugcagaggaugaagugcua

SEQ ID NO: 764809 - RNA, 19 nt, Homo sapiens
  misc_RNA (1)...(19): siRNA sense strand
cgacaucagcgcagagauc

SEQ ID NO: 764810 - RNA, 19 nt, Homo sapiens
  misc_RNA (1)...(19): siRNA sense strand
gggacccuauugacguuga

SEQ ID NO: 764811 - RNA, 19 nt, Homo sapiens
  misc_RNA (1)...(19): siRNA sense strand
ugcaggaccucagcucuug

SEQ ID NO: 764812 - RNA, 19 nt, Homo sapiens
  misc_RNA (1)...(19): siRNA sense strand
cgcccuggauaacgucuuu

SEQ ID NO: 764813 - RNA, 19 nt, Homo sapiens
  misc_RNA (1)...(19): siRNA sense strand
gccgacuucuggugcuuug

SEQ ID NO: 764814 - RNA, 19 nt, Homo sapiens
  misc_RNA (1)...(19): siRNA sense strand
gcgcuggugcagaggauga

SEQ ID NO: 764815 - RNA, 19 nt, Homo sapiens
  misc_RNA (1)...(19): siRNA sense strand
cggaggaggaguuccaguu

SEQ ID NO: 764816 - RNA, 19 nt, Homo sapiens
  misc_RNA (1)...(19): siRNA sense strand
ccgauggcuucgacgaguu

SEQ ID NO: 764817 - RNA, 19 nt, Homo sapiens
  misc_RNA (1)...(19): siRNA sense strand
aggaggaguuccaguuucu

SEQ ID NO: 764818 - RNA, 19 nt, Homo sapiens
  misc_RNA (1)...(19): siRNA sense strand
augcagcuguauccaagaa

SEQ ID NO: 764819 - RNA, 19 nt, Homo sapiens
  misc_RNA (1)...(19): siRNA sense strand
gguaccagcgcgacuacga

SEQ ID NO: 764820 - RNA, 19 nt, Homo sapiens
  misc_RNA (1)...(19): siRNA sense strand
gaccucagcucuugcauca

SEQ ID NO: 764821 - RNA, 19 nt, Homo sapiens
  misc_RNA (1)...(19): siRNA sense strand
ggagcaggauagugccuuu

SEQ ID NO: 764822 - RNA, 19 nt, Homo sapiens
  misc_RNA (1)...(19): siRNA sense strand
ggaggaggaguuccaguuu

SEQ ID NO: 764823 - RNA, 19 nt, Homo sapiens
  misc_RNA (1)...(19): siRNA sense strand
gaggaggaguuccaguuuc

SEQ ID NO: 764824 - RNA, 19 nt, Homo sapiens
  misc_RNA (1)...(19): siRNA sense strand
ggaaagaugcagcuguauc

SEQ ID NO: 764825 - RNA, 19 nt, Homo sapiens
  misc_RNA (1)...(19): siRNA sense strand
gagcucaagugcgacauca

SEQ ID NO: 764826 - RNA, 19 nt, Homo sapiens
  misc_RNA (1)...(19): siRNA sense strand
gcagcuguauccaagaaag

SEQ ID NO: 764827 - RNA, 19 nt, Homo sapiens
  misc_RNA (1)...(19): siRNA sense strand
ggggaaagaugcagcugua

SEQ ID NO: 764828 - RNA, 19 nt, Homo sapiens
  misc_RNA (1)...(19): siRNA sense strand
gaaagaugcagcuguaucc

SEQ ID NO: 764829 - RNA, 19 nt, Homo sapiens
  misc_RNA (1)...(19): siRNA sense strand
cgaagcugcugccuugucu

SEQ ID NO: 764830 - RNA, 19 nt, Homo sapiens
  misc_RNA (1)...(19): siRNA sense strand
ugcagaggaugaagugcua

SEQ ID NO: 764831 - RNA, 19 nt, Homo sapiens
  misc_RNA (1)...(19): siRNA sense strand
cgacaucagcgcagagauc

SEQ ID NO: 764832 - RNA, 19 nt, Homo sapiens
  misc_RNA (1)...(19): siRNA sense strand
gggacccuauugacguuga

SEQ ID NO: 764833 - RNA, 19 nt, Homo sapiens
  misc_RNA (1)...(19): siRNA sense strand
ugcaggaccucagcucuug

SEQ ID NO: 764834 - RNA, 19 nt, Homo sapiens
  misc_RNA (1)...(19): siRNA sense strand
cgcccuggauaacgucuuu

SEQ ID NO: 764835 - RNA, 19 nt, Homo sapiens
  misc_RNA (1)...(19): siRNA sense strand
gccgacuucuggugcuuug

SEQ ID NO: 764836 - RNA, 19 nt, Homo sapiens
  misc_RNA (1)...(19): siRNA sense strand
gcgcuggugcagaggauga

SEQ ID NO: 764837 - RNA, 19 nt, Homo sapiens
  misc_RNA (1)...(19): siRNA sense strand
cggaggaggaguuccaguu

SEQ ID NO: 764838 - RNA, 19 nt, Homo sapiens
  misc_RNA (1)...(19): siRNA sense strand
ccgauggcuucgacgaguu

SEQ ID NO: 764839 - RNA, 19 nt, Homo sapiens
  misc_RNA (1)...(19): siRNA sense strand
aggaggaguuccaguuucu

SEQ ID NO: 764840 - RNA, 19 nt, Homo sapiens
  misc_RNA (1)...(19): siRNA sense strand
augcagcuguauccaagaa

SEQ ID NO: 764841 - RNA, 19 nt, Homo sapiens
  misc_RNA (1)...(19): siRNA sense strand
gguaccagcgcgacuacga

SEQ ID NO: 764842 - RNA, 19 nt, Homo sapiens
  misc_RNA (1)...(19): siRNA sense strand
gaccucagcucuugcauca

SEQ ID NO: 764843 - RNA, 19 nt, Homo sapiens
  misc_RNA (1)...(19): siRNA sense strand
ggagcaggauagugccuuu

SEQ ID NO: 764844 - RNA, 19 nt, Homo sapiens
  misc_RNA (1)...(19): siRNA sense strand
ggaggaggaguuccaguuu

SEQ ID NO: 764845 - RNA, 19 nt, Homo sapiens
  misc_RNA (1)...(19): siRNA sense strand
gaggaggaguuccaguuuc

SEQ ID NO: 764846 - RNA, 19 nt, Homo sapiens
  misc_RNA (1)...(19): siRNA sense strand
ggaaagaugcagcuguauc

SEQ ID NO: 764847 - RNA, 19 nt, Homo sapiens
  misc_RNA (1)...(19): siRNA sense strand
gagcucaagugcgacauca

SEQ ID NO: 764848 - RNA, 19 nt, Homo sapiens
  misc_RNA (1)...(19): siRNA sense strand
gcagcuguauccaagaaag

SEQ ID NO: 764849 - RNA, 19 nt, Homo sapiens
  misc_RNA (1)...(19): siRNA sense strand
ggggaaagaugcagcugua

SEQ ID NO: 764850 - RNA, 19 nt, Homo sapiens
  misc_RNA (1)...(19): siRNA sense strand
gaaagaugcagcuguaucc

SEQ ID NO: 764851 - RNA, 19 nt, Homo sapiens
  misc_RNA (1)...(19): siRNA sense strand
cgaagcugcugccuugucu

SEQ ID NO: 764852 - RNA, 19 nt, Homo sapiens
  misc_RNA (1)...(19): siRNA sense strand
ugcagaggaugaagugcua

SEQ ID NO: 764853 - RNA, 19 nt, Homo sapiens
  misc_RNA (1)...(19): siRNA sense strand
cgacaucagcgcagagauc

SEQ ID NO: 764854 - RNA, 19 nt, Homo sapiens
  misc_RNA (1)...(19): siRNA sense strand
gggacccuauugacguuga

SEQ ID NO: 764855 - RNA, 19 nt, Homo sapiens
  misc_RNA (1)...(19): siRNA sense strand
ugcaggaccucagcucuug

SEQ ID NO: 764856 - RNA, 19 nt, Homo sapiens
  misc_RNA (1)...(19): siRNA sense strand
cgcccuggauaacgucuuu

SEQ ID NO: 764857 - RNA, 19 nt, Homo sapiens
  misc_RNA (1)...(19): siRNA sense strand
gccgacuucuggugcuuug

SEQ ID NO: 764858 - RNA, 19 nt, Homo sapiens
  misc_RNA (1)...(19): siRNA sense strand
gcgcuggugcagaggauga

SEQ ID NO: 764859 - RNA, 19 nt, Homo sapiens
  misc_RNA (1)...(19): siRNA sense strand
cggaggaggaguuccaguu

SEQ ID NO: 764860 - RNA, 19 nt, Homo sapiens
  misc_RNA (1)...(19): siRNA sense strand
ccgauggcuucgacgaguu

SEQ ID NO: 764861 - RNA, 19 nt, Homo sapiens
  misc_RNA (1)...(19): siRNA sense strand
aggaggaguuccaguuucu

SEQ ID NO: 764862 - RNA, 19 nt, Homo sapiens
  misc_RNA (1)...(19): siRNA sense strand
augcagcuguauccaagaa

SEQ ID NO: 764863 - RNA, 19 nt, Homo sapiens
  misc_RNA (1)...(19): siRNA sense strand
gguaccagcgcgacuacga

SEQ ID NO: 764864 - RNA, 19 nt, Homo sapiens
  misc_RNA (1)...(19): siRNA sense strand
gaccucagcucuugcauca

SEQ ID NO: 764865 - RNA, 19 nt, Homo sapiens
  misc_RNA (1)...(19): siRNA sense strand
ggagcaggauagugccuuu

SEQ ID NO: 764866 - RNA, 19 nt, Homo sapiens
  misc_RNA (1)...(19): siRNA sense strand
ggaggaggaguuccaguuu

SEQ ID NO: 764867 - RNA, 19 nt, Homo sapiens
  misc_RNA (1)...(19): siRNA sense strand
gaggaggaguuccaguuuc

SEQ ID NO: 764868 - RNA, 19 nt, Homo sapiens
  misc_RNA (1)...(19): siRNA sense strand
ggaaagaugcagcuguauc

SEQ ID NO: 764869 - RNA, 19 nt, Homo sapiens
  misc_RNA (1)...(19): siRNA sense strand
gagcucaagugcgacauca

SEQ ID NO: 764870 - RNA, 19 nt, Homo sapiens
  misc_RNA (1)...(19): siRNA sense strand
gcagcuguauccaagaaag

SEQ ID NO: 764871 - RNA, 19 nt, Homo sapiens
  misc_RNA (1)...(19): siRNA sense strand
ggggaaagaugcagcugua

SEQ ID NO: 764872 - RNA, 19 nt, Homo sapiens
  misc_RNA (1)...(19): siRNA sense strand
gaaagaugcagcuguaucc

SEQ ID NO: 764873 - RNA, 19 nt, Homo sapiens
  misc_RNA (1)...(19): siRNA sense strand
cgaagcugcugccuugucu

SEQ ID NO: 764874 - RNA, 19 nt, Homo sapiens
  misc_RNA (1)...(19): siRNA sense strand
ugcagaggaugaagugcua

SEQ ID NO: 764875 - RNA, 19 nt, Homo sapiens
  misc_RNA (1)...(19): siRNA sense strand
cgacaucagcgcagagauc

SEQ ID NO: 764876 - RNA, 19 nt, Homo sapiens
  misc_RNA (1)...(19): siRNA sense strand
gggacccuauugacguuga

SEQ ID NO: 764877 - RNA, 19 nt, Homo sapiens
  misc_RNA (1)...(19): siRNA sense strand
ugcaggaccucagcucuug

SEQ ID NO: 764878 - RNA, 19 nt, Homo sapiens
  misc_RNA (1)...(19): siRNA sense strand
cgcccuggauaacgucuuu

SEQ ID NO: 764879 - RNA, 19 nt, Homo sapiens
  misc_RNA (1)...(19): siRNA sense strand
gccgacuucuggugcuuug

SEQ ID NO: 764880 - RNA, 19 nt, Homo sapiens
  misc_RNA (1)...(19): siRNA sense strand
gcgcuggugcagaggauga

SEQ ID NO: 764881 - RNA, 19 nt, Homo sapiens
  misc_RNA (1)...(19): siRNA sense strand
cggaggaggaguuccaguu

SEQ ID NO: 764882 - RNA, 19 nt, Homo sapiens
  misc_RNA (1)...(19): siRNA sense strand
ccgauggcuucgacgaguu

SEQ ID NO: 764883 - RNA, 19 nt, Homo sapiens
  misc_RNA (1)...(19): siRNA sense strand
aggaggaguuccaguuucu

SEQ ID NO: 764884 - RNA, 19 nt, Homo sapiens
  misc_RNA (1)...(19): siRNA sense strand
augcagcuguauccaagaa

SEQ ID NO: 764885 - RNA, 19 nt, Homo sapiens
  misc_RNA (1)...(19): siRNA sense strand
gguaccagcgcgacuacga

SEQ ID NO: 764886 - RNA, 19 nt, Homo sapiens
  misc_RNA (1)...(19): siRNA sense strand
gaccucagcucuugcauca

SEQ ID NO: 764887 - RNA, 19 nt, Homo sapiens
  misc_RNA (1)...(19): siRNA sense strand
ggagcaggauagugccuuu

SEQ ID NO: 764888 - RNA, 19 nt, Homo sapiens
  misc_RNA (1)...(19): siRNA sense strand
ggaggaggaguuccaguuu

SEQ ID NO: 764889 - RNA, 19 nt, Homo sapiens
  misc_RNA (1)...(19): siRNA sense strand
gaggaggaguuccaguuuc

SEQ ID NO: 764890 - RNA, 19 nt, Homo sapiens
  misc_RNA (1)...(19): siRNA sense strand
ggaaagaugcagcuguauc

SEQ ID NO: 764891 - RNA, 19 nt, Homo sapiens
  misc_RNA (1)...(19): siRNA sense strand
gagcucaagugcgacauca

SEQ ID NO: 764892 - RNA, 19 nt, Homo sapiens
  misc_RNA (1)...(19): siRNA sense strand
gcagcuguauccaagaaag

SEQ ID NO: 764893 - RNA, 19 nt, Homo sapiens
  misc_RNA (1)...(19): siRNA sense strand
ggggaaagaugcagcugua

SEQ ID NO: 764894 - RNA, 19 nt, Homo sapiens
  misc_RNA (1)...(19): siRNA sense strand
gaaagaugcagcuguaucc

SEQ ID NO: 764895 - RNA, 19 nt, Homo sapiens
  misc_RNA (1)...(19): siRNA sense strand
cgaagcugcugccuugucu

SEQ ID NO: 764896 - RNA, 19 nt, Homo sapiens
  misc_RNA (1)...(19): siRNA sense strand
ugcagaggaugaagugcua

SEQ ID NO: 764897 - RNA, 19 nt, Homo sapiens
  misc_RNA (1)...(19): siRNA sense strand
cgacaucagcgcagagauc

SEQ ID NO: 764898 - RNA, 19 nt, Homo sapiens
  misc_RNA (1)...(19): siRNA sense strand
gggacccuauugacguuga

SEQ ID NO: 764899 - RNA, 19 nt, Homo sapiens
  misc_RNA (1)...(19): siRNA sense strand
ugcaggaccucagcucuug

SEQ ID NO: 764900 - RNA, 19 nt, Homo sapiens
  misc_RNA (1)...(19): siRNA sense strand
cgcccuggauaacgucuuu

SEQ ID NO: 764901 - RNA, 19 nt, Homo sapiens
  misc_RNA (1)...(19): siRNA sense strand
gccgacuucuggugcuuug

SEQ ID NO: 764902 - RNA, 19 nt, Homo sapiens
  misc_RNA (1)...(19): siRNA sense strand
gcgcuggugcagaggauga

SEQ ID NO: 764903 - RNA, 19 nt, Homo sapiens
  misc_RNA (1)...(19): siRNA sense strand
cggaggaggaguuccaguu

SEQ ID NO: 764904 - RNA, 19 nt, Homo sapiens
  misc_RNA (1)...(19): siRNA sense strand
ccgauggcuucgacgaguu

SEQ ID NO: 764905 - RNA, 19 nt, Homo sapiens
  misc_RNA (1)...(19): siRNA sense strand
aggaggaguuccaguuucu

SEQ ID NO: 764906 - RNA, 19 nt, Homo sapiens
  misc_RNA (1)...(19): siRNA sense strand
augcagcuguauccaagaa

SEQ ID NO: 764907 - RNA, 19 nt, Homo sapiens
  misc_RNA (1)...(19): siRNA sense strand
gguaccagcgcgacuacga

SEQ ID NO: 764908 - RNA, 19 nt, Homo sapiens
  misc_RNA (1)...(19): siRNA sense strand
gaccucagcucuugcauca

SEQ ID NO: 764909 - RNA, 19 nt, Homo sapiens
  misc_RNA (1)...(19): siRNA sense strand
ggagcaggauagugccuuu

SEQ ID NO: 764910 - RNA, 19 nt, Homo sapiens
  misc_RNA (1)...(19): siRNA sense strand
ggaggaggaguuccaguuu

SEQ ID NO: 764911 - RNA, 19 nt, Homo sapiens
  misc_RNA (1)...(19): siRNA sense strand
gaggaggaguuccaguuuc

SEQ ID NO: 764912 - RNA, 19 nt, Homo sapiens
  misc_RNA (1)...(19): siRNA sense strand
ggaaagaugcagcuguauc

SEQ ID NO: 764913 - RNA, 19 nt, Homo sapiens
  misc_RNA (1)...(19): siRNA sense strand
gagcucaagugcgacauca

SEQ ID NO: 764914 - RNA, 19 nt, Homo sapiens
  misc_RNA (1)...(19): siRNA sense strand
gcagcuguauccaagaaag

SEQ ID NO: 764915 - RNA, 19 nt, Homo sapiens
  misc_RNA (1)...(19): siRNA sense strand
ggggaaagaugcagcugua

SEQ ID NO: 764916 - RNA, 19 nt, Homo sapiens
  misc_RNA (1)...(19): siRNA sense strand
gaaagaugcagcuguaucc

SEQ ID NO: 764917 - RNA, 19 nt, Homo sapiens
  misc_RNA (1)...(19): siRNA sense strand
cgaagcugcugccuugucu

SEQ ID NO: 764918 - RNA, 19 nt, Homo sapiens
  misc_RNA (1)...(19): siRNA sense strand
ugcagaggaugaagugcua

SEQ ID NO: 764919 - RNA, 19 nt, Homo sapiens
  misc_RNA (1)...(19): siRNA sense strand
cgacaucagcgcagagauc

SEQ ID NO: 764920 - RNA, 19 nt, Homo sapiens
  misc_RNA (1)...(19): siRNA sense strand
gggacccuauugacguuga

SEQ ID NO: 764921 - RNA, 19 nt, Homo sapiens
  misc_RNA (1)...(19): siRNA sense strand
ugcaggaccucagcucuug

SEQ ID NO: 764922 - RNA, 19 nt, Homo sapiens
  misc_RNA (1)...(19): siRNA sense strand
cgcccuggauaacgucuuu

SEQ ID NO: 764923 - RNA, 19 nt, Homo sapiens
  misc_RNA (1)...(19): siRNA sense strand
gccgacuucuggugcuuug

SEQ ID NO: 764924 - RNA, 19 nt, Homo sapiens
  misc_RNA (1)...(19): siRNA sense strand
gcgcuggugcagaggauga

SEQ ID NO: 764925 - RNA, 19 nt, Homo sapiens
  misc_RNA (1)...(19): siRNA sense strand
cggaggaggaguuccaguu

SEQ ID NO: 764926 - RNA, 19 nt, Homo sapiens
  misc_RNA (1)...(19): siRNA sense strand
ccgauggcuucgacgaguu

SEQ ID NO: 764927 - RNA, 19 nt, Homo sapiens
  misc_RNA (1)...(19): siRNA sense strand
aggaggaguuccaguuucu

SEQ ID NO: 764928 - RNA, 19 nt, Homo sapiens
  misc_RNA (1)...(19): siRNA sense strand
augcagcuguauccaagaa

SEQ ID NO: 764929 - RNA, 19 nt, Homo sapiens
  misc_RNA (1)...(19): siRNA sense strand
gguaccagcgcgacuacga

SEQ ID NO: 764930 - RNA, 19 nt, Homo sapiens
  misc_RNA (1)...(19): siRNA sense strand
gaccucagcucuugcauca

SEQ ID NO: 764931 - RNA, 19 nt, Homo sapiens
  misc_RNA (1)...(19): siRNA sense strand
ggagcaggauagugccuuu

SEQ ID NO: 764932 - RNA, 19 nt, Homo sapiens
  misc_RNA (1)...(19): siRNA sense strand
ggaggaggaguuccaguuu

SEQ ID NO: 764933 - RNA, 19 nt, Homo sapiens
  misc_RNA (1)...(19): siRNA sense strand
gaggaggaguuccaguuuc

SEQ ID NO: 764934 - RNA, 19 nt, Homo sapiens
  misc_RNA (1)...(19): siRNA sense strand
ggaaagaugcagcuguauc

SEQ ID NO: 764935 - RNA, 19 nt, Homo sapiens
  misc_RNA (1)...(19): siRNA sense strand
gagcucaagugcgacauca

SEQ ID NO: 764936 - RNA, 19 nt, Homo sapiens
  misc_RNA (1)...(19): siRNA sense strand
gcagcuguauccaagaaag

SEQ ID NO: 764937 - RNA, 19 nt, Homo sapiens
  misc_RNA (1)...(19): siRNA sense strand
ggggaaagaugcagcugua

SEQ ID NO: 764938 - RNA, 19 nt, Homo sapiens
  misc_RNA (1)...(19): siRNA sense strand
gaaagaugcagcuguaucc

SEQ ID NO: 764939 - RNA, 19 nt, Homo sapiens
  misc_RNA (1)...(19): siRNA sense strand
cgaagcugcugccuugucu

SEQ ID NO: 764940 - RNA, 19 nt, Homo sapiens
  misc_RNA (1)...(19): siRNA sense strand
ugcagaggaugaagugcua

SEQ ID NO: 764941 - RNA, 19 nt, Homo sapiens
  misc_RNA (1)...(19): siRNA sense strand
cgacaucagcgcagagauc

SEQ ID NO: 764942 - RNA, 19 nt, Homo sapiens
  misc_RNA (1)...(19): siRNA sense strand
gggacccuauugacguuga

SEQ ID NO: 764943 - RNA, 19 nt, Homo sapiens
  misc_RNA (1)...(19): siRNA sense strand
ugcaggaccucagcucuug

SEQ ID NO: 764944 - RNA, 19 nt, Homo sapiens
  misc_RNA (1)...(19): siRNA sense strand
cgcccuggauaacgucuuu

SEQ ID NO: 764945 - RNA, 19 nt, Homo sapiens
  misc_RNA (1)...(19): siRNA sense strand
gccgacuucuggugcuuug

SEQ ID NO: 764946 - RNA, 19 nt, Homo sapiens
  misc_RNA (1)...(19): siRNA sense strand
gcgcuggugcagaggauga

SEQ ID NO: 764947 - RNA, 19 nt, Homo sapiens
  misc_RNA (1)...(19): siRNA sense strand
cggaggaggaguuccaguu

SEQ ID NO: 764948 - RNA, 19 nt, Homo sapiens
  misc_RNA (1)...(19): siRNA sense strand
ccgauggcuucgacgaguu

SEQ ID NO: 764949 - RNA, 19 nt, Homo sapiens
  misc_RNA (1)...(19): siRNA sense strand
aggaggaguuccaguuucu

SEQ ID NO: 764950 - RNA, 19 nt, Homo sapiens
  misc_RNA (1)...(19): siRNA sense strand
augcagcuguauccaagaa

SEQ ID NO: 764951 - RNA, 19 nt, Homo sapiens
  misc_RNA (1)...(19): siRNA sense strand
gguaccagcgcgacuacga

SEQ ID NO: 764952 - RNA, 19 nt, Homo sapiens
  misc_RNA (1)...(19): siRNA sense strand
gaccucagcucuugcauca

SEQ ID NO: 764953 - RNA, 19 nt, Homo sapiens
  misc_RNA (1)...(19): siRNA sense strand
ggagcaggauagugccuuu

SEQ ID NO: 764954 - RNA, 19 nt, Homo sapiens
  misc_RNA (1)...(19): siRNA sense strand
ggaggaggaguuccaguuu

SEQ ID NO: 764955 - RNA, 19 nt, Homo sapiens
  misc_RNA (1)...(19): siRNA sense strand
gaggaggaguuccaguuuc

SEQ ID NO: 764956 - RNA, 19 nt, Homo sapiens
  misc_RNA (1)...(19): siRNA sense strand
ggaaagaugcagcuguauc

SEQ ID NO: 764957 - RNA, 19 nt, Homo sapiens
  misc_RNA (1)...(19): siRNA sense strand
gagcucaagugcgacauca

SEQ ID NO: 764958 - RNA, 19 nt, Homo sapiens
  misc_RNA (1)...(19): siRNA sense strand
gcagcuguauccaagaaag

SEQ ID NO: 764959 - RNA, 19 nt, Homo sapiens
  misc_RNA (1)...(19): siRNA sense strand
ggggaaagaugcagcugua

SEQ ID NO: 764960 - RNA, 19 nt, Homo sapiens
  misc_RNA (1)...(19): siRNA sense strand
gaaagaugcagcuguaucc

SEQ ID NO: 764961 - RNA, 19 nt, Homo sapiens
  misc_RNA (1)...(19): siRNA sense strand
cgaagcugcugccuugucu

SEQ ID NO: 764962 - RNA, 19 nt, Homo sapiens
  misc_RNA (1)...(19): siRNA sense strand
ugcagaggaugaagugcua

SEQ ID NO: 764963 - RNA, 19 nt, Homo sapiens
  misc_RNA (1)...(19): siRNA sense strand
cgacaucagcgcagagauc

SEQ ID NO: 764964 - RNA, 19 nt, Homo sapiens
  misc_RNA (1)...(19): siRNA sense strand
gggacccuauugacguuga

SEQ ID NO: 764965 - RNA, 19 nt, Homo sapiens
  misc_RNA (1)...(19): siRNA sense strand
ugcaggaccucagcucuug

SEQ ID NO: 764966 - RNA, 19 nt, Homo sapiens
  misc_RNA (1)...(19): siRNA sense strand
cgcccuggauaacgucuuu

SEQ ID NO: 764967 - RNA, 19 nt, Homo sapiens
  misc_RNA (1)...(19): siRNA sense strand
gccgacuucuggugcuuug

SEQ ID NO: 764968 - RNA, 19 nt, Homo sapiens
  misc_RNA (1)...(19): siRNA sense strand
gcgcuggugcagaggauga

SEQ ID NO: 764969 - RNA, 19 nt, Homo sapiens
  misc_RNA (1)...(19): siRNA sense strand
cggaggaggaguuccaguu

SEQ ID NO: 764970 - RNA, 19 nt, Homo sapiens
  misc_RNA (1)...(19): siRNA sense strand
ccgauggcuucgacgaguu

SEQ ID NO: 764971 - RNA, 19 nt, Homo sapiens
  misc_RNA (1)...(19): siRNA sense strand
aggaggaguuccaguuucu

SEQ ID NO: 764972 - RNA, 19 nt, Homo sapiens
  misc_RNA (1)...(19): siRNA sense strand
augcagcuguauccaagaa

SEQ ID NO: 764973 - RNA, 19 nt, Homo sapiens
  misc_RNA (1)...(19): siRNA sense strand
gguaccagcgcgacuacga

SEQ ID NO: 764974 - RNA, 19 nt, Homo sapiens
  misc_RNA (1)...(19): siRNA sense strand
gaccucagcucuugcauca

SEQ ID NO: 764975 - RNA, 19 nt, Homo sapiens
  misc_RNA (1)...(19): siRNA sense strand
ggagcaggauagugccuuu

SEQ ID NO: 764976 - RNA, 19 nt, Homo sapiens
  misc_RNA (1)...(19): siRNA sense strand
ggaggaggaguuccaguuu

SEQ ID NO: 764977 - RNA, 19 nt, Homo sapiens
  misc_RNA (1)...(19): siRNA sense strand
gaggaggaguuccaguuuc

SEQ ID NO: 764978 - RNA, 19 nt, Homo sapiens
  misc_RNA (1)...(19): siRNA sense strand
ggaaagaugcagcuguauc

SEQ ID NO: 764979 - RNA, 19 nt, Homo sapiens
  misc_RNA (1)...(19): siRNA sense strand
gagcucaagugcgacauca

SEQ ID NO: 764980 - RNA, 19 nt, Homo sapiens
  misc_RNA (1)...(19): siRNA sense strand
gcagcuguauccaagaaag

SEQ ID NO: 764981 - RNA, 19 nt, Homo sapiens
  misc_RNA (1)...(19): siRNA sense strand
ggggaaagaugcagcugua

SEQ ID NO: 764982 - RNA, 19 nt, Homo sapiens
  misc_RNA (1)...(19): siRNA sense strand
gaaagaugcagcuguaucc

SEQ ID NO: 764983 - RNA, 19 nt, Homo sapiens
  misc_RNA (1)...(19): siRNA sense strand
cgaagcugcugccuugucu

SEQ ID NO: 764984 - RNA, 19 nt, Homo sapiens
  misc_RNA (1)...(19): siRNA sense strand
ugcagaggaugaagugcua

SEQ ID NO: 764985 - RNA, 19 nt, Homo sapiens
  misc_RNA (1)...(19): siRNA sense strand
cgacaucagcgcagagauc

SEQ ID NO: 764986 - RNA, 19 nt, Homo sapiens
  misc_RNA (1)...(19): siRNA sense strand
gggacccuauugacguuga

SEQ ID NO: 764987 - RNA, 19 nt, Homo sapiens
  misc_RNA (1)...(19): siRNA sense strand
ugcaggaccucagcucuug

SEQ ID NO: 764988 - RNA, 19 nt, Homo sapiens
  misc_RNA (1)...(19): siRNA sense strand
cgcccuggauaacgucuuu

SEQ ID NO: 764989 - RNA, 19 nt, Homo sapiens
  misc_RNA (1)...(19): siRNA sense strand
gccgacuucuggugcuuug

SEQ ID NO: 764990 - RNA, 19 nt, Homo sapiens
  misc_RNA (1)...(19): siRNA sense strand
gcgcuggugcagaggauga

SEQ ID NO: 764991 - RNA, 19 nt, Homo sapiens
  misc_RNA (1)...(19): siRNA sense strand
cggaggaggaguuccaguu

SEQ ID NO: 764992 - RNA, 19 nt, Homo sapiens
  misc_RNA (1)...(19): siRNA sense strand
ccgauggcuucgacgaguu

SEQ ID NO: 764993 - RNA, 19 nt, Homo sapiens
  misc_RNA (1)...(19): siRNA sense strand
aggaggaguuccaguuucu

SEQ ID NO: 764994 - RNA, 19 nt, Homo sapiens
  misc_RNA (1)...(19): siRNA sense strand
augcagcuguauccaagaa

SEQ ID NO: 764995 - RNA, 19 nt, Homo sapiens
  misc_RNA (1)...(19): siRNA sense strand
gguaccagcgcgacuacga

SEQ ID NO: 764996 - RNA, 19 nt, Homo sapiens
  misc_RNA (1)...(19): siRNA sense strand
gaccucagcucuugcauca

SEQ ID NO: 764997 - RNA, 19 nt, Homo sapiens
  misc_RNA (1)...(19): siRNA sense strand
ggagcaggauagugccuuu

SEQ ID NO: 764998 - RNA, 19 nt, Homo sapiens
  misc_RNA (1)...(19): siRNA sense strand
ggaggaggaguuccaguuu

SEQ ID NO: 764999 - RNA, 19 nt, Homo sapiens
  misc_RNA (1)...(19): siRNA sense strand
gaggaggaguuccaguuuc

SEQ ID NO: 765000 - RNA, 19 nt, Homo sapiens
  misc_RNA (1)...(19): siRNA sense strand
ggaaagaugcagcuguauc

SEQ ID NO: 765001 - RNA, 19 nt, Homo sapiens
  misc_RNA (1)...(19): siRNA sense strand
gagcucaagugcgacauca

SEQ ID NO: 765002 - RNA, 19 nt, Homo sapiens
  misc_RNA (1)...(19): siRNA sense strand
gcagcuguauccaagaaag

SEQ ID NO: 765003 - RNA, 19 nt, Homo sapiens
  misc_RNA (1)...(19): siRNA sense strand
ggggaaagaugcagcugua

SEQ ID NO: 765004 - RNA, 19 nt, Homo sapiens
  misc_RNA (1)...(19): siRNA sense strand
gaaagaugcagcuguaucc

SEQ ID NO: 765005 - RNA, 19 nt, Homo sapiens
  misc_RNA (1)...(19): siRNA sense strand
cgaagcugcugccuugucu

SEQ ID NO: 765006 - RNA, 19 nt, Homo sapiens
  misc_RNA (1)...(19): siRNA sense strand
ugcagaggaugaagugcua

SEQ ID NO: 765007 - RNA, 19 nt, Homo sapiens
  misc_RNA (1)...(19): siRNA sense strand
cgacaucagcgcagagauc

SEQ ID NO: 765008 - RNA, 19 nt, Homo sapiens
  misc_RNA (1)...(19): siRNA sense strand
gggacccuauugacguuga

SEQ ID NO: 765009 - RNA, 19 nt, Homo sapiens
  misc_RNA (1)...(19): siRNA sense strand
ugcaggaccucagcucuug

SEQ ID NO: 765010 - RNA, 19 nt, Homo sapiens
  misc_RNA (1)...(19): siRNA sense strand
cgcccuggauaacgucuuu

SEQ ID NO: 765011 - RNA, 19 nt, Homo sapiens
  misc_RNA (1)...(19): siRNA sense strand
gccgacuucuggugcuuug

SEQ ID NO: 765012 - RNA, 19 nt, Homo sapiens
  misc_RNA (1)...(19): siRNA sense strand
gcgcuggugcagaggauga

SEQ ID NO: 765013 - RNA, 19 nt, Homo sapiens
  misc_RNA (1)...(19): siRNA sense strand
cggaggaggaguuccaguu

SEQ ID NO: 765014 - RNA, 19 nt, Homo sapiens
  misc_RNA (1)...(19): siRNA sense strand
ccgauggcuucgacgaguu

SEQ ID NO: 765015 - RNA, 19 nt, Homo sapiens
  misc_RNA (1)...(19): siRNA sense strand
aggaggaguuccaguuucu

SEQ ID NO: 765016 - RNA, 19 nt, Homo sapiens
  misc_RNA (1)...(19): siRNA sense strand
augcagcuguauccaagaa

SEQ ID NO: 765017 - RNA, 19 nt, Homo sapiens
  misc_RNA (1)...(19): siRNA sense strand
gguaccagcgcgacuacga

SEQ ID NO: 765018 - RNA, 19 nt, Homo sapiens
  misc_RNA (1)...(19): siRNA sense strand
gaccucagcucuugcauca

SEQ ID NO: 765019 - RNA, 19 nt, Homo sapiens
  misc_RNA (1)...(19): siRNA sense strand
ggagcaggauagugccuuu

SEQ ID NO: 765020 - RNA, 19 nt, Homo sapiens
  misc_RNA (1)...(19): siRNA sense strand
ggaggaggaguuccaguuu

SEQ ID NO: 765021 - RNA, 19 nt, Homo sapiens
  misc_RNA (1)...(19): siRNA sense strand
gaggaggaguuccaguuuc

SEQ ID NO: 765022 - RNA, 19 nt, Homo sapiens
  misc_RNA (1)...(19): siRNA sense strand
ggaaagaugcagcuguauc

SEQ ID NO: 765023 - RNA, 19 nt, Homo sapiens
  misc_RNA (1)...(19): siRNA sense strand
gagcucaagugcgacauca

SEQ ID NO: 765024 - RNA, 19 nt, Homo sapiens
  misc_RNA (1)...(19): siRNA sense strand
gcagcuguauccaagaaag

SEQ ID NO: 765025 - RNA, 19 nt, Homo sapiens
  misc_RNA (1)...(19): siRNA sense strand
ggggaaagaugcagcugua

SEQ ID NO: 765026 - RNA, 19 nt, Homo sapiens
  misc_RNA (1)...(19): siRNA sense strand
gaaagaugcagcuguaucc

SEQ ID NO: 765027 - RNA, 19 nt, Homo sapiens
  misc_RNA (1)...(19): siRNA sense strand
cgaagcugcugccuugucu

SEQ ID NO: 765028 - RNA, 19 nt, Homo sapiens
  misc_RNA (1)...(19): siRNA sense strand
ugcagaggaugaagugcua

SEQ ID NO: 765029 - RNA, 19 nt, Homo sapiens
  misc_RNA (1)...(19): siRNA sense strand
cgacaucagcgcagagauc

SEQ ID NO: 765030 - RNA, 19 nt, Homo sapiens
  misc_RNA (1)...(19): siRNA sense strand
gggacccuauugacguuga

SEQ ID NO: 765031 - RNA, 19 nt, Homo sapiens
  misc_RNA (1)...(19): siRNA sense strand
ugcaggaccucagcucuug

SEQ ID NO: 765032 - RNA, 19 nt, Homo sapiens
  misc_RNA (1)...(19): siRNA sense strand
cgcccuggauaacgucuuu

SEQ ID NO: 765033 - RNA, 19 nt, Homo sapiens
  misc_RNA (1)...(19): siRNA sense strand
gccgacuucuggugcuuug

SEQ ID NO: 765034 - RNA, 19 nt, Homo sapiens
  misc_RNA (1)...(19): siRNA sense strand
gcgcuggugcagaggauga

SEQ ID NO: 765035 - RNA, 19 nt, Homo sapiens
  misc_RNA (1)...(19): siRNA sense strand
cggaggaggaguuccaguu

SEQ ID NO: 765036 - RNA, 19 nt, Homo sapiens
  misc_RNA (1)...(19): siRNA sense strand
ccgauggcuucgacgaguu

SEQ ID NO: 765037 - RNA, 19 nt, Homo sapiens
  misc_RNA (1)...(19): siRNA sense strand
aggaggaguuccaguuucu

SEQ ID NO: 765038 - RNA, 19 nt, Homo sapiens
  misc_RNA (1)...(19): siRNA sense strand
augcagcuguauccaagaa

SEQ ID NO: 765039 - RNA, 19 nt, Homo sapiens
  misc_RNA (1)...(19): siRNA sense strand
gguaccagcgcgacuacga

SEQ ID NO: 765040 - RNA, 19 nt, Homo sapiens
  misc_RNA (1)...(19): siRNA sense strand
gaccucagcucuugcauca

SEQ ID NO: 765041 - RNA, 19 nt, Homo sapiens
  misc_RNA (1)...(19): siRNA sense strand
ggagcaggauagugccuuu

SEQ ID NO: 765042 - RNA, 19 nt, Homo sapiens
  misc_RNA (1)...(19): siRNA sense strand
ggaggaggaguuccaguuu

SEQ ID NO: 765043 - RNA, 19 nt, Homo sapiens
  misc_RNA (1)...(19): siRNA sense strand
gaggaggaguuccaguuuc

SEQ ID NO: 765044 - RNA, 19 nt, Homo sapiens
  misc_RNA (1)...(19): siRNA sense strand
ggaaagaugcagcuguauc

SEQ ID NO: 765045 - RNA, 19 nt, Homo sapiens
  misc_RNA (1)...(19): siRNA sense strand
gagcucaagugcgacauca

SEQ ID NO: 765046 - RNA, 19 nt, Homo sapiens
  misc_RNA (1)...(19): siRNA sense strand
gcagcuguauccaagaaag

SEQ ID NO: 765047 - RNA, 19 nt, Homo sapiens
  misc_RNA (1)...(19): siRNA sense strand
ggggaaagaugcagcugua

SEQ ID NO: 765048 - RNA, 19 nt, Homo sapiens
  misc_RNA (1)...(19): siRNA sense strand
gaaagaugcagcuguaucc

SEQ ID NO: 765049 - RNA, 19 nt, Homo sapiens
  misc_RNA (1)...(19): siRNA sense strand
cgaagcugcugccuugucu

SEQ ID NO: 765050 - RNA, 19 nt, Homo sapiens
  misc_RNA (1)...(19): siRNA sense strand
ugcagaggaugaagugcua

SEQ ID NO: 765051 - RNA, 19 nt, Homo sapiens
  misc_RNA (1)...(19): siRNA sense strand
cgacaucagcgcagagauc

SEQ ID NO: 765052 - RNA, 19 nt, Homo sapiens
  misc_RNA (1)...(19): siRNA sense strand
gggacccuauugacguuga

SEQ ID NO: 765053 - RNA, 19 nt, Homo sapiens
  misc_RNA (1)...(19): siRNA sense strand
ugcaggaccucagcucuug

SEQ ID NO: 765054 - RNA, 19 nt, Homo sapiens
  misc_RNA (1)...(19): siRNA sense strand
cgcccuggauaacgucuuu

SEQ ID NO: 765055 - RNA, 19 nt, Homo sapiens
  misc_RNA (1)...(19): siRNA sense strand
gccgacuucuggugcuuug

SEQ ID NO: 765056 - RNA, 19 nt, Homo sapiens
  misc_RNA (1)...(19): siRNA sense strand
gcgcuggugcagaggauga

SEQ ID NO: 765057 - RNA, 19 nt, Homo sapiens
  misc_RNA (1)...(19): siRNA sense strand
cggaggaggaguuccaguu

SEQ ID NO: 765058 - RNA, 19 nt, Homo sapiens
  misc_RNA (1)...(19): siRNA sense strand
ccgauggcuucgacgaguu

SEQ ID NO: 765059 - RNA, 19 nt, Homo sapiens
  misc_RNA (1)...(19): siRNA sense strand
aggaggaguuccaguuucu

SEQ ID NO: 765060 - RNA, 19 nt, Homo sapiens
  misc_RNA (1)...(19): siRNA sense strand
augcagcuguauccaagaa

SEQ ID NO: 765061 - RNA, 19 nt, Homo sapiens
  misc_RNA (1)...(19): siRNA sense strand
gguaccagcgcgacuacga

SEQ ID NO: 765062 - RNA, 19 nt, Homo sapiens
  misc_RNA (1)...(19): siRNA sense strand
gaccucagcucuugcauca

SEQ ID NO: 765063 - RNA, 19 nt, Homo sapiens
  misc_RNA (1)...(19): siRNA sense strand
ggagcaggauagugccuuu

SEQ ID NO: 765064 - RNA, 19 nt, Homo sapiens
  misc_RNA (1)...(19): siRNA sense strand
ggaggaggaguuccaguuu

SEQ ID NO: 765065 - RNA, 19 nt, Homo sapiens
  misc_RNA (1)...(19): siRNA sense strand
gaggaggaguuccaguuuc

SEQ ID NO: 765066 - RNA, 19 nt, Homo sapiens
  misc_RNA (1)...(19): siRNA sense strand
ggaaagaugcagcuguauc

SEQ ID NO: 765067 - RNA, 19 nt, Homo sapiens
  misc_RNA (1)...(19): siRNA sense strand
gagcucaagugcgacauca

SEQ ID NO: 765068 - RNA, 19 nt, Homo sapiens
  misc_RNA (1)...(19): siRNA sense strand
gcagcuguauccaagaaag

SEQ ID NO: 765069 - RNA, 19 nt, Homo sapiens
  misc_RNA (1)...(19): siRNA sense strand
ggggaaagaugcagcugua

SEQ ID NO: 765070 - RNA, 19 nt, Homo sapiens
  misc_RNA (1)...(19): siRNA sense strand
gaaagaugcagcuguaucc

SEQ ID NO: 765071 - RNA, 19 nt, Homo sapiens
  misc_RNA (1)...(19): siRNA sense strand
cgaagcugcugccuugucu

SEQ ID NO: 765072 - RNA, 19 nt, Homo sapiens
  misc_RNA (1)...(19): siRNA sense strand
ugcagaggaugaagugcua

SEQ ID NO: 765073 - RNA, 19 nt, Homo sapiens
  misc_RNA (1)...(19): siRNA sense strand
cgacaucagcgcagagauc

SEQ ID NO: 765074 - RNA, 19 nt, Homo sapiens
  misc_RNA (1)...(19): siRNA sense strand
gggacccuauugacguuga

SEQ ID NO: 765075 - RNA, 19 nt, Homo sapiens
  misc_RNA (1)...(19): siRNA sense strand
ugcaggaccucagcucuug

SEQ ID NO: 765076 - RNA, 19 nt, Homo sapiens
  misc_RNA (1)...(19): siRNA sense strand
cgcccuggauaacgucuuu

SEQ ID NO: 765077 - RNA, 19 nt, Homo sapiens
  misc_RNA (1)...(19): siRNA sense strand
gccgacuucuggugcuuug

SEQ ID NO: 765078 - RNA, 19 nt, Homo sapiens
  misc_RNA (1)...(19): siRNA sense strand
gcgcuggugcagaggauga

SEQ ID NO: 765079 - RNA, 19 nt, Homo sapiens
  misc_RNA (1)...(19): siRNA sense strand
cggaggaggaguuccaguu

SEQ ID NO: 765080 - RNA, 19 nt, Homo sapiens
  misc_RNA (1)...(19): siRNA sense strand
ccgauggcuucgacgaguu

SEQ ID NO: 765081 - RNA, 19 nt, Homo sapiens
  misc_RNA (1)...(19): siRNA sense strand
aggaggaguuccaguuucu

SEQ ID NO: 765082 - RNA, 19 nt, Homo sapiens
  misc_RNA (1)...(19): siRNA sense strand
augcagcuguauccaagaa

SEQ ID NO: 765083 - RNA, 19 nt, Homo sapiens
  misc_RNA (1)...(19): siRNA sense strand
gguaccagcgcgacuacga

SEQ ID NO: 765084 - RNA, 19 nt, Homo sapiens
  misc_RNA (1)...(19): siRNA sense strand
gaccucagcucuugcauca

SEQ ID NO: 765085 - RNA, 19 nt, Homo sapiens
  misc_RNA (1)...(19): siRNA sense strand
ggagcaggauagugccuuu

SEQ ID NO: 765086 - RNA, 19 nt, Homo sapiens
  misc_RNA (1)...(19): siRNA sense strand
ggaggaggaguuccaguuu

SEQ ID NO: 765087 - RNA, 19 nt, Homo sapiens
  misc_RNA (1)...(19): siRNA sense strand
gaggaggaguuccaguuuc

SEQ ID NO: 765088 - RNA, 19 nt, Homo sapiens
  misc_RNA (1)...(19): siRNA sense strand
ggaaagaugcagcuguauc

SEQ ID NO: 765089 - RNA, 19 nt, Homo sapiens
  misc_RNA (1)...(19): siRNA sense strand
gagcucaagugcgacauca

SEQ ID NO: 765090 - RNA, 19 nt, Homo sapiens
  misc_RNA (1)...(19): siRNA sense strand
gcagcuguauccaagaaag

SEQ ID NO: 765091 - RNA, 19 nt, Homo sapiens
  misc_RNA (1)...(19): siRNA sense strand
ggggaaagaugcagcugua

SEQ ID NO: 765092 - RNA, 19 nt, Homo sapiens
  misc_RNA (1)...(19): siRNA sense strand
gaaagaugcagcuguaucc

SEQ ID NO: 765093 - RNA, 19 nt, Homo sapiens
  misc_RNA (1)...(19): siRNA sense strand
cgaagcugcugccuugucu

SEQ ID NO: 765094 - RNA, 19 nt, Homo sapiens
  misc_RNA (1)...(19): siRNA sense strand
ugcagaggaugaagugcua

SEQ ID NO: 765095 - RNA, 19 nt, Homo sapiens
  misc_RNA (1)...(19): siRNA sense strand
cgacaucagcgcagagauc

SEQ ID NO: 765096 - RNA, 19 nt, Homo sapiens
  misc_RNA (1)...(19): siRNA sense strand
gggacccuauugacguuga

SEQ ID NO: 765097 - RNA, 19 nt, Homo sapiens
  misc_RNA (1)...(19): siRNA sense strand
ugcaggaccucagcucuug

SEQ ID NO: 765098 - RNA, 19 nt, Homo sapiens
  misc_RNA (1)...(19): siRNA sense strand
cgcccuggauaacgucuuu

SEQ ID NO: 765099 - RNA, 19 nt, Homo sapiens
  misc_RNA (1)...(19): siRNA sense strand
gccgacuucuggugcuuug

SEQ ID NO: 765100 - RNA, 19 nt, Homo sapiens
  misc_RNA (1)...(19): siRNA sense strand
gcgcuggugcagaggauga

SEQ ID NO: 765101 - RNA, 19 nt, Homo sapiens
  misc_RNA (1)...(19): siRNA sense strand
cggaggaggaguuccaguu

SEQ ID NO: 765102 - RNA, 19 nt, Homo sapiens
  misc_RNA (1)...(19): siRNA sense strand
ccgauggcuucgacgaguu

SEQ ID NO: 765103 - RNA, 19 nt, Homo sapiens
  misc_RNA (1)...(19): siRNA sense strand
aggaggaguuccaguuucu

SEQ ID NO: 765104 - RNA, 19 nt, Homo sapiens
  misc_RNA (1)...(19): siRNA sense strand
augcagcuguauccaagaa

SEQ ID NO: 765105 - RNA, 19 nt, Homo sapiens
  misc_RNA (1)...(19): siRNA sense strand
gguaccagcgcgacuacga

SEQ ID NO: 765106 - RNA, 19 nt, Homo sapiens
  misc_RNA (1)...(19): siRNA sense strand
gaccucagcucuugcauca

SEQ ID NO: 765107 - RNA, 19 nt, Homo sapiens
  misc_RNA (1)...(19): siRNA sense strand
ggagcaggauagugccuuu

SEQ ID NO: 765108 - RNA, 19 nt, Homo sapiens
  misc_RNA (1)...(19): siRNA sense strand
ggaggaggaguuccaguuu

SEQ ID NO: 765109 - RNA, 19 nt, Homo sapiens
  misc_RNA (1)...(19): siRNA sense strand
gaggaggaguuccaguuuc

SEQ ID NO: 765110 - RNA, 19 nt, Homo sapiens
  misc_RNA (1)...(19): siRNA sense strand
ggaaagaugcagcuguauc

SEQ ID NO: 765111 - RNA, 19 nt, Homo sapiens
  misc_RNA (1)...(19): siRNA sense strand
gagcucaagugcgacauca

SEQ ID NO: 765112 - RNA, 19 nt, Homo sapiens
  misc_RNA (1)...(19): siRNA sense strand
gcagcuguauccaagaaag

SEQ ID NO: 765113 - RNA, 19 nt, Homo sapiens
  misc_RNA (1)...(19): siRNA sense strand
ggggaaagaugcagcugua

SEQ ID NO: 765114 - RNA, 19 nt, Homo sapiens
  misc_RNA (1)...(19): siRNA sense strand
gaaagaugcagcuguaucc

SEQ ID NO: 765115 - RNA, 19 nt, Homo sapiens
  misc_RNA (1)...(19): siRNA sense strand
cgaagcugcugccuugucu

SEQ ID NO: 765116 - RNA, 19 nt, Homo sapiens
  misc_RNA (1)...(19): siRNA sense strand
ugcagaggaugaagugcua

SEQ ID NO: 765117 - RNA, 19 nt, Homo sapiens
  misc_RNA (1)...(19): siRNA sense strand
cgacaucagcgcagagauc

SEQ ID NO: 765118 - RNA, 19 nt, Homo sapiens
  misc_RNA (1)...(19): siRNA sense strand
gggacccuauugacguuga

SEQ ID NO: 765119 - RNA, 19 nt, Homo sapiens
  misc_RNA (1)...(19): siRNA sense strand
ugcaggaccucagcucuug

SEQ ID NO: 765120 - RNA, 19 nt, Homo sapiens
  misc_RNA (1)...(19): siRNA sense strand
cgcccuggauaacgucuuu

SEQ ID NO: 765121 - RNA, 19 nt, Homo sapiens
  misc_RNA (1)...(19): siRNA sense strand
gccgacuucuggugcuuug

SEQ ID NO: 765122 - RNA, 19 nt, Homo sapiens
  misc_RNA (1)...(19): siRNA sense strand
gcgcuggugcagaggauga

SEQ ID NO: 765123 - RNA, 19 nt, Homo sapiens
  misc_RNA (1)...(19): siRNA sense strand
cggaggaggaguuccaguu

SEQ ID NO: 765124 - RNA, 19 nt, Homo sapiens
  misc_RNA (1)...(19): siRNA sense strand
ccgauggcuucgacgaguu

SEQ ID NO: 765125 - RNA, 19 nt, Homo sapiens
  misc_RNA (1)...(19): siRNA sense strand
aggaggaguuccaguuucu

SEQ ID NO: 765126 - RNA, 19 nt, Homo sapiens
  misc_RNA (1)...(19): siRNA sense strand
augcagcuguauccaagaa

SEQ ID NO: 765127 - RNA, 19 nt, Homo sapiens
  misc_RNA (1)...(19): siRNA sense strand
gguaccagcgcgacuacga

SEQ ID NO: 765128 - RNA, 19 nt, Homo sapiens
  misc_RNA (1)...(19): siRNA sense strand
gaccucagcucuugcauca

SEQ ID NO: 765129 - RNA, 19 nt, Homo sapiens
  misc_RNA (1)...(19): siRNA sense strand
ggagcaggauagugccuuu

SEQ ID NO: 765130 - RNA, 19 nt, Homo sapiens
  misc_RNA (1)...(19): siRNA sense strand
ggaggaggaguuccaguuu

SEQ ID NO: 765131 - RNA, 19 nt, Homo sapiens
  misc_RNA (1)...(19): siRNA sense strand
gaggaggaguuccaguuuc

SEQ ID NO: 765132 - RNA, 19 nt, Homo sapiens
  misc_RNA (1)...(19): siRNA sense strand
ggaaagaugcagcuguauc

SEQ ID NO: 765133 - RNA, 19 nt, Homo sapiens
  misc_RNA (1)...(19): siRNA sense strand
gagcucaagugcgacauca

SEQ ID NO: 765134 - RNA, 19 nt, Homo sapiens
  misc_RNA (1)...(19): siRNA sense strand
gcagcuguauccaagaaag

SEQ ID NO: 765135 - RNA, 19 nt, Homo sapiens
  misc_RNA (1)...(19): siRNA sense strand
ggggaaagaugcagcugua

SEQ ID NO: 765136 - RNA, 19 nt, Homo sapiens
  misc_RNA (1)...(19): siRNA sense strand
gaaagaugcagcuguaucc

SEQ ID NO: 765137 - RNA, 19 nt, Homo sapiens
  misc_RNA (1)...(19): siRNA sense strand
cgaagcugcugccuugucu

SEQ ID NO: 765138 - RNA, 19 nt, Homo sapiens
  misc_RNA (1)...(19): siRNA sense strand
ugcagaggaugaagugcua

SEQ ID NO: 765139 - RNA, 19 nt, Homo sapiens
  misc_RNA (1)...(19): siRNA sense strand
cgacaucagcgcagagauc

SEQ ID NO: 765140 - RNA, 19 nt, Homo sapiens
  misc_RNA (1)...(19): siRNA sense strand
gggacccuauugacguuga

SEQ ID NO: 765141 - RNA, 19 nt, Homo sapiens
  misc_RNA (1)...(19): siRNA sense strand
ugcaggaccucagcucuug

SEQ ID NO: 765142 - RNA, 19 nt, Homo sapiens
  misc_RNA (1)...(19): siRNA sense strand
cgcccuggauaacgucuuu

SEQ ID NO: 765143 - RNA, 19 nt, Homo sapiens
  misc_RNA (1)...(19): siRNA sense strand
gccgacuucuggugcuuug

SEQ ID NO: 765144 - RNA, 19 nt, Homo sapiens
  misc_RNA (1)...(19): siRNA sense strand
gcgcuggugcagaggauga

SEQ ID NO: 765145 - RNA, 19 nt, Homo sapiens
  misc_RNA (1)...(19): siRNA sense strand
cggaggaggaguuccaguu

SEQ ID NO: 765146 - RNA, 19 nt, Homo sapiens
  misc_RNA (1)...(19): siRNA sense strand
ccgauggcuucgacgaguu

SEQ ID NO: 765147 - RNA, 19 nt, Homo sapiens
  misc_RNA (1)...(19): siRNA sense strand
aggaggaguuccaguuucu

SEQ ID NO: 765148 - RNA, 19 nt, Homo sapiens
  misc_RNA (1)...(19): siRNA sense strand
augcagcuguauccaagaa

SEQ ID NO: 765149 - RNA, 19 nt, Homo sapiens
  misc_RNA (1)...(19): siRNA sense strand
gguaccagcgcgacuacga

SEQ ID NO: 765150 - RNA, 19 nt, Homo sapiens
  misc_RNA (1)...(19): siRNA sense strand
gaccucagcucuugcauca

SEQ ID NO: 765151 - RNA, 19 nt, Homo sapiens
  misc_RNA (1)...(19): siRNA sense strand
ggagcaggauagugccuuu

SEQ ID NO: 765152 - RNA, 19 nt, Homo sapiens
  misc_RNA (1)...(19): siRNA sense strand
ggaggaggaguuccaguuu

SEQ ID NO: 765153 - RNA, 19 nt, Homo sapiens
  misc_RNA (1)...(19): siRNA sense strand
gaggaggaguuccaguuuc

SEQ ID NO: 765154 - RNA, 19 nt, Homo sapiens
  misc_RNA (1)...(19): siRNA sense strand
ggaaagaugcagcuguauc

SEQ ID NO: 765155 - RNA, 19 nt, Homo sapiens
  misc_RNA (1)...(19): siRNA sense strand
gagcucaagugcgacauca

SEQ ID NO: 765156 - RNA, 19 nt, Homo sapiens
  misc_RNA (1)...(19): siRNA sense strand
gcagcuguauccaagaaag

SEQ ID NO: 765157 - RNA, 19 nt, Homo sapiens
  misc_RNA (1)...(19): siRNA sense strand
ggggaaagaugcagcugua

SEQ ID NO: 765158 - RNA, 19 nt, Homo sapiens
  misc_RNA (1)...(19): siRNA sense strand
gaaagaugcagcuguaucc

SEQ ID NO: 765159 - RNA, 19 nt, Homo sapiens
  misc_RNA (1)...(19): siRNA sense strand
cgaagcugcugccuugucu

SEQ ID NO: 765160 - RNA, 19 nt, Homo sapiens
  misc_RNA (1)...(19): siRNA sense strand
ugcagaggaugaagugcua

SEQ ID NO: 765161 - RNA, 19 nt, Homo sapiens
  misc_RNA (1)...(19): siRNA sense strand
cgacaucagcgcagagauc

SEQ ID NO: 765162 - RNA, 19 nt, Homo sapiens
  misc_RNA (1)...(19): siRNA sense strand
gggacccuauugacguuga

SEQ ID NO: 765163 - RNA, 19 nt, Homo sapiens
  misc_RNA (1)...(19): siRNA sense strand
ugcaggaccucagcucuug

SEQ ID NO: 765164 - RNA, 19 nt, Homo sapiens
  misc_RNA (1)...(19): siRNA sense strand
cgcccuggauaacgucuuu

SEQ ID NO: 765165 - RNA, 19 nt, Homo sapiens
  misc_RNA (1)...(19): siRNA sense strand
gccgacuucuggugcuuug

SEQ ID NO: 765166 - RNA, 19 nt, Homo sapiens
  misc_RNA (1)...(19): siRNA sense strand
gcgcuggugcagaggauga

SEQ ID NO: 765167 - RNA, 19 nt, Homo sapiens
  misc_RNA (1)...(19): siRNA sense strand
cggaggaggaguuccaguu

SEQ ID NO: 765168 - RNA, 19 nt, Homo sapiens
  misc_RNA (1)...(19): siRNA sense strand
ccgauggcuucgacgaguu

SEQ ID NO: 765169 - RNA, 19 nt, Homo sapiens
  misc_RNA (1)...(19): siRNA sense strand
aggaggaguuccaguuucu

SEQ ID NO: 765170 - RNA, 19 nt, Homo sapiens
  misc_RNA (1)...(19): siRNA sense strand
augcagcuguauccaagaa

SEQ ID NO: 765171 - RNA, 19 nt, Homo sapiens
  misc_RNA (1)...(19): siRNA sense strand
gguaccagcgcgacuacga

SEQ ID NO: 765172 - RNA, 19 nt, Homo sapiens
  misc_RNA (1)...(19): siRNA sense strand
gaccucagcucuugcauca

SEQ ID NO: 765173 - RNA, 19 nt, Homo sapiens
  misc_RNA (1)...(19): siRNA sense strand
ggagcaggauagugccuuu

SEQ ID NO: 765174 - RNA, 19 nt, Homo sapiens
  misc_RNA (1)...(19): siRNA sense strand
ggaggaggaguuccaguuu

SEQ ID NO: 765175 - RNA, 19 nt, Homo sapiens
  misc_RNA (1)...(19): siRNA sense strand
gaggaggaguuccaguuuc

SEQ ID NO: 765176 - RNA, 19 nt, Homo sapiens
  misc_RNA (1)...(19): siRNA sense strand
ggaaagaugcagcuguauc

SEQ ID NO: 765177 - RNA, 19 nt, Homo sapiens
  misc_RNA (1)...(19): siRNA sense strand
gagcucaagugcgacauca

SEQ ID NO: 765178 - RNA, 19 nt, Homo sapiens
  misc_RNA (1)...(19): siRNA sense strand
gcagcuguauccaagaaag

SEQ ID NO: 765179 - RNA, 19 nt, Homo sapiens
  misc_RNA (1)...(19): siRNA sense strand
ggggaaagaugcagcugua

SEQ ID NO: 765180 - RNA, 19 nt, Homo sapiens
  misc_RNA (1)...(19): siRNA sense strand
gaaagaugcagcuguaucc

SEQ ID NO: 765181 - RNA, 19 nt, Homo sapiens
  misc_RNA (1)...(19): siRNA sense strand
cgaagcugcugccuugucu

SEQ ID NO: 765182 - RNA, 19 nt, Homo sapiens
  misc_RNA (1)...(19): siRNA sense strand
ugcagaggaugaagugcua

SEQ ID NO: 765183 - RNA, 19 nt, Homo sapiens
  misc_RNA (1)...(19): siRNA sense strand
cgacaucagcgcagagauc

SEQ ID NO: 765184 - RNA, 19 nt, Homo sapiens
  misc_RNA (1)...(19): siRNA sense strand
gggacccuauugacguuga

SEQ ID NO: 765185 - RNA, 19 nt, Homo sapiens
  misc_RNA (1)...(19): siRNA sense strand
ugcaggaccucagcucuug

SEQ ID NO: 765186 - RNA, 19 nt, Homo sapiens
  misc_RNA (1)...(19): siRNA sense strand
cgcccuggauaacgucuuu

SEQ ID NO: 765187 - RNA, 19 nt, Homo sapiens
  misc_RNA (1)...(19): siRNA sense strand
gccgacuucuggugcuuug

SEQ ID NO: 765188 - RNA, 19 nt, Homo sapiens
  misc_RNA (1)...(19): siRNA sense strand
gcgcuggugcagaggauga

SEQ ID NO: 765189 - RNA, 19 nt, Homo sapiens
  misc_RNA (1)...(19): siRNA sense strand
cggaggaggaguuccaguu

SEQ ID NO: 765190 - RNA, 19 nt, Homo sapiens
  misc_RNA (1)...(19): siRNA sense strand
ccgauggcuucgacgaguu

SEQ ID NO: 765191 - RNA, 19 nt, Homo sapiens
  misc_RNA (1)...(19): siRNA sense strand
aggaggaguuccaguuucu

SEQ ID NO: 765192 - RNA, 19 nt, Homo sapiens
  misc_RNA (1)...(19): siRNA sense strand
augcagcuguauccaagaa

SEQ ID NO: 765193 - RNA, 19 nt, Homo sapiens
  misc_RNA (1)...(19): siRNA sense strand
gguaccagcgcgacuacga

SEQ ID NO: 765194 - RNA, 19 nt, Homo sapiens
  misc_RNA (1)...(19): siRNA sense strand
gaccucagcucuugcauca

SEQ ID NO: 765195 - RNA, 19 nt, Homo sapiens
  misc_RNA (1)...(19): siRNA sense strand
ggagcaggauagugccuuu

SEQ ID NO: 765196 - RNA, 19 nt, Homo sapiens
  misc_RNA (1)...(19): siRNA sense strand
ggaggaggaguuccaguuu

SEQ ID NO: 765197 - RNA, 19 nt, Homo sapiens
  misc_RNA (1)...(19): siRNA sense strand
gaggaggaguuccaguuuc

SEQ ID NO: 765198 - RNA, 19 nt, Homo sapiens
  misc_RNA (1)...(19): siRNA sense strand
ggaaagaugcagcuguauc

SEQ ID NO: 765199 - RNA, 19 nt, Homo sapiens
  misc_RNA (1)...(19): siRNA sense strand
gagcucaagugcgacauca

SEQ ID NO: 765200 - RNA, 19 nt, Homo sapiens
  misc_RNA (1)...(19): siRNA sense strand
gcagcuguauccaagaaag

SEQ ID NO: 765201 - RNA, 19 nt, Homo sapiens
  misc_RNA (1)...(19): siRNA sense strand
ggggaaagaugcagcugua

SEQ ID NO: 765202 - RNA, 19 nt, Homo sapiens
  misc_RNA (1)...(19): siRNA sense strand
gaaagaugcagcuguaucc

SEQ ID NO: 765203 - RNA, 19 nt, Homo sapiens
  misc_RNA (1)...(19): siRNA sense strand
cgaagcugcugccuugucu

SEQ ID NO: 765204 - RNA, 19 nt, Homo sapiens
  misc_RNA (1)...(19): siRNA sense strand
ugcagaggaugaagugcua

SEQ ID NO: 765205 - RNA, 19 nt, Homo sapiens
  misc_RNA (1)...(19): siRNA sense strand
cgacaucagcgcagagauc

SEQ ID NO: 765206 - RNA, 19 nt, Homo sapiens
  misc_RNA (1)...(19): siRNA sense strand
gggacccuauugacguuga

SEQ ID NO: 765207 - RNA, 19 nt, Homo sapiens
  misc_RNA (1)...(19): siRNA sense strand
ugcaggaccucagcucuug

SEQ ID NO: 765208 - RNA, 19 nt, Homo sapiens
  misc_RNA (1)...(19): siRNA sense strand
cgcccuggauaacgucuuu

SEQ ID NO: 765209 - RNA, 19 nt, Homo sapiens
  misc_RNA (1)...(19): siRNA sense strand
gccgacuucuggugcuuug

SEQ ID NO: 765210 - RNA, 19 nt, Homo sapiens
  misc_RNA (1)...(19): siRNA sense strand
gcgcuggugcagaggauga

SEQ ID NO: 765211 - RNA, 19 nt, Homo sapiens
  misc_RNA (1)...(19): siRNA sense strand
cggaggaggaguuccaguu

SEQ ID NO: 765212 - RNA, 19 nt, Homo sapiens
  misc_RNA (1)...(19): siRNA sense strand
ccgauggcuucgacgaguu

SEQ ID NO: 765213 - RNA, 19 nt, Homo sapiens
  misc_RNA (1)...(19): siRNA sense strand
aggaggaguuccaguuucu

SEQ ID NO: 765214 - RNA, 19 nt, Homo sapiens
  misc_RNA (1)...(19): siRNA sense strand
augcagcuguauccaagaa

SEQ ID NO: 765215 - RNA, 19 nt, Homo sapiens
  misc_RNA (1)...(19): siRNA sense strand
gguaccagcgcgacuacga

SEQ ID NO: 765216 - RNA, 19 nt, Homo sapiens
  misc_RNA (1)...(19): siRNA sense strand
gaccucagcucuugcauca

SEQ ID NO: 765217 - RNA, 19 nt, Homo sapiens
  misc_RNA (1)...(19): siRNA sense strand
ggagcaggauagugccuuu

SEQ ID NO: 765218 - RNA, 19 nt, Homo sapiens
  misc_RNA (1)...(19): siRNA sense strand
ggaggaggaguuccaguuu

SEQ ID NO: 765219 - RNA, 19 nt, Homo sapiens
  misc_RNA (1)...(19): siRNA sense strand
gaggaggaguuccaguuuc

SEQ ID NO: 765220 - RNA, 19 nt, Homo sapiens
  misc_RNA (1)...(19): siRNA sense strand
ggaaagaugcagcuguauc

SEQ ID NO: 765221 - RNA, 19 nt, Homo sapiens
  misc_RNA (1)...(19): siRNA sense strand
gagcucaagugcgacauca

SEQ ID NO: 765222 - RNA, 19 nt, Homo sapiens
  misc_RNA (1)...(19): siRNA sense strand
gcagcuguauccaagaaag

SEQ ID NO: 765223 - RNA, 19 nt, Homo sapiens
  misc_RNA (1)...(19): siRNA sense strand
ggggaaagaugcagcugua

SEQ ID NO: 765224 - RNA, 19 nt, Homo sapiens
  misc_RNA (1)...(19): siRNA sense strand
gaaagaugcagcuguaucc

SEQ ID NO: 765225 - RNA, 19 nt, Homo sapiens
  misc_RNA (1)...(19): siRNA sense strand
cgaagcugcugccuugucu

SEQ ID NO: 765226 - RNA, 19 nt, Homo sapiens
  misc_RNA (1)...(19): siRNA sense strand
ugcagaggaugaagugcua

SEQ ID NO: 765227 - RNA, 19 nt, Homo sapiens
  misc_RNA (1)...(19): siRNA sense strand
cgacaucagcgcagagauc

SEQ ID NO: 765228 - RNA, 19 nt, Homo sapiens
  misc_RNA (1)...(19): siRNA sense strand
gggacccuauugacguuga

SEQ ID NO: 765229 - RNA, 19 nt, Homo sapiens
  misc_RNA (1)...(19): siRNA sense strand
ugcaggaccucagcucuug

SEQ ID NO: 765230 - RNA, 19 nt, Homo sapiens
  misc_RNA (1)...(19): siRNA sense strand
cgcccuggauaacgucuuu

SEQ ID NO: 765231 - RNA, 19 nt, Homo sapiens
  misc_RNA (1)...(19): siRNA sense strand
gccgacuucuggugcuuug

SEQ ID NO: 765232 - RNA, 19 nt, Homo sapiens
  misc_RNA (1)...(19): siRNA sense strand
gcgcuggugcagaggauga

SEQ ID NO: 765233 - RNA, 19 nt, Homo sapiens
  misc_RNA (1)...(19): siRNA sense strand
cggaggaggaguuccaguu

SEQ ID NO: 765234 - RNA, 19 nt, Homo sapiens
  misc_RNA (1)...(19): siRNA sense strand
ccgauggcuucgacgaguu

SEQ ID NO: 765235 - RNA, 19 nt, Homo sapiens
  misc_RNA (1)...(19): siRNA sense strand
aggaggaguuccaguuucu

SEQ ID NO: 765236 - RNA, 19 nt, Homo sapiens
  misc_RNA (1)...(19): siRNA sense strand
augcagcuguauccaagaa

SEQ ID NO: 765237 - RNA, 19 nt, Homo sapiens
  misc_RNA (1)...(19): siRNA sense strand
gguaccagcgcgacuacga

SEQ ID NO: 765238 - RNA, 19 nt, Homo sapiens
  misc_RNA (1)...(19): siRNA sense strand
caaaggaagccaacaauua

SEQ ID NO: 765239 - RNA, 19 nt, Homo sapiens
  misc_RNA (1)...(19): siRNA sense strand
caagacaaaucucuacaua

SEQ ID NO: 765240 - RNA, 19 nt, Homo sapiens
  misc_RNA (1)...(19): siRNA sense strand
ggugaaauauggaacaaua

SEQ ID NO: 765241 - RNA, 19 nt, Homo sapiens
  misc_RNA (1)...(19): siRNA sense strand
ugagagacuucaucaauaa

SEQ ID NO: 765242 - RNA, 19 nt, Homo sapiens
  misc_RNA (1)...(19): siRNA sense strand
gauuaugacucuacuaaga

SEQ ID NO: 765243 - RNA, 19 nt, Homo sapiens
  misc_RNA (1)...(19): siRNA sense strand
ugaagaugauggugaaaua

SEQ ID NO: 765244 - RNA, 19 nt, Homo sapiens
  misc_RNA (1)...(19): siRNA sense strand
gagaaagaaacacugauua

SEQ ID NO: 765245 - RNA, 19 nt, Homo sapiens
  misc_RNA (1)...(19): siRNA sense strand
gcacuuggauucugguguu

SEQ ID NO: 765246 - RNA, 19 nt, Homo sapiens
  misc_RNA (1)...(19): siRNA sense strand
ggaagaagcagcuaagaug

SEQ ID NO: 765247 - RNA, 19 nt, Homo sapiens
  misc_RNA (1)...(19): siRNA sense strand
gaagagucaugaagaaaca

SEQ ID NO: 765248 - RNA, 19 nt, Homo sapiens
  misc_RNA (1)...(19): siRNA sense strand
agaauuaagugcagaaaga

SEQ ID NO: 765249 - RNA, 19 nt, Homo sapiens
  misc_RNA (1)...(19): siRNA sense strand
uugaggaacuccaauauuu

SEQ ID NO: 765250 - RNA, 19 nt, Homo sapiens
  misc_RNA (1)...(19): siRNA sense strand
aacaauaucuccagaagaa

SEQ ID NO: 765251 - RNA, 19 nt, Homo sapiens
  misc_RNA (1)...(19): siRNA sense strand
uauggaagcuugaaggauu

SEQ ID NO: 765252 - RNA, 19 nt, Homo sapiens
  misc_RNA (1)...(19): siRNA sense strand
aaagacagaugaacccaaa

SEQ ID NO: 765253 - RNA, 19 nt, Homo sapiens
  misc_RNA (1)...(19): siRNA sense strand
gcagaagaagacaagauua

SEQ ID NO: 765254 - RNA, 19 nt, Homo sapiens
  misc_RNA (1)...(19): siRNA sense strand
ggaacaauaucuccagaag

SEQ ID NO: 765255 - RNA, 19 nt, Homo sapiens
  misc_RNA (1)...(19): siRNA sense strand
gaaacaguaucuaacacau

SEQ ID NO: 765256 - RNA, 19 nt, Homo sapiens
  misc_RNA (1)...(19): siRNA sense strand
acaaauggcuuggaaagga

SEQ ID NO: 765257 - RNA, 19 nt, Homo sapiens
  misc_RNA (1)...(19): siRNA sense strand
gaaaugauugcucuucaga

SEQ ID NO: 765258 - RNA, 19 nt, Homo sapiens
  misc_RNA (1)...(19): siRNA sense strand
cagaagaagacaagauuaa

SEQ ID NO: 765259 - RNA, 19 nt, Homo sapiens
  misc_RNA (1)...(19): siRNA sense strand
cacauacacuggaagauga

SEQ ID NO: 765260 - RNA, 19 nt, Homo sapiens
  misc_RNA (1)...(19): siRNA sense strand
gcacauacacuggaagaug

SEQ ID NO: 765261 - RNA, 19 nt, Homo sapiens
  misc_RNA (1)...(19): siRNA sense strand
agagaagagucaugaagaa

SEQ ID NO: 765262 - RNA, 19 nt, Homo sapiens
  misc_RNA (1)...(19): siRNA sense strand
aaaggaagccaacaauuau

SEQ ID NO: 765263 - RNA, 19 nt, Homo sapiens
  misc_RNA (1)...(19): siRNA sense strand
gaacuaaaaccuacaguga

SEQ ID NO: 765264 - RNA, 19 nt, Homo sapiens
  misc_RNA (1)...(19): siRNA sense strand
gaacaauaucuccagaaga

SEQ ID NO: 765265 - RNA, 19 nt, Homo sapiens
  misc_RNA (1)...(19): siRNA sense strand
gagaaagaaagacaaucua

SEQ ID NO: 765266 - RNA, 19 nt, Homo sapiens
  misc_RNA (1)...(19): siRNA sense strand
cagaugaacccaaaggaaa

SEQ ID NO: 765267 - RNA, 19 nt, Homo sapiens
  misc_RNA (1)...(19): siRNA sense strand
aagaguggauuggaucaua

SEQ ID NO: 765268 - RNA, 19 nt, Homo sapiens
  misc_RNA (1)...(19): siRNA sense strand
aaacacugauugacuuugu

SEQ ID NO: 765269 - RNA, 19 nt, Homo sapiens
  misc_RNA (1)...(19): siRNA sense strand
gaugaaacaguaucuaaca

SEQ ID NO: 765270 - RNA, 19 nt, Homo sapiens
  misc_RNA (1)...(19): siRNA sense strand
gcuaaaggcaauaacagaa

SEQ ID NO: 765271 - RNA, 19 nt, Homo sapiens
  misc_RNA (1)...(19): siRNA sense strand
aaacagaagccuauuugga

SEQ ID NO: 765272 - RNA, 19 nt, Homo sapiens
  misc_RNA (1)...(19): siRNA sense strand
agaaaacgaugaaacagua

SEQ ID NO: 765273 - RNA, 19 nt, Homo sapiens
  misc_RNA (1)...(19): siRNA sense strand
acagaaagccaagcacaua

SEQ ID NO: 765274 - RNA, 19 nt, Homo sapiens
  misc_RNA (1)...(19): siRNA sense strand
uuuaaccgcugaagacauu

SEQ ID NO: 765275 - RNA, 19 nt, Homo sapiens
  misc_RNA (1)...(19): siRNA sense strand
cagagaaagugacuccaau

SEQ ID NO: 765276 - RNA, 19 nt, Homo sapiens
  misc_RNA (1)...(19): siRNA sense strand
gagaagagucaugaagaaa

SEQ ID NO: 765277 - RNA, 19 nt, Homo sapiens
  misc_RNA (1)...(19): siRNA sense strand
ucuaacacauuaaccuuga

SEQ ID NO: 765278 - RNA, 19 nt, Homo sapiens
  misc_RNA (1)...(19): siRNA sense strand
ggucagagcaacuauucuu

SEQ ID NO: 765279 - RNA, 19 nt, Homo sapiens
  misc_RNA (1)...(19): siRNA sense strand
aaacauauccuccagaaaa

SEQ ID NO: 765280 - RNA, 19 nt, Homo sapiens
  misc_RNA (1)...(19): siRNA sense strand
gaagaugauggugaaauau

SEQ ID NO: 765281 - RNA, 19 nt, Homo sapiens
  misc_RNA (1)...(19): siRNA sense strand
gaaagaaacacugauuacu

SEQ ID NO: 765282 - RNA, 19 nt, Homo sapiens
  misc_RNA (1)...(19): siRNA sense strand
ccaagcacauacacuggaa

SEQ ID NO: 765283 - RNA, 19 nt, Homo sapiens
  misc_RNA (1)...(19): siRNA sense strand
gagcaacuauucuuuuguu

SEQ ID NO: 765284 - RNA, 19 nt, Homo sapiens
  misc_RNA (1)...(19): siRNA sense strand
uguggaagauguugauuca

SEQ ID NO: 765285 - RNA, 19 nt, Homo sapiens
  misc_RNA (1)...(19): siRNA sense strand
gagacuucaucaauaaaca

SEQ ID NO: 765286 - RNA, 19 nt, Homo sapiens
  misc_RNA (1)...(19): siRNA sense strand
aaacagacaguaccaagga

SEQ ID NO: 765287 - RNA, 19 nt, Homo sapiens
  misc_RNA (1)...(19): siRNA sense strand
ggaggaagccaagacaaau

SEQ ID NO: 765288 - RNA, 19 nt, Homo sapiens
  misc_RNA (1)...(19): siRNA sense strand
agaguggauuggaucauaa

SEQ ID NO: 765289 - RNA, 19 nt, Homo sapiens
  misc_RNA (1)...(19): siRNA sense strand
cagaagaagguguuuccua

SEQ ID NO: 765290 - RNA, 19 nt, Homo sapiens
  misc_RNA (1)...(19): siRNA sense strand
cccacaagcuggacugaga

SEQ ID NO: 765291 - RNA, 19 nt, Homo sapiens
  misc_RNA (1)...(19): siRNA sense strand
gccaucaagcgcauuuaua

SEQ ID NO: 765292 - RNA, 19 nt, Homo sapiens
  misc_RNA (1)...(19): siRNA sense strand
agaagcagcuaagauggaa

SEQ ID NO: 765293 - RNA, 19 nt, Homo sapiens
  misc_RNA (1)...(19): siRNA sense strand
ucaaaggaagccaacaauu

SEQ ID NO: 765294 - RNA, 19 nt, Homo sapiens
  misc_RNA (1)...(19): siRNA sense strand
cagagaagagucaugaaga

SEQ ID NO: 765295 - RNA, 19 nt, Homo sapiens
  misc_RNA (1)...(19): siRNA sense strand
caucagagaagagucauga

SEQ ID NO: 765296 - RNA, 19 nt, Homo sapiens
  misc_RNA (1)...(19): siRNA sense strand
caacaauuaugaggaggau

SEQ ID NO: 765297 - RNA, 19 nt, Homo sapiens
  misc_RNA (1)...(19): siRNA sense strand
cuaaaggcaauaacagaaa

SEQ ID NO: 765298 - RNA, 19 nt, Homo sapiens
  misc_RNA (1)...(19): siRNA sense strand
aacagaagccuauuuggaa

SEQ ID NO: 765299 - RNA, 19 nt, Homo sapiens
  misc_RNA (1)...(19): siRNA sense strand
aaagagaaagaaacacuga

SEQ ID NO: 765300 - RNA, 19 nt, Homo sapiens
  misc_RNA (1)...(19): siRNA sense strand
cuacagugaagacaacuuu

SEQ ID NO: 765301 - RNA, 19 nt, Homo sapiens
  misc_RNA (1)...(19): siRNA sense strand
caagcuggacugagaauca

SEQ ID NO: 765302 - RNA, 19 nt, Homo sapiens
  misc_RNA (1)...(19): siRNA sense strand
uaaguugaauguggaagau

SEQ ID NO: 765303 - RNA, 19 nt, Homo sapiens
  misc_RNA (1)...(19): siRNA sense strand
gaagaaacagacaguacca

SEQ ID NO: 765304 - RNA, 19 nt, Homo sapiens
  misc_RNA (1)...(19): siRNA sense strand
ugaaaacacugauugacuu

SEQ ID NO: 765305 - RNA, 19 nt, Homo sapiens
  misc_RNA (1)...(19): siRNA sense strand
auaagaagcuccccacuug

SEQ ID NO: 765306 - RNA, 19 nt, Homo sapiens
  misc_RNA (1)...(19): siRNA sense strand
cagcuaagauggaaaagga

SEQ ID NO: 765307 - RNA, 19 nt, Homo sapiens
  misc_RNA (1)...(19): siRNA sense strand
ugauugcucuucagaccaa

SEQ ID NO: 765308 - RNA, 19 nt, Homo sapiens
  misc_RNA (1)...(19): siRNA sense strand
agagaaagaaacacugauu

SEQ ID NO: 765309 - RNA, 19 nt, Homo sapiens
  misc_RNA (1)...(19): siRNA sense strand
ugaggaggaucccaauaag

SEQ ID NO: 765310 - RNA, 19 nt, Homo sapiens
  misc_RNA (1)...(19): siRNA sense strand
caacuagacgggacuccuu

SEQ ID NO: 765311 - RNA, 19 nt, Homo sapiens
  misc_RNA (1)...(19): siRNA sense strand
gagagacuucaucaauaaa

SEQ ID NO: 765312 - RNA, 19 nt, Homo sapiens
  misc_RNA (1)...(19): siRNA sense strand
agaagauuaugaccuuuca

SEQ ID NO: 765313 - RNA, 19 nt, Homo sapiens
  misc_RNA (1)...(19): siRNA sense strand
gagaaagugacuccaaugg

SEQ ID NO: 765314 - RNA, 19 nt, Homo sapiens
  misc_RNA (1)...(19): siRNA sense strand
gcuccccacuugauaauaa

SEQ ID NO: 765315 - RNA, 19 nt, Homo sapiens
  misc_RNA (1)...(19): siRNA sense strand
ccaucaagcgcauuuauag

SEQ ID NO: 765316 - RNA, 19 nt, Homo sapiens
  misc_RNA (1)...(19): siRNA sense strand
ugauugacuuugugaagau

SEQ ID NO: 765317 - RNA, 19 nt, Homo sapiens
  misc_RNA (1)...(19): siRNA sense strand
ugaagacaacuuugaggaa

SEQ ID NO: 765318 - RNA, 19 nt, Homo sapiens
  misc_RNA (1)...(19): siRNA sense strand
gauucaagcuuuccccaaa

SEQ ID NO: 765319 - RNA, 19 nt, Homo sapiens
  misc_RNA (1)...(19): siRNA sense strand
acagagccguguuugacaa

SEQ ID NO: 765320 - RNA, 19 nt, Homo sapiens
  misc_RNA (1)...(19): siRNA sense strand
gaauguggaagauguugau

SEQ ID NO: 765321 - RNA, 19 nt, Homo sapiens
  misc_RNA (1)...(19): siRNA sense strand
ugaaguagcagagguuuua

SEQ ID NO: 765322 - RNA, 19 nt, Homo sapiens
  misc_RNA (1)...(19): siRNA sense strand
gcuugaaggauuccacaaa

SEQ ID NO: 765323 - RNA, 19 nt, Homo sapiens
  misc_RNA (1)...(19): siRNA sense strand
ccaaggaagaagcagcuaa

SEQ ID NO: 765324 - RNA, 19 nt, Homo sapiens
  misc_RNA (1)...(19): siRNA sense strand
acacauuaaccuugacaaa

SEQ ID NO: 765325 - RNA, 19 nt, Homo sapiens
  misc_RNA (1)...(19): siRNA sense strand
gagccguguuugacaagau

SEQ ID NO: 765326 - RNA, 19 nt, Homo sapiens
  misc_RNA (1)...(19): siRNA sense strand
uuucaaagaugagagacuu

SEQ ID NO: 765327 - RNA, 19 nt, Homo sapiens
  misc_RNA (1)...(19): siRNA sense strand
uugaaugguugaagaaaca

SEQ ID NO: 765328 - RNA, 19 nt, Homo sapiens
  misc_RNA (1)...(19): siRNA sense strand
gaugaaaugauugcucuuc

SEQ ID NO: 765329 - RNA, 19 nt, Homo sapiens
  misc_RNA (1)...(19): siRNA sense strand
cuacuuaaucucggccuua

SEQ ID NO: 765330 - RNA, 19 nt, Homo sapiens
  misc_RNA (1)...(19): siRNA sense strand
gaaugaacagauugcugaa

SEQ ID NO: 765331 - RNA, 19 nt, Homo sapiens
  misc_RNA (1)...(19): siRNA sense strand
ugagaaagaaagacaaucu

SEQ ID NO: 765332 - RNA, 19 nt, Homo sapiens
  misc_RNA (1)...(19): siRNA sense strand
gaaaacacugauugacuuu

SEQ ID NO: 765333 - RNA, 19 nt, Homo sapiens
  misc_RNA (1)...(19): siRNA sense strand
ugacaaauggcuuggaaag

SEQ ID NO: 765334 - RNA, 19 nt, Homo sapiens
  misc_RNA (1)...(19): siRNA sense strand
ccagagaaagugacuccaa

SEQ ID NO: 765335 - RNA, 19 nt, Homo sapiens
  misc_RNA (1)...(19): siRNA sense strand
gccaggauuuaugaagaaa

SEQ ID NO: 765336 - RNA, 19 nt, Homo sapiens
  misc_RNA (1)...(19): siRNA sense strand
ugccaggauuuaugaagaa

SEQ ID NO: 765337 - RNA, 19 nt, Homo sapiens
  misc_RNA (1)...(19): siRNA sense strand
gaggaagccaagacaaauc

SEQ ID NO: 765338 - RNA, 19 nt, Homo sapiens
  misc_RNA (1)...(19): siRNA sense strand
ggaagguccugacggauga

SEQ ID NO: 765339 - RNA, 19 nt, Homo sapiens
  misc_RNA (1)...(19): siRNA sense strand
ccgaggagcucaagaaguu

SEQ ID NO: 765340 - RNA, 19 nt, Homo sapiens
  misc_RNA (1)...(19): siRNA sense strand
ggaacuggaccugcaagga

SEQ ID NO: 765341 - RNA, 19 nt, Homo sapiens
  misc_RNA (1)...(19): siRNA sense strand
caagcaagaugcggaagcu

SEQ ID NO: 765342 - RNA, 19 nt, Homo sapiens
  misc_RNA (1)...(19): siRNA sense strand
gcugcuggaugcucuguac

SEQ ID NO: 765343 - RNA, 19 nt, Homo sapiens
  misc_RNA (1)...(19): siRNA sense strand
gaggagcucaagaaguuca

SEQ ID NO: 765344 - RNA, 19 nt, Homo sapiens
  misc_RNA (1)...(19): siRNA sense strand
ggaagguccugacggauga

SEQ ID NO: 765345 - RNA, 19 nt, Homo sapiens
  misc_RNA (1)...(19): siRNA sense strand
ccgaggagcucaagaaguu

SEQ ID NO: 765346 - RNA, 19 nt, Homo sapiens
  misc_RNA (1)...(19): siRNA sense strand
ggaacuggaccugcaagga

SEQ ID NO: 765347 - RNA, 19 nt, Homo sapiens
  misc_RNA (1)...(19): siRNA sense strand
caagcaagaugcggaagcu

SEQ ID NO: 765348 - RNA, 19 nt, Homo sapiens
  misc_RNA (1)...(19): siRNA sense strand
gcugcuggaugcucuguac

SEQ ID NO: 765349 - RNA, 19 nt, Homo sapiens
  misc_RNA (1)...(19): siRNA sense strand
gaggagcucaagaaguuca

SEQ ID NO: 765350 - RNA, 19 nt, Homo sapiens
  misc_RNA (1)...(19): siRNA sense strand
ggaagguccugacggauga

SEQ ID NO: 765351 - RNA, 19 nt, Homo sapiens
  misc_RNA (1)...(19): siRNA sense strand
ccgaggagcucaagaaguu

SEQ ID NO: 765352 - RNA, 19 nt, Homo sapiens
  misc_RNA (1)...(19): siRNA sense strand
ggaacuggaccugcaagga

SEQ ID NO: 765353 - RNA, 19 nt, Homo sapiens
  misc_RNA (1)...(19): siRNA sense strand
caagcaagaugcggaagcu

SEQ ID NO: 765354 - RNA, 19 nt, Homo sapiens
  misc_RNA (1)...(19): siRNA sense strand
gcugcuggaugcucuguac

SEQ ID NO: 765355 - RNA, 19 nt, Homo sapiens
  misc_RNA (1)...(19): siRNA sense strand
gaggagcucaagaaguuca

SEQ ID NO: 765356 - RNA, 19 nt, Homo sapiens
  misc_RNA (1)...(19): siRNA sense strand
gaccucagcucuugcauca

SEQ ID NO: 765357 - RNA, 19 nt, Homo sapiens
  misc_RNA (1)...(19): siRNA sense strand
ggagcaggauagugccuuu

SEQ ID NO: 765358 - RNA, 19 nt, Homo sapiens
  misc_RNA (1)...(19): siRNA sense strand
ggaggaggaguuccaguuu

SEQ ID NO: 765359 - RNA, 19 nt, Homo sapiens
  misc_RNA (1)...(19): siRNA sense strand
gaggaggaguuccaguuuc

SEQ ID NO: 765360 - RNA, 19 nt, Homo sapiens
  misc_RNA (1)...(19): siRNA sense strand
ggaaagaugcagcuguauc

SEQ ID NO: 765361 - RNA, 19 nt, Homo sapiens
  misc_RNA (1)...(19): siRNA sense strand
gagcucaagugcgacauca

SEQ ID NO: 765362 - RNA, 19 nt, Homo sapiens
  misc_RNA (1)...(19): siRNA sense strand
gcagcuguauccaagaaag

SEQ ID NO: 765363 - RNA, 19 nt, Homo sapiens
  misc_RNA (1)...(19): siRNA sense strand
ggggaaagaugcagcugua

SEQ ID NO: 765364 - RNA, 19 nt, Homo sapiens
  misc_RNA (1)...(19): siRNA sense strand
gaaagaugcagcuguaucc

SEQ ID NO: 765365 - RNA, 19 nt, Homo sapiens
  misc_RNA (1)...(19): siRNA sense strand
cgaagcugcugccuugucu

SEQ ID NO: 765366 - RNA, 19 nt, Homo sapiens
  misc_RNA (1)...(19): siRNA sense strand
ugcagaggaugaagugcua

SEQ ID NO: 765367 - RNA, 19 nt, Homo sapiens
  misc_RNA (1)...(19): siRNA sense strand
cgacaucagcgcagagauc

SEQ ID NO: 765368 - RNA, 19 nt, Homo sapiens
  misc_RNA (1)...(19): siRNA sense strand
gggacccuauugacguuga

SEQ ID NO: 765369 - RNA, 19 nt, Homo sapiens
  misc_RNA (1)...(19): siRNA sense strand
ugcaggaccucagcucuug

SEQ ID NO: 765370 - RNA, 19 nt, Homo sapiens
  misc_RNA (1)...(19): siRNA sense strand
cgcccuggauaacgucuuu

SEQ ID NO: 765371 - RNA, 19 nt, Homo sapiens
  misc_RNA (1)...(19): siRNA sense strand
gccgacuucuggugcuuug

SEQ ID NO: 765372 - RNA, 19 nt, Homo sapiens
  misc_RNA (1)...(19): siRNA sense strand
gcgcuggugcagaggauga

SEQ ID NO: 765373 - RNA, 19 nt, Homo sapiens
  misc_RNA (1)...(19): siRNA sense strand
cggaggaggaguuccaguu

SEQ ID NO: 765374 - RNA, 19 nt, Homo sapiens
  misc_RNA (1)...(19): siRNA sense strand
ccgauggcuucgacgaguu

SEQ ID NO: 765375 - RNA, 19 nt, Homo sapiens
  misc_RNA (1)...(19): siRNA sense strand
aggaggaguuccaguuucu

SEQ ID NO: 765376 - RNA, 19 nt, Homo sapiens
  misc_RNA (1)...(19): siRNA sense strand
augcagcuguauccaagaa

SEQ ID NO: 765377 - RNA, 19 nt, Homo sapiens
  misc_RNA (1)...(19): siRNA sense strand
gguaccagcgcgacuacga

SEQ ID NO: 765378 - RNA, 19 nt, Homo sapiens
  misc_RNA (1)...(19): siRNA sense strand
gaccucagcucuugcauca

SEQ ID NO: 765379 - RNA, 19 nt, Homo sapiens
  misc_RNA (1)...(19): siRNA sense strand
ggagcaggauagugccuuu

SEQ ID NO: 765380 - RNA, 19 nt, Homo sapiens
  misc_RNA (1)...(19): siRNA sense strand
ggaggaggaguuccaguuu

SEQ ID NO: 765381 - RNA, 19 nt, Homo sapiens
  misc_RNA (1)...(19): siRNA sense strand
gaggaggaguuccaguuuc

SEQ ID NO: 765382 - RNA, 19 nt, Homo sapiens
  misc_RNA (1)...(19): siRNA sense strand
ggaaagaugcagcuguauc

SEQ ID NO: 765383 - RNA, 19 nt, Homo sapiens
  misc_RNA (1)...(19): siRNA sense strand
gagcucaagugcgacauca

SEQ ID NO: 765384 - RNA, 19 nt, Homo sapiens
  misc_RNA (1)...(19): siRNA sense strand
gcagcuguauccaagaaag

SEQ ID NO: 765385 - RNA, 19 nt, Homo sapiens
  misc_RNA (1)...(19): siRNA sense strand
ggggaaagaugcagcugua

SEQ ID NO: 765386 - RNA, 19 nt, Homo sapiens
  misc_RNA (1)...(19): siRNA sense strand
gaaagaugcagcuguaucc

SEQ ID NO: 765387 - RNA, 19 nt, Homo sapiens
  misc_RNA (1)...(19): siRNA sense strand
cgaagcugcugccuugucu

SEQ ID NO: 765388 - RNA, 19 nt, Homo sapiens
  misc_RNA (1)...(19): siRNA sense strand
ugcagaggaugaagugcua

SEQ ID NO: 765389 - RNA, 19 nt, Homo sapiens
  misc_RNA (1)...(19): siRNA sense strand
cgacaucagcgcagagauc

SEQ ID NO: 765390 - RNA, 19 nt, Homo sapiens
  misc_RNA (1)...(19): siRNA sense strand
gggacccuauugacguuga

SEQ ID NO: 765391 - RNA, 19 nt, Homo sapiens
  misc_RNA (1)...(19): siRNA sense strand
ugcaggaccucagcucuug

SEQ ID NO: 765392 - RNA, 19 nt, Homo sapiens
  misc_RNA (1)...(19): siRNA sense strand
cgcccuggauaacgucuuu

SEQ ID NO: 765393 - RNA, 19 nt, Homo sapiens
  misc_RNA (1)...(19): siRNA sense strand
gccgacuucuggugcuuug

SEQ ID NO: 765394 - RNA, 19 nt, Homo sapiens
  misc_RNA (1)...(19): siRNA sense strand
gcgcuggugcagaggauga

SEQ ID NO: 765395 - RNA, 19 nt, Homo sapiens
  misc_RNA (1)...(19): siRNA sense strand
cggaggaggaguuccaguu

SEQ ID NO: 765396 - RNA, 19 nt, Homo sapiens
  misc_RNA (1)...(19): siRNA sense strand
ccgauggcuucgacgaguu

SEQ ID NO: 765397 - RNA, 19 nt, Homo sapiens
  misc_RNA (1)...(19): siRNA sense strand
aggaggaguuccaguuucu

SEQ ID NO: 765398 - RNA, 19 nt, Homo sapiens
  misc_RNA (1)...(19): siRNA sense strand
augcagcuguauccaagaa

SEQ ID NO: 765399 - RNA, 19 nt, Homo sapiens
  misc_RNA (1)...(19): siRNA sense strand
gguaccagcgcgacuacga

SEQ ID NO: 765400 - RNA, 19 nt, Homo sapiens
  misc_RNA (1)...(19): siRNA sense strand
gaccucagcucuugcauca

SEQ ID NO: 765401 - RNA, 19 nt, Homo sapiens
  misc_RNA (1)...(19): siRNA sense strand
ggagcaggauagugccuuu

SEQ ID NO: 765402 - RNA, 19 nt, Homo sapiens
  misc_RNA (1)...(19): siRNA sense strand
ggaggaggaguuccaguuu

SEQ ID NO: 765403 - RNA, 19 nt, Homo sapiens
  misc_RNA (1)...(19): siRNA sense strand
gaggaggaguuccaguuuc

SEQ ID NO: 765404 - RNA, 19 nt, Homo sapiens
  misc_RNA (1)...(19): siRNA sense strand
ggaaagaugcagcuguauc

SEQ ID NO: 765405 - RNA, 19 nt, Homo sapiens
  misc_RNA (1)...(19): siRNA sense strand
gagcucaagugcgacauca

SEQ ID NO: 765406 - RNA, 19 nt, Homo sapiens
  misc_RNA (1)...(19): siRNA sense strand
gcagcuguauccaagaaag

SEQ ID NO: 765407 - RNA, 19 nt, Homo sapiens
  misc_RNA (1)...(19): siRNA sense strand
ggggaaagaugcagcugua

SEQ ID NO: 765408 - RNA, 19 nt, Homo sapiens
  misc_RNA (1)...(19): siRNA sense strand
gaaagaugcagcuguaucc

SEQ ID NO: 765409 - RNA, 19 nt, Homo sapiens
  misc_RNA (1)...(19): siRNA sense strand
cgaagcugcugccuugucu

SEQ ID NO: 765410 - RNA, 19 nt, Homo sapiens
  misc_RNA (1)...(19): siRNA sense strand
ugcagaggaugaagugcua

SEQ ID NO: 765411 - RNA, 19 nt, Homo sapiens
  misc_RNA (1)...(19): siRNA sense strand
cgacaucagcgcagagauc

SEQ ID NO: 765412 - RNA, 19 nt, Homo sapiens
  misc_RNA (1)...(19): siRNA sense strand
gggacccuauugacguuga

SEQ ID NO: 765413 - RNA, 19 nt, Homo sapiens
  misc_RNA (1)...(19): siRNA sense strand
ugcaggaccucagcucuug

SEQ ID NO: 765414 - RNA, 19 nt, Homo sapiens
  misc_RNA (1)...(19): siRNA sense strand
cgcccuggauaacgucuuu

SEQ ID NO: 765415 - RNA, 19 nt, Homo sapiens
  misc_RNA (1)...(19): siRNA sense strand
gccgacuucuggugcuuug

SEQ ID NO: 765416 - RNA, 19 nt, Homo sapiens
  misc_RNA (1)...(19): siRNA sense strand
gcgcuggugcagaggauga

SEQ ID NO: 765417 - RNA, 19 nt, Homo sapiens
  misc_RNA (1)...(19): siRNA sense strand
cggaggaggaguuccaguu

SEQ ID NO: 765418 - RNA, 19 nt, Homo sapiens
  misc_RNA (1)...(19): siRNA sense strand
ccgauggcuucgacgaguu

SEQ ID NO: 765419 - RNA, 19 nt, Homo sapiens
  misc_RNA (1)...(19): siRNA sense strand
aggaggaguuccaguuucu

SEQ ID NO: 765420 - RNA, 19 nt, Homo sapiens
  misc_RNA (1)...(19): siRNA sense strand
augcagcuguauccaagaa

SEQ ID NO: 765421 - RNA, 19 nt, Homo sapiens
  misc_RNA (1)...(19): siRNA sense strand
gguaccagcgcgacuacga

SEQ ID NO: 765422 - RNA, 19 nt, Homo sapiens
  misc_RNA (1)...(19): siRNA sense strand
gaccucagcucuugcauca

SEQ ID NO: 765423 - RNA, 19 nt, Homo sapiens
  misc_RNA (1)...(19): siRNA sense strand
ggagcaggauagugccuuu

SEQ ID NO: 765424 - RNA, 19 nt, Homo sapiens
  misc_RNA (1)...(19): siRNA sense strand
ggaggaggaguuccaguuu

SEQ ID NO: 765425 - RNA, 19 nt, Homo sapiens
  misc_RNA (1)...(19): siRNA sense strand
gaggaggaguuccaguuuc

SEQ ID NO: 765426 - RNA, 19 nt, Homo sapiens
  misc_RNA (1)...(19): siRNA sense strand
ggaaagaugcagcuguauc

SEQ ID NO: 765427 - RNA, 19 nt, Homo sapiens
  misc_RNA (1)...(19): siRNA sense strand
gagcucaagugcgacauca

SEQ ID NO: 765428 - RNA, 19 nt, Homo sapiens
  misc_RNA (1)...(19): siRNA sense strand
gcagcuguauccaagaaag

SEQ ID NO: 765429 - RNA, 19 nt, Homo sapiens
  misc_RNA (1)...(19): siRNA sense strand
ggggaaagaugcagcugua

SEQ ID NO: 765430 - RNA, 19 nt, Homo sapiens
  misc_RNA (1)...(19): siRNA sense strand
gaaagaugcagcuguaucc

SEQ ID NO: 765431 - RNA, 19 nt, Homo sapiens
  misc_RNA (1)...(19): siRNA sense strand
cgaagcugcugccuugucu

SEQ ID NO: 765432 - RNA, 19 nt, Homo sapiens
  misc_RNA (1)...(19): siRNA sense strand
ugcagaggaugaagugcua

SEQ ID NO: 765433 - RNA, 19 nt, Homo sapiens
  misc_RNA (1)...(19): siRNA sense strand
cgacaucagcgcagagauc

SEQ ID NO: 765434 - RNA, 19 nt, Homo sapiens
  misc_RNA (1)...(19): siRNA sense strand
gggacccuauugacguuga

SEQ ID NO: 765435 - RNA, 19 nt, Homo sapiens
  misc_RNA (1)...(19): siRNA sense strand
ugcaggaccucagcucuug

SEQ ID NO: 765436 - RNA, 19 nt, Homo sapiens
  misc_RNA (1)...(19): siRNA sense strand
cgcccuggauaacgucuuu

SEQ ID NO: 765437 - RNA, 19 nt, Homo sapiens
  misc_RNA (1)...(19): siRNA sense strand
gccgacuucuggugcuuug

SEQ ID NO: 765438 - RNA, 19 nt, Homo sapiens
  misc_RNA (1)...(19): siRNA sense strand
gcgcuggugcagaggauga

SEQ ID NO: 765439 - RNA, 19 nt, Homo sapiens
  misc_RNA (1)...(19): siRNA sense strand
cggaggaggaguuccaguu

SEQ ID NO: 765440 - RNA, 19 nt, Homo sapiens
  misc_RNA (1)...(19): siRNA sense strand
ccgauggcuucgacgaguu

SEQ ID NO: 765441 - RNA, 19 nt, Homo sapiens
  misc_RNA (1)...(19): siRNA sense strand
aggaggaguuccaguuucu

SEQ ID NO: 765442 - RNA, 19 nt, Homo sapiens
  misc_RNA (1)...(19): siRNA sense strand
augcagcuguauccaagaa

SEQ ID NO: 765443 - RNA, 19 nt, Homo sapiens
  misc_RNA (1)...(19): siRNA sense strand
gguaccagcgcgacuacga

SEQ ID NO: 765444 - RNA, 19 nt, Homo sapiens
  misc_RNA (1)...(19): siRNA sense strand
gaccucagcucuugcauca

SEQ ID NO: 765445 - RNA, 19 nt, Homo sapiens
  misc_RNA (1)...(19): siRNA sense strand
ggagcaggauagugccuuu

SEQ ID NO: 765446 - RNA, 19 nt, Homo sapiens
  misc_RNA (1)...(19): siRNA sense strand
ggaggaggaguuccaguuu

SEQ ID NO: 765447 - RNA, 19 nt, Homo sapiens
  misc_RNA (1)...(19): siRNA sense strand
gaggaggaguuccaguuuc

SEQ ID NO: 765448 - RNA, 19 nt, Homo sapiens
  misc_RNA (1)...(19): siRNA sense strand
ggaaagaugcagcuguauc

SEQ ID NO: 765449 - RNA, 19 nt, Homo sapiens
  misc_RNA (1)...(19): siRNA sense strand
gagcucaagugcgacauca

SEQ ID NO: 765450 - RNA, 19 nt, Homo sapiens
  misc_RNA (1)...(19): siRNA sense strand
gcagcuguauccaagaaag

SEQ ID NO: 765451 - RNA, 19 nt, Homo sapiens
  misc_RNA (1)...(19): siRNA sense strand
ggggaaagaugcagcugua

SEQ ID NO: 765452 - RNA, 19 nt, Homo sapiens
  misc_RNA (1)...(19): siRNA sense strand
gaaagaugcagcuguaucc

SEQ ID NO: 765453 - RNA, 19 nt, Homo sapiens
  misc_RNA (1)...(19): siRNA sense strand
cgaagcugcugccuugucu

SEQ ID NO: 765454 - RNA, 19 nt, Homo sapiens
  misc_RNA (1)...(19): siRNA sense strand
ugcagaggaugaagugcua

SEQ ID NO: 765455 - RNA, 19 nt, Homo sapiens
  misc_RNA (1)...(19): siRNA sense strand
cgacaucagcgcagagauc

SEQ ID NO: 765456 - RNA, 19 nt, Homo sapiens
  misc_RNA (1)...(19): siRNA sense strand
gggacccuauugacguuga

SEQ ID NO: 765457 - RNA, 19 nt, Homo sapiens
  misc_RNA (1)...(19): siRNA sense strand
ugcaggaccucagcucuug

SEQ ID NO: 765458 - RNA, 19 nt, Homo sapiens
  misc_RNA (1)...(19): siRNA sense strand
cgcccuggauaacgucuuu

SEQ ID NO: 765459 - RNA, 19 nt, Homo sapiens
  misc_RNA (1)...(19): siRNA sense strand
gccgacuucuggugcuuug

SEQ ID NO: 765460 - RNA, 19 nt, Homo sapiens
  misc_RNA (1)...(19): siRNA sense strand
gcgcuggugcagaggauga

SEQ ID NO: 765461 - RNA, 19 nt, Homo sapiens
  misc_RNA (1)...(19): siRNA sense strand
cggaggaggaguuccaguu

SEQ ID NO: 765462 - RNA, 19 nt, Homo sapiens
  misc_RNA (1)...(19): siRNA sense strand
ccgauggcuucgacgaguu

SEQ ID NO: 765463 - RNA, 19 nt, Homo sapiens
  misc_RNA (1)...(19): siRNA sense strand
aggaggaguuccaguuucu

SEQ ID NO: 765464 - RNA, 19 nt, Homo sapiens
  misc_RNA (1)...(19): siRNA sense strand
augcagcuguauccaagaa

SEQ ID NO: 765465 - RNA, 19 nt, Homo sapiens
  misc_RNA (1)...(19): siRNA sense strand
gguaccagcgcgacuacga

SEQ ID NO: 765466 - RNA, 19 nt, Homo sapiens
  misc_RNA (1)...(19): siRNA sense strand
gaccucagcucuugcauca

SEQ ID NO: 765467 - RNA, 19 nt, Homo sapiens
  misc_RNA (1)...(19): siRNA sense strand
ggagcaggauagugccuuu

SEQ ID NO: 765468 - RNA, 19 nt, Homo sapiens
  misc_RNA (1)...(19): siRNA sense strand
ggaggaggaguuccaguuu

SEQ ID NO: 765469 - RNA, 19 nt, Homo sapiens
  misc_RNA (1)...(19): siRNA sense strand
gaggaggaguuccaguuuc

SEQ ID NO: 765470 - RNA, 19 nt, Homo sapiens
  misc_RNA (1)...(19): siRNA sense strand
ggaaagaugcagcuguauc

SEQ ID NO: 765471 - RNA, 19 nt, Homo sapiens
  misc_RNA (1)...(19): siRNA sense strand
gagcucaagugcgacauca

SEQ ID NO: 765472 - RNA, 19 nt, Homo sapiens
  misc_RNA (1)...(19): siRNA sense strand
gcagcuguauccaagaaag

SEQ ID NO: 765473 - RNA, 19 nt, Homo sapiens
  misc_RNA (1)...(19): siRNA sense strand
ggggaaagaugcagcugua

SEQ ID NO: 765474 - RNA, 19 nt, Homo sapiens
  misc_RNA (1)...(19): siRNA sense strand
gaaagaugcagcuguaucc

SEQ ID NO: 765475 - RNA, 19 nt, Homo sapiens
  misc_RNA (1)...(19): siRNA sense strand
cgaagcugcugccuugucu

SEQ ID NO: 765476 - RNA, 19 nt, Homo sapiens
  misc_RNA (1)...(19): siRNA sense strand
ugcagaggaugaagugcua

SEQ ID NO: 765477 - RNA, 19 nt, Homo sapiens
  misc_RNA (1)...(19): siRNA sense strand
cgacaucagcgcagagauc

SEQ ID NO: 765478 - RNA, 19 nt, Homo sapiens
  misc_RNA (1)...(19): siRNA sense strand
gggacccuauugacguuga

SEQ ID NO: 765479 - RNA, 19 nt, Homo sapiens
  misc_RNA (1)...(19): siRNA sense strand
ugcaggaccucagcucuug

SEQ ID NO: 765480 - RNA, 19 nt, Homo sapiens
  misc_RNA (1)...(19): siRNA sense strand
cgcccuggauaacgucuuu

SEQ ID NO: 765481 - RNA, 19 nt, Homo sapiens
  misc_RNA (1)...(19): siRNA sense strand
gccgacuucuggugcuuug

SEQ ID NO: 765482 - RNA, 19 nt, Homo sapiens
  misc_RNA (1)...(19): siRNA sense strand
gcgcuggugcagaggauga

SEQ ID NO: 765483 - RNA, 19 nt, Homo sapiens
  misc_RNA (1)...(19): siRNA sense strand
cggaggaggaguuccaguu

SEQ ID NO: 765484 - RNA, 19 nt, Homo sapiens
  misc_RNA (1)...(19): siRNA sense strand
ccgauggcuucgacgaguu

SEQ ID NO: 765485 - RNA, 19 nt, Homo sapiens
  misc_RNA (1)...(19): siRNA sense strand
aggaggaguuccaguuucu

SEQ ID NO: 765486 - RNA, 19 nt, Homo sapiens
  misc_RNA (1)...(19): siRNA sense strand
augcagcuguauccaagaa

SEQ ID NO: 765487 - RNA, 19 nt, Homo sapiens
  misc_RNA (1)...(19): siRNA sense strand
gguaccagcgcgacuacga

SEQ ID NO: 765488 - RNA, 19 nt, Homo sapiens
  misc_RNA (1)...(19): siRNA sense strand
gaccucagcucuugcauca

SEQ ID NO: 765489 - RNA, 19 nt, Homo sapiens
  misc_RNA (1)...(19): siRNA sense strand
ggagcaggauagugccuuu

SEQ ID NO: 765490 - RNA, 19 nt, Homo sapiens
  misc_RNA (1)...(19): siRNA sense strand
ggaggaggaguuccaguuu

SEQ ID NO: 765491 - RNA, 19 nt, Homo sapiens
  misc_RNA (1)...(19): siRNA sense strand
gaggaggaguuccaguuuc

SEQ ID NO: 765492 - RNA, 19 nt, Homo sapiens
  misc_RNA (1)...(19): siRNA sense strand
ggaaagaugcagcuguauc

SEQ ID NO: 765493 - RNA, 19 nt, Homo sapiens
  misc_RNA (1)...(19): siRNA sense strand
gagcucaagugcgacauca

SEQ ID NO: 765494 - RNA, 19 nt, Homo sapiens
  misc_RNA (1)...(19): siRNA sense strand
gcagcuguauccaagaaag

SEQ ID NO: 765495 - RNA, 19 nt, Homo sapiens
  misc_RNA (1)...(19): siRNA sense strand
ggggaaagaugcagcugua

SEQ ID NO: 765496 - RNA, 19 nt, Homo sapiens
  misc_RNA (1)...(19): siRNA sense strand
gaaagaugcagcuguaucc

SEQ ID NO: 765497 - RNA, 19 nt, Homo sapiens
  misc_RNA (1)...(19): siRNA sense strand
cgaagcugcugccuugucu

SEQ ID NO: 765498 - RNA, 19 nt, Homo sapiens
  misc_RNA (1)...(19): siRNA sense strand
ugcagaggaugaagugcua

SEQ ID NO: 765499 - RNA, 19 nt, Homo sapiens
  misc_RNA (1)...(19): siRNA sense strand
cgacaucagcgcagagauc

SEQ ID NO: 765500 - RNA, 19 nt, Homo sapiens
  misc_RNA (1)...(19): siRNA sense strand
gggacccuauugacguuga

SEQ ID NO: 765501 - RNA, 19 nt, Homo sapiens
  misc_RNA (1)...(19): siRNA sense strand
ugcaggaccucagcucuug

SEQ ID NO: 765502 - RNA, 19 nt, Homo sapiens
  misc_RNA (1)...(19): siRNA sense strand
cgcccuggauaacgucuuu

SEQ ID NO: 765503 - RNA, 19 nt, Homo sapiens
  misc_RNA (1)...(19): siRNA sense strand
gccgacuucuggugcuuug

SEQ ID NO: 765504 - RNA, 19 nt, Homo sapiens
  misc_RNA (1)...(19): siRNA sense strand
gcgcuggugcagaggauga

SEQ ID NO: 765505 - RNA, 19 nt, Homo sapiens
  misc_RNA (1)...(19): siRNA sense strand
cggaggaggaguuccaguu

SEQ ID NO: 765506 - RNA, 19 nt, Homo sapiens
  misc_RNA (1)...(19): siRNA sense strand
ccgauggcuucgacgaguu

SEQ ID NO: 765507 - RNA, 19 nt, Homo sapiens
  misc_RNA (1)...(19): siRNA sense strand
aggaggaguuccaguuucu

SEQ ID NO: 765508 - RNA, 19 nt, Homo sapiens
  misc_RNA (1)...(19): siRNA sense strand
augcagcuguauccaagaa

SEQ ID NO: 765509 - RNA, 19 nt, Homo sapiens
  misc_RNA (1)...(19): siRNA sense strand
gguaccagcgcgacuacga

SEQ ID NO: 765510 - RNA, 19 nt, Homo sapiens
  misc_RNA (1)...(19): siRNA sense strand
gaccucagcucuugcauca

SEQ ID NO: 765511 - RNA, 19 nt, Homo sapiens
  misc_RNA (1)...(19): siRNA sense strand
ggagcaggauagugccuuu

SEQ ID NO: 765512 - RNA, 19 nt, Homo sapiens
  misc_RNA (1)...(19): siRNA sense strand
ggaggaggaguuccaguuu

SEQ ID NO: 765513 - RNA, 19 nt, Homo sapiens
  misc_RNA (1)...(19): siRNA sense strand
gaggaggaguuccaguuuc

SEQ ID NO: 765514 - RNA, 19 nt, Homo sapiens
  misc_RNA (1)...(19): siRNA sense strand
ggaaagaugcagcuguauc

SEQ ID NO: 765515 - RNA, 19 nt, Homo sapiens
  misc_RNA (1)...(19): siRNA sense strand
gagcucaagugcgacauca

SEQ ID NO: 765516 - RNA, 19 nt, Homo sapiens
  misc_RNA (1)...(19): siRNA sense strand
gcagcuguauccaagaaag

SEQ ID NO: 765517 - RNA, 19 nt, Homo sapiens
  misc_RNA (1)...(19): siRNA sense strand
ggggaaagaugcagcugua

SEQ ID NO: 765518 - RNA, 19 nt, Homo sapiens
  misc_RNA (1)...(19): siRNA sense strand
gaaagaugcagcuguaucc

SEQ ID NO: 765519 - RNA, 19 nt, Homo sapiens
  misc_RNA (1)...(19): siRNA sense strand
cgaagcugcugccuugucu

SEQ ID NO: 765520 - RNA, 19 nt, Homo sapiens
  misc_RNA (1)...(19): siRNA sense strand
ugcagaggaugaagugcua

SEQ ID NO: 765521 - RNA, 19 nt, Homo sapiens
  misc_RNA (1)...(19): siRNA sense strand
cgacaucagcgcagagauc

SEQ ID NO: 765522 - RNA, 19 nt, Homo sapiens
  misc_RNA (1)...(19): siRNA sense strand
gggacccuauugacguuga

SEQ ID NO: 765523 - RNA, 19 nt, Homo sapiens
  misc_RNA (1)...(19): siRNA sense strand
ugcaggaccucagcucuug

SEQ ID NO: 765524 - RNA, 19 nt, Homo sapiens
  misc_RNA (1)...(19): siRNA sense strand
cgcccuggauaacgucuuu

SEQ ID NO: 765525 - RNA, 19 nt, Homo sapiens
  misc_RNA (1)...(19): siRNA sense strand
gccgacuucuggugcuuug

SEQ ID NO: 765526 - RNA, 19 nt, Homo sapiens
  misc_RNA (1)...(19): siRNA sense strand
gcgcuggugcagaggauga

SEQ ID NO: 765527 - RNA, 19 nt, Homo sapiens
  misc_RNA (1)...(19): siRNA sense strand
cggaggaggaguuccaguu

SEQ ID NO: 765528 - RNA, 19 nt, Homo sapiens
  misc_RNA (1)...(19): siRNA sense strand
ccgauggcuucgacgaguu

SEQ ID NO: 765529 - RNA, 19 nt, Homo sapiens
  misc_RNA (1)...(19): siRNA sense strand
aggaggaguuccaguuucu

SEQ ID NO: 765530 - RNA, 19 nt, Homo sapiens
  misc_RNA (1)...(19): siRNA sense strand
augcagcuguauccaagaa

SEQ ID NO: 765531 - RNA, 19 nt, Homo sapiens
  misc_RNA (1)...(19): siRNA sense strand
gguaccagcgcgacuacga

SEQ ID NO: 765532 - RNA, 19 nt, Homo sapiens
  misc_RNA (1)...(19): siRNA sense strand
gaccucagcucuugcauca

SEQ ID NO: 765533 - RNA, 19 nt, Homo sapiens
  misc_RNA (1)...(19): siRNA sense strand
ggagcaggauagugccuuu

SEQ ID NO: 765534 - RNA, 19 nt, Homo sapiens
  misc_RNA (1)...(19): siRNA sense strand
ggaggaggaguuccaguuu

SEQ ID NO: 765535 - RNA, 19 nt, Homo sapiens
  misc_RNA (1)...(19): siRNA sense strand
gaggaggaguuccaguuuc

SEQ ID NO: 765536 - RNA, 19 nt, Homo sapiens
  misc_RNA (1)...(19): siRNA sense strand
ggaaagaugcagcuguauc

SEQ ID NO: 765537 - RNA, 19 nt, Homo sapiens
  misc_RNA (1)...(19): siRNA sense strand
gagcucaagugcgacauca

SEQ ID NO: 765538 - RNA, 19 nt, Homo sapiens
  misc_RNA (1)...(19): siRNA sense strand
gcagcuguauccaagaaag

SEQ ID NO: 765539 - RNA, 19 nt, Homo sapiens
  misc_RNA (1)...(19): siRNA sense strand
ggggaaagaugcagcugua

SEQ ID NO: 765540 - RNA, 19 nt, Homo sapiens
  misc_RNA (1)...(19): siRNA sense strand
gaaagaugcagcuguaucc

SEQ ID NO: 765541 - RNA, 19 nt, Homo sapiens
  misc_RNA (1)...(19): siRNA sense strand
cgaagcugcugccuugucu

SEQ ID NO: 765542 - RNA, 19 nt, Homo sapiens
  misc_RNA (1)...(19): siRNA sense strand
ugcagaggaugaagugcua

SEQ ID NO: 765543 - RNA, 19 nt, Homo sapiens
  misc_RNA (1)...(19): siRNA sense strand
cgacaucagcgcagagauc

SEQ ID NO: 765544 - RNA, 19 nt, Homo sapiens
  misc_RNA (1)...(19): siRNA sense strand
gggacccuauugacguuga

SEQ ID NO: 765545 - RNA, 19 nt, Homo sapiens
  misc_RNA (1)...(19): siRNA sense strand
ugcaggaccucagcucuug

SEQ ID NO: 765546 - RNA, 19 nt, Homo sapiens
  misc_RNA (1)...(19): siRNA sense strand
cgcccuggauaacgucuuu

SEQ ID NO: 765547 - RNA, 19 nt, Homo sapiens
  misc_RNA (1)...(19): siRNA sense strand
gccgacuucuggugcuuug

SEQ ID NO: 765548 - RNA, 19 nt, Homo sapiens
  misc_RNA (1)...(19): siRNA sense strand
gcgcuggugcagaggauga

SEQ ID NO: 765549 - RNA, 19 nt, Homo sapiens
  misc_RNA (1)...(19): siRNA sense strand
cggaggaggaguuccaguu

SEQ ID NO: 765550 - RNA, 19 nt, Homo sapiens
  misc_RNA (1)...(19): siRNA sense strand
ccgauggcuucgacgaguu

SEQ ID NO: 765551 - RNA, 19 nt, Homo sapiens
  misc_RNA (1)...(19): siRNA sense strand
aggaggaguuccaguuucu

SEQ ID NO: 765552 - RNA, 19 nt, Homo sapiens
  misc_RNA (1)...(19): siRNA sense strand
augcagcuguauccaagaa

SEQ ID NO: 765553 - RNA, 19 nt, Homo sapiens
  misc_RNA (1)...(19): siRNA sense strand
gguaccagcgcgacuacga

SEQ ID NO: 765554 - RNA, 19 nt, Homo sapiens
  misc_RNA (1)...(19): siRNA sense strand
gaccucagcucuugcauca

SEQ ID NO: 765555 - RNA, 19 nt, Homo sapiens
  misc_RNA (1)...(19): siRNA sense strand
ggagcaggauagugccuuu

SEQ ID NO: 765556 - RNA, 19 nt, Homo sapiens
  misc_RNA (1)...(19): siRNA sense strand
ggaggaggaguuccaguuu

SEQ ID NO: 765557 - RNA, 19 nt, Homo sapiens
  misc_RNA (1)...(19): siRNA sense strand
gaggaggaguuccaguuuc

SEQ ID NO: 765558 - RNA, 19 nt, Homo sapiens
  misc_RNA (1)...(19): siRNA sense strand
ggaaagaugcagcuguauc

SEQ ID NO: 765559 - RNA, 19 nt, Homo sapiens
  misc_RNA (1)...(19): siRNA sense strand
gagcucaagugcgacauca

SEQ ID NO: 765560 - RNA, 19 nt, Homo sapiens
  misc_RNA (1)...(19): siRNA sense strand
gcagcuguauccaagaaag

SEQ ID NO: 765561 - RNA, 19 nt, Homo sapiens
  misc_RNA (1)...(19): siRNA sense strand
ggggaaagaugcagcugua

SEQ ID NO: 765562 - RNA, 19 nt, Homo sapiens
  misc_RNA (1)...(19): siRNA sense strand
gaaagaugcagcuguaucc

SEQ ID NO: 765563 - RNA, 19 nt, Homo sapiens
  misc_RNA (1)...(19): siRNA sense strand
cgaagcugcugccuugucu

SEQ ID NO: 765564 - RNA, 19 nt, Homo sapiens
  misc_RNA (1)...(19): siRNA sense strand
ugcagaggaugaagugcua

SEQ ID NO: 765565 - RNA, 19 nt, Homo sapiens
  misc_RNA (1)...(19): siRNA sense strand
cgacaucagcgcagagauc

SEQ ID NO: 765566 - RNA, 19 nt, Homo sapiens
  misc_RNA (1)...(19): siRNA sense strand
gggacccuauugacguuga

SEQ ID NO: 765567 - RNA, 19 nt, Homo sapiens
  misc_RNA (1)...(19): siRNA sense strand
ugcaggaccucagcucuug

SEQ ID NO: 765568 - RNA, 19 nt, Homo sapiens
  misc_RNA (1)...(19): siRNA sense strand
cgcccuggauaacgucuuu

SEQ ID NO: 765569 - RNA, 19 nt, Homo sapiens
  misc_RNA (1)...(19): siRNA sense strand
gccgacuucuggugcuuug

SEQ ID NO: 765570 - RNA, 19 nt, Homo sapiens
  misc_RNA (1)...(19): siRNA sense strand
gcgcuggugcagaggauga

SEQ ID NO: 765571 - RNA, 19 nt, Homo sapiens
  misc_RNA (1)...(19): siRNA sense strand
cggaggaggaguuccaguu

SEQ ID NO: 765572 - RNA, 19 nt, Homo sapiens
  misc_RNA (1)...(19): siRNA sense strand
ccgauggcuucgacgaguu

SEQ ID NO: 765573 - RNA, 19 nt, Homo sapiens
  misc_RNA (1)...(19): siRNA sense strand
aggaggaguuccaguuucu

SEQ ID NO: 765574 - RNA, 19 nt, Homo sapiens
  misc_RNA (1)...(19): siRNA sense strand
augcagcuguauccaagaa

SEQ ID NO: 765575 - RNA, 19 nt, Homo sapiens
  misc_RNA (1)...(19): siRNA sense strand
gguaccagcgcgacuacga

SEQ ID NO: 765576 - RNA, 19 nt, Homo sapiens
  misc_RNA (1)...(19): siRNA sense strand
gaccucagcucuugcauca

SEQ ID NO: 765577 - RNA, 19 nt, Homo sapiens
  misc_RNA (1)...(19): siRNA sense strand
ggagcaggauagugccuuu

SEQ ID NO: 765578 - RNA, 19 nt, Homo sapiens
  misc_RNA (1)...(19): siRNA sense strand
ggaggaggaguuccaguuu

SEQ ID NO: 765579 - RNA, 19 nt, Homo sapiens
  misc_RNA (1)...(19): siRNA sense strand
gaggaggaguuccaguuuc

SEQ ID NO: 765580 - RNA, 19 nt, Homo sapiens
  misc_RNA (1)...(19): siRNA sense strand
ggaaagaugcagcuguauc

SEQ ID NO: 765581 - RNA, 19 nt, Homo sapiens
  misc_RNA (1)...(19): siRNA sense strand
gagcucaagugcgacauca

SEQ ID NO: 765582 - RNA, 19 nt, Homo sapiens
  misc_RNA (1)...(19): siRNA sense strand
gcagcuguauccaagaaag

SEQ ID NO: 765583 - RNA, 19 nt, Homo sapiens
  misc_RNA (1)...(19): siRNA sense strand
ggggaaagaugcagcugua

SEQ ID NO: 765584 - RNA, 19 nt, Homo sapiens
  misc_RNA (1)...(19): siRNA sense strand
gaaagaugcagcuguaucc

SEQ ID NO: 765585 - RNA, 19 nt, Homo sapiens
  misc_RNA (1)...(19): siRNA sense strand
cgaagcugcugccuugucu

SEQ ID NO: 765586 - RNA, 19 nt, Homo sapiens
  misc_RNA (1)...(19): siRNA sense strand
ugcagaggaugaagugcua

SEQ ID NO: 765587 - RNA, 19 nt, Homo sapiens
  misc_RNA (1)...(19): siRNA sense strand
cgacaucagcgcagagauc

SEQ ID NO: 765588 - RNA, 19 nt, Homo sapiens
  misc_RNA (1)...(19): siRNA sense strand
gggacccuauugacguuga

SEQ ID NO: 765589 - RNA, 19 nt, Homo sapiens
  misc_RNA (1)...(19): siRNA sense strand
ugcaggaccucagcucuug

SEQ ID NO: 765590 - RNA, 19 nt, Homo sapiens
  misc_RNA (1)...(19): siRNA sense strand
cgcccuggauaacgucuuu

SEQ ID NO: 765591 - RNA, 19 nt, Homo sapiens
  misc_RNA (1)...(19): siRNA sense strand
gccgacuucuggugcuuug

SEQ ID NO: 765592 - RNA, 19 nt, Homo sapiens
  misc_RNA (1)...(19): siRNA sense strand
gcgcuggugcagaggauga

SEQ ID NO: 765593 - RNA, 19 nt, Homo sapiens
  misc_RNA (1)...(19): siRNA sense strand
cggaggaggaguuccaguu

SEQ ID NO: 765594 - RNA, 19 nt, Homo sapiens
  misc_RNA (1)...(19): siRNA sense strand
ccgauggcuucgacgaguu

SEQ ID NO: 765595 - RNA, 19 nt, Homo sapiens
  misc_RNA (1)...(19): siRNA sense strand
aggaggaguuccaguuucu

SEQ ID NO: 765596 - RNA, 19 nt, Homo sapiens
  misc_RNA (1)...(19): siRNA sense strand
augcagcuguauccaagaa

SEQ ID NO: 765597 - RNA, 19 nt, Homo sapiens
  misc_RNA (1)...(19): siRNA sense strand
gguaccagcgcgacuacga

SEQ ID NO: 765598 - RNA, 19 nt, Homo sapiens
  misc_RNA (1)...(19): siRNA sense strand
gaccucagcucuugcauca

SEQ ID NO: 765599 - RNA, 19 nt, Homo sapiens
  misc_RNA (1)...(19): siRNA sense strand
ggagcaggauagugccuuu

SEQ ID NO: 765600 - RNA, 19 nt, Homo sapiens
  misc_RNA (1)...(19): siRNA sense strand
ggaggaggaguuccaguuu

SEQ ID NO: 765601 - RNA, 19 nt, Homo sapiens
  misc_RNA (1)...(19): siRNA sense strand
gaggaggaguuccaguuuc

SEQ ID NO: 765602 - RNA, 19 nt, Homo sapiens
  misc_RNA (1)...(19): siRNA sense strand
ggaaagaugcagcuguauc

SEQ ID NO: 765603 - RNA, 19 nt, Homo sapiens
  misc_RNA (1)...(19): siRNA sense strand
gagcucaagugcgacauca

SEQ ID NO: 765604 - RNA, 19 nt, Homo sapiens
  misc_RNA (1)...(19): siRNA sense strand
gcagcuguauccaagaaag

SEQ ID NO: 765605 - RNA, 19 nt, Homo sapiens
  misc_RNA (1)...(19): siRNA sense strand
ggggaaagaugcagcugua

SEQ ID NO: 765606 - RNA, 19 nt, Homo sapiens
  misc_RNA (1)...(19): siRNA sense strand
gaaagaugcagcuguaucc

SEQ ID NO: 765607 - RNA, 19 nt, Homo sapiens
  misc_RNA (1)...(19): siRNA sense strand
cgaagcugcugccuugucu

SEQ ID NO: 765608 - RNA, 19 nt, Homo sapiens
  misc_RNA (1)...(19): siRNA sense strand
ugcagaggaugaagugcua

SEQ ID NO: 765609 - RNA, 19 nt, Homo sapiens
  misc_RNA (1)...(19): siRNA sense strand
cgacaucagcgcagagauc

SEQ ID NO: 765610 - RNA, 19 nt, Homo sapiens
  misc_RNA (1)...(19): siRNA sense strand
gggacccuauugacguuga

SEQ ID NO: 765611 - RNA, 19 nt, Homo sapiens
  misc_RNA (1)...(19): siRNA sense strand
ugcaggaccucagcucuug

SEQ ID NO: 765612 - RNA, 19 nt, Homo sapiens
  misc_RNA (1)...(19): siRNA sense strand
cgcccuggauaacgucuuu

SEQ ID NO: 765613 - RNA, 19 nt, Homo sapiens
  misc_RNA (1)...(19): siRNA sense strand
gccgacuucuggugcuuug

SEQ ID NO: 765614 - RNA, 19 nt, Homo sapiens
  misc_RNA (1)...(19): siRNA sense strand
gcgcuggugcagaggauga

SEQ ID NO: 765615 - RNA, 19 nt, Homo sapiens
  misc_RNA (1)...(19): siRNA sense strand
cggaggaggaguuccaguu

SEQ ID NO: 765616 - RNA, 19 nt, Homo sapiens
  misc_RNA (1)...(19): siRNA sense strand
ccgauggcuucgacgaguu

SEQ ID NO: 765617 - RNA, 19 nt, Homo sapiens
  misc_RNA (1)...(19): siRNA sense strand
aggaggaguuccaguuucu

SEQ ID NO: 765618 - RNA, 19 nt, Homo sapiens
  misc_RNA (1)...(19): siRNA sense strand
augcagcuguauccaagaa

SEQ ID NO: 765619 - RNA, 19 nt, Homo sapiens
  misc_RNA (1)...(19): siRNA sense strand
gguaccagcgcgacuacga

SEQ ID NO: 765620 - RNA, 19 nt, Homo sapiens
  misc_RNA (1)...(19): siRNA sense strand
gaccucagcucuugcauca

SEQ ID NO: 765621 - RNA, 19 nt, Homo sapiens
  misc_RNA (1)...(19): siRNA sense strand
ggagcaggauagugccuuu

SEQ ID NO: 765622 - RNA, 19 nt, Homo sapiens
  misc_RNA (1)...(19): siRNA sense strand
ggaggaggaguuccaguuu

SEQ ID NO: 765623 - RNA, 19 nt, Homo sapiens
  misc_RNA (1)...(19): siRNA sense strand
gaggaggaguuccaguuuc

SEQ ID NO: 765624 - RNA, 19 nt, Homo sapiens
  misc_RNA (1)...(19): siRNA sense strand
ggaaagaugcagcuguauc

SEQ ID NO: 765625 - RNA, 19 nt, Homo sapiens
  misc_RNA (1)...(19): siRNA sense strand
gagcucaagugcgacauca

SEQ ID NO: 765626 - RNA, 19 nt, Homo sapiens
  misc_RNA (1)...(19): siRNA sense strand
gcagcuguauccaagaaag

SEQ ID NO: 765627 - RNA, 19 nt, Homo sapiens
  misc_RNA (1)...(19): siRNA sense strand
ggggaaagaugcagcugua

SEQ ID NO: 765628 - RNA, 19 nt, Homo sapiens
  misc_RNA (1)...(19): siRNA sense strand
gaaagaugcagcuguaucc

SEQ ID NO: 765629 - RNA, 19 nt, Homo sapiens
  misc_RNA (1)...(19): siRNA sense strand
cgaagcugcugccuugucu

SEQ ID NO: 765630 - RNA, 19 nt, Homo sapiens
  misc_RNA (1)...(19): siRNA sense strand
ugcagaggaugaagugcua

SEQ ID NO: 765631 - RNA, 19 nt, Homo sapiens
  misc_RNA (1)...(19): siRNA sense strand
cgacaucagcgcagagauc

SEQ ID NO: 765632 - RNA, 19 nt, Homo sapiens
  misc_RNA (1)...(19): siRNA sense strand
gggacccuauugacguuga

SEQ ID NO: 765633 - RNA, 19 nt, Homo sapiens
  misc_RNA (1)...(19): siRNA sense strand
ugcaggaccucagcucuug

SEQ ID NO: 765634 - RNA, 19 nt, Homo sapiens
  misc_RNA (1)...(19): siRNA sense strand
cgcccuggauaacgucuuu

SEQ ID NO: 765635 - RNA, 19 nt, Homo sapiens
  misc_RNA (1)...(19): siRNA sense strand
gccgacuucuggugcuuug

SEQ ID NO: 765636 - RNA, 19 nt, Homo sapiens
  misc_RNA (1)...(19): siRNA sense strand
gcgcuggugcagaggauga

SEQ ID NO: 765637 - RNA, 19 nt, Homo sapiens
  misc_RNA (1)...(19): siRNA sense strand
cggaggaggaguuccaguu

SEQ ID NO: 765638 - RNA, 19 nt, Homo sapiens
  misc_RNA (1)...(19): siRNA sense strand
ccgauggcuucgacgaguu

SEQ ID NO: 765639 - RNA, 19 nt, Homo sapiens
  misc_RNA (1)...(19): siRNA sense strand
aggaggaguuccaguuucu

SEQ ID NO: 765640 - RNA, 19 nt, Homo sapiens
  misc_RNA (1)...(19): siRNA sense strand
augcagcuguauccaagaa

SEQ ID NO: 765641 - RNA, 19 nt, Homo sapiens
  misc_RNA (1)...(19): siRNA sense strand
gguaccagcgcgacuacga

SEQ ID NO: 765642 - RNA, 19 nt, Homo sapiens
  misc_RNA (1)...(19): siRNA sense strand
gaccucagcucuugcauca

SEQ ID NO: 765643 - RNA, 19 nt, Homo sapiens
  misc_RNA (1)...(19): siRNA sense strand
ggagcaggauagugccuuu

SEQ ID NO: 765644 - RNA, 19 nt, Homo sapiens
  misc_RNA (1)...(19): siRNA sense strand
ggaggaggaguuccaguuu

SEQ ID NO: 765645 - RNA, 19 nt, Homo sapiens
  misc_RNA (1)...(19): siRNA sense strand
gaggaggaguuccaguuuc

SEQ ID NO: 765646 - RNA, 19 nt, Homo sapiens
  misc_RNA (1)...(19): siRNA sense strand
ggaaagaugcagcuguauc

SEQ ID NO: 765647 - RNA, 19 nt, Homo sapiens
  misc_RNA (1)...(19): siRNA sense strand
gagcucaagugcgacauca

SEQ ID NO: 765648 - RNA, 19 nt, Homo sapiens
  misc_RNA (1)...(19): siRNA sense strand
gcagcuguauccaagaaag

SEQ ID NO: 765649 - RNA, 19 nt, Homo sapiens
  misc_RNA (1)...(19): siRNA sense strand
ggggaaagaugcagcugua

SEQ ID NO: 765650 - RNA, 19 nt, Homo sapiens
  misc_RNA (1)...(19): siRNA sense strand
gaaagaugcagcuguaucc

SEQ ID NO: 765651 - RNA, 19 nt, Homo sapiens
  misc_RNA (1)...(19): siRNA sense strand
cgaagcugcugccuugucu

SEQ ID NO: 765652 - RNA, 19 nt, Homo sapiens
  misc_RNA (1)...(19): siRNA sense strand
ugcagaggaugaagugcua

SEQ ID NO: 765653 - RNA, 19 nt, Homo sapiens
  misc_RNA (1)...(19): siRNA sense strand
cgacaucagcgcagagauc

SEQ ID NO: 765654 - RNA, 19 nt, Homo sapiens
  misc_RNA (1)...(19): siRNA sense strand
gggacccuauugacguuga

SEQ ID NO: 765655 - RNA, 19 nt, Homo sapiens
  misc_RNA (1)...(19): siRNA sense strand
ugcaggaccucagcucuug

SEQ ID NO: 765656 - RNA, 19 nt, Homo sapiens
  misc_RNA (1)...(19): siRNA sense strand
cgcccuggauaacgucuuu

SEQ ID NO: 765657 - RNA, 19 nt, Homo sapiens
  misc_RNA (1)...(19): siRNA sense strand
gccgacuucuggugcuuug

SEQ ID NO: 765658 - RNA, 19 nt, Homo sapiens
  misc_RNA (1)...(19): siRNA sense strand
gcgcuggugcagaggauga

SEQ ID NO: 765659 - RNA, 19 nt, Homo sapiens
  misc_RNA (1)...(19): siRNA sense strand
cggaggaggaguuccaguu

SEQ ID NO: 765660 - RNA, 19 nt, Homo sapiens
  misc_RNA (1)...(19): siRNA sense strand
ccgauggcuucgacgaguu

SEQ ID NO: 765661 - RNA, 19 nt, Homo sapiens
  misc_RNA (1)...(19): siRNA sense strand
aggaggaguuccaguuucu

SEQ ID NO: 765662 - RNA, 19 nt, Homo sapiens
  misc_RNA (1)...(19): siRNA sense strand
augcagcuguauccaagaa

SEQ ID NO: 765663 - RNA, 19 nt, Homo sapiens
  misc_RNA (1)...(19): siRNA sense strand
gguaccagcgcgacuacga

SEQ ID NO: 765664 - RNA, 19 nt, Homo sapiens
  misc_RNA (1)...(19): siRNA sense strand
gaccucagcucuugcauca

SEQ ID NO: 765665 - RNA, 19 nt, Homo sapiens
  misc_RNA (1)...(19): siRNA sense strand
ggagcaggauagugccuuu

SEQ ID NO: 765666 - RNA, 19 nt, Homo sapiens
  misc_RNA (1)...(19): siRNA sense strand
ggaggaggaguuccaguuu

SEQ ID NO: 765667 - RNA, 19 nt, Homo sapiens
  misc_RNA (1)...(19): siRNA sense strand
gaggaggaguuccaguuuc

SEQ ID NO: 765668 - RNA, 19 nt, Homo sapiens
  misc_RNA (1)...(19): siRNA sense strand
ggaaagaugcagcuguauc

SEQ ID NO: 765669 - RNA, 19 nt, Homo sapiens
  misc_RNA (1)...(19): siRNA sense strand
gagcucaagugcgacauca

SEQ ID NO: 765670 - RNA, 19 nt, Homo sapiens
  misc_RNA (1)...(19): siRNA sense strand
gcagcuguauccaagaaag

SEQ ID NO: 765671 - RNA, 19 nt, Homo sapiens
  misc_RNA (1)...(19): siRNA sense strand
ggggaaagaugcagcugua

SEQ ID NO: 765672 - RNA, 19 nt, Homo sapiens
  misc_RNA (1)...(19): siRNA sense strand
gaaagaugcagcuguaucc

SEQ ID NO: 765673 - RNA, 19 nt, Homo sapiens
  misc_RNA (1)...(19): siRNA sense strand
cgaagcugcugccuugucu

SEQ ID NO: 765674 - RNA, 19 nt, Homo sapiens
  misc_RNA (1)...(19): siRNA sense strand
ugcagaggaugaagugcua

SEQ ID NO: 765675 - RNA, 19 nt, Homo sapiens
  misc_RNA (1)...(19): siRNA sense strand
cgacaucagcgcagagauc

SEQ ID NO: 765676 - RNA, 19 nt, Homo sapiens
  misc_RNA (1)...(19): siRNA sense strand
gggacccuauugacguuga

SEQ ID NO: 765677 - RNA, 19 nt, Homo sapiens
  misc_RNA (1)...(19): siRNA sense strand
ugcaggaccucagcucuug

SEQ ID NO: 765678 - RNA, 19 nt, Homo sapiens
  misc_RNA (1)...(19): siRNA sense strand
cgcccuggauaacgucuuu

SEQ ID NO: 765679 - RNA, 19 nt, Homo sapiens
  misc_RNA (1)...(19): siRNA sense strand
gccgacuucuggugcuuug

SEQ ID NO: 765680 - RNA, 19 nt, Homo sapiens
  misc_RNA (1)...(19): siRNA sense strand
gcgcuggugcagaggauga

SEQ ID NO: 765681 - RNA, 19 nt, Homo sapiens
  misc_RNA (1)...(19): siRNA sense strand
cggaggaggaguuccaguu

SEQ ID NO: 765682 - RNA, 19 nt, Homo sapiens
  misc_RNA (1)...(19): siRNA sense strand
ccgauggcuucgacgaguu

SEQ ID NO: 765683 - RNA, 19 nt, Homo sapiens
  misc_RNA (1)...(19): siRNA sense strand
aggaggaguuccaguuucu

SEQ ID NO: 765684 - RNA, 19 nt, Homo sapiens
  misc_RNA (1)...(19): siRNA sense strand
augcagcuguauccaagaa

SEQ ID NO: 765685 - RNA, 19 nt, Homo sapiens
  misc_RNA (1)...(19): siRNA sense strand
gguaccagcgcgacuacga

SEQ ID NO: 765686 - RNA, 19 nt, Homo sapiens
  misc_RNA (1)...(19): siRNA sense strand
gaccucagcucuugcauca

SEQ ID NO: 765687 - RNA, 19 nt, Homo sapiens
  misc_RNA (1)...(19): siRNA sense strand
ggagcaggauagugccuuu

SEQ ID NO: 765688 - RNA, 19 nt, Homo sapiens
  misc_RNA (1)...(19): siRNA sense strand
ggaggaggaguuccaguuu

SEQ ID NO: 765689 - RNA, 19 nt, Homo sapiens
  misc_RNA (1)...(19): siRNA sense strand
gaggaggaguuccaguuuc

SEQ ID NO: 765690 - RNA, 19 nt, Homo sapiens
  misc_RNA (1)...(19): siRNA sense strand
ggaaagaugcagcuguauc

SEQ ID NO: 765691 - RNA, 19 nt, Homo sapiens
  misc_RNA (1)...(19): siRNA sense strand
gagcucaagugcgacauca

SEQ ID NO: 765692 - RNA, 19 nt, Homo sapiens
  misc_RNA (1)...(19): siRNA sense strand
gcagcuguauccaagaaag

SEQ ID NO: 765693 - RNA, 19 nt, Homo sapiens
  misc_RNA (1)...(19): siRNA sense strand
ggggaaagaugcagcugua

SEQ ID NO: 765694 - RNA, 19 nt, Homo sapiens
  misc_RNA (1)...(19): siRNA sense strand
gaaagaugcagcuguaucc

SEQ ID NO: 765695 - RNA, 19 nt, Homo sapiens
  misc_RNA (1)...(19): siRNA sense strand
cgaagcugcugccuugucu

SEQ ID NO: 765696 - RNA, 19 nt, Homo sapiens
  misc_RNA (1)...(19): siRNA sense strand
ugcagaggaugaagugcua

SEQ ID NO: 765697 - RNA, 19 nt, Homo sapiens
  misc_RNA (1)...(19): siRNA sense strand
cgacaucagcgcagagauc

SEQ ID NO: 765698 - RNA, 19 nt, Homo sapiens
  misc_RNA (1)...(19): siRNA sense strand
gggacccuauugacguuga

SEQ ID NO: 765699 - RNA, 19 nt, Homo sapiens
  misc_RNA (1)...(19): siRNA sense strand
ugcaggaccucagcucuug

SEQ ID NO: 765700 - RNA, 19 nt, Homo sapiens
  misc_RNA (1)...(19): siRNA sense strand
cgcccuggauaacgucuuu

SEQ ID NO: 765701 - RNA, 19 nt, Homo sapiens
  misc_RNA (1)...(19): siRNA sense strand
gccgacuucuggugcuuug

SEQ ID NO: 765702 - RNA, 19 nt, Homo sapiens
  misc_RNA (1)...(19): siRNA sense strand
gcgcuggugcagaggauga

SEQ ID NO: 765703 - RNA, 19 nt, Homo sapiens
  misc_RNA (1)...(19): siRNA sense strand
cggaggaggaguuccaguu

SEQ ID NO: 765704 - RNA, 19 nt, Homo sapiens
  misc_RNA (1)...(19): siRNA sense strand
ccgauggcuucgacgaguu

SEQ ID NO: 765705 - RNA, 19 nt, Homo sapiens
  misc_RNA (1)...(19): siRNA sense strand
aggaggaguuccaguuucu

SEQ ID NO: 765706 - RNA, 19 nt, Homo sapiens
  misc_RNA (1)...(19): siRNA sense strand
augcagcuguauccaagaa

SEQ ID NO: 765707 - RNA, 19 nt, Homo sapiens
  misc_RNA (1)...(19): siRNA sense strand
gguaccagcgcgacuacga

SEQ ID NO: 765708 - RNA, 19 nt, Homo sapiens
  misc_RNA (1)...(19): siRNA sense strand
gaccucagcucuugcauca

SEQ ID NO: 765709 - RNA, 19 nt, Homo sapiens
  misc_RNA (1)...(19): siRNA sense strand
ggagcaggauagugccuuu

SEQ ID NO: 765710 - RNA, 19 nt, Homo sapiens
  misc_RNA (1)...(19): siRNA sense strand
ggaggaggaguuccaguuu

SEQ ID NO: 765711 - RNA, 19 nt, Homo sapiens
  misc_RNA (1)...(19): siRNA sense strand
gaggaggaguuccaguuuc

SEQ ID NO: 765712 - RNA, 19 nt, Homo sapiens
  misc_RNA (1)...(19): siRNA sense strand
ggaaagaugcagcuguauc

SEQ ID NO: 765713 - RNA, 19 nt, Homo sapiens
  misc_RNA (1)...(19): siRNA sense strand
gagcucaagugcgacauca

SEQ ID NO: 765714 - RNA, 19 nt, Homo sapiens
  misc_RNA (1)...(19): siRNA sense strand
gcagcuguauccaagaaag

SEQ ID NO: 765715 - RNA, 19 nt, Homo sapiens
  misc_RNA (1)...(19): siRNA sense strand
ggggaaagaugcagcugua

SEQ ID NO: 765716 - RNA, 19 nt, Homo sapiens
  misc_RNA (1)...(19): siRNA sense strand
gaaagaugcagcuguaucc

SEQ ID NO: 765717 - RNA, 19 nt, Homo sapiens
  misc_RNA (1)...(19): siRNA sense strand
cgaagcugcugccuugucu

SEQ ID NO: 765718 - RNA, 19 nt, Homo sapiens
  misc_RNA (1)...(19): siRNA sense strand
ugcagaggaugaagugcua

SEQ ID NO: 765719 - RNA, 19 nt, Homo sapiens
  misc_RNA (1)...(19): siRNA sense strand
cgacaucagcgcagagauc

SEQ ID NO: 765720 - RNA, 19 nt, Homo sapiens
  misc_RNA (1)...(19): siRNA sense strand
gggacccuauugacguuga

SEQ ID NO: 765721 - RNA, 19 nt, Homo sapiens
  misc_RNA (1)...(19): siRNA sense strand
ugcaggaccucagcucuug

SEQ ID NO: 765722 - RNA, 19 nt, Homo sapiens
  misc_RNA (1)...(19): siRNA sense strand
cgcccuggauaacgucuuu

SEQ ID NO: 765723 - RNA, 19 nt, Homo sapiens
  misc_RNA (1)...(19): siRNA sense strand
gccgacuucuggugcuuug

SEQ ID NO: 765724 - RNA, 19 nt, Homo sapiens
  misc_RNA (1)...(19): siRNA sense strand
gcgcuggugcagaggauga

SEQ ID NO: 765725 - RNA, 19 nt, Homo sapiens
  misc_RNA (1)...(19): siRNA sense strand
cggaggaggaguuccaguu

SEQ ID NO: 765726 - RNA, 19 nt, Homo sapiens
  misc_RNA (1)...(19): siRNA sense strand
ccgauggcuucgacgaguu

SEQ ID NO: 765727 - RNA, 19 nt, Homo sapiens
  misc_RNA (1)...(19): siRNA sense strand
aggaggaguuccaguuucu

SEQ ID NO: 765728 - RNA, 19 nt, Homo sapiens
  misc_RNA (1)...(19): siRNA sense strand
augcagcuguauccaagaa

SEQ ID NO: 765729 - RNA, 19 nt, Homo sapiens
  misc_RNA (1)...(19): siRNA sense strand
gguaccagcgcgacuacga

SEQ ID NO: 765730 - RNA, 19 nt, Homo sapiens
  misc_RNA (1)...(19): siRNA sense strand
gaccucagcucuugcauca

SEQ ID NO: 765731 - RNA, 19 nt, Homo sapiens
  misc_RNA (1)...(19): siRNA sense strand
ggagcaggauagugccuuu

SEQ ID NO: 765732 - RNA, 19 nt, Homo sapiens
  misc_RNA (1)...(19): siRNA sense strand
ggaggaggaguuccaguuu

SEQ ID NO: 765733 - RNA, 19 nt, Homo sapiens
  misc_RNA (1)...(19): siRNA sense strand
gaggaggaguuccaguuuc

SEQ ID NO: 765734 - RNA, 19 nt, Homo sapiens
  misc_RNA (1)...(19): siRNA sense strand
ggaaagaugcagcuguauc

SEQ ID NO: 765735 - RNA, 19 nt, Homo sapiens
  misc_RNA (1)...(19): siRNA sense strand
gagcucaagugcgacauca

SEQ ID NO: 765736 - RNA, 19 nt, Homo sapiens
  misc_RNA (1)...(19): siRNA sense strand
gcagcuguauccaagaaag

SEQ ID NO: 765737 - RNA, 19 nt, Homo sapiens
  misc_RNA (1)...(19): siRNA sense strand
ggggaaagaugcagcugua

SEQ ID NO: 765738 - RNA, 19 nt, Homo sapiens
  misc_RNA (1)...(19): siRNA sense strand
gaaagaugcagcuguaucc

SEQ ID NO: 765739 - RNA, 19 nt, Homo sapiens
  misc_RNA (1)...(19): siRNA sense strand
cgaagcugcugccuugucu

SEQ ID NO: 765740 - RNA, 19 nt, Homo sapiens
  misc_RNA (1)...(19): siRNA sense strand
ugcagaggaugaagugcua

SEQ ID NO: 765741 - RNA, 19 nt, Homo sapiens
  misc_RNA (1)...(19): siRNA sense strand
cgacaucagcgcagagauc

SEQ ID NO: 765742 - RNA, 19 nt, Homo sapiens
  misc_RNA (1)...(19): siRNA sense strand
gggacccuauugacguuga

SEQ ID NO: 765743 - RNA, 19 nt, Homo sapiens
  misc_RNA (1)...(19): siRNA sense strand
ugcaggaccucagcucuug

SEQ ID NO: 765744 - RNA, 19 nt, Homo sapiens
  misc_RNA (1)...(19): siRNA sense strand
cgcccuggauaacgucuuu

SEQ ID NO: 765745 - RNA, 19 nt, Homo sapiens
  misc_RNA (1)...(19): siRNA sense strand
gccgacuucuggugcuuug

SEQ ID NO: 765746 - RNA, 19 nt, Homo sapiens
  misc_RNA (1)...(19): siRNA sense strand
gcgcuggugcagaggauga

SEQ ID NO: 765747 - RNA, 19 nt, Homo sapiens
  misc_RNA (1)...(19): siRNA sense strand
cggaggaggaguuccaguu

SEQ ID NO: 765748 - RNA, 19 nt, Homo sapiens
  misc_RNA (1)...(19): siRNA sense strand
ccgauggcuucgacgaguu

SEQ ID NO: 765749 - RNA, 19 nt, Homo sapiens
  misc_RNA (1)...(19): siRNA sense strand
aggaggaguuccaguuucu

SEQ ID NO: 765750 - RNA, 19 nt, Homo sapiens
  misc_RNA (1)...(19): siRNA sense strand
augcagcuguauccaagaa

SEQ ID NO: 765751 - RNA, 19 nt, Homo sapiens
  misc_RNA (1)...(19): siRNA sense strand
gguaccagcgcgacuacga

SEQ ID NO: 765752 - RNA, 19 nt, Homo sapiens
  misc_RNA (1)...(19): siRNA sense strand
gaccucagcucuugcauca

SEQ ID NO: 765753 - RNA, 19 nt, Homo sapiens
  misc_RNA (1)...(19): siRNA sense strand
ggagcaggauagugccuuu

SEQ ID NO: 765754 - RNA, 19 nt, Homo sapiens
  misc_RNA (1)...(19): siRNA sense strand
ggaggaggaguuccaguuu

SEQ ID NO: 765755 - RNA, 19 nt, Homo sapiens
  misc_RNA (1)...(19): siRNA sense strand
gaggaggaguuccaguuuc

SEQ ID NO: 765756 - RNA, 19 nt, Homo sapiens
  misc_RNA (1)...(19): siRNA sense strand
ggaaagaugcagcuguauc

SEQ ID NO: 765757 - RNA, 19 nt, Homo sapiens
  misc_RNA (1)...(19): siRNA sense strand
gagcucaagugcgacauca

SEQ ID NO: 765758 - RNA, 19 nt, Homo sapiens
  misc_RNA (1)...(19): siRNA sense strand
gcagcuguauccaagaaag

SEQ ID NO: 765759 - RNA, 19 nt, Homo sapiens
  misc_RNA (1)...(19): siRNA sense strand
ggggaaagaugcagcugua

SEQ ID NO: 765760 - RNA, 19 nt, Homo sapiens
  misc_RNA (1)...(19): siRNA sense strand
gaaagaugcagcuguaucc

SEQ ID NO: 765761 - RNA, 19 nt, Homo sapiens
  misc_RNA (1)...(19): siRNA sense strand
cgaagcugcugccuugucu

SEQ ID NO: 765762 - RNA, 19 nt, Homo sapiens
  misc_RNA (1)...(19): siRNA sense strand
ugcagaggaugaagugcua

SEQ ID NO: 765763 - RNA, 19 nt, Homo sapiens
  misc_RNA (1)...(19): siRNA sense strand
cgacaucagcgcagagauc

SEQ ID NO: 765764 - RNA, 19 nt, Homo sapiens
  misc_RNA (1)...(19): siRNA sense strand
gggacccuauugacguuga

SEQ ID NO: 765765 - RNA, 19 nt, Homo sapiens
  misc_RNA (1)...(19): siRNA sense strand
ugcaggaccucagcucuug

SEQ ID NO: 765766 - RNA, 19 nt, Homo sapiens
  misc_RNA (1)...(19): siRNA sense strand
cgcccuggauaacgucuuu

SEQ ID NO: 765767 - RNA, 19 nt, Homo sapiens
  misc_RNA (1)...(19): siRNA sense strand
gccgacuucuggugcuuug

SEQ ID NO: 765768 - RNA, 19 nt, Homo sapiens
  misc_RNA (1)...(19): siRNA sense strand
gcgcuggugcagaggauga

SEQ ID NO: 765769 - RNA, 19 nt, Homo sapiens
  misc_RNA (1)...(19): siRNA sense strand
cggaggaggaguuccaguu

SEQ ID NO: 765770 - RNA, 19 nt, Homo sapiens
  misc_RNA (1)...(19): siRNA sense strand
ccgauggcuucgacgaguu

SEQ ID NO: 765771 - RNA, 19 nt, Homo sapiens
  misc_RNA (1)...(19): siRNA sense strand
aggaggaguuccaguuucu

SEQ ID NO: 765772 - RNA, 19 nt, Homo sapiens
  misc_RNA (1)...(19): siRNA sense strand
augcagcuguauccaagaa

SEQ ID NO: 765773 - RNA, 19 nt, Homo sapiens
  misc_RNA (1)...(19): siRNA sense strand
gguaccagcgcgacuacga

SEQ ID NO: 765774 - RNA, 19 nt, Homo sapiens
  misc_RNA (1)...(19): siRNA sense strand
gaccucagcucuugcauca

SEQ ID NO: 765775 - RNA, 19 nt, Homo sapiens
  misc_RNA (1)...(19): siRNA sense strand
ggagcaggauagugccuuu

SEQ ID NO: 765776 - RNA, 19 nt, Homo sapiens
  misc_RNA (1)...(19): siRNA sense strand
ggaggaggaguuccaguuu

SEQ ID NO: 765777 - RNA, 19 nt, Homo sapiens
  misc_RNA (1)...(19): siRNA sense strand
gaggaggaguuccaguuuc

SEQ ID NO: 765778 - RNA, 19 nt, Homo sapiens
  misc_RNA (1)...(19): siRNA sense strand
ggaaagaugcagcuguauc

SEQ ID NO: 765779 - RNA, 19 nt, Homo sapiens
  misc_RNA (1)...(19): siRNA sense strand
gagcucaagugcgacauca

SEQ ID NO: 765780 - RNA, 19 nt, Homo sapiens
  misc_RNA (1)...(19): siRNA sense strand
gcagcuguauccaagaaag

SEQ ID NO: 765781 - RNA, 19 nt, Homo sapiens
  misc_RNA (1)...(19): siRNA sense strand
ggggaaagaugcagcugua

SEQ ID NO: 765782 - RNA, 19 nt, Homo sapiens
  misc_RNA (1)...(19): siRNA sense strand
gaaagaugcagcuguaucc

SEQ ID NO: 765783 - RNA, 19 nt, Homo sapiens
  misc_RNA (1)...(19): siRNA sense strand
cgaagcugcugccuugucu

SEQ ID NO: 765784 - RNA, 19 nt, Homo sapiens
  misc_RNA (1)...(19): siRNA sense strand
ugcagaggaugaagugcua

SEQ ID NO: 765785 - RNA, 19 nt, Homo sapiens
  misc_RNA (1)...(19): siRNA sense strand
cgacaucagcgcagagauc

SEQ ID NO: 765786 - RNA, 19 nt, Homo sapiens
  misc_RNA (1)...(19): siRNA sense strand
gggacccuauugacguuga

SEQ ID NO: 765787 - RNA, 19 nt, Homo sapiens
  misc_RNA (1)...(19): siRNA sense strand
ugcaggaccucagcucuug

SEQ ID NO: 765788 - RNA, 19 nt, Homo sapiens
  misc_RNA (1)...(19): siRNA sense strand
cgcccuggauaacgucuuu

SEQ ID NO: 765789 - RNA, 19 nt, Homo sapiens
  misc_RNA (1)...(19): siRNA sense strand
gccgacuucuggugcuuug

SEQ ID NO: 765790 - RNA, 19 nt, Homo sapiens
  misc_RNA (1)...(19): siRNA sense strand
gcgcuggugcagaggauga

SEQ ID NO: 765791 - RNA, 19 nt, Homo sapiens
  misc_RNA (1)...(19): siRNA sense strand
cggaggaggaguuccaguu

SEQ ID NO: 765792 - RNA, 19 nt, Homo sapiens
  misc_RNA (1)...(19): siRNA sense strand
ccgauggcuucgacgaguu

SEQ ID NO: 765793 - RNA, 19 nt, Homo sapiens
  misc_RNA (1)...(19): siRNA sense strand
aggaggaguuccaguuucu

SEQ ID NO: 765794 - RNA, 19 nt, Homo sapiens
  misc_RNA (1)...(19): siRNA sense strand
augcagcuguauccaagaa

SEQ ID NO: 765795 - RNA, 19 nt, Homo sapiens
  misc_RNA (1)...(19): siRNA sense strand
gguaccagcgcgacuacga

SEQ ID NO: 765796 - RNA, 19 nt, Homo sapiens
  misc_RNA (1)...(19): siRNA sense strand
gaccucagcucuugcauca

SEQ ID NO: 765797 - RNA, 19 nt, Homo sapiens
  misc_RNA (1)...(19): siRNA sense strand
ggagcaggauagugccuuu

SEQ ID NO: 765798 - RNA, 19 nt, Homo sapiens
  misc_RNA (1)...(19): siRNA sense strand
ggaggaggaguuccaguuu

SEQ ID NO: 765799 - RNA, 19 nt, Homo sapiens
  misc_RNA (1)...(19): siRNA sense strand
gaggaggaguuccaguuuc

SEQ ID NO: 765800 - RNA, 19 nt, Homo sapiens
  misc_RNA (1)...(19): siRNA sense strand
ggaaagaugcagcuguauc

SEQ ID NO: 765801 - RNA, 19 nt, Homo sapiens
  misc_RNA (1)...(19): siRNA sense strand
gagcucaagugcgacauca

SEQ ID NO: 765802 - RNA, 19 nt, Homo sapiens
  misc_RNA (1)...(19): siRNA sense strand
gcagcuguauccaagaaag

SEQ ID NO: 765803 - RNA, 19 nt, Homo sapiens
  misc_RNA (1)...(19): siRNA sense strand
ggggaaagaugcagcugua

SEQ ID NO: 765804 - RNA, 19 nt, Homo sapiens
  misc_RNA (1)...(19): siRNA sense strand
gaaagaugcagcuguaucc

SEQ ID NO: 765805 - RNA, 19 nt, Homo sapiens
  misc_RNA (1)...(19): siRNA sense strand
cgaagcugcugccuugucu

SEQ ID NO: 765806 - RNA, 19 nt, Homo sapiens
  misc_RNA (1)...(19): siRNA sense strand
ugcagaggaugaagugcua

SEQ ID NO: 765807 - RNA, 19 nt, Homo sapiens
  misc_RNA (1)...(19): siRNA sense strand
cgacaucagcgcagagauc

SEQ ID NO: 765808 - RNA, 19 nt, Homo sapiens
  misc_RNA (1)...(19): siRNA sense strand
gggacccuauugacguuga

SEQ ID NO: 765809 - RNA, 19 nt, Homo sapiens
  misc_RNA (1)...(19): siRNA sense strand
ugcaggaccucagcucuug

SEQ ID NO: 765810 - RNA, 19 nt, Homo sapiens
  misc_RNA (1)...(19): siRNA sense strand
cgcccuggauaacgucuuu

SEQ ID NO: 765811 - RNA, 19 nt, Homo sapiens
  misc_RNA (1)...(19): siRNA sense strand
gccgacuucuggugcuuug

SEQ ID NO: 765812 - RNA, 19 nt, Homo sapiens
  misc_RNA (1)...(19): siRNA sense strand
gcgcuggugcagaggauga

SEQ ID NO: 765813 - RNA, 19 nt, Homo sapiens
  misc_RNA (1)...(19): siRNA sense strand
cggaggaggaguuccaguu

SEQ ID NO: 765814 - RNA, 19 nt, Homo sapiens
  misc_RNA (1)...(19): siRNA sense strand
ccgauggcuucgacgaguu

SEQ ID NO: 765815 - RNA, 19 nt, Homo sapiens
  misc_RNA (1)...(19): siRNA sense strand
aggaggaguuccaguuucu

SEQ ID NO: 765816 - RNA, 19 nt, Homo sapiens
  misc_RNA (1)...(19): siRNA sense strand
augcagcuguauccaagaa

SEQ ID NO: 765817 - RNA, 19 nt, Homo sapiens
  misc_RNA (1)...(19): siRNA sense strand
gguaccagcgcgacuacga

SEQ ID NO: 765818 - RNA, 19 nt, Homo sapiens
  misc_RNA (1)...(19): siRNA sense strand
gaccucagcucuugcauca

SEQ ID NO: 765819 - RNA, 19 nt, Homo sapiens
  misc_RNA (1)...(19): siRNA sense strand
ggagcaggauagugccuuu

SEQ ID NO: 765820 - RNA, 19 nt, Homo sapiens
  misc_RNA (1)...(19): siRNA sense strand
ggaggaggaguuccaguuu

SEQ ID NO: 765821 - RNA, 19 nt, Homo sapiens
  misc_RNA (1)...(19): siRNA sense strand
gaggaggaguuccaguuuc

SEQ ID NO: 765822 - RNA, 19 nt, Homo sapiens
  misc_RNA (1)...(19): siRNA sense strand
ggaaagaugcagcuguauc

SEQ ID NO: 765823 - RNA, 19 nt, Homo sapiens
  misc_RNA (1)...(19): siRNA sense strand
gagcucaagugcgacauca

SEQ ID NO: 765824 - RNA, 19 nt, Homo sapiens
  misc_RNA (1)...(19): siRNA sense strand
gcagcuguauccaagaaag

SEQ ID NO: 765825 - RNA, 19 nt, Homo sapiens
  misc_RNA (1)...(19): siRNA sense strand
ggggaaagaugcagcugua

SEQ ID NO: 765826 - RNA, 19 nt, Homo sapiens
  misc_RNA (1)...(19): siRNA sense strand
gaaagaugcagcuguaucc

SEQ ID NO: 765827 - RNA, 19 nt, Homo sapiens
  misc_RNA (1)...(19): siRNA sense strand
cgaagcugcugccuugucu

SEQ ID NO: 765828 - RNA, 19 nt, Homo sapiens
  misc_RNA (1)...(19): siRNA sense strand
ugcagaggaugaagugcua

SEQ ID NO: 765829 - RNA, 19 nt, Homo sapiens
  misc_RNA (1)...(19): siRNA sense strand
cgacaucagcgcagagauc

SEQ ID NO: 765830 - RNA, 19 nt, Homo sapiens
  misc_RNA (1)...(19): siRNA sense strand
gggacccuauugacguuga

SEQ ID NO: 765831 - RNA, 19 nt, Homo sapiens
  misc_RNA (1)...(19): siRNA sense strand
ugcaggaccucagcucuug

SEQ ID NO: 765832 - RNA, 19 nt, Homo sapiens
  misc_RNA (1)...(19): siRNA sense strand
cgcccuggauaacgucuuu

SEQ ID NO: 765833 - RNA, 19 nt, Homo sapiens
  misc_RNA (1)...(19): siRNA sense strand
gccgacuucuggugcuuug

SEQ ID NO: 765834 - RNA, 19 nt, Homo sapiens
  misc_RNA (1)...(19): siRNA sense strand
gcgcuggugcagaggauga

SEQ ID NO: 765835 - RNA, 19 nt, Homo sapiens
  misc_RNA (1)...(19): siRNA sense strand
cggaggaggaguuccaguu

SEQ ID NO: 765836 - RNA, 19 nt, Homo sapiens
  misc_RNA (1)...(19): siRNA sense strand
ccgauggcuucgacgaguu

SEQ ID NO: 765837 - RNA, 19 nt, Homo sapiens
  misc_RNA (1)...(19): siRNA sense strand
aggaggaguuccaguuucu

SEQ ID NO: 765838 - RNA, 19 nt, Homo sapiens
  misc_RNA (1)...(19): siRNA sense strand
augcagcuguauccaagaa

SEQ ID NO: 765839 - RNA, 19 nt, Homo sapiens
  misc_RNA (1)...(19): siRNA sense strand
gguaccagcgcgacuacga

SEQ ID NO: 765840 - RNA, 19 nt, Homo sapiens
  misc_RNA (1)...(19): siRNA sense strand
gaccucagcucuugcauca

SEQ ID NO: 765841 - RNA, 19 nt, Homo sapiens
  misc_RNA (1)...(19): siRNA sense strand
ggagcaggauagugccuuu

SEQ ID NO: 765842 - RNA, 19 nt, Homo sapiens
  misc_RNA (1)...(19): siRNA sense strand
ggaggaggaguuccaguuu

SEQ ID NO: 765843 - RNA, 19 nt, Homo sapiens
  misc_RNA (1)...(19): siRNA sense strand
gaggaggaguuccaguuuc

SEQ ID NO: 765844 - RNA, 19 nt, Homo sapiens
  misc_RNA (1)...(19): siRNA sense strand
ggaaagaugcagcuguauc

SEQ ID NO: 765845 - RNA, 19 nt, Homo sapiens
  misc_RNA (1)...(19): siRNA sense strand
gagcucaagugcgacauca

SEQ ID NO: 765846 - RNA, 19 nt, Homo sapiens
  misc_RNA (1)...(19): siRNA sense strand
gcagcuguauccaagaaag

SEQ ID NO: 765847 - RNA, 19 nt, Homo sapiens
  misc_RNA (1)...(19): siRNA sense strand
ggggaaagaugcagcugua

SEQ ID NO: 765848 - RNA, 19 nt, Homo sapiens
  misc_RNA (1)...(19): siRNA sense strand
gaaagaugcagcuguaucc

SEQ ID NO: 765849 - RNA, 19 nt, Homo sapiens
  misc_RNA (1)...(19): siRNA sense strand
cgaagcugcugccuugucu

SEQ ID NO: 765850 - RNA, 19 nt, Homo sapiens
  misc_RNA (1)...(19): siRNA sense strand
ugcagaggaugaagugcua

SEQ ID NO: 765851 - RNA, 19 nt, Homo sapiens
  misc_RNA (1)...(19): siRNA sense strand
cgacaucagcgcagagauc

SEQ ID NO: 765852 - RNA, 19 nt, Homo sapiens
  misc_RNA (1)...(19): siRNA sense strand
gggacccuauugacguuga

SEQ ID NO: 765853 - RNA, 19 nt, Homo sapiens
  misc_RNA (1)...(19): siRNA sense strand
ugcaggaccucagcucuug

SEQ ID NO: 765854 - RNA, 19 nt, Homo sapiens
  misc_RNA (1)...(19): siRNA sense strand
cgcccuggauaacgucuuu

SEQ ID NO: 765855 - RNA, 19 nt, Homo sapiens
  misc_RNA (1)...(19): siRNA sense strand
gccgacuucuggugcuuug

SEQ ID NO: 765856 - RNA, 19 nt, Homo sapiens
  misc_RNA (1)...(19): siRNA sense strand
gcgcuggugcagaggauga

SEQ ID NO: 765857 - RNA, 19 nt, Homo sapiens
  misc_RNA (1)...(19): siRNA sense strand
cggaggaggaguuccaguu

SEQ ID NO: 765858 - RNA, 19 nt, Homo sapiens
  misc_RNA (1)...(19): siRNA sense strand
ccgauggcuucgacgaguu

SEQ ID NO: 765859 - RNA, 19 nt, Homo sapiens
  misc_RNA (1)...(19): siRNA sense strand
aggaggaguuccaguuucu

SEQ ID NO: 765860 - RNA, 19 nt, Homo sapiens
  misc_RNA (1)...(19): siRNA sense strand
augcagcuguauccaagaa

SEQ ID NO: 765861 - RNA, 19 nt, Homo sapiens
  misc_RNA (1)...(19): siRNA sense strand
gguaccagcgcgacuacga

SEQ ID NO: 765862 - RNA, 19 nt, Homo sapiens
  misc_RNA (1)...(19): siRNA sense strand
gaccucagcucuugcauca

SEQ ID NO: 765863 - RNA, 19 nt, Homo sapiens
  misc_RNA (1)...(19): siRNA sense strand
ggagcaggauagugccuuu

SEQ ID NO: 765864 - RNA, 19 nt, Homo sapiens
  misc_RNA (1)...(19): siRNA sense strand
ggaggaggaguuccaguuu

SEQ ID NO: 765865 - RNA, 19 nt, Homo sapiens
  misc_RNA (1)...(19): siRNA sense strand
gaggaggaguuccaguuuc

SEQ ID NO: 765866 - RNA, 19 nt, Homo sapiens
  misc_RNA (1)...(19): siRNA sense strand
ggaaagaugcagcuguauc

SEQ ID NO: 765867 - RNA, 19 nt, Homo sapiens
  misc_RNA (1)...(19): siRNA sense strand
gagcucaagugcgacauca

SEQ ID NO: 765868 - RNA, 19 nt, Homo sapiens
  misc_RNA (1)...(19): siRNA sense strand
gcagcuguauccaagaaag

SEQ ID NO: 765869 - RNA, 19 nt, Homo sapiens
  misc_RNA (1)...(19): siRNA sense strand
ggggaaagaugcagcugua

SEQ ID NO: 765870 - RNA, 19 nt, Homo sapiens
  misc_RNA (1)...(19): siRNA sense strand
gaaagaugcagcuguaucc

SEQ ID NO: 765871 - RNA, 19 nt, Homo sapiens
  misc_RNA (1)...(19): siRNA sense strand
cgaagcugcugccuugucu

SEQ ID NO: 765872 - RNA, 19 nt, Homo sapiens
  misc_RNA (1)...(19): siRNA sense strand
ugcagaggaugaagugcua

SEQ ID NO: 765873 - RNA, 19 nt, Homo sapiens
  misc_RNA (1)...(19): siRNA sense strand
cgacaucagcgcagagauc

SEQ ID NO: 765874 - RNA, 19 nt, Homo sapiens
  misc_RNA (1)...(19): siRNA sense strand
gggacccuauugacguuga

SEQ ID NO: 765875 - RNA, 19 nt, Homo sapiens
  misc_RNA (1)...(19): siRNA sense strand
ugcaggaccucagcucuug

SEQ ID NO: 765876 - RNA, 19 nt, Homo sapiens
  misc_RNA (1)...(19): siRNA sense strand
cgcccuggauaacgucuuu

SEQ ID NO: 765877 - RNA, 19 nt, Homo sapiens
  misc_RNA (1)...(19): siRNA sense strand
gccgacuucuggugcuuug

SEQ ID NO: 765878 - RNA, 19 nt, Homo sapiens
  misc_RNA (1)...(19): siRNA sense strand
gcgcuggugcagaggauga

SEQ ID NO: 765879 - RNA, 19 nt, Homo sapiens
  misc_RNA (1)...(19): siRNA sense strand
cggaggaggaguuccaguu

SEQ ID NO: 765880 - RNA, 19 nt, Homo sapiens
  misc_RNA (1)...(19): siRNA sense strand
ccgauggcuucgacgaguu

SEQ ID NO: 765881 - RNA, 19 nt, Homo sapiens
  misc_RNA (1)...(19): siRNA sense strand
aggaggaguuccaguuucu

SEQ ID NO: 765882 - RNA, 19 nt, Homo sapiens
  misc_RNA (1)...(19): siRNA sense strand
augcagcuguauccaagaa

SEQ ID NO: 765883 - RNA, 19 nt, Homo sapiens
  misc_RNA (1)...(19): siRNA sense strand
gguaccagcgcgacuacga

SEQ ID NO: 765884 - RNA, 19 nt, Homo sapiens
  misc_RNA (1)...(19): siRNA sense strand
gaccucagcucuugcauca

SEQ ID NO: 765885 - RNA, 19 nt, Homo sapiens
  misc_RNA (1)...(19): siRNA sense strand
ggagcaggauagugccuuu

SEQ ID NO: 765886 - RNA, 19 nt, Homo sapiens
  misc_RNA (1)...(19): siRNA sense strand
ggaggaggaguuccaguuu

SEQ ID NO: 765887 - RNA, 19 nt, Homo sapiens
  misc_RNA (1)...(19): siRNA sense strand
gaggaggaguuccaguuuc

SEQ ID NO: 765888 - RNA, 19 nt, Homo sapiens
  misc_RNA (1)...(19): siRNA sense strand
ggaaagaugcagcuguauc

SEQ ID NO: 765889 - RNA, 19 nt, Homo sapiens
  misc_RNA (1)...(19): siRNA sense strand
gagcucaagugcgacauca

SEQ ID NO: 765890 - RNA, 19 nt, Homo sapiens
  misc_RNA (1)...(19): siRNA sense strand
gcagcuguauccaagaaag

SEQ ID NO: 765891 - RNA, 19 nt, Homo sapiens
  misc_RNA (1)...(19): siRNA sense strand
ggggaaagaugcagcugua

SEQ ID NO: 765892 - RNA, 19 nt, Homo sapiens
  misc_RNA (1)...(19): siRNA sense strand
gaaagaugcagcuguaucc

SEQ ID NO: 765893 - RNA, 19 nt, Homo sapiens
  misc_RNA (1)...(19): siRNA sense strand
cgaagcugcugccuugucu

SEQ ID NO: 765894 - RNA, 19 nt, Homo sapiens
  misc_RNA (1)...(19): siRNA sense strand
ugcagaggaugaagugcua

SEQ ID NO: 765895 - RNA, 19 nt, Homo sapiens
  misc_RNA (1)...(19): siRNA sense strand
cgacaucagcgcagagauc

SEQ ID NO: 765896 - RNA, 19 nt, Homo sapiens
  misc_RNA (1)...(19): siRNA sense strand
gggacccuauugacguuga

SEQ ID NO: 765897 - RNA, 19 nt, Homo sapiens
  misc_RNA (1)...(19): siRNA sense strand
ugcaggaccucagcucuug

SEQ ID NO: 765898 - RNA, 19 nt, Homo sapiens
  misc_RNA (1)...(19): siRNA sense strand
cgcccuggauaacgucuuu

SEQ ID NO: 765899 - RNA, 19 nt, Homo sapiens
  misc_RNA (1)...(19): siRNA sense strand
gccgacuucuggugcuuug

SEQ ID NO: 765900 - RNA, 19 nt, Homo sapiens
  misc_RNA (1)...(19): siRNA sense strand
gcgcuggugcagaggauga

SEQ ID NO: 765901 - RNA, 19 nt, Homo sapiens
  misc_RNA (1)...(19): siRNA sense strand
cggaggaggaguuccaguu

SEQ ID NO: 765902 - RNA, 19 nt, Homo sapiens
  misc_RNA (1)...(19): siRNA sense strand
ccgauggcuucgacgaguu

SEQ ID NO: 765903 - RNA, 19 nt, Homo sapiens
  misc_RNA (1)...(19): siRNA sense strand
aggaggaguuccaguuucu

SEQ ID NO: 765904 - RNA, 19 nt, Homo sapiens
  misc_RNA (1)...(19): siRNA sense strand
augcagcuguauccaagaa

SEQ ID NO: 765905 - RNA, 19 nt, Homo sapiens
  misc_RNA (1)...(19): siRNA sense strand
gguaccagcgcgacuacga

SEQ ID NO: 765906 - RNA, 19 nt, Homo sapiens
  misc_RNA (1)...(19): siRNA sense strand
gaccucagcucuugcauca

SEQ ID NO: 765907 - RNA, 19 nt, Homo sapiens
  misc_RNA (1)...(19): siRNA sense strand
ggagcaggauagugccuuu

SEQ ID NO: 765908 - RNA, 19 nt, Homo sapiens
  misc_RNA (1)...(19): siRNA sense strand
ggaggaggaguuccaguuu

SEQ ID NO: 765909 - RNA, 19 nt, Homo sapiens
  misc_RNA (1)...(19): siRNA sense strand
gaggaggaguuccaguuuc

SEQ ID NO: 765910 - RNA, 19 nt, Homo sapiens
  misc_RNA (1)...(19): siRNA sense strand
ggaaagaugcagcuguauc

SEQ ID NO: 765911 - RNA, 19 nt, Homo sapiens
  misc_RNA (1)...(19): siRNA sense strand
gagcucaagugcgacauca

SEQ ID NO: 765912 - RNA, 19 nt, Homo sapiens
  misc_RNA (1)...(19): siRNA sense strand
gcagcuguauccaagaaag

SEQ ID NO: 765913 - RNA, 19 nt, Homo sapiens
  misc_RNA (1)...(19): siRNA sense strand
ggggaaagaugcagcugua

SEQ ID NO: 765914 - RNA, 19 nt, Homo sapiens
  misc_RNA (1)...(19): siRNA sense strand
gaaagaugcagcuguaucc

SEQ ID NO: 765915 - RNA, 19 nt, Homo sapiens
  misc_RNA (1)...(19): siRNA sense strand
cgaagcugcugccuugucu

SEQ ID NO: 765916 - RNA, 19 nt, Homo sapiens
  misc_RNA (1)...(19): siRNA sense strand
ugcagaggaugaagugcua

SEQ ID NO: 765917 - RNA, 19 nt, Homo sapiens
  misc_RNA (1)...(19): siRNA sense strand
cgacaucagcgcagagauc

SEQ ID NO: 765918 - RNA, 19 nt, Homo sapiens
  misc_RNA (1)...(19): siRNA sense strand
gggacccuauugacguuga

SEQ ID NO: 765919 - RNA, 19 nt, Homo sapiens
  misc_RNA (1)...(19): siRNA sense strand
ugcaggaccucagcucuug

SEQ ID NO: 765920 - RNA, 19 nt, Homo sapiens
  misc_RNA (1)...(19): siRNA sense strand
cgcccuggauaacgucuuu

SEQ ID NO: 765921 - RNA, 19 nt, Homo sapiens
  misc_RNA (1)...(19): siRNA sense strand
gccgacuucuggugcuuug

SEQ ID NO: 765922 - RNA, 19 nt, Homo sapiens
  misc_RNA (1)...(19): siRNA sense strand
gcgcuggugcagaggauga

SEQ ID NO: 765923 - RNA, 19 nt, Homo sapiens
  misc_RNA (1)...(19): siRNA sense strand
cggaggaggaguuccaguu

SEQ ID NO: 765924 - RNA, 19 nt, Homo sapiens
  misc_RNA (1)...(19): siRNA sense strand
ccgauggcuucgacgaguu

SEQ ID NO: 765925 - RNA, 19 nt, Homo sapiens
  misc_RNA (1)...(19): siRNA sense strand
aggaggaguuccaguuucu

SEQ ID NO: 765926 - RNA, 19 nt, Homo sapiens
  misc_RNA (1)...(19): siRNA sense strand
augcagcuguauccaagaa

SEQ ID NO: 765927 - RNA, 19 nt, Homo sapiens
  misc_RNA (1)...(19): siRNA sense strand
gguaccagcgcgacuacga

SEQ ID NO: 765928 - RNA, 19 nt, Homo sapiens
  misc_RNA (1)...(19): siRNA sense strand
gaccucagcucuugcauca

SEQ ID NO: 765929 - RNA, 19 nt, Homo sapiens
  misc_RNA (1)...(19): siRNA sense strand
ggagcaggauagugccuuu

SEQ ID NO: 765930 - RNA, 19 nt, Homo sapiens
  misc_RNA (1)...(19): siRNA sense strand
ggaggaggaguuccaguuu

SEQ ID NO: 765931 - RNA, 19 nt, Homo sapiens
  misc_RNA (1)...(19): siRNA sense strand
gaggaggaguuccaguuuc

SEQ ID NO: 765932 - RNA, 19 nt, Homo sapiens
  misc_RNA (1)...(19): siRNA sense strand
ggaaagaugcagcuguauc

SEQ ID NO: 765933 - RNA, 19 nt, Homo sapiens
  misc_RNA (1)...(19): siRNA sense strand
gagcucaagugcgacauca

SEQ ID NO: 765934 - RNA, 19 nt, Homo sapiens
  misc_RNA (1)...(19): siRNA sense strand
gcagcuguauccaagaaag

SEQ ID NO: 765935 - RNA, 19 nt, Homo sapiens
  misc_RNA (1)...(19): siRNA sense strand
ggggaaagaugcagcugua

SEQ ID NO: 765936 - RNA, 19 nt, Homo sapiens
  misc_RNA (1)...(19): siRNA sense strand
gaaagaugcagcuguaucc

SEQ ID NO: 765937 - RNA, 19 nt, Homo sapiens
  misc_RNA (1)...(19): siRNA sense strand
cgaagcugcugccuugucu

SEQ ID NO: 765938 - RNA, 19 nt, Homo sapiens
  misc_RNA (1)...(19): siRNA sense strand
ugcagaggaugaagugcua

SEQ ID NO: 765939 - RNA, 19 nt, Homo sapiens
  misc_RNA (1)...(19): siRNA sense strand
cgacaucagcgcagagauc

SEQ ID NO: 765940 - RNA, 19 nt, Homo sapiens
  misc_RNA (1)...(19): siRNA sense strand
gggacccuauugacguuga

SEQ ID NO: 765941 - RNA, 19 nt, Homo sapiens
  misc_RNA (1)...(19): siRNA sense strand
ugcaggaccucagcucuug

SEQ ID NO: 765942 - RNA, 19 nt, Homo sapiens
  misc_RNA (1)...(19): siRNA sense strand
cgcccuggauaacgucuuu

SEQ ID NO: 765943 - RNA, 19 nt, Homo sapiens
  misc_RNA (1)...(19): siRNA sense strand
gccgacuucuggugcuuug

SEQ ID NO: 765944 - RNA, 19 nt, Homo sapiens
  misc_RNA (1)...(19): siRNA sense strand
gcgcuggugcagaggauga

SEQ ID NO: 765945 - RNA, 19 nt, Homo sapiens
  misc_RNA (1)...(19): siRNA sense strand
cggaggaggaguuccaguu

SEQ ID NO: 765946 - RNA, 19 nt, Homo sapiens
  misc_RNA (1)...(19): siRNA sense strand
ccgauggcuucgacgaguu

SEQ ID NO: 765947 - RNA, 19 nt, Homo sapiens
  misc_RNA (1)...(19): siRNA sense strand
aggaggaguuccaguuucu

SEQ ID NO: 765948 - RNA, 19 nt, Homo sapiens
  misc_RNA (1)...(19): siRNA sense strand
augcagcuguauccaagaa

SEQ ID NO: 765949 - RNA, 19 nt, Homo sapiens
  misc_RNA (1)...(19): siRNA sense strand
gguaccagcgcgacuacga

SEQ ID NO: 765950 - RNA, 19 nt, Homo sapiens
  misc_RNA (1)...(19): siRNA sense strand
gaccucagcucuugcauca

SEQ ID NO: 765951 - RNA, 19 nt, Homo sapiens
  misc_RNA (1)...(19): siRNA sense strand
ggagcaggauagugccuuu

SEQ ID NO: 765952 - RNA, 19 nt, Homo sapiens
  misc_RNA (1)...(19): siRNA sense strand
ggaggaggaguuccaguuu

SEQ ID NO: 765953 - RNA, 19 nt, Homo sapiens
  misc_RNA (1)...(19): siRNA sense strand
gaggaggaguuccaguuuc

SEQ ID NO: 765954 - RNA, 19 nt, Homo sapiens
  misc_RNA (1)...(19): siRNA sense strand
ggaaagaugcagcuguauc

SEQ ID NO: 765955 - RNA, 19 nt, Homo sapiens
  misc_RNA (1)...(19): siRNA sense strand
gagcucaagugcgacauca

SEQ ID NO: 765956 - RNA, 19 nt, Homo sapiens
  misc_RNA (1)...(19): siRNA sense strand
gcagcuguauccaagaaag

SEQ ID NO: 765957 - RNA, 19 nt, Homo sapiens
  misc_RNA (1)...(19): siRNA sense strand
ggggaaagaugcagcugua

SEQ ID NO: 765958 - RNA, 19 nt, Homo sapiens
  misc_RNA (1)...(19): siRNA sense strand
gaaagaugcagcuguaucc

SEQ ID NO: 765959 - RNA, 19 nt, Homo sapiens
  misc_RNA (1)...(19): siRNA sense strand
cgaagcugcugccuugucu

SEQ ID NO: 765960 - RNA, 19 nt, Homo sapiens
  misc_RNA (1)...(19): siRNA sense strand
ugcagaggaugaagugcua

SEQ ID NO: 765961 - RNA, 19 nt, Homo sapiens
  misc_RNA (1)...(19): siRNA sense strand
cgacaucagcgcagagauc

SEQ ID NO: 765962 - RNA, 19 nt, Homo sapiens
  misc_RNA (1)...(19): siRNA sense strand
gggacccuauugacguuga

SEQ ID NO: 765963 - RNA, 19 nt, Homo sapiens
  misc_RNA (1)...(19): siRNA sense strand
ugcaggaccucagcucuug

SEQ ID NO: 765964 - RNA, 19 nt, Homo sapiens
  misc_RNA (1)...(19): siRNA sense strand
cgcccuggauaacgucuuu

SEQ ID NO: 765965 - RNA, 19 nt, Homo sapiens
  misc_RNA (1)...(19): siRNA sense strand
gccgacuucuggugcuuug

SEQ ID NO: 765966 - RNA, 19 nt, Homo sapiens
  misc_RNA (1)...(19): siRNA sense strand
gcgcuggugcagaggauga

SEQ ID NO: 765967 - RNA, 19 nt, Homo sapiens
  misc_RNA (1)...(19): siRNA sense strand
cggaggaggaguuccaguu

SEQ ID NO: 765968 - RNA, 19 nt, Homo sapiens
  misc_RNA (1)...(19): siRNA sense strand
ccgauggcuucgacgaguu

SEQ ID NO: 765969 - RNA, 19 nt, Homo sapiens
  misc_RNA (1)...(19): siRNA sense strand
aggaggaguuccaguuucu

SEQ ID NO: 765970 - RNA, 19 nt, Homo sapiens
  misc_RNA (1)...(19): siRNA sense strand
augcagcuguauccaagaa

SEQ ID NO: 765971 - RNA, 19 nt, Homo sapiens
  misc_RNA (1)...(19): siRNA sense strand
gguaccagcgcgacuacga

SEQ ID NO: 765972 - RNA, 19 nt, Homo sapiens
  misc_RNA (1)...(19): siRNA sense strand
gaccucagcucuugcauca

SEQ ID NO: 765973 - RNA, 19 nt, Homo sapiens
  misc_RNA (1)...(19): siRNA sense strand
ggagcaggauagugccuuu

SEQ ID NO: 765974 - RNA, 19 nt, Homo sapiens
  misc_RNA (1)...(19): siRNA sense strand
ggaggaggaguuccaguuu

SEQ ID NO: 765975 - RNA, 19 nt, Homo sapiens
  misc_RNA (1)...(19): siRNA sense strand
gaggaggaguuccaguuuc

SEQ ID NO: 765976 - RNA, 19 nt, Homo sapiens
  misc_RNA (1)...(19): siRNA sense strand
ggaaagaugcagcuguauc

SEQ ID NO: 765977 - RNA, 19 nt, Homo sapiens
  misc_RNA (1)...(19): siRNA sense strand
gagcucaagugcgacauca

SEQ ID NO: 765978 - RNA, 19 nt, Homo sapiens
  misc_RNA (1)...(19): siRNA sense strand
gcagcuguauccaagaaag

SEQ ID NO: 765979 - RNA, 19 nt, Homo sapiens
  misc_RNA (1)...(19): siRNA sense strand
ggggaaagaugcagcugua

SEQ ID NO: 765980 - RNA, 19 nt, Homo sapiens
  misc_RNA (1)...(19): siRNA sense strand
gaaagaugcagcuguaucc

SEQ ID NO: 765981 - RNA, 19 nt, Homo sapiens
  misc_RNA (1)...(19): siRNA sense strand
cgaagcugcugccuugucu

SEQ ID NO: 765982 - RNA, 19 nt, Homo sapiens
  misc_RNA (1)...(19): siRNA sense strand
ugcagaggaugaagugcua

SEQ ID NO: 765983 - RNA, 19 nt, Homo sapiens
  misc_RNA (1)...(19): siRNA sense strand
cgacaucagcgcagagauc

SEQ ID NO: 765984 - RNA, 19 nt, Homo sapiens
  misc_RNA (1)...(19): siRNA sense strand
gggacccuauugacguuga

SEQ ID NO: 765985 - RNA, 19 nt, Homo sapiens
  misc_RNA (1)...(19): siRNA sense strand
ugcaggaccucagcucuug

SEQ ID NO: 765986 - RNA, 19 nt, Homo sapiens
  misc_RNA (1)...(19): siRNA sense strand
cgcccuggauaacgucuuu

SEQ ID NO: 765987 - RNA, 19 nt, Homo sapiens
  misc_RNA (1)...(19): siRNA sense strand
gccgacuucuggugcuuug

SEQ ID NO: 765988 - RNA, 19 nt, Homo sapiens
  misc_RNA (1)...(19): siRNA sense strand
gcgcuggugcagaggauga

SEQ ID NO: 765989 - RNA, 19 nt, Homo sapiens
  misc_RNA (1)...(19): siRNA sense strand
cggaggaggaguuccaguu

SEQ ID NO: 765990 - RNA, 19 nt, Homo sapiens
  misc_RNA (1)...(19): siRNA sense strand
ccgauggcuucgacgaguu

SEQ ID NO: 765991 - RNA, 19 nt, Homo sapiens
  misc_RNA (1)...(19): siRNA sense strand
aggaggaguuccaguuucu

SEQ ID NO: 765992 - RNA, 19 nt, Homo sapiens
  misc_RNA (1)...(19): siRNA sense strand
augcagcuguauccaagaa

SEQ ID NO: 765993 - RNA, 19 nt, Homo sapiens
  misc_RNA (1)...(19): siRNA sense strand
gguaccagcgcgacuacga

SEQ ID NO: 765994 - RNA, 19 nt, Homo sapiens
  misc_RNA (1)...(19): siRNA sense strand
gaccucagcucuugcauca

SEQ ID NO: 765995 - RNA, 19 nt, Homo sapiens
  misc_RNA (1)...(19): siRNA sense strand
ggagcaggauagugccuuu

SEQ ID NO: 765996 - RNA, 19 nt, Homo sapiens
  misc_RNA (1)...(19): siRNA sense strand
ggaggaggaguuccaguuu

SEQ ID NO: 765997 - RNA, 19 nt, Homo sapiens
  misc_RNA (1)...(19): siRNA sense strand
gaggaggaguuccaguuuc

SEQ ID NO: 765998 - RNA, 19 nt, Homo sapiens
  misc_RNA (1)...(19): siRNA sense strand
ggaaagaugcagcuguauc

SEQ ID NO: 765999 - RNA, 19 nt, Homo sapiens
  misc_RNA (1)...(19): siRNA sense strand
gagcucaagugcgacauca

SEQ ID NO: 766000 - RNA, 19 nt, Homo sapiens
  misc_RNA (1)...(19): siRNA sense strand
gcagcuguauccaagaaag

SEQ ID NO: 766001 - RNA, 19 nt, Homo sapiens
  misc_RNA (1)...(19): siRNA sense strand
ggggaaagaugcagcugua

SEQ ID NO: 766002 - RNA, 19 nt, Homo sapiens
  misc_RNA (1)...(19): siRNA sense strand
gaaagaugcagcuguaucc

SEQ ID NO: 766003 - RNA, 19 nt, Homo sapiens
  misc_RNA (1)...(19): siRNA sense strand
cgaagcugcugccuugucu

SEQ ID NO: 766004 - RNA, 19 nt, Homo sapiens
  misc_RNA (1)...(19): siRNA sense strand
ugcagaggaugaagugcua

SEQ ID NO: 766005 - RNA, 19 nt, Homo sapiens
  misc_RNA (1)...(19): siRNA sense strand
cgacaucagcgcagagauc

SEQ ID NO: 766006 - RNA, 19 nt, Homo sapiens
  misc_RNA (1)...(19): siRNA sense strand
gggacccuauugacguuga

SEQ ID NO: 766007 - RNA, 19 nt, Homo sapiens
  misc_RNA (1)...(19): siRNA sense strand
ugcaggaccucagcucuug

SEQ ID NO: 766008 - RNA, 19 nt, Homo sapiens
  misc_RNA (1)...(19): siRNA sense strand
cgcccuggauaacgucuuu

SEQ ID NO: 766009 - RNA, 19 nt, Homo sapiens
  misc_RNA (1)...(19): siRNA sense strand
gccgacuucuggugcuuug

SEQ ID NO: 766010 - RNA, 19 nt, Homo sapiens
  misc_RNA (1)...(19): siRNA sense strand
gcgcuggugcagaggauga

SEQ ID NO: 766011 - RNA, 19 nt, Homo sapiens
  misc_RNA (1)...(19): siRNA sense strand
cggaggaggaguuccaguu

SEQ ID NO: 766012 - RNA, 19 nt, Homo sapiens
  misc_RNA (1)...(19): siRNA sense strand
ccgauggcuucgacgaguu

SEQ ID NO: 766013 - RNA, 19 nt, Homo sapiens
  misc_RNA (1)...(19): siRNA sense strand
aggaggaguuccaguuucu

SEQ ID NO: 766014 - RNA, 19 nt, Homo sapiens
  misc_RNA (1)...(19): siRNA sense strand
augcagcuguauccaagaa

SEQ ID NO: 766015 - RNA, 19 nt, Homo sapiens
  misc_RNA (1)...(19): siRNA sense strand
gguaccagcgcgacuacga

SEQ ID NO: 766016 - RNA, 19 nt, Homo sapiens
  misc_RNA (1)...(19): siRNA sense strand
gaccucagcucuugcauca

SEQ ID NO: 766017 - RNA, 19 nt, Homo sapiens
  misc_RNA (1)...(19): siRNA sense strand
ggagcaggauagugccuuu

SEQ ID NO: 766018 - RNA, 19 nt, Homo sapiens
  misc_RNA (1)...(19): siRNA sense strand
ggaggaggaguuccaguuu

SEQ ID NO: 766019 - RNA, 19 nt, Homo sapiens
  misc_RNA (1)...(19): siRNA sense strand
gaggaggaguuccaguuuc

SEQ ID NO: 766020 - RNA, 19 nt, Homo sapiens
  misc_RNA (1)...(19): siRNA sense strand
ggaaagaugcagcuguauc

SEQ ID NO: 766021 - RNA, 19 nt, Homo sapiens
  misc_RNA (1)...(19): siRNA sense strand
gagcucaagugcgacauca

SEQ ID NO: 766022 - RNA, 19 nt, Homo sapiens
  misc_RNA (1)...(19): siRNA sense strand
gcagcuguauccaagaaag

SEQ ID NO: 766023 - RNA, 19 nt, Homo sapiens
  misc_RNA (1)...(19): siRNA sense strand
ggggaaagaugcagcugua

SEQ ID NO: 766024 - RNA, 19 nt, Homo sapiens
  misc_RNA (1)...(19): siRNA sense strand
gaaagaugcagcuguaucc

SEQ ID NO: 766025 - RNA, 19 nt, Homo sapiens
  misc_RNA (1)...(19): siRNA sense strand
cgaagcugcugccuugucu

SEQ ID NO: 766026 - RNA, 19 nt, Homo sapiens
  misc_RNA (1)...(19): siRNA sense strand
ugcagaggaugaagugcua

SEQ ID NO: 766027 - RNA, 19 nt, Homo sapiens
  misc_RNA (1)...(19): siRNA sense strand
cgacaucagcgcagagauc

SEQ ID NO: 766028 - RNA, 19 nt, Homo sapiens
  misc_RNA (1)...(19): siRNA sense strand
gggacccuauugacguuga

SEQ ID NO: 766029 - RNA, 19 nt, Homo sapiens
  misc_RNA (1)...(19): siRNA sense strand
ugcaggaccucagcucuug

SEQ ID NO: 766030 - RNA, 19 nt, Homo sapiens
  misc_RNA (1)...(19): siRNA sense strand
cgcccuggauaacgucuuu

SEQ ID NO: 766031 - RNA, 19 nt, Homo sapiens
  misc_RNA (1)...(19): siRNA sense strand
gccgacuucuggugcuuug

SEQ ID NO: 766032 - RNA, 19 nt, Homo sapiens
  misc_RNA (1)...(19): siRNA sense strand
gcgcuggugcagaggauga

SEQ ID NO: 766033 - RNA, 19 nt, Homo sapiens
  misc_RNA (1)...(19): siRNA sense strand
cggaggaggaguuccaguu

SEQ ID NO: 766034 - RNA, 19 nt, Homo sapiens
  misc_RNA (1)...(19): siRNA sense strand
ccgauggcuucgacgaguu

SEQ ID NO: 766035 - RNA, 19 nt, Homo sapiens
  misc_RNA (1)...(19): siRNA sense strand
aggaggaguuccaguuucu

SEQ ID NO: 766036 - RNA, 19 nt, Homo sapiens
  misc_RNA (1)...(19): siRNA sense strand
augcagcuguauccaagaa

SEQ ID NO: 766037 - RNA, 19 nt, Homo sapiens
  misc_RNA (1)...(19): siRNA sense strand
gguaccagcgcgacuacga

SEQ ID NO: 766038 - RNA, 19 nt, Homo sapiens
  misc_RNA (1)...(19): siRNA sense strand
gaccucagcucuugcauca

SEQ ID NO: 766039 - RNA, 19 nt, Homo sapiens
  misc_RNA (1)...(19): siRNA sense strand
ggagcaggauagugccuuu

SEQ ID NO: 766040 - RNA, 19 nt, Homo sapiens
  misc_RNA (1)...(19): siRNA sense strand
ggaggaggaguuccaguuu

SEQ ID NO: 766041 - RNA, 19 nt, Homo sapiens
  misc_RNA (1)...(19): siRNA sense strand
gaggaggaguuccaguuuc

SEQ ID NO: 766042 - RNA, 19 nt, Homo sapiens
  misc_RNA (1)...(19): siRNA sense strand
ggaaagaugcagcuguauc

SEQ ID NO: 766043 - RNA, 19 nt, Homo sapiens
  misc_RNA (1)...(19): siRNA sense strand
gagcucaagugcgacauca

SEQ ID NO: 766044 - RNA, 19 nt, Homo sapiens
  misc_RNA (1)...(19): siRNA sense strand
gcagcuguauccaagaaag

SEQ ID NO: 766045 - RNA, 19 nt, Homo sapiens
  misc_RNA (1)...(19): siRNA sense strand
ggggaaagaugcagcugua

SEQ ID NO: 766046 - RNA, 19 nt, Homo sapiens
  misc_RNA (1)...(19): siRNA sense strand
gaaagaugcagcuguaucc

SEQ ID NO: 766047 - RNA, 19 nt, Homo sapiens
  misc_RNA (1)...(19): siRNA sense strand
cgaagcugcugccuugucu

SEQ ID NO: 766048 - RNA, 19 nt, Homo sapiens
  misc_RNA (1)...(19): siRNA sense strand
ugcagaggaugaagugcua

SEQ ID NO: 766049 - RNA, 19 nt, Homo sapiens
  misc_RNA (1)...(19): siRNA sense strand
cgacaucagcgcagagauc

SEQ ID NO: 766050 - RNA, 19 nt, Homo sapiens
  misc_RNA (1)...(19): siRNA sense strand
gggacccuauugacguuga

SEQ ID NO: 766051 - RNA, 19 nt, Homo sapiens
  misc_RNA (1)...(19): siRNA sense strand
ugcaggaccucagcucuug

SEQ ID NO: 766052 - RNA, 19 nt, Homo sapiens
  misc_RNA (1)...(19): siRNA sense strand
cgcccuggauaacgucuuu

SEQ ID NO: 766053 - RNA, 19 nt, Homo sapiens
  misc_RNA (1)...(19): siRNA sense strand
gccgacuucuggugcuuug

SEQ ID NO: 766054 - RNA, 19 nt, Homo sapiens
  misc_RNA (1)...(19): siRNA sense strand
gcgcuggugcagaggauga

SEQ ID NO: 766055 - RNA, 19 nt, Homo sapiens
  misc_RNA (1)...(19): siRNA sense strand
cggaggaggaguuccaguu

SEQ ID NO: 766056 - RNA, 19 nt, Homo sapiens
  misc_RNA (1)...(19): siRNA sense strand
ccgauggcuucgacgaguu

SEQ ID NO: 766057 - RNA, 19 nt, Homo sapiens
  misc_RNA (1)...(19): siRNA sense strand
aggaggaguuccaguuucu

SEQ ID NO: 766058 - RNA, 19 nt, Homo sapiens
  misc_RNA (1)...(19): siRNA sense strand
augcagcuguauccaagaa

SEQ ID NO: 766059 - RNA, 19 nt, Homo sapiens
  misc_RNA (1)...(19): siRNA sense strand
gguaccagcgcgacuacga

SEQ ID NO: 766060 - RNA, 19 nt, Homo sapiens
  misc_RNA (1)...(19): siRNA sense strand
gaccucagcucuugcauca

SEQ ID NO: 766061 - RNA, 19 nt, Homo sapiens
  misc_RNA (1)...(19): siRNA sense strand
ggagcaggauagugccuuu

SEQ ID NO: 766062 - RNA, 19 nt, Homo sapiens
  misc_RNA (1)...(19): siRNA sense strand
ggaggaggaguuccaguuu

SEQ ID NO: 766063 - RNA, 19 nt, Homo sapiens
  misc_RNA (1)...(19): siRNA sense strand
gaggaggaguuccaguuuc

SEQ ID NO: 766064 - RNA, 19 nt, Homo sapiens
  misc_RNA (1)...(19): siRNA sense strand
ggaaagaugcagcuguauc

SEQ ID NO: 766065 - RNA, 19 nt, Homo sapiens
  misc_RNA (1)...(19): siRNA sense strand
gagcucaagugcgacauca

SEQ ID NO: 766066 - RNA, 19 nt, Homo sapiens
  misc_RNA (1)...(19): siRNA sense strand
gcagcuguauccaagaaag

SEQ ID NO: 766067 - RNA, 19 nt, Homo sapiens
  misc_RNA (1)...(19): siRNA sense strand
ggggaaagaugcagcugua

SEQ ID NO: 766068 - RNA, 19 nt, Homo sapiens
  misc_RNA (1)...(19): siRNA sense strand
gaaagaugcagcuguaucc

SEQ ID NO: 766069 - RNA, 19 nt, Homo sapiens
  misc_RNA (1)...(19): siRNA sense strand
cgaagcugcugccuugucu

SEQ ID NO: 766070 - RNA, 19 nt, Homo sapiens
  misc_RNA (1)...(19): siRNA sense strand
ugcagaggaugaagugcua

SEQ ID NO: 766071 - RNA, 19 nt, Homo sapiens
  misc_RNA (1)...(19): siRNA sense strand
cgacaucagcgcagagauc

SEQ ID NO: 766072 - RNA, 19 nt, Homo sapiens
  misc_RNA (1)...(19): siRNA sense strand
gggacccuauugacguuga

SEQ ID NO: 766073 - RNA, 19 nt, Homo sapiens
  misc_RNA (1)...(19): siRNA sense strand
ugcaggaccucagcucuug

SEQ ID NO: 766074 - RNA, 19 nt, Homo sapiens
  misc_RNA (1)...(19): siRNA sense strand
cgcccuggauaacgucuuu

SEQ ID NO: 766075 - RNA, 19 nt, Homo sapiens
  misc_RNA (1)...(19): siRNA sense strand
gccgacuucuggugcuuug

SEQ ID NO: 766076 - RNA, 19 nt, Homo sapiens
  misc_RNA (1)...(19): siRNA sense strand
gcgcuggugcagaggauga

SEQ ID NO: 766077 - RNA, 19 nt, Homo sapiens
  misc_RNA (1)...(19): siRNA sense strand
cggaggaggaguuccaguu

SEQ ID NO: 766078 - RNA, 19 nt, Homo sapiens
  misc_RNA (1)...(19): siRNA sense strand
ccgauggcuucgacgaguu

SEQ ID NO: 766079 - RNA, 19 nt, Homo sapiens
  misc_RNA (1)...(19): siRNA sense strand
aggaggaguuccaguuucu

SEQ ID NO: 766080 - RNA, 19 nt, Homo sapiens
  misc_RNA (1)...(19): siRNA sense strand
augcagcuguauccaagaa

SEQ ID NO: 766081 - RNA, 19 nt, Homo sapiens
  misc_RNA (1)...(19): siRNA sense strand
gguaccagcgcgacuacga

SEQ ID NO: 766082 - RNA, 19 nt, Homo sapiens
  misc_RNA (1)...(19): siRNA sense strand
gaaaccagguggauucuga

SEQ ID NO: 766083 - RNA, 19 nt, Homo sapiens
  misc_RNA (1)...(19): siRNA sense strand
gaaaggugcuuccucucuu

SEQ ID NO: 766084 - RNA, 19 nt, Homo sapiens
  misc_RNA (1)...(19): siRNA sense strand
gaaacccgaugaaggcaau

SEQ ID NO: 766085 - RNA, 19 nt, Homo sapiens
  misc_RNA (1)...(19): siRNA sense strand
ucaguugucuccuggaaga

SEQ ID NO: 766086 - RNA, 19 nt, Homo sapiens
  misc_RNA (1)...(19): siRNA sense strand
gcucaguugucuccuggaa

SEQ ID NO: 766087 - RNA, 19 nt, Homo sapiens
  misc_RNA (1)...(19): siRNA sense strand
cacauucuacuuccaauuu

SEQ ID NO: 766088 - RNA, 19 nt, Homo sapiens
  misc_RNA (1)...(19): siRNA sense strand
gcacauucuacuuccaauu

SEQ ID NO: 766089 - RNA, 19 nt, Homo sapiens
  misc_RNA (1)...(19): siRNA sense strand
cauacugucuccuaacaca

SEQ ID NO: 766090 - RNA, 19 nt, Homo sapiens
  misc_RNA (1)...(19): siRNA sense strand
aaaggugcuuccucucuug

SEQ ID NO: 766091 - RNA, 19 nt, Homo sapiens
  misc_RNA (1)...(19): siRNA sense strand
gaaacuuggcugugcuuca

SEQ ID NO: 766092 - RNA, 19 nt, Homo sapiens
  misc_RNA (1)...(19): siRNA sense strand
gaucagaaacccgaugaag

SEQ ID NO: 766093 - RNA, 19 nt, Homo sapiens
  misc_RNA (1)...(19): siRNA sense strand
cuguggagaucauggacua

SEQ ID NO: 766094 - RNA, 19 nt, Homo sapiens
  misc_RNA (1)...(19): siRNA sense strand
ggugcuuccucucuugguu

SEQ ID NO: 766095 - RNA, 19 nt, Homo sapiens
  misc_RNA (1)...(19): siRNA sense strand
gacccauugucaugcagaa

SEQ ID NO: 766096 - RNA, 19 nt, Homo sapiens
  misc_RNA (1)...(19): siRNA sense strand
cauggacuaugaagauuuu

SEQ ID NO: 766097 - RNA, 19 nt, Homo sapiens
  misc_RNA (1)...(19): siRNA sense strand
aaaaccaacuuucgacuuc

SEQ ID NO: 766098 - RNA, 19 nt, Homo sapiens
  misc_RNA (1)...(19): siRNA sense strand
aaacuuggcugugcuucac

SEQ ID NO: 766099 - RNA, 19 nt, Homo sapiens
  misc_RNA (1)...(19): siRNA sense strand
cagaucagaaacccgauga

SEQ ID NO: 766100 - RNA, 19 nt, Homo sapiens
  misc_RNA (1)...(19): siRNA sense strand
ugagacccauugucaugca

SEQ ID NO: 766101 - RNA, 19 nt, Homo sapiens
  misc_RNA (1)...(19): siRNA sense strand
ucugagacccauugucaug

SEQ ID NO: 766102 - RNA, 19 nt, Homo sapiens
  misc_RNA (1)...(19): siRNA sense strand
guucugcgacgacauacug

SEQ ID NO: 766103 - RNA, 19 nt, Homo sapiens
  misc_RNA (1)...(19): siRNA sense strand
gcacagcaacgugaaucuc

SEQ ID NO: 766104 - RNA, 19 nt, Homo sapiens
  misc_RNA (1)...(19): siRNA sense strand
ccaacgaucggaacgaaac

SEQ ID NO: 766105 - RNA, 19 nt, Homo sapiens
  misc_RNA (1)...(19): siRNA sense strand
agaaaggugcuuccucucu

SEQ ID NO: 766106 - RNA, 19 nt, Homo sapiens
  misc_RNA (1)...(19): siRNA sense strand
gguaggaagucacggaaua

SEQ ID NO: 766107 - RNA, 19 nt, Homo sapiens
  misc_RNA (1)...(19): siRNA sense strand
ggaaauaugccuggaagua

SEQ ID NO: 766108 - RNA, 19 nt, Homo sapiens
  misc_RNA (1)...(19): siRNA sense strand
ccaagaggauuauucuauu

SEQ ID NO: 766109 - RNA, 19 nt, Homo sapiens
  misc_RNA (1)...(19): siRNA sense strand
gaggacacguuucugcuuu

SEQ ID NO: 766110 - RNA, 19 nt, Homo sapiens
  misc_RNA (1)...(19): siRNA sense strand
guaacaaaguucacauuca

SEQ ID NO: 766111 - RNA, 19 nt, Homo sapiens
  misc_RNA (1)...(19): siRNA sense strand
aaacaacccagaagaaauu

SEQ ID NO: 766112 - RNA, 19 nt, Homo sapiens
  misc_RNA (1)...(19): siRNA sense strand
uguaguaucugcauuccua

SEQ ID NO: 766113 - RNA, 19 nt, Homo sapiens
  misc_RNA (1)...(19): siRNA sense strand
gucagggucugguguagua

SEQ ID NO: 766114 - RNA, 19 nt, Homo sapiens
  misc_RNA (1)...(19): siRNA sense strand
ccacugcacuuuccagaca

SEQ ID NO: 766115 - RNA, 19 nt, Homo sapiens
  misc_RNA (1)...(19): siRNA sense strand
gaaauaugccuggaaguag

SEQ ID NO: 766116 - RNA, 19 nt, Homo sapiens
  misc_RNA (1)...(19): siRNA sense strand
gcaaggaaccacugcacuu

SEQ ID NO: 766117 - RNA, 19 nt, Homo sapiens
  misc_RNA (1)...(19): siRNA sense strand
gauaggcccucaggcuuug

SEQ ID NO: 766118 - RNA, 19 nt, Homo sapiens
  misc_RNA (1)...(19): siRNA sense strand
gaaaacaacccagaagaaa

SEQ ID NO: 766119 - RNA, 19 nt, Homo sapiens
  misc_RNA (1)...(19): siRNA sense strand
ucaaguucaccaagucuua

SEQ ID NO: 766120 - RNA, 19 nt, Homo sapiens
  misc_RNA (1)...(19): siRNA sense strand
caaggaaccacugcacuuu

SEQ ID NO: 766121 - RNA, 19 nt, Homo sapiens
  misc_RNA (1)...(19): siRNA sense strand
gggaagucauggacagguu

SEQ ID NO: 766122 - RNA, 19 nt, Homo sapiens
  misc_RNA (1)...(19): siRNA sense strand
guucacauucaaccaguua

SEQ ID NO: 766123 - RNA, 19 nt, Homo sapiens
  misc_RNA (1)...(19): siRNA sense strand
cagacaagcaggccaagaa

SEQ ID NO: 766124 - RNA, 19 nt, Homo sapiens
  misc_RNA (1)...(19): siRNA sense strand
ccagaucuccuuucaccaa

SEQ ID NO: 766125 - RNA, 19 nt, Homo sapiens
  misc_RNA (1)...(19): siRNA sense strand
ggaagucauggacagguuu

SEQ ID NO: 766126 - RNA, 19 nt, Homo sapiens
  misc_RNA (1)...(19): siRNA sense strand
cacauucaaccaguuauua

SEQ ID NO: 766127 - RNA, 19 nt, Homo sapiens
  misc_RNA (1)...(19): siRNA sense strand
gaaauggucgggaagucau

SEQ ID NO: 766128 - RNA, 19 nt, Homo sapiens
  misc_RNA (1)...(19): siRNA sense strand
auuccuagccucuaugaua

SEQ ID NO: 766129 - RNA, 19 nt, Homo sapiens
  misc_RNA (1)...(19): siRNA sense strand
uggcaggaguggaaauaug

SEQ ID NO: 766130 - RNA, 19 nt, Homo sapiens
  misc_RNA (1)...(19): siRNA sense strand
ggaggacacguuucugcuu

SEQ ID NO: 766131 - RNA, 19 nt, Homo sapiens
  misc_RNA (1)...(19): siRNA sense strand
gaacuggcaggaguggaaa

SEQ ID NO: 766132 - RNA, 19 nt, Homo sapiens
  misc_RNA (1)...(19): siRNA sense strand
ugauaggcccucaggcuuu

SEQ ID NO: 766133 - RNA, 19 nt, Homo sapiens
  misc_RNA (1)...(19): siRNA sense strand
gacaaaaggucugcaagga

SEQ ID NO: 766134 - RNA, 19 nt, Homo sapiens
  misc_RNA (1)...(19): siRNA sense strand
caugugcacugauaucaac

SEQ ID NO: 766135 - RNA, 19 nt, Homo sapiens
  misc_RNA (1)...(19): siRNA sense strand
ccucaggcuuuguacaugu

SEQ ID NO: 766136 - RNA, 19 nt, Homo sapiens
  misc_RNA (1)...(19): siRNA sense strand
guacaugugcacugauauc

SEQ ID NO: 766137 - RNA, 19 nt, Homo sapiens
  misc_RNA (1)...(19): siRNA sense strand
uuguacaugugcacugaua

SEQ ID NO: 766138 - RNA, 19 nt, Homo sapiens
  misc_RNA (1)...(19): siRNA sense strand
cgaacuggcaggaguggaa

SEQ ID NO: 766139 - RNA, 19 nt, Homo sapiens
  misc_RNA (1)...(19): siRNA sense strand
caaccaguuauuacagauu

SEQ ID NO: 766140 - RNA, 19 nt, Homo sapiens
  misc_RNA (1)...(19): siRNA sense strand
gaucuccuuucaccaagag

SEQ ID NO: 766141 - RNA, 19 nt, Homo sapiens
  misc_RNA (1)...(19): siRNA sense strand
gguuccagaucuccuuuca

SEQ ID NO: 766142 - RNA, 19 nt, Homo sapiens
  misc_RNA (1)...(19): siRNA sense strand
ucacauucaaccaguuauu

SEQ ID NO: 766143 - RNA, 19 nt, Homo sapiens
  misc_RNA (1)...(19): siRNA sense strand
agacaagcaggccaagaaa

SEQ ID NO: 766144 - RNA, 19 nt, Homo sapiens
  misc_RNA (1)...(19): siRNA sense strand
gcauuccuagccucuauga

SEQ ID NO: 766145 - RNA, 19 nt, Homo sapiens
  misc_RNA (1)...(19): siRNA sense strand
ucaaccaguuauuacagau

SEQ ID NO: 766146 - RNA, 19 nt, Homo sapiens
  misc_RNA (1)...(19): siRNA sense strand
gcagaaauggucgggaagu

SEQ ID NO: 766147 - RNA, 19 nt, Homo sapiens
  misc_RNA (1)...(19): siRNA sense strand
cagaaauggucgggaaguc

SEQ ID NO: 766148 - RNA, 19 nt, Homo sapiens
  misc_RNA (1)...(19): siRNA sense strand
cugcauuccuagccucuau

SEQ ID NO: 766149 - RNA, 19 nt, Homo sapiens
  misc_RNA (1)...(19): siRNA sense strand
accaagaggauuauucuau

SEQ ID NO: 766150 - RNA, 19 nt, Homo sapiens
  misc_RNA (1)...(19): siRNA sense strand
ucaccaagaggauuauucu

SEQ ID NO: 766151 - RNA, 19 nt, Homo sapiens
  misc_RNA (1)...(19): siRNA sense strand
guaggaagucacggaauag

SEQ ID NO: 766152 - RNA, 19 nt, Homo sapiens
  misc_RNA (1)...(19): siRNA sense strand
guccucaaguucaccaagu

SEQ ID NO: 766153 - RNA, 19 nt, Homo sapiens
  misc_RNA (1)...(19): siRNA sense strand
ggacacguuucugcuuuug

SEQ ID NO: 766154 - RNA, 19 nt, Homo sapiens
  misc_RNA (1)...(19): siRNA sense strand
uguaacaaaguucacauuc

SEQ ID NO: 766155 - RNA, 19 nt, Homo sapiens
  misc_RNA (1)...(19): siRNA sense strand
ccuuucaccaagaggauua

SEQ ID NO: 766156 - RNA, 19 nt, Homo sapiens
  misc_RNA (1)...(19): siRNA sense strand
acaagcaggccaagaaacu

SEQ ID NO: 766157 - RNA, 19 nt, Homo sapiens
  misc_RNA (1)...(19): siRNA sense strand
gguaggaagucacggaaua

SEQ ID NO: 766158 - RNA, 19 nt, Homo sapiens
  misc_RNA (1)...(19): siRNA sense strand
ggaaauaugccuggaagua

SEQ ID NO: 766159 - RNA, 19 nt, Homo sapiens
  misc_RNA (1)...(19): siRNA sense strand
ccaagaggauuauucuauu

SEQ ID NO: 766160 - RNA, 19 nt, Homo sapiens
  misc_RNA (1)...(19): siRNA sense strand
gaggacacguuucugcuuu

SEQ ID NO: 766161 - RNA, 19 nt, Homo sapiens
  misc_RNA (1)...(19): siRNA sense strand
guaacaaaguucacauuca

SEQ ID NO: 766162 - RNA, 19 nt, Homo sapiens
  misc_RNA (1)...(19): siRNA sense strand
aaacaacccagaagaaauu

SEQ ID NO: 766163 - RNA, 19 nt, Homo sapiens
  misc_RNA (1)...(19): siRNA sense strand
uguaguaucugcauuccua

SEQ ID NO: 766164 - RNA, 19 nt, Homo sapiens
  misc_RNA (1)...(19): siRNA sense strand
gucagggucugguguagua

SEQ ID NO: 766165 - RNA, 19 nt, Homo sapiens
  misc_RNA (1)...(19): siRNA sense strand
ccacugcacuuuccagaca

SEQ ID NO: 766166 - RNA, 19 nt, Homo sapiens
  misc_RNA (1)...(19): siRNA sense strand
gaaauaugccuggaaguag

SEQ ID NO: 766167 - RNA, 19 nt, Homo sapiens
  misc_RNA (1)...(19): siRNA sense strand
gcaaggaaccacugcacuu

SEQ ID NO: 766168 - RNA, 19 nt, Homo sapiens
  misc_RNA (1)...(19): siRNA sense strand
gauaggcccucaggcuuug

SEQ ID NO: 766169 - RNA, 19 nt, Homo sapiens
  misc_RNA (1)...(19): siRNA sense strand
gaaaacaacccagaagaaa

SEQ ID NO: 766170 - RNA, 19 nt, Homo sapiens
  misc_RNA (1)...(19): siRNA sense strand
ucaaguucaccaagucuua

SEQ ID NO: 766171 - RNA, 19 nt, Homo sapiens
  misc_RNA (1)...(19): siRNA sense strand
caaggaaccacugcacuuu

SEQ ID NO: 766172 - RNA, 19 nt, Homo sapiens
  misc_RNA (1)...(19): siRNA sense strand
gggaagucauggacagguu

SEQ ID NO: 766173 - RNA, 19 nt, Homo sapiens
  misc_RNA (1)...(19): siRNA sense strand
guucacauucaaccaguua

SEQ ID NO: 766174 - RNA, 19 nt, Homo sapiens
  misc_RNA (1)...(19): siRNA sense strand
cagacaagcaggccaagaa

SEQ ID NO: 766175 - RNA, 19 nt, Homo sapiens
  misc_RNA (1)...(19): siRNA sense strand
ccagaucuccuuucaccaa

SEQ ID NO: 766176 - RNA, 19 nt, Homo sapiens
  misc_RNA (1)...(19): siRNA sense strand
ggaagucauggacagguuu

SEQ ID NO: 766177 - RNA, 19 nt, Homo sapiens
  misc_RNA (1)...(19): siRNA sense strand
cacauucaaccaguuauua

SEQ ID NO: 766178 - RNA, 19 nt, Homo sapiens
  misc_RNA (1)...(19): siRNA sense strand
gaaauggucgggaagucau

SEQ ID NO: 766179 - RNA, 19 nt, Homo sapiens
  misc_RNA (1)...(19): siRNA sense strand
auuccuagccucuaugaua

SEQ ID NO: 766180 - RNA, 19 nt, Homo sapiens
  misc_RNA (1)...(19): siRNA sense strand
uggcaggaguggaaauaug

SEQ ID NO: 766181 - RNA, 19 nt, Homo sapiens
  misc_RNA (1)...(19): siRNA sense strand
ggaggacacguuucugcuu

SEQ ID NO: 766182 - RNA, 19 nt, Homo sapiens
  misc_RNA (1)...(19): siRNA sense strand
gaacuggcaggaguggaaa

SEQ ID NO: 766183 - RNA, 19 nt, Homo sapiens
  misc_RNA (1)...(19): siRNA sense strand
ugauaggcccucaggcuuu

SEQ ID NO: 766184 - RNA, 19 nt, Homo sapiens
  misc_RNA (1)...(19): siRNA sense strand
gacaaaaggucugcaagga

SEQ ID NO: 766185 - RNA, 19 nt, Homo sapiens
  misc_RNA (1)...(19): siRNA sense strand
caugugcacugauaucaac

SEQ ID NO: 766186 - RNA, 19 nt, Homo sapiens
  misc_RNA (1)...(19): siRNA sense strand
ccucaggcuuuguacaugu

SEQ ID NO: 766187 - RNA, 19 nt, Homo sapiens
  misc_RNA (1)...(19): siRNA sense strand
guacaugugcacugauauc

SEQ ID NO: 766188 - RNA, 19 nt, Homo sapiens
  misc_RNA (1)...(19): siRNA sense strand
uuguacaugugcacugaua

SEQ ID NO: 766189 - RNA, 19 nt, Homo sapiens
  misc_RNA (1)...(19): siRNA sense strand
cgaacuggcaggaguggaa

SEQ ID NO: 766190 - RNA, 19 nt, Homo sapiens
  misc_RNA (1)...(19): siRNA sense strand
caaccaguuauuacagauu

SEQ ID NO: 766191 - RNA, 19 nt, Homo sapiens
  misc_RNA (1)...(19): siRNA sense strand
gaucuccuuucaccaagag

SEQ ID NO: 766192 - RNA, 19 nt, Homo sapiens
  misc_RNA (1)...(19): siRNA sense strand
gguuccagaucuccuuuca

SEQ ID NO: 766193 - RNA, 19 nt, Homo sapiens
  misc_RNA (1)...(19): siRNA sense strand
ucacauucaaccaguuauu

SEQ ID NO: 766194 - RNA, 19 nt, Homo sapiens
  misc_RNA (1)...(19): siRNA sense strand
agacaagcaggccaagaaa

SEQ ID NO: 766195 - RNA, 19 nt, Homo sapiens
  misc_RNA (1)...(19): siRNA sense strand
gcauuccuagccucuauga

SEQ ID NO: 766196 - RNA, 19 nt, Homo sapiens
  misc_RNA (1)...(19): siRNA sense strand
ucaaccaguuauuacagau

SEQ ID NO: 766197 - RNA, 19 nt, Homo sapiens
  misc_RNA (1)...(19): siRNA sense strand
gcagaaauggucgggaagu

SEQ ID NO: 766198 - RNA, 19 nt, Homo sapiens
  misc_RNA (1)...(19): siRNA sense strand
cagaaauggucgggaaguc

SEQ ID NO: 766199 - RNA, 19 nt, Homo sapiens
  misc_RNA (1)...(19): siRNA sense strand
cugcauuccuagccucuau

SEQ ID NO: 766200 - RNA, 19 nt, Homo sapiens
  misc_RNA (1)...(19): siRNA sense strand
accaagaggauuauucuau

SEQ ID NO: 766201 - RNA, 19 nt, Homo sapiens
  misc_RNA (1)...(19): siRNA sense strand
ucaccaagaggauuauucu

SEQ ID NO: 766202 - RNA, 19 nt, Homo sapiens
  misc_RNA (1)...(19): siRNA sense strand
guaggaagucacggaauag

SEQ ID NO: 766203 - RNA, 19 nt, Homo sapiens
  misc_RNA (1)...(19): siRNA sense strand
guccucaaguucaccaagu

SEQ ID NO: 766204 - RNA, 19 nt, Homo sapiens
  misc_RNA (1)...(19): siRNA sense strand
ggacacguuucugcuuuug

SEQ ID NO: 766205 - RNA, 19 nt, Homo sapiens
  misc_RNA (1)...(19): siRNA sense strand
uguaacaaaguucacauuc

SEQ ID NO: 766206 - RNA, 19 nt, Homo sapiens
  misc_RNA (1)...(19): siRNA sense strand
ccuuucaccaagaggauua

SEQ ID NO: 766207 - RNA, 19 nt, Homo sapiens
  misc_RNA (1)...(19): siRNA sense strand
acaagcaggccaagaaacu

SEQ ID NO: 766208 - RNA, 19 nt, Homo sapiens
  misc_RNA (1)...(19): siRNA sense strand
aaggagagaugguggauua

SEQ ID NO: 766209 - RNA, 19 nt, Homo sapiens
  misc_RNA (1)...(19): siRNA sense strand
cagcugggcuuccugguuu

SEQ ID NO: 766210 - RNA, 19 nt, Homo sapiens
  misc_RNA (1)...(19): siRNA sense strand
ccaaagacaucuccaggau

SEQ ID NO: 766211 - RNA, 19 nt, Homo sapiens
  misc_RNA (1)...(19): siRNA sense strand
gagagaugguggauuacaa

SEQ ID NO: 766212 - RNA, 19 nt, Homo sapiens
  misc_RNA (1)...(19): siRNA sense strand
aaagggaccucgcgguaaa

SEQ ID NO: 766213 - RNA, 19 nt, Homo sapiens
  misc_RNA (1)...(19): siRNA sense strand
gaugguggauuacaaugga

SEQ ID NO: 766214 - RNA, 19 nt, Homo sapiens
  misc_RNA (1)...(19): siRNA sense strand
ggauuacaauggaaacauc

SEQ ID NO: 766215 - RNA, 19 nt, Homo sapiens
  misc_RNA (1)...(19): siRNA sense strand
caagggagaaccagggaaa

SEQ ID NO: 766216 - RNA, 19 nt, Homo sapiens
  misc_RNA (1)...(19): siRNA sense strand
ggaagcaggacuagaugga

SEQ ID NO: 766217 - RNA, 19 nt, Homo sapiens
  misc_RNA (1)...(19): siRNA sense strand
caaggcugcuggaacaagu

SEQ ID NO: 766218 - RNA, 19 nt, Homo sapiens
  misc_RNA (1)...(19): siRNA sense strand
gggagaagcaggugucgau

SEQ ID NO: 766219 - RNA, 19 nt, Homo sapiens
  misc_RNA (1)...(19): siRNA sense strand
ggagaacagggaccagaug

SEQ ID NO: 766220 - RNA, 19 nt, Homo sapiens
  misc_RNA (1)...(19): siRNA sense strand
acaauggaaacaucaauga

SEQ ID NO: 766221 - RNA, 19 nt, Homo sapiens
  misc_RNA (1)...(19): siRNA sense strand
gaaaggagagaugguggau

SEQ ID NO: 766222 - RNA, 19 nt, Homo sapiens
  misc_RNA (1)...(19): siRNA sense strand
cuagagguuucccuggauu

SEQ ID NO: 766223 - RNA, 19 nt, Homo sapiens
  misc_RNA (1)...(19): siRNA sense strand
gcaaauggagacggcuauu

SEQ ID NO: 766224 - RNA, 19 nt, Homo sapiens
  misc_RNA (1)...(19): siRNA sense strand
gaaaggcuuccagggagaa

SEQ ID NO: 766225 - RNA, 19 nt, Homo sapiens
  misc_RNA (1)...(19): siRNA sense strand
gcagcugggcuuccugguu

SEQ ID NO: 766226 - RNA, 19 nt, Homo sapiens
  misc_RNA (1)...(19): siRNA sense strand
ggagagaugguggauuaca

SEQ ID NO: 766227 - RNA, 19 nt, Homo sapiens
  misc_RNA (1)...(19): siRNA sense strand
gaugcuggcaacuccauug

SEQ ID NO: 766228 - RNA, 19 nt, Homo sapiens
  misc_RNA (1)...(19): siRNA sense strand
gcguggagcagcuggagaa

SEQ ID NO: 766229 - RNA, 19 nt, Homo sapiens
  misc_RNA (1)...(19): siRNA sense strand
uggagcagcuggagaacag

SEQ ID NO: 766230 - RNA, 19 nt, Homo sapiens
  misc_RNA (1)...(19): siRNA sense strand
ggauuuccgggucccauug

SEQ ID NO: 766231 - RNA, 19 nt, Homo sapiens
  misc_RNA (1)...(19): siRNA sense strand
gagaugguggauuacaaug

SEQ ID NO: 766232 - RNA, 19 nt, Homo sapiens
  misc_RNA (1)...(19): siRNA sense strand
uagcggagcgcacccacaa

SEQ ID NO: 766233 - RNA, 19 nt, Homo sapiens
  misc_RNA (1)...(19): siRNA sense strand
gggagaaccagggaaagga

SEQ ID NO: 766234 - RNA, 19 nt, Homo sapiens
  misc_RNA (1)...(19): siRNA sense strand
gagccaggccagcauccaa

SEQ ID NO: 766235 - RNA, 19 nt, Homo sapiens
  misc_RNA (1)...(19): siRNA sense strand
gguacuccaggaccaauug

SEQ ID NO: 766236 - RNA, 19 nt, Homo sapiens
  misc_RNA (1)...(19): siRNA sense strand
aaaggagacccugggauga

SEQ ID NO: 766237 - RNA, 19 nt, Homo sapiens
  misc_RNA (1)...(19): siRNA sense strand
gagccagggaucccaggaa

SEQ ID NO: 766238 - RNA, 19 nt, Homo sapiens
  misc_RNA (1)...(19): siRNA sense strand
gaaccagggaaaggagaga

SEQ ID NO: 766239 - RNA, 19 nt, Homo sapiens
  misc_RNA (1)...(19): siRNA sense strand
gauuacaauggaaacauca

SEQ ID NO: 766240 - RNA, 19 nt, Homo sapiens
  misc_RNA (1)...(19): siRNA sense strand
ggucaaccaggaacuagag

SEQ ID NO: 766241 - RNA, 19 nt, Homo sapiens
  misc_RNA (1)...(19): siRNA sense strand
aaggagagaugguggauua

SEQ ID NO: 766242 - RNA, 19 nt, Homo sapiens
  misc_RNA (1)...(19): siRNA sense strand
cagcugggcuuccugguuu

SEQ ID NO: 766243 - RNA, 19 nt, Homo sapiens
  misc_RNA (1)...(19): siRNA sense strand
ccaaagacaucuccaggau

SEQ ID NO: 766244 - RNA, 19 nt, Homo sapiens
  misc_RNA (1)...(19): siRNA sense strand
gagagaugguggauuacaa

SEQ ID NO: 766245 - RNA, 19 nt, Homo sapiens
  misc_RNA (1)...(19): siRNA sense strand
aaagggaccucgcgguaaa

SEQ ID NO: 766246 - RNA, 19 nt, Homo sapiens
  misc_RNA (1)...(19): siRNA sense strand
gaugguggauuacaaugga

SEQ ID NO: 766247 - RNA, 19 nt, Homo sapiens
  misc_RNA (1)...(19): siRNA sense strand
ggauuacaauggaaacauc

SEQ ID NO: 766248 - RNA, 19 nt, Homo sapiens
  misc_RNA (1)...(19): siRNA sense strand
caagggagaaccagggaaa

SEQ ID NO: 766249 - RNA, 19 nt, Homo sapiens
  misc_RNA (1)...(19): siRNA sense strand
ggaagcaggacuagaugga

SEQ ID NO: 766250 - RNA, 19 nt, Homo sapiens
  misc_RNA (1)...(19): siRNA sense strand
caaggcugcuggaacaagu

SEQ ID NO: 766251 - RNA, 19 nt, Homo sapiens
  misc_RNA (1)...(19): siRNA sense strand
gggagaagcaggugucgau

SEQ ID NO: 766252 - RNA, 19 nt, Homo sapiens
  misc_RNA (1)...(19): siRNA sense strand
ggagaacagggaccagaug

SEQ ID NO: 766253 - RNA, 19 nt, Homo sapiens
  misc_RNA (1)...(19): siRNA sense strand
acaauggaaacaucaauga

SEQ ID NO: 766254 - RNA, 19 nt, Homo sapiens
  misc_RNA (1)...(19): siRNA sense strand
gaaaggagagaugguggau

SEQ ID NO: 766255 - RNA, 19 nt, Homo sapiens
  misc_RNA (1)...(19): siRNA sense strand
cuagagguuucccuggauu

SEQ ID NO: 766256 - RNA, 19 nt, Homo sapiens
  misc_RNA (1)...(19): siRNA sense strand
gcaaauggagacggcuauu

SEQ ID NO: 766257 - RNA, 19 nt, Homo sapiens
  misc_RNA (1)...(19): siRNA sense strand
gaaaggcuuccagggagaa

SEQ ID NO: 766258 - RNA, 19 nt, Homo sapiens
  misc_RNA (1)...(19): siRNA sense strand
gcagcugggcuuccugguu

SEQ ID NO: 766259 - RNA, 19 nt, Homo sapiens
  misc_RNA (1)...(19): siRNA sense strand
ggagagaugguggauuaca

SEQ ID NO: 766260 - RNA, 19 nt, Homo sapiens
  misc_RNA (1)...(19): siRNA sense strand
gaugcuggcaacuccauug

SEQ ID NO: 766261 - RNA, 19 nt, Homo sapiens
  misc_RNA (1)...(19): siRNA sense strand
gcguggagcagcuggagaa

SEQ ID NO: 766262 - RNA, 19 nt, Homo sapiens
  misc_RNA (1)...(19): siRNA sense strand
uggagcagcuggagaacag

SEQ ID NO: 766263 - RNA, 19 nt, Homo sapiens
  misc_RNA (1)...(19): siRNA sense strand
ggauuuccgggucccauug

SEQ ID NO: 766264 - RNA, 19 nt, Homo sapiens
  misc_RNA (1)...(19): siRNA sense strand
gagaugguggauuacaaug

SEQ ID NO: 766265 - RNA, 19 nt, Homo sapiens
  misc_RNA (1)...(19): siRNA sense strand
uagcggagcgcacccacaa

SEQ ID NO: 766266 - RNA, 19 nt, Homo sapiens
  misc_RNA (1)...(19): siRNA sense strand
gggagaaccagggaaagga

SEQ ID NO: 766267 - RNA, 19 nt, Homo sapiens
  misc_RNA (1)...(19): siRNA sense strand
gagccaggccagcauccaa

SEQ ID NO: 766268 - RNA, 19 nt, Homo sapiens
  misc_RNA (1)...(19): siRNA sense strand
gguacuccaggaccaauug

SEQ ID NO: 766269 - RNA, 19 nt, Homo sapiens
  misc_RNA (1)...(19): siRNA sense strand
aaaggagacccugggauga

SEQ ID NO: 766270 - RNA, 19 nt, Homo sapiens
  misc_RNA (1)...(19): siRNA sense strand
gagccagggaucccaggaa

SEQ ID NO: 766271 - RNA, 19 nt, Homo sapiens
  misc_RNA (1)...(19): siRNA sense strand
gaaccagggaaaggagaga

SEQ ID NO: 766272 - RNA, 19 nt, Homo sapiens
  misc_RNA (1)...(19): siRNA sense strand
gauuacaauggaaacauca

SEQ ID NO: 766273 - RNA, 19 nt, Homo sapiens
  misc_RNA (1)...(19): siRNA sense strand
ggucaaccaggaacuagag

SEQ ID NO: 766274 - RNA, 19 nt, Homo sapiens
  misc_RNA (1)...(19): siRNA sense strand
aaggagagaugguggauua

SEQ ID NO: 766275 - RNA, 19 nt, Homo sapiens
  misc_RNA (1)...(19): siRNA sense strand
cagcugggcuuccugguuu

SEQ ID NO: 766276 - RNA, 19 nt, Homo sapiens
  misc_RNA (1)...(19): siRNA sense strand
ccaaagacaucuccaggau

SEQ ID NO: 766277 - RNA, 19 nt, Homo sapiens
  misc_RNA (1)...(19): siRNA sense strand
gagagaugguggauuacaa

SEQ ID NO: 766278 - RNA, 19 nt, Homo sapiens
  misc_RNA (1)...(19): siRNA sense strand
aaagggaccucgcgguaaa

SEQ ID NO: 766279 - RNA, 19 nt, Homo sapiens
  misc_RNA (1)...(19): siRNA sense strand
gaugguggauuacaaugga

SEQ ID NO: 766280 - RNA, 19 nt, Homo sapiens
  misc_RNA (1)...(19): siRNA sense strand
ggauuacaauggaaacauc

SEQ ID NO: 766281 - RNA, 19 nt, Homo sapiens
  misc_RNA (1)...(19): siRNA sense strand
caagggagaaccagggaaa

SEQ ID NO: 766282 - RNA, 19 nt, Homo sapiens
  misc_RNA (1)...(19): siRNA sense strand
ggaagcaggacuagaugga

SEQ ID NO: 766283 - RNA, 19 nt, Homo sapiens
  misc_RNA (1)...(19): siRNA sense strand
caaggcugcuggaacaagu

SEQ ID NO: 766284 - RNA, 19 nt, Homo sapiens
  misc_RNA (1)...(19): siRNA sense strand
gggagaagcaggugucgau

SEQ ID NO: 766285 - RNA, 19 nt, Homo sapiens
  misc_RNA (1)...(19): siRNA sense strand
ggagaacagggaccagaug

SEQ ID NO: 766286 - RNA, 19 nt, Homo sapiens
  misc_RNA (1)...(19): siRNA sense strand
acaauggaaacaucaauga

SEQ ID NO: 766287 - RNA, 19 nt, Homo sapiens
  misc_RNA (1)...(19): siRNA sense strand
gaaaggagagaugguggau

SEQ ID NO: 766288 - RNA, 19 nt, Homo sapiens
  misc_RNA (1)...(19): siRNA sense strand
cuagagguuucccuggauu

SEQ ID NO: 766289 - RNA, 19 nt, Homo sapiens
  misc_RNA (1)...(19): siRNA sense strand
gcaaauggagacggcuauu

SEQ ID NO: 766290 - RNA, 19 nt, Homo sapiens
  misc_RNA (1)...(19): siRNA sense strand
gaaaggcuuccagggagaa

SEQ ID NO: 766291 - RNA, 19 nt, Homo sapiens
  misc_RNA (1)...(19): siRNA sense strand
gcagcugggcuuccugguu

SEQ ID NO: 766292 - RNA, 19 nt, Homo sapiens
  misc_RNA (1)...(19): siRNA sense strand
ggagagaugguggauuaca

SEQ ID NO: 766293 - RNA, 19 nt, Homo sapiens
  misc_RNA (1)...(19): siRNA sense strand
gaugcuggcaacuccauug

SEQ ID NO: 766294 - RNA, 19 nt, Homo sapiens
  misc_RNA (1)...(19): siRNA sense strand
gcguggagcagcuggagaa

SEQ ID NO: 766295 - RNA, 19 nt, Homo sapiens
  misc_RNA (1)...(19): siRNA sense strand
uggagcagcuggagaacag

SEQ ID NO: 766296 - RNA, 19 nt, Homo sapiens
  misc_RNA (1)...(19): siRNA sense strand
ggauuuccgggucccauug

SEQ ID NO: 766297 - RNA, 19 nt, Homo sapiens
  misc_RNA (1)...(19): siRNA sense strand
gagaugguggauuacaaug

SEQ ID NO: 766298 - RNA, 19 nt, Homo sapiens
  misc_RNA (1)...(19): siRNA sense strand
uagcggagcgcacccacaa

SEQ ID NO: 766299 - RNA, 19 nt, Homo sapiens
  misc_RNA (1)...(19): siRNA sense strand
gggagaaccagggaaagga

SEQ ID NO: 766300 - RNA, 19 nt, Homo sapiens
  misc_RNA (1)...(19): siRNA sense strand
gagccaggccagcauccaa

SEQ ID NO: 766301 - RNA, 19 nt, Homo sapiens
  misc_RNA (1)...(19): siRNA sense strand
gguacuccaggaccaauug

SEQ ID NO: 766302 - RNA, 19 nt, Homo sapiens
  misc_RNA (1)...(19): siRNA sense strand
aaaggagacccugggauga

SEQ ID NO: 766303 - RNA, 19 nt, Homo sapiens
  misc_RNA (1)...(19): siRNA sense strand
gagccagggaucccaggaa

SEQ ID NO: 766304 - RNA, 19 nt, Homo sapiens
  misc_RNA (1)...(19): siRNA sense strand
gaaccagggaaaggagaga

SEQ ID NO: 766305 - RNA, 19 nt, Homo sapiens
  misc_RNA (1)...(19): siRNA sense strand
gauuacaauggaaacauca

SEQ ID NO: 766306 - RNA, 19 nt, Homo sapiens
  misc_RNA (1)...(19): siRNA sense strand
ggucaaccaggaacuagag

SEQ ID NO: 766307 - RNA, 19 nt, Homo sapiens
  misc_RNA (1)...(19): siRNA sense strand
aaggagagaugguggauua

SEQ ID NO: 766308 - RNA, 19 nt, Homo sapiens
  misc_RNA (1)...(19): siRNA sense strand
cagcugggcuuccugguuu

SEQ ID NO: 766309 - RNA, 19 nt, Homo sapiens
  misc_RNA (1)...(19): siRNA sense strand
ccaaagacaucuccaggau

SEQ ID NO: 766310 - RNA, 19 nt, Homo sapiens
  misc_RNA (1)...(19): siRNA sense strand
gagagaugguggauuacaa

SEQ ID NO: 766311 - RNA, 19 nt, Homo sapiens
  misc_RNA (1)...(19): siRNA sense strand
aaagggaccucgcgguaaa

SEQ ID NO: 766312 - RNA, 19 nt, Homo sapiens
  misc_RNA (1)...(19): siRNA sense strand
gaugguggauuacaaugga

SEQ ID NO: 766313 - RNA, 19 nt, Homo sapiens
  misc_RNA (1)...(19): siRNA sense strand
ggauuacaauggaaacauc

SEQ ID NO: 766314 - RNA, 19 nt, Homo sapiens
  misc_RNA (1)...(19): siRNA sense strand
caagggagaaccagggaaa

SEQ ID NO: 766315 - RNA, 19 nt, Homo sapiens
  misc_RNA (1)...(19): siRNA sense strand
ggaagcaggacuagaugga

SEQ ID NO: 766316 - RNA, 19 nt, Homo sapiens
  misc_RNA (1)...(19): siRNA sense strand
caaggcugcuggaacaagu

SEQ ID NO: 766317 - RNA, 19 nt, Homo sapiens
  misc_RNA (1)...(19): siRNA sense strand
gggagaagcaggugucgau

SEQ ID NO: 766318 - RNA, 19 nt, Homo sapiens
  misc_RNA (1)...(19): siRNA sense strand
ggagaacagggaccagaug

SEQ ID NO: 766319 - RNA, 19 nt, Homo sapiens
  misc_RNA (1)...(19): siRNA sense strand
acaauggaaacaucaauga

SEQ ID NO: 766320 - RNA, 19 nt, Homo sapiens
  misc_RNA (1)...(19): siRNA sense strand
gaaaggagagaugguggau

SEQ ID NO: 766321 - RNA, 19 nt, Homo sapiens
  misc_RNA (1)...(19): siRNA sense strand
cuagagguuucccuggauu

SEQ ID NO: 766322 - RNA, 19 nt, Homo sapiens
  misc_RNA (1)...(19): siRNA sense strand
gcaaauggagacggcuauu

SEQ ID NO: 766323 - RNA, 19 nt, Homo sapiens
  misc_RNA (1)...(19): siRNA sense strand
gaaaggcuuccagggagaa

SEQ ID NO: 766324 - RNA, 19 nt, Homo sapiens
  misc_RNA (1)...(19): siRNA sense strand
gcagcugggcuuccugguu

SEQ ID NO: 766325 - RNA, 19 nt, Homo sapiens
  misc_RNA (1)...(19): siRNA sense strand
ggagagaugguggauuaca

SEQ ID NO: 766326 - RNA, 19 nt, Homo sapiens
  misc_RNA (1)...(19): siRNA sense strand
gaugcuggcaacuccauug

SEQ ID NO: 766327 - RNA, 19 nt, Homo sapiens
  misc_RNA (1)...(19): siRNA sense strand
gcguggagcagcuggagaa

SEQ ID NO: 766328 - RNA, 19 nt, Homo sapiens
  misc_RNA (1)...(19): siRNA sense strand
uggagcagcuggagaacag

SEQ ID NO: 766329 - RNA, 19 nt, Homo sapiens
  misc_RNA (1)...(19): siRNA sense strand
ggauuuccgggucccauug

SEQ ID NO: 766330 - RNA, 19 nt, Homo sapiens
  misc_RNA (1)...(19): siRNA sense strand
gagaugguggauuacaaug

SEQ ID NO: 766331 - RNA, 19 nt, Homo sapiens
  misc_RNA (1)...(19): siRNA sense strand
uagcggagcgcacccacaa

SEQ ID NO: 766332 - RNA, 19 nt, Homo sapiens
  misc_RNA (1)...(19): siRNA sense strand
gggagaaccagggaaagga

SEQ ID NO: 766333 - RNA, 19 nt, Homo sapiens
  misc_RNA (1)...(19): siRNA sense strand
gagccaggccagcauccaa

SEQ ID NO: 766334 - RNA, 19 nt, Homo sapiens
  misc_RNA (1)...(19): siRNA sense strand
gguacuccaggaccaauug

SEQ ID NO: 766335 - RNA, 19 nt, Homo sapiens
  misc_RNA (1)...(19): siRNA sense strand
aaaggagacccugggauga

SEQ ID NO: 766336 - RNA, 19 nt, Homo sapiens
  misc_RNA (1)...(19): siRNA sense strand
gagccagggaucccaggaa

SEQ ID NO: 766337 - RNA, 19 nt, Homo sapiens
  misc_RNA (1)...(19): siRNA sense strand
gaaccagggaaaggagaga

SEQ ID NO: 766338 - RNA, 19 nt, Homo sapiens
  misc_RNA (1)...(19): siRNA sense strand
gauuacaauggaaacauca

SEQ ID NO: 766339 - RNA, 19 nt, Homo sapiens
  misc_RNA (1)...(19): siRNA sense strand
ggucaaccaggaacuagag

SEQ ID NO: 766340 - RNA, 19 nt, Homo sapiens
  misc_RNA (1)...(19): siRNA sense strand
aaggagagaugguggauua

SEQ ID NO: 766341 - RNA, 19 nt, Homo sapiens
  misc_RNA (1)...(19): siRNA sense strand
cagcugggcuuccugguuu

SEQ ID NO: 766342 - RNA, 19 nt, Homo sapiens
  misc_RNA (1)...(19): siRNA sense strand
ccaaagacaucuccaggau

SEQ ID NO: 766343 - RNA, 19 nt, Homo sapiens
  misc_RNA (1)...(19): siRNA sense strand
gagagaugguggauuacaa

SEQ ID NO: 766344 - RNA, 19 nt, Homo sapiens
  misc_RNA (1)...(19): siRNA sense strand
aaagggaccucgcgguaaa

SEQ ID NO: 766345 - RNA, 19 nt, Homo sapiens
  misc_RNA (1)...(19): siRNA sense strand
gaugguggauuacaaugga

SEQ ID NO: 766346 - RNA, 19 nt, Homo sapiens
  misc_RNA (1)...(19): siRNA sense strand
ggauuacaauggaaacauc

SEQ ID NO: 766347 - RNA, 19 nt, Homo sapiens
  misc_RNA (1)...(19): siRNA sense strand
caagggagaaccagggaaa

SEQ ID NO: 766348 - RNA, 19 nt, Homo sapiens
  misc_RNA (1)...(19): siRNA sense strand
ggaagcaggacuagaugga

SEQ ID NO: 766349 - RNA, 19 nt, Homo sapiens
  misc_RNA (1)...(19): siRNA sense strand
caaggcugcuggaacaagu

SEQ ID NO: 766350 - RNA, 19 nt, Homo sapiens
  misc_RNA (1)...(19): siRNA sense strand
gggagaagcaggugucgau

SEQ ID NO: 766351 - RNA, 19 nt, Homo sapiens
  misc_RNA (1)...(19): siRNA sense strand
ggagaacagggaccagaug

SEQ ID NO: 766352 - RNA, 19 nt, Homo sapiens
  misc_RNA (1)...(19): siRNA sense strand
acaauggaaacaucaauga

SEQ ID NO: 766353 - RNA, 19 nt, Homo sapiens
  misc_RNA (1)...(19): siRNA sense strand
gaaaggagagaugguggau

SEQ ID NO: 766354 - RNA, 19 nt, Homo sapiens
  misc_RNA (1)...(19): siRNA sense strand
cuagagguuucccuggauu

SEQ ID NO: 766355 - RNA, 19 nt, Homo sapiens
  misc_RNA (1)...(19): siRNA sense strand
gcaaauggagacggcuauu

SEQ ID NO: 766356 - RNA, 19 nt, Homo sapiens
  misc_RNA (1)...(19): siRNA sense strand
gaaaggcuuccagggagaa

SEQ ID NO: 766357 - RNA, 19 nt, Homo sapiens
  misc_RNA (1)...(19): siRNA sense strand
gcagcugggcuuccugguu

SEQ ID NO: 766358 - RNA, 19 nt, Homo sapiens
  misc_RNA (1)...(19): siRNA sense strand
ggagagaugguggauuaca

SEQ ID NO: 766359 - RNA, 19 nt, Homo sapiens
  misc_RNA (1)...(19): siRNA sense strand
gaugcuggcaacuccauug

SEQ ID NO: 766360 - RNA, 19 nt, Homo sapiens
  misc_RNA (1)...(19): siRNA sense strand
gcguggagcagcuggagaa

SEQ ID NO: 766361 - RNA, 19 nt, Homo sapiens
  misc_RNA (1)...(19): siRNA sense strand
uggagcagcuggagaacag

SEQ ID NO: 766362 - RNA, 19 nt, Homo sapiens
  misc_RNA (1)...(19): siRNA sense strand
ggauuuccgggucccauug

SEQ ID NO: 766363 - RNA, 19 nt, Homo sapiens
  misc_RNA (1)...(19): siRNA sense strand
gagaugguggauuacaaug

SEQ ID NO: 766364 - RNA, 19 nt, Homo sapiens
  misc_RNA (1)...(19): siRNA sense strand
uagcggagcgcacccacaa

SEQ ID NO: 766365 - RNA, 19 nt, Homo sapiens
  misc_RNA (1)...(19): siRNA sense strand
gggagaaccagggaaagga

SEQ ID NO: 766366 - RNA, 19 nt, Homo sapiens
  misc_RNA (1)...(19): siRNA sense strand
gagccaggccagcauccaa

SEQ ID NO: 766367 - RNA, 19 nt, Homo sapiens
  misc_RNA (1)...(19): siRNA sense strand
gguacuccaggaccaauug

SEQ ID NO: 766368 - RNA, 19 nt, Homo sapiens
  misc_RNA (1)...(19): siRNA sense strand
aaaggagacccugggauga

SEQ ID NO: 766369 - RNA, 19 nt, Homo sapiens
  misc_RNA (1)...(19): siRNA sense strand
gagccagggaucccaggaa

SEQ ID NO: 766370 - RNA, 19 nt, Homo sapiens
  misc_RNA (1)...(19): siRNA sense strand
gaaccagggaaaggagaga

SEQ ID NO: 766371 - RNA, 19 nt, Homo sapiens
  misc_RNA (1)...(19): siRNA sense strand
gauuacaauggaaacauca

SEQ ID NO: 766372 - RNA, 19 nt, Homo sapiens
  misc_RNA (1)...(19): siRNA sense strand
ggucaaccaggaacuagag

SEQ ID NO: 766373 - RNA, 19 nt, Homo sapiens
  misc_RNA (1)...(19): siRNA sense strand
aaggagagaugguggauua

SEQ ID NO: 766374 - RNA, 19 nt, Homo sapiens
  misc_RNA (1)...(19): siRNA sense strand
cagcugggcuuccugguuu

SEQ ID NO: 766375 - RNA, 19 nt, Homo sapiens
  misc_RNA (1)...(19): siRNA sense strand
ccaaagacaucuccaggau

SEQ ID NO: 766376 - RNA, 19 nt, Homo sapiens
  misc_RNA (1)...(19): siRNA sense strand
gagagaugguggauuacaa

SEQ ID NO: 766377 - RNA, 19 nt, Homo sapiens
  misc_RNA (1)...(19): siRNA sense strand
aaagggaccucgcgguaaa

SEQ ID NO: 766378 - RNA, 19 nt, Homo sapiens
  misc_RNA (1)...(19): siRNA sense strand
gaugguggauuacaaugga

SEQ ID NO: 766379 - RNA, 19 nt, Homo sapiens
  misc_RNA (1)...(19): siRNA sense strand
ggauuacaauggaaacauc

SEQ ID NO: 766380 - RNA, 19 nt, Homo sapiens
  misc_RNA (1)...(19): siRNA sense strand
caagggagaaccagggaaa

SEQ ID NO: 766381 - RNA, 19 nt, Homo sapiens
  misc_RNA (1)...(19): siRNA sense strand
ggaagcaggacuagaugga

SEQ ID NO: 766382 - RNA, 19 nt, Homo sapiens
  misc_RNA (1)...(19): siRNA sense strand
caaggcugcuggaacaagu

SEQ ID NO: 766383 - RNA, 19 nt, Homo sapiens
  misc_RNA (1)...(19): siRNA sense strand
gggagaagcaggugucgau

SEQ ID NO: 766384 - RNA, 19 nt, Homo sapiens
  misc_RNA (1)...(19): siRNA sense strand
ggagaacagggaccagaug

SEQ ID NO: 766385 - RNA, 19 nt, Homo sapiens
  misc_RNA (1)...(19): siRNA sense strand
acaauggaaacaucaauga

SEQ ID NO: 766386 - RNA, 19 nt, Homo sapiens
  misc_RNA (1)...(19): siRNA sense strand
gaaaggagagaugguggau

SEQ ID NO: 766387 - RNA, 19 nt, Homo sapiens
  misc_RNA (1)...(19): siRNA sense strand
cuagagguuucccuggauu

SEQ ID NO: 766388 - RNA, 19 nt, Homo sapiens
  misc_RNA (1)...(19): siRNA sense strand
gcaaauggagacggcuauu

SEQ ID NO: 766389 - RNA, 19 nt, Homo sapiens
  misc_RNA (1)...(19): siRNA sense strand
gaaaggcuuccagggagaa

SEQ ID NO: 766390 - RNA, 19 nt, Homo sapiens
  misc_RNA (1)...(19): siRNA sense strand
gcagcugggcuuccugguu

SEQ ID NO: 766391 - RNA, 19 nt, Homo sapiens
  misc_RNA (1)...(19): siRNA sense strand
ggagagaugguggauuaca

SEQ ID NO: 766392 - RNA, 19 nt, Homo sapiens
  misc_RNA (1)...(19): siRNA sense strand
gaugcuggcaacuccauug

SEQ ID NO: 766393 - RNA, 19 nt, Homo sapiens
  misc_RNA (1)...(19): siRNA sense strand
gcguggagcagcuggagaa

SEQ ID NO: 766394 - RNA, 19 nt, Homo sapiens
  misc_RNA (1)...(19): siRNA sense strand
uggagcagcuggagaacag

SEQ ID NO: 766395 - RNA, 19 nt, Homo sapiens
  misc_RNA (1)...(19): siRNA sense strand
ggauuuccgggucccauug

SEQ ID NO: 766396 - RNA, 19 nt, Homo sapiens
  misc_RNA (1)...(19): siRNA sense strand
gagaugguggauuacaaug

SEQ ID NO: 766397 - RNA, 19 nt, Homo sapiens
  misc_RNA (1)...(19): siRNA sense strand
uagcggagcgcacccacaa

SEQ ID NO: 766398 - RNA, 19 nt, Homo sapiens
  misc_RNA (1)...(19): siRNA sense strand
gggagaaccagggaaagga

SEQ ID NO: 766399 - RNA, 19 nt, Homo sapiens
  misc_RNA (1)...(19): siRNA sense strand
gagccaggccagcauccaa

SEQ ID NO: 766400 - RNA, 19 nt, Homo sapiens
  misc_RNA (1)...(19): siRNA sense strand
gguacuccaggaccaauug

SEQ ID NO: 766401 - RNA, 19 nt, Homo sapiens
  misc_RNA (1)...(19): siRNA sense strand
aaaggagacccugggauga

SEQ ID NO: 766402 - RNA, 19 nt, Homo sapiens
  misc_RNA (1)...(19): siRNA sense strand
gagccagggaucccaggaa

SEQ ID NO: 766403 - RNA, 19 nt, Homo sapiens
  misc_RNA (1)...(19): siRNA sense strand
gaaccagggaaaggagaga

SEQ ID NO: 766404 - RNA, 19 nt, Homo sapiens
  misc_RNA (1)...(19): siRNA sense strand
gauuacaauggaaacauca

SEQ ID NO: 766405 - RNA, 19 nt, Homo sapiens
  misc_RNA (1)...(19): siRNA sense strand
ggucaaccaggaacuagag

SEQ ID NO: 766406 - RNA, 19 nt, Homo sapiens
  misc_RNA (1)...(19): siRNA sense strand
aaggagagaugguggauua

SEQ ID NO: 766407 - RNA, 19 nt, Homo sapiens
  misc_RNA (1)...(19): siRNA sense strand
cagcugggcuuccugguuu

SEQ ID NO: 766408 - RNA, 19 nt, Homo sapiens
  misc_RNA (1)...(19): siRNA sense strand
ccaaagacaucuccaggau

SEQ ID NO: 766409 - RNA, 19 nt, Homo sapiens
  misc_RNA (1)...(19): siRNA sense strand
gagagaugguggauuacaa

SEQ ID NO: 766410 - RNA, 19 nt, Homo sapiens
  misc_RNA (1)...(19): siRNA sense strand
aaagggaccucgcgguaaa

SEQ ID NO: 766411 - RNA, 19 nt, Homo sapiens
  misc_RNA (1)...(19): siRNA sense strand
gaugguggauuacaaugga

SEQ ID NO: 766412 - RNA, 19 nt, Homo sapiens
  misc_RNA (1)...(19): siRNA sense strand
ggauuacaauggaaacauc

SEQ ID NO: 766413 - RNA, 19 nt, Homo sapiens
  misc_RNA (1)...(19): siRNA sense strand
caagggagaaccagggaaa

SEQ ID NO: 766414 - RNA, 19 nt, Homo sapiens
  misc_RNA (1)...(19): siRNA sense strand
ggaagcaggacuagaugga

SEQ ID NO: 766415 - RNA, 19 nt, Homo sapiens
  misc_RNA (1)...(19): siRNA sense strand
caaggcugcuggaacaagu

SEQ ID NO: 766416 - RNA, 19 nt, Homo sapiens
  misc_RNA (1)...(19): siRNA sense strand
gggagaagcaggugucgau

SEQ ID NO: 766417 - RNA, 19 nt, Homo sapiens
  misc_RNA (1)...(19): siRNA sense strand
ggagaacagggaccagaug

SEQ ID NO: 766418 - RNA, 19 nt, Homo sapiens
  misc_RNA (1)...(19): siRNA sense strand
acaauggaaacaucaauga

SEQ ID NO: 766419 - RNA, 19 nt, Homo sapiens
  misc_RNA (1)...(19): siRNA sense strand
gaaaggagagaugguggau

SEQ ID NO: 766420 - RNA, 19 nt, Homo sapiens
  misc_RNA (1)...(19): siRNA sense strand
cuagagguuucccuggauu

SEQ ID NO: 766421 - RNA, 19 nt, Homo sapiens
  misc_RNA (1)...(19): siRNA sense strand
gcaaauggagacggcuauu

SEQ ID NO: 766422 - RNA, 19 nt, Homo sapiens
  misc_RNA (1)...(19): siRNA sense strand
gaaaggcuuccagggagaa

SEQ ID NO: 766423 - RNA, 19 nt, Homo sapiens
  misc_RNA (1)...(19): siRNA sense strand
gcagcugggcuuccugguu

SEQ ID NO: 766424 - RNA, 19 nt, Homo sapiens
  misc_RNA (1)...(19): siRNA sense strand
ggagagaugguggauuaca

SEQ ID NO: 766425 - RNA, 19 nt, Homo sapiens
  misc_RNA (1)...(19): siRNA sense strand
gaugcuggcaacuccauug

SEQ ID NO: 766426 - RNA, 19 nt, Homo sapiens
  misc_RNA (1)...(19): siRNA sense strand
gcguggagcagcuggagaa

SEQ ID NO: 766427 - RNA, 19 nt, Homo sapiens
  misc_RNA (1)...(19): siRNA sense strand
uggagcagcuggagaacag

SEQ ID NO: 766428 - RNA, 19 nt, Homo sapiens
  misc_RNA (1)...(19): siRNA sense strand
ggauuuccgggucccauug

SEQ ID NO: 766429 - RNA, 19 nt, Homo sapiens
  misc_RNA (1)...(19): siRNA sense strand
gagaugguggauuacaaug

SEQ ID NO: 766430 - RNA, 19 nt, Homo sapiens
  misc_RNA (1)...(19): siRNA sense strand
uagcggagcgcacccacaa

SEQ ID NO: 766431 - RNA, 19 nt, Homo sapiens
  misc_RNA (1)...(19): siRNA sense strand
gggagaaccagggaaagga

SEQ ID NO: 766432 - RNA, 19 nt, Homo sapiens
  misc_RNA (1)...(19): siRNA sense strand
gagccaggccagcauccaa

SEQ ID NO: 766433 - RNA, 19 nt, Homo sapiens
  misc_RNA (1)...(19): siRNA sense strand
gguacuccaggaccaauug

SEQ ID NO: 766434 - RNA, 19 nt, Homo sapiens
  misc_RNA (1)...(19): siRNA sense strand
aaaggagacccugggauga

SEQ ID NO: 766435 - RNA, 19 nt, Homo sapiens
  misc_RNA (1)...(19): siRNA sense strand
gagccagggaucccaggaa

SEQ ID NO: 766436 - RNA, 19 nt, Homo sapiens
  misc_RNA (1)...(19): siRNA sense strand
gaaccagggaaaggagaga

SEQ ID NO: 766437 - RNA, 19 nt, Homo sapiens
  misc_RNA (1)...(19): siRNA sense strand
gauuacaauggaaacauca

SEQ ID NO: 766438 - RNA, 19 nt, Homo sapiens
  misc_RNA (1)...(19): siRNA sense strand
ggucaaccaggaacuagag

SEQ ID NO: 766439 - RNA, 19 nt, Homo sapiens
  misc_RNA (1)...(19): siRNA sense strand
aaggagagaugguggauua

SEQ ID NO: 766440 - RNA, 19 nt, Homo sapiens
  misc_RNA (1)...(19): siRNA sense strand
cagcugggcuuccugguuu

SEQ ID NO: 766441 - RNA, 19 nt, Homo sapiens
  misc_RNA (1)...(19): siRNA sense strand
ccaaagacaucuccaggau

SEQ ID NO: 766442 - RNA, 19 nt, Homo sapiens
  misc_RNA (1)...(19): siRNA sense strand
gagagaugguggauuacaa

SEQ ID NO: 766443 - RNA, 19 nt, Homo sapiens
  misc_RNA (1)...(19): siRNA sense strand
aaagggaccucgcgguaaa

SEQ ID NO: 766444 - RNA, 19 nt, Homo sapiens
  misc_RNA (1)...(19): siRNA sense strand
gaugguggauuacaaugga

SEQ ID NO: 766445 - RNA, 19 nt, Homo sapiens
  misc_RNA (1)...(19): siRNA sense strand
ggauuacaauggaaacauc

SEQ ID NO: 766446 - RNA, 19 nt, Homo sapiens
  misc_RNA (1)...(19): siRNA sense strand
caagggagaaccagggaaa

SEQ ID NO: 766447 - RNA, 19 nt, Homo sapiens
  misc_RNA (1)...(19): siRNA sense strand
ggaagcaggacuagaugga

SEQ ID NO: 766448 - RNA, 19 nt, Homo sapiens
  misc_RNA (1)...(19): siRNA sense strand
caaggcugcuggaacaagu

SEQ ID NO: 766449 - RNA, 19 nt, Homo sapiens
  misc_RNA (1)...(19): siRNA sense strand
gggagaagcaggugucgau

SEQ ID NO: 766450 - RNA, 19 nt, Homo sapiens
  misc_RNA (1)...(19): siRNA sense strand
ggagaacagggaccagaug

SEQ ID NO: 766451 - RNA, 19 nt, Homo sapiens
  misc_RNA (1)...(19): siRNA sense strand
acaauggaaacaucaauga

SEQ ID NO: 766452 - RNA, 19 nt, Homo sapiens
  misc_RNA (1)...(19): siRNA sense strand
gaaaggagagaugguggau

SEQ ID NO: 766453 - RNA, 19 nt, Homo sapiens
  misc_RNA (1)...(19): siRNA sense strand
cuagagguuucccuggauu

SEQ ID NO: 766454 - RNA, 19 nt, Homo sapiens
  misc_RNA (1)...(19): siRNA sense strand
gcaaauggagacggcuauu

SEQ ID NO: 766455 - RNA, 19 nt, Homo sapiens
  misc_RNA (1)...(19): siRNA sense strand
gaaaggcuuccagggagaa

SEQ ID NO: 766456 - RNA, 19 nt, Homo sapiens
  misc_RNA (1)...(19): siRNA sense strand
gcagcugggcuuccugguu

SEQ ID NO: 766457 - RNA, 19 nt, Homo sapiens
  misc_RNA (1)...(19): siRNA sense strand
ggagagaugguggauuaca

SEQ ID NO: 766458 - RNA, 19 nt, Homo sapiens
  misc_RNA (1)...(19): siRNA sense strand
gaugcuggcaacuccauug

SEQ ID NO: 766459 - RNA, 19 nt, Homo sapiens
  misc_RNA (1)...(19): siRNA sense strand
gcguggagcagcuggagaa

SEQ ID NO: 766460 - RNA, 19 nt, Homo sapiens
  misc_RNA (1)...(19): siRNA sense strand
uggagcagcuggagaacag

SEQ ID NO: 766461 - RNA, 19 nt, Homo sapiens
  misc_RNA (1)...(19): siRNA sense strand
ggauuuccgggucccauug

SEQ ID NO: 766462 - RNA, 19 nt, Homo sapiens
  misc_RNA (1)...(19): siRNA sense strand
gagaugguggauuacaaug

SEQ ID NO: 766463 - RNA, 19 nt, Homo sapiens
  misc_RNA (1)...(19): siRNA sense strand
uagcggagcgcacccacaa

SEQ ID NO: 766464 - RNA, 19 nt, Homo sapiens
  misc_RNA (1)...(19): siRNA sense strand
gggagaaccagggaaagga

SEQ ID NO: 766465 - RNA, 19 nt, Homo sapiens
  misc_RNA (1)...(19): siRNA sense strand
gagccaggccagcauccaa

SEQ ID NO: 766466 - RNA, 19 nt, Homo sapiens
  misc_RNA (1)...(19): siRNA sense strand
gguacuccaggaccaauug

SEQ ID NO: 766467 - RNA, 19 nt, Homo sapiens
  misc_RNA (1)...(19): siRNA sense strand
aaaggagacccugggauga

SEQ ID NO: 766468 - RNA, 19 nt, Homo sapiens
  misc_RNA (1)...(19): siRNA sense strand
gagccagggaucccaggaa

SEQ ID NO: 766469 - RNA, 19 nt, Homo sapiens
  misc_RNA (1)...(19): siRNA sense strand
gaaccagggaaaggagaga

SEQ ID NO: 766470 - RNA, 19 nt, Homo sapiens
  misc_RNA (1)...(19): siRNA sense strand
gauuacaauggaaacauca

SEQ ID NO: 766471 - RNA, 19 nt, Homo sapiens
  misc_RNA (1)...(19): siRNA sense strand
ggucaaccaggaacuagag

SEQ ID NO: 766472 - RNA, 19 nt, Homo sapiens
  misc_RNA (1)...(19): siRNA sense strand
aaggagagaugguggauua

SEQ ID NO: 766473 - RNA, 19 nt, Homo sapiens
  misc_RNA (1)...(19): siRNA sense strand
cagcugggcuuccugguuu

SEQ ID NO: 766474 - RNA, 19 nt, Homo sapiens
  misc_RNA (1)...(19): siRNA sense strand
ccaaagacaucuccaggau

SEQ ID NO: 766475 - RNA, 19 nt, Homo sapiens
  misc_RNA (1)...(19): siRNA sense strand
gagagaugguggauuacaa

SEQ ID NO: 766476 - RNA, 19 nt, Homo sapiens
  misc_RNA (1)...(19): siRNA sense strand
aaagggaccucgcgguaaa

SEQ ID NO: 766477 - RNA, 19 nt, Homo sapiens
  misc_RNA (1)...(19): siRNA sense strand
gaugguggauuacaaugga

SEQ ID NO: 766478 - RNA, 19 nt, Homo sapiens
  misc_RNA (1)...(19): siRNA sense strand
ggauuacaauggaaacauc

SEQ ID NO: 766479 - RNA, 19 nt, Homo sapiens
  misc_RNA (1)...(19): siRNA sense strand
caagggagaaccagggaaa

SEQ ID NO: 766480 - RNA, 19 nt, Homo sapiens
  misc_RNA (1)...(19): siRNA sense strand
ggaagcaggacuagaugga

SEQ ID NO: 766481 - RNA, 19 nt, Homo sapiens
  misc_RNA (1)...(19): siRNA sense strand
caaggcugcuggaacaagu

SEQ ID NO: 766482 - RNA, 19 nt, Homo sapiens
  misc_RNA (1)...(19): siRNA sense strand
gggagaagcaggugucgau

SEQ ID NO: 766483 - RNA, 19 nt, Homo sapiens
  misc_RNA (1)...(19): siRNA sense strand
ggagaacagggaccagaug

SEQ ID NO: 766484 - RNA, 19 nt, Homo sapiens
  misc_RNA (1)...(19): siRNA sense strand
acaauggaaacaucaauga

SEQ ID NO: 766485 - RNA, 19 nt, Homo sapiens
  misc_RNA (1)...(19): siRNA sense strand
gaaaggagagaugguggau

SEQ ID NO: 766486 - RNA, 19 nt, Homo sapiens
  misc_RNA (1)...(19): siRNA sense strand
cuagagguuucccuggauu

SEQ ID NO: 766487 - RNA, 19 nt, Homo sapiens
  misc_RNA (1)...(19): siRNA sense strand
gcaaauggagacggcuauu

SEQ ID NO: 766488 - RNA, 19 nt, Homo sapiens
  misc_RNA (1)...(19): siRNA sense strand
gaaaggcuuccagggagaa

SEQ ID NO: 766489 - RNA, 19 nt, Homo sapiens
  misc_RNA (1)...(19): siRNA sense strand
gcagcugggcuuccugguu

SEQ ID NO: 766490 - RNA, 19 nt, Homo sapiens
  misc_RNA (1)...(19): siRNA sense strand
ggagagaugguggauuaca

SEQ ID NO: 766491 - RNA, 19 nt, Homo sapiens
  misc_RNA (1)...(19): siRNA sense strand
gaugcuggcaacuccauug

SEQ ID NO: 766492 - RNA, 19 nt, Homo sapiens
  misc_RNA (1)...(19): siRNA sense strand
gcguggagcagcuggagaa

SEQ ID NO: 766493 - RNA, 19 nt, Homo sapiens
  misc_RNA (1)...(19): siRNA sense strand
uggagcagcuggagaacag

SEQ ID NO: 766494 - RNA, 19 nt, Homo sapiens
  misc_RNA (1)...(19): siRNA sense strand
ggauuuccgggucccauug

SEQ ID NO: 766495 - RNA, 19 nt, Homo sapiens
  misc_RNA (1)...(19): siRNA sense strand
gagaugguggauuacaaug

SEQ ID NO: 766496 - RNA, 19 nt, Homo sapiens
  misc_RNA (1)...(19): siRNA sense strand
uagcggagcgcacccacaa

SEQ ID NO: 766497 - RNA, 19 nt, Homo sapiens
  misc_RNA (1)...(19): siRNA sense strand
gggagaaccagggaaagga

SEQ ID NO: 766498 - RNA, 19 nt, Homo sapiens
  misc_RNA (1)...(19): siRNA sense strand
gagccaggccagcauccaa

SEQ ID NO: 766499 - RNA, 19 nt, Homo sapiens
  misc_RNA (1)...(19): siRNA sense strand
gguacuccaggaccaauug

SEQ ID NO: 766500 - RNA, 19 nt, Homo sapiens
  misc_RNA (1)...(19): siRNA sense strand
aaaggagacccugggauga

SEQ ID NO: 766501 - RNA, 19 nt, Homo sapiens
  misc_RNA (1)...(19): siRNA sense strand
gagccagggaucccaggaa

SEQ ID NO: 766502 - RNA, 19 nt, Homo sapiens
  misc_RNA (1)...(19): siRNA sense strand
gaaccagggaaaggagaga

SEQ ID NO: 766503 - RNA, 19 nt, Homo sapiens
  misc_RNA (1)...(19): siRNA sense strand
gauuacaauggaaacauca

SEQ ID NO: 766504 - RNA, 19 nt, Homo sapiens
  misc_RNA (1)...(19): siRNA sense strand
ggucaaccaggaacuagag

SEQ ID NO: 766505 - RNA, 19 nt, Homo sapiens
  misc_RNA (1)...(19): siRNA sense strand
aaggagagaugguggauua

SEQ ID NO: 766506 - RNA, 19 nt, Homo sapiens
  misc_RNA (1)...(19): siRNA sense strand
cagcugggcuuccugguuu

SEQ ID NO: 766507 - RNA, 19 nt, Homo sapiens
  misc_RNA (1)...(19): siRNA sense strand
ccaaagacaucuccaggau

SEQ ID NO: 766508 - RNA, 19 nt, Homo sapiens
  misc_RNA (1)...(19): siRNA sense strand
gagagaugguggauuacaa

SEQ ID NO: 766509 - RNA, 19 nt, Homo sapiens
  misc_RNA (1)...(19): siRNA sense strand
aaagggaccucgcgguaaa

SEQ ID NO: 766510 - RNA, 19 nt, Homo sapiens
  misc_RNA (1)...(19): siRNA sense strand
gaugguggauuacaaugga

SEQ ID NO: 766511 - RNA, 19 nt, Homo sapiens
  misc_RNA (1)...(19): siRNA sense strand
ggauuacaauggaaacauc

SEQ ID NO: 766512 - RNA, 19 nt, Homo sapiens
  misc_RNA (1)...(19): siRNA sense strand
caagggagaaccagggaaa

SEQ ID NO: 766513 - RNA, 19 nt, Homo sapiens
  misc_RNA (1)...(19): siRNA sense strand
ggaagcaggacuagaugga

SEQ ID NO: 766514 - RNA, 19 nt, Homo sapiens
  misc_RNA (1)...(19): siRNA sense strand
caaggcugcuggaacaagu

SEQ ID NO: 766515 - RNA, 19 nt, Homo sapiens
  misc_RNA (1)...(19): siRNA sense strand
gggagaagcaggugucgau

SEQ ID NO: 766516 - RNA, 19 nt, Homo sapiens
  misc_RNA (1)...(19): siRNA sense strand
ggagaacagggaccagaug

SEQ ID NO: 766517 - RNA, 19 nt, Homo sapiens
  misc_RNA (1)...(19): siRNA sense strand
acaauggaaacaucaauga

SEQ ID NO: 766518 - RNA, 19 nt, Homo sapiens
  misc_RNA (1)...(19): siRNA sense strand
gaaaggagagaugguggau

SEQ ID NO: 766519 - RNA, 19 nt, Homo sapiens
  misc_RNA (1)...(19): siRNA sense strand
cuagagguuucccuggauu

SEQ ID NO: 766520 - RNA, 19 nt, Homo sapiens
  misc_RNA (1)...(19): siRNA sense strand
gcaaauggagacggcuauu

SEQ ID NO: 766521 - RNA, 19 nt, Homo sapiens
  misc_RNA (1)...(19): siRNA sense strand
gaaaggcuuccagggagaa

SEQ ID NO: 766522 - RNA, 19 nt, Homo sapiens
  misc_RNA (1)...(19): siRNA sense strand
gcagcugggcuuccugguu

SEQ ID NO: 766523 - RNA, 19 nt, Homo sapiens
  misc_RNA (1)...(19): siRNA sense strand
ggagagaugguggauuaca

SEQ ID NO: 766524 - RNA, 19 nt, Homo sapiens
  misc_RNA (1)...(19): siRNA sense strand
gaugcuggcaacuccauug

SEQ ID NO: 766525 - RNA, 19 nt, Homo sapiens
  misc_RNA (1)...(19): siRNA sense strand
gcguggagcagcuggagaa

SEQ ID NO: 766526 - RNA, 19 nt, Homo sapiens
  misc_RNA (1)...(19): siRNA sense strand
uggagcagcuggagaacag

SEQ ID NO: 766527 - RNA, 19 nt, Homo sapiens
  misc_RNA (1)...(19): siRNA sense strand
ggauuuccgggucccauug

SEQ ID NO: 766528 - RNA, 19 nt, Homo sapiens
  misc_RNA (1)...(19): siRNA sense strand
gagaugguggauuacaaug

SEQ ID NO: 766529 - RNA, 19 nt, Homo sapiens
  misc_RNA (1)...(19): siRNA sense strand
uagcggagcgcacccacaa

SEQ ID NO: 766530 - RNA, 19 nt, Homo sapiens
  misc_RNA (1)...(19): siRNA sense strand
gggagaaccagggaaagga

SEQ ID NO: 766531 - RNA, 19 nt, Homo sapiens
  misc_RNA (1)...(19): siRNA sense strand
gagccaggccagcauccaa

SEQ ID NO: 766532 - RNA, 19 nt, Homo sapiens
  misc_RNA (1)...(19): siRNA sense strand
gguacuccaggaccaauug

SEQ ID NO: 766533 - RNA, 19 nt, Homo sapiens
  misc_RNA (1)...(19): siRNA sense strand
aaaggagacccugggauga

SEQ ID NO: 766534 - RNA, 19 nt, Homo sapiens
  misc_RNA (1)...(19): siRNA sense strand
gagccagggaucccaggaa

SEQ ID NO: 766535 - RNA, 19 nt, Homo sapiens
  misc_RNA (1)...(19): siRNA sense strand
gaaccagggaaaggagaga

SEQ ID NO: 766536 - RNA, 19 nt, Homo sapiens
  misc_RNA (1)...(19): siRNA sense strand
gauuacaauggaaacauca

SEQ ID NO: 766537 - RNA, 19 nt, Homo sapiens
  misc_RNA (1)...(19): siRNA sense strand
ggucaaccaggaacuagag

SEQ ID NO: 766538 - RNA, 19 nt, Homo sapiens
  misc_RNA (1)...(19): siRNA sense strand
aaggagagaugguggauua

SEQ ID NO: 766539 - RNA, 19 nt, Homo sapiens
  misc_RNA (1)...(19): siRNA sense strand
cagcugggcuuccugguuu

SEQ ID NO: 766540 - RNA, 19 nt, Homo sapiens
  misc_RNA (1)...(19): siRNA sense strand
ccaaagacaucuccaggau

SEQ ID NO: 766541 - RNA, 19 nt, Homo sapiens
  misc_RNA (1)...(19): siRNA sense strand
gagagaugguggauuacaa

SEQ ID NO: 766542 - RNA, 19 nt, Homo sapiens
  misc_RNA (1)...(19): siRNA sense strand
aaagggaccucgcgguaaa

SEQ ID NO: 766543 - RNA, 19 nt, Homo sapiens
  misc_RNA (1)...(19): siRNA sense strand
gaugguggauuacaaugga

SEQ ID NO: 766544 - RNA, 19 nt, Homo sapiens
  misc_RNA (1)...(19): siRNA sense strand
ggauuacaauggaaacauc

SEQ ID NO: 766545 - RNA, 19 nt, Homo sapiens
  misc_RNA (1)...(19): siRNA sense strand
caagggagaaccagggaaa

SEQ ID NO: 766546 - RNA, 19 nt, Homo sapiens
  misc_RNA (1)...(19): siRNA sense strand
ggaagcaggacuagaugga

SEQ ID NO: 766547 - RNA, 19 nt, Homo sapiens
  misc_RNA (1)...(19): siRNA sense strand
caaggcugcuggaacaagu

SEQ ID NO: 766548 - RNA, 19 nt, Homo sapiens
  misc_RNA (1)...(19): siRNA sense strand
gggagaagcaggugucgau

SEQ ID NO: 766549 - RNA, 19 nt, Homo sapiens
  misc_RNA (1)...(19): siRNA sense strand
ggagaacagggaccagaug

SEQ ID NO: 766550 - RNA, 19 nt, Homo sapiens
  misc_RNA (1)...(19): siRNA sense strand
acaauggaaacaucaauga

SEQ ID NO: 766551 - RNA, 19 nt, Homo sapiens
  misc_RNA (1)...(19): siRNA sense strand
gaaaggagagaugguggau

SEQ ID NO: 766552 - RNA, 19 nt, Homo sapiens
  misc_RNA (1)...(19): siRNA sense strand
cuagagguuucccuggauu

SEQ ID NO: 766553 - RNA, 19 nt, Homo sapiens
  misc_RNA (1)...(19): siRNA sense strand
gcaaauggagacggcuauu

SEQ ID NO: 766554 - RNA, 19 nt, Homo sapiens
  misc_RNA (1)...(19): siRNA sense strand
gaaaggcuuccagggagaa

SEQ ID NO: 766555 - RNA, 19 nt, Homo sapiens
  misc_RNA (1)...(19): siRNA sense strand
gcagcugggcuuccugguu

SEQ ID NO: 766556 - RNA, 19 nt, Homo sapiens
  misc_RNA (1)...(19): siRNA sense strand
ggagagaugguggauuaca

SEQ ID NO: 766557 - RNA, 19 nt, Homo sapiens
  misc_RNA (1)...(19): siRNA sense strand
gaugcuggcaacuccauug

SEQ ID NO: 766558 - RNA, 19 nt, Homo sapiens
  misc_RNA (1)...(19): siRNA sense strand
gcguggagcagcuggagaa

SEQ ID NO: 766559 - RNA, 19 nt, Homo sapiens
  misc_RNA (1)...(19): siRNA sense strand
uggagcagcuggagaacag

SEQ ID NO: 766560 - RNA, 19 nt, Homo sapiens
  misc_RNA (1)...(19): siRNA sense strand
ggauuuccgggucccauug

SEQ ID NO: 766561 - RNA, 19 nt, Homo sapiens
  misc_RNA (1)...(19): siRNA sense strand
gagaugguggauuacaaug

SEQ ID NO: 766562 - RNA, 19 nt, Homo sapiens
  misc_RNA (1)...(19): siRNA sense strand
uagcggagcgcacccacaa

SEQ ID NO: 766563 - RNA, 19 nt, Homo sapiens
  misc_RNA (1)...(19): siRNA sense strand
gggagaaccagggaaagga

SEQ ID NO: 766564 - RNA, 19 nt, Homo sapiens
  misc_RNA (1)...(19): siRNA sense strand
gagccaggccagcauccaa

SEQ ID NO: 766565 - RNA, 19 nt, Homo sapiens
  misc_RNA (1)...(19): siRNA sense strand
gguacuccaggaccaauug

SEQ ID NO: 766566 - RNA, 19 nt, Homo sapiens
  misc_RNA (1)...(19): siRNA sense strand
aaaggagacccugggauga

SEQ ID NO: 766567 - RNA, 19 nt, Homo sapiens
  misc_RNA (1)...(19): siRNA sense strand
gagccagggaucccaggaa

SEQ ID NO: 766568 - RNA, 19 nt, Homo sapiens
  misc_RNA (1)...(19): siRNA sense strand
gaaccagggaaaggagaga

SEQ ID NO: 766569 - RNA, 19 nt, Homo sapiens
  misc_RNA (1)...(19): siRNA sense strand
gauuacaauggaaacauca

SEQ ID NO: 766570 - RNA, 19 nt, Homo sapiens
  misc_RNA (1)...(19): siRNA sense strand
ggucaaccaggaacuagag

SEQ ID NO: 766571 - RNA, 19 nt, Homo sapiens
  misc_RNA (1)...(19): siRNA sense strand
aaggagagaugguggauua

SEQ ID NO: 766572 - RNA, 19 nt, Homo sapiens
  misc_RNA (1)...(19): siRNA sense strand
cagcugggcuuccugguuu

SEQ ID NO: 766573 - RNA, 19 nt, Homo sapiens
  misc_RNA (1)...(19): siRNA sense strand
ccaaagacaucuccaggau

SEQ ID NO: 766574 - RNA, 19 nt, Homo sapiens
  misc_RNA (1)...(19): siRNA sense strand
gagagaugguggauuacaa

SEQ ID NO: 766575 - RNA, 19 nt, Homo sapiens
  misc_RNA (1)...(19): siRNA sense strand
aaagggaccucgcgguaaa

SEQ ID NO: 766576 - RNA, 19 nt, Homo sapiens
  misc_RNA (1)...(19): siRNA sense strand
gaugguggauuacaaugga

SEQ ID NO: 766577 - RNA, 19 nt, Homo sapiens
  misc_RNA (1)...(19): siRNA sense strand
ggauuacaauggaaacauc

SEQ ID NO: 766578 - RNA, 19 nt, Homo sapiens
  misc_RNA (1)...(19): siRNA sense strand
caagggagaaccagggaaa

SEQ ID NO: 766579 - RNA, 19 nt, Homo sapiens
  misc_RNA (1)...(19): siRNA sense strand
ggaagcaggacuagaugga

SEQ ID NO: 766580 - RNA, 19 nt, Homo sapiens
  misc_RNA (1)...(19): siRNA sense strand
caaggcugcuggaacaagu

SEQ ID NO: 766581 - RNA, 19 nt, Homo sapiens
  misc_RNA (1)...(19): siRNA sense strand
gggagaagcaggugucgau

SEQ ID NO: 766582 - RNA, 19 nt, Homo sapiens
  misc_RNA (1)...(19): siRNA sense strand
ggagaacagggaccagaug

SEQ ID NO: 766583 - RNA, 19 nt, Homo sapiens
  misc_RNA (1)...(19): siRNA sense strand
acaauggaaacaucaauga

SEQ ID NO: 766584 - RNA, 19 nt, Homo sapiens
  misc_RNA (1)...(19): siRNA sense strand
gaaaggagagaugguggau

SEQ ID NO: 766585 - RNA, 19 nt, Homo sapiens
  misc_RNA (1)...(19): siRNA sense strand
cuagagguuucccuggauu

SEQ ID NO: 766586 - RNA, 19 nt, Homo sapiens
  misc_RNA (1)...(19): siRNA sense strand
gcaaauggagacggcuauu

SEQ ID NO: 766587 - RNA, 19 nt, Homo sapiens
  misc_RNA (1)...(19): siRNA sense strand
gaaaggcuuccagggagaa

SEQ ID NO: 766588 - RNA, 19 nt, Homo sapiens
  misc_RNA (1)...(19): siRNA sense strand
gcagcugggcuuccugguu

SEQ ID NO: 766589 - RNA, 19 nt, Homo sapiens
  misc_RNA (1)...(19): siRNA sense strand
ggagagaugguggauuaca

SEQ ID NO: 766590 - RNA, 19 nt, Homo sapiens
  misc_RNA (1)...(19): siRNA sense strand
gaugcuggcaacuccauug

SEQ ID NO: 766591 - RNA, 19 nt, Homo sapiens
  misc_RNA (1)...(19): siRNA sense strand
gcguggagcagcuggagaa

SEQ ID NO: 766592 - RNA, 19 nt, Homo sapiens
  misc_RNA (1)...(19): siRNA sense strand
uggagcagcuggagaacag

SEQ ID NO: 766593 - RNA, 19 nt, Homo sapiens
  misc_RNA (1)...(19): siRNA sense strand
ggauuuccgggucccauug

SEQ ID NO: 766594 - RNA, 19 nt, Homo sapiens
  misc_RNA (1)...(19): siRNA sense strand
gagaugguggauuacaaug

SEQ ID NO: 766595 - RNA, 19 nt, Homo sapiens
  misc_RNA (1)...(19): siRNA sense strand
uagcggagcgcacccacaa

SEQ ID NO: 766596 - RNA, 19 nt, Homo sapiens
  misc_RNA (1)...(19): siRNA sense strand
gggagaaccagggaaagga

SEQ ID NO: 766597 - RNA, 19 nt, Homo sapiens
  misc_RNA (1)...(19): siRNA sense strand
gagccaggccagcauccaa

SEQ ID NO: 766598 - RNA, 19 nt, Homo sapiens
  misc_RNA (1)...(19): siRNA sense strand
gguacuccaggaccaauug

SEQ ID NO: 766599 - RNA, 19 nt, Homo sapiens
  misc_RNA (1)...(19): siRNA sense strand
aaaggagacccugggauga

SEQ ID NO: 766600 - RNA, 19 nt, Homo sapiens
  misc_RNA (1)...(19): siRNA sense strand
gagccagggaucccaggaa

SEQ ID NO: 766601 - RNA, 19 nt, Homo sapiens
  misc_RNA (1)...(19): siRNA sense strand
gaaccagggaaaggagaga

SEQ ID NO: 766602 - RNA, 19 nt, Homo sapiens
  misc_RNA (1)...(19): siRNA sense strand
gauuacaauggaaacauca

SEQ ID NO: 766603 - RNA, 19 nt, Homo sapiens
  misc_RNA (1)...(19): siRNA sense strand
ggucaaccaggaacuagag

SEQ ID NO: 766604 - RNA, 19 nt, Homo sapiens
  misc_RNA (1)...(19): siRNA sense strand
aaggagagaugguggauua

SEQ ID NO: 766605 - RNA, 19 nt, Homo sapiens
  misc_RNA (1)...(19): siRNA sense strand
cagcugggcuuccugguuu

SEQ ID NO: 766606 - RNA, 19 nt, Homo sapiens
  misc_RNA (1)...(19): siRNA sense strand
ccaaagacaucuccaggau

SEQ ID NO: 766607 - RNA, 19 nt, Homo sapiens
  misc_RNA (1)...(19): siRNA sense strand
gagagaugguggauuacaa

SEQ ID NO: 766608 - RNA, 19 nt, Homo sapiens
  misc_RNA (1)...(19): siRNA sense strand
aaagggaccucgcgguaaa

SEQ ID NO: 766609 - RNA, 19 nt, Homo sapiens
  misc_RNA (1)...(19): siRNA sense strand
gaugguggauuacaaugga

SEQ ID NO: 766610 - RNA, 19 nt, Homo sapiens
  misc_RNA (1)...(19): siRNA sense strand
ggauuacaauggaaacauc

SEQ ID NO: 766611 - RNA, 19 nt, Homo sapiens
  misc_RNA (1)...(19): siRNA sense strand
caagggagaaccagggaaa

SEQ ID NO: 766612 - RNA, 19 nt, Homo sapiens
  misc_RNA (1)...(19): siRNA sense strand
ggaagcaggacuagaugga

SEQ ID NO: 766613 - RNA, 19 nt, Homo sapiens
  misc_RNA (1)...(19): siRNA sense strand
caaggcugcuggaacaagu

SEQ ID NO: 766614 - RNA, 19 nt, Homo sapiens
  misc_RNA (1)...(19): siRNA sense strand
gggagaagcaggugucgau

SEQ ID NO: 766615 - RNA, 19 nt, Homo sapiens
  misc_RNA (1)...(19): siRNA sense strand
ggagaacagggaccagaug

SEQ ID NO: 766616 - RNA, 19 nt, Homo sapiens
  misc_RNA (1)...(19): siRNA sense strand
acaauggaaacaucaauga

SEQ ID NO: 766617 - RNA, 19 nt, Homo sapiens
  misc_RNA (1)...(19): siRNA sense strand
gaaaggagagaugguggau

SEQ ID NO: 766618 - RNA, 19 nt, Homo sapiens
  misc_RNA (1)...(19): siRNA sense strand
cuagagguuucccuggauu

SEQ ID NO: 766619 - RNA, 19 nt, Homo sapiens
  misc_RNA (1)...(19): siRNA sense strand
gcaaauggagacggcuauu

SEQ ID NO: 766620 - RNA, 19 nt, Homo sapiens
  misc_RNA (1)...(19): siRNA sense strand
gaaaggcuuccagggagaa

SEQ ID NO: 766621 - RNA, 19 nt, Homo sapiens
  misc_RNA (1)...(19): siRNA sense strand
gcagcugggcuuccugguu

SEQ ID NO: 766622 - RNA, 19 nt, Homo sapiens
  misc_RNA (1)...(19): siRNA sense strand
ggagagaugguggauuaca

SEQ ID NO: 766623 - RNA, 19 nt, Homo sapiens
  misc_RNA (1)...(19): siRNA sense strand
gaugcuggcaacuccauug

SEQ ID NO: 766624 - RNA, 19 nt, Homo sapiens
  misc_RNA (1)...(19): siRNA sense strand
gcguggagcagcuggagaa

SEQ ID NO: 766625 - RNA, 19 nt, Homo sapiens
  misc_RNA (1)...(19): siRNA sense strand
uggagcagcuggagaacag

SEQ ID NO: 766626 - RNA, 19 nt, Homo sapiens
  misc_RNA (1)...(19): siRNA sense strand
ggauuuccgggucccauug

SEQ ID NO: 766627 - RNA, 19 nt, Homo sapiens
  misc_RNA (1)...(19): siRNA sense strand
gagaugguggauuacaaug

SEQ ID NO: 766628 - RNA, 19 nt, Homo sapiens
  misc_RNA (1)...(19): siRNA sense strand
uagcggagcgcacccacaa

SEQ ID NO: 766629 - RNA, 19 nt, Homo sapiens
  misc_RNA (1)...(19): siRNA sense strand
gggagaaccagggaaagga

SEQ ID NO: 766630 - RNA, 19 nt, Homo sapiens
  misc_RNA (1)...(19): siRNA sense strand
gagccaggccagcauccaa

SEQ ID NO: 766631 - RNA, 19 nt, Homo sapiens
  misc_RNA (1)...(19): siRNA sense strand
gguacuccaggaccaauug

SEQ ID NO: 766632 - RNA, 19 nt, Homo sapiens
  misc_RNA (1)...(19): siRNA sense strand
aaaggagacccugggauga

SEQ ID NO: 766633 - RNA, 19 nt, Homo sapiens
  misc_RNA (1)...(19): siRNA sense strand
gagccagggaucccaggaa

SEQ ID NO: 766634 - RNA, 19 nt, Homo sapiens
  misc_RNA (1)...(19): siRNA sense strand
gaaccagggaaaggagaga

SEQ ID NO: 766635 - RNA, 19 nt, Homo sapiens
  misc_RNA (1)...(19): siRNA sense strand
gauuacaauggaaacauca

SEQ ID NO: 766636 - RNA, 19 nt, Homo sapiens
  misc_RNA (1)...(19): siRNA sense strand
ggucaaccaggaacuagag

SEQ ID NO: 766637 - RNA, 19 nt, Homo sapiens
  misc_RNA (1)...(19): siRNA sense strand
aaggagagaugguggauua

SEQ ID NO: 766638 - RNA, 19 nt, Homo sapiens
  misc_RNA (1)...(19): siRNA sense strand
cagcugggcuuccugguuu

SEQ ID NO: 766639 - RNA, 19 nt, Homo sapiens
  misc_RNA (1)...(19): siRNA sense strand
ccaaagacaucuccaggau

SEQ ID NO: 766640 - RNA, 19 nt, Homo sapiens
  misc_RNA (1)...(19): siRNA sense strand
gagagaugguggauuacaa

SEQ ID NO: 766641 - RNA, 19 nt, Homo sapiens
  misc_RNA (1)...(19): siRNA sense strand
aaagggaccucgcgguaaa

SEQ ID NO: 766642 - RNA, 19 nt, Homo sapiens
  misc_RNA (1)...(19): siRNA sense strand
gaugguggauuacaaugga

SEQ ID NO: 766643 - RNA, 19 nt, Homo sapiens
  misc_RNA (1)...(19): siRNA sense strand
ggauuacaauggaaacauc

SEQ ID NO: 766644 - RNA, 19 nt, Homo sapiens
  misc_RNA (1)...(19): siRNA sense strand
caagggagaaccagggaaa

SEQ ID NO: 766645 - RNA, 19 nt, Homo sapiens
  misc_RNA (1)...(19): siRNA sense strand
ggaagcaggacuagaugga

SEQ ID NO: 766646 - RNA, 19 nt, Homo sapiens
  misc_RNA (1)...(19): siRNA sense strand
caaggcugcuggaacaagu

SEQ ID NO: 766647 - RNA, 19 nt, Homo sapiens
  misc_RNA (1)...(19): siRNA sense strand
gggagaagcaggugucgau

SEQ ID NO: 766648 - RNA, 19 nt, Homo sapiens
  misc_RNA (1)...(19): siRNA sense strand
ggagaacagggaccagaug

SEQ ID NO: 766649 - RNA, 19 nt, Homo sapiens
  misc_RNA (1)...(19): siRNA sense strand
acaauggaaacaucaauga

SEQ ID NO: 766650 - RNA, 19 nt, Homo sapiens
  misc_RNA (1)...(19): siRNA sense strand
gaaaggagagaugguggau

SEQ ID NO: 766651 - RNA, 19 nt, Homo sapiens
  misc_RNA (1)...(19): siRNA sense strand
cuagagguuucccuggauu

SEQ ID NO: 766652 - RNA, 19 nt, Homo sapiens
  misc_RNA (1)...(19): siRNA sense strand
gcaaauggagacggcuauu

SEQ ID NO: 766653 - RNA, 19 nt, Homo sapiens
  misc_RNA (1)...(19): siRNA sense strand
gaaaggcuuccagggagaa

SEQ ID NO: 766654 - RNA, 19 nt, Homo sapiens
  misc_RNA (1)...(19): siRNA sense strand
gcagcugggcuuccugguu

SEQ ID NO: 766655 - RNA, 19 nt, Homo sapiens
  misc_RNA (1)...(19): siRNA sense strand
ggagagaugguggauuaca

SEQ ID NO: 766656 - RNA, 19 nt, Homo sapiens
  misc_RNA (1)...(19): siRNA sense strand
gaugcuggcaacuccauug

SEQ ID NO: 766657 - RNA, 19 nt, Homo sapiens
  misc_RNA (1)...(19): siRNA sense strand
gcguggagcagcuggagaa

SEQ ID NO: 766658 - RNA, 19 nt, Homo sapiens
  misc_RNA (1)...(19): siRNA sense strand
uggagcagcuggagaacag

SEQ ID NO: 766659 - RNA, 19 nt, Homo sapiens
  misc_RNA (1)...(19): siRNA sense strand
ggauuuccgggucccauug

SEQ ID NO: 766660 - RNA, 19 nt, Homo sapiens
  misc_RNA (1)...(19): siRNA sense strand
gagaugguggauuacaaug

SEQ ID NO: 766661 - RNA, 19 nt, Homo sapiens
  misc_RNA (1)...(19): siRNA sense strand
uagcggagcgcacccacaa

SEQ ID NO: 766662 - RNA, 19 nt, Homo sapiens
  misc_RNA (1)...(19): siRNA sense strand
gggagaaccagggaaagga

SEQ ID NO: 766663 - RNA, 19 nt, Homo sapiens
  misc_RNA (1)...(19): siRNA sense strand
gagccaggccagcauccaa

SEQ ID NO: 766664 - RNA, 19 nt, Homo sapiens
  misc_RNA (1)...(19): siRNA sense strand
gguacuccaggaccaauug

SEQ ID NO: 766665 - RNA, 19 nt, Homo sapiens
  misc_RNA (1)...(19): siRNA sense strand
aaaggagacccugggauga

SEQ ID NO: 766666 - RNA, 19 nt, Homo sapiens
  misc_RNA (1)...(19): siRNA sense strand
gagccagggaucccaggaa

SEQ ID NO: 766667 - RNA, 19 nt, Homo sapiens
  misc_RNA (1)...(19): siRNA sense strand
gaaccagggaaaggagaga

SEQ ID NO: 766668 - RNA, 19 nt, Homo sapiens
  misc_RNA (1)...(19): siRNA sense strand
gauuacaauggaaacauca

SEQ ID NO: 766669 - RNA, 19 nt, Homo sapiens
  misc_RNA (1)...(19): siRNA sense strand
ggucaaccaggaacuagag

SEQ ID NO: 766670 - RNA, 19 nt, Homo sapiens
  misc_RNA (1)...(19): siRNA sense strand
aaggagagaugguggauua

SEQ ID NO: 766671 - RNA, 19 nt, Homo sapiens
  misc_RNA (1)...(19): siRNA sense strand
cagcugggcuuccugguuu

SEQ ID NO: 766672 - RNA, 19 nt, Homo sapiens
  misc_RNA (1)...(19): siRNA sense strand
ccaaagacaucuccaggau

SEQ ID NO: 766673 - RNA, 19 nt, Homo sapiens
  misc_RNA (1)...(19): siRNA sense strand
gagagaugguggauuacaa

SEQ ID NO: 766674 - RNA, 19 nt, Homo sapiens
  misc_RNA (1)...(19): siRNA sense strand
aaagggaccucgcgguaaa

SEQ ID NO: 766675 - RNA, 19 nt, Homo sapiens
  misc_RNA (1)...(19): siRNA sense strand
gaugguggauuacaaugga

SEQ ID NO: 766676 - RNA, 19 nt, Homo sapiens
  misc_RNA (1)...(19): siRNA sense strand
ggauuacaauggaaacauc

SEQ ID NO: 766677 - RNA, 19 nt, Homo sapiens
  misc_RNA (1)...(19): siRNA sense strand
caagggagaaccagggaaa

SEQ ID NO: 766678 - RNA, 19 nt, Homo sapiens
  misc_RNA (1)...(19): siRNA sense strand
ggaagcaggacuagaugga

SEQ ID NO: 766679 - RNA, 19 nt, Homo sapiens
  misc_RNA (1)...(19): siRNA sense strand
caaggcugcuggaacaagu

SEQ ID NO: 766680 - RNA, 19 nt, Homo sapiens
  misc_RNA (1)...(19): siRNA sense strand
gggagaagcaggugucgau

SEQ ID NO: 766681 - RNA, 19 nt, Homo sapiens
  misc_RNA (1)...(19): siRNA sense strand
ggagaacagggaccagaug

SEQ ID NO: 766682 - RNA, 19 nt, Homo sapiens
  misc_RNA (1)...(19): siRNA sense strand
acaauggaaacaucaauga

SEQ ID NO: 766683 - RNA, 19 nt, Homo sapiens
  misc_RNA (1)...(19): siRNA sense strand
gaaaggagagaugguggau

SEQ ID NO: 766684 - RNA, 19 nt, Homo sapiens
  misc_RNA (1)...(19): siRNA sense strand
cuagagguuucccuggauu

SEQ ID NO: 766685 - RNA, 19 nt, Homo sapiens
  misc_RNA (1)...(19): siRNA sense strand
gcaaauggagacggcuauu

SEQ ID NO: 766686 - RNA, 19 nt, Homo sapiens
  misc_RNA (1)...(19): siRNA sense strand
gaaaggcuuccagggagaa

SEQ ID NO: 766687 - RNA, 19 nt, Homo sapiens
  misc_RNA (1)...(19): siRNA sense strand
gcagcugggcuuccugguu

SEQ ID NO: 766688 - RNA, 19 nt, Homo sapiens
  misc_RNA (1)...(19): siRNA sense strand
ggagagaugguggauuaca

SEQ ID NO: 766689 - RNA, 19 nt, Homo sapiens
  misc_RNA (1)...(19): siRNA sense strand
gaugcuggcaacuccauug

SEQ ID NO: 766690 - RNA, 19 nt, Homo sapiens
  misc_RNA (1)...(19): siRNA sense strand
gcguggagcagcuggagaa

SEQ ID NO: 766691 - RNA, 19 nt, Homo sapiens
  misc_RNA (1)...(19): siRNA sense strand
uggagcagcuggagaacag

SEQ ID NO: 766692 - RNA, 19 nt, Homo sapiens
  misc_RNA (1)...(19): siRNA sense strand
ggauuuccgggucccauug

SEQ ID NO: 766693 - RNA, 19 nt, Homo sapiens
  misc_RNA (1)...(19): siRNA sense strand
gagaugguggauuacaaug

SEQ ID NO: 766694 - RNA, 19 nt, Homo sapiens
  misc_RNA (1)...(19): siRNA sense strand
uagcggagcgcacccacaa

SEQ ID NO: 766695 - RNA, 19 nt, Homo sapiens
  misc_RNA (1)...(19): siRNA sense strand
gggagaaccagggaaagga

SEQ ID NO: 766696 - RNA, 19 nt, Homo sapiens
  misc_RNA (1)...(19): siRNA sense strand
gagccaggccagcauccaa

SEQ ID NO: 766697 - RNA, 19 nt, Homo sapiens
  misc_RNA (1)...(19): siRNA sense strand
gguacuccaggaccaauug

SEQ ID NO: 766698 - RNA, 19 nt, Homo sapiens
  misc_RNA (1)...(19): siRNA sense strand
aaaggagacccugggauga

SEQ ID NO: 766699 - RNA, 19 nt, Homo sapiens
  misc_RNA (1)...(19): siRNA sense strand
gagccagggaucccaggaa

SEQ ID NO: 766700 - RNA, 19 nt, Homo sapiens
  misc_RNA (1)...(19): siRNA sense strand
gaaccagggaaaggagaga

SEQ ID NO: 766701 - RNA, 19 nt, Homo sapiens
  misc_RNA (1)...(19): siRNA sense strand
gauuacaauggaaacauca

SEQ ID NO: 766702 - RNA, 19 nt, Homo sapiens
  misc_RNA (1)...(19): siRNA sense strand
ggucaaccaggaacuagag

SEQ ID NO: 766703 - RNA, 19 nt, Homo sapiens
  misc_RNA (1)...(19): siRNA sense strand
aaggagagaugguggauua

SEQ ID NO: 766704 - RNA, 19 nt, Homo sapiens
  misc_RNA (1)...(19): siRNA sense strand
cagcugggcuuccugguuu

SEQ ID NO: 766705 - RNA, 19 nt, Homo sapiens
  misc_RNA (1)...(19): siRNA sense strand
ccaaagacaucuccaggau

SEQ ID NO: 766706 - RNA, 19 nt, Homo sapiens
  misc_RNA (1)...(19): siRNA sense strand
gagagaugguggauuacaa

SEQ ID NO: 766707 - RNA, 19 nt, Homo sapiens
  misc_RNA (1)...(19): siRNA sense strand
aaagggaccucgcgguaaa

SEQ ID NO: 766708 - RNA, 19 nt, Homo sapiens
  misc_RNA (1)...(19): siRNA sense strand
gaugguggauuacaaugga

SEQ ID NO: 766709 - RNA, 19 nt, Homo sapiens
  misc_RNA (1)...(19): siRNA sense strand
ggauuacaauggaaacauc

SEQ ID NO: 766710 - RNA, 19 nt, Homo sapiens
  misc_RNA (1)...(19): siRNA sense strand
caagggagaaccagggaaa

SEQ ID NO: 766711 - RNA, 19 nt, Homo sapiens
  misc_RNA (1)...(19): siRNA sense strand
ggaagcaggacuagaugga

SEQ ID NO: 766712 - RNA, 19 nt, Homo sapiens
  misc_RNA (1)...(19): siRNA sense strand
caaggcugcuggaacaagu

SEQ ID NO: 766713 - RNA, 19 nt, Homo sapiens
  misc_RNA (1)...(19): siRNA sense strand
gggagaagcaggugucgau

SEQ ID NO: 766714 - RNA, 19 nt, Homo sapiens
  misc_RNA (1)...(19): siRNA sense strand
ggagaacagggaccagaug

SEQ ID NO: 766715 - RNA, 19 nt, Homo sapiens
  misc_RNA (1)...(19): siRNA sense strand
acaauggaaacaucaauga

SEQ ID NO: 766716 - RNA, 19 nt, Homo sapiens
  misc_RNA (1)...(19): siRNA sense strand
gaaaggagagaugguggau

SEQ ID NO: 766717 - RNA, 19 nt, Homo sapiens
  misc_RNA (1)...(19): siRNA sense strand
cuagagguuucccuggauu

SEQ ID NO: 766718 - RNA, 19 nt, Homo sapiens
  misc_RNA (1)...(19): siRNA sense strand
gcaaauggagacggcuauu

SEQ ID NO: 766719 - RNA, 19 nt, Homo sapiens
  misc_RNA (1)...(19): siRNA sense strand
gaaaggcuuccagggagaa

SEQ ID NO: 766720 - RNA, 19 nt, Homo sapiens
  misc_RNA (1)...(19): siRNA sense strand
gcagcugggcuuccugguu

SEQ ID NO: 766721 - RNA, 19 nt, Homo sapiens
  misc_RNA (1)...(19): siRNA sense strand
ggagagaugguggauuaca

SEQ ID NO: 766722 - RNA, 19 nt, Homo sapiens
  misc_RNA (1)...(19): siRNA sense strand
gaugcuggcaacuccauug

SEQ ID NO: 766723 - RNA, 19 nt, Homo sapiens
  misc_RNA (1)...(19): siRNA sense strand
gcguggagcagcuggagaa

SEQ ID NO: 766724 - RNA, 19 nt, Homo sapiens
  misc_RNA (1)...(19): siRNA sense strand
uggagcagcuggagaacag

SEQ ID NO: 766725 - RNA, 19 nt, Homo sapiens
  misc_RNA (1)...(19): siRNA sense strand
ggauuuccgggucccauug

SEQ ID NO: 766726 - RNA, 19 nt, Homo sapiens
  misc_RNA (1)...(19): siRNA sense strand
gagaugguggauuacaaug

SEQ ID NO: 766727 - RNA, 19 nt, Homo sapiens
  misc_RNA (1)...(19): siRNA sense strand
uagcggagcgcacccacaa

SEQ ID NO: 766728 - RNA, 19 nt, Homo sapiens
  misc_RNA (1)...(19): siRNA sense strand
gggagaaccagggaaagga

SEQ ID NO: 766729 - RNA, 19 nt, Homo sapiens
  misc_RNA (1)...(19): siRNA sense strand
gagccaggccagcauccaa

SEQ ID NO: 766730 - RNA, 19 nt, Homo sapiens
  misc_RNA (1)...(19): siRNA sense strand
gguacuccaggaccaauug

SEQ ID NO: 766731 - RNA, 19 nt, Homo sapiens
  misc_RNA (1)...(19): siRNA sense strand
aaaggagacccugggauga

SEQ ID NO: 766732 - RNA, 19 nt, Homo sapiens
  misc_RNA (1)...(19): siRNA sense strand
gagccagggaucccaggaa

SEQ ID NO: 766733 - RNA, 19 nt, Homo sapiens
  misc_RNA (1)...(19): siRNA sense strand
gaaccagggaaaggagaga

SEQ ID NO: 766734 - RNA, 19 nt, Homo sapiens
  misc_RNA (1)...(19): siRNA sense strand
gauuacaauggaaacauca

SEQ ID NO: 766735 - RNA, 19 nt, Homo sapiens
  misc_RNA (1)...(19): siRNA sense strand
ggucaaccaggaacuagag

SEQ ID NO: 766736 - RNA, 19 nt, Homo sapiens
  misc_RNA (1)...(19): siRNA sense strand
aaggagagaugguggauua

SEQ ID NO: 766737 - RNA, 19 nt, Homo sapiens
  misc_RNA (1)...(19): siRNA sense strand
cagcugggcuuccugguuu

SEQ ID NO: 766738 - RNA, 19 nt, Homo sapiens
  misc_RNA (1)...(19): siRNA sense strand
ccaaagacaucuccaggau

SEQ ID NO: 766739 - RNA, 19 nt, Homo sapiens
  misc_RNA (1)...(19): siRNA sense strand
gagagaugguggauuacaa

SEQ ID NO: 766740 - RNA, 19 nt, Homo sapiens
  misc_RNA (1)...(19): siRNA sense strand
aaagggaccucgcgguaaa

SEQ ID NO: 766741 - RNA, 19 nt, Homo sapiens
  misc_RNA (1)...(19): siRNA sense strand
gaugguggauuacaaugga

SEQ ID NO: 766742 - RNA, 19 nt, Homo sapiens
  misc_RNA (1)...(19): siRNA sense strand
ggauuacaauggaaacauc

SEQ ID NO: 766743 - RNA, 19 nt, Homo sapiens
  misc_RNA (1)...(19): siRNA sense strand
caagggagaaccagggaaa

SEQ ID NO: 766744 - RNA, 19 nt, Homo sapiens
  misc_RNA (1)...(19): siRNA sense strand
ggaagcaggacuagaugga

SEQ ID NO: 766745 - RNA, 19 nt, Homo sapiens
  misc_RNA (1)...(19): siRNA sense strand
caaggcugcuggaacaagu

SEQ ID NO: 766746 - RNA, 19 nt, Homo sapiens
  misc_RNA (1)...(19): siRNA sense strand
gggagaagcaggugucgau

SEQ ID NO: 766747 - RNA, 19 nt, Homo sapiens
  misc_RNA (1)...(19): siRNA sense strand
ggagaacagggaccagaug

SEQ ID NO: 766748 - RNA, 19 nt, Homo sapiens
  misc_RNA (1)...(19): siRNA sense strand
acaauggaaacaucaauga

SEQ ID NO: 766749 - RNA, 19 nt, Homo sapiens
  misc_RNA (1)...(19): siRNA sense strand
gaaaggagagaugguggau

SEQ ID NO: 766750 - RNA, 19 nt, Homo sapiens
  misc_RNA (1)...(19): siRNA sense strand
cuagagguuucccuggauu

SEQ ID NO: 766751 - RNA, 19 nt, Homo sapiens
  misc_RNA (1)...(19): siRNA sense strand
gcaaauggagacggcuauu

SEQ ID NO: 766752 - RNA, 19 nt, Homo sapiens
  misc_RNA (1)...(19): siRNA sense strand
gaaaggcuuccagggagaa

SEQ ID NO: 766753 - RNA, 19 nt, Homo sapiens
  misc_RNA (1)...(19): siRNA sense strand
gcagcugggcuuccugguu

SEQ ID NO: 766754 - RNA, 19 nt, Homo sapiens
  misc_RNA (1)...(19): siRNA sense strand
ggagagaugguggauuaca

SEQ ID NO: 766755 - RNA, 19 nt, Homo sapiens
  misc_RNA (1)...(19): siRNA sense strand
gaugcuggcaacuccauug

SEQ ID NO: 766756 - RNA, 19 nt, Homo sapiens
  misc_RNA (1)...(19): siRNA sense strand
gcguggagcagcuggagaa

SEQ ID NO: 766757 - RNA, 19 nt, Homo sapiens
  misc_RNA (1)...(19): siRNA sense strand
uggagcagcuggagaacag

SEQ ID NO: 766758 - RNA, 19 nt, Homo sapiens
  misc_RNA (1)...(19): siRNA sense strand
ggauuuccgggucccauug

SEQ ID NO: 766759 - RNA, 19 nt, Homo sapiens
  misc_RNA (1)...(19): siRNA sense strand
gagaugguggauuacaaug

SEQ ID NO: 766760 - RNA, 19 nt, Homo sapiens
  misc_RNA (1)...(19): siRNA sense strand
uagcggagcgcacccacaa

SEQ ID NO: 766761 - RNA, 19 nt, Homo sapiens
  misc_RNA (1)...(19): siRNA sense strand
gggagaaccagggaaagga

SEQ ID NO: 766762 - RNA, 19 nt, Homo sapiens
  misc_RNA (1)...(19): siRNA sense strand
gagccaggccagcauccaa

SEQ ID NO: 766763 - RNA, 19 nt, Homo sapiens
  misc_RNA (1)...(19): siRNA sense strand
gguacuccaggaccaauug

SEQ ID NO: 766764 - RNA, 19 nt, Homo sapiens
  misc_RNA (1)...(19): siRNA sense strand
aaaggagacccugggauga

SEQ ID NO: 766765 - RNA, 19 nt, Homo sapiens
  misc_RNA (1)...(19): siRNA sense strand
gagccagggaucccaggaa

SEQ ID NO: 766766 - RNA, 19 nt, Homo sapiens
  misc_RNA (1)...(19): siRNA sense strand
gaaccagggaaaggagaga

SEQ ID NO: 766767 - RNA, 19 nt, Homo sapiens
  misc_RNA (1)...(19): siRNA sense strand
gauuacaauggaaacauca

SEQ ID NO: 766768 - RNA, 19 nt, Homo sapiens
  misc_RNA (1)...(19): siRNA sense strand
ggucaaccaggaacuagag

SEQ ID NO: 766769 - RNA, 19 nt, Homo sapiens
  misc_RNA (1)...(19): siRNA sense strand
aaggagagaugguggauua

SEQ ID NO: 766770 - RNA, 19 nt, Homo sapiens
  misc_RNA (1)...(19): siRNA sense strand
cagcugggcuuccugguuu

SEQ ID NO: 766771 - RNA, 19 nt, Homo sapiens
  misc_RNA (1)...(19): siRNA sense strand
ccaaagacaucuccaggau

SEQ ID NO: 766772 - RNA, 19 nt, Homo sapiens
  misc_RNA (1)...(19): siRNA sense strand
gagagaugguggauuacaa

SEQ ID NO: 766773 - RNA, 19 nt, Homo sapiens
  misc_RNA (1)...(19): siRNA sense strand
aaagggaccucgcgguaaa

SEQ ID NO: 766774 - RNA, 19 nt, Homo sapiens
  misc_RNA (1)...(19): siRNA sense strand
gaugguggauuacaaugga

SEQ ID NO: 766775 - RNA, 19 nt, Homo sapiens
  misc_RNA (1)...(19): siRNA sense strand
ggauuacaauggaaacauc

SEQ ID NO: 766776 - RNA, 19 nt, Homo sapiens
  misc_RNA (1)...(19): siRNA sense strand
caagggagaaccagggaaa

SEQ ID NO: 766777 - RNA, 19 nt, Homo sapiens
  misc_RNA (1)...(19): siRNA sense strand
ggaagcaggacuagaugga

SEQ ID NO: 766778 - RNA, 19 nt, Homo sapiens
  misc_RNA (1)...(19): siRNA sense strand
caaggcugcuggaacaagu

SEQ ID NO: 766779 - RNA, 19 nt, Homo sapiens
  misc_RNA (1)...(19): siRNA sense strand
gggagaagcaggugucgau

SEQ ID NO: 766780 - RNA, 19 nt, Homo sapiens
  misc_RNA (1)...(19): siRNA sense strand
ggagaacagggaccagaug

SEQ ID NO: 766781 - RNA, 19 nt, Homo sapiens
  misc_RNA (1)...(19): siRNA sense strand
acaauggaaacaucaauga

SEQ ID NO: 766782 - RNA, 19 nt, Homo sapiens
  misc_RNA (1)...(19): siRNA sense strand
gaaaggagagaugguggau

SEQ ID NO: 766783 - RNA, 19 nt, Homo sapiens
  misc_RNA (1)...(19): siRNA sense strand
cuagagguuucccuggauu

SEQ ID NO: 766784 - RNA, 19 nt, Homo sapiens
  misc_RNA (1)...(19): siRNA sense strand
gcaaauggagacggcuauu

SEQ ID NO: 766785 - RNA, 19 nt, Homo sapiens
  misc_RNA (1)...(19): siRNA sense strand
gaaaggcuuccagggagaa

SEQ ID NO: 766786 - RNA, 19 nt, Homo sapiens
  misc_RNA (1)...(19): siRNA sense strand
gcagcugggcuuccugguu

SEQ ID NO: 766787 - RNA, 19 nt, Homo sapiens
  misc_RNA (1)...(19): siRNA sense strand
ggagagaugguggauuaca

SEQ ID NO: 766788 - RNA, 19 nt, Homo sapiens
  misc_RNA (1)...(19): siRNA sense strand
gaugcuggcaacuccauug

SEQ ID NO: 766789 - RNA, 19 nt, Homo sapiens
  misc_RNA (1)...(19): siRNA sense strand
gcguggagcagcuggagaa

SEQ ID NO: 766790 - RNA, 19 nt, Homo sapiens
  misc_RNA (1)...(19): siRNA sense strand
uggagcagcuggagaacag

SEQ ID NO: 766791 - RNA, 19 nt, Homo sapiens
  misc_RNA (1)...(19): siRNA sense strand
ggauuuccgggucccauug

SEQ ID NO: 766792 - RNA, 19 nt, Homo sapiens
  misc_RNA (1)...(19): siRNA sense strand
gagaugguggauuacaaug

SEQ ID NO: 766793 - RNA, 19 nt, Homo sapiens
  misc_RNA (1)...(19): siRNA sense strand
uagcggagcgcacccacaa

SEQ ID NO: 766794 - RNA, 19 nt, Homo sapiens
  misc_RNA (1)...(19): siRNA sense strand
gggagaaccagggaaagga

SEQ ID NO: 766795 - RNA, 19 nt, Homo sapiens
  misc_RNA (1)...(19): siRNA sense strand
gagccaggccagcauccaa

SEQ ID NO: 766796 - RNA, 19 nt, Homo sapiens
  misc_RNA (1)...(19): siRNA sense strand
gguacuccaggaccaauug

SEQ ID NO: 766797 - RNA, 19 nt, Homo sapiens
  misc_RNA (1)...(19): siRNA sense strand
aaaggagacccugggauga

SEQ ID NO: 766798 - RNA, 19 nt, Homo sapiens
  misc_RNA (1)...(19): siRNA sense strand
gagccagggaucccaggaa

SEQ ID NO: 766799 - RNA, 19 nt, Homo sapiens
  misc_RNA (1)...(19): siRNA sense strand
gaaccagggaaaggagaga

SEQ ID NO: 766800 - RNA, 19 nt, Homo sapiens
  misc_RNA (1)...(19): siRNA sense strand
gauuacaauggaaacauca

SEQ ID NO: 766801 - RNA, 19 nt, Homo sapiens
  misc_RNA (1)...(19): siRNA sense strand
ggucaaccaggaacuagag

SEQ ID NO: 766802 - RNA, 19 nt, Homo sapiens
  misc_RNA (1)...(19): siRNA sense strand
aaggagagaugguggauua

SEQ ID NO: 766803 - RNA, 19 nt, Homo sapiens
  misc_RNA (1)...(19): siRNA sense strand
cagcugggcuuccugguuu

SEQ ID NO: 766804 - RNA, 19 nt, Homo sapiens
  misc_RNA (1)...(19): siRNA sense strand
ccaaagacaucuccaggau

SEQ ID NO: 766805 - RNA, 19 nt, Homo sapiens
  misc_RNA (1)...(19): siRNA sense strand
gagagaugguggauuacaa

SEQ ID NO: 766806 - RNA, 19 nt, Homo sapiens
  misc_RNA (1)...(19): siRNA sense strand
aaagggaccucgcgguaaa

SEQ ID NO: 766807 - RNA, 19 nt, Homo sapiens
  misc_RNA (1)...(19): siRNA sense strand
gaugguggauuacaaugga

SEQ ID NO: 766808 - RNA, 19 nt, Homo sapiens
  misc_RNA (1)...(19): siRNA sense strand
ggauuacaauggaaacauc

SEQ ID NO: 766809 - RNA, 19 nt, Homo sapiens
  misc_RNA (1)...(19): siRNA sense strand
gggcgaagauggcuuacca

SEQ ID NO: 766810 - RNA, 19 nt, Homo sapiens
  misc_RNA (1)...(19): siRNA sense strand
caagggagaaccagggaaa

SEQ ID NO: 766811 - RNA, 19 nt, Homo sapiens
  misc_RNA (1)...(19): siRNA sense strand
ggaagcaggacuagaugga

SEQ ID NO: 766812 - RNA, 19 nt, Homo sapiens
  misc_RNA (1)...(19): siRNA sense strand
caaggcugcuggaacaagu

SEQ ID NO: 766813 - RNA, 19 nt, Homo sapiens
  misc_RNA (1)...(19): siRNA sense strand
gggagaagcaggugucgau

SEQ ID NO: 766814 - RNA, 19 nt, Homo sapiens
  misc_RNA (1)...(19): siRNA sense strand
ggagaacagggaccagaug

SEQ ID NO: 766815 - RNA, 19 nt, Homo sapiens
  misc_RNA (1)...(19): siRNA sense strand
acaauggaaacaucaauga

SEQ ID NO: 766816 - RNA, 19 nt, Homo sapiens
  misc_RNA (1)...(19): siRNA sense strand
gaaaggagagaugguggau

SEQ ID NO: 766817 - RNA, 19 nt, Homo sapiens
  misc_RNA (1)...(19): siRNA sense strand
cuagagguuucccuggauu

SEQ ID NO: 766818 - RNA, 19 nt, Homo sapiens
  misc_RNA (1)...(19): siRNA sense strand
gcaaauggagacggcuauu

SEQ ID NO: 766819 - RNA, 19 nt, Homo sapiens
  misc_RNA (1)...(19): siRNA sense strand
gaaaggcuuccagggagaa

SEQ ID NO: 766820 - RNA, 19 nt, Homo sapiens
  misc_RNA (1)...(19): siRNA sense strand
gcagcugggcuuccugguu

SEQ ID NO: 766821 - RNA, 19 nt, Homo sapiens
  misc_RNA (1)...(19): siRNA sense strand
ggagagaugguggauuaca

SEQ ID NO: 766822 - RNA, 19 nt, Homo sapiens
  misc_RNA (1)...(19): siRNA sense strand
gaugcuggcaacuccauug

SEQ ID NO: 766823 - RNA, 19 nt, Homo sapiens
  misc_RNA (1)...(19): siRNA sense strand
gcguggagcagcuggagaa

SEQ ID NO: 766824 - RNA, 19 nt, Homo sapiens
  misc_RNA (1)...(19): siRNA sense strand
uggagcagcuggagaacag

SEQ ID NO: 766825 - RNA, 19 nt, Homo sapiens
  misc_RNA (1)...(19): siRNA sense strand
ggauuuccgggucccauug

SEQ ID NO: 766826 - RNA, 19 nt, Homo sapiens
  misc_RNA (1)...(19): siRNA sense strand
gagaugguggauuacaaug

SEQ ID NO: 766827 - RNA, 19 nt, Homo sapiens
  misc_RNA (1)...(19): siRNA sense strand
uagcggagcgcacccacaa

SEQ ID NO: 766828 - RNA, 19 nt, Homo sapiens
  misc_RNA (1)...(19): siRNA sense strand
gggagaaccagggaaagga

SEQ ID NO: 766829 - RNA, 19 nt, Homo sapiens
  misc_RNA (1)...(19): siRNA sense strand
gagccaggccagcauccaa

SEQ ID NO: 766830 - RNA, 19 nt, Homo sapiens
  misc_RNA (1)...(19): siRNA sense strand
gguacuccaggaccaauug

SEQ ID NO: 766831 - RNA, 19 nt, Homo sapiens
  misc_RNA (1)...(19): siRNA sense strand
aaaggagacccugggauga

SEQ ID NO: 766832 - RNA, 19 nt, Homo sapiens
  misc_RNA (1)...(19): siRNA sense strand
gagccagggaucccaggaa

SEQ ID NO: 766833 - RNA, 19 nt, Homo sapiens
  misc_RNA (1)...(19): siRNA sense strand
gaaccagggaaaggagaga

SEQ ID NO: 766834 - RNA, 19 nt, Homo sapiens
  misc_RNA (1)...(19): siRNA sense strand
gauuacaauggaaacauca

SEQ ID NO: 766835 - RNA, 19 nt, Homo sapiens
  misc_RNA (1)...(19): siRNA sense strand
ggucaaccaggaacuagag

SEQ ID NO: 766836 - RNA, 19 nt, Homo sapiens
  misc_RNA (1)...(19): siRNA sense strand
aaggagagaugguggauua

SEQ ID NO: 766837 - RNA, 19 nt, Homo sapiens
  misc_RNA (1)...(19): siRNA sense strand
cagcugggcuuccugguuu

SEQ ID NO: 766838 - RNA, 19 nt, Homo sapiens
  misc_RNA (1)...(19): siRNA sense strand
ccaaagacaucuccaggau

SEQ ID NO: 766839 - RNA, 19 nt, Homo sapiens
  misc_RNA (1)...(19): siRNA sense strand
gagagaugguggauuacaa

SEQ ID NO: 766840 - RNA, 19 nt, Homo sapiens
  misc_RNA (1)...(19): siRNA sense strand
aaagggaccucgcgguaaa

SEQ ID NO: 766841 - RNA, 19 nt, Homo sapiens
  misc_RNA (1)...(19): siRNA sense strand
gaugguggauuacaaugga

SEQ ID NO: 766842 - RNA, 19 nt, Homo sapiens
  misc_RNA (1)...(19): siRNA sense strand
ggauuacaauggaaacauc

SEQ ID NO: 766843 - RNA, 19 nt, Homo sapiens
  misc_RNA (1)...(19): siRNA sense strand
caagggagaaccagggaaa

SEQ ID NO: 766844 - RNA, 19 nt, Homo sapiens
  misc_RNA (1)...(19): siRNA sense strand
ggaagcaggacuagaugga

SEQ ID NO: 766845 - RNA, 19 nt, Homo sapiens
  misc_RNA (1)...(19): siRNA sense strand
caaggcugcuggaacaagu

SEQ ID NO: 766846 - RNA, 19 nt, Homo sapiens
  misc_RNA (1)...(19): siRNA sense strand
gggagaagcaggugucgau

SEQ ID NO: 766847 - RNA, 19 nt, Homo sapiens
  misc_RNA (1)...(19): siRNA sense strand
ggagaacagggaccagaug

SEQ ID NO: 766848 - RNA, 19 nt, Homo sapiens
  misc_RNA (1)...(19): siRNA sense strand
acaauggaaacaucaauga

SEQ ID NO: 766849 - RNA, 19 nt, Homo sapiens
  misc_RNA (1)...(19): siRNA sense strand
gaaaggagagaugguggau

SEQ ID NO: 766850 - RNA, 19 nt, Homo sapiens
  misc_RNA (1)...(19): siRNA sense strand
cuagagguuucccuggauu

SEQ ID NO: 766851 - RNA, 19 nt, Homo sapiens
  misc_RNA (1)...(19): siRNA sense strand
gcaaauggagacggcuauu

SEQ ID NO: 766852 - RNA, 19 nt, Homo sapiens
  misc_RNA (1)...(19): siRNA sense strand
gaaaggcuuccagggagaa

SEQ ID NO: 766853 - RNA, 19 nt, Homo sapiens
  misc_RNA (1)...(19): siRNA sense strand
gcagcugggcuuccugguu

SEQ ID NO: 766854 - RNA, 19 nt, Homo sapiens
  misc_RNA (1)...(19): siRNA sense strand
ggagagaugguggauuaca

SEQ ID NO: 766855 - RNA, 19 nt, Homo sapiens
  misc_RNA (1)...(19): siRNA sense strand
gaugcuggcaacuccauug

SEQ ID NO: 766856 - RNA, 19 nt, Homo sapiens
  misc_RNA (1)...(19): siRNA sense strand
gcguggagcagcuggagaa

SEQ ID NO: 766857 - RNA, 19 nt, Homo sapiens
  misc_RNA (1)...(19): siRNA sense strand
uggagcagcuggagaacag

SEQ ID NO: 766858 - RNA, 19 nt, Homo sapiens
  misc_RNA (1)...(19): siRNA sense strand
ggauuuccgggucccauug

SEQ ID NO: 766859 - RNA, 19 nt, Homo sapiens
  misc_RNA (1)...(19): siRNA sense strand
gagaugguggauuacaaug

SEQ ID NO: 766860 - RNA, 19 nt, Homo sapiens
  misc_RNA (1)...(19): siRNA sense strand
uagcggagcgcacccacaa

SEQ ID NO: 766861 - RNA, 19 nt, Homo sapiens
  misc_RNA (1)...(19): siRNA sense strand
gggagaaccagggaaagga

SEQ ID NO: 766862 - RNA, 19 nt, Homo sapiens
  misc_RNA (1)...(19): siRNA sense strand
gagccaggccagcauccaa

SEQ ID NO: 766863 - RNA, 19 nt, Homo sapiens
  misc_RNA (1)...(19): siRNA sense strand
gguacuccaggaccaauug

SEQ ID NO: 766864 - RNA, 19 nt, Homo sapiens
  misc_RNA (1)...(19): siRNA sense strand
aaaggagacccugggauga

SEQ ID NO: 766865 - RNA, 19 nt, Homo sapiens
  misc_RNA (1)...(19): siRNA sense strand
gagccagggaucccaggaa

SEQ ID NO: 766866 - RNA, 19 nt, Homo sapiens
  misc_RNA (1)...(19): siRNA sense strand
gaaccagggaaaggagaga

SEQ ID NO: 766867 - RNA, 19 nt, Homo sapiens
  misc_RNA (1)...(19): siRNA sense strand
gauuacaauggaaacauca

SEQ ID NO: 766868 - RNA, 19 nt, Homo sapiens
  misc_RNA (1)...(19): siRNA sense strand
ggucaaccaggaacuagag

SEQ ID NO: 766869 - RNA, 19 nt, Homo sapiens
  misc_RNA (1)...(19): siRNA sense strand
aaggagagaugguggauua

SEQ ID NO: 766870 - RNA, 19 nt, Homo sapiens
  misc_RNA (1)...(19): siRNA sense strand
cagcugggcuuccugguuu

SEQ ID NO: 766871 - RNA, 19 nt, Homo sapiens
  misc_RNA (1)...(19): siRNA sense strand
ccaaagacaucuccaggau

SEQ ID NO: 766872 - RNA, 19 nt, Homo sapiens
  misc_RNA (1)...(19): siRNA sense strand
gagagaugguggauuacaa

SEQ ID NO: 766873 - RNA, 19 nt, Homo sapiens
  misc_RNA (1)...(19): siRNA sense strand
aaagggaccucgcgguaaa

SEQ ID NO: 766874 - RNA, 19 nt, Homo sapiens
  misc_RNA (1)...(19): siRNA sense strand
gaugguggauuacaaugga

SEQ ID NO: 766875 - RNA, 19 nt, Homo sapiens
  misc_RNA (1)...(19): siRNA sense strand
ggauuacaauggaaacauc

SEQ ID NO: 766876 - RNA, 19 nt, Homo sapiens
  misc_RNA (1)...(19): siRNA sense strand
caagggagaaccagggaaa

SEQ ID NO: 766877 - RNA, 19 nt, Homo sapiens
  misc_RNA (1)...(19): siRNA sense strand
ggaagcaggacuagaugga

SEQ ID NO: 766878 - RNA, 19 nt, Homo sapiens
  misc_RNA (1)...(19): siRNA sense strand
caaggcugcuggaacaagu

SEQ ID NO: 766879 - RNA, 19 nt, Homo sapiens
  misc_RNA (1)...(19): siRNA sense strand
gggagaagcaggugucgau

SEQ ID NO: 766880 - RNA, 19 nt, Homo sapiens
  misc_RNA (1)...(19): siRNA sense strand
ggagaacagggaccagaug

SEQ ID NO: 766881 - RNA, 19 nt, Homo sapiens
  misc_RNA (1)...(19): siRNA sense strand
acaauggaaacaucaauga

SEQ ID NO: 766882 - RNA, 19 nt, Homo sapiens
  misc_RNA (1)...(19): siRNA sense strand
gaaaggagagaugguggau

SEQ ID NO: 766883 - RNA, 19 nt, Homo sapiens
  misc_RNA (1)...(19): siRNA sense strand
cuagagguuucccuggauu

SEQ ID NO: 766884 - RNA, 19 nt, Homo sapiens
  misc_RNA (1)...(19): siRNA sense strand
gcaaauggagacggcuauu

SEQ ID NO: 766885 - RNA, 19 nt, Homo sapiens
  misc_RNA (1)...(19): siRNA sense strand
gaaaggcuuccagggagaa

SEQ ID NO: 766886 - RNA, 19 nt, Homo sapiens
  misc_RNA (1)...(19): siRNA sense strand
gcagcugggcuuccugguu

SEQ ID NO: 766887 - RNA, 19 nt, Homo sapiens
  misc_RNA (1)...(19): siRNA sense strand
ggagagaugguggauuaca

SEQ ID NO: 766888 - RNA, 19 nt, Homo sapiens
  misc_RNA (1)...(19): siRNA sense strand
gaugcuggcaacuccauug

SEQ ID NO: 766889 - RNA, 19 nt, Homo sapiens
  misc_RNA (1)...(19): siRNA sense strand
gcguggagcagcuggagaa

SEQ ID NO: 766890 - RNA, 19 nt, Homo sapiens
  misc_RNA (1)...(19): siRNA sense strand
uggagcagcuggagaacag

SEQ ID NO: 766891 - RNA, 19 nt, Homo sapiens
  misc_RNA (1)...(19): siRNA sense strand
ggauuuccgggucccauug

SEQ ID NO: 766892 - RNA, 19 nt, Homo sapiens
  misc_RNA (1)...(19): siRNA sense strand
gagaugguggauuacaaug

SEQ ID NO: 766893 - RNA, 19 nt, Homo sapiens
  misc_RNA (1)...(19): siRNA sense strand
uagcggagcgcacccacaa

SEQ ID NO: 766894 - RNA, 19 nt, Homo sapiens
  misc_RNA (1)...(19): siRNA sense strand
gggagaaccagggaaagga

SEQ ID NO: 766895 - RNA, 19 nt, Homo sapiens
  misc_RNA (1)...(19): siRNA sense strand
gagccaggccagcauccaa

SEQ ID NO: 766896 - RNA, 19 nt, Homo sapiens
  misc_RNA (1)...(19): siRNA sense strand
gguacuccaggaccaauug

SEQ ID NO: 766897 - RNA, 19 nt, Homo sapiens
  misc_RNA (1)...(19): siRNA sense strand
aaaggagacccugggauga

SEQ ID NO: 766898 - RNA, 19 nt, Homo sapiens
  misc_RNA (1)...(19): siRNA sense strand
gagccagggaucccaggaa

SEQ ID NO: 766899 - RNA, 19 nt, Homo sapiens
  misc_RNA (1)...(19): siRNA sense strand
gaaccagggaaaggagaga

SEQ ID NO: 766900 - RNA, 19 nt, Homo sapiens
  misc_RNA (1)...(19): siRNA sense strand
gauuacaauggaaacauca

SEQ ID NO: 766901 - RNA, 19 nt, Homo sapiens
  misc_RNA (1)...(19): siRNA sense strand
ggucaaccaggaacuagag

SEQ ID NO: 766902 - RNA, 19 nt, Homo sapiens
  misc_RNA (1)...(19): siRNA sense strand
aaggagagaugguggauua

SEQ ID NO: 766903 - RNA, 19 nt, Homo sapiens
  misc_RNA (1)...(19): siRNA sense strand
cagcugggcuuccugguuu

SEQ ID NO: 766904 - RNA, 19 nt, Homo sapiens
  misc_RNA (1)...(19): siRNA sense strand
ccaaagacaucuccaggau

SEQ ID NO: 766905 - RNA, 19 nt, Homo sapiens
  misc_RNA (1)...(19): siRNA sense strand
gagagaugguggauuacaa

SEQ ID NO: 766906 - RNA, 19 nt, Homo sapiens
  misc_RNA (1)...(19): siRNA sense strand
aaagggaccucgcgguaaa

SEQ ID NO: 766907 - RNA, 19 nt, Homo sapiens
  misc_RNA (1)...(19): siRNA sense strand
gaugguggauuacaaugga

SEQ ID NO: 766908 - RNA, 19 nt, Homo sapiens
  misc_RNA (1)...(19): siRNA sense strand
ggauuacaauggaaacauc

SEQ ID NO: 766909 - RNA, 19 nt, Homo sapiens
  misc_RNA (1)...(19): siRNA sense strand
caagggagaaccagggaaa

SEQ ID NO: 766910 - RNA, 19 nt, Homo sapiens
  misc_RNA (1)...(19): siRNA sense strand
ggaagcaggacuagaugga

SEQ ID NO: 766911 - RNA, 19 nt, Homo sapiens
  misc_RNA (1)...(19): siRNA sense strand
caaggcugcuggaacaagu

SEQ ID NO: 766912 - RNA, 19 nt, Homo sapiens
  misc_RNA (1)...(19): siRNA sense strand
gggagaagcaggugucgau

SEQ ID NO: 766913 - RNA, 19 nt, Homo sapiens
  misc_RNA (1)...(19): siRNA sense strand
ggagaacagggaccagaug

SEQ ID NO: 766914 - RNA, 19 nt, Homo sapiens
  misc_RNA (1)...(19): siRNA sense strand
acaauggaaacaucaauga

SEQ ID NO: 766915 - RNA, 19 nt, Homo sapiens
  misc_RNA (1)...(19): siRNA sense strand
gaaaggagagaugguggau

SEQ ID NO: 766916 - RNA, 19 nt, Homo sapiens
  misc_RNA (1)...(19): siRNA sense strand
cuagagguuucccuggauu

SEQ ID NO: 766917 - RNA, 19 nt, Homo sapiens
  misc_RNA (1)...(19): siRNA sense strand
gcaaauggagacggcuauu

SEQ ID NO: 766918 - RNA, 19 nt, Homo sapiens
  misc_RNA (1)...(19): siRNA sense strand
gaaaggcuuccagggagaa

SEQ ID NO: 766919 - RNA, 19 nt, Homo sapiens
  misc_RNA (1)...(19): siRNA sense strand
gcagcugggcuuccugguu

SEQ ID NO: 766920 - RNA, 19 nt, Homo sapiens
  misc_RNA (1)...(19): siRNA sense strand
ggagagaugguggauuaca

SEQ ID NO: 766921 - RNA, 19 nt, Homo sapiens
  misc_RNA (1)...(19): siRNA sense strand
gaugcuggcaacuccauug

SEQ ID NO: 766922 - RNA, 19 nt, Homo sapiens
  misc_RNA (1)...(19): siRNA sense strand
gcguggagcagcuggagaa

SEQ ID NO: 766923 - RNA, 19 nt, Homo sapiens
  misc_RNA (1)...(19): siRNA sense strand
uggagcagcuggagaacag

SEQ ID NO: 766924 - RNA, 19 nt, Homo sapiens
  misc_RNA (1)...(19): siRNA sense strand
ggauuuccgggucccauug

SEQ ID NO: 766925 - RNA, 19 nt, Homo sapiens
  misc_RNA (1)...(19): siRNA sense strand
gagaugguggauuacaaug

SEQ ID NO: 766926 - RNA, 19 nt, Homo sapiens
  misc_RNA (1)...(19): siRNA sense strand
uagcggagcgcacccacaa

SEQ ID NO: 766927 - RNA, 19 nt, Homo sapiens
  misc_RNA (1)...(19): siRNA sense strand
gggagaaccagggaaagga

SEQ ID NO: 766928 - RNA, 19 nt, Homo sapiens
  misc_RNA (1)...(19): siRNA sense strand
gagccaggccagcauccaa

SEQ ID NO: 766929 - RNA, 19 nt, Homo sapiens
  misc_RNA (1)...(19): siRNA sense strand
gguacuccaggaccaauug

SEQ ID NO: 766930 - RNA, 19 nt, Homo sapiens
  misc_RNA (1)...(19): siRNA sense strand
aaaggagacccugggauga

SEQ ID NO: 766931 - RNA, 19 nt, Homo sapiens
  misc_RNA (1)...(19): siRNA sense strand
gagccagggaucccaggaa

SEQ ID NO: 766932 - RNA, 19 nt, Homo sapiens
  misc_RNA (1)...(19): siRNA sense strand
gaaccagggaaaggagaga

SEQ ID NO: 766933 - RNA, 19 nt, Homo sapiens
  misc_RNA (1)...(19): siRNA sense strand
gauuacaauggaaacauca

SEQ ID NO: 766934 - RNA, 19 nt, Homo sapiens
  misc_RNA (1)...(19): siRNA sense strand
ggucaaccaggaacuagag

SEQ ID NO: 766935 - RNA, 19 nt, Homo sapiens
  misc_RNA (1)...(19): siRNA sense strand
aaggagagaugguggauua

SEQ ID NO: 766936 - RNA, 19 nt, Homo sapiens
  misc_RNA (1)...(19): siRNA sense strand
cagcugggcuuccugguuu

SEQ ID NO: 766937 - RNA, 19 nt, Homo sapiens
  misc_RNA (1)...(19): siRNA sense strand
ccaaagacaucuccaggau

SEQ ID NO: 766938 - RNA, 19 nt, Homo sapiens
  misc_RNA (1)...(19): siRNA sense strand
gagagaugguggauuacaa

SEQ ID NO: 766939 - RNA, 19 nt, Homo sapiens
  misc_RNA (1)...(19): siRNA sense strand
aaagggaccucgcgguaaa

SEQ ID NO: 766940 - RNA, 19 nt, Homo sapiens
  misc_RNA (1)...(19): siRNA sense strand
gaugguggauuacaaugga

SEQ ID NO: 766941 - RNA, 19 nt, Homo sapiens
  misc_RNA (1)...(19): siRNA sense strand
ggauuacaauggaaacauc

SEQ ID NO: 766942 - RNA, 19 nt, Homo sapiens
  misc_RNA (1)...(19): siRNA sense strand
caagggagaaccagggaaa

SEQ ID NO: 766943 - RNA, 19 nt, Homo sapiens
  misc_RNA (1)...(19): siRNA sense strand
ggaagcaggacuagaugga

SEQ ID NO: 766944 - RNA, 19 nt, Homo sapiens
  misc_RNA (1)...(19): siRNA sense strand
caaggcugcuggaacaagu

SEQ ID NO: 766945 - RNA, 19 nt, Homo sapiens
  misc_RNA (1)...(19): siRNA sense strand
gggagaagcaggugucgau

SEQ ID NO: 766946 - RNA, 19 nt, Homo sapiens
  misc_RNA (1)...(19): siRNA sense strand
ggagaacagggaccagaug

SEQ ID NO: 766947 - RNA, 19 nt, Homo sapiens
  misc_RNA (1)...(19): siRNA sense strand
acaauggaaacaucaauga

SEQ ID NO: 766948 - RNA, 19 nt, Homo sapiens
  misc_RNA (1)...(19): siRNA sense strand
gaaaggagagaugguggau

SEQ ID NO: 766949 - RNA, 19 nt, Homo sapiens
  misc_RNA (1)...(19): siRNA sense strand
cuagagguuucccuggauu

SEQ ID NO: 766950 - RNA, 19 nt, Homo sapiens
  misc_RNA (1)...(19): siRNA sense strand
gcaaauggagacggcuauu

SEQ ID NO: 766951 - RNA, 19 nt, Homo sapiens
  misc_RNA (1)...(19): siRNA sense strand
gaaaggcuuccagggagaa

SEQ ID NO: 766952 - RNA, 19 nt, Homo sapiens
  misc_RNA (1)...(19): siRNA sense strand
gcagcugggcuuccugguu

SEQ ID NO: 766953 - RNA, 19 nt, Homo sapiens
  misc_RNA (1)...(19): siRNA sense strand
ggagagaugguggauuaca

SEQ ID NO: 766954 - RNA, 19 nt, Homo sapiens
  misc_RNA (1)...(19): siRNA sense strand
gaugcuggcaacuccauug

SEQ ID NO: 766955 - RNA, 19 nt, Homo sapiens
  misc_RNA (1)...(19): siRNA sense strand
gcguggagcagcuggagaa

SEQ ID NO: 766956 - RNA, 19 nt, Homo sapiens
  misc_RNA (1)...(19): siRNA sense strand
uggagcagcuggagaacag

SEQ ID NO: 766957 - RNA, 19 nt, Homo sapiens
  misc_RNA (1)...(19): siRNA sense strand
ggauuuccgggucccauug

SEQ ID NO: 766958 - RNA, 19 nt, Homo sapiens
  misc_RNA (1)...(19): siRNA sense strand
gagaugguggauuacaaug

SEQ ID NO: 766959 - RNA, 19 nt, Homo sapiens
  misc_RNA (1)...(19): siRNA sense strand
uagcggagcgcacccacaa

SEQ ID NO: 766960 - RNA, 19 nt, Homo sapiens
  misc_RNA (1)...(19): siRNA sense strand
gggagaaccagggaaagga

SEQ ID NO: 766961 - RNA, 19 nt, Homo sapiens
  misc_RNA (1)...(19): siRNA sense strand
gagccaggccagcauccaa

SEQ ID NO: 766962 - RNA, 19 nt, Homo sapiens
  misc_RNA (1)...(19): siRNA sense strand
gguacuccaggaccaauug

SEQ ID NO: 766963 - RNA, 19 nt, Homo sapiens
  misc_RNA (1)...(19): siRNA sense strand
aaaggagacccugggauga

SEQ ID NO: 766964 - RNA, 19 nt, Homo sapiens
  misc_RNA (1)...(19): siRNA sense strand
gagccagggaucccaggaa

SEQ ID NO: 766965 - RNA, 19 nt, Homo sapiens
  misc_RNA (1)...(19): siRNA sense strand
gaaccagggaaaggagaga

SEQ ID NO: 766966 - RNA, 19 nt, Homo sapiens
  misc_RNA (1)...(19): siRNA sense strand
gauuacaauggaaacauca

SEQ ID NO: 766967 - RNA, 19 nt, Homo sapiens
  misc_RNA (1)...(19): siRNA sense strand
ggucaaccaggaacuagag

SEQ ID NO: 766968 - RNA, 19 nt, Homo sapiens
  misc_RNA (1)...(19): siRNA sense strand
aaggagagaugguggauua

SEQ ID NO: 766969 - RNA, 19 nt, Homo sapiens
  misc_RNA (1)...(19): siRNA sense strand
cagcugggcuuccugguuu

SEQ ID NO: 766970 - RNA, 19 nt, Homo sapiens
  misc_RNA (1)...(19): siRNA sense strand
ccaaagacaucuccaggau

SEQ ID NO: 766971 - RNA, 19 nt, Homo sapiens
  misc_RNA (1)...(19): siRNA sense strand
gagagaugguggauuacaa

SEQ ID NO: 766972 - RNA, 19 nt, Homo sapiens
  misc_RNA (1)...(19): siRNA sense strand
aaagggaccucgcgguaaa

SEQ ID NO: 766973 - RNA, 19 nt, Homo sapiens
  misc_RNA (1)...(19): siRNA sense strand
gaugguggauuacaaugga

SEQ ID NO: 766974 - RNA, 19 nt, Homo sapiens
  misc_RNA (1)...(19): siRNA sense strand
ggauuacaauggaaacauc

SEQ ID NO: 766975 - RNA, 19 nt, Homo sapiens
  misc_RNA (1)...(19): siRNA sense strand
caagggagaaccagggaaa

SEQ ID NO: 766976 - RNA, 19 nt, Homo sapiens
  misc_RNA (1)...(19): siRNA sense strand
ggaagcaggacuagaugga

SEQ ID NO: 766977 - RNA, 19 nt, Homo sapiens
  misc_RNA (1)...(19): siRNA sense strand
caaggcugcuggaacaagu

SEQ ID NO: 766978 - RNA, 19 nt, Homo sapiens
  misc_RNA (1)...(19): siRNA sense strand
gggagaagcaggugucgau

SEQ ID NO: 766979 - RNA, 19 nt, Homo sapiens
  misc_RNA (1)...(19): siRNA sense strand
ggagaacagggaccagaug

SEQ ID NO: 766980 - RNA, 19 nt, Homo sapiens
  misc_RNA (1)...(19): siRNA sense strand
acaauggaaacaucaauga

SEQ ID NO: 766981 - RNA, 19 nt, Homo sapiens
  misc_RNA (1)...(19): siRNA sense strand
gaaaggagagaugguggau

SEQ ID NO: 766982 - RNA, 19 nt, Homo sapiens
  misc_RNA (1)...(19): siRNA sense strand
cuagagguuucccuggauu

SEQ ID NO: 766983 - RNA, 19 nt, Homo sapiens
  misc_RNA (1)...(19): siRNA sense strand
gcaaauggagacggcuauu

SEQ ID NO: 766984 - RNA, 19 nt, Homo sapiens
  misc_RNA (1)...(19): siRNA sense strand
gaaaggcuuccagggagaa

SEQ ID NO: 766985 - RNA, 19 nt, Homo sapiens
  misc_RNA (1)...(19): siRNA sense strand
gcagcugggcuuccugguu

SEQ ID NO: 766986 - RNA, 19 nt, Homo sapiens
  misc_RNA (1)...(19): siRNA sense strand
ggagagaugguggauuaca

SEQ ID NO: 766987 - RNA, 19 nt, Homo sapiens
  misc_RNA (1)...(19): siRNA sense strand
gaugcuggcaacuccauug

SEQ ID NO: 766988 - RNA, 19 nt, Homo sapiens
  misc_RNA (1)...(19): siRNA sense strand
gcguggagcagcuggagaa

SEQ ID NO: 766989 - RNA, 19 nt, Homo sapiens
  misc_RNA (1)...(19): siRNA sense strand
uggagcagcuggagaacag

SEQ ID NO: 766990 - RNA, 19 nt, Homo sapiens
  misc_RNA (1)...(19): siRNA sense strand
ggauuuccgggucccauug

SEQ ID NO: 766991 - RNA, 19 nt, Homo sapiens
  misc_RNA (1)...(19): siRNA sense strand
gagaugguggauuacaaug

SEQ ID NO: 766992 - RNA, 19 nt, Homo sapiens
  misc_RNA (1)...(19): siRNA sense strand
uagcggagcgcacccacaa

SEQ ID NO: 766993 - RNA, 19 nt, Homo sapiens
  misc_RNA (1)...(19): siRNA sense strand
gggagaaccagggaaagga

SEQ ID NO: 766994 - RNA, 19 nt, Homo sapiens
  misc_RNA (1)...(19): siRNA sense strand
gagccaggccagcauccaa

SEQ ID NO: 766995 - RNA, 19 nt, Homo sapiens
  misc_RNA (1)...(19): siRNA sense strand
gguacuccaggaccaauug

SEQ ID NO: 766996 - RNA, 19 nt, Homo sapiens
  misc_RNA (1)...(19): siRNA sense strand
aaaggagacccugggauga

SEQ ID NO: 766997 - RNA, 19 nt, Homo sapiens
  misc_RNA (1)...(19): siRNA sense strand
gagccagggaucccaggaa

SEQ ID NO: 766998 - RNA, 19 nt, Homo sapiens
  misc_RNA (1)...(19): siRNA sense strand
gaaccagggaaaggagaga

SEQ ID NO: 766999 - RNA, 19 nt, Homo sapiens
  misc_RNA (1)...(19): siRNA sense strand
gauuacaauggaaacauca

SEQ ID NO: 767000 - RNA, 19 nt, Homo sapiens
  misc_RNA (1)...(19): siRNA sense strand
ggucaaccaggaacuagag

SEQ ID NO: 767001 - RNA, 19 nt, Homo sapiens
  misc_RNA (1)...(19): siRNA sense strand
aaggagagaugguggauua

SEQ ID NO: 767002 - RNA, 19 nt, Homo sapiens
  misc_RNA (1)...(19): siRNA sense strand
cagcugggcuuccugguuu

SEQ ID NO: 767003 - RNA, 19 nt, Homo sapiens
  misc_RNA (1)...(19): siRNA sense strand
ccaaagacaucuccaggau

SEQ ID NO: 767004 - RNA, 19 nt, Homo sapiens
  misc_RNA (1)...(19): siRNA sense strand
gagagaugguggauuacaa

SEQ ID NO: 767005 - RNA, 19 nt, Homo sapiens
  misc_RNA (1)...(19): siRNA sense strand
aaagggaccucgcgguaaa

SEQ ID NO: 767006 - RNA, 19 nt, Homo sapiens
  misc_RNA (1)...(19): siRNA sense strand
gaugguggauuacaaugga

SEQ ID NO: 767007 - RNA, 19 nt, Homo sapiens
  misc_RNA (1)...(19): siRNA sense strand
ggauuacaauggaaacauc

SEQ ID NO: 767008 - RNA, 19 nt, Homo sapiens
  misc_RNA (1)...(19): siRNA sense strand
caagggagaaccagggaaa

SEQ ID NO: 767009 - RNA, 19 nt, Homo sapiens
  misc_RNA (1)...(19): siRNA sense strand
ggaagcaggacuagaugga

SEQ ID NO: 767010 - RNA, 19 nt, Homo sapiens
  misc_RNA (1)...(19): siRNA sense strand
caaggcugcuggaacaagu

SEQ ID NO: 767011 - RNA, 19 nt, Homo sapiens
  misc_RNA (1)...(19): siRNA sense strand
gggagaagcaggugucgau

SEQ ID NO: 767012 - RNA, 19 nt, Homo sapiens
  misc_RNA (1)...(19): siRNA sense strand
ggagaacagggaccagaug

SEQ ID NO: 767013 - RNA, 19 nt, Homo sapiens
  misc_RNA (1)...(19): siRNA sense strand
acaauggaaacaucaauga

SEQ ID NO: 767014 - RNA, 19 nt, Homo sapiens
  misc_RNA (1)...(19): siRNA sense strand
gaaaggagagaugguggau

SEQ ID NO: 767015 - RNA, 19 nt, Homo sapiens
  misc_RNA (1)...(19): siRNA sense strand
cuagagguuucccuggauu

SEQ ID NO: 767016 - RNA, 19 nt, Homo sapiens
  misc_RNA (1)...(19): siRNA sense strand
gcaaauggagacggcuauu

SEQ ID NO: 767017 - RNA, 19 nt, Homo sapiens
  misc_RNA (1)...(19): siRNA sense strand
gaaaggcuuccagggagaa

SEQ ID NO: 767018 - RNA, 19 nt, Homo sapiens
  misc_RNA (1)...(19): siRNA sense strand
gcagcugggcuuccugguu

SEQ ID NO: 767019 - RNA, 19 nt, Homo sapiens
  misc_RNA (1)...(19): siRNA sense strand
ggagagaugguggauuaca

SEQ ID NO: 767020 - RNA, 19 nt, Homo sapiens
  misc_RNA (1)...(19): siRNA sense strand
gaugcuggcaacuccauug

SEQ ID NO: 767021 - RNA, 19 nt, Homo sapiens
  misc_RNA (1)...(19): siRNA sense strand
gcguggagcagcuggagaa

SEQ ID NO: 767022 - RNA, 19 nt, Homo sapiens
  misc_RNA (1)...(19): siRNA sense strand
uggagcagcuggagaacag

SEQ ID NO: 767023 - RNA, 19 nt, Homo sapiens
  misc_RNA (1)...(19): siRNA sense strand
ggauuuccgggucccauug

SEQ ID NO: 767024 - RNA, 19 nt, Homo sapiens
  misc_RNA (1)...(19): siRNA sense strand
gagaugguggauuacaaug

SEQ ID NO: 767025 - RNA, 19 nt, Homo sapiens
  misc_RNA (1)...(19): siRNA sense strand
uagcggagcgcacccacaa

SEQ ID NO: 767026 - RNA, 19 nt, Homo sapiens
  misc_RNA (1)...(19): siRNA sense strand
gggagaaccagggaaagga

SEQ ID NO: 767027 - RNA, 19 nt, Homo sapiens
  misc_RNA (1)...(19): siRNA sense strand
gagccaggccagcauccaa

SEQ ID NO: 767028 - RNA, 19 nt, Homo sapiens
  misc_RNA (1)...(19): siRNA sense strand
gguacuccaggaccaauug

SEQ ID NO: 767029 - RNA, 19 nt, Homo sapiens
  misc_RNA (1)...(19): siRNA sense strand
aaaggagacccugggauga

SEQ ID NO: 767030 - RNA, 19 nt, Homo sapiens
  misc_RNA (1)...(19): siRNA sense strand
gagccagggaucccaggaa

SEQ ID NO: 767031 - RNA, 19 nt, Homo sapiens
  misc_RNA (1)...(19): siRNA sense strand
gaaccagggaaaggagaga

SEQ ID NO: 767032 - RNA, 19 nt, Homo sapiens
  misc_RNA (1)...(19): siRNA sense strand
gauuacaauggaaacauca

SEQ ID NO: 767033 - RNA, 19 nt, Homo sapiens
  misc_RNA (1)...(19): siRNA sense strand
ggucaaccaggaacuagag

SEQ ID NO: 767034 - RNA, 19 nt, Homo sapiens
  misc_RNA (1)...(19): siRNA sense strand
aaggagagaugguggauua

SEQ ID NO: 767035 - RNA, 19 nt, Homo sapiens
  misc_RNA (1)...(19): siRNA sense strand
cagcugggcuuccugguuu

SEQ ID NO: 767036 - RNA, 19 nt, Homo sapiens
  misc_RNA (1)...(19): siRNA sense strand
ccaaagacaucuccaggau

SEQ ID NO: 767037 - RNA, 19 nt, Homo sapiens
  misc_RNA (1)...(19): siRNA sense strand
gagagaugguggauuacaa

SEQ ID NO: 767038 - RNA, 19 nt, Homo sapiens
  misc_RNA (1)...(19): siRNA sense strand
aaagggaccucgcgguaaa

SEQ ID NO: 767039 - RNA, 19 nt, Homo sapiens
  misc_RNA (1)...(19): siRNA sense strand
gaugguggauuacaaugga

SEQ ID NO: 767040 - RNA, 19 nt, Homo sapiens
  misc_RNA (1)...(19): siRNA sense strand
ggauuacaauggaaacauc

SEQ ID NO: 767041 - RNA, 19 nt, Homo sapiens
  misc_RNA (1)...(19): siRNA sense strand
caagggagaaccagggaaa

SEQ ID NO: 767042 - RNA, 19 nt, Homo sapiens
  misc_RNA (1)...(19): siRNA sense strand
ggaagcaggacuagaugga

SEQ ID NO: 767043 - RNA, 19 nt, Homo sapiens
  misc_RNA (1)...(19): siRNA sense strand
caaggcugcuggaacaagu

SEQ ID NO: 767044 - RNA, 19 nt, Homo sapiens
  misc_RNA (1)...(19): siRNA sense strand
gggagaagcaggugucgau

SEQ ID NO: 767045 - RNA, 19 nt, Homo sapiens
  misc_RNA (1)...(19): siRNA sense strand
ggagaacagggaccagaug

SEQ ID NO: 767046 - RNA, 19 nt, Homo sapiens
  misc_RNA (1)...(19): siRNA sense strand
acaauggaaacaucaauga

SEQ ID NO: 767047 - RNA, 19 nt, Homo sapiens
  misc_RNA (1)...(19): siRNA sense strand
gaaaggagagaugguggau

SEQ ID NO: 767048 - RNA, 19 nt, Homo sapiens
  misc_RNA (1)...(19): siRNA sense strand
cuagagguuucccuggauu

SEQ ID NO: 767049 - RNA, 19 nt, Homo sapiens
  misc_RNA (1)...(19): siRNA sense strand
gcaaauggagacggcuauu

SEQ ID NO: 767050 - RNA, 19 nt, Homo sapiens
  misc_RNA (1)...(19): siRNA sense strand
gaaaggcuuccagggagaa

SEQ ID NO: 767051 - RNA, 19 nt, Homo sapiens
  misc_RNA (1)...(19): siRNA sense strand
gcagcugggcuuccugguu

SEQ ID NO: 767052 - RNA, 19 nt, Homo sapiens
  misc_RNA (1)...(19): siRNA sense strand
ggagagaugguggauuaca

SEQ ID NO: 767053 - RNA, 19 nt, Homo sapiens
  misc_RNA (1)...(19): siRNA sense strand
gaugcuggcaacuccauug

SEQ ID NO: 767054 - RNA, 19 nt, Homo sapiens
  misc_RNA (1)...(19): siRNA sense strand
gcguggagcagcuggagaa

SEQ ID NO: 767055 - RNA, 19 nt, Homo sapiens
  misc_RNA (1)...(19): siRNA sense strand
uggagcagcuggagaacag

SEQ ID NO: 767056 - RNA, 19 nt, Homo sapiens
  misc_RNA (1)...(19): siRNA sense strand
ggauuuccgggucccauug

SEQ ID NO: 767057 - RNA, 19 nt, Homo sapiens
  misc_RNA (1)...(19): siRNA sense strand
gagaugguggauuacaaug

SEQ ID NO: 767058 - RNA, 19 nt, Homo sapiens
  misc_RNA (1)...(19): siRNA sense strand
uagcggagcgcacccacaa

SEQ ID NO: 767059 - RNA, 19 nt, Homo sapiens
  misc_RNA (1)...(19): siRNA sense strand
gggagaaccagggaaagga

SEQ ID NO: 767060 - RNA, 19 nt, Homo sapiens
  misc_RNA (1)...(19): siRNA sense strand
gagccaggccagcauccaa

SEQ ID NO: 767061 - RNA, 19 nt, Homo sapiens
  misc_RNA (1)...(19): siRNA sense strand
gguacuccaggaccaauug

SEQ ID NO: 767062 - RNA, 19 nt, Homo sapiens
  misc_RNA (1)...(19): siRNA sense strand
aaaggagacccugggauga

SEQ ID NO: 767063 - RNA, 19 nt, Homo sapiens
  misc_RNA (1)...(19): siRNA sense strand
gagccagggaucccaggaa

SEQ ID NO: 767064 - RNA, 19 nt, Homo sapiens
  misc_RNA (1)...(19): siRNA sense strand
gaaccagggaaaggagaga

SEQ ID NO: 767065 - RNA, 19 nt, Homo sapiens
  misc_RNA (1)...(19): siRNA sense strand
gauuacaauggaaacauca

SEQ ID NO: 767066 - RNA, 19 nt, Homo sapiens
  misc_RNA (1)...(19): siRNA sense strand
ggucaaccaggaacuagag

SEQ ID NO: 767067 - RNA, 19 nt, Homo sapiens
  misc_RNA (1)...(19): siRNA sense strand
aaggagagaugguggauua

SEQ ID NO: 767068 - RNA, 19 nt, Homo sapiens
  misc_RNA (1)...(19): siRNA sense strand
cagcugggcuuccugguuu

SEQ ID NO: 767069 - RNA, 19 nt, Homo sapiens
  misc_RNA (1)...(19): siRNA sense strand
ccaaagacaucuccaggau

SEQ ID NO: 767070 - RNA, 19 nt, Homo sapiens
  misc_RNA (1)...(19): siRNA sense strand
gagagaugguggauuacaa

SEQ ID NO: 767071 - RNA, 19 nt, Homo sapiens
  misc_RNA (1)...(19): siRNA sense strand
aaagggaccucgcgguaaa

SEQ ID NO: 767072 - RNA, 19 nt, Homo sapiens
  misc_RNA (1)...(19): siRNA sense strand
gaugguggauuacaaugga

SEQ ID NO: 767073 - RNA, 19 nt, Homo sapiens
  misc_RNA (1)...(19): siRNA sense strand
ggauuacaauggaaacauc

SEQ ID NO: 767074 - RNA, 19 nt, Homo sapiens
  misc_RNA (1)...(19): siRNA sense strand
caagggagaaccagggaaa

SEQ ID NO: 767075 - RNA, 19 nt, Homo sapiens
  misc_RNA (1)...(19): siRNA sense strand
ggaagcaggacuagaugga

SEQ ID NO: 767076 - RNA, 19 nt, Homo sapiens
  misc_RNA (1)...(19): siRNA sense strand
caaggcugcuggaacaagu

SEQ ID NO: 767077 - RNA, 19 nt, Homo sapiens
  misc_RNA (1)...(19): siRNA sense strand
gggagaagcaggugucgau

SEQ ID NO: 767078 - RNA, 19 nt, Homo sapiens
  misc_RNA (1)...(19): siRNA sense strand
ggagaacagggaccagaug

SEQ ID NO: 767079 - RNA, 19 nt, Homo sapiens
  misc_RNA (1)...(19): siRNA sense strand
acaauggaaacaucaauga

SEQ ID NO: 767080 - RNA, 19 nt, Homo sapiens
  misc_RNA (1)...(19): siRNA sense strand
gaaaggagagaugguggau

SEQ ID NO: 767081 - RNA, 19 nt, Homo sapiens
  misc_RNA (1)...(19): siRNA sense strand
cuagagguuucccuggauu

SEQ ID NO: 767082 - RNA, 19 nt, Homo sapiens
  misc_RNA (1)...(19): siRNA sense strand
gcaaauggagacggcuauu

SEQ ID NO: 767083 - RNA, 19 nt, Homo sapiens
  misc_RNA (1)...(19): siRNA sense strand
gaaaggcuuccagggagaa

SEQ ID NO: 767084 - RNA, 19 nt, Homo sapiens
  misc_RNA (1)...(19): siRNA sense strand
gcagcugggcuuccugguu

SEQ ID NO: 767085 - RNA, 19 nt, Homo sapiens
  misc_RNA (1)...(19): siRNA sense strand
ggagagaugguggauuaca

SEQ ID NO: 767086 - RNA, 19 nt, Homo sapiens
  misc_RNA (1)...(19): siRNA sense strand
gaugcuggcaacuccauug

SEQ ID NO: 767087 - RNA, 19 nt, Homo sapiens
  misc_RNA (1)...(19): siRNA sense strand
gcguggagcagcuggagaa

SEQ ID NO: 767088 - RNA, 19 nt, Homo sapiens
  misc_RNA (1)...(19): siRNA sense strand
uggagcagcuggagaacag

SEQ ID NO: 767089 - RNA, 19 nt, Homo sapiens
  misc_RNA (1)...(19): siRNA sense strand
ggauuuccgggucccauug

SEQ ID NO: 767090 - RNA, 19 nt, Homo sapiens
  misc_RNA (1)...(19): siRNA sense strand
gagaugguggauuacaaug

SEQ ID NO: 767091 - RNA, 19 nt, Homo sapiens
  misc_RNA (1)...(19): siRNA sense strand
uagcggagcgcacccacaa

SEQ ID NO: 767092 - RNA, 19 nt, Homo sapiens
  misc_RNA (1)...(19): siRNA sense strand
gggagaaccagggaaagga

SEQ ID NO: 767093 - RNA, 19 nt, Homo sapiens
  misc_RNA (1)...(19): siRNA sense strand
gagccaggccagcauccaa

SEQ ID NO: 767094 - RNA, 19 nt, Homo sapiens
  misc_RNA (1)...(19): siRNA sense strand
gguacuccaggaccaauug

SEQ ID NO: 767095 - RNA, 19 nt, Homo sapiens
  misc_RNA (1)...(19): siRNA sense strand
aaaggagacccugggauga

SEQ ID NO: 767096 - RNA, 19 nt, Homo sapiens
  misc_RNA (1)...(19): siRNA sense strand
gagccagggaucccaggaa

SEQ ID NO: 767097 - RNA, 19 nt, Homo sapiens
  misc_RNA (1)...(19): siRNA sense strand
gaaccagggaaaggagaga

SEQ ID NO: 767098 - RNA, 19 nt, Homo sapiens
  misc_RNA (1)...(19): siRNA sense strand
gauuacaauggaaacauca

SEQ ID NO: 767099 - RNA, 19 nt, Homo sapiens
  misc_RNA (1)...(19): siRNA sense strand
ggucaaccaggaacuagag

SEQ ID NO: 767100 - RNA, 19 nt, Homo sapiens
  misc_RNA (1)...(19): siRNA sense strand
aaggagagaugguggauua

SEQ ID NO: 767101 - RNA, 19 nt, Homo sapiens
  misc_RNA (1)...(19): siRNA sense strand
cagcugggcuuccugguuu

SEQ ID NO: 767102 - RNA, 19 nt, Homo sapiens
  misc_RNA (1)...(19): siRNA sense strand
ccaaagacaucuccaggau

SEQ ID NO: 767103 - RNA, 19 nt, Homo sapiens
  misc_RNA (1)...(19): siRNA sense strand
gagagaugguggauuacaa

SEQ ID NO: 767104 - RNA, 19 nt, Homo sapiens
  misc_RNA (1)...(19): siRNA sense strand
aaagggaccucgcgguaaa

SEQ ID NO: 767105 - RNA, 19 nt, Homo sapiens
  misc_RNA (1)...(19): siRNA sense strand
gaugguggauuacaaugga

SEQ ID NO: 767106 - RNA, 19 nt, Homo sapiens
  misc_RNA (1)...(19): siRNA sense strand
ggauuacaauggaaacauc

SEQ ID NO: 767107 - RNA, 19 nt, Homo sapiens
  misc_RNA (1)...(19): siRNA sense strand
caagggagaaccagggaaa

SEQ ID NO: 767108 - RNA, 19 nt, Homo sapiens
  misc_RNA (1)...(19): siRNA sense strand
ggaagcaggacuagaugga

SEQ ID NO: 767109 - RNA, 19 nt, Homo sapiens
  misc_RNA (1)...(19): siRNA sense strand
caaggcugcuggaacaagu

SEQ ID NO: 767110 - RNA, 19 nt, Homo sapiens
  misc_RNA (1)...(19): siRNA sense strand
gggagaagcaggugucgau

SEQ ID NO: 767111 - RNA, 19 nt, Homo sapiens
  misc_RNA (1)...(19): siRNA sense strand
ggagaacagggaccagaug

SEQ ID NO: 767112 - RNA, 19 nt, Homo sapiens
  misc_RNA (1)...(19): siRNA sense strand
acaauggaaacaucaauga

SEQ ID NO: 767113 - RNA, 19 nt, Homo sapiens
  misc_RNA (1)...(19): siRNA sense strand
gaaaggagagaugguggau

SEQ ID NO: 767114 - RNA, 19 nt, Homo sapiens
  misc_RNA (1)...(19): siRNA sense strand
cuagagguuucccuggauu

SEQ ID NO: 767115 - RNA, 19 nt, Homo sapiens
  misc_RNA (1)...(19): siRNA sense strand
gcaaauggagacggcuauu

SEQ ID NO: 767116 - RNA, 19 nt, Homo sapiens
  misc_RNA (1)...(19): siRNA sense strand
gaaaggcuuccagggagaa

SEQ ID NO: 767117 - RNA, 19 nt, Homo sapiens
  misc_RNA (1)...(19): siRNA sense strand
gcagcugggcuuccugguu

SEQ ID NO: 767118 - RNA, 19 nt, Homo sapiens
  misc_RNA (1)...(19): siRNA sense strand
ggagagaugguggauuaca

SEQ ID NO: 767119 - RNA, 19 nt, Homo sapiens
  misc_RNA (1)...(19): siRNA sense strand
gaugcuggcaacuccauug

SEQ ID NO: 767120 - RNA, 19 nt, Homo sapiens
  misc_RNA (1)...(19): siRNA sense strand
gcguggagcagcuggagaa

SEQ ID NO: 767121 - RNA, 19 nt, Homo sapiens
  misc_RNA (1)...(19): siRNA sense strand
uggagcagcuggagaacag

SEQ ID NO: 767122 - RNA, 19 nt, Homo sapiens
  misc_RNA (1)...(19): siRNA sense strand
ggauuuccgggucccauug

SEQ ID NO: 767123 - RNA, 19 nt, Homo sapiens
  misc_RNA (1)...(19): siRNA sense strand
gagaugguggauuacaaug

SEQ ID NO: 767124 - RNA, 19 nt, Homo sapiens
  misc_RNA (1)...(19): siRNA sense strand
uagcggagcgcacccacaa

SEQ ID NO: 767125 - RNA, 19 nt, Homo sapiens
  misc_RNA (1)...(19): siRNA sense strand
gggagaaccagggaaagga

SEQ ID NO: 767126 - RNA, 19 nt, Homo sapiens
  misc_RNA (1)...(19): siRNA sense strand
gagccaggccagcauccaa

SEQ ID NO: 767127 - RNA, 19 nt, Homo sapiens
  misc_RNA (1)...(19): siRNA sense strand
gguacuccaggaccaauug

SEQ ID NO: 767128 - RNA, 19 nt, Homo sapiens
  misc_RNA (1)...(19): siRNA sense strand
aaaggagacccugggauga

SEQ ID NO: 767129 - RNA, 19 nt, Homo sapiens
  misc_RNA (1)...(19): siRNA sense strand
gagccagggaucccaggaa

SEQ ID NO: 767130 - RNA, 19 nt, Homo sapiens
  misc_RNA (1)...(19): siRNA sense strand
gaaccagggaaaggagaga

SEQ ID NO: 767131 - RNA, 19 nt, Homo sapiens
  misc_RNA (1)...(19): siRNA sense strand
gauuacaauggaaacauca

SEQ ID NO: 767132 - RNA, 19 nt, Homo sapiens
  misc_RNA (1)...(19): siRNA sense strand
ggucaaccaggaacuagag

SEQ ID NO: 767133 - RNA, 19 nt, Homo sapiens
  misc_RNA (1)...(19): siRNA sense strand
aaggagagaugguggauua

SEQ ID NO: 767134 - RNA, 19 nt, Homo sapiens
  misc_RNA (1)...(19): siRNA sense strand
cagcugggcuuccugguuu

SEQ ID NO: 767135 - RNA, 19 nt, Homo sapiens
  misc_RNA (1)...(19): siRNA sense strand
ccaaagacaucuccaggau

SEQ ID NO: 767136 - RNA, 19 nt, Homo sapiens
  misc_RNA (1)...(19): siRNA sense strand
gagagaugguggauuacaa

SEQ ID NO: 767137 - RNA, 19 nt, Homo sapiens
  misc_RNA (1)...(19): siRNA sense strand
aaagggaccucgcgguaaa

SEQ ID NO: 767138 - RNA, 19 nt, Homo sapiens
  misc_RNA (1)...(19): siRNA sense strand
gaugguggauuacaaugga

SEQ ID NO: 767139 - RNA, 19 nt, Homo sapiens
  misc_RNA (1)...(19): siRNA sense strand
ggauuacaauggaaacauc

SEQ ID NO: 767140 - RNA, 19 nt, Homo sapiens
  misc_RNA (1)...(19): siRNA sense strand
caagggagaaccagggaaa

SEQ ID NO: 767141 - RNA, 19 nt, Homo sapiens
  misc_RNA (1)...(19): siRNA sense strand
ggaagcaggacuagaugga

SEQ ID NO: 767142 - RNA, 19 nt, Homo sapiens
  misc_RNA (1)...(19): siRNA sense strand
caaggcugcuggaacaagu

SEQ ID NO: 767143 - RNA, 19 nt, Homo sapiens
  misc_RNA (1)...(19): siRNA sense strand
gggagaagcaggugucgau

SEQ ID NO: 767144 - RNA, 19 nt, Homo sapiens
  misc_RNA (1)...(19): siRNA sense strand
ggagaacagggaccagaug

SEQ ID NO: 767145 - RNA, 19 nt, Homo sapiens
  misc_RNA (1)...(19): siRNA sense strand
acaauggaaacaucaauga

SEQ ID NO: 767146 - RNA, 19 nt, Homo sapiens
  misc_RNA (1)...(19): siRNA sense strand
gaaaggagagaugguggau

SEQ ID NO: 767147 - RNA, 19 nt, Homo sapiens
  misc_RNA (1)...(19): siRNA sense strand
cuagagguuucccuggauu

SEQ ID NO: 767148 - RNA, 19 nt, Homo sapiens
  misc_RNA (1)...(19): siRNA sense strand
gcaaauggagacggcuauu

SEQ ID NO: 767149 - RNA, 19 nt, Homo sapiens
  misc_RNA (1)...(19): siRNA sense strand
gaaaggcuuccagggagaa

SEQ ID NO: 767150 - RNA, 19 nt, Homo sapiens
  misc_RNA (1)...(19): siRNA sense strand
gcagcugggcuuccugguu

SEQ ID NO: 767151 - RNA, 19 nt, Homo sapiens
  misc_RNA (1)...(19): siRNA sense strand
ggagagaugguggauuaca

SEQ ID NO: 767152 - RNA, 19 nt, Homo sapiens
  misc_RNA (1)...(19): siRNA sense strand
gaugcuggcaacuccauug

SEQ ID NO: 767153 - RNA, 19 nt, Homo sapiens
  misc_RNA (1)...(19): siRNA sense strand
gcguggagcagcuggagaa

SEQ ID NO: 767154 - RNA, 19 nt, Homo sapiens
  misc_RNA (1)...(19): siRNA sense strand
uggagcagcuggagaacag

SEQ ID NO: 767155 - RNA, 19 nt, Homo sapiens
  misc_RNA (1)...(19): siRNA sense strand
ggauuuccgggucccauug

SEQ ID NO: 767156 - RNA, 19 nt, Homo sapiens
  misc_RNA (1)...(19): siRNA sense strand
gagaugguggauuacaaug

SEQ ID NO: 767157 - RNA, 19 nt, Homo sapiens
  misc_RNA (1)...(19): siRNA sense strand
uagcggagcgcacccacaa

SEQ ID NO: 767158 - RNA, 19 nt, Homo sapiens
  misc_RNA (1)...(19): siRNA sense strand
gggagaaccagggaaagga

SEQ ID NO: 767159 - RNA, 19 nt, Homo sapiens
  misc_RNA (1)...(19): siRNA sense strand
gagccaggccagcauccaa

SEQ ID NO: 767160 - RNA, 19 nt, Homo sapiens
  misc_RNA (1)...(19): siRNA sense strand
gguacuccaggaccaauug

SEQ ID NO: 767161 - RNA, 19 nt, Homo sapiens
  misc_RNA (1)...(19): siRNA sense strand
aaaggagacccugggauga

SEQ ID NO: 767162 - RNA, 19 nt, Homo sapiens
  misc_RNA (1)...(19): siRNA sense strand
gagccagggaucccaggaa

SEQ ID NO: 767163 - RNA, 19 nt, Homo sapiens
  misc_RNA (1)...(19): siRNA sense strand
gaaccagggaaaggagaga

SEQ ID NO: 767164 - RNA, 19 nt, Homo sapiens
  misc_RNA (1)...(19): siRNA sense strand
gauuacaauggaaacauca

SEQ ID NO: 767165 - RNA, 19 nt, Homo sapiens
  misc_RNA (1)...(19): siRNA sense strand
ggucaaccaggaacuagag

SEQ ID NO: 767166 - RNA, 19 nt, Homo sapiens
  misc_RNA (1)...(19): siRNA sense strand
aaggagagaugguggauua

SEQ ID NO: 767167 - RNA, 19 nt, Homo sapiens
  misc_RNA (1)...(19): siRNA sense strand
cagcugggcuuccugguuu

SEQ ID NO: 767168 - RNA, 19 nt, Homo sapiens
  misc_RNA (1)...(19): siRNA sense strand
ccaaagacaucuccaggau

SEQ ID NO: 767169 - RNA, 19 nt, Homo sapiens
  misc_RNA (1)...(19): siRNA sense strand
gagagaugguggauuacaa

SEQ ID NO: 767170 - RNA, 19 nt, Homo sapiens
  misc_RNA (1)...(19): siRNA sense strand
aaagggaccucgcgguaaa

SEQ ID NO: 767171 - RNA, 19 nt, Homo sapiens
  misc_RNA (1)...(19): siRNA sense strand
gaugguggauuacaaugga

SEQ ID NO: 767172 - RNA, 19 nt, Homo sapiens
  misc_RNA (1)...(19): siRNA sense strand
ggauuacaauggaaacauc

SEQ ID NO: 767173 - RNA, 19 nt, Homo sapiens
  misc_RNA (1)...(19): siRNA sense strand
caagggagaaccagggaaa

SEQ ID NO: 767174 - RNA, 19 nt, Homo sapiens
  misc_RNA (1)...(19): siRNA sense strand
ggaagcaggacuagaugga

SEQ ID NO: 767175 - RNA, 19 nt, Homo sapiens
  misc_RNA (1)...(19): siRNA sense strand
caaggcugcuggaacaagu

SEQ ID NO: 767176 - RNA, 19 nt, Homo sapiens
  misc_RNA (1)...(19): siRNA sense strand
gggagaagcaggugucgau

SEQ ID NO: 767177 - RNA, 19 nt, Homo sapiens
  misc_RNA (1)...(19): siRNA sense strand
ggagaacagggaccagaug

SEQ ID NO: 767178 - RNA, 19 nt, Homo sapiens
  misc_RNA (1)...(19): siRNA sense strand
acaauggaaacaucaauga

SEQ ID NO: 767179 - RNA, 19 nt, Homo sapiens
  misc_RNA (1)...(19): siRNA sense strand
gaaaggagagaugguggau

SEQ ID NO: 767180 - RNA, 19 nt, Homo sapiens
  misc_RNA (1)...(19): siRNA sense strand
cuagagguuucccuggauu

SEQ ID NO: 767181 - RNA, 19 nt, Homo sapiens
  misc_RNA (1)...(19): siRNA sense strand
gcaaauggagacggcuauu

SEQ ID NO: 767182 - RNA, 19 nt, Homo sapiens
  misc_RNA (1)...(19): siRNA sense strand
gaaaggcuuccagggagaa

SEQ ID NO: 767183 - RNA, 19 nt, Homo sapiens
  misc_RNA (1)...(19): siRNA sense strand
gcagcugggcuuccugguu

SEQ ID NO: 767184 - RNA, 19 nt, Homo sapiens
  misc_RNA (1)...(19): siRNA sense strand
ggagagaugguggauuaca

SEQ ID NO: 767185 - RNA, 19 nt, Homo sapiens
  misc_RNA (1)...(19): siRNA sense strand
gaugcuggcaacuccauug

SEQ ID NO: 767186 - RNA, 19 nt, Homo sapiens
  misc_RNA (1)...(19): siRNA sense strand
gcguggagcagcuggagaa

SEQ ID NO: 767187 - RNA, 19 nt, Homo sapiens
  misc_RNA (1)...(19): siRNA sense strand
uggagcagcuggagaacag

SEQ ID NO: 767188 - RNA, 19 nt, Homo sapiens
  misc_RNA (1)...(19): siRNA sense strand
ggauuuccgggucccauug

SEQ ID NO: 767189 - RNA, 19 nt, Homo sapiens
  misc_RNA (1)...(19): siRNA sense strand
gagaugguggauuacaaug

SEQ ID NO: 767190 - RNA, 19 nt, Homo sapiens
  misc_RNA (1)...(19): siRNA sense strand
uagcggagcgcacccacaa

SEQ ID NO: 767191 - RNA, 19 nt, Homo sapiens
  misc_RNA (1)...(19): siRNA sense strand
gggagaaccagggaaagga

SEQ ID NO: 767192 - RNA, 19 nt, Homo sapiens
  misc_RNA (1)...(19): siRNA sense strand
gagccaggccagcauccaa

SEQ ID NO: 767193 - RNA, 19 nt, Homo sapiens
  misc_RNA (1)...(19): siRNA sense strand
gguacuccaggaccaauug

SEQ ID NO: 767194 - RNA, 19 nt, Homo sapiens
  misc_RNA (1)...(19): siRNA sense strand
aaaggagacccugggauga

SEQ ID NO: 767195 - RNA, 19 nt, Homo sapiens
  misc_RNA (1)...(19): siRNA sense strand
gagccagggaucccaggaa

SEQ ID NO: 767196 - RNA, 19 nt, Homo sapiens
  misc_RNA (1)...(19): siRNA sense strand
gaaccagggaaaggagaga

SEQ ID NO: 767197 - RNA, 19 nt, Homo sapiens
  misc_RNA (1)...(19): siRNA sense strand
gauuacaauggaaacauca

SEQ ID NO: 767198 - RNA, 19 nt, Homo sapiens
  misc_RNA (1)...(19): siRNA sense strand
ggucaaccaggaacuagag

SEQ ID NO: 767199 - RNA, 19 nt, Homo sapiens
  misc_RNA (1)...(19): siRNA sense strand
aaggagagaugguggauua

SEQ ID NO: 767200 - RNA, 19 nt, Homo sapiens
  misc_RNA (1)...(19): siRNA sense strand
cagcugggcuuccugguuu

SEQ ID NO: 767201 - RNA, 19 nt, Homo sapiens
  misc_RNA (1)...(19): siRNA sense strand
ccaaagacaucuccaggau

SEQ ID NO: 767202 - RNA, 19 nt, Homo sapiens
  misc_RNA (1)...(19): siRNA sense strand
gagagaugguggauuacaa

SEQ ID NO: 767203 - RNA, 19 nt, Homo sapiens
  misc_RNA (1)...(19): siRNA sense strand
aaagggaccucgcgguaaa

SEQ ID NO: 767204 - RNA, 19 nt, Homo sapiens
  misc_RNA (1)...(19): siRNA sense strand
gaugguggauuacaaugga

SEQ ID NO: 767205 - RNA, 19 nt, Homo sapiens
  misc_RNA (1)...(19): siRNA sense strand
ggauuacaauggaaacauc

SEQ ID NO: 767206 - RNA, 19 nt, Homo sapiens
  misc_RNA (1)...(19): siRNA sense strand
caagggagaaccagggaaa

SEQ ID NO: 767207 - RNA, 19 nt, Homo sapiens
  misc_RNA (1)...(19): siRNA sense strand
ggaagcaggacuagaugga

SEQ ID NO: 767208 - RNA, 19 nt, Homo sapiens
  misc_RNA (1)...(19): siRNA sense strand
caaggcugcuggaacaagu

SEQ ID NO: 767209 - RNA, 19 nt, Homo sapiens
  misc_RNA (1)...(19): siRNA sense strand
gggagaagcaggugucgau

SEQ ID NO: 767210 - RNA, 19 nt, Homo sapiens
  misc_RNA (1)...(19): siRNA sense strand
ggagaacagggaccagaug

SEQ ID NO: 767211 - RNA, 19 nt, Homo sapiens
  misc_RNA (1)...(19): siRNA sense strand
acaauggaaacaucaauga

SEQ ID NO: 767212 - RNA, 19 nt, Homo sapiens
  misc_RNA (1)...(19): siRNA sense strand
gaaaggagagaugguggau

SEQ ID NO: 767213 - RNA, 19 nt, Homo sapiens
  misc_RNA (1)...(19): siRNA sense strand
cuagagguuucccuggauu

SEQ ID NO: 767214 - RNA, 19 nt, Homo sapiens
  misc_RNA (1)...(19): siRNA sense strand
gcaaauggagacggcuauu

SEQ ID NO: 767215 - RNA, 19 nt, Homo sapiens
  misc_RNA (1)...(19): siRNA sense strand
gaaaggcuuccagggagaa

SEQ ID NO: 767216 - RNA, 19 nt, Homo sapiens
  misc_RNA (1)...(19): siRNA sense strand
gcagcugggcuuccugguu

SEQ ID NO: 767217 - RNA, 19 nt, Homo sapiens
  misc_RNA (1)...(19): siRNA sense strand
ggagagaugguggauuaca

SEQ ID NO: 767218 - RNA, 19 nt, Homo sapiens
  misc_RNA (1)...(19): siRNA sense strand
gaugcuggcaacuccauug

SEQ ID NO: 767219 - RNA, 19 nt, Homo sapiens
  misc_RNA (1)...(19): siRNA sense strand
gcguggagcagcuggagaa

SEQ ID NO: 767220 - RNA, 19 nt, Homo sapiens
  misc_RNA (1)...(19): siRNA sense strand
uggagcagcuggagaacag

SEQ ID NO: 767221 - RNA, 19 nt, Homo sapiens
  misc_RNA (1)...(19): siRNA sense strand
ggauuuccgggucccauug

SEQ ID NO: 767222 - RNA, 19 nt, Homo sapiens
  misc_RNA (1)...(19): siRNA sense strand
gagaugguggauuacaaug

SEQ ID NO: 767223 - RNA, 19 nt, Homo sapiens
  misc_RNA (1)...(19): siRNA sense strand
uagcggagcgcacccacaa

SEQ ID NO: 767224 - RNA, 19 nt, Homo sapiens
  misc_RNA (1)...(19): siRNA sense strand
gggagaaccagggaaagga

SEQ ID NO: 767225 - RNA, 19 nt, Homo sapiens
  misc_RNA (1)...(19): siRNA sense strand
gagccaggccagcauccaa

SEQ ID NO: 767226 - RNA, 19 nt, Homo sapiens
  misc_RNA (1)...(19): siRNA sense strand
gguacuccaggaccaauug

SEQ ID NO: 767227 - RNA, 19 nt, Homo sapiens
  misc_RNA (1)...(19): siRNA sense strand
aaaggagacccugggauga

SEQ ID NO: 767228 - RNA, 19 nt, Homo sapiens
  misc_RNA (1)...(19): siRNA sense strand
gagccagggaucccaggaa

SEQ ID NO: 767229 - RNA, 19 nt, Homo sapiens
  misc_RNA (1)...(19): siRNA sense strand
gaaccagggaaaggagaga

SEQ ID NO: 767230 - RNA, 19 nt, Homo sapiens
  misc_RNA (1)...(19): siRNA sense strand
gauuacaauggaaacauca

SEQ ID NO: 767231 - RNA, 19 nt, Homo sapiens
  misc_RNA (1)...(19): siRNA sense strand
ggucaaccaggaacuagag

SEQ ID NO: 767232 - RNA, 19 nt, Homo sapiens
  misc_RNA (1)...(19): siRNA sense strand
aaggagagaugguggauua

SEQ ID NO: 767233 - RNA, 19 nt, Homo sapiens
  misc_RNA (1)...(19): siRNA sense strand
cagcugggcuuccugguuu

SEQ ID NO: 767234 - RNA, 19 nt, Homo sapiens
  misc_RNA (1)...(19): siRNA sense strand
ccaaagacaucuccaggau

SEQ ID NO: 767235 - RNA, 19 nt, Homo sapiens
  misc_RNA (1)...(19): siRNA sense strand
gagagaugguggauuacaa

SEQ ID NO: 767236 - RNA, 19 nt, Homo sapiens
  misc_RNA (1)...(19): siRNA sense strand
aaagggaccucgcgguaaa

SEQ ID NO: 767237 - RNA, 19 nt, Homo sapiens
  misc_RNA (1)...(19): siRNA sense strand
gaugguggauuacaaugga

SEQ ID NO: 767238 - RNA, 19 nt, Homo sapiens
  misc_RNA (1)...(19): siRNA sense strand
ggauuacaauggaaacauc

SEQ ID NO: 767239 - RNA, 19 nt, Homo sapiens
  misc_RNA (1)...(19): siRNA sense strand
caagggagaaccagggaaa

SEQ ID NO: 767240 - RNA, 19 nt, Homo sapiens
  misc_RNA (1)...(19): siRNA sense strand
ggaagcaggacuagaugga

SEQ ID NO: 767241 - RNA, 19 nt, Homo sapiens
  misc_RNA (1)...(19): siRNA sense strand
caaggcugcuggaacaagu

SEQ ID NO: 767242 - RNA, 19 nt, Homo sapiens
  misc_RNA (1)...(19): siRNA sense strand
gggagaagcaggugucgau

SEQ ID NO: 767243 - RNA, 19 nt, Homo sapiens
  misc_RNA (1)...(19): siRNA sense strand
ggagaacagggaccagaug

SEQ ID NO: 767244 - RNA, 19 nt, Homo sapiens
  misc_RNA (1)...(19): siRNA sense strand
acaauggaaacaucaauga

SEQ ID NO: 767245 - RNA, 19 nt, Homo sapiens
  misc_RNA (1)...(19): siRNA sense strand
gaaaggagagaugguggau

SEQ ID NO: 767246 - RNA, 19 nt, Homo sapiens
  misc_RNA (1)...(19): siRNA sense strand
cuagagguuucccuggauu

SEQ ID NO: 767247 - RNA, 19 nt, Homo sapiens
  misc_RNA (1)...(19): siRNA sense strand
gcaaauggagacggcuauu

SEQ ID NO: 767248 - RNA, 19 nt, Homo sapiens
  misc_RNA (1)...(19): siRNA sense strand
gaaaggcuuccagggagaa

SEQ ID NO: 767249 - RNA, 19 nt, Homo sapiens
  misc_RNA (1)...(19): siRNA sense strand
gcagcugggcuuccugguu

SEQ ID NO: 767250 - RNA, 19 nt, Homo sapiens
  misc_RNA (1)...(19): siRNA sense strand
ggagagaugguggauuaca

SEQ ID NO: 767251 - RNA, 19 nt, Homo sapiens
  misc_RNA (1)...(19): siRNA sense strand
gaugcuggcaacuccauug

SEQ ID NO: 767252 - RNA, 19 nt, Homo sapiens
  misc_RNA (1)...(19): siRNA sense strand
gcguggagcagcuggagaa

SEQ ID NO: 767253 - RNA, 19 nt, Homo sapiens
  misc_RNA (1)...(19): siRNA sense strand
uggagcagcuggagaacag

SEQ ID NO: 767254 - RNA, 19 nt, Homo sapiens
  misc_RNA (1)...(19): siRNA sense strand
ggauuuccgggucccauug

SEQ ID NO: 767255 - RNA, 19 nt, Homo sapiens
  misc_RNA (1)...(19): siRNA sense strand
gagaugguggauuacaaug

SEQ ID NO: 767256 - RNA, 19 nt, Homo sapiens
  misc_RNA (1)...(19): siRNA sense strand
uagcggagcgcacccacaa

SEQ ID NO: 767257 - RNA, 19 nt, Homo sapiens
  misc_RNA (1)...(19): siRNA sense strand
gggagaaccagggaaagga

SEQ ID NO: 767258 - RNA, 19 nt, Homo sapiens
  misc_RNA (1)...(19): siRNA sense strand
gagccaggccagcauccaa

SEQ ID NO: 767259 - RNA, 19 nt, Homo sapiens
  misc_RNA (1)...(19): siRNA sense strand
gguacuccaggaccaauug

SEQ ID NO: 767260 - RNA, 19 nt, Homo sapiens
  misc_RNA (1)...(19): siRNA sense strand
aaaggagacccugggauga

SEQ ID NO: 767261 - RNA, 19 nt, Homo sapiens
  misc_RNA (1)...(19): siRNA sense strand
gagccagggaucccaggaa

SEQ ID NO: 767262 - RNA, 19 nt, Homo sapiens
  misc_RNA (1)...(19): siRNA sense strand
gaaccagggaaaggagaga

SEQ ID NO: 767263 - RNA, 19 nt, Homo sapiens
  misc_RNA (1)...(19): siRNA sense strand
gauuacaauggaaacauca

SEQ ID NO: 767264 - RNA, 19 nt, Homo sapiens
  misc_RNA (1)...(19): siRNA sense strand
ggucaaccaggaacuagag

SEQ ID NO: 767265 - RNA, 19 nt, Homo sapiens
  misc_RNA (1)...(19): siRNA sense strand
aaggagagaugguggauua

SEQ ID NO: 767266 - RNA, 19 nt, Homo sapiens
  misc_RNA (1)...(19): siRNA sense strand
cagcugggcuuccugguuu

SEQ ID NO: 767267 - RNA, 19 nt, Homo sapiens
  misc_RNA (1)...(19): siRNA sense strand
ccaaagacaucuccaggau

SEQ ID NO: 767268 - RNA, 19 nt, Homo sapiens
  misc_RNA (1)...(19): siRNA sense strand
gagagaugguggauuacaa

SEQ ID NO: 767269 - RNA, 19 nt, Homo sapiens
  misc_RNA (1)...(19): siRNA sense strand
aaagggaccucgcgguaaa

SEQ ID NO: 767270 - RNA, 19 nt, Homo sapiens
  misc_RNA (1)...(19): siRNA sense strand
gaugguggauuacaaugga

SEQ ID NO: 767271 - RNA, 19 nt, Homo sapiens
  misc_RNA (1)...(19): siRNA sense strand
ggauuacaauggaaacauc

SEQ ID NO: 767272 - RNA, 19 nt, Homo sapiens
  misc_RNA (1)...(19): siRNA sense strand
caagggagaaccagggaaa

SEQ ID NO: 767273 - RNA, 19 nt, Homo sapiens
  misc_RNA (1)...(19): siRNA sense strand
ggaagcaggacuagaugga

SEQ ID NO: 767274 - RNA, 19 nt, Homo sapiens
  misc_RNA (1)...(19): siRNA sense strand
caaggcugcuggaacaagu

SEQ ID NO: 767275 - RNA, 19 nt, Homo sapiens
  misc_RNA (1)...(19): siRNA sense strand
gggagaagcaggugucgau

SEQ ID NO: 767276 - RNA, 19 nt, Homo sapiens
  misc_RNA (1)...(19): siRNA sense strand
ggagaacagggaccagaug

SEQ ID NO: 767277 - RNA, 19 nt, Homo sapiens
  misc_RNA (1)...(19): siRNA sense strand
acaauggaaacaucaauga

SEQ ID NO: 767278 - RNA, 19 nt, Homo sapiens
  misc_RNA (1)...(19): siRNA sense strand
gaaaggagagaugguggau

SEQ ID NO: 767279 - RNA, 19 nt, Homo sapiens
  misc_RNA (1)...(19): siRNA sense strand
cuagagguuucccuggauu

SEQ ID NO: 767280 - RNA, 19 nt, Homo sapiens
  misc_RNA (1)...(19): siRNA sense strand
gcaaauggagacggcuauu

SEQ ID NO: 767281 - RNA, 19 nt, Homo sapiens
  misc_RNA (1)...(19): siRNA sense strand
gaaaggcuuccagggagaa

SEQ ID NO: 767282 - RNA, 19 nt, Homo sapiens
  misc_RNA (1)...(19): siRNA sense strand
gcagcugggcuuccugguu

SEQ ID NO: 767283 - RNA, 19 nt, Homo sapiens
  misc_RNA (1)...(19): siRNA sense strand
ggagagaugguggauuaca

SEQ ID NO: 767284 - RNA, 19 nt, Homo sapiens
  misc_RNA (1)...(19): siRNA sense strand
gaugcuggcaacuccauug

SEQ ID NO: 767285 - RNA, 19 nt, Homo sapiens
  misc_RNA (1)...(19): siRNA sense strand
gcguggagcagcuggagaa

SEQ ID NO: 767286 - RNA, 19 nt, Homo sapiens
  misc_RNA (1)...(19): siRNA sense strand
uggagcagcuggagaacag

SEQ ID NO: 767287 - RNA, 19 nt, Homo sapiens
  misc_RNA (1)...(19): siRNA sense strand
ggauuuccgggucccauug

SEQ ID NO: 767288 - RNA, 19 nt, Homo sapiens
  misc_RNA (1)...(19): siRNA sense strand
gagaugguggauuacaaug

SEQ ID NO: 767289 - RNA, 19 nt, Homo sapiens
  misc_RNA (1)...(19): siRNA sense strand
uagcggagcgcacccacaa

SEQ ID NO: 767290 - RNA, 19 nt, Homo sapiens
  misc_RNA (1)...(19): siRNA sense strand
gggagaaccagggaaagga

SEQ ID NO: 767291 - RNA, 19 nt, Homo sapiens
  misc_RNA (1)...(19): siRNA sense strand
gagccaggccagcauccaa

SEQ ID NO: 767292 - RNA, 19 nt, Homo sapiens
  misc_RNA (1)...(19): siRNA sense strand
gguacuccaggaccaauug

SEQ ID NO: 767293 - RNA, 19 nt, Homo sapiens
  misc_RNA (1)...(19): siRNA sense strand
aaaggagacccugggauga

SEQ ID NO: 767294 - RNA, 19 nt, Homo sapiens
  misc_RNA (1)...(19): siRNA sense strand
gagccagggaucccaggaa

SEQ ID NO: 767295 - RNA, 19 nt, Homo sapiens
  misc_RNA (1)...(19): siRNA sense strand
gaaccagggaaaggagaga

SEQ ID NO: 767296 - RNA, 19 nt, Homo sapiens
  misc_RNA (1)...(19): siRNA sense strand
gauuacaauggaaacauca

SEQ ID NO: 767297 - RNA, 19 nt, Homo sapiens
  misc_RNA (1)...(19): siRNA sense strand
ggucaaccaggaacuagag

SEQ ID NO: 767298 - RNA, 19 nt, Homo sapiens
  misc_RNA (1)...(19): siRNA sense strand
aaggagagaugguggauua

SEQ ID NO: 767299 - RNA, 19 nt, Homo sapiens
  misc_RNA (1)...(19): siRNA sense strand
cagcugggcuuccugguuu

SEQ ID NO: 767300 - RNA, 19 nt, Homo sapiens
  misc_RNA (1)...(19): siRNA sense strand
ccaaagacaucuccaggau

SEQ ID NO: 767301 - RNA, 19 nt, Homo sapiens
  misc_RNA (1)...(19): siRNA sense strand
gagagaugguggauuacaa

SEQ ID NO: 767302 - RNA, 19 nt, Homo sapiens
  misc_RNA (1)...(19): siRNA sense strand
aaagggaccucgcgguaaa

SEQ ID NO: 767303 - RNA, 19 nt, Homo sapiens
  misc_RNA (1)...(19): siRNA sense strand
gaugguggauuacaaugga

SEQ ID NO: 767304 - RNA, 19 nt, Homo sapiens
  misc_RNA (1)...(19): siRNA sense strand
ggauuacaauggaaacauc

SEQ ID NO: 767305 - RNA, 19 nt, Homo sapiens
  misc_RNA (1)...(19): siRNA sense strand
caagggagaaccagggaaa

SEQ ID NO: 767306 - RNA, 19 nt, Homo sapiens
  misc_RNA (1)...(19): siRNA sense strand
ggaagcaggacuagaugga

SEQ ID NO: 767307 - RNA, 19 nt, Homo sapiens
  misc_RNA (1)...(19): siRNA sense strand
caaggcugcuggaacaagu

SEQ ID NO: 767308 - RNA, 19 nt, Homo sapiens
  misc_RNA (1)...(19): siRNA sense strand
gggagaagcaggugucgau

SEQ ID NO: 767309 - RNA, 19 nt, Homo sapiens
  misc_RNA (1)...(19): siRNA sense strand
ggagaacagggaccagaug

SEQ ID NO: 767310 - RNA, 19 nt, Homo sapiens
  misc_RNA (1)...(19): siRNA sense strand
acaauggaaacaucaauga

SEQ ID NO: 767311 - RNA, 19 nt, Homo sapiens
  misc_RNA (1)...(19): siRNA sense strand
gaaaggagagaugguggau

SEQ ID NO: 767312 - RNA, 19 nt, Homo sapiens
  misc_RNA (1)...(19): siRNA sense strand
cuagagguuucccuggauu

SEQ ID NO: 767313 - RNA, 19 nt, Homo sapiens
  misc_RNA (1)...(19): siRNA sense strand
gcaaauggagacggcuauu

SEQ ID NO: 767314 - RNA, 19 nt, Homo sapiens
  misc_RNA (1)...(19): siRNA sense strand
gaaaggcuuccagggagaa

SEQ ID NO: 767315 - RNA, 19 nt, Homo sapiens
  misc_RNA (1)...(19): siRNA sense strand
gcagcugggcuuccugguu

SEQ ID NO: 767316 - RNA, 19 nt, Homo sapiens
  misc_RNA (1)...(19): siRNA sense strand
ggagagaugguggauuaca

SEQ ID NO: 767317 - RNA, 19 nt, Homo sapiens
  misc_RNA (1)...(19): siRNA sense strand
gaugcuggcaacuccauug

SEQ ID NO: 767318 - RNA, 19 nt, Homo sapiens
  misc_RNA (1)...(19): siRNA sense strand
gcguggagcagcuggagaa

SEQ ID NO: 767319 - RNA, 19 nt, Homo sapiens
  misc_RNA (1)...(19): siRNA sense strand
uggagcagcuggagaacag

SEQ ID NO: 767320 - RNA, 19 nt, Homo sapiens
  misc_RNA (1)...(19): siRNA sense strand
ggauuuccgggucccauug

SEQ ID NO: 767321 - RNA, 19 nt, Homo sapiens
  misc_RNA (1)...(19): siRNA sense strand
gagaugguggauuacaaug

SEQ ID NO: 767322 - RNA, 19 nt, Homo sapiens
  misc_RNA (1)...(19): siRNA sense strand
uagcggagcgcacccacaa

SEQ ID NO: 767323 - RNA, 19 nt, Homo sapiens
  misc_RNA (1)...(19): siRNA sense strand
gggagaaccagggaaagga

SEQ ID NO: 767324 - RNA, 19 nt, Homo sapiens
  misc_RNA (1)...(19): siRNA sense strand
gagccaggccagcauccaa

SEQ ID NO: 767325 - RNA, 19 nt, Homo sapiens
  misc_RNA (1)...(19): siRNA sense strand
gguacuccaggaccaauug

SEQ ID NO: 767326 - RNA, 19 nt, Homo sapiens
  misc_RNA (1)...(19): siRNA sense strand
aaaggagacccugggauga

SEQ ID NO: 767327 - RNA, 19 nt, Homo sapiens
  misc_RNA (1)...(19): siRNA sense strand
gagccagggaucccaggaa

SEQ ID NO: 767328 - RNA, 19 nt, Homo sapiens
  misc_RNA (1)...(19): siRNA sense strand
gaaccagggaaaggagaga

SEQ ID NO: 767329 - RNA, 19 nt, Homo sapiens
  misc_RNA (1)...(19): siRNA sense strand
gauuacaauggaaacauca

SEQ ID NO: 767330 - RNA, 19 nt, Homo sapiens
  misc_RNA (1)...(19): siRNA sense strand
ggucaaccaggaacuagag

SEQ ID NO: 767331 - RNA, 19 nt, Homo sapiens
  misc_RNA (1)...(19): siRNA sense strand
aaggagagaugguggauua

SEQ ID NO: 767332 - RNA, 19 nt, Homo sapiens
  misc_RNA (1)...(19): siRNA sense strand
cagcugggcuuccugguuu

SEQ ID NO: 767333 - RNA, 19 nt, Homo sapiens
  misc_RNA (1)...(19): siRNA sense strand
ccaaagacaucuccaggau

SEQ ID NO: 767334 - RNA, 19 nt, Homo sapiens
  misc_RNA (1)...(19): siRNA sense strand
gagagaugguggauuacaa

SEQ ID NO: 767335 - RNA, 19 nt, Homo sapiens
  misc_RNA (1)...(19): siRNA sense strand
aaagggaccucgcgguaaa

SEQ ID NO: 767336 - RNA, 19 nt, Homo sapiens
  misc_RNA (1)...(19): siRNA sense strand
gaugguggauuacaaugga

SEQ ID NO: 767337 - RNA, 19 nt, Homo sapiens
  misc_RNA (1)...(19): siRNA sense strand
ggauuacaauggaaacauc

SEQ ID NO: 767338 - RNA, 19 nt, Homo sapiens
  misc_RNA (1)...(19): siRNA sense strand
caagggagaaccagggaaa

SEQ ID NO: 767339 - RNA, 19 nt, Homo sapiens
  misc_RNA (1)...(19): siRNA sense strand
ggaagcaggacuagaugga

SEQ ID NO: 767340 - RNA, 19 nt, Homo sapiens
  misc_RNA (1)...(19): siRNA sense strand
caaggcugcuggaacaagu

SEQ ID NO: 767341 - RNA, 19 nt, Homo sapiens
  misc_RNA (1)...(19): siRNA sense strand
gggagaagcaggugucgau

SEQ ID NO: 767342 - RNA, 19 nt, Homo sapiens
  misc_RNA (1)...(19): siRNA sense strand
ggagaacagggaccagaug

SEQ ID NO: 767343 - RNA, 19 nt, Homo sapiens
  misc_RNA (1)...(19): siRNA sense strand
acaauggaaacaucaauga

SEQ ID NO: 767344 - RNA, 19 nt, Homo sapiens
  misc_RNA (1)...(19): siRNA sense strand
gaaaggagagaugguggau

SEQ ID NO: 767345 - RNA, 19 nt, Homo sapiens
  misc_RNA (1)...(19): siRNA sense strand
cuagagguuucccuggauu

SEQ ID NO: 767346 - RNA, 19 nt, Homo sapiens
  misc_RNA (1)...(19): siRNA sense strand
gcaaauggagacggcuauu

SEQ ID NO: 767347 - RNA, 19 nt, Homo sapiens
  misc_RNA (1)...(19): siRNA sense strand
gaaaggcuuccagggagaa

SEQ ID NO: 767348 - RNA, 19 nt, Homo sapiens
  misc_RNA (1)...(19): siRNA sense strand
gcagcugggcuuccugguu

SEQ ID NO: 767349 - RNA, 19 nt, Homo sapiens
  misc_RNA (1)...(19): siRNA sense strand
ggagagaugguggauuaca

SEQ ID NO: 767350 - RNA, 19 nt, Homo sapiens
  misc_RNA (1)...(19): siRNA sense strand
gaugcuggcaacuccauug

SEQ ID NO: 767351 - RNA, 19 nt, Homo sapiens
  misc_RNA (1)...(19): siRNA sense strand
gcguggagcagcuggagaa

SEQ ID NO: 767352 - RNA, 19 nt, Homo sapiens
  misc_RNA (1)...(19): siRNA sense strand
uggagcagcuggagaacag

SEQ ID NO: 767353 - RNA, 19 nt, Homo sapiens
  misc_RNA (1)...(19): siRNA sense strand
ggauuuccgggucccauug

SEQ ID NO: 767354 - RNA, 19 nt, Homo sapiens
  misc_RNA (1)...(19): siRNA sense strand
gagaugguggauuacaaug

SEQ ID NO: 767355 - RNA, 19 nt, Homo sapiens
  misc_RNA (1)...(19): siRNA sense strand
uagcggagcgcacccacaa

SEQ ID NO: 767356 - RNA, 19 nt, Homo sapiens
  misc_RNA (1)...(19): siRNA sense strand
gggagaaccagggaaagga

SEQ ID NO: 767357 - RNA, 19 nt, Homo sapiens
  misc_RNA (1)...(19): siRNA sense strand
gagccaggccagcauccaa

SEQ ID NO: 767358 - RNA, 19 nt, Homo sapiens
  misc_RNA (1)...(19): siRNA sense strand
gguacuccaggaccaauug

SEQ ID NO: 767359 - RNA, 19 nt, Homo sapiens
  misc_RNA (1)...(19): siRNA sense strand
aaaggagacccugggauga

SEQ ID NO: 767360 - RNA, 19 nt, Homo sapiens
  misc_RNA (1)...(19): siRNA sense strand
gagccagggaucccaggaa

SEQ ID NO: 767361 - RNA, 19 nt, Homo sapiens
  misc_RNA (1)...(19): siRNA sense strand
gaaccagggaaaggagaga

SEQ ID NO: 767362 - RNA, 19 nt, Homo sapiens
  misc_RNA (1)...(19): siRNA sense strand
gauuacaauggaaacauca

SEQ ID NO: 767363 - RNA, 19 nt, Homo sapiens
  misc_RNA (1)...(19): siRNA sense strand
ggucaaccaggaacuagag

SEQ ID NO: 767364 - RNA, 19 nt, Homo sapiens
  misc_RNA (1)...(19): siRNA sense strand
aaggagagaugguggauua

SEQ ID NO: 767365 - RNA, 19 nt, Homo sapiens
  misc_RNA (1)...(19): siRNA sense strand
cagcugggcuuccugguuu

SEQ ID NO: 767366 - RNA, 19 nt, Homo sapiens
  misc_RNA (1)...(19): siRNA sense strand
ccaaagacaucuccaggau

SEQ ID NO: 767367 - RNA, 19 nt, Homo sapiens
  misc_RNA (1)...(19): siRNA sense strand
gagagaugguggauuacaa

SEQ ID NO: 767368 - RNA, 19 nt, Homo sapiens
  misc_RNA (1)...(19): siRNA sense strand
aaagggaccucgcgguaaa

SEQ ID NO: 767369 - RNA, 19 nt, Homo sapiens
  misc_RNA (1)...(19): siRNA sense strand
gaugguggauuacaaugga

SEQ ID NO: 767370 - RNA, 19 nt, Homo sapiens
  misc_RNA (1)...(19): siRNA sense strand
ggauuacaauggaaacauc

SEQ ID NO: 767371 - RNA, 19 nt, Homo sapiens
  misc_RNA (1)...(19): siRNA sense strand
caagggagaaccagggaaa

SEQ ID NO: 767372 - RNA, 19 nt, Homo sapiens
  misc_RNA (1)...(19): siRNA sense strand
ggaagcaggacuagaugga

SEQ ID NO: 767373 - RNA, 19 nt, Homo sapiens
  misc_RNA (1)...(19): siRNA sense strand
caaggcugcuggaacaagu

SEQ ID NO: 767374 - RNA, 19 nt, Homo sapiens
  misc_RNA (1)...(19): siRNA sense strand
gggagaagcaggugucgau

SEQ ID NO: 767375 - RNA, 19 nt, Homo sapiens
  misc_RNA (1)...(19): siRNA sense strand
ggagaacagggaccagaug

SEQ ID NO: 767376 - RNA, 19 nt, Homo sapiens
  misc_RNA (1)...(19): siRNA sense strand
acaauggaaacaucaauga

SEQ ID NO: 767377 - RNA, 19 nt, Homo sapiens
  misc_RNA (1)...(19): siRNA sense strand
gaaaggagagaugguggau

SEQ ID NO: 767378 - RNA, 19 nt, Homo sapiens
  misc_RNA (1)...(19): siRNA sense strand
cuagagguuucccuggauu

SEQ ID NO: 767379 - RNA, 19 nt, Homo sapiens
  misc_RNA (1)...(19): siRNA sense strand
gcaaauggagacggcuauu

SEQ ID NO: 767380 - RNA, 19 nt, Homo sapiens
  misc_RNA (1)...(19): siRNA sense strand
gaaaggcuuccagggagaa

SEQ ID NO: 767381 - RNA, 19 nt, Homo sapiens
  misc_RNA (1)...(19): siRNA sense strand
gcagcugggcuuccugguu

SEQ ID NO: 767382 - RNA, 19 nt, Homo sapiens
  misc_RNA (1)...(19): siRNA sense strand
ggagagaugguggauuaca

SEQ ID NO: 767383 - RNA, 19 nt, Homo sapiens
  misc_RNA (1)...(19): siRNA sense strand
gaugcuggcaacuccauug

SEQ ID NO: 767384 - RNA, 19 nt, Homo sapiens
  misc_RNA (1)...(19): siRNA sense strand
gcguggagcagcuggagaa

SEQ ID NO: 767385 - RNA, 19 nt, Homo sapiens
  misc_RNA (1)...(19): siRNA sense strand
uggagcagcuggagaacag

SEQ ID NO: 767386 - RNA, 19 nt, Homo sapiens
  misc_RNA (1)...(19): siRNA sense strand
ggauuuccgggucccauug

SEQ ID NO: 767387 - RNA, 19 nt, Homo sapiens
  misc_RNA (1)...(19): siRNA sense strand
gagaugguggauuacaaug

SEQ ID NO: 767388 - RNA, 19 nt, Homo sapiens
  misc_RNA (1)...(19): siRNA sense strand
uagcggagcgcacccacaa

SEQ ID NO: 767389 - RNA, 19 nt, Homo sapiens
  misc_RNA (1)...(19): siRNA sense strand
gggagaaccagggaaagga

SEQ ID NO: 767390 - RNA, 19 nt, Homo sapiens
  misc_RNA (1)...(19): siRNA sense strand
gagccaggccagcauccaa

SEQ ID NO: 767391 - RNA, 19 nt, Homo sapiens
  misc_RNA (1)...(19): siRNA sense strand
gguacuccaggaccaauug

SEQ ID NO: 767392 - RNA, 19 nt, Homo sapiens
  misc_RNA (1)...(19): siRNA sense strand
aaaggagacccugggauga

SEQ ID NO: 767393 - RNA, 19 nt, Homo sapiens
  misc_RNA (1)...(19): siRNA sense strand
gagccagggaucccaggaa

SEQ ID NO: 767394 - RNA, 19 nt, Homo sapiens
  misc_RNA (1)...(19): siRNA sense strand
gaaccagggaaaggagaga

SEQ ID NO: 767395 - RNA, 19 nt, Homo sapiens
  misc_RNA (1)...(19): siRNA sense strand
gauuacaauggaaacauca

SEQ ID NO: 767396 - RNA, 19 nt, Homo sapiens
  misc_RNA (1)...(19): siRNA sense strand
ggucaaccaggaacuagag

SEQ ID NO: 767397 - RNA, 19 nt, Homo sapiens
  misc_RNA (1)...(19): siRNA sense strand
aaggagagaugguggauua

SEQ ID NO: 767398 - RNA, 19 nt, Homo sapiens
  misc_RNA (1)...(19): siRNA sense strand
cagcugggcuuccugguuu

SEQ ID NO: 767399 - RNA, 19 nt, Homo sapiens
  misc_RNA (1)...(19): siRNA sense strand
ccaaagacaucuccaggau

SEQ ID NO: 767400 - RNA, 19 nt, Homo sapiens
  misc_RNA (1)...(19): siRNA sense strand
gagagaugguggauuacaa

SEQ ID NO: 767401 - RNA, 19 nt, Homo sapiens
  misc_RNA (1)...(19): siRNA sense strand
aaagggaccucgcgguaaa

SEQ ID NO: 767402 - RNA, 19 nt, Homo sapiens
  misc_RNA (1)...(19): siRNA sense strand
gaugguggauuacaaugga

SEQ ID NO: 767403 - RNA, 19 nt, Homo sapiens
  misc_RNA (1)...(19): siRNA sense strand
ggauuacaauggaaacauc

SEQ ID NO: 767404 - RNA, 19 nt, Homo sapiens
  misc_RNA (1)...(19): siRNA sense strand
caagggagaaccagggaaa

SEQ ID NO: 767405 - RNA, 19 nt, Homo sapiens
  misc_RNA (1)...(19): siRNA sense strand
ggaagcaggacuagaugga

SEQ ID NO: 767406 - RNA, 19 nt, Homo sapiens
  misc_RNA (1)...(19): siRNA sense strand
caaggcugcuggaacaagu

SEQ ID NO: 767407 - RNA, 19 nt, Homo sapiens
  misc_RNA (1)...(19): siRNA sense strand
gggagaagcaggugucgau

SEQ ID NO: 767408 - RNA, 19 nt, Homo sapiens
  misc_RNA (1)...(19): siRNA sense strand
ggagaacagggaccagaug

SEQ ID NO: 767409 - RNA, 19 nt, Homo sapiens
  misc_RNA (1)...(19): siRNA sense strand
acaauggaaacaucaauga

SEQ ID NO: 767410 - RNA, 19 nt, Homo sapiens
  misc_RNA (1)...(19): siRNA sense strand
gaaaggagagaugguggau

SEQ ID NO: 767411 - RNA, 19 nt, Homo sapiens
  misc_RNA (1)...(19): siRNA sense strand
cuagagguuucccuggauu

SEQ ID NO: 767412 - RNA, 19 nt, Homo sapiens
  misc_RNA (1)...(19): siRNA sense strand
gcaaauggagacggcuauu

SEQ ID NO: 767413 - RNA, 19 nt, Homo sapiens
  misc_RNA (1)...(19): siRNA sense strand
gaaaggcuuccagggagaa

SEQ ID NO: 767414 - RNA, 19 nt, Homo sapiens
  misc_RNA (1)...(19): siRNA sense strand
gcagcugggcuuccugguu

SEQ ID NO: 767415 - RNA, 19 nt, Homo sapiens
  misc_RNA (1)...(19): siRNA sense strand
ggagagaugguggauuaca

SEQ ID NO: 767416 - RNA, 19 nt, Homo sapiens
  misc_RNA (1)...(19): siRNA sense strand
gaugcuggcaacuccauug

SEQ ID NO: 767417 - RNA, 19 nt, Homo sapiens
  misc_RNA (1)...(19): siRNA sense strand
gcguggagcagcuggagaa

SEQ ID NO: 767418 - RNA, 19 nt, Homo sapiens
  misc_RNA (1)...(19): siRNA sense strand
uggagcagcuggagaacag

SEQ ID NO: 767419 - RNA, 19 nt, Homo sapiens
  misc_RNA (1)...(19): siRNA sense strand
ggauuuccgggucccauug

SEQ ID NO: 767420 - RNA, 19 nt, Homo sapiens
  misc_RNA (1)...(19): siRNA sense strand
gagaugguggauuacaaug

SEQ ID NO: 767421 - RNA, 19 nt, Homo sapiens
  misc_RNA (1)...(19): siRNA sense strand
uagcggagcgcacccacaa

SEQ ID NO: 767422 - RNA, 19 nt, Homo sapiens
  misc_RNA (1)...(19): siRNA sense strand
gggagaaccagggaaagga

SEQ ID NO: 767423 - RNA, 19 nt, Homo sapiens
  misc_RNA (1)...(19): siRNA sense strand
gagccaggccagcauccaa

SEQ ID NO: 767424 - RNA, 19 nt, Homo sapiens
  misc_RNA (1)...(19): siRNA sense strand
gguacuccaggaccaauug

SEQ ID NO: 767425 - RNA, 19 nt, Homo sapiens
  misc_RNA (1)...(19): siRNA sense strand
aaaggagacccugggauga

SEQ ID NO: 767426 - RNA, 19 nt, Homo sapiens
  misc_RNA (1)...(19): siRNA sense strand
gagccagggaucccaggaa

SEQ ID NO: 767427 - RNA, 19 nt, Homo sapiens
  misc_RNA (1)...(19): siRNA sense strand
gaaccagggaaaggagaga

SEQ ID NO: 767428 - RNA, 19 nt, Homo sapiens
  misc_RNA (1)...(19): siRNA sense strand
gauuacaauggaaacauca

SEQ ID NO: 767429 - RNA, 19 nt, Homo sapiens
  misc_RNA (1)...(19): siRNA sense strand
ggucaaccaggaacuagag

SEQ ID NO: 767430 - RNA, 19 nt, Homo sapiens
  misc_RNA (1)...(19): siRNA sense strand
aaggagagaugguggauua

SEQ ID NO: 767431 - RNA, 19 nt, Homo sapiens
  misc_RNA (1)...(19): siRNA sense strand
cagcugggcuuccugguuu

SEQ ID NO: 767432 - RNA, 19 nt, Homo sapiens
  misc_RNA (1)...(19): siRNA sense strand
ccaaagacaucuccaggau

SEQ ID NO: 767433 - RNA, 19 nt, Homo sapiens
  misc_RNA (1)...(19): siRNA sense strand
gagagaugguggauuacaa

SEQ ID NO: 767434 - RNA, 19 nt, Homo sapiens
  misc_RNA (1)...(19): siRNA sense strand
aaagggaccucgcgguaaa

SEQ ID NO: 767435 - RNA, 19 nt, Homo sapiens
  misc_RNA (1)...(19): siRNA sense strand
gaugguggauuacaaugga

SEQ ID NO: 767436 - RNA, 19 nt, Homo sapiens
  misc_RNA (1)...(19): siRNA sense strand
ggauuacaauggaaacauc

SEQ ID NO: 767437 - RNA, 19 nt, Homo sapiens
  misc_RNA (1)...(19): siRNA sense strand
gggcgaagauggcuuacca

SEQ ID NO: 767438 - RNA, 19 nt, Homo sapiens
  misc_RNA (1)...(19): siRNA sense strand
caagggagaaccagggaaa

SEQ ID NO: 767439 - RNA, 19 nt, Homo sapiens
  misc_RNA (1)...(19): siRNA sense strand
ggaagcaggacuagaugga

SEQ ID NO: 767440 - RNA, 19 nt, Homo sapiens
  misc_RNA (1)...(19): siRNA sense strand
caaggcugcuggaacaagu

SEQ ID NO: 767441 - RNA, 19 nt, Homo sapiens
  misc_RNA (1)...(19): siRNA sense strand
gggagaagcaggugucgau

SEQ ID NO: 767442 - RNA, 19 nt, Homo sapiens
  misc_RNA (1)...(19): siRNA sense strand
ggagaacagggaccagaug

SEQ ID NO: 767443 - RNA, 19 nt, Homo sapiens
  misc_RNA (1)...(19): siRNA sense strand
acaauggaaacaucaauga

SEQ ID NO: 767444 - RNA, 19 nt, Homo sapiens
  misc_RNA (1)...(19): siRNA sense strand
gaaaggagagaugguggau

SEQ ID NO: 767445 - RNA, 19 nt, Homo sapiens
  misc_RNA (1)...(19): siRNA sense strand
cuagagguuucccuggauu

SEQ ID NO: 767446 - RNA, 19 nt, Homo sapiens
  misc_RNA (1)...(19): siRNA sense strand
gcaaauggagacggcuauu

SEQ ID NO: 767447 - RNA, 19 nt, Homo sapiens
  misc_RNA (1)...(19): siRNA sense strand
gaaaggcuuccagggagaa

SEQ ID NO: 767448 - RNA, 19 nt, Homo sapiens
  misc_RNA (1)...(19): siRNA sense strand
gcagcugggcuuccugguu

SEQ ID NO: 767449 - RNA, 19 nt, Homo sapiens
  misc_RNA (1)...(19): siRNA sense strand
ggagagaugguggauuaca

SEQ ID NO: 767450 - RNA, 19 nt, Homo sapiens
  misc_RNA (1)...(19): siRNA sense strand
gaugcuggcaacuccauug

SEQ ID NO: 767451 - RNA, 19 nt, Homo sapiens
  misc_RNA (1)...(19): siRNA sense strand
gcguggagcagcuggagaa

SEQ ID NO: 767452 - RNA, 19 nt, Homo sapiens
  misc_RNA (1)...(19): siRNA sense strand
uggagcagcuggagaacag

SEQ ID NO: 767453 - RNA, 19 nt, Homo sapiens
  misc_RNA (1)...(19): siRNA sense strand
ggauuuccgggucccauug

SEQ ID NO: 767454 - RNA, 19 nt, Homo sapiens
  misc_RNA (1)...(19): siRNA sense strand
gagaugguggauuacaaug

SEQ ID NO: 767455 - RNA, 19 nt, Homo sapiens
  misc_RNA (1)...(19): siRNA sense strand
uagcggagcgcacccacaa

SEQ ID NO: 767456 - RNA, 19 nt, Homo sapiens
  misc_RNA (1)...(19): siRNA sense strand
gggagaaccagggaaagga

SEQ ID NO: 767457 - RNA, 19 nt, Homo sapiens
  misc_RNA (1)...(19): siRNA sense strand
gagccaggccagcauccaa

SEQ ID NO: 767458 - RNA, 19 nt, Homo sapiens
  misc_RNA (1)...(19): siRNA sense strand
gguacuccaggaccaauug

SEQ ID NO: 767459 - RNA, 19 nt, Homo sapiens
  misc_RNA (1)...(19): siRNA sense strand
aaaggagacccugggauga

SEQ ID NO: 767460 - RNA, 19 nt, Homo sapiens
  misc_RNA (1)...(19): siRNA sense strand
gagccagggaucccaggaa

SEQ ID NO: 767461 - RNA, 19 nt, Homo sapiens
  misc_RNA (1)...(19): siRNA sense strand
gaaccagggaaaggagaga

SEQ ID NO: 767462 - RNA, 19 nt, Homo sapiens
  misc_RNA (1)...(19): siRNA sense strand
gauuacaauggaaacauca

SEQ ID NO: 767463 - RNA, 19 nt, Homo sapiens
  misc_RNA (1)...(19): siRNA sense strand
ggucaaccaggaacuagag

SEQ ID NO: 767464 - RNA, 19 nt, Homo sapiens
  misc_RNA (1)...(19): siRNA sense strand
aaggagagaugguggauua

SEQ ID NO: 767465 - RNA, 19 nt, Homo sapiens
  misc_RNA (1)...(19): siRNA sense strand
cagcugggcuuccugguuu

SEQ ID NO: 767466 - RNA, 19 nt, Homo sapiens
  misc_RNA (1)...(19): siRNA sense strand
ccaaagacaucuccaggau

SEQ ID NO: 767467 - RNA, 19 nt, Homo sapiens
  misc_RNA (1)...(19): siRNA sense strand
gagagaugguggauuacaa

SEQ ID NO: 767468 - RNA, 19 nt, Homo sapiens
  misc_RNA (1)...(19): siRNA sense strand
aaagggaccucgcgguaaa

SEQ ID NO: 767469 - RNA, 19 nt, Homo sapiens
  misc_RNA (1)...(19): siRNA sense strand
gaugguggauuacaaugga

SEQ ID NO: 767470 - RNA, 19 nt, Homo sapiens
  misc_RNA (1)...(19): siRNA sense strand
ggauuacaauggaaacauc

SEQ ID NO: 767471 - RNA, 19 nt, Homo sapiens
  misc_RNA (1)...(19): siRNA sense strand
caagggagaaccagggaaa

SEQ ID NO: 767472 - RNA, 19 nt, Homo sapiens
  misc_RNA (1)...(19): siRNA sense strand
ggaagcaggacuagaugga

SEQ ID NO: 767473 - RNA, 19 nt, Homo sapiens
  misc_RNA (1)...(19): siRNA sense strand
caaggcugcuggaacaagu

SEQ ID NO: 767474 - RNA, 19 nt, Homo sapiens
  misc_RNA (1)...(19): siRNA sense strand
gggagaagcaggugucgau

SEQ ID NO: 767475 - RNA, 19 nt, Homo sapiens
  misc_RNA (1)...(19): siRNA sense strand
ggagaacagggaccagaug

SEQ ID NO: 767476 - RNA, 19 nt, Homo sapiens
  misc_RNA (1)...(19): siRNA sense strand
acaauggaaacaucaauga

SEQ ID NO: 767477 - RNA, 19 nt, Homo sapiens
  misc_RNA (1)...(19): siRNA sense strand
gaaaggagagaugguggau

SEQ ID NO: 767478 - RNA, 19 nt, Homo sapiens
  misc_RNA (1)...(19): siRNA sense strand
cuagagguuucccuggauu

SEQ ID NO: 767479 - RNA, 19 nt, Homo sapiens
  misc_RNA (1)...(19): siRNA sense strand
gcaaauggagacggcuauu

SEQ ID NO: 767480 - RNA, 19 nt, Homo sapiens
  misc_RNA (1)...(19): siRNA sense strand
gaaaggcuuccagggagaa

SEQ ID NO: 767481 - RNA, 19 nt, Homo sapiens
  misc_RNA (1)...(19): siRNA sense strand
gcagcugggcuuccugguu

SEQ ID NO: 767482 - RNA, 19 nt, Homo sapiens
  misc_RNA (1)...(19): siRNA sense strand
ggagagaugguggauuaca

SEQ ID NO: 767483 - RNA, 19 nt, Homo sapiens
  misc_RNA (1)...(19): siRNA sense strand
gaugcuggcaacuccauug

SEQ ID NO: 767484 - RNA, 19 nt, Homo sapiens
  misc_RNA (1)...(19): siRNA sense strand
gcguggagcagcuggagaa

SEQ ID NO: 767485 - RNA, 19 nt, Homo sapiens
  misc_RNA (1)...(19): siRNA sense strand
uggagcagcuggagaacag

SEQ ID NO: 767486 - RNA, 19 nt, Homo sapiens
  misc_RNA (1)...(19): siRNA sense strand
ggauuuccgggucccauug

SEQ ID NO: 767487 - RNA, 19 nt, Homo sapiens
  misc_RNA (1)...(19): siRNA sense strand
gagaugguggauuacaaug

SEQ ID NO: 767488 - RNA, 19 nt, Homo sapiens
  misc_RNA (1)...(19): siRNA sense strand
uagcggagcgcacccacaa

SEQ ID NO: 767489 - RNA, 19 nt, Homo sapiens
  misc_RNA (1)...(19): siRNA sense strand
gggagaaccagggaaagga

SEQ ID NO: 767490 - RNA, 19 nt, Homo sapiens
  misc_RNA (1)...(19): siRNA sense strand
gagccaggccagcauccaa

SEQ ID NO: 767491 - RNA, 19 nt, Homo sapiens
  misc_RNA (1)...(19): siRNA sense strand
gguacuccaggaccaauug

SEQ ID NO: 767492 - RNA, 19 nt, Homo sapiens
  misc_RNA (1)...(19): siRNA sense strand
aaaggagacccugggauga

SEQ ID NO: 767493 - RNA, 19 nt, Homo sapiens
  misc_RNA (1)...(19): siRNA sense strand
gagccagggaucccaggaa

SEQ ID NO: 767494 - RNA, 19 nt, Homo sapiens
  misc_RNA (1)...(19): siRNA sense strand
gaaccagggaaaggagaga

SEQ ID NO: 767495 - RNA, 19 nt, Homo sapiens
  misc_RNA (1)...(19): siRNA sense strand
gauuacaauggaaacauca

SEQ ID NO: 767496 - RNA, 19 nt, Homo sapiens
  misc_RNA (1)...(19): siRNA sense strand
ggucaaccaggaacuagag

SEQ ID NO: 767497 - RNA, 19 nt, Homo sapiens
  misc_RNA (1)...(19): siRNA sense strand
aaggagagaugguggauua

SEQ ID NO: 767498 - RNA, 19 nt, Homo sapiens
  misc_RNA (1)...(19): siRNA sense strand
cagcugggcuuccugguuu

SEQ ID NO: 767499 - RNA, 19 nt, Homo sapiens
  misc_RNA (1)...(19): siRNA sense strand
ccaaagacaucuccaggau

SEQ ID NO: 767500 - RNA, 19 nt, Homo sapiens
  misc_RNA (1)...(19): siRNA sense strand
gagagaugguggauuacaa

SEQ ID NO: 767501 - RNA, 19 nt, Homo sapiens
  misc_RNA (1)...(19): siRNA sense strand
aaagggaccucgcgguaaa

SEQ ID NO: 767502 - RNA, 19 nt, Homo sapiens
  misc_RNA (1)...(19): siRNA sense strand
gaugguggauuacaaugga

SEQ ID NO: 767503 - RNA, 19 nt, Homo sapiens
  misc_RNA (1)...(19): siRNA sense strand
ggauuacaauggaaacauc

SEQ ID NO: 767504 - RNA, 19 nt, Homo sapiens
  misc_RNA (1)...(19): siRNA sense strand
caagggagaaccagggaaa

SEQ ID NO: 767505 - RNA, 19 nt, Homo sapiens
  misc_RNA (1)...(19): siRNA sense strand
ggaagcaggacuagaugga

SEQ ID NO: 767506 - RNA, 19 nt, Homo sapiens
  misc_RNA (1)...(19): siRNA sense strand
caaggcugcuggaacaagu

SEQ ID NO: 767507 - RNA, 19 nt, Homo sapiens
  misc_RNA (1)...(19): siRNA sense strand
gggagaagcaggugucgau

SEQ ID NO: 767508 - RNA, 19 nt, Homo sapiens
  misc_RNA (1)...(19): siRNA sense strand
ggagaacagggaccagaug

SEQ ID NO: 767509 - RNA, 19 nt, Homo sapiens
  misc_RNA (1)...(19): siRNA sense strand
acaauggaaacaucaauga

SEQ ID NO: 767510 - RNA, 19 nt, Homo sapiens
  misc_RNA (1)...(19): siRNA sense strand
gaaaggagagaugguggau

SEQ ID NO: 767511 - RNA, 19 nt, Homo sapiens
  misc_RNA (1)...(19): siRNA sense strand
cuagagguuucccuggauu

SEQ ID NO: 767512 - RNA, 19 nt, Homo sapiens
  misc_RNA (1)...(19): siRNA sense strand
gcaaauggagacggcuauu

SEQ ID NO: 767513 - RNA, 19 nt, Homo sapiens
  misc_RNA (1)...(19): siRNA sense strand
gaaaggcuuccagggagaa

SEQ ID NO: 767514 - RNA, 19 nt, Homo sapiens
  misc_RNA (1)...(19): siRNA sense strand
gcagcugggcuuccugguu

SEQ ID NO: 767515 - RNA, 19 nt, Homo sapiens
  misc_RNA (1)...(19): siRNA sense strand
ggagagaugguggauuaca

SEQ ID NO: 767516 - RNA, 19 nt, Homo sapiens
  misc_RNA (1)...(19): siRNA sense strand
gaugcuggcaacuccauug

SEQ ID NO: 767517 - RNA, 19 nt, Homo sapiens
  misc_RNA (1)...(19): siRNA sense strand
gcguggagcagcuggagaa

SEQ ID NO: 767518 - RNA, 19 nt, Homo sapiens
  misc_RNA (1)...(19): siRNA sense strand
uggagcagcuggagaacag

SEQ ID NO: 767519 - RNA, 19 nt, Homo sapiens
  misc_RNA (1)...(19): siRNA sense strand
ggauuuccgggucccauug

SEQ ID NO: 767520 - RNA, 19 nt, Homo sapiens
  misc_RNA (1)...(19): siRNA sense strand
gagaugguggauuacaaug

SEQ ID NO: 767521 - RNA, 19 nt, Homo sapiens
  misc_RNA (1)...(19): siRNA sense strand
uagcggagcgcacccacaa

SEQ ID NO: 767522 - RNA, 19 nt, Homo sapiens
  misc_RNA (1)...(19): siRNA sense strand
gggagaaccagggaaagga

SEQ ID NO: 767523 - RNA, 19 nt, Homo sapiens
  misc_RNA (1)...(19): siRNA sense strand
gagccaggccagcauccaa

SEQ ID NO: 767524 - RNA, 19 nt, Homo sapiens
  misc_RNA (1)...(19): siRNA sense strand
gguacuccaggaccaauug

SEQ ID NO: 767525 - RNA, 19 nt, Homo sapiens
  misc_RNA (1)...(19): siRNA sense strand
aaaggagacccugggauga

SEQ ID NO: 767526 - RNA, 19 nt, Homo sapiens
  misc_RNA (1)...(19): siRNA sense strand
gagccagggaucccaggaa

SEQ ID NO: 767527 - RNA, 19 nt, Homo sapiens
  misc_RNA (1)...(19): siRNA sense strand
gaaccagggaaaggagaga

SEQ ID NO: 767528 - RNA, 19 nt, Homo sapiens
  misc_RNA (1)...(19): siRNA sense strand
gauuacaauggaaacauca

SEQ ID NO: 767529 - RNA, 19 nt, Homo sapiens
  misc_RNA (1)...(19): siRNA sense strand
ggucaaccaggaacuagag

SEQ ID NO: 767530 - RNA, 19 nt, Homo sapiens
  misc_RNA (1)...(19): siRNA sense strand
aaggagagaugguggauua

SEQ ID NO: 767531 - RNA, 19 nt, Homo sapiens
  misc_RNA (1)...(19): siRNA sense strand
cagcugggcuuccugguuu

SEQ ID NO: 767532 - RNA, 19 nt, Homo sapiens
  misc_RNA (1)...(19): siRNA sense strand
ccaaagacaucuccaggau

SEQ ID NO: 767533 - RNA, 19 nt, Homo sapiens
  misc_RNA (1)...(19): siRNA sense strand
gagagaugguggauuacaa

SEQ ID NO: 767534 - RNA, 19 nt, Homo sapiens
  misc_RNA (1)...(19): siRNA sense strand
aaagggaccucgcgguaaa

SEQ ID NO: 767535 - RNA, 19 nt, Homo sapiens
  misc_RNA (1)...(19): siRNA sense strand
gaugguggauuacaaugga

SEQ ID NO: 767536 - RNA, 19 nt, Homo sapiens
  misc_RNA (1)...(19): siRNA sense strand
ggauuacaauggaaacauc

SEQ ID NO: 767537 - RNA, 19 nt, Homo sapiens
  misc_RNA (1)...(19): siRNA sense strand
caagggagaaccagggaaa

SEQ ID NO: 767538 - RNA, 19 nt, Homo sapiens
  misc_RNA (1)...(19): siRNA sense strand
ggaagcaggacuagaugga

SEQ ID NO: 767539 - RNA, 19 nt, Homo sapiens
  misc_RNA (1)...(19): siRNA sense strand
caaggcugcuggaacaagu

SEQ ID NO: 767540 - RNA, 19 nt, Homo sapiens
  misc_RNA (1)...(19): siRNA sense strand
gggagaagcaggugucgau

SEQ ID NO: 767541 - RNA, 19 nt, Homo sapiens
  misc_RNA (1)...(19): siRNA sense strand
ggagaacagggaccagaug

SEQ ID NO: 767542 - RNA, 19 nt, Homo sapiens
  misc_RNA (1)...(19): siRNA sense strand
acaauggaaacaucaauga

SEQ ID NO: 767543 - RNA, 19 nt, Homo sapiens
  misc_RNA (1)...(19): siRNA sense strand
gaaaggagagaugguggau

SEQ ID NO: 767544 - RNA, 19 nt, Homo sapiens
  misc_RNA (1)...(19): siRNA sense strand
cuagagguuucccuggauu

SEQ ID NO: 767545 - RNA, 19 nt, Homo sapiens
  misc_RNA (1)...(19): siRNA sense strand
gcaaauggagacggcuauu

SEQ ID NO: 767546 - RNA, 19 nt, Homo sapiens
  misc_RNA (1)...(19): siRNA sense strand
gaaaggcuuccagggagaa

SEQ ID NO: 767547 - RNA, 19 nt, Homo sapiens
  misc_RNA (1)...(19): siRNA sense strand
gcagcugggcuuccugguu

SEQ ID NO: 767548 - RNA, 19 nt, Homo sapiens
  misc_RNA (1)...(19): siRNA sense strand
ggagagaugguggauuaca

SEQ ID NO: 767549 - RNA, 19 nt, Homo sapiens
  misc_RNA (1)...(19): siRNA sense strand
gaugcuggcaacuccauug

SEQ ID NO: 767550 - RNA, 19 nt, Homo sapiens
  misc_RNA (1)...(19): siRNA sense strand
gcguggagcagcuggagaa

SEQ ID NO: 767551 - RNA, 19 nt, Homo sapiens
  misc_RNA (1)...(19): siRNA sense strand
uggagcagcuggagaacag

SEQ ID NO: 767552 - RNA, 19 nt, Homo sapiens
  misc_RNA (1)...(19): siRNA sense strand
ggauuuccgggucccauug

SEQ ID NO: 767553 - RNA, 19 nt, Homo sapiens
  misc_RNA (1)...(19): siRNA sense strand
gagaugguggauuacaaug

SEQ ID NO: 767554 - RNA, 19 nt, Homo sapiens
  misc_RNA (1)...(19): siRNA sense strand
uagcggagcgcacccacaa

SEQ ID NO: 767555 - RNA, 19 nt, Homo sapiens
  misc_RNA (1)...(19): siRNA sense strand
gggagaaccagggaaagga

SEQ ID NO: 767556 - RNA, 19 nt, Homo sapiens
  misc_RNA (1)...(19): siRNA sense strand
gagccaggccagcauccaa

SEQ ID NO: 767557 - RNA, 19 nt, Homo sapiens
  misc_RNA (1)...(19): siRNA sense strand
gguacuccaggaccaauug

SEQ ID NO: 767558 - RNA, 19 nt, Homo sapiens
  misc_RNA (1)...(19): siRNA sense strand
aaaggagacccugggauga

SEQ ID NO: 767559 - RNA, 19 nt, Homo sapiens
  misc_RNA (1)...(19): siRNA sense strand
gagccagggaucccaggaa

SEQ ID NO: 767560 - RNA, 19 nt, Homo sapiens
  misc_RNA (1)...(19): siRNA sense strand
gaaccagggaaaggagaga

SEQ ID NO: 767561 - RNA, 19 nt, Homo sapiens
  misc_RNA (1)...(19): siRNA sense strand
gauuacaauggaaacauca

SEQ ID NO: 767562 - RNA, 19 nt, Homo sapiens
  misc_RNA (1)...(19): siRNA sense strand
ggucaaccaggaacuagag

SEQ ID NO: 767563 - RNA, 19 nt, Homo sapiens
  misc_RNA (1)...(19): siRNA sense strand
aaggagagaugguggauua

SEQ ID NO: 767564 - RNA, 19 nt, Homo sapiens
  misc_RNA (1)...(19): siRNA sense strand
cagcugggcuuccugguuu

SEQ ID NO: 767565 - RNA, 19 nt, Homo sapiens
  misc_RNA (1)...(19): siRNA sense strand
ccaaagacaucuccaggau

SEQ ID NO: 767566 - RNA, 19 nt, Homo sapiens
  misc_RNA (1)...(19): siRNA sense strand
gagagaugguggauuacaa

SEQ ID NO: 767567 - RNA, 19 nt, Homo sapiens
  misc_RNA (1)...(19): siRNA sense strand
aaagggaccucgcgguaaa

SEQ ID NO: 767568 - RNA, 19 nt, Homo sapiens
  misc_RNA (1)...(19): siRNA sense strand
gaugguggauuacaaugga

SEQ ID NO: 767569 - RNA, 19 nt, Homo sapiens
  misc_RNA (1)...(19): siRNA sense strand
ggauuacaauggaaacauc

SEQ ID NO: 767570 - RNA, 19 nt, Homo sapiens
  misc_RNA (1)...(19): siRNA sense strand
caagggagaaccagggaaa

SEQ ID NO: 767571 - RNA, 19 nt, Homo sapiens
  misc_RNA (1)...(19): siRNA sense strand
ggaagcaggacuagaugga

SEQ ID NO: 767572 - RNA, 19 nt, Homo sapiens
  misc_RNA (1)...(19): siRNA sense strand
caaggcugcuggaacaagu

SEQ ID NO: 767573 - RNA, 19 nt, Homo sapiens
  misc_RNA (1)...(19): siRNA sense strand
gggagaagcaggugucgau

SEQ ID NO: 767574 - RNA, 19 nt, Homo sapiens
  misc_RNA (1)...(19): siRNA sense strand
ggagaacagggaccagaug

SEQ ID NO: 767575 - RNA, 19 nt, Homo sapiens
  misc_RNA (1)...(19): siRNA sense strand
acaauggaaacaucaauga

SEQ ID NO: 767576 - RNA, 19 nt, Homo sapiens
  misc_RNA (1)...(19): siRNA sense strand
gaaaggagagaugguggau

SEQ ID NO: 767577 - RNA, 19 nt, Homo sapiens
  misc_RNA (1)...(19): siRNA sense strand
cuagagguuucccuggauu

SEQ ID NO: 767578 - RNA, 19 nt, Homo sapiens
  misc_RNA (1)...(19): siRNA sense strand
gcaaauggagacggcuauu

SEQ ID NO: 767579 - RNA, 19 nt, Homo sapiens
  misc_RNA (1)...(19): siRNA sense strand
gaaaggcuuccagggagaa

SEQ ID NO: 767580 - RNA, 19 nt, Homo sapiens
  misc_RNA (1)...(19): siRNA sense strand
gcagcugggcuuccugguu

SEQ ID NO: 767581 - RNA, 19 nt, Homo sapiens
  misc_RNA (1)...(19): siRNA sense strand
ggagagaugguggauuaca

SEQ ID NO: 767582 - RNA, 19 nt, Homo sapiens
  misc_RNA (1)...(19): siRNA sense strand
gaugcuggcaacuccauug

SEQ ID NO: 767583 - RNA, 19 nt, Homo sapiens
  misc_RNA (1)...(19): siRNA sense strand
gcguggagcagcuggagaa

SEQ ID NO: 767584 - RNA, 19 nt, Homo sapiens
  misc_RNA (1)...(19): siRNA sense strand
uggagcagcuggagaacag

SEQ ID NO: 767585 - RNA, 19 nt, Homo sapiens
  misc_RNA (1)...(19): siRNA sense strand
ggauuuccgggucccauug

SEQ ID NO: 767586 - RNA, 19 nt, Homo sapiens
  misc_RNA (1)...(19): siRNA sense strand
gagaugguggauuacaaug

SEQ ID NO: 767587 - RNA, 19 nt, Homo sapiens
  misc_RNA (1)...(19): siRNA sense strand
uagcggagcgcacccacaa

SEQ ID NO: 767588 - RNA, 19 nt, Homo sapiens
  misc_RNA (1)...(19): siRNA sense strand
gggagaaccagggaaagga

SEQ ID NO: 767589 - RNA, 19 nt, Homo sapiens
  misc_RNA (1)...(19): siRNA sense strand
gagccaggccagcauccaa

SEQ ID NO: 767590 - RNA, 19 nt, Homo sapiens
  misc_RNA (1)...(19): siRNA sense strand
gguacuccaggaccaauug

SEQ ID NO: 767591 - RNA, 19 nt, Homo sapiens
  misc_RNA (1)...(19): siRNA sense strand
aaaggagacccugggauga

SEQ ID NO: 767592 - RNA, 19 nt, Homo sapiens
  misc_RNA (1)...(19): siRNA sense strand
gagccagggaucccaggaa

SEQ ID NO: 767593 - RNA, 19 nt, Homo sapiens
  misc_RNA (1)...(19): siRNA sense strand
gaaccagggaaaggagaga

SEQ ID NO: 767594 - RNA, 19 nt, Homo sapiens
  misc_RNA (1)...(19): siRNA sense strand
gauuacaauggaaacauca

SEQ ID NO: 767595 - RNA, 19 nt, Homo sapiens
  misc_RNA (1)...(19): siRNA sense strand
ggucaaccaggaacuagag

SEQ ID NO: 767596 - RNA, 19 nt, Homo sapiens
  misc_RNA (1)...(19): siRNA sense strand
aaggagagaugguggauua

SEQ ID NO: 767597 - RNA, 19 nt, Homo sapiens
  misc_RNA (1)...(19): siRNA sense strand
cagcugggcuuccugguuu

SEQ ID NO: 767598 - RNA, 19 nt, Homo sapiens
  misc_RNA (1)...(19): siRNA sense strand
ccaaagacaucuccaggau

SEQ ID NO: 767599 - RNA, 19 nt, Homo sapiens
  misc_RNA (1)...(19): siRNA sense strand
gagagaugguggauuacaa

SEQ ID NO: 767600 - RNA, 19 nt, Homo sapiens
  misc_RNA (1)...(19): siRNA sense strand
aaagggaccucgcgguaaa

SEQ ID NO: 767601 - RNA, 19 nt, Homo sapiens
  misc_RNA (1)...(19): siRNA sense strand
gaugguggauuacaaugga

SEQ ID NO: 767602 - RNA, 19 nt, Homo sapiens
  misc_RNA (1)...(19): siRNA sense strand
ggauuacaauggaaacauc

SEQ ID NO: 767603 - RNA, 19 nt, Homo sapiens
  misc_RNA (1)...(19): siRNA sense strand
caagggagaaccagggaaa

SEQ ID NO: 767604 - RNA, 19 nt, Homo sapiens
  misc_RNA (1)...(19): siRNA sense strand
ggaagcaggacuagaugga

SEQ ID NO: 767605 - RNA, 19 nt, Homo sapiens
  misc_RNA (1)...(19): siRNA sense strand
caaggcugcuggaacaagu

SEQ ID NO: 767606 - RNA, 19 nt, Homo sapiens
  misc_RNA (1)...(19): siRNA sense strand
gggagaagcaggugucgau

SEQ ID NO: 767607 - RNA, 19 nt, Homo sapiens
  misc_RNA (1)...(19): siRNA sense strand
ggagaacagggaccagaug

SEQ ID NO: 767608 - RNA, 19 nt, Homo sapiens
  misc_RNA (1)...(19): siRNA sense strand
acaauggaaacaucaauga

SEQ ID NO: 767609 - RNA, 19 nt, Homo sapiens
  misc_RNA (1)...(19): siRNA sense strand
gaaaggagagaugguggau

SEQ ID NO: 767610 - RNA, 19 nt, Homo sapiens
  misc_RNA (1)...(19): siRNA sense strand
cuagagguuucccuggauu

SEQ ID NO: 767611 - RNA, 19 nt, Homo sapiens
  misc_RNA (1)...(19): siRNA sense strand
gcaaauggagacggcuauu

SEQ ID NO: 767612 - RNA, 19 nt, Homo sapiens
  misc_RNA (1)...(19): siRNA sense strand
gaaaggcuuccagggagaa

SEQ ID NO: 767613 - RNA, 19 nt, Homo sapiens
  misc_RNA (1)...(19): siRNA sense strand
gcagcugggcuuccugguu

SEQ ID NO: 767614 - RNA, 19 nt, Homo sapiens
  misc_RNA (1)...(19): siRNA sense strand
ggagagaugguggauuaca

SEQ ID NO: 767615 - RNA, 19 nt, Homo sapiens
  misc_RNA (1)...(19): siRNA sense strand
gaugcuggcaacuccauug

SEQ ID NO: 767616 - RNA, 19 nt, Homo sapiens
  misc_RNA (1)...(19): siRNA sense strand
gcguggagcagcuggagaa

SEQ ID NO: 767617 - RNA, 19 nt, Homo sapiens
  misc_RNA (1)...(19): siRNA sense strand
uggagcagcuggagaacag

SEQ ID NO: 767618 - RNA, 19 nt, Homo sapiens
  misc_RNA (1)...(19): siRNA sense strand
ggauuuccgggucccauug

SEQ ID NO: 767619 - RNA, 19 nt, Homo sapiens
  misc_RNA (1)...(19): siRNA sense strand
gagaugguggauuacaaug

SEQ ID NO: 767620 - RNA, 19 nt, Homo sapiens
  misc_RNA (1)...(19): siRNA sense strand
uagcggagcgcacccacaa

SEQ ID NO: 767621 - RNA, 19 nt, Homo sapiens
  misc_RNA (1)...(19): siRNA sense strand
gggagaaccagggaaagga

SEQ ID NO: 767622 - RNA, 19 nt, Homo sapiens
  misc_RNA (1)...(19): siRNA sense strand
gagccaggccagcauccaa

SEQ ID NO: 767623 - RNA, 19 nt, Homo sapiens
  misc_RNA (1)...(19): siRNA sense strand
gguacuccaggaccaauug

SEQ ID NO: 767624 - RNA, 19 nt, Homo sapiens
  misc_RNA (1)...(19): siRNA sense strand
aaaggagacccugggauga

SEQ ID NO: 767625 - RNA, 19 nt, Homo sapiens
  misc_RNA (1)...(19): siRNA sense strand
gagccagggaucccaggaa

SEQ ID NO: 767626 - RNA, 19 nt, Homo sapiens
  misc_RNA (1)...(19): siRNA sense strand
gaaccagggaaaggagaga

SEQ ID NO: 767627 - RNA, 19 nt, Homo sapiens
  misc_RNA (1)...(19): siRNA sense strand
gauuacaauggaaacauca

SEQ ID NO: 767628 - RNA, 19 nt, Homo sapiens
  misc_RNA (1)...(19): siRNA sense strand
ggucaaccaggaacuagag

SEQ ID NO: 767629 - RNA, 19 nt, Homo sapiens
  misc_RNA (1)...(19): siRNA sense strand
aaggagagaugguggauua

SEQ ID NO: 767630 - RNA, 19 nt, Homo sapiens
  misc_RNA (1)...(19): siRNA sense strand
cagcugggcuuccugguuu

SEQ ID NO: 767631 - RNA, 19 nt, Homo sapiens
  misc_RNA (1)...(19): siRNA sense strand
ccaaagacaucuccaggau

SEQ ID NO: 767632 - RNA, 19 nt, Homo sapiens
  misc_RNA (1)...(19): siRNA sense strand
gagagaugguggauuacaa

SEQ ID NO: 767633 - RNA, 19 nt, Homo sapiens
  misc_RNA (1)...(19): siRNA sense strand
aaagggaccucgcgguaaa

SEQ ID NO: 767634 - RNA, 19 nt, Homo sapiens
  misc_RNA (1)...(19): siRNA sense strand
gaugguggauuacaaugga

SEQ ID NO: 767635 - RNA, 19 nt, Homo sapiens
  misc_RNA (1)...(19): siRNA sense strand
ggauuacaauggaaacauc

SEQ ID NO: 767636 - RNA, 19 nt, Homo sapiens
  misc_RNA (1)...(19): siRNA sense strand
caagggagaaccagggaaa

SEQ ID NO: 767637 - RNA, 19 nt, Homo sapiens
  misc_RNA (1)...(19): siRNA sense strand
ggaagcaggacuagaugga

SEQ ID NO: 767638 - RNA, 19 nt, Homo sapiens
  misc_RNA (1)...(19): siRNA sense strand
caaggcugcuggaacaagu

SEQ ID NO: 767639 - RNA, 19 nt, Homo sapiens
  misc_RNA (1)...(19): siRNA sense strand
gggagaagcaggugucgau

SEQ ID NO: 767640 - RNA, 19 nt, Homo sapiens
  misc_RNA (1)...(19): siRNA sense strand
ggagaacagggaccagaug

SEQ ID NO: 767641 - RNA, 19 nt, Homo sapiens
  misc_RNA (1)...(19): siRNA sense strand
acaauggaaacaucaauga

SEQ ID NO: 767642 - RNA, 19 nt, Homo sapiens
  misc_RNA (1)...(19): siRNA sense strand
gaaaggagagaugguggau

SEQ ID NO: 767643 - RNA, 19 nt, Homo sapiens
  misc_RNA (1)...(19): siRNA sense strand
cuagagguuucccuggauu

SEQ ID NO: 767644 - RNA, 19 nt, Homo sapiens
  misc_RNA (1)...(19): siRNA sense strand
gcaaauggagacggcuauu

SEQ ID NO: 767645 - RNA, 19 nt, Homo sapiens
  misc_RNA (1)...(19): siRNA sense strand
gaaaggcuuccagggagaa

SEQ ID NO: 767646 - RNA, 19 nt, Homo sapiens
  misc_RNA (1)...(19): siRNA sense strand
gcagcugggcuuccugguu

SEQ ID NO: 767647 - RNA, 19 nt, Homo sapiens
  misc_RNA (1)...(19): siRNA sense strand
ggagagaugguggauuaca

SEQ ID NO: 767648 - RNA, 19 nt, Homo sapiens
  misc_RNA (1)...(19): siRNA sense strand
gaugcuggcaacuccauug

SEQ ID NO: 767649 - RNA, 19 nt, Homo sapiens
  misc_RNA (1)...(19): siRNA sense strand
gcguggagcagcuggagaa

SEQ ID NO: 767650 - RNA, 19 nt, Homo sapiens
  misc_RNA (1)...(19): siRNA sense strand
uggagcagcuggagaacag

SEQ ID NO: 767651 - RNA, 19 nt, Homo sapiens
  misc_RNA (1)...(19): siRNA sense strand
ggauuuccgggucccauug

SEQ ID NO: 767652 - RNA, 19 nt, Homo sapiens
  misc_RNA (1)...(19): siRNA sense strand
gagaugguggauuacaaug

SEQ ID NO: 767653 - RNA, 19 nt, Homo sapiens
  misc_RNA (1)...(19): siRNA sense strand
uagcggagcgcacccacaa

SEQ ID NO: 767654 - RNA, 19 nt, Homo sapiens
  misc_RNA (1)...(19): siRNA sense strand
gggagaaccagggaaagga

SEQ ID NO: 767655 - RNA, 19 nt, Homo sapiens
  misc_RNA (1)...(19): siRNA sense strand
gagccaggccagcauccaa

SEQ ID NO: 767656 - RNA, 19 nt, Homo sapiens
  misc_RNA (1)...(19): siRNA sense strand
gguacuccaggaccaauug

SEQ ID NO: 767657 - RNA, 19 nt, Homo sapiens
  misc_RNA (1)...(19): siRNA sense strand
aaaggagacccugggauga

SEQ ID NO: 767658 - RNA, 19 nt, Homo sapiens
  misc_RNA (1)...(19): siRNA sense strand
gagccagggaucccaggaa

SEQ ID NO: 767659 - RNA, 19 nt, Homo sapiens
  misc_RNA (1)...(19): siRNA sense strand
gaaccagggaaaggagaga

SEQ ID NO: 767660 - RNA, 19 nt, Homo sapiens
  misc_RNA (1)...(19): siRNA sense strand
gauuacaauggaaacauca

SEQ ID NO: 767661 - RNA, 19 nt, Homo sapiens
  misc_RNA (1)...(19): siRNA sense strand
ggucaaccaggaacuagag

SEQ ID NO: 767662 - RNA, 19 nt, Homo sapiens
  misc_RNA (1)...(19): siRNA sense strand
aaggagagaugguggauua

SEQ ID NO: 767663 - RNA, 19 nt, Homo sapiens
  misc_RNA (1)...(19): siRNA sense strand
cagcugggcuuccugguuu

SEQ ID NO: 767664 - RNA, 19 nt, Homo sapiens
  misc_RNA (1)...(19): siRNA sense strand
ccaaagacaucuccaggau

SEQ ID NO: 767665 - RNA, 19 nt, Homo sapiens
  misc_RNA (1)...(19): siRNA sense strand
gagagaugguggauuacaa

SEQ ID NO: 767666 - RNA, 19 nt, Homo sapiens
  misc_RNA (1)...(19): siRNA sense strand
aaagggaccucgcgguaaa

SEQ ID NO: 767667 - RNA, 19 nt, Homo sapiens
  misc_RNA (1)...(19): siRNA sense strand
gaugguggauuacaaugga

SEQ ID NO: 767668 - RNA, 19 nt, Homo sapiens
  misc_RNA (1)...(19): siRNA sense strand
ggauuacaauggaaacauc

SEQ ID NO: 767669 - RNA, 19 nt, Homo sapiens
  misc_RNA (1)...(19): siRNA sense strand
caagggagaaccagggaaa

SEQ ID NO: 767670 - RNA, 19 nt, Homo sapiens
  misc_RNA (1)...(19): siRNA sense strand
ggaagcaggacuagaugga

SEQ ID NO: 767671 - RNA, 19 nt, Homo sapiens
  misc_RNA (1)...(19): siRNA sense strand
caaggcugcuggaacaagu

SEQ ID NO: 767672 - RNA, 19 nt, Homo sapiens
  misc_RNA (1)...(19): siRNA sense strand
gggagaagcaggugucgau

SEQ ID NO: 767673 - RNA, 19 nt, Homo sapiens
  misc_RNA (1)...(19): siRNA sense strand
ggagaacagggaccagaug

SEQ ID NO: 767674 - RNA, 19 nt, Homo sapiens
  misc_RNA (1)...(19): siRNA sense strand
acaauggaaacaucaauga

SEQ ID NO: 767675 - RNA, 19 nt, Homo sapiens
  misc_RNA (1)...(19): siRNA sense strand
gaaaggagagaugguggau

SEQ ID NO: 767676 - RNA, 19 nt, Homo sapiens
  misc_RNA (1)...(19): siRNA sense strand
cuagagguuucccuggauu

SEQ ID NO: 767677 - RNA, 19 nt, Homo sapiens
  misc_RNA (1)...(19): siRNA sense strand
gcaaauggagacggcuauu

SEQ ID NO: 767678 - RNA, 19 nt, Homo sapiens
  misc_RNA (1)...(19): siRNA sense strand
gaaaggcuuccagggagaa

SEQ ID NO: 767679 - RNA, 19 nt, Homo sapiens
  misc_RNA (1)...(19): siRNA sense strand
gcagcugggcuuccugguu

SEQ ID NO: 767680 - RNA, 19 nt, Homo sapiens
  misc_RNA (1)...(19): siRNA sense strand
ggagagaugguggauuaca

SEQ ID NO: 767681 - RNA, 19 nt, Homo sapiens
  misc_RNA (1)...(19): siRNA sense strand
gaugcuggcaacuccauug

SEQ ID NO: 767682 - RNA, 19 nt, Homo sapiens
  misc_RNA (1)...(19): siRNA sense strand
gcguggagcagcuggagaa

SEQ ID NO: 767683 - RNA, 19 nt, Homo sapiens
  misc_RNA (1)...(19): siRNA sense strand
uggagcagcuggagaacag

SEQ ID NO: 767684 - RNA, 19 nt, Homo sapiens
  misc_RNA (1)...(19): siRNA sense strand
ggauuuccgggucccauug

SEQ ID NO: 767685 - RNA, 19 nt, Homo sapiens
  misc_RNA (1)...(19): siRNA sense strand
gagaugguggauuacaaug

SEQ ID NO: 767686 - RNA, 19 nt, Homo sapiens
  misc_RNA (1)...(19): siRNA sense strand
uagcggagcgcacccacaa

SEQ ID NO: 767687 - RNA, 19 nt, Homo sapiens
  misc_RNA (1)...(19): siRNA sense strand
gggagaaccagggaaagga

SEQ ID NO: 767688 - RNA, 19 nt, Homo sapiens
  misc_RNA (1)...(19): siRNA sense strand
gagccaggccagcauccaa

SEQ ID NO: 767689 - RNA, 19 nt, Homo sapiens
  misc_RNA (1)...(19): siRNA sense strand
gguacuccaggaccaauug

SEQ ID NO: 767690 - RNA, 19 nt, Homo sapiens
  misc_RNA (1)...(19): siRNA sense strand
aaaggagacccugggauga

SEQ ID NO: 767691 - RNA, 19 nt, Homo sapiens
  misc_RNA (1)...(19): siRNA sense strand
gagccagggaucccaggaa

SEQ ID NO: 767692 - RNA, 19 nt, Homo sapiens
  misc_RNA (1)...(19): siRNA sense strand
gaaccagggaaaggagaga

SEQ ID NO: 767693 - RNA, 19 nt, Homo sapiens
  misc_RNA (1)...(19): siRNA sense strand
gauuacaauggaaacauca

SEQ ID NO: 767694 - RNA, 19 nt, Homo sapiens
  misc_RNA (1)...(19): siRNA sense strand
ggucaaccaggaacuagag

SEQ ID NO: 767695 - RNA, 19 nt, Homo sapiens
  misc_RNA (1)...(19): siRNA sense strand
aaggagagaugguggauua

SEQ ID NO: 767696 - RNA, 19 nt, Homo sapiens
  misc_RNA (1)...(19): siRNA sense strand
cagcugggcuuccugguuu

SEQ ID NO: 767697 - RNA, 19 nt, Homo sapiens
  misc_RNA (1)...(19): siRNA sense strand
ccaaagacaucuccaggau

SEQ ID NO: 767698 - RNA, 19 nt, Homo sapiens
  misc_RNA (1)...(19): siRNA sense strand
gagagaugguggauuacaa

SEQ ID NO: 767699 - RNA, 19 nt, Homo sapiens
  misc_RNA (1)...(19): siRNA sense strand
aaagggaccucgcgguaaa

SEQ ID NO: 767700 - RNA, 19 nt, Homo sapiens
  misc_RNA (1)...(19): siRNA sense strand
gaugguggauuacaaugga

SEQ ID NO: 767701 - RNA, 19 nt, Homo sapiens
  misc_RNA (1)...(19): siRNA sense strand
ggauuacaauggaaacauc

SEQ ID NO: 767702 - RNA, 19 nt, Homo sapiens
  misc_RNA (1)...(19): siRNA sense strand
caagggagaaccagggaaa

SEQ ID NO: 767703 - RNA, 19 nt, Homo sapiens
  misc_RNA (1)...(19): siRNA sense strand
ggaagcaggacuagaugga

SEQ ID NO: 767704 - RNA, 19 nt, Homo sapiens
  misc_RNA (1)...(19): siRNA sense strand
caaggcugcuggaacaagu

SEQ ID NO: 767705 - RNA, 19 nt, Homo sapiens
  misc_RNA (1)...(19): siRNA sense strand
gggagaagcaggugucgau

SEQ ID NO: 767706 - RNA, 19 nt, Homo sapiens
  misc_RNA (1)...(19): siRNA sense strand
ggagaacagggaccagaug

SEQ ID NO: 767707 - RNA, 19 nt, Homo sapiens
  misc_RNA (1)...(19): siRNA sense strand
acaauggaaacaucaauga

SEQ ID NO: 767708 - RNA, 19 nt, Homo sapiens
  misc_RNA (1)...(19): siRNA sense strand
gaaaggagagaugguggau

SEQ ID NO: 767709 - RNA, 19 nt, Homo sapiens
  misc_RNA (1)...(19): siRNA sense strand
cuagagguuucccuggauu

SEQ ID NO: 767710 - RNA, 19 nt, Homo sapiens
  misc_RNA (1)...(19): siRNA sense strand
gcaaauggagacggcuauu

SEQ ID NO: 767711 - RNA, 19 nt, Homo sapiens
  misc_RNA (1)...(19): siRNA sense strand
gaaaggcuuccagggagaa

SEQ ID NO: 767712 - RNA, 19 nt, Homo sapiens
  misc_RNA (1)...(19): siRNA sense strand
gcagcugggcuuccugguu

SEQ ID NO: 767713 - RNA, 19 nt, Homo sapiens
  misc_RNA (1)...(19): siRNA sense strand
ggagagaugguggauuaca

SEQ ID NO: 767714 - RNA, 19 nt, Homo sapiens
  misc_RNA (1)...(19): siRNA sense strand
gaugcuggcaacuccauug

SEQ ID NO: 767715 - RNA, 19 nt, Homo sapiens
  misc_RNA (1)...(19): siRNA sense strand
gcguggagcagcuggagaa

SEQ ID NO: 767716 - RNA, 19 nt, Homo sapiens
  misc_RNA (1)...(19): siRNA sense strand
uggagcagcuggagaacag

SEQ ID NO: 767717 - RNA, 19 nt, Homo sapiens
  misc_RNA (1)...(19): siRNA sense strand
ggauuuccgggucccauug

SEQ ID NO: 767718 - RNA, 19 nt, Homo sapiens
  misc_RNA (1)...(19): siRNA sense strand
gagaugguggauuacaaug

SEQ ID NO: 767719 - RNA, 19 nt, Homo sapiens
  misc_RNA (1)...(19): siRNA sense strand
uagcggagcgcacccacaa

SEQ ID NO: 767720 - RNA, 19 nt, Homo sapiens
  misc_RNA (1)...(19): siRNA sense strand
gggagaaccagggaaagga

SEQ ID NO: 767721 - RNA, 19 nt, Homo sapiens
  misc_RNA (1)...(19): siRNA sense strand
gagccaggccagcauccaa

SEQ ID NO: 767722 - RNA, 19 nt, Homo sapiens
  misc_RNA (1)...(19): siRNA sense strand
gguacuccaggaccaauug

SEQ ID NO: 767723 - RNA, 19 nt, Homo sapiens
  misc_RNA (1)...(19): siRNA sense strand
aaaggagacccugggauga

SEQ ID NO: 767724 - RNA, 19 nt, Homo sapiens
  misc_RNA (1)...(19): siRNA sense strand
gagccagggaucccaggaa

SEQ ID NO: 767725 - RNA, 19 nt, Homo sapiens
  misc_RNA (1)...(19): siRNA sense strand
gaaccagggaaaggagaga

SEQ ID NO: 767726 - RNA, 19 nt, Homo sapiens
  misc_RNA (1)...(19): siRNA sense strand
gauuacaauggaaacauca

SEQ ID NO: 767727 - RNA, 19 nt, Homo sapiens
  misc_RNA (1)...(19): siRNA sense strand
ggucaaccaggaacuagag

SEQ ID NO: 767728 - RNA, 19 nt, Homo sapiens
  misc_RNA (1)...(19): siRNA sense strand
aaggagagaugguggauua

SEQ ID NO: 767729 - RNA, 19 nt, Homo sapiens
  misc_RNA (1)...(19): siRNA sense strand
cagcugggcuuccugguuu

SEQ ID NO: 767730 - RNA, 19 nt, Homo sapiens
  misc_RNA (1)...(19): siRNA sense strand
ccaaagacaucuccaggau

SEQ ID NO: 767731 - RNA, 19 nt, Homo sapiens
  misc_RNA (1)...(19): siRNA sense strand
gagagaugguggauuacaa

SEQ ID NO: 767732 - RNA, 19 nt, Homo sapiens
  misc_RNA (1)...(19): siRNA sense strand
aaagggaccucgcgguaaa

SEQ ID NO: 767733 - RNA, 19 nt, Homo sapiens
  misc_RNA (1)...(19): siRNA sense strand
gaugguggauuacaaugga

SEQ ID NO: 767734 - RNA, 19 nt, Homo sapiens
  misc_RNA (1)...(19): siRNA sense strand
ggauuacaauggaaacauc

SEQ ID NO: 767735 - RNA, 19 nt, Homo sapiens
  misc_RNA (1)...(19): siRNA sense strand
caagggagaaccagggaaa

SEQ ID NO: 767736 - RNA, 19 nt, Homo sapiens
  misc_RNA (1)...(19): siRNA sense strand
ggaagcaggacuagaugga

SEQ ID NO: 767737 - RNA, 19 nt, Homo sapiens
  misc_RNA (1)...(19): siRNA sense strand
caaggcugcuggaacaagu

SEQ ID NO: 767738 - RNA, 19 nt, Homo sapiens
  misc_RNA (1)...(19): siRNA sense strand
gggagaagcaggugucgau

SEQ ID NO: 767739 - RNA, 19 nt, Homo sapiens
  misc_RNA (1)...(19): siRNA sense strand
ggagaacagggaccagaug

SEQ ID NO: 767740 - RNA, 19 nt, Homo sapiens
  misc_RNA (1)...(19): siRNA sense strand
acaauggaaacaucaauga

SEQ ID NO: 767741 - RNA, 19 nt, Homo sapiens
  misc_RNA (1)...(19): siRNA sense strand
gaaaggagagaugguggau

SEQ ID NO: 767742 - RNA, 19 nt, Homo sapiens
  misc_RNA (1)...(19): siRNA sense strand
cuagagguuucccuggauu

SEQ ID NO: 767743 - RNA, 19 nt, Homo sapiens
  misc_RNA (1)...(19): siRNA sense strand
gcaaauggagacggcuauu

SEQ ID NO: 767744 - RNA, 19 nt, Homo sapiens
  misc_RNA (1)...(19): siRNA sense strand
gaaaggcuuccagggagaa

SEQ ID NO: 767745 - RNA, 19 nt, Homo sapiens
  misc_RNA (1)...(19): siRNA sense strand
gcagcugggcuuccugguu

SEQ ID NO: 767746 - RNA, 19 nt, Homo sapiens
  misc_RNA (1)...(19): siRNA sense strand
ggagagaugguggauuaca

SEQ ID NO: 767747 - RNA, 19 nt, Homo sapiens
  misc_RNA (1)...(19): siRNA sense strand
gaugcuggcaacuccauug

SEQ ID NO: 767748 - RNA, 19 nt, Homo sapiens
  misc_RNA (1)...(19): siRNA sense strand
gcguggagcagcuggagaa

SEQ ID NO: 767749 - RNA, 19 nt, Homo sapiens
  misc_RNA (1)...(19): siRNA sense strand
uggagcagcuggagaacag

SEQ ID NO: 767750 - RNA, 19 nt, Homo sapiens
  misc_RNA (1)...(19): siRNA sense strand
ggauuuccgggucccauug

SEQ ID NO: 767751 - RNA, 19 nt, Homo sapiens
  misc_RNA (1)...(19): siRNA sense strand
gagaugguggauuacaaug

SEQ ID NO: 767752 - RNA, 19 nt, Homo sapiens
  misc_RNA (1)...(19): siRNA sense strand
uagcggagcgcacccacaa

SEQ ID NO: 767753 - RNA, 19 nt, Homo sapiens
  misc_RNA (1)...(19): siRNA sense strand
gggagaaccagggaaagga

SEQ ID NO: 767754 - RNA, 19 nt, Homo sapiens
  misc_RNA (1)...(19): siRNA sense strand
gagccaggccagcauccaa

SEQ ID NO: 767755 - RNA, 19 nt, Homo sapiens
  misc_RNA (1)...(19): siRNA sense strand
gguacuccaggaccaauug

SEQ ID NO: 767756 - RNA, 19 nt, Homo sapiens
  misc_RNA (1)...(19): siRNA sense strand
aaaggagacccugggauga

SEQ ID NO: 767757 - RNA, 19 nt, Homo sapiens
  misc_RNA (1)...(19): siRNA sense strand
gagccagggaucccaggaa

SEQ ID NO: 767758 - RNA, 19 nt, Homo sapiens
  misc_RNA (1)...(19): siRNA sense strand
gaaccagggaaaggagaga

SEQ ID NO: 767759 - RNA, 19 nt, Homo sapiens
  misc_RNA (1)...(19): siRNA sense strand
gauuacaauggaaacauca

SEQ ID NO: 767760 - RNA, 19 nt, Homo sapiens
  misc_RNA (1)...(19): siRNA sense strand
ggucaaccaggaacuagag

SEQ ID NO: 767761 - RNA, 19 nt, Homo sapiens
  misc_RNA (1)...(19): siRNA sense strand
aaggagagaugguggauua

SEQ ID NO: 767762 - RNA, 19 nt, Homo sapiens
  misc_RNA (1)...(19): siRNA sense strand
cagcugggcuuccugguuu

SEQ ID NO: 767763 - RNA, 19 nt, Homo sapiens
  misc_RNA (1)...(19): siRNA sense strand
ccaaagacaucuccaggau

SEQ ID NO: 767764 - RNA, 19 nt, Homo sapiens
  misc_RNA (1)...(19): siRNA sense strand
gagagaugguggauuacaa

SEQ ID NO: 767765 - RNA, 19 nt, Homo sapiens
  misc_RNA (1)...(19): siRNA sense strand
aaagggaccucgcgguaaa

SEQ ID NO: 767766 - RNA, 19 nt, Homo sapiens
  misc_RNA (1)...(19): siRNA sense strand
gaugguggauuacaaugga

SEQ ID NO: 767767 - RNA, 19 nt, Homo sapiens
  misc_RNA (1)...(19): siRNA sense strand
ggauuacaauggaaacauc

SEQ ID NO: 767768 - RNA, 19 nt, Homo sapiens
  misc_RNA (1)...(19): siRNA sense strand
caagggagaaccagggaaa

SEQ ID NO: 767769 - RNA, 19 nt, Homo sapiens
  misc_RNA (1)...(19): siRNA sense strand
ggaagcaggacuagaugga

SEQ ID NO: 767770 - RNA, 19 nt, Homo sapiens
  misc_RNA (1)...(19): siRNA sense strand
caaggcugcuggaacaagu

SEQ ID NO: 767771 - RNA, 19 nt, Homo sapiens
  misc_RNA (1)...(19): siRNA sense strand
gggagaagcaggugucgau

SEQ ID NO: 767772 - RNA, 19 nt, Homo sapiens
  misc_RNA (1)...(19): siRNA sense strand
ggagaacagggaccagaug

SEQ ID NO: 767773 - RNA, 19 nt, Homo sapiens
  misc_RNA (1)...(19): siRNA sense strand
acaauggaaacaucaauga

SEQ ID NO: 767774 - RNA, 19 nt, Homo sapiens
  misc_RNA (1)...(19): siRNA sense strand
gaaaggagagaugguggau

SEQ ID NO: 767775 - RNA, 19 nt, Homo sapiens
  misc_RNA (1)...(19): siRNA sense strand
cuagagguuucccuggauu

SEQ ID NO: 767776 - RNA, 19 nt, Homo sapiens
  misc_RNA (1)...(19): siRNA sense strand
gcaaauggagacggcuauu

SEQ ID NO: 767777 - RNA, 19 nt, Homo sapiens
  misc_RNA (1)...(19): siRNA sense strand
gaaaggcuuccagggagaa

SEQ ID NO: 767778 - RNA, 19 nt, Homo sapiens
  misc_RNA (1)...(19): siRNA sense strand
gcagcugggcuuccugguu

SEQ ID NO: 767779 - RNA, 19 nt, Homo sapiens
  misc_RNA (1)...(19): siRNA sense strand
ggagagaugguggauuaca

SEQ ID NO: 767780 - RNA, 19 nt, Homo sapiens
  misc_RNA (1)...(19): siRNA sense strand
gaugcuggcaacuccauug

SEQ ID NO: 767781 - RNA, 19 nt, Homo sapiens
  misc_RNA (1)...(19): siRNA sense strand
gcguggagcagcuggagaa

SEQ ID NO: 767782 - RNA, 19 nt, Homo sapiens
  misc_RNA (1)...(19): siRNA sense strand
uggagcagcuggagaacag

SEQ ID NO: 767783 - RNA, 19 nt, Homo sapiens
  misc_RNA (1)...(19): siRNA sense strand
ggauuuccgggucccauug

SEQ ID NO: 767784 - RNA, 19 nt, Homo sapiens
  misc_RNA (1)...(19): siRNA sense strand
gagaugguggauuacaaug

SEQ ID NO: 767785 - RNA, 19 nt, Homo sapiens
  misc_RNA (1)...(19): siRNA sense strand
uagcggagcgcacccacaa

SEQ ID NO: 767786 - RNA, 19 nt, Homo sapiens
  misc_RNA (1)...(19): siRNA sense strand
gggagaaccagggaaagga

SEQ ID NO: 767787 - RNA, 19 nt, Homo sapiens
  misc_RNA (1)...(19): siRNA sense strand
gagccaggccagcauccaa

SEQ ID NO: 767788 - RNA, 19 nt, Homo sapiens
  misc_RNA (1)...(19): siRNA sense strand
gguacuccaggaccaauug

SEQ ID NO: 767789 - RNA, 19 nt, Homo sapiens
  misc_RNA (1)...(19): siRNA sense strand
aaaggagacccugggauga

SEQ ID NO: 767790 - RNA, 19 nt, Homo sapiens
  misc_RNA (1)...(19): siRNA sense strand
gagccagggaucccaggaa

SEQ ID NO: 767791 - RNA, 19 nt, Homo sapiens
  misc_RNA (1)...(19): siRNA sense strand
gaaccagggaaaggagaga

SEQ ID NO: 767792 - RNA, 19 nt, Homo sapiens
  misc_RNA (1)...(19): siRNA sense strand
gauuacaauggaaacauca

SEQ ID NO: 767793 - RNA, 19 nt, Homo sapiens
  misc_RNA (1)...(19): siRNA sense strand
ggucaaccaggaacuagag

SEQ ID NO: 767794 - RNA, 19 nt, Homo sapiens
  misc_RNA (1)...(19): siRNA sense strand
aaggagagaugguggauua

SEQ ID NO: 767795 - RNA, 19 nt, Homo sapiens
  misc_RNA (1)...(19): siRNA sense strand
cagcugggcuuccugguuu

SEQ ID NO: 767796 - RNA, 19 nt, Homo sapiens
  misc_RNA (1)...(19): siRNA sense strand
ccaaagacaucuccaggau

SEQ ID NO: 767797 - RNA, 19 nt, Homo sapiens
  misc_RNA (1)...(19): siRNA sense strand
gagagaugguggauuacaa

SEQ ID NO: 767798 - RNA, 19 nt, Homo sapiens
  misc_RNA (1)...(19): siRNA sense strand
aaagggaccucgcgguaaa

SEQ ID NO: 767799 - RNA, 19 nt, Homo sapiens
  misc_RNA (1)...(19): siRNA sense strand
gaugguggauuacaaugga

SEQ ID NO: 767800 - RNA, 19 nt, Homo sapiens
  misc_RNA (1)...(19): siRNA sense strand
ggauuacaauggaaacauc

SEQ ID NO: 767801 - RNA, 19 nt, Homo sapiens
  misc_RNA (1)...(19): siRNA sense strand
caagggagaaccagggaaa

SEQ ID NO: 767802 - RNA, 19 nt, Homo sapiens
  misc_RNA (1)...(19): siRNA sense strand
ggaagcaggacuagaugga

SEQ ID NO: 767803 - RNA, 19 nt, Homo sapiens
  misc_RNA (1)...(19): siRNA sense strand
caaggcugcuggaacaagu

SEQ ID NO: 767804 - RNA, 19 nt, Homo sapiens
  misc_RNA (1)...(19): siRNA sense strand
gggagaagcaggugucgau

SEQ ID NO: 767805 - RNA, 19 nt, Homo sapiens
  misc_RNA (1)...(19): siRNA sense strand
ggagaacagggaccagaug

SEQ ID NO: 767806 - RNA, 19 nt, Homo sapiens
  misc_RNA (1)...(19): siRNA sense strand
acaauggaaacaucaauga

SEQ ID NO: 767807 - RNA, 19 nt, Homo sapiens
  misc_RNA (1)...(19): siRNA sense strand
gaaaggagagaugguggau

SEQ ID NO: 767808 - RNA, 19 nt, Homo sapiens
  misc_RNA (1)...(19): siRNA sense strand
cuagagguuucccuggauu

SEQ ID NO: 767809 - RNA, 19 nt, Homo sapiens
  misc_RNA (1)...(19): siRNA sense strand
gcaaauggagacggcuauu

SEQ ID NO: 767810 - RNA, 19 nt, Homo sapiens
  misc_RNA (1)...(19): siRNA sense strand
gaaaggcuuccagggagaa

SEQ ID NO: 767811 - RNA, 19 nt, Homo sapiens
  misc_RNA (1)...(19): siRNA sense strand
gcagcugggcuuccugguu

SEQ ID NO: 767812 - RNA, 19 nt, Homo sapiens
  misc_RNA (1)...(19): siRNA sense strand
ggagagaugguggauuaca

SEQ ID NO: 767813 - RNA, 19 nt, Homo sapiens
  misc_RNA (1)...(19): siRNA sense strand
gaugcuggcaacuccauug

SEQ ID NO: 767814 - RNA, 19 nt, Homo sapiens
  misc_RNA (1)...(19): siRNA sense strand
gcguggagcagcuggagaa

SEQ ID NO: 767815 - RNA, 19 nt, Homo sapiens
  misc_RNA (1)...(19): siRNA sense strand
uggagcagcuggagaacag

SEQ ID NO: 767816 - RNA, 19 nt, Homo sapiens
  misc_RNA (1)...(19): siRNA sense strand
ggauuuccgggucccauug

SEQ ID NO: 767817 - RNA, 19 nt, Homo sapiens
  misc_RNA (1)...(19): siRNA sense strand
gagaugguggauuacaaug

SEQ ID NO: 767818 - RNA, 19 nt, Homo sapiens
  misc_RNA (1)...(19): siRNA sense strand
uagcggagcgcacccacaa

SEQ ID NO: 767819 - RNA, 19 nt, Homo sapiens
  misc_RNA (1)...(19): siRNA sense strand
gggagaaccagggaaagga

SEQ ID NO: 767820 - RNA, 19 nt, Homo sapiens
  misc_RNA (1)...(19): siRNA sense strand
gagccaggccagcauccaa

SEQ ID NO: 767821 - RNA, 19 nt, Homo sapiens
  misc_RNA (1)...(19): siRNA sense strand
gguacuccaggaccaauug

SEQ ID NO: 767822 - RNA, 19 nt, Homo sapiens
  misc_RNA (1)...(19): siRNA sense strand
aaaggagacccugggauga

SEQ ID NO: 767823 - RNA, 19 nt, Homo sapiens
  misc_RNA (1)...(19): siRNA sense strand
gagccagggaucccaggaa

SEQ ID NO: 767824 - RNA, 19 nt, Homo sapiens
  misc_RNA (1)...(19): siRNA sense strand
gaaccagggaaaggagaga

SEQ ID NO: 767825 - RNA, 19 nt, Homo sapiens
  misc_RNA (1)...(19): siRNA sense strand
gauuacaauggaaacauca

SEQ ID NO: 767826 - RNA, 19 nt, Homo sapiens
  misc_RNA (1)...(19): siRNA sense strand
ggucaaccaggaacuagag

SEQ ID NO: 767827 - RNA, 19 nt, Homo sapiens
  misc_RNA (1)...(19): siRNA sense strand
aaggagagaugguggauua

SEQ ID NO: 767828 - RNA, 19 nt, Homo sapiens
  misc_RNA (1)...(19): siRNA sense strand
cagcugggcuuccugguuu

SEQ ID NO: 767829 - RNA, 19 nt, Homo sapiens
  misc_RNA (1)...(19): siRNA sense strand
ccaaagacaucuccaggau

SEQ ID NO: 767830 - RNA, 19 nt, Homo sapiens
  misc_RNA (1)...(19): siRNA sense strand
gagagaugguggauuacaa

SEQ ID NO: 767831 - RNA, 19 nt, Homo sapiens
  misc_RNA (1)...(19): siRNA sense strand
aaagggaccucgcgguaaa

SEQ ID NO: 767832 - RNA, 19 nt, Homo sapiens
  misc_RNA (1)...(19): siRNA sense strand
gaugguggauuacaaugga

SEQ ID NO: 767833 - RNA, 19 nt, Homo sapiens
  misc_RNA (1)...(19): siRNA sense strand
ggauuacaauggaaacauc

SEQ ID NO: 767834 - RNA, 19 nt, Homo sapiens
  misc_RNA (1)...(19): siRNA sense strand
caagggagaaccagggaaa

SEQ ID NO: 767835 - RNA, 19 nt, Homo sapiens
  misc_RNA (1)...(19): siRNA sense strand
ggaagcaggacuagaugga

SEQ ID NO: 767836 - RNA, 19 nt, Homo sapiens
  misc_RNA (1)...(19): siRNA sense strand
caaggcugcuggaacaagu

SEQ ID NO: 767837 - RNA, 19 nt, Homo sapiens
  misc_RNA (1)...(19): siRNA sense strand
gggagaagcaggugucgau

SEQ ID NO: 767838 - RNA, 19 nt, Homo sapiens
  misc_RNA (1)...(19): siRNA sense strand
ggagaacagggaccagaug

SEQ ID NO: 767839 - RNA, 19 nt, Homo sapiens
  misc_RNA (1)...(19): siRNA sense strand
acaauggaaacaucaauga

SEQ ID NO: 767840 - RNA, 19 nt, Homo sapiens
  misc_RNA (1)...(19): siRNA sense strand
gaaaggagagaugguggau

SEQ ID NO: 767841 - RNA, 19 nt, Homo sapiens
  misc_RNA (1)...(19): siRNA sense strand
cuagagguuucccuggauu

SEQ ID NO: 767842 - RNA, 19 nt, Homo sapiens
  misc_RNA (1)...(19): siRNA sense strand
gcaaauggagacggcuauu

SEQ ID NO: 767843 - RNA, 19 nt, Homo sapiens
  misc_RNA (1)...(19): siRNA sense strand
gaaaggcuuccagggagaa

SEQ ID NO: 767844 - RNA, 19 nt, Homo sapiens
  misc_RNA (1)...(19): siRNA sense strand
gcagcugggcuuccugguu

SEQ ID NO: 767845 - RNA, 19 nt, Homo sapiens
  misc_RNA (1)...(19): siRNA sense strand
ggagagaugguggauuaca

SEQ ID NO: 767846 - RNA, 19 nt, Homo sapiens
  misc_RNA (1)...(19): siRNA sense strand
gaugcuggcaacuccauug

SEQ ID NO: 767847 - RNA, 19 nt, Homo sapiens
  misc_RNA (1)...(19): siRNA sense strand
gcguggagcagcuggagaa

SEQ ID NO: 767848 - RNA, 19 nt, Homo sapiens
  misc_RNA (1)...(19): siRNA sense strand
uggagcagcuggagaacag

SEQ ID NO: 767849 - RNA, 19 nt, Homo sapiens
  misc_RNA (1)...(19): siRNA sense strand
ggauuuccgggucccauug

SEQ ID NO: 767850 - RNA, 19 nt, Homo sapiens
  misc_RNA (1)...(19): siRNA sense strand
gagaugguggauuacaaug

SEQ ID NO: 767851 - RNA, 19 nt, Homo sapiens
  misc_RNA (1)...(19): siRNA sense strand
uagcggagcgcacccacaa

SEQ ID NO: 767852 - RNA, 19 nt, Homo sapiens
  misc_RNA (1)...(19): siRNA sense strand
gggagaaccagggaaagga

SEQ ID NO: 767853 - RNA, 19 nt, Homo sapiens
  misc_RNA (1)...(19): siRNA sense strand
gagccaggccagcauccaa

SEQ ID NO: 767854 - RNA, 19 nt, Homo sapiens
  misc_RNA (1)...(19): siRNA sense strand
gguacuccaggaccaauug

SEQ ID NO: 767855 - RNA, 19 nt, Homo sapiens
  misc_RNA (1)...(19): siRNA sense strand
aaaggagacccugggauga

SEQ ID NO: 767856 - RNA, 19 nt, Homo sapiens
  misc_RNA (1)...(19): siRNA sense strand
gagccagggaucccaggaa

SEQ ID NO: 767857 - RNA, 19 nt, Homo sapiens
  misc_RNA (1)...(19): siRNA sense strand
gaaccagggaaaggagaga

SEQ ID NO: 767858 - RNA, 19 nt, Homo sapiens
  misc_RNA (1)...(19): siRNA sense strand
gauuacaauggaaacauca

SEQ ID NO: 767859 - RNA, 19 nt, Homo sapiens
  misc_RNA (1)...(19): siRNA sense strand
ggucaaccaggaacuagag

SEQ ID NO: 767860 - RNA, 19 nt, Homo sapiens
  misc_RNA (1)...(19): siRNA sense strand
aaggagagaugguggauua

SEQ ID NO: 767861 - RNA, 19 nt, Homo sapiens
  misc_RNA (1)...(19): siRNA sense strand
cagcugggcuuccugguuu

SEQ ID NO: 767862 - RNA, 19 nt, Homo sapiens
  misc_RNA (1)...(19): siRNA sense strand
ccaaagacaucuccaggau

SEQ ID NO: 767863 - RNA, 19 nt, Homo sapiens
  misc_RNA (1)...(19): siRNA sense strand
gagagaugguggauuacaa

SEQ ID NO: 767864 - RNA, 19 nt, Homo sapiens
  misc_RNA (1)...(19): siRNA sense strand
aaagggaccucgcgguaaa

SEQ ID NO: 767865 - RNA, 19 nt, Homo sapiens
  misc_RNA (1)...(19): siRNA sense strand
gaugguggauuacaaugga

SEQ ID NO: 767866 - RNA, 19 nt, Homo sapiens
  misc_RNA (1)...(19): siRNA sense strand
ggauuacaauggaaacauc

SEQ ID NO: 767867 - RNA, 19 nt, Homo sapiens
  misc_RNA (1)...(19): siRNA sense strand
caagggagaaccagggaaa

SEQ ID NO: 767868 - RNA, 19 nt, Homo sapiens
  misc_RNA (1)...(19): siRNA sense strand
ggaagcaggacuagaugga

SEQ ID NO: 767869 - RNA, 19 nt, Homo sapiens
  misc_RNA (1)...(19): siRNA sense strand
caaggcugcuggaacaagu

SEQ ID NO: 767870 - RNA, 19 nt, Homo sapiens
  misc_RNA (1)...(19): siRNA sense strand
gggagaagcaggugucgau

SEQ ID NO: 767871 - RNA, 19 nt, Homo sapiens
  misc_RNA (1)...(19): siRNA sense strand
ggagaacagggaccagaug

SEQ ID NO: 767872 - RNA, 19 nt, Homo sapiens
  misc_RNA (1)...(19): siRNA sense strand
acaauggaaacaucaauga

SEQ ID NO: 767873 - RNA, 19 nt, Homo sapiens
  misc_RNA (1)...(19): siRNA sense strand
gaaaggagagaugguggau

SEQ ID NO: 767874 - RNA, 19 nt, Homo sapiens
  misc_RNA (1)...(19): siRNA sense strand
cuagagguuucccuggauu

SEQ ID NO: 767875 - RNA, 19 nt, Homo sapiens
  misc_RNA (1)...(19): siRNA sense strand
gcaaauggagacggcuauu

SEQ ID NO: 767876 - RNA, 19 nt, Homo sapiens
  misc_RNA (1)...(19): siRNA sense strand
gaaaggcuuccagggagaa

SEQ ID NO: 767877 - RNA, 19 nt, Homo sapiens
  misc_RNA (1)...(19): siRNA sense strand
gcagcugggcuuccugguu

SEQ ID NO: 767878 - RNA, 19 nt, Homo sapiens
  misc_RNA (1)...(19): siRNA sense strand
ggagagaugguggauuaca

SEQ ID NO: 767879 - RNA, 19 nt, Homo sapiens
  misc_RNA (1)...(19): siRNA sense strand
gaugcuggcaacuccauug

SEQ ID NO: 767880 - RNA, 19 nt, Homo sapiens
  misc_RNA (1)...(19): siRNA sense strand
gcguggagcagcuggagaa

SEQ ID NO: 767881 - RNA, 19 nt, Homo sapiens
  misc_RNA (1)...(19): siRNA sense strand
uggagcagcuggagaacag

SEQ ID NO: 767882 - RNA, 19 nt, Homo sapiens
  misc_RNA (1)...(19): siRNA sense strand
ggauuuccgggucccauug

SEQ ID NO: 767883 - RNA, 19 nt, Homo sapiens
  misc_RNA (1)...(19): siRNA sense strand
gagaugguggauuacaaug

SEQ ID NO: 767884 - RNA, 19 nt, Homo sapiens
  misc_RNA (1)...(19): siRNA sense strand
uagcggagcgcacccacaa

SEQ ID NO: 767885 - RNA, 19 nt, Homo sapiens
  misc_RNA (1)...(19): siRNA sense strand
gggagaaccagggaaagga

SEQ ID NO: 767886 - RNA, 19 nt, Homo sapiens
  misc_RNA (1)...(19): siRNA sense strand
gagccaggccagcauccaa

SEQ ID NO: 767887 - RNA, 19 nt, Homo sapiens
  misc_RNA (1)...(19): siRNA sense strand
gguacuccaggaccaauug

SEQ ID NO: 767888 - RNA, 19 nt, Homo sapiens
  misc_RNA (1)...(19): siRNA sense strand
aaaggagacccugggauga

SEQ ID NO: 767889 - RNA, 19 nt, Homo sapiens
  misc_RNA (1)...(19): siRNA sense strand
gagccagggaucccaggaa

SEQ ID NO: 767890 - RNA, 19 nt, Homo sapiens
  misc_RNA (1)...(19): siRNA sense strand
gaaccagggaaaggagaga

SEQ ID NO: 767891 - RNA, 19 nt, Homo sapiens
  misc_RNA (1)...(19): siRNA sense strand
gauuacaauggaaacauca

SEQ ID NO: 767892 - RNA, 19 nt, Homo sapiens
  misc_RNA (1)...(19): siRNA sense strand
ggucaaccaggaacuagag

SEQ ID NO: 767893 - RNA, 19 nt, Homo sapiens
  misc_RNA (1)...(19): siRNA sense strand
aaggagagaugguggauua

SEQ ID NO: 767894 - RNA, 19 nt, Homo sapiens
  misc_RNA (1)...(19): siRNA sense strand
cagcugggcuuccugguuu

SEQ ID NO: 767895 - RNA, 19 nt, Homo sapiens
  misc_RNA (1)...(19): siRNA sense strand
ccaaagacaucuccaggau

SEQ ID NO: 767896 - RNA, 19 nt, Homo sapiens
  misc_RNA (1)...(19): siRNA sense strand
gagagaugguggauuacaa

SEQ ID NO: 767897 - RNA, 19 nt, Homo sapiens
  misc_RNA (1)...(19): siRNA sense strand
aaagggaccucgcgguaaa

SEQ ID NO: 767898 - RNA, 19 nt, Homo sapiens
  misc_RNA (1)...(19): siRNA sense strand
gaugguggauuacaaugga

SEQ ID NO: 767899 - RNA, 19 nt, Homo sapiens
  misc_RNA (1)...(19): siRNA sense strand
ggauuacaauggaaacauc

SEQ ID NO: 767900 - RNA, 19 nt, Homo sapiens
  misc_RNA (1)...(19): siRNA sense strand
caagggagaaccagggaaa

SEQ ID NO: 767901 - RNA, 19 nt, Homo sapiens
  misc_RNA (1)...(19): siRNA sense strand
ggaagcaggacuagaugga

SEQ ID NO: 767902 - RNA, 19 nt, Homo sapiens
  misc_RNA (1)...(19): siRNA sense strand
caaggcugcuggaacaagu

SEQ ID NO: 767903 - RNA, 19 nt, Homo sapiens
  misc_RNA (1)...(19): siRNA sense strand
gggagaagcaggugucgau

SEQ ID NO: 767904 - RNA, 19 nt, Homo sapiens
  misc_RNA (1)...(19): siRNA sense strand
ggagaacagggaccagaug

SEQ ID NO: 767905 - RNA, 19 nt, Homo sapiens
  misc_RNA (1)...(19): siRNA sense strand
acaauggaaacaucaauga

SEQ ID NO: 767906 - RNA, 19 nt, Homo sapiens
  misc_RNA (1)...(19): siRNA sense strand
gaaaggagagaugguggau

SEQ ID NO: 767907 - RNA, 19 nt, Homo sapiens
  misc_RNA (1)...(19): siRNA sense strand
cuagagguuucccuggauu

SEQ ID NO: 767908 - RNA, 19 nt, Homo sapiens
  misc_RNA (1)...(19): siRNA sense strand
gcaaauggagacggcuauu

SEQ ID NO: 767909 - RNA, 19 nt, Homo sapiens
  misc_RNA (1)...(19): siRNA sense strand
gaaaggcuuccagggagaa

SEQ ID NO: 767910 - RNA, 19 nt, Homo sapiens
  misc_RNA (1)...(19): siRNA sense strand
gcagcugggcuuccugguu

SEQ ID NO: 767911 - RNA, 19 nt, Homo sapiens
  misc_RNA (1)...(19): siRNA sense strand
ggagagaugguggauuaca

SEQ ID NO: 767912 - RNA, 19 nt, Homo sapiens
  misc_RNA (1)...(19): siRNA sense strand
gaugcuggcaacuccauug

SEQ ID NO: 767913 - RNA, 19 nt, Homo sapiens
  misc_RNA (1)...(19): siRNA sense strand
gcguggagcagcuggagaa

SEQ ID NO: 767914 - RNA, 19 nt, Homo sapiens
  misc_RNA (1)...(19): siRNA sense strand
uggagcagcuggagaacag

SEQ ID NO: 767915 - RNA, 19 nt, Homo sapiens
  misc_RNA (1)...(19): siRNA sense strand
ggauuuccgggucccauug

SEQ ID NO: 767916 - RNA, 19 nt, Homo sapiens
  misc_RNA (1)...(19): siRNA sense strand
gagaugguggauuacaaug

SEQ ID NO: 767917 - RNA, 19 nt, Homo sapiens
  misc_RNA (1)...(19): siRNA sense strand
uagcggagcgcacccacaa

SEQ ID NO: 767918 - RNA, 19 nt, Homo sapiens
  misc_RNA (1)...(19): siRNA sense strand
gggagaaccagggaaagga

SEQ ID NO: 767919 - RNA, 19 nt, Homo sapiens
  misc_RNA (1)...(19): siRNA sense strand
gagccaggccagcauccaa

SEQ ID NO: 767920 - RNA, 19 nt, Homo sapiens
  misc_RNA (1)...(19): siRNA sense strand
gguacuccaggaccaauug

SEQ ID NO: 767921 - RNA, 19 nt, Homo sapiens
  misc_RNA (1)...(19): siRNA sense strand
aaaggagacccugggauga

SEQ ID NO: 767922 - RNA, 19 nt, Homo sapiens
  misc_RNA (1)...(19): siRNA sense strand
gagccagggaucccaggaa

SEQ ID NO: 767923 - RNA, 19 nt, Homo sapiens
  misc_RNA (1)...(19): siRNA sense strand
gaaccagggaaaggagaga

SEQ ID NO: 767924 - RNA, 19 nt, Homo sapiens
  misc_RNA (1)...(19): siRNA sense strand
gauuacaauggaaacauca

SEQ ID NO: 767925 - RNA, 19 nt, Homo sapiens
  misc_RNA (1)...(19): siRNA sense strand
ggucaaccaggaacuagag

SEQ ID NO: 767926 - RNA, 19 nt, Homo sapiens
  misc_RNA (1)...(19): siRNA sense strand
aaggagagaugguggauua

SEQ ID NO: 767927 - RNA, 19 nt, Homo sapiens
  misc_RNA (1)...(19): siRNA sense strand
cagcugggcuuccugguuu

SEQ ID NO: 767928 - RNA, 19 nt, Homo sapiens
  misc_RNA (1)...(19): siRNA sense strand
ccaaagacaucuccaggau

SEQ ID NO: 767929 - RNA, 19 nt, Homo sapiens
  misc_RNA (1)...(19): siRNA sense strand
gagagaugguggauuacaa

SEQ ID NO: 767930 - RNA, 19 nt, Homo sapiens
  misc_RNA (1)...(19): siRNA sense strand
aaagggaccucgcgguaaa

SEQ ID NO: 767931 - RNA, 19 nt, Homo sapiens
  misc_RNA (1)...(19): siRNA sense strand
gaugguggauuacaaugga

SEQ ID NO: 767932 - RNA, 19 nt, Homo sapiens
  misc_RNA (1)...(19): siRNA sense strand
ggauuacaauggaaacauc

SEQ ID NO: 767933 - RNA, 19 nt, Homo sapiens
  misc_RNA (1)...(19): siRNA sense strand
caagggagaaccagggaaa

SEQ ID NO: 767934 - RNA, 19 nt, Homo sapiens
  misc_RNA (1)...(19): siRNA sense strand
ggaagcaggacuagaugga

SEQ ID NO: 767935 - RNA, 19 nt, Homo sapiens
  misc_RNA (1)...(19): siRNA sense strand
caaggcugcuggaacaagu

SEQ ID NO: 767936 - RNA, 19 nt, Homo sapiens
  misc_RNA (1)...(19): siRNA sense strand
gggagaagcaggugucgau

SEQ ID NO: 767937 - RNA, 19 nt, Homo sapiens
  misc_RNA (1)...(19): siRNA sense strand
ggagaacagggaccagaug

SEQ ID NO: 767938 - RNA, 19 nt, Homo sapiens
  misc_RNA (1)...(19): siRNA sense strand
acaauggaaacaucaauga

SEQ ID NO: 767939 - RNA, 19 nt, Homo sapiens
  misc_RNA (1)...(19): siRNA sense strand
gaaaggagagaugguggau

SEQ ID NO: 767940 - RNA, 19 nt, Homo sapiens
  misc_RNA (1)...(19): siRNA sense strand
cuagagguuucccuggauu

SEQ ID NO: 767941 - RNA, 19 nt, Homo sapiens
  misc_RNA (1)...(19): siRNA sense strand
gcaaauggagacggcuauu

SEQ ID NO: 767942 - RNA, 19 nt, Homo sapiens
  misc_RNA (1)...(19): siRNA sense strand
gaaaggcuuccagggagaa

SEQ ID NO: 767943 - RNA, 19 nt, Homo sapiens
  misc_RNA (1)...(19): siRNA sense strand
gcagcugggcuuccugguu

SEQ ID NO: 767944 - RNA, 19 nt, Homo sapiens
  misc_RNA (1)...(19): siRNA sense strand
ggagagaugguggauuaca

SEQ ID NO: 767945 - RNA, 19 nt, Homo sapiens
  misc_RNA (1)...(19): siRNA sense strand
gaugcuggcaacuccauug

SEQ ID NO: 767946 - RNA, 19 nt, Homo sapiens
  misc_RNA (1)...(19): siRNA sense strand
gcguggagcagcuggagaa

SEQ ID NO: 767947 - RNA, 19 nt, Homo sapiens
  misc_RNA (1)...(19): siRNA sense strand
uggagcagcuggagaacag

SEQ ID NO: 767948 - RNA, 19 nt, Homo sapiens
  misc_RNA (1)...(19): siRNA sense strand
ggauuuccgggucccauug

SEQ ID NO: 767949 - RNA, 19 nt, Homo sapiens
  misc_RNA (1)...(19): siRNA sense strand
gagaugguggauuacaaug

SEQ ID NO: 767950 - RNA, 19 nt, Homo sapiens
  misc_RNA (1)...(19): siRNA sense strand
uagcggagcgcacccacaa

SEQ ID NO: 767951 - RNA, 19 nt, Homo sapiens
  misc_RNA (1)...(19): siRNA sense strand
gggagaaccagggaaagga

SEQ ID NO: 767952 - RNA, 19 nt, Homo sapiens
  misc_RNA (1)...(19): siRNA sense strand
gagccaggccagcauccaa

SEQ ID NO: 767953 - RNA, 19 nt, Homo sapiens
  misc_RNA (1)...(19): siRNA sense strand
gguacuccaggaccaauug

SEQ ID NO: 767954 - RNA, 19 nt, Homo sapiens
  misc_RNA (1)...(19): siRNA sense strand
aaaggagacccugggauga

SEQ ID NO: 767955 - RNA, 19 nt, Homo sapiens
  misc_RNA (1)...(19): siRNA sense strand
gagccagggaucccaggaa

SEQ ID NO: 767956 - RNA, 19 nt, Homo sapiens
  misc_RNA (1)...(19): siRNA sense strand
gaaccagggaaaggagaga

SEQ ID NO: 767957 - RNA, 19 nt, Homo sapiens
  misc_RNA (1)...(19): siRNA sense strand
gauuacaauggaaacauca

SEQ ID NO: 767958 - RNA, 19 nt, Homo sapiens
  misc_RNA (1)...(19): siRNA sense strand
ggucaaccaggaacuagag

SEQ ID NO: 767959 - RNA, 19 nt, Homo sapiens
  misc_RNA (1)...(19): siRNA sense strand
aaggagagaugguggauua

SEQ ID NO: 767960 - RNA, 19 nt, Homo sapiens
  misc_RNA (1)...(19): siRNA sense strand
cagcugggcuuccugguuu

SEQ ID NO: 767961 - RNA, 19 nt, Homo sapiens
  misc_RNA (1)...(19): siRNA sense strand
ccaaagacaucuccaggau

SEQ ID NO: 767962 - RNA, 19 nt, Homo sapiens
  misc_RNA (1)...(19): siRNA sense strand
gagagaugguggauuacaa

SEQ ID NO: 767963 - RNA, 19 nt, Homo sapiens
  misc_RNA (1)...(19): siRNA sense strand
aaagggaccucgcgguaaa

SEQ ID NO: 767964 - RNA, 19 nt, Homo sapiens
  misc_RNA (1)...(19): siRNA sense strand
gaugguggauuacaaugga

SEQ ID NO: 767965 - RNA, 19 nt, Homo sapiens
  misc_RNA (1)...(19): siRNA sense strand
ggauuacaauggaaacauc

SEQ ID NO: 767966 - RNA, 19 nt, Homo sapiens
  misc_RNA (1)...(19): siRNA sense strand
caagggagaaccagggaaa

SEQ ID NO: 767967 - RNA, 19 nt, Homo sapiens
  misc_RNA (1)...(19): siRNA sense strand
ggaagcaggacuagaugga

SEQ ID NO: 767968 - RNA, 19 nt, Homo sapiens
  misc_RNA (1)...(19): siRNA sense strand
caaggcugcuggaacaagu

SEQ ID NO: 767969 - RNA, 19 nt, Homo sapiens
  misc_RNA (1)...(19): siRNA sense strand
gggagaagcaggugucgau

SEQ ID NO: 767970 - RNA, 19 nt, Homo sapiens
  misc_RNA (1)...(19): siRNA sense strand
ggagaacagggaccagaug

SEQ ID NO: 767971 - RNA, 19 nt, Homo sapiens
  misc_RNA (1)...(19): siRNA sense strand
acaauggaaacaucaauga

SEQ ID NO: 767972 - RNA, 19 nt, Homo sapiens
  misc_RNA (1)...(19): siRNA sense strand
gaaaggagagaugguggau

SEQ ID NO: 767973 - RNA, 19 nt, Homo sapiens
  misc_RNA (1)...(19): siRNA sense strand
cuagagguuucccuggauu

SEQ ID NO: 767974 - RNA, 19 nt, Homo sapiens
  misc_RNA (1)...(19): siRNA sense strand
gcaaauggagacggcuauu

SEQ ID NO: 767975 - RNA, 19 nt, Homo sapiens
  misc_RNA (1)...(19): siRNA sense strand
gaaaggcuuccagggagaa

SEQ ID NO: 767976 - RNA, 19 nt, Homo sapiens
  misc_RNA (1)...(19): siRNA sense strand
gcagcugggcuuccugguu

SEQ ID NO: 767977 - RNA, 19 nt, Homo sapiens
  misc_RNA (1)...(19): siRNA sense strand
ggagagaugguggauuaca

SEQ ID NO: 767978 - RNA, 19 nt, Homo sapiens
  misc_RNA (1)...(19): siRNA sense strand
gaugcuggcaacuccauug

SEQ ID NO: 767979 - RNA, 19 nt, Homo sapiens
  misc_RNA (1)...(19): siRNA sense strand
gcguggagcagcuggagaa

SEQ ID NO: 767980 - RNA, 19 nt, Homo sapiens
  misc_RNA (1)...(19): siRNA sense strand
uggagcagcuggagaacag

SEQ ID NO: 767981 - RNA, 19 nt, Homo sapiens
  misc_RNA (1)...(19): siRNA sense strand
ggauuuccgggucccauug

SEQ ID NO: 767982 - RNA, 19 nt, Homo sapiens
  misc_RNA (1)...(19): siRNA sense strand
gagaugguggauuacaaug

SEQ ID NO: 767983 - RNA, 19 nt, Homo sapiens
  misc_RNA (1)...(19): siRNA sense strand
uagcggagcgcacccacaa

SEQ ID NO: 767984 - RNA, 19 nt, Homo sapiens
  misc_RNA (1)...(19): siRNA sense strand
gggagaaccagggaaagga

SEQ ID NO: 767985 - RNA, 19 nt, Homo sapiens
  misc_RNA (1)...(19): siRNA sense strand
gagccaggccagcauccaa

SEQ ID NO: 767986 - RNA, 19 nt, Homo sapiens
  misc_RNA (1)...(19): siRNA sense strand
gguacuccaggaccaauug

SEQ ID NO: 767987 - RNA, 19 nt, Homo sapiens
  misc_RNA (1)...(19): siRNA sense strand
aaaggagacccugggauga

SEQ ID NO: 767988 - RNA, 19 nt, Homo sapiens
  misc_RNA (1)...(19): siRNA sense strand
gagccagggaucccaggaa

SEQ ID NO: 767989 - RNA, 19 nt, Homo sapiens
  misc_RNA (1)...(19): siRNA sense strand
gaaccagggaaaggagaga

SEQ ID NO: 767990 - RNA, 19 nt, Homo sapiens
  misc_RNA (1)...(19): siRNA sense strand
gauuacaauggaaacauca

SEQ ID NO: 767991 - RNA, 19 nt, Homo sapiens
  misc_RNA (1)...(19): siRNA sense strand
ggucaaccaggaacuagag

SEQ ID NO: 767992 - RNA, 19 nt, Homo sapiens
  misc_RNA (1)...(19): siRNA sense strand
aaggagagaugguggauua

SEQ ID NO: 767993 - RNA, 19 nt, Homo sapiens
  misc_RNA (1)...(19): siRNA sense strand
cagcugggcuuccugguuu

SEQ ID NO: 767994 - RNA, 19 nt, Homo sapiens
  misc_RNA (1)...(19): siRNA sense strand
ccaaagacaucuccaggau

SEQ ID NO: 767995 - RNA, 19 nt, Homo sapiens
  misc_RNA (1)...(19): siRNA sense strand
gagagaugguggauuacaa

SEQ ID NO: 767996 - RNA, 19 nt, Homo sapiens
  misc_RNA (1)...(19): siRNA sense strand
aaagggaccucgcgguaaa

SEQ ID NO: 767997 - RNA, 19 nt, Homo sapiens
  misc_RNA (1)...(19): siRNA sense strand
gaugguggauuacaaugga

SEQ ID NO: 767998 - RNA, 19 nt, Homo sapiens
  misc_RNA (1)...(19): siRNA sense strand
ggauuacaauggaaacauc

SEQ ID NO: 767999 - RNA, 19 nt, Homo sapiens
  misc_RNA (1)...(19): siRNA sense strand
caagggagaaccagggaaa

SEQ ID NO: 768000 - RNA, 19 nt, Homo sapiens
  misc_RNA (1)...(19): siRNA sense strand
ggaagcaggacuagaugga

SEQ ID NO: 768001 - RNA, 19 nt, Homo sapiens
  misc_RNA (1)...(19): siRNA sense strand
caaggcugcuggaacaagu

SEQ ID NO: 768002 - RNA, 19 nt, Homo sapiens
  misc_RNA (1)...(19): siRNA sense strand
gggagaagcaggugucgau

SEQ ID NO: 768003 - RNA, 19 nt, Homo sapiens
  misc_RNA (1)...(19): siRNA sense strand
ggagaacagggaccagaug

SEQ ID NO: 768004 - RNA, 19 nt, Homo sapiens
  misc_RNA (1)...(19): siRNA sense strand
acaauggaaacaucaauga

SEQ ID NO: 768005 - RNA, 19 nt, Homo sapiens
  misc_RNA (1)...(19): siRNA sense strand
gaaaggagagaugguggau

SEQ ID NO: 768006 - RNA, 19 nt, Homo sapiens
  misc_RNA (1)...(19): siRNA sense strand
cuagagguuucccuggauu

SEQ ID NO: 768007 - RNA, 19 nt, Homo sapiens
  misc_RNA (1)...(19): siRNA sense strand
gcaaauggagacggcuauu

SEQ ID NO: 768008 - RNA, 19 nt, Homo sapiens
  misc_RNA (1)...(19): siRNA sense strand
gaaaggcuuccagggagaa

SEQ ID NO: 768009 - RNA, 19 nt, Homo sapiens
  misc_RNA (1)...(19): siRNA sense strand
gcagcugggcuuccugguu

SEQ ID NO: 768010 - RNA, 19 nt, Homo sapiens
  misc_RNA (1)...(19): siRNA sense strand
ggagagaugguggauuaca

SEQ ID NO: 768011 - RNA, 19 nt, Homo sapiens
  misc_RNA (1)...(19): siRNA sense strand
gaugcuggcaacuccauug

SEQ ID NO: 768012 - RNA, 19 nt, Homo sapiens
  misc_RNA (1)...(19): siRNA sense strand
gcguggagcagcuggagaa

SEQ ID NO: 768013 - RNA, 19 nt, Homo sapiens
  misc_RNA (1)...(19): siRNA sense strand
uggagcagcuggagaacag

SEQ ID NO: 768014 - RNA, 19 nt, Homo sapiens
  misc_RNA (1)...(19): siRNA sense strand
ggauuuccgggucccauug

SEQ ID NO: 768015 - RNA, 19 nt, Homo sapiens
  misc_RNA (1)...(19): siRNA sense strand
gagaugguggauuacaaug

SEQ ID NO: 768016 - RNA, 19 nt, Homo sapiens
  misc_RNA (1)...(19): siRNA sense strand
uagcggagcgcacccacaa

SEQ ID NO: 768017 - RNA, 19 nt, Homo sapiens
  misc_RNA (1)...(19): siRNA sense strand
gggagaaccagggaaagga

SEQ ID NO: 768018 - RNA, 19 nt, Homo sapiens
  misc_RNA (1)...(19): siRNA sense strand
gagccaggccagcauccaa

SEQ ID NO: 768019 - RNA, 19 nt, Homo sapiens
  misc_RNA (1)...(19): siRNA sense strand
gguacuccaggaccaauug

SEQ ID NO: 768020 - RNA, 19 nt, Homo sapiens
  misc_RNA (1)...(19): siRNA sense strand
aaaggagacccugggauga

SEQ ID NO: 768021 - RNA, 19 nt, Homo sapiens
  misc_RNA (1)...(19): siRNA sense strand
gagccagggaucccaggaa

SEQ ID NO: 768022 - RNA, 19 nt, Homo sapiens
  misc_RNA (1)...(19): siRNA sense strand
gaaccagggaaaggagaga

SEQ ID NO: 768023 - RNA, 19 nt, Homo sapiens
  misc_RNA (1)...(19): siRNA sense strand
gauuacaauggaaacauca

SEQ ID NO: 768024 - RNA, 19 nt, Homo sapiens
  misc_RNA (1)...(19): siRNA sense strand
ggucaaccaggaacuagag

SEQ ID NO: 768025 - RNA, 19 nt, Homo sapiens
  misc_RNA (1)...(19): siRNA sense strand
aaggagagaugguggauua

SEQ ID NO: 768026 - RNA, 19 nt, Homo sapiens
  misc_RNA (1)...(19): siRNA sense strand
cagcugggcuuccugguuu

SEQ ID NO: 768027 - RNA, 19 nt, Homo sapiens
  misc_RNA (1)...(19): siRNA sense strand
ccaaagacaucuccaggau

SEQ ID NO: 768028 - RNA, 19 nt, Homo sapiens
  misc_RNA (1)...(19): siRNA sense strand
gagagaugguggauuacaa

SEQ ID NO: 768029 - RNA, 19 nt, Homo sapiens
  misc_RNA (1)...(19): siRNA sense strand
aaagggaccucgcgguaaa

SEQ ID NO: 768030 - RNA, 19 nt, Homo sapiens
  misc_RNA (1)...(19): siRNA sense strand
gaugguggauuacaaugga

SEQ ID NO: 768031 - RNA, 19 nt, Homo sapiens
  misc_RNA (1)...(19): siRNA sense strand
ggauuacaauggaaacauc

SEQ ID NO: 768032 - RNA, 19 nt, Homo sapiens
  misc_RNA (1)...(19): siRNA sense strand
caagggagaaccagggaaa

SEQ ID NO: 768033 - RNA, 19 nt, Homo sapiens
  misc_RNA (1)...(19): siRNA sense strand
ggaagcaggacuagaugga

SEQ ID NO: 768034 - RNA, 19 nt, Homo sapiens
  misc_RNA (1)...(19): siRNA sense strand
caaggcugcuggaacaagu

SEQ ID NO: 768035 - RNA, 19 nt, Homo sapiens
  misc_RNA (1)...(19): siRNA sense strand
gggagaagcaggugucgau

SEQ ID NO: 768036 - RNA, 19 nt, Homo sapiens
  misc_RNA (1)...(19): siRNA sense strand
ggagaacagggaccagaug

SEQ ID NO: 768037 - RNA, 19 nt, Homo sapiens
  misc_RNA (1)...(19): siRNA sense strand
acaauggaaacaucaauga

SEQ ID NO: 768038 - RNA, 19 nt, Homo sapiens
  misc_RNA (1)...(19): siRNA sense strand
gaaaggagagaugguggau

SEQ ID NO: 768039 - RNA, 19 nt, Homo sapiens
  misc_RNA (1)...(19): siRNA sense strand
cuagagguuucccuggauu

SEQ ID NO: 768040 - RNA, 19 nt, Homo sapiens
  misc_RNA (1)...(19): siRNA sense strand
gcaaauggagacggcuauu

SEQ ID NO: 768041 - RNA, 19 nt, Homo sapiens
  misc_RNA (1)...(19): siRNA sense strand
gaaaggcuuccagggagaa

SEQ ID NO: 768042 - RNA, 19 nt, Homo sapiens
  misc_RNA (1)...(19): siRNA sense strand
gcagcugggcuuccugguu

SEQ ID NO: 768043 - RNA, 19 nt, Homo sapiens
  misc_RNA (1)...(19): siRNA sense strand
ggagagaugguggauuaca

SEQ ID NO: 768044 - RNA, 19 nt, Homo sapiens
  misc_RNA (1)...(19): siRNA sense strand
gaugcuggcaacuccauug

SEQ ID NO: 768045 - RNA, 19 nt, Homo sapiens
  misc_RNA (1)...(19): siRNA sense strand
gcguggagcagcuggagaa

SEQ ID NO: 768046 - RNA, 19 nt, Homo sapiens
  misc_RNA (1)...(19): siRNA sense strand
uggagcagcuggagaacag

SEQ ID NO: 768047 - RNA, 19 nt, Homo sapiens
  misc_RNA (1)...(19): siRNA sense strand
ggauuuccgggucccauug

SEQ ID NO: 768048 - RNA, 19 nt, Homo sapiens
  misc_RNA (1)...(19): siRNA sense strand
gagaugguggauuacaaug

SEQ ID NO: 768049 - RNA, 19 nt, Homo sapiens
  misc_RNA (1)...(19): siRNA sense strand
uagcggagcgcacccacaa

SEQ ID NO: 768050 - RNA, 19 nt, Homo sapiens
  misc_RNA (1)...(19): siRNA sense strand
gggagaaccagggaaagga

SEQ ID NO: 768051 - RNA, 19 nt, Homo sapiens
  misc_RNA (1)...(19): siRNA sense strand
gagccaggccagcauccaa

SEQ ID NO: 768052 - RNA, 19 nt, Homo sapiens
  misc_RNA (1)...(19): siRNA sense strand
gguacuccaggaccaauug

SEQ ID NO: 768053 - RNA, 19 nt, Homo sapiens
  misc_RNA (1)...(19): siRNA sense strand
aaaggagacccugggauga

SEQ ID NO: 768054 - RNA, 19 nt, Homo sapiens
  misc_RNA (1)...(19): siRNA sense strand
gagccagggaucccaggaa

SEQ ID NO: 768055 - RNA, 19 nt, Homo sapiens
  misc_RNA (1)...(19): siRNA sense strand
gaaccagggaaaggagaga

SEQ ID NO: 768056 - RNA, 19 nt, Homo sapiens
  misc_RNA (1)...(19): siRNA sense strand
gauuacaauggaaacauca

SEQ ID NO: 768057 - RNA, 19 nt, Homo sapiens
  misc_RNA (1)...(19): siRNA sense strand
ggucaaccaggaacuagag

SEQ ID NO: 768058 - RNA, 19 nt, Homo sapiens
  misc_RNA (1)...(19): siRNA sense strand
aaggagagaugguggauua

SEQ ID NO: 768059 - RNA, 19 nt, Homo sapiens
  misc_RNA (1)...(19): siRNA sense strand
cagcugggcuuccugguuu

SEQ ID NO: 768060 - RNA, 19 nt, Homo sapiens
  misc_RNA (1)...(19): siRNA sense strand
ccaaagacaucuccaggau

SEQ ID NO: 768061 - RNA, 19 nt, Homo sapiens
  misc_RNA (1)...(19): siRNA sense strand
gagagaugguggauuacaa

SEQ ID NO: 768062 - RNA, 19 nt, Homo sapiens
  misc_RNA (1)...(19): siRNA sense strand
aaagggaccucgcgguaaa

SEQ ID NO: 768063 - RNA, 19 nt, Homo sapiens
  misc_RNA (1)...(19): siRNA sense strand
gaugguggauuacaaugga

SEQ ID NO: 768064 - RNA, 19 nt, Homo sapiens
  misc_RNA (1)...(19): siRNA sense strand
ggauuacaauggaaacauc

SEQ ID NO: 768065 - RNA, 19 nt, Homo sapiens
  misc_RNA (1)...(19): siRNA sense strand
gggcgaagauggcuuacca

SEQ ID NO: 768066 - RNA, 19 nt, Homo sapiens
  misc_RNA (1)...(19): siRNA sense strand
caagggagaaccagggaaa

SEQ ID NO: 768067 - RNA, 19 nt, Homo sapiens
  misc_RNA (1)...(19): siRNA sense strand
ggaagcaggacuagaugga

SEQ ID NO: 768068 - RNA, 19 nt, Homo sapiens
  misc_RNA (1)...(19): siRNA sense strand
caaggcugcuggaacaagu

SEQ ID NO: 768069 - RNA, 19 nt, Homo sapiens
  misc_RNA (1)...(19): siRNA sense strand
gggagaagcaggugucgau

SEQ ID NO: 768070 - RNA, 19 nt, Homo sapiens
  misc_RNA (1)...(19): siRNA sense strand
ggagaacagggaccagaug

SEQ ID NO: 768071 - RNA, 19 nt, Homo sapiens
  misc_RNA (1)...(19): siRNA sense strand
acaauggaaacaucaauga

SEQ ID NO: 768072 - RNA, 19 nt, Homo sapiens
  misc_RNA (1)...(19): siRNA sense strand
gaaaggagagaugguggau

SEQ ID NO: 768073 - RNA, 19 nt, Homo sapiens
  misc_RNA (1)...(19): siRNA sense strand
cuagagguuucccuggauu

SEQ ID NO: 768074 - RNA, 19 nt, Homo sapiens
  misc_RNA (1)...(19): siRNA sense strand
gcaaauggagacggcuauu

SEQ ID NO: 768075 - RNA, 19 nt, Homo sapiens
  misc_RNA (1)...(19): siRNA sense strand
gaaaggcuuccagggagaa

SEQ ID NO: 768076 - RNA, 19 nt, Homo sapiens
  misc_RNA (1)...(19): siRNA sense strand
gcagcugggcuuccugguu

SEQ ID NO: 768077 - RNA, 19 nt, Homo sapiens
  misc_RNA (1)...(19): siRNA sense strand
ggagagaugguggauuaca

SEQ ID NO: 768078 - RNA, 19 nt, Homo sapiens
  misc_RNA (1)...(19): siRNA sense strand
gaugcuggcaacuccauug

SEQ ID NO: 768079 - RNA, 19 nt, Homo sapiens
  misc_RNA (1)...(19): siRNA sense strand
gcguggagcagcuggagaa

SEQ ID NO: 768080 - RNA, 19 nt, Homo sapiens
  misc_RNA (1)...(19): siRNA sense strand
uggagcagcuggagaacag

SEQ ID NO: 768081 - RNA, 19 nt, Homo sapiens
  misc_RNA (1)...(19): siRNA sense strand
ggauuuccgggucccauug

SEQ ID NO: 768082 - RNA, 19 nt, Homo sapiens
  misc_RNA (1)...(19): siRNA sense strand
gagaugguggauuacaaug

SEQ ID NO: 768083 - RNA, 19 nt, Homo sapiens
  misc_RNA (1)...(19): siRNA sense strand
uagcggagcgcacccacaa

SEQ ID NO: 768084 - RNA, 19 nt, Homo sapiens
  misc_RNA (1)...(19): siRNA sense strand
gggagaaccagggaaagga

SEQ ID NO: 768085 - RNA, 19 nt, Homo sapiens
  misc_RNA (1)...(19): siRNA sense strand
gagccaggccagcauccaa

SEQ ID NO: 768086 - RNA, 19 nt, Homo sapiens
  misc_RNA (1)...(19): siRNA sense strand
gguacuccaggaccaauug

SEQ ID NO: 768087 - RNA, 19 nt, Homo sapiens
  misc_RNA (1)...(19): siRNA sense strand
aaaggagacccugggauga

SEQ ID NO: 768088 - RNA, 19 nt, Homo sapiens
  misc_RNA (1)...(19): siRNA sense strand
gagccagggaucccaggaa

SEQ ID NO: 768089 - RNA, 19 nt, Homo sapiens
  misc_RNA (1)...(19): siRNA sense strand
gaaccagggaaaggagaga

SEQ ID NO: 768090 - RNA, 19 nt, Homo sapiens
  misc_RNA (1)...(19): siRNA sense strand
gauuacaauggaaacauca

SEQ ID NO: 768091 - RNA, 19 nt, Homo sapiens
  misc_RNA (1)...(19): siRNA sense strand
ggucaaccaggaacuagag

SEQ ID NO: 768092 - RNA, 19 nt, Homo sapiens
  misc_RNA (1)...(19): siRNA sense strand
ggaccaggccgagaauuaa

SEQ ID NO: 768093 - RNA, 19 nt, Homo sapiens
  misc_RNA (1)...(19): siRNA sense strand
ggucacaguuggaaagaca

SEQ ID NO: 768094 - RNA, 19 nt, Homo sapiens
  misc_RNA (1)...(19): siRNA sense strand
cugagaacguggaguuuaa

SEQ ID NO: 768095 - RNA, 19 nt, Homo sapiens
  misc_RNA (1)...(19): siRNA sense strand
gaacguggaguuuaagucu

SEQ ID NO: 768096 - RNA, 19 nt, Homo sapiens
  misc_RNA (1)...(19): siRNA sense strand
gagaaacaacauggacuuu

SEQ ID NO: 768097 - RNA, 19 nt, Homo sapiens
  misc_RNA (1)...(19): siRNA sense strand
gccgagaauuaaucuacaa

SEQ ID NO: 768098 - RNA, 19 nt, Homo sapiens
  misc_RNA (1)...(19): siRNA sense strand
auacuacugugugaaguuu

SEQ ID NO: 768099 - RNA, 19 nt, Homo sapiens
  misc_RNA (1)...(19): siRNA sense strand
uggaccaggccgagaauua

SEQ ID NO: 768100 - RNA, 19 nt, Homo sapiens
  misc_RNA (1)...(19): siRNA sense strand
cugagaagcuccuguuggu

SEQ ID NO: 768101 - RNA, 19 nt, Homo sapiens
  misc_RNA (1)...(19): siRNA sense strand
ucacaaagagaaacaacau

SEQ ID NO: 768102 - RNA, 19 nt, Homo sapiens
  misc_RNA (1)...(19): siRNA sense strand
caaagagaaacaacaugga

SEQ ID NO: 768103 - RNA, 19 nt, Homo sapiens
  misc_RNA (1)...(19): siRNA sense strand
ccugagaacguggaguuua

SEQ ID NO: 768104 - RNA, 19 nt, Homo sapiens
  misc_RNA (1)...(19): siRNA sense strand
ggccgagaauuaaucuaca

SEQ ID NO: 768105 - RNA, 19 nt, Homo sapiens
  misc_RNA (1)...(19): siRNA sense strand
uuacugcgcugcuccucau

SEQ ID NO: 768106 - RNA, 19 nt, Homo sapiens
  misc_RNA (1)...(19): siRNA sense strand
gaccaggccgagaauuaau

SEQ ID NO: 768107 - RNA, 19 nt, Homo sapiens
  misc_RNA (1)...(19): siRNA sense strand
gcccugagaacguggaguu

SEQ ID NO: 768108 - RNA, 19 nt, Homo sapiens
  misc_RNA (1)...(19): siRNA sense strand
agagaaacaacauggacuu

SEQ ID NO: 768109 - RNA, 19 nt, Homo sapiens
  misc_RNA (1)...(19): siRNA sense strand
caggguaacaacaguuuca

SEQ ID NO: 768110 - RNA, 19 nt, Homo sapiens
  misc_RNA (1)...(19): siRNA sense strand
cauacuacugugugaaguu

SEQ ID NO: 768111 - RNA, 19 nt, Homo sapiens
  misc_RNA (1)...(19): siRNA sense strand
gagaacguggaguuuaagu

SEQ ID NO: 768112 - RNA, 19 nt, Homo sapiens
  misc_RNA (1)...(19): siRNA sense strand
ggaccaggccgagaauuaa

SEQ ID NO: 768113 - RNA, 19 nt, Homo sapiens
  misc_RNA (1)...(19): siRNA sense strand
ggucacaguuggaaagaca

SEQ ID NO: 768114 - RNA, 19 nt, Homo sapiens
  misc_RNA (1)...(19): siRNA sense strand
cugagaacguggaguuuaa

SEQ ID NO: 768115 - RNA, 19 nt, Homo sapiens
  misc_RNA (1)...(19): siRNA sense strand
gaacguggaguuuaagucu

SEQ ID NO: 768116 - RNA, 19 nt, Homo sapiens
  misc_RNA (1)...(19): siRNA sense strand
gagaaacaacauggacuuu

SEQ ID NO: 768117 - RNA, 19 nt, Homo sapiens
  misc_RNA (1)...(19): siRNA sense strand
gccgagaauuaaucuacaa

SEQ ID NO: 768118 - RNA, 19 nt, Homo sapiens
  misc_RNA (1)...(19): siRNA sense strand
auacuacugugugaaguuu

SEQ ID NO: 768119 - RNA, 19 nt, Homo sapiens
  misc_RNA (1)...(19): siRNA sense strand
uggaccaggccgagaauua

SEQ ID NO: 768120 - RNA, 19 nt, Homo sapiens
  misc_RNA (1)...(19): siRNA sense strand
cugagaagcuccuguuggu

SEQ ID NO: 768121 - RNA, 19 nt, Homo sapiens
  misc_RNA (1)...(19): siRNA sense strand
ucacaaagagaaacaacau

SEQ ID NO: 768122 - RNA, 19 nt, Homo sapiens
  misc_RNA (1)...(19): siRNA sense strand
caaagagaaacaacaugga

SEQ ID NO: 768123 - RNA, 19 nt, Homo sapiens
  misc_RNA (1)...(19): siRNA sense strand
ccugagaacguggaguuua

SEQ ID NO: 768124 - RNA, 19 nt, Homo sapiens
  misc_RNA (1)...(19): siRNA sense strand
ggccgagaauuaaucuaca

SEQ ID NO: 768125 - RNA, 19 nt, Homo sapiens
  misc_RNA (1)...(19): siRNA sense strand
uuacugcgcugcuccucau

SEQ ID NO: 768126 - RNA, 19 nt, Homo sapiens
  misc_RNA (1)...(19): siRNA sense strand
gaccaggccgagaauuaau

SEQ ID NO: 768127 - RNA, 19 nt, Homo sapiens
  misc_RNA (1)...(19): siRNA sense strand
gcccugagaacguggaguu

SEQ ID NO: 768128 - RNA, 19 nt, Homo sapiens
  misc_RNA (1)...(19): siRNA sense strand
agagaaacaacauggacuu

SEQ ID NO: 768129 - RNA, 19 nt, Homo sapiens
  misc_RNA (1)...(19): siRNA sense strand
caggguaacaacaguuuca

SEQ ID NO: 768130 - RNA, 19 nt, Homo sapiens
  misc_RNA (1)...(19): siRNA sense strand
cauacuacugugugaaguu

SEQ ID NO: 768131 - RNA, 19 nt, Homo sapiens
  misc_RNA (1)...(19): siRNA sense strand
gagaacguggaguuuaagu

SEQ ID NO: 768132 - RNA, 19 nt, Homo sapiens
  misc_RNA (1)...(19): siRNA sense strand
ggaggucuguuccgcauga

SEQ ID NO: 768133 - RNA, 19 nt, Homo sapiens
  misc_RNA (1)...(19): siRNA sense strand
ggagaacuacgaggaguau

SEQ ID NO: 768134 - RNA, 19 nt, Homo sapiens
  misc_RNA (1)...(19): siRNA sense strand
acaaggaggugacgacacu

SEQ ID NO: 768135 - RNA, 19 nt, Homo sapiens
  misc_RNA (1)...(19): siRNA sense strand
gcuacuuccugaccaagau

SEQ ID NO: 768136 - RNA, 19 nt, Homo sapiens
  misc_RNA (1)...(19): siRNA sense strand
ucaagugccugcugaucca

SEQ ID NO: 768137 - RNA, 19 nt, Homo sapiens
  misc_RNA (1)...(19): siRNA sense strand
ucaaggucuuucccaacga

SEQ ID NO: 768138 - RNA, 19 nt, Homo sapiens
  misc_RNA (1)...(19): siRNA sense strand
guacugcugaccaucaagu

SEQ ID NO: 768139 - RNA, 19 nt, Homo sapiens
  misc_RNA (1)...(19): siRNA sense strand
gacacguacugcugaccau

SEQ ID NO: 768140 - RNA, 19 nt, Homo sapiens
  misc_RNA (1)...(19): siRNA sense strand
guacuugcugggacggauu

SEQ ID NO: 768141 - RNA, 19 nt, Homo sapiens
  misc_RNA (1)...(19): siRNA sense strand
gaccucagcucuugcauca

SEQ ID NO: 768142 - RNA, 19 nt, Homo sapiens
  misc_RNA (1)...(19): siRNA sense strand
ggagcaggauagugccuuu

SEQ ID NO: 768143 - RNA, 19 nt, Homo sapiens
  misc_RNA (1)...(19): siRNA sense strand
ggaggaggaguuccaguuu

SEQ ID NO: 768144 - RNA, 19 nt, Homo sapiens
  misc_RNA (1)...(19): siRNA sense strand
gaggaggaguuccaguuuc

SEQ ID NO: 768145 - RNA, 19 nt, Homo sapiens
  misc_RNA (1)...(19): siRNA sense strand
ggaaagaugcagcuguauc

SEQ ID NO: 768146 - RNA, 19 nt, Homo sapiens
  misc_RNA (1)...(19): siRNA sense strand
gagcucaagugcgacauca

SEQ ID NO: 768147 - RNA, 19 nt, Homo sapiens
  misc_RNA (1)...(19): siRNA sense strand
gcagcuguauccaagaaag

SEQ ID NO: 768148 - RNA, 19 nt, Homo sapiens
  misc_RNA (1)...(19): siRNA sense strand
ggggaaagaugcagcugua

SEQ ID NO: 768149 - RNA, 19 nt, Homo sapiens
  misc_RNA (1)...(19): siRNA sense strand
gaaagaugcagcuguaucc

SEQ ID NO: 768150 - RNA, 19 nt, Homo sapiens
  misc_RNA (1)...(19): siRNA sense strand
cgaagcugcugccuugucu

SEQ ID NO: 768151 - RNA, 19 nt, Homo sapiens
  misc_RNA (1)...(19): siRNA sense strand
ugcagaggaugaagugcua

SEQ ID NO: 768152 - RNA, 19 nt, Homo sapiens
  misc_RNA (1)...(19): siRNA sense strand
cgacaucagcgcagagauc

SEQ ID NO: 768153 - RNA, 19 nt, Homo sapiens
  misc_RNA (1)...(19): siRNA sense strand
gggacccuauugacguuga

SEQ ID NO: 768154 - RNA, 19 nt, Homo sapiens
  misc_RNA (1)...(19): siRNA sense strand
ugcaggaccucagcucuug

SEQ ID NO: 768155 - RNA, 19 nt, Homo sapiens
  misc_RNA (1)...(19): siRNA sense strand
cgcccuggauaacgucuuu

SEQ ID NO: 768156 - RNA, 19 nt, Homo sapiens
  misc_RNA (1)...(19): siRNA sense strand
gccgacuucuggugcuuug

SEQ ID NO: 768157 - RNA, 19 nt, Homo sapiens
  misc_RNA (1)...(19): siRNA sense strand
gcgcuggugcagaggauga

SEQ ID NO: 768158 - RNA, 19 nt, Homo sapiens
  misc_RNA (1)...(19): siRNA sense strand
cggaggaggaguuccaguu

SEQ ID NO: 768159 - RNA, 19 nt, Homo sapiens
  misc_RNA (1)...(19): siRNA sense strand
ccgauggcuucgacgaguu

SEQ ID NO: 768160 - RNA, 19 nt, Homo sapiens
  misc_RNA (1)...(19): siRNA sense strand
aggaggaguuccaguuucu

SEQ ID NO: 768161 - RNA, 19 nt, Homo sapiens
  misc_RNA (1)...(19): siRNA sense strand
augcagcuguauccaagaa

SEQ ID NO: 768162 - RNA, 19 nt, Homo sapiens
  misc_RNA (1)...(19): siRNA sense strand
gguaccagcgcgacuacga

SEQ ID NO: 768163 - RNA, 19 nt, Homo sapiens
  misc_RNA (1)...(19): siRNA sense strand
gaccucagcucuugcauca

SEQ ID NO: 768164 - RNA, 19 nt, Homo sapiens
  misc_RNA (1)...(19): siRNA sense strand
ggagcaggauagugccuuu

SEQ ID NO: 768165 - RNA, 19 nt, Homo sapiens
  misc_RNA (1)...(19): siRNA sense strand
ggaggaggaguuccaguuu

SEQ ID NO: 768166 - RNA, 19 nt, Homo sapiens
  misc_RNA (1)...(19): siRNA sense strand
gaggaggaguuccaguuuc

SEQ ID NO: 768167 - RNA, 19 nt, Homo sapiens
  misc_RNA (1)...(19): siRNA sense strand
ggaaagaugcagcuguauc

SEQ ID NO: 768168 - RNA, 19 nt, Homo sapiens
  misc_RNA (1)...(19): siRNA sense strand
gagcucaagugcgacauca

SEQ ID NO: 768169 - RNA, 19 nt, Homo sapiens
  misc_RNA (1)...(19): siRNA sense strand
gcagcuguauccaagaaag

SEQ ID NO: 768170 - RNA, 19 nt, Homo sapiens
  misc_RNA (1)...(19): siRNA sense strand
ggggaaagaugcagcugua

SEQ ID NO: 768171 - RNA, 19 nt, Homo sapiens
  misc_RNA (1)...(19): siRNA sense strand
gaaagaugcagcuguaucc

SEQ ID NO: 768172 - RNA, 19 nt, Homo sapiens
  misc_RNA (1)...(19): siRNA sense strand
cgaagcugcugccuugucu

SEQ ID NO: 768173 - RNA, 19 nt, Homo sapiens
  misc_RNA (1)...(19): siRNA sense strand
ugcagaggaugaagugcua

SEQ ID NO: 768174 - RNA, 19 nt, Homo sapiens
  misc_RNA (1)...(19): siRNA sense strand
cgacaucagcgcagagauc

SEQ ID NO: 768175 - RNA, 19 nt, Homo sapiens
  misc_RNA (1)...(19): siRNA sense strand
gggacccuauugacguuga

SEQ ID NO: 768176 - RNA, 19 nt, Homo sapiens
  misc_RNA (1)...(19): siRNA sense strand
ugcaggaccucagcucuug

SEQ ID NO: 768177 - RNA, 19 nt, Homo sapiens
  misc_RNA (1)...(19): siRNA sense strand
cgcccuggauaacgucuuu

SEQ ID NO: 768178 - RNA, 19 nt, Homo sapiens
  misc_RNA (1)...(19): siRNA sense strand
gccgacuucuggugcuuug

SEQ ID NO: 768179 - RNA, 19 nt, Homo sapiens
  misc_RNA (1)...(19): siRNA sense strand
gcgcuggugcagaggauga

SEQ ID NO: 768180 - RNA, 19 nt, Homo sapiens
  misc_RNA (1)...(19): siRNA sense strand
cggaggaggaguuccaguu

SEQ ID NO: 768181 - RNA, 19 nt, Homo sapiens
  misc_RNA (1)...(19): siRNA sense strand
ccgauggcuucgacgaguu

SEQ ID NO: 768182 - RNA, 19 nt, Homo sapiens
  misc_RNA (1)...(19): siRNA sense strand
aggaggaguuccaguuucu

SEQ ID NO: 768183 - RNA, 19 nt, Homo sapiens
  misc_RNA (1)...(19): siRNA sense strand
augcagcuguauccaagaa

SEQ ID NO: 768184 - RNA, 19 nt, Homo sapiens
  misc_RNA (1)...(19): siRNA sense strand
gguaccagcgcgacuacga

SEQ ID NO: 768185 - RNA, 19 nt, Homo sapiens
  misc_RNA (1)...(19): siRNA sense strand
gaccucagcucuugcauca

SEQ ID NO: 768186 - RNA, 19 nt, Homo sapiens
  misc_RNA (1)...(19): siRNA sense strand
ggagcaggauagugccuuu

SEQ ID NO: 768187 - RNA, 19 nt, Homo sapiens
  misc_RNA (1)...(19): siRNA sense strand
ggaggaggaguuccaguuu

SEQ ID NO: 768188 - RNA, 19 nt, Homo sapiens
  misc_RNA (1)...(19): siRNA sense strand
gaggaggaguuccaguuuc

SEQ ID NO: 768189 - RNA, 19 nt, Homo sapiens
  misc_RNA (1)...(19): siRNA sense strand
ggaaagaugcagcuguauc

SEQ ID NO: 768190 - RNA, 19 nt, Homo sapiens
  misc_RNA (1)...(19): siRNA sense strand
gagcucaagugcgacauca

SEQ ID NO: 768191 - RNA, 19 nt, Homo sapiens
  misc_RNA (1)...(19): siRNA sense strand
gcagcuguauccaagaaag

SEQ ID NO: 768192 - RNA, 19 nt, Homo sapiens
  misc_RNA (1)...(19): siRNA sense strand
ggggaaagaugcagcugua

SEQ ID NO: 768193 - RNA, 19 nt, Homo sapiens
  misc_RNA (1)...(19): siRNA sense strand
gaaagaugcagcuguaucc

SEQ ID NO: 768194 - RNA, 19 nt, Homo sapiens
  misc_RNA (1)...(19): siRNA sense strand
cgaagcugcugccuugucu

SEQ ID NO: 768195 - RNA, 19 nt, Homo sapiens
  misc_RNA (1)...(19): siRNA sense strand
ugcagaggaugaagugcua

SEQ ID NO: 768196 - RNA, 19 nt, Homo sapiens
  misc_RNA (1)...(19): siRNA sense strand
cgacaucagcgcagagauc

SEQ ID NO: 768197 - RNA, 19 nt, Homo sapiens
  misc_RNA (1)...(19): siRNA sense strand
gggacccuauugacguuga

SEQ ID NO: 768198 - RNA, 19 nt, Homo sapiens
  misc_RNA (1)...(19): siRNA sense strand
ugcaggaccucagcucuug

SEQ ID NO: 768199 - RNA, 19 nt, Homo sapiens
  misc_RNA (1)...(19): siRNA sense strand
cgcccuggauaacgucuuu

SEQ ID NO: 768200 - RNA, 19 nt, Homo sapiens
  misc_RNA (1)...(19): siRNA sense strand
gccgacuucuggugcuuug

SEQ ID NO: 768201 - RNA, 19 nt, Homo sapiens
  misc_RNA (1)...(19): siRNA sense strand
gcgcuggugcagaggauga

SEQ ID NO: 768202 - RNA, 19 nt, Homo sapiens
  misc_RNA (1)...(19): siRNA sense strand
cggaggaggaguuccaguu

SEQ ID NO: 768203 - RNA, 19 nt, Homo sapiens
  misc_RNA (1)...(19): siRNA sense strand
ccgauggcuucgacgaguu

SEQ ID NO: 768204 - RNA, 19 nt, Homo sapiens
  misc_RNA (1)...(19): siRNA sense strand
aggaggaguuccaguuucu

SEQ ID NO: 768205 - RNA, 19 nt, Homo sapiens
  misc_RNA (1)...(19): siRNA sense strand
augcagcuguauccaagaa

SEQ ID NO: 768206 - RNA, 19 nt, Homo sapiens
  misc_RNA (1)...(19): siRNA sense strand
gguaccagcgcgacuacga

SEQ ID NO: 768207 - RNA, 19 nt, Homo sapiens
  misc_RNA (1)...(19): siRNA sense strand
gaccucagcucuugcauca

SEQ ID NO: 768208 - RNA, 19 nt, Homo sapiens
  misc_RNA (1)...(19): siRNA sense strand
ggagcaggauagugccuuu

SEQ ID NO: 768209 - RNA, 19 nt, Homo sapiens
  misc_RNA (1)...(19): siRNA sense strand
ggaggaggaguuccaguuu

SEQ ID NO: 768210 - RNA, 19 nt, Homo sapiens
  misc_RNA (1)...(19): siRNA sense strand
gaggaggaguuccaguuuc

SEQ ID NO: 768211 - RNA, 19 nt, Homo sapiens
  misc_RNA (1)...(19): siRNA sense strand
ggaaagaugcagcuguauc

SEQ ID NO: 768212 - RNA, 19 nt, Homo sapiens
  misc_RNA (1)...(19): siRNA sense strand
gagcucaagugcgacauca

SEQ ID NO: 768213 - RNA, 19 nt, Homo sapiens
  misc_RNA (1)...(19): siRNA sense strand
gcagcuguauccaagaaag

SEQ ID NO: 768214 - RNA, 19 nt, Homo sapiens
  misc_RNA (1)...(19): siRNA sense strand
ggggaaagaugcagcugua

SEQ ID NO: 768215 - RNA, 19 nt, Homo sapiens
  misc_RNA (1)...(19): siRNA sense strand
gaaagaugcagcuguaucc

SEQ ID NO: 768216 - RNA, 19 nt, Homo sapiens
  misc_RNA (1)...(19): siRNA sense strand
cgaagcugcugccuugucu

SEQ ID NO: 768217 - RNA, 19 nt, Homo sapiens
  misc_RNA (1)...(19): siRNA sense strand
ugcagaggaugaagugcua

SEQ ID NO: 768218 - RNA, 19 nt, Homo sapiens
  misc_RNA (1)...(19): siRNA sense strand
cgacaucagcgcagagauc

SEQ ID NO: 768219 - RNA, 19 nt, Homo sapiens
  misc_RNA (1)...(19): siRNA sense strand
gggacccuauugacguuga

SEQ ID NO: 768220 - RNA, 19 nt, Homo sapiens
  misc_RNA (1)...(19): siRNA sense strand
ugcaggaccucagcucuug

SEQ ID NO: 768221 - RNA, 19 nt, Homo sapiens
  misc_RNA (1)...(19): siRNA sense strand
cgcccuggauaacgucuuu

SEQ ID NO: 768222 - RNA, 19 nt, Homo sapiens
  misc_RNA (1)...(19): siRNA sense strand
gccgacuucuggugcuuug

SEQ ID NO: 768223 - RNA, 19 nt, Homo sapiens
  misc_RNA (1)...(19): siRNA sense strand
gcgcuggugcagaggauga

SEQ ID NO: 768224 - RNA, 19 nt, Homo sapiens
  misc_RNA (1)...(19): siRNA sense strand
cggaggaggaguuccaguu

SEQ ID NO: 768225 - RNA, 19 nt, Homo sapiens
  misc_RNA (1)...(19): siRNA sense strand
ccgauggcuucgacgaguu

SEQ ID NO: 768226 - RNA, 19 nt, Homo sapiens
  misc_RNA (1)...(19): siRNA sense strand
aggaggaguuccaguuucu

SEQ ID NO: 768227 - RNA, 19 nt, Homo sapiens
  misc_RNA (1)...(19): siRNA sense strand
augcagcuguauccaagaa

SEQ ID NO: 768228 - RNA, 19 nt, Homo sapiens
  misc_RNA (1)...(19): siRNA sense strand
gguaccagcgcgacuacga

SEQ ID NO: 768229 - RNA, 19 nt, Homo sapiens
  misc_RNA (1)...(19): siRNA sense strand
gaccucagcucuugcauca

SEQ ID NO: 768230 - RNA, 19 nt, Homo sapiens
  misc_RNA (1)...(19): siRNA sense strand
ggagcaggauagugccuuu

SEQ ID NO: 768231 - RNA, 19 nt, Homo sapiens
  misc_RNA (1)...(19): siRNA sense strand
ggaggaggaguuccaguuu

SEQ ID NO: 768232 - RNA, 19 nt, Homo sapiens
  misc_RNA (1)...(19): siRNA sense strand
gaggaggaguuccaguuuc

SEQ ID NO: 768233 - RNA, 19 nt, Homo sapiens
  misc_RNA (1)...(19): siRNA sense strand
ggaaagaugcagcuguauc

SEQ ID NO: 768234 - RNA, 19 nt, Homo sapiens
  misc_RNA (1)...(19): siRNA sense strand
gagcucaagugcgacauca

SEQ ID NO: 768235 - RNA, 19 nt, Homo sapiens
  misc_RNA (1)...(19): siRNA sense strand
gcagcuguauccaagaaag

SEQ ID NO: 768236 - RNA, 19 nt, Homo sapiens
  misc_RNA (1)...(19): siRNA sense strand
ggggaaagaugcagcugua

SEQ ID NO: 768237 - RNA, 19 nt, Homo sapiens
  misc_RNA (1)...(19): siRNA sense strand
gaaagaugcagcuguaucc

SEQ ID NO: 768238 - RNA, 19 nt, Homo sapiens
  misc_RNA (1)...(19): siRNA sense strand
cgaagcugcugccuugucu

SEQ ID NO: 768239 - RNA, 19 nt, Homo sapiens
  misc_RNA (1)...(19): siRNA sense strand
ugcagaggaugaagugcua

SEQ ID NO: 768240 - RNA, 19 nt, Homo sapiens
  misc_RNA (1)...(19): siRNA sense strand
cgacaucagcgcagagauc

SEQ ID NO: 768241 - RNA, 19 nt, Homo sapiens
  misc_RNA (1)...(19): siRNA sense strand
gggacccuauugacguuga

SEQ ID NO: 768242 - RNA, 19 nt, Homo sapiens
  misc_RNA (1)...(19): siRNA sense strand
ugcaggaccucagcucuug

SEQ ID NO: 768243 - RNA, 19 nt, Homo sapiens
  misc_RNA (1)...(19): siRNA sense strand
cgcccuggauaacgucuuu

SEQ ID NO: 768244 - RNA, 19 nt, Homo sapiens
  misc_RNA (1)...(19): siRNA sense strand
gccgacuucuggugcuuug

SEQ ID NO: 768245 - RNA, 19 nt, Homo sapiens
  misc_RNA (1)...(19): siRNA sense strand
gcgcuggugcagaggauga

SEQ ID NO: 768246 - RNA, 19 nt, Homo sapiens
  misc_RNA (1)...(19): siRNA sense strand
cggaggaggaguuccaguu

SEQ ID NO: 768247 - RNA, 19 nt, Homo sapiens
  misc_RNA (1)...(19): siRNA sense strand
ccgauggcuucgacgaguu

SEQ ID NO: 768248 - RNA, 19 nt, Homo sapiens
  misc_RNA (1)...(19): siRNA sense strand
aggaggaguuccaguuucu

SEQ ID NO: 768249 - RNA, 19 nt, Homo sapiens
  misc_RNA (1)...(19): siRNA sense strand
augcagcuguauccaagaa

SEQ ID NO: 768250 - RNA, 19 nt, Homo sapiens
  misc_RNA (1)...(19): siRNA sense strand
gguaccagcgcgacuacga

SEQ ID NO: 768251 - RNA, 19 nt, Homo sapiens
  misc_RNA (1)...(19): siRNA sense strand
gaccucagcucuugcauca

SEQ ID NO: 768252 - RNA, 19 nt, Homo sapiens
  misc_RNA (1)...(19): siRNA sense strand
ggagcaggauagugccuuu

SEQ ID NO: 768253 - RNA, 19 nt, Homo sapiens
  misc_RNA (1)...(19): siRNA sense strand
ggaggaggaguuccaguuu

SEQ ID NO: 768254 - RNA, 19 nt, Homo sapiens
  misc_RNA (1)...(19): siRNA sense strand
gaggaggaguuccaguuuc

SEQ ID NO: 768255 - RNA, 19 nt, Homo sapiens
  misc_RNA (1)...(19): siRNA sense strand
ggaaagaugcagcuguauc

SEQ ID NO: 768256 - RNA, 19 nt, Homo sapiens
  misc_RNA (1)...(19): siRNA sense strand
gagcucaagugcgacauca

SEQ ID NO: 768257 - RNA, 19 nt, Homo sapiens
  misc_RNA (1)...(19): siRNA sense strand
gcagcuguauccaagaaag

SEQ ID NO: 768258 - RNA, 19 nt, Homo sapiens
  misc_RNA (1)...(19): siRNA sense strand
ggggaaagaugcagcugua

SEQ ID NO: 768259 - RNA, 19 nt, Homo sapiens
  misc_RNA (1)...(19): siRNA sense strand
gaaagaugcagcuguaucc

SEQ ID NO: 768260 - RNA, 19 nt, Homo sapiens
  misc_RNA (1)...(19): siRNA sense strand
cgaagcugcugccuugucu

SEQ ID NO: 768261 - RNA, 19 nt, Homo sapiens
  misc_RNA (1)...(19): siRNA sense strand
ugcagaggaugaagugcua

SEQ ID NO: 768262 - RNA, 19 nt, Homo sapiens
  misc_RNA (1)...(19): siRNA sense strand
cgacaucagcgcagagauc

SEQ ID NO: 768263 - RNA, 19 nt, Homo sapiens
  misc_RNA (1)...(19): siRNA sense strand
gggacccuauugacguuga

SEQ ID NO: 768264 - RNA, 19 nt, Homo sapiens
  misc_RNA (1)...(19): siRNA sense strand
ugcaggaccucagcucuug

SEQ ID NO: 768265 - RNA, 19 nt, Homo sapiens
  misc_RNA (1)...(19): siRNA sense strand
cgcccuggauaacgucuuu

SEQ ID NO: 768266 - RNA, 19 nt, Homo sapiens
  misc_RNA (1)...(19): siRNA sense strand
gccgacuucuggugcuuug

SEQ ID NO: 768267 - RNA, 19 nt, Homo sapiens
  misc_RNA (1)...(19): siRNA sense strand
gcgcuggugcagaggauga

SEQ ID NO: 768268 - RNA, 19 nt, Homo sapiens
  misc_RNA (1)...(19): siRNA sense strand
cggaggaggaguuccaguu

SEQ ID NO: 768269 - RNA, 19 nt, Homo sapiens
  misc_RNA (1)...(19): siRNA sense strand
ccgauggcuucgacgaguu

SEQ ID NO: 768270 - RNA, 19 nt, Homo sapiens
  misc_RNA (1)...(19): siRNA sense strand
aggaggaguuccaguuucu

SEQ ID NO: 768271 - RNA, 19 nt, Homo sapiens
  misc_RNA (1)...(19): siRNA sense strand
augcagcuguauccaagaa

SEQ ID NO: 768272 - RNA, 19 nt, Homo sapiens
  misc_RNA (1)...(19): siRNA sense strand
gguaccagcgcgacuacga

SEQ ID NO: 768273 - RNA, 19 nt, Homo sapiens
  misc_RNA (1)...(19): siRNA sense strand
gaccucagcucuugcauca

SEQ ID NO: 768274 - RNA, 19 nt, Homo sapiens
  misc_RNA (1)...(19): siRNA sense strand
ggagcaggauagugccuuu

SEQ ID NO: 768275 - RNA, 19 nt, Homo sapiens
  misc_RNA (1)...(19): siRNA sense strand
ggaggaggaguuccaguuu

SEQ ID NO: 768276 - RNA, 19 nt, Homo sapiens
  misc_RNA (1)...(19): siRNA sense strand
gaggaggaguuccaguuuc

SEQ ID NO: 768277 - RNA, 19 nt, Homo sapiens
  misc_RNA (1)...(19): siRNA sense strand
ggaaagaugcagcuguauc

SEQ ID NO: 768278 - RNA, 19 nt, Homo sapiens
  misc_RNA (1)...(19): siRNA sense strand
gagcucaagugcgacauca

SEQ ID NO: 768279 - RNA, 19 nt, Homo sapiens
  misc_RNA (1)...(19): siRNA sense strand
gcagcuguauccaagaaag

SEQ ID NO: 768280 - RNA, 19 nt, Homo sapiens
  misc_RNA (1)...(19): siRNA sense strand
ggggaaagaugcagcugua

SEQ ID NO: 768281 - RNA, 19 nt, Homo sapiens
  misc_RNA (1)...(19): siRNA sense strand
gaaagaugcagcuguaucc

SEQ ID NO: 768282 - RNA, 19 nt, Homo sapiens
  misc_RNA (1)...(19): siRNA sense strand
cgaagcugcugccuugucu

SEQ ID NO: 768283 - RNA, 19 nt, Homo sapiens
  misc_RNA (1)...(19): siRNA sense strand
ugcagaggaugaagugcua

SEQ ID NO: 768284 - RNA, 19 nt, Homo sapiens
  misc_RNA (1)...(19): siRNA sense strand
cgacaucagcgcagagauc

SEQ ID NO: 768285 - RNA, 19 nt, Homo sapiens
  misc_RNA (1)...(19): siRNA sense strand
gggacccuauugacguuga

SEQ ID NO: 768286 - RNA, 19 nt, Homo sapiens
  misc_RNA (1)...(19): siRNA sense strand
ugcaggaccucagcucuug

SEQ ID NO: 768287 - RNA, 19 nt, Homo sapiens
  misc_RNA (1)...(19): siRNA sense strand
cgcccuggauaacgucuuu

SEQ ID NO: 768288 - RNA, 19 nt, Homo sapiens
  misc_RNA (1)...(19): siRNA sense strand
gccgacuucuggugcuuug

SEQ ID NO: 768289 - RNA, 19 nt, Homo sapiens
  misc_RNA (1)...(19): siRNA sense strand
gcgcuggugcagaggauga

SEQ ID NO: 768290 - RNA, 19 nt, Homo sapiens
  misc_RNA (1)...(19): siRNA sense strand
cggaggaggaguuccaguu

SEQ ID NO: 768291 - RNA, 19 nt, Homo sapiens
  misc_RNA (1)...(19): siRNA sense strand
ccgauggcuucgacgaguu

SEQ ID NO: 768292 - RNA, 19 nt, Homo sapiens
  misc_RNA (1)...(19): siRNA sense strand
aggaggaguuccaguuucu

SEQ ID NO: 768293 - RNA, 19 nt, Homo sapiens
  misc_RNA (1)...(19): siRNA sense strand
augcagcuguauccaagaa

SEQ ID NO: 768294 - RNA, 19 nt, Homo sapiens
  misc_RNA (1)...(19): siRNA sense strand
gguaccagcgcgacuacga

SEQ ID NO: 768295 - RNA, 19 nt, Homo sapiens
  misc_RNA (1)...(19): siRNA sense strand
gaccucagcucuugcauca

SEQ ID NO: 768296 - RNA, 19 nt, Homo sapiens
  misc_RNA (1)...(19): siRNA sense strand
ggagcaggauagugccuuu

SEQ ID NO: 768297 - RNA, 19 nt, Homo sapiens
  misc_RNA (1)...(19): siRNA sense strand
ggaggaggaguuccaguuu

SEQ ID NO: 768298 - RNA, 19 nt, Homo sapiens
  misc_RNA (1)...(19): siRNA sense strand
gaggaggaguuccaguuuc

SEQ ID NO: 768299 - RNA, 19 nt, Homo sapiens
  misc_RNA (1)...(19): siRNA sense strand
ggaaagaugcagcuguauc

SEQ ID NO: 768300 - RNA, 19 nt, Homo sapiens
  misc_RNA (1)...(19): siRNA sense strand
gagcucaagugcgacauca

SEQ ID NO: 768301 - RNA, 19 nt, Homo sapiens
  misc_RNA (1)...(19): siRNA sense strand
gcagcuguauccaagaaag

SEQ ID NO: 768302 - RNA, 19 nt, Homo sapiens
  misc_RNA (1)...(19): siRNA sense strand
ggggaaagaugcagcugua

SEQ ID NO: 768303 - RNA, 19 nt, Homo sapiens
  misc_RNA (1)...(19): siRNA sense strand
gaaagaugcagcuguaucc

SEQ ID NO: 768304 - RNA, 19 nt, Homo sapiens
  misc_RNA (1)...(19): siRNA sense strand
cgaagcugcugccuugucu

SEQ ID NO: 768305 - RNA, 19 nt, Homo sapiens
  misc_RNA (1)...(19): siRNA sense strand
ugcagaggaugaagugcua

SEQ ID NO: 768306 - RNA, 19 nt, Homo sapiens
  misc_RNA (1)...(19): siRNA sense strand
cgacaucagcgcagagauc

SEQ ID NO: 768307 - RNA, 19 nt, Homo sapiens
  misc_RNA (1)...(19): siRNA sense strand
gggacccuauugacguuga

SEQ ID NO: 768308 - RNA, 19 nt, Homo sapiens
  misc_RNA (1)...(19): siRNA sense strand
ugcaggaccucagcucuug

SEQ ID NO: 768309 - RNA, 19 nt, Homo sapiens
  misc_RNA (1)...(19): siRNA sense strand
cgcccuggauaacgucuuu

SEQ ID NO: 768310 - RNA, 19 nt, Homo sapiens
  misc_RNA (1)...(19): siRNA sense strand
gccgacuucuggugcuuug

SEQ ID NO: 768311 - RNA, 19 nt, Homo sapiens
  misc_RNA (1)...(19): siRNA sense strand
gcgcuggugcagaggauga

SEQ ID NO: 768312 - RNA, 19 nt, Homo sapiens
  misc_RNA (1)...(19): siRNA sense strand
cggaggaggaguuccaguu

SEQ ID NO: 768313 - RNA, 19 nt, Homo sapiens
  misc_RNA (1)...(19): siRNA sense strand
ccgauggcuucgacgaguu

SEQ ID NO: 768314 - RNA, 19 nt, Homo sapiens
  misc_RNA (1)...(19): siRNA sense strand
aggaggaguuccaguuucu

SEQ ID NO: 768315 - RNA, 19 nt, Homo sapiens
  misc_RNA (1)...(19): siRNA sense strand
augcagcuguauccaagaa

SEQ ID NO: 768316 - RNA, 19 nt, Homo sapiens
  misc_RNA (1)...(19): siRNA sense strand
gguaccagcgcgacuacga

SEQ ID NO: 768317 - RNA, 19 nt, Homo sapiens
  misc_RNA (1)...(19): siRNA sense strand
gaccucagcucuugcauca

SEQ ID NO: 768318 - RNA, 19 nt, Homo sapiens
  misc_RNA (1)...(19): siRNA sense strand
ggagcaggauagugccuuu

SEQ ID NO: 768319 - RNA, 19 nt, Homo sapiens
  misc_RNA (1)...(19): siRNA sense strand
ggaggaggaguuccaguuu

SEQ ID NO: 768320 - RNA, 19 nt, Homo sapiens
  misc_RNA (1)...(19): siRNA sense strand
gaggaggaguuccaguuuc

SEQ ID NO: 768321 - RNA, 19 nt, Homo sapiens
  misc_RNA (1)...(19): siRNA sense strand
ggaaagaugcagcuguauc

SEQ ID NO: 768322 - RNA, 19 nt, Homo sapiens
  misc_RNA (1)...(19): siRNA sense strand
gagcucaagugcgacauca

SEQ ID NO: 768323 - RNA, 19 nt, Homo sapiens
  misc_RNA (1)...(19): siRNA sense strand
gcagcuguauccaagaaag

SEQ ID NO: 768324 - RNA, 19 nt, Homo sapiens
  misc_RNA (1)...(19): siRNA sense strand
ggggaaagaugcagcugua

SEQ ID NO: 768325 - RNA, 19 nt, Homo sapiens
  misc_RNA (1)...(19): siRNA sense strand
gaaagaugcagcuguaucc

SEQ ID NO: 768326 - RNA, 19 nt, Homo sapiens
  misc_RNA (1)...(19): siRNA sense strand
cgaagcugcugccuugucu

SEQ ID NO: 768327 - RNA, 19 nt, Homo sapiens
  misc_RNA (1)...(19): siRNA sense strand
ugcagaggaugaagugcua

SEQ ID NO: 768328 - RNA, 19 nt, Homo sapiens
  misc_RNA (1)...(19): siRNA sense strand
cgacaucagcgcagagauc

SEQ ID NO: 768329 - RNA, 19 nt, Homo sapiens
  misc_RNA (1)...(19): siRNA sense strand
gggacccuauugacguuga

SEQ ID NO: 768330 - RNA, 19 nt, Homo sapiens
  misc_RNA (1)...(19): siRNA sense strand
ugcaggaccucagcucuug

SEQ ID NO: 768331 - RNA, 19 nt, Homo sapiens
  misc_RNA (1)...(19): siRNA sense strand
cgcccuggauaacgucuuu

SEQ ID NO: 768332 - RNA, 19 nt, Homo sapiens
  misc_RNA (1)...(19): siRNA sense strand
gccgacuucuggugcuuug

SEQ ID NO: 768333 - RNA, 19 nt, Homo sapiens
  misc_RNA (1)...(19): siRNA sense strand
gcgcuggugcagaggauga

SEQ ID NO: 768334 - RNA, 19 nt, Homo sapiens
  misc_RNA (1)...(19): siRNA sense strand
cggaggaggaguuccaguu

SEQ ID NO: 768335 - RNA, 19 nt, Homo sapiens
  misc_RNA (1)...(19): siRNA sense strand
ccgauggcuucgacgaguu

SEQ ID NO: 768336 - RNA, 19 nt, Homo sapiens
  misc_RNA (1)...(19): siRNA sense strand
aggaggaguuccaguuucu

SEQ ID NO: 768337 - RNA, 19 nt, Homo sapiens
  misc_RNA (1)...(19): siRNA sense strand
augcagcuguauccaagaa

SEQ ID NO: 768338 - RNA, 19 nt, Homo sapiens
  misc_RNA (1)...(19): siRNA sense strand
gguaccagcgcgacuacga

SEQ ID NO: 768339 - RNA, 19 nt, Homo sapiens
  misc_RNA (1)...(19): siRNA sense strand
gaccucagcucuugcauca

SEQ ID NO: 768340 - RNA, 19 nt, Homo sapiens
  misc_RNA (1)...(19): siRNA sense strand
ggagcaggauagugccuuu

SEQ ID NO: 768341 - RNA, 19 nt, Homo sapiens
  misc_RNA (1)...(19): siRNA sense strand
ggaggaggaguuccaguuu

SEQ ID NO: 768342 - RNA, 19 nt, Homo sapiens
  misc_RNA (1)...(19): siRNA sense strand
gaggaggaguuccaguuuc

SEQ ID NO: 768343 - RNA, 19 nt, Homo sapiens
  misc_RNA (1)...(19): siRNA sense strand
ggaaagaugcagcuguauc

SEQ ID NO: 768344 - RNA, 19 nt, Homo sapiens
  misc_RNA (1)...(19): siRNA sense strand
gagcucaagugcgacauca

SEQ ID NO: 768345 - RNA, 19 nt, Homo sapiens
  misc_RNA (1)...(19): siRNA sense strand
gcagcuguauccaagaaag

SEQ ID NO: 768346 - RNA, 19 nt, Homo sapiens
  misc_RNA (1)...(19): siRNA sense strand
ggggaaagaugcagcugua

SEQ ID NO: 768347 - RNA, 19 nt, Homo sapiens
  misc_RNA (1)...(19): siRNA sense strand
gaaagaugcagcuguaucc

SEQ ID NO: 768348 - RNA, 19 nt, Homo sapiens
  misc_RNA (1)...(19): siRNA sense strand
cgaagcugcugccuugucu

SEQ ID NO: 768349 - RNA, 19 nt, Homo sapiens
  misc_RNA (1)...(19): siRNA sense strand
ugcagaggaugaagugcua

SEQ ID NO: 768350 - RNA, 19 nt, Homo sapiens
  misc_RNA (1)...(19): siRNA sense strand
cgacaucagcgcagagauc

SEQ ID NO: 768351 - RNA, 19 nt, Homo sapiens
  misc_RNA (1)...(19): siRNA sense strand
gggacccuauugacguuga

SEQ ID NO: 768352 - RNA, 19 nt, Homo sapiens
  misc_RNA (1)...(19): siRNA sense strand
ugcaggaccucagcucuug

SEQ ID NO: 768353 - RNA, 19 nt, Homo sapiens
  misc_RNA (1)...(19): siRNA sense strand
cgcccuggauaacgucuuu

SEQ ID NO: 768354 - RNA, 19 nt, Homo sapiens
  misc_RNA (1)...(19): siRNA sense strand
gccgacuucuggugcuuug

SEQ ID NO: 768355 - RNA, 19 nt, Homo sapiens
  misc_RNA (1)...(19): siRNA sense strand
gcgcuggugcagaggauga

SEQ ID NO: 768356 - RNA, 19 nt, Homo sapiens
  misc_RNA (1)...(19): siRNA sense strand
cggaggaggaguuccaguu

SEQ ID NO: 768357 - RNA, 19 nt, Homo sapiens
  misc_RNA (1)...(19): siRNA sense strand
ccgauggcuucgacgaguu

SEQ ID NO: 768358 - RNA, 19 nt, Homo sapiens
  misc_RNA (1)...(19): siRNA sense strand
aggaggaguuccaguuucu

SEQ ID NO: 768359 - RNA, 19 nt, Homo sapiens
  misc_RNA (1)...(19): siRNA sense strand
augcagcuguauccaagaa

SEQ ID NO: 768360 - RNA, 19 nt, Homo sapiens
  misc_RNA (1)...(19): siRNA sense strand
gguaccagcgcgacuacga

SEQ ID NO: 768361 - RNA, 19 nt, Homo sapiens
  misc_RNA (1)...(19): siRNA sense strand
gaccucagcucuugcauca

SEQ ID NO: 768362 - RNA, 19 nt, Homo sapiens
  misc_RNA (1)...(19): siRNA sense strand
ggagcaggauagugccuuu

SEQ ID NO: 768363 - RNA, 19 nt, Homo sapiens
  misc_RNA (1)...(19): siRNA sense strand
ggaggaggaguuccaguuu

SEQ ID NO: 768364 - RNA, 19 nt, Homo sapiens
  misc_RNA (1)...(19): siRNA sense strand
gaggaggaguuccaguuuc

SEQ ID NO: 768365 - RNA, 19 nt, Homo sapiens
  misc_RNA (1)...(19): siRNA sense strand
ggaaagaugcagcuguauc

SEQ ID NO: 768366 - RNA, 19 nt, Homo sapiens
  misc_RNA (1)...(19): siRNA sense strand
gagcucaagugcgacauca

SEQ ID NO: 768367 - RNA, 19 nt, Homo sapiens
  misc_RNA (1)...(19): siRNA sense strand
gcagcuguauccaagaaag

SEQ ID NO: 768368 - RNA, 19 nt, Homo sapiens
  misc_RNA (1)...(19): siRNA sense strand
ggggaaagaugcagcugua

SEQ ID NO: 768369 - RNA, 19 nt, Homo sapiens
  misc_RNA (1)...(19): siRNA sense strand
gaaagaugcagcuguaucc

SEQ ID NO: 768370 - RNA, 19 nt, Homo sapiens
  misc_RNA (1)...(19): siRNA sense strand
cgaagcugcugccuugucu

SEQ ID NO: 768371 - RNA, 19 nt, Homo sapiens
  misc_RNA (1)...(19): siRNA sense strand
ugcagaggaugaagugcua

SEQ ID NO: 768372 - RNA, 19 nt, Homo sapiens
  misc_RNA (1)...(19): siRNA sense strand
cgacaucagcgcagagauc

SEQ ID NO: 768373 - RNA, 19 nt, Homo sapiens
  misc_RNA (1)...(19): siRNA sense strand
gggacccuauugacguuga

SEQ ID NO: 768374 - RNA, 19 nt, Homo sapiens
  misc_RNA (1)...(19): siRNA sense strand
ugcaggaccucagcucuug

SEQ ID NO: 768375 - RNA, 19 nt, Homo sapiens
  misc_RNA (1)...(19): siRNA sense strand
cgcccuggauaacgucuuu

SEQ ID NO: 768376 - RNA, 19 nt, Homo sapiens
  misc_RNA (1)...(19): siRNA sense strand
gccgacuucuggugcuuug

SEQ ID NO: 768377 - RNA, 19 nt, Homo sapiens
  misc_RNA (1)...(19): siRNA sense strand
gcgcuggugcagaggauga

SEQ ID NO: 768378 - RNA, 19 nt, Homo sapiens
  misc_RNA (1)...(19): siRNA sense strand
cggaggaggaguuccaguu

SEQ ID NO: 768379 - RNA, 19 nt, Homo sapiens
  misc_RNA (1)...(19): siRNA sense strand
ccgauggcuucgacgaguu

SEQ ID NO: 768380 - RNA, 19 nt, Homo sapiens
  misc_RNA (1)...(19): siRNA sense strand
aggaggaguuccaguuucu

SEQ ID NO: 768381 - RNA, 19 nt, Homo sapiens
  misc_RNA (1)...(19): siRNA sense strand
augcagcuguauccaagaa

SEQ ID NO: 768382 - RNA, 19 nt, Homo sapiens
  misc_RNA (1)...(19): siRNA sense strand
gguaccagcgcgacuacga

SEQ ID NO: 768383 - RNA, 19 nt, Homo sapiens
  misc_RNA (1)...(19): siRNA sense strand
ggagaaagcucgagucauc

SEQ ID NO: 768384 - RNA, 19 nt, Homo sapiens
  misc_RNA (1)...(19): siRNA sense strand
ggaauggcauggucuugaa

SEQ ID NO: 768385 - RNA, 19 nt, Homo sapiens
  misc_RNA (1)...(19): siRNA sense strand
guccggaacgucuauaaga

SEQ ID NO: 768386 - RNA, 19 nt, Homo sapiens
  misc_RNA (1)...(19): siRNA sense strand
uccggaacgucuauaagaa

SEQ ID NO: 768387 - RNA, 19 nt, Homo sapiens
  misc_RNA (1)...(19): siRNA sense strand
gcccggaccaucggcauuu

SEQ ID NO: 768388 - RNA, 19 nt, Homo sapiens
  misc_RNA (1)...(19): siRNA sense strand
cgaggaggcggaacaaguc

SEQ ID NO: 768389 - RNA, 19 nt, Homo sapiens
  misc_RNA (1)...(19): siRNA sense strand
uuucaaagccuucgcuagu

SEQ ID NO: 768390 - RNA, 19 nt, Homo sapiens
  misc_RNA (1)...(19): siRNA sense strand
guaccgcuccaaacucauc

SEQ ID NO: 768391 - RNA, 19 nt, Homo sapiens
  misc_RNA (1)...(19): siRNA sense strand
cggaauggcauggucuuga

SEQ ID NO: 768392 - RNA, 19 nt, Homo sapiens
  misc_RNA (1)...(19): siRNA sense strand
ggagaaagcucgagucauc

SEQ ID NO: 768393 - RNA, 19 nt, Homo sapiens
  misc_RNA (1)...(19): siRNA sense strand
ggaauggcauggucuugaa

SEQ ID NO: 768394 - RNA, 19 nt, Homo sapiens
  misc_RNA (1)...(19): siRNA sense strand
guccggaacgucuauaaga

SEQ ID NO: 768395 - RNA, 19 nt, Homo sapiens
  misc_RNA (1)...(19): siRNA sense strand
uccggaacgucuauaagaa

SEQ ID NO: 768396 - RNA, 19 nt, Homo sapiens
  misc_RNA (1)...(19): siRNA sense strand
gcccggaccaucggcauuu

SEQ ID NO: 768397 - RNA, 19 nt, Homo sapiens
  misc_RNA (1)...(19): siRNA sense strand
cgaggaggcggaacaaguc

SEQ ID NO: 768398 - RNA, 19 nt, Homo sapiens
  misc_RNA (1)...(19): siRNA sense strand
uuucaaagccuucgcuagu

SEQ ID NO: 768399 - RNA, 19 nt, Homo sapiens
  misc_RNA (1)...(19): siRNA sense strand
guaccgcuccaaacucauc

SEQ ID NO: 768400 - RNA, 19 nt, Homo sapiens
  misc_RNA (1)...(19): siRNA sense strand
cggaauggcauggucuuga

SEQ ID NO: 768401 - RNA, 19 nt, Homo sapiens
  misc_RNA (1)...(19): siRNA sense strand
ggagaaagcucgagucauc

SEQ ID NO: 768402 - RNA, 19 nt, Homo sapiens
  misc_RNA (1)...(19): siRNA sense strand
ggaauggcauggucuugaa

SEQ ID NO: 768403 - RNA, 19 nt, Homo sapiens
  misc_RNA (1)...(19): siRNA sense strand
guccggaacgucuauaaga

SEQ ID NO: 768404 - RNA, 19 nt, Homo sapiens
  misc_RNA (1)...(19): siRNA sense strand
uccggaacgucuauaagaa

SEQ ID NO: 768405 - RNA, 19 nt, Homo sapiens
  misc_RNA (1)...(19): siRNA sense strand
gcccggaccaucggcauuu

SEQ ID NO: 768406 - RNA, 19 nt, Homo sapiens
  misc_RNA (1)...(19): siRNA sense strand
cgaggaggcggaacaaguc

SEQ ID NO: 768407 - RNA, 19 nt, Homo sapiens
  misc_RNA (1)...(19): siRNA sense strand
uuucaaagccuucgcuagu

SEQ ID NO: 768408 - RNA, 19 nt, Homo sapiens
  misc_RNA (1)...(19): siRNA sense strand
guaccgcuccaaacucauc

SEQ ID NO: 768409 - RNA, 19 nt, Homo sapiens
  misc_RNA (1)...(19): siRNA sense strand
cggaauggcauggucuuga

SEQ ID NO: 768410 - RNA, 19 nt, Homo sapiens
  misc_RNA (1)...(19): siRNA sense strand
ggagaaagcucgagucauc

SEQ ID NO: 768411 - RNA, 19 nt, Homo sapiens
  misc_RNA (1)...(19): siRNA sense strand
ggaauggcauggucuugaa

SEQ ID NO: 768412 - RNA, 19 nt, Homo sapiens
  misc_RNA (1)...(19): siRNA sense strand
guccggaacgucuauaaga

SEQ ID NO: 768413 - RNA, 19 nt, Homo sapiens
  misc_RNA (1)...(19): siRNA sense strand
uccggaacgucuauaagaa

SEQ ID NO: 768414 - RNA, 19 nt, Homo sapiens
  misc_RNA (1)...(19): siRNA sense strand
gcccggaccaucggcauuu

SEQ ID NO: 768415 - RNA, 19 nt, Homo sapiens
  misc_RNA (1)...(19): siRNA sense strand
cgaggaggcggaacaaguc

SEQ ID NO: 768416 - RNA, 19 nt, Homo sapiens
  misc_RNA (1)...(19): siRNA sense strand
uuucaaagccuucgcuagu

SEQ ID NO: 768417 - RNA, 19 nt, Homo sapiens
  misc_RNA (1)...(19): siRNA sense strand
guaccgcuccaaacucauc

SEQ ID NO: 768418 - RNA, 19 nt, Homo sapiens
  misc_RNA (1)...(19): siRNA sense strand
cggaauggcauggucuuga

SEQ ID NO: 768419 - RNA, 19 nt, Homo sapiens
  misc_RNA (1)...(19): siRNA sense strand
gaaagacacuuaacagcua

SEQ ID NO: 768420 - RNA, 19 nt, Homo sapiens
  misc_RNA (1)...(19): siRNA sense strand
guaaacaggugucugauaa

SEQ ID NO: 768421 - RNA, 19 nt, Homo sapiens
  misc_RNA (1)...(19): siRNA sense strand
cagaauggaucuucaaaua

SEQ ID NO: 768422 - RNA, 19 nt, Homo sapiens
  misc_RNA (1)...(19): siRNA sense strand
uaacaaaccugugacuaua

SEQ ID NO: 768423 - RNA, 19 nt, Homo sapiens
  misc_RNA (1)...(19): siRNA sense strand
gaaugaggcugaagaaaga

SEQ ID NO: 768424 - RNA, 19 nt, Homo sapiens
  misc_RNA (1)...(19): siRNA sense strand
ggaauuagacuuucuugua

SEQ ID NO: 768425 - RNA, 19 nt, Homo sapiens
  misc_RNA (1)...(19): siRNA sense strand
gaaagugaaugauguccua

SEQ ID NO: 768426 - RNA, 19 nt, Homo sapiens
  misc_RNA (1)...(19): siRNA sense strand
ggaaaucaacucucaauaa

SEQ ID NO: 768427 - RNA, 19 nt, Homo sapiens
  misc_RNA (1)...(19): siRNA sense strand
gaaaucaacucucaauaag

SEQ ID NO: 768428 - RNA, 19 nt, Homo sapiens
  misc_RNA (1)...(19): siRNA sense strand
caacaccucuuacgauaaa

SEQ ID NO: 768429 - RNA, 19 nt, Homo sapiens
  misc_RNA (1)...(19): siRNA sense strand
gaaaggaaccucaaaggaa

SEQ ID NO: 768430 - RNA, 19 nt, Homo sapiens
  misc_RNA (1)...(19): siRNA sense strand
gaaaugagggcaauagaaa

SEQ ID NO: 768431 - RNA, 19 nt, Homo sapiens
  misc_RNA (1)...(19): siRNA sense strand
ucagugagaucaucagaua

SEQ ID NO: 768432 - RNA, 19 nt, Homo sapiens
  misc_RNA (1)...(19): siRNA sense strand
ggaaagaagucucuagaag

SEQ ID NO: 768433 - RNA, 19 nt, Homo sapiens
  misc_RNA (1)...(19): siRNA sense strand
cuaaugagcuugaagaaga

SEQ ID NO: 768434 - RNA, 19 nt, Homo sapiens
  misc_RNA (1)...(19): siRNA sense strand
ccaagaauauuuccacauu

SEQ ID NO: 768435 - RNA, 19 nt, Homo sapiens
  misc_RNA (1)...(19): siRNA sense strand
gagaggaggucaaagaaga

SEQ ID NO: 768436 - RNA, 19 nt, Homo sapiens
  misc_RNA (1)...(19): siRNA sense strand
gaacagucauugcauuaug

SEQ ID NO: 768437 - RNA, 19 nt, Homo sapiens
  misc_RNA (1)...(19): siRNA sense strand
ggaggaagauggagauaau

SEQ ID NO: 768438 - RNA, 19 nt, Homo sapiens
  misc_RNA (1)...(19): siRNA sense strand
ggaagagccuugugaggaa

SEQ ID NO: 768439 - RNA, 19 nt, Homo sapiens
  misc_RNA (1)...(19): siRNA sense strand
aaacaaaucuacagggaaa

SEQ ID NO: 768440 - RNA, 19 nt, Homo sapiens
  misc_RNA (1)...(19): siRNA sense strand
guacagagccgcuauacaa

SEQ ID NO: 768441 - RNA, 19 nt, Homo sapiens
  misc_RNA (1)...(19): siRNA sense strand
acaaaucacugcaagagua

SEQ ID NO: 768442 - RNA, 19 nt, Homo sapiens
  misc_RNA (1)...(19): siRNA sense strand
gaacaaagaggugaagaaa

SEQ ID NO: 768443 - RNA, 19 nt, Homo sapiens
  misc_RNA (1)...(19): siRNA sense strand
gcagaaagcagcaguaaau

SEQ ID NO: 768444 - RNA, 19 nt, Homo sapiens
  misc_RNA (1)...(19): siRNA sense strand
gcccagagaucaaauaaau

SEQ ID NO: 768445 - RNA, 19 nt, Homo sapiens
  misc_RNA (1)...(19): siRNA sense strand
caaggcaauucuucaguua

SEQ ID NO: 768446 - RNA, 19 nt, Homo sapiens
  misc_RNA (1)...(19): siRNA sense strand
acacagaacugauccaaga

SEQ ID NO: 768447 - RNA, 19 nt, Homo sapiens
  misc_RNA (1)...(19): siRNA sense strand
gagcagaaauaaagaaaca

SEQ ID NO: 768448 - RNA, 19 nt, Homo sapiens
  misc_RNA (1)...(19): siRNA sense strand
gaaagcagcaguaaauuca

SEQ ID NO: 768449 - RNA, 19 nt, Homo sapiens
  misc_RNA (1)...(19): siRNA sense strand
gaagacguauuucgccaaa

SEQ ID NO: 768450 - RNA, 19 nt, Homo sapiens
  misc_RNA (1)...(19): siRNA sense strand
ggacuucaguguguacuuu

SEQ ID NO: 768451 - RNA, 19 nt, Homo sapiens
  misc_RNA (1)...(19): siRNA sense strand
gaacaacuaacuccugaaa

SEQ ID NO: 768452 - RNA, 19 nt, Homo sapiens
  misc_RNA (1)...(19): siRNA sense strand
uaacguacauguuggauca

SEQ ID NO: 768453 - RNA, 19 nt, Homo sapiens
  misc_RNA (1)...(19): siRNA sense strand
ucaaguaucuuagcaaguu

SEQ ID NO: 768454 - RNA, 19 nt, Homo sapiens
  misc_RNA (1)...(19): siRNA sense strand
gaauuagacuuucuuguac

SEQ ID NO: 768455 - RNA, 19 nt, Homo sapiens
  misc_RNA (1)...(19): siRNA sense strand
gagccauuauuuccauuua

SEQ ID NO: 768456 - RNA, 19 nt, Homo sapiens
  misc_RNA (1)...(19): siRNA sense strand
gaauggaucuucaaauagg

SEQ ID NO: 768457 - RNA, 19 nt, Homo sapiens
  misc_RNA (1)...(19): siRNA sense strand
gaaaucagcaaguucugua

SEQ ID NO: 768458 - RNA, 19 nt, Homo sapiens
  misc_RNA (1)...(19): siRNA sense strand
caccauguauucauaagua

SEQ ID NO: 768459 - RNA, 19 nt, Homo sapiens
  misc_RNA (1)...(19): siRNA sense strand
caucaaggcuguuauaguc

SEQ ID NO: 768460 - RNA, 19 nt, Homo sapiens
  misc_RNA (1)...(19): siRNA sense strand
caacuuguauugugacguu

SEQ ID NO: 768461 - RNA, 19 nt, Homo sapiens
  misc_RNA (1)...(19): siRNA sense strand
caaggcaucuguagccaaa

SEQ ID NO: 768462 - RNA, 19 nt, Homo sapiens
  misc_RNA (1)...(19): siRNA sense strand
ucaaaggaauucuagaaga

SEQ ID NO: 768463 - RNA, 19 nt, Homo sapiens
  misc_RNA (1)...(19): siRNA sense strand
ggauucuucuguccaauuu

SEQ ID NO: 768464 - RNA, 19 nt, Homo sapiens
  misc_RNA (1)...(19): siRNA sense strand
ccaaguggguccaguaaau

SEQ ID NO: 768465 - RNA, 19 nt, Homo sapiens
  misc_RNA (1)...(19): siRNA sense strand
uaaagaggagccauuauuu

SEQ ID NO: 768466 - RNA, 19 nt, Homo sapiens
  misc_RNA (1)...(19): siRNA sense strand
ucagguaacucaacacaga

SEQ ID NO: 768467 - RNA, 19 nt, Homo sapiens
  misc_RNA (1)...(19): siRNA sense strand
caagaagacugaagacucu

SEQ ID NO: 768468 - RNA, 19 nt, Homo sapiens
  misc_RNA (1)...(19): siRNA sense strand
gaagauggagauaaugauu

SEQ ID NO: 768469 - RNA, 19 nt, Homo sapiens
  misc_RNA (1)...(19): siRNA sense strand
ugaaguaacugaagaggau

SEQ ID NO: 768470 - RNA, 19 nt, Homo sapiens
  misc_RNA (1)...(19): siRNA sense strand
cagcagugauuugcauuua

SEQ ID NO: 768471 - RNA, 19 nt, Homo sapiens
  misc_RNA (1)...(19): siRNA sense strand
uaaaggaaaugaaggagau

SEQ ID NO: 768472 - RNA, 19 nt, Homo sapiens
  misc_RNA (1)...(19): siRNA sense strand
gaagaagaacuaaauaugg

SEQ ID NO: 768473 - RNA, 19 nt, Homo sapiens
  misc_RNA (1)...(19): siRNA sense strand
ggaauuuggucugcuuaaa

SEQ ID NO: 768474 - RNA, 19 nt, Homo sapiens
  misc_RNA (1)...(19): siRNA sense strand
gaggagaaggaauuuaaua

SEQ ID NO: 768475 - RNA, 19 nt, Homo sapiens
  misc_RNA (1)...(19): siRNA sense strand
uaccagaggugcaaauuga

SEQ ID NO: 768476 - RNA, 19 nt, Homo sapiens
  misc_RNA (1)...(19): siRNA sense strand
ggaucaccauguauucaua

SEQ ID NO: 768477 - RNA, 19 nt, Homo sapiens
  misc_RNA (1)...(19): siRNA sense strand
gaugaggaagcuauauuua

SEQ ID NO: 768478 - RNA, 19 nt, Homo sapiens
  misc_RNA (1)...(19): siRNA sense strand
gcaaauauggcuacacaga

SEQ ID NO: 768479 - RNA, 19 nt, Homo sapiens
  misc_RNA (1)...(19): siRNA sense strand
gagagugccucaaguaucu

SEQ ID NO: 768480 - RNA, 19 nt, Homo sapiens
  misc_RNA (1)...(19): siRNA sense strand
gaacaaaaccaucaguuaa

SEQ ID NO: 768481 - RNA, 19 nt, Homo sapiens
  misc_RNA (1)...(19): siRNA sense strand
agaacaagaucuccucaaa

SEQ ID NO: 768482 - RNA, 19 nt, Homo sapiens
  misc_RNA (1)...(19): siRNA sense strand
ggauggaaaucaacucuca

SEQ ID NO: 768483 - RNA, 19 nt, Homo sapiens
  misc_RNA (1)...(19): siRNA sense strand
gaagcaguuucaaguaaug

SEQ ID NO: 768484 - RNA, 19 nt, Homo sapiens
  misc_RNA (1)...(19): siRNA sense strand
gaaugagucagcagacaua

SEQ ID NO: 768485 - RNA, 19 nt, Homo sapiens
  misc_RNA (1)...(19): siRNA sense strand
ugaccaagaugauugcauu

SEQ ID NO: 768486 - RNA, 19 nt, Homo sapiens
  misc_RNA (1)...(19): siRNA sense strand
agaagaaucuccaucugaa

SEQ ID NO: 768487 - RNA, 19 nt, Homo sapiens
  misc_RNA (1)...(19): siRNA sense strand
ugaaugauguccuaauugu

SEQ ID NO: 768488 - RNA, 19 nt, Homo sapiens
  misc_RNA (1)...(19): siRNA sense strand
gauccaagauugaccaaag

SEQ ID NO: 768489 - RNA, 19 nt, Homo sapiens
  misc_RNA (1)...(19): siRNA sense strand
gaagaaagaagcucuaggu

SEQ ID NO: 768490 - RNA, 19 nt, Homo sapiens
  misc_RNA (1)...(19): siRNA sense strand
gaagagcuaccuuugaaug

SEQ ID NO: 768491 - RNA, 19 nt, Homo sapiens
  misc_RNA (1)...(19): siRNA sense strand
guuauagucucuucuccua

SEQ ID NO: 768492 - RNA, 19 nt, Homo sapiens
  misc_RNA (1)...(19): siRNA sense strand
ggaaacagaagaaaugugu

SEQ ID NO: 768493 - RNA, 19 nt, Homo sapiens
  misc_RNA (1)...(19): siRNA sense strand
gaaguacauugaaacaaca

SEQ ID NO: 768494 - RNA, 19 nt, Homo sapiens
  misc_RNA (1)...(19): siRNA sense strand
ccacgaagacguucucauu

SEQ ID NO: 768495 - RNA, 19 nt, Homo sapiens
  misc_RNA (1)...(19): siRNA sense strand
uggaagagcuaccuuugaa

SEQ ID NO: 768496 - RNA, 19 nt, Homo sapiens
  misc_RNA (1)...(19): siRNA sense strand
aaaugaaacuccacgaaga

SEQ ID NO: 768497 - RNA, 19 nt, Homo sapiens
  misc_RNA (1)...(19): siRNA sense strand
ugaugucccugaggaauua

SEQ ID NO: 768498 - RNA, 19 nt, Homo sapiens
  misc_RNA (1)...(19): siRNA sense strand
gaaaguacucccagcauuc

SEQ ID NO: 768499 - RNA, 19 nt, Homo sapiens
  misc_RNA (1)...(19): siRNA sense strand
caaggaaacagaagaaaug

SEQ ID NO: 768500 - RNA, 19 nt, Homo sapiens
  misc_RNA (1)...(19): siRNA sense strand
cuacaaagagugauucaaa

SEQ ID NO: 768501 - RNA, 19 nt, Homo sapiens
  misc_RNA (1)...(19): siRNA sense strand
gagaggaugucaaggagau

SEQ ID NO: 768502 - RNA, 19 nt, Homo sapiens
  misc_RNA (1)...(19): siRNA sense strand
cugaugaggucgagaauga

SEQ ID NO: 768503 - RNA, 19 nt, Homo sapiens
  misc_RNA (1)...(19): siRNA sense strand
gaagauuucauuucuggaa

SEQ ID NO: 768504 - RNA, 19 nt, Homo sapiens
  misc_RNA (1)...(19): siRNA sense strand
aaaggaaccucaaaggaau

SEQ ID NO: 768505 - RNA, 19 nt, Homo sapiens
  misc_RNA (1)...(19): siRNA sense strand
aaagaacagucauugcauu

SEQ ID NO: 768506 - RNA, 19 nt, Homo sapiens
  misc_RNA (1)...(19): siRNA sense strand
ggaaagaacagucauugca

SEQ ID NO: 768507 - RNA, 19 nt, Homo sapiens
  misc_RNA (1)...(19): siRNA sense strand
gacauucuauucguuguaa

SEQ ID NO: 768508 - RNA, 19 nt, Homo sapiens
  misc_RNA (1)...(19): siRNA sense strand
ccaagaauuugccaucguu

SEQ ID NO: 768509 - RNA, 19 nt, Homo sapiens
  misc_RNA (1)...(19): siRNA sense strand
aacaacaccucuuacgaua

SEQ ID NO: 768510 - RNA, 19 nt, Homo sapiens
  misc_RNA (1)...(19): siRNA sense strand
gcagugauuugcauuuagu

SEQ ID NO: 768511 - RNA, 19 nt, Homo sapiens
  misc_RNA (1)...(19): siRNA sense strand
gggaugacagcaacaauaa

SEQ ID NO: 768512 - RNA, 19 nt, Homo sapiens
  misc_RNA (1)...(19): siRNA sense strand
gcaauucuucaguuagaua

SEQ ID NO: 768513 - RNA, 19 nt, Homo sapiens
  misc_RNA (1)...(19): siRNA sense strand
cacagaagauccacuugaa

SEQ ID NO: 768514 - RNA, 19 nt, Homo sapiens
  misc_RNA (1)...(19): siRNA sense strand
aaacuggauuacagagaua

SEQ ID NO: 768515 - RNA, 19 nt, Homo sapiens
  misc_RNA (1)...(19): siRNA sense strand
gaacagagaaggcugaaaa

SEQ ID NO: 768516 - RNA, 19 nt, Homo sapiens
  misc_RNA (1)...(19): siRNA sense strand
gguaauaaagcuucaauca

SEQ ID NO: 768517 - RNA, 19 nt, Homo sapiens
  misc_RNA (1)...(19): siRNA sense strand
ccacagagaaugaauguuc

SEQ ID NO: 768518 - RNA, 19 nt, Homo sapiens
  misc_RNA (1)...(19): siRNA sense strand
gagaagaaaugagggcaau

SEQ ID NO: 768519 - RNA, 19 nt, Homo sapiens
  misc_RNA (1)...(19): siRNA sense strand
gaacacagaucaagauuag

SEQ ID NO: 768520 - RNA, 19 nt, Homo sapiens
  misc_RNA (1)...(19): siRNA sense strand
ggaaggagccuaugaaaga

SEQ ID NO: 768521 - RNA, 19 nt, Homo sapiens
  misc_RNA (1)...(19): siRNA sense strand
gaagagaccuauggugaaa

SEQ ID NO: 768522 - RNA, 19 nt, Homo sapiens
  misc_RNA (1)...(19): siRNA sense strand
gcaccaagaugaagcagaa

SEQ ID NO: 768523 - RNA, 19 nt, Homo sapiens
  misc_RNA (1)...(19): siRNA sense strand
aaagggaacuggagcauaa

SEQ ID NO: 768524 - RNA, 19 nt, Homo sapiens
  misc_RNA (1)...(19): siRNA sense strand
gaaagcacaccaagacaua

SEQ ID NO: 768525 - RNA, 19 nt, Homo sapiens
  misc_RNA (1)...(19): siRNA sense strand
gaagagaauagacaacuaa

SEQ ID NO: 768526 - RNA, 19 nt, Homo sapiens
  misc_RNA (1)...(19): siRNA sense strand
ggaggugucucgaaauaau

SEQ ID NO: 768527 - RNA, 19 nt, Homo sapiens
  misc_RNA (1)...(19): siRNA sense strand
gcagaaccaugaagcaguu

SEQ ID NO: 768528 - RNA, 19 nt, Homo sapiens
  misc_RNA (1)...(19): siRNA sense strand
gcaacagcauaagaauuua

SEQ ID NO: 768529 - RNA, 19 nt, Homo sapiens
  misc_RNA (1)...(19): siRNA sense strand
ucgaagagcugaaauguag

SEQ ID NO: 768530 - RNA, 19 nt, Homo sapiens
  misc_RNA (1)...(19): siRNA sense strand
caggaggugucucgaaaua

SEQ ID NO: 768531 - RNA, 19 nt, Homo sapiens
  misc_RNA (1)...(19): siRNA sense strand
gcugagaaaucacaucgaa

SEQ ID NO: 768532 - RNA, 19 nt, Homo sapiens
  misc_RNA (1)...(19): siRNA sense strand
gagaauagacaacuaagga

SEQ ID NO: 768533 - RNA, 19 nt, Homo sapiens
  misc_RNA (1)...(19): siRNA sense strand
ggaggacaauguugaugaa

SEQ ID NO: 768534 - RNA, 19 nt, Homo sapiens
  misc_RNA (1)...(19): siRNA sense strand
agacucaaguugcagaaua

SEQ ID NO: 768535 - RNA, 19 nt, Homo sapiens
  misc_RNA (1)...(19): siRNA sense strand
gcagaugacccuaauaauc

SEQ ID NO: 768536 - RNA, 19 nt, Homo sapiens
  misc_RNA (1)...(19): siRNA sense strand
uaaagaaacagcacaguga

SEQ ID NO: 768537 - RNA, 19 nt, Homo sapiens
  misc_RNA (1)...(19): siRNA sense strand
gcaagagaauacagaagug

SEQ ID NO: 768538 - RNA, 19 nt, Homo sapiens
  misc_RNA (1)...(19): siRNA sense strand
ccaagccaaugaucaaauu

SEQ ID NO: 768539 - RNA, 19 nt, Homo sapiens
  misc_RNA (1)...(19): siRNA sense strand
auacacagcuucaagaugu

SEQ ID NO: 768540 - RNA, 19 nt, Homo sapiens
  misc_RNA (1)...(19): siRNA sense strand
gaauagacaacuaaggaaa

SEQ ID NO: 768541 - RNA, 19 nt, Homo sapiens
  misc_RNA (1)...(19): siRNA sense strand
ugaaagauacucugaauag

SEQ ID NO: 768542 - RNA, 19 nt, Homo sapiens
  misc_RNA (1)...(19): siRNA sense strand
cagcagaugacccuaauaa

SEQ ID NO: 768543 - RNA, 19 nt, Homo sapiens
  misc_RNA (1)...(19): siRNA sense strand
ggaggaacauuuggugaug

SEQ ID NO: 768544 - RNA, 19 nt, Homo sapiens
  misc_RNA (1)...(19): siRNA sense strand
cagaugacccuaauaauca

SEQ ID NO: 768545 - RNA, 19 nt, Homo sapiens
  misc_RNA (1)...(19): siRNA sense strand
uuagagaaauccuugcaaa

SEQ ID NO: 768546 - RNA, 19 nt, Homo sapiens
  misc_RNA (1)...(19): siRNA sense strand
gaagaagccgagcaaguga

SEQ ID NO: 768547 - RNA, 19 nt, Homo sapiens
  misc_RNA (1)...(19): siRNA sense strand
gagacuguauacaauuuga

SEQ ID NO: 768548 - RNA, 19 nt, Homo sapiens
  misc_RNA (1)...(19): siRNA sense strand
gcaagaaguucgagaugac

SEQ ID NO: 768549 - RNA, 19 nt, Homo sapiens
  misc_RNA (1)...(19): siRNA sense strand
uaaguuagaagcacaagaa

SEQ ID NO: 768550 - RNA, 19 nt, Homo sapiens
  misc_RNA (1)...(19): siRNA sense strand
ggaagaagaggaggaagaa

SEQ ID NO: 768551 - RNA, 19 nt, Homo sapiens
  misc_RNA (1)...(19): siRNA sense strand
gaagaaaauuugccagaug

SEQ ID NO: 768552 - RNA, 19 nt, Homo sapiens
  misc_RNA (1)...(19): siRNA sense strand
agacuucaguagaacauuu

SEQ ID NO: 768553 - RNA, 19 nt, Homo sapiens
  misc_RNA (1)...(19): siRNA sense strand
gaaggagauccagguaaua

SEQ ID NO: 768554 - RNA, 19 nt, Homo sapiens
  misc_RNA (1)...(19): siRNA sense strand
agaaggagauccagguaau

SEQ ID NO: 768555 - RNA, 19 nt, Homo sapiens
  misc_RNA (1)...(19): siRNA sense strand
gggcagcuguagaagauau

SEQ ID NO: 768556 - RNA, 19 nt, Homo sapiens
  misc_RNA (1)...(19): siRNA sense strand
ggaagaggaacaucgcaaa

SEQ ID NO: 768557 - RNA, 19 nt, Homo sapiens
  misc_RNA (1)...(19): siRNA sense strand
aagaggagguucaggaaga

SEQ ID NO: 768558 - RNA, 19 nt, Homo sapiens
  misc_RNA (1)...(19): siRNA sense strand
gaaagauacucugaauagg

SEQ ID NO: 768559 - RNA, 19 nt, Homo sapiens
  misc_RNA (1)...(19): siRNA sense strand
agaagagaauagacaacua

SEQ ID NO: 768560 - RNA, 19 nt, Homo sapiens
  misc_RNA (1)...(19): siRNA sense strand
agauuugacugaagagaaa

SEQ ID NO: 768561 - RNA, 19 nt, Homo sapiens
  misc_RNA (1)...(19): siRNA sense strand
gauauaaacccagcagaug

SEQ ID NO: 768562 - RNA, 19 nt, Homo sapiens
  misc_RNA (1)...(19): siRNA sense strand
gcacaccaagacauacaua

SEQ ID NO: 768563 - RNA, 19 nt, Homo sapiens
  misc_RNA (1)...(19): siRNA sense strand
caacugaaagauacucuga

SEQ ID NO: 768564 - RNA, 19 nt, Homo sapiens
  misc_RNA (1)...(19): siRNA sense strand
gcagaaggagauccaggua

SEQ ID NO: 768565 - RNA, 19 nt, Homo sapiens
  misc_RNA (1)...(19): siRNA sense strand
gaagagcagaagacacaaa

SEQ ID NO: 768566 - RNA, 19 nt, Homo sapiens
  misc_RNA (1)...(19): siRNA sense strand
agacauacauacacagcuu

SEQ ID NO: 768567 - RNA, 19 nt, Homo sapiens
  misc_RNA (1)...(19): siRNA sense strand
gaggaaggagccuaugaaa

SEQ ID NO: 768568 - RNA, 19 nt, Homo sapiens
  misc_RNA (1)...(19): siRNA sense strand
ggaggaacacgauccauca

SEQ ID NO: 768569 - RNA, 19 nt, Homo sapiens
  misc_RNA (1)...(19): siRNA sense strand
ccauaaggaggcagaauuu

SEQ ID NO: 768570 - RNA, 19 nt, Homo sapiens
  misc_RNA (1)...(19): siRNA sense strand
gaaggcaagauuccaauag

SEQ ID NO: 768571 - RNA, 19 nt, Homo sapiens
  misc_RNA (1)...(19): siRNA sense strand
ugagaaaucacaucgaaga

SEQ ID NO: 768572 - RNA, 19 nt, Homo sapiens
  misc_RNA (1)...(19): siRNA sense strand
ccaaucacccuaugaggaa

SEQ ID NO: 768573 - RNA, 19 nt, Homo sapiens
  misc_RNA (1)...(19): siRNA sense strand
gcgcgaugcucuacuacga

SEQ ID NO: 768574 - RNA, 19 nt, Homo sapiens
  misc_RNA (1)...(19): siRNA sense strand
guuagaagcacaagaaaca

SEQ ID NO: 768575 - RNA, 19 nt, Homo sapiens
  misc_RNA (1)...(19): siRNA sense strand
gggcugcaguugcugagaa

SEQ ID NO: 768576 - RNA, 19 nt, Homo sapiens
  misc_RNA (1)...(19): siRNA sense strand
gaaggagccuaugaaagag

SEQ ID NO: 768577 - RNA, 19 nt, Homo sapiens
  misc_RNA (1)...(19): siRNA sense strand
gggaacaccaggaagcuuu

SEQ ID NO: 768578 - RNA, 19 nt, Homo sapiens
  misc_RNA (1)...(19): siRNA sense strand
agaagcacaagaaacauua

SEQ ID NO: 768579 - RNA, 19 nt, Homo sapiens
  misc_RNA (1)...(19): siRNA sense strand
gacucaaguugcagaauau

SEQ ID NO: 768580 - RNA, 19 nt, Homo sapiens
  misc_RNA (1)...(19): siRNA sense strand
agaggaacaucgcaaacaa

SEQ ID NO: 768581 - RNA, 19 nt, Homo sapiens
  misc_RNA (1)...(19): siRNA sense strand
gaaacagcacagugacuug

SEQ ID NO: 768582 - RNA, 19 nt, Homo sapiens
  misc_RNA (1)...(19): siRNA sense strand
uagggcagcuguagaagau

SEQ ID NO: 768583 - RNA, 19 nt, Homo sapiens
  misc_RNA (1)...(19): siRNA sense strand
acgaggagcuaaagaaaca

SEQ ID NO: 768584 - RNA, 19 nt, Homo sapiens
  misc_RNA (1)...(19): siRNA sense strand
gaagcacaagaaacauuaa

SEQ ID NO: 768585 - RNA, 19 nt, Homo sapiens
  misc_RNA (1)...(19): siRNA sense strand
gaaagagcagcaugagcaa

SEQ ID NO: 768586 - RNA, 19 nt, Homo sapiens
  misc_RNA (1)...(19): siRNA sense strand
ggaaagcacaccaagacau

SEQ ID NO: 768587 - RNA, 19 nt, Homo sapiens
  misc_RNA (1)...(19): siRNA sense strand
auacagaaguggaggaaca

SEQ ID NO: 768588 - RNA, 19 nt, Homo sapiens
  misc_RNA (1)...(19): siRNA sense strand
gagaggaaggagccuauga

SEQ ID NO: 768589 - RNA, 19 nt, Homo sapiens
  misc_RNA (1)...(19): siRNA sense strand
ucaagcaacagcauaagaa

SEQ ID NO: 768590 - RNA, 19 nt, Homo sapiens
  misc_RNA (1)...(19): siRNA sense strand
gagcagaggaccagggaau

SEQ ID NO: 768591 - RNA, 19 nt, Homo sapiens
  misc_RNA (1)...(19): siRNA sense strand
ugaacacagaucaagauua

SEQ ID NO: 768592 - RNA, 19 nt, Homo sapiens
  misc_RNA (1)...(19): siRNA sense strand
ucaaggugaggaugaauuu

SEQ ID NO: 768593 - RNA, 19 nt, Homo sapiens
  misc_RNA (1)...(19): siRNA sense strand
gagagaagagaauagacaa

SEQ ID NO: 768594 - RNA, 19 nt, Homo sapiens
  misc_RNA (1)...(19): siRNA sense strand
ugaagaagccgagcaagug

SEQ ID NO: 768595 - RNA, 19 nt, Homo sapiens
  misc_RNA (1)...(19): siRNA sense strand
gaggaugaauuugaagaag

SEQ ID NO: 768596 - RNA, 19 nt, Homo sapiens
  misc_RNA (1)...(19): siRNA sense strand
aagauacucugaauaggau

SEQ ID NO: 768597 - RNA, 19 nt, Homo sapiens
  misc_RNA (1)...(19): siRNA sense strand
aaagauacucugaauagga

SEQ ID NO: 768598 - RNA, 19 nt, Homo sapiens
  misc_RNA (1)...(19): siRNA sense strand
agcaacagcauaagaauuu

SEQ ID NO: 768599 - RNA, 19 nt, Homo sapiens
  misc_RNA (1)...(19): siRNA sense strand
ccacaagagugcacuagcu

SEQ ID NO: 768600 - RNA, 19 nt, Homo sapiens
  misc_RNA (1)...(19): siRNA sense strand
gagcaagaaguucgagaug

SEQ ID NO: 768601 - RNA, 19 nt, Homo sapiens
  misc_RNA (1)...(19): siRNA sense strand
gagacaaccagcaccaaga

SEQ ID NO: 768602 - RNA, 19 nt, Homo sapiens
  misc_RNA (1)...(19): siRNA sense strand
gaugcuauggauaaugaua

SEQ ID NO: 768603 - RNA, 19 nt, Homo sapiens
  misc_RNA (1)...(19): siRNA sense strand
ugacccagguggcacauuc

SEQ ID NO: 768604 - RNA, 19 nt, Homo sapiens
  misc_RNA (1)...(19): siRNA sense strand
ccgagaagccgacccagaa

SEQ ID NO: 768605 - RNA, 19 nt, Homo sapiens
  misc_RNA (1)...(19): siRNA sense strand
aggaagauuugacugaaga

SEQ ID NO: 768606 - RNA, 19 nt, Homo sapiens
  misc_RNA (1)...(19): siRNA sense strand
guauacaauuugagagaag

SEQ ID NO: 768607 - RNA, 19 nt, Homo sapiens
  misc_RNA (1)...(19): siRNA sense strand
gaauacagaaguggaggaa

SEQ ID NO: 768608 - RNA, 19 nt, Homo sapiens
  misc_RNA (1)...(19): siRNA sense strand
uaaucaaggugaggaugaa

SEQ ID NO: 768609 - RNA, 19 nt, Homo sapiens
  misc_RNA (1)...(19): siRNA sense strand
gcagauagggcagcuguag

SEQ ID NO: 768610 - RNA, 19 nt, Homo sapiens
  misc_RNA (1)...(19): siRNA sense strand
ggaagaggagcacagaaag

SEQ ID NO: 768611 - RNA, 19 nt, Homo sapiens
  misc_RNA (1)...(19): siRNA sense strand
acugaaagauacucugaau

SEQ ID NO: 768612 - RNA, 19 nt, Homo sapiens
  misc_RNA (1)...(19): siRNA sense strand
cagaaguggaggaacauuu

SEQ ID NO: 768613 - RNA, 19 nt, Homo sapiens
  misc_RNA (1)...(19): siRNA sense strand
cgaaagcagaagcggauuu

SEQ ID NO: 768614 - RNA, 19 nt, Homo sapiens
  misc_RNA (1)...(19): siRNA sense strand
gcagguggcaagagagaug

SEQ ID NO: 768615 - RNA, 19 nt, Homo sapiens
  misc_RNA (1)...(19): siRNA sense strand
caaauuccaaucacccuau

SEQ ID NO: 768616 - RNA, 19 nt, Homo sapiens
  misc_RNA (1)...(19): siRNA sense strand
cacauucuccacaagguua

SEQ ID NO: 768617 - RNA, 19 nt, Homo sapiens
  misc_RNA (1)...(19): siRNA sense strand
gcacauucuccacaagguu

SEQ ID NO: 768618 - RNA, 19 nt, Homo sapiens
  misc_RNA (1)...(19): siRNA sense strand
ggaggaagaagaggaggaa

SEQ ID NO: 768619 - RNA, 19 nt, Homo sapiens
  misc_RNA (1)...(19): siRNA sense strand
gaauaaaguuguuggguau

SEQ ID NO: 768620 - RNA, 19 nt, Homo sapiens
  misc_RNA (1)...(19): siRNA sense strand
auaagaagcugaaguacua

SEQ ID NO: 768621 - RNA, 19 nt, Homo sapiens
  misc_RNA (1)...(19): siRNA sense strand
ggcaggcucuccaauauaa

SEQ ID NO: 768622 - RNA, 19 nt, Homo sapiens
  misc_RNA (1)...(19): siRNA sense strand
ggauaagugugcaaagaaa

SEQ ID NO: 768623 - RNA, 19 nt, Homo sapiens
  misc_RNA (1)...(19): siRNA sense strand
cagauaugcugaaauuuga

SEQ ID NO: 768624 - RNA, 19 nt, Homo sapiens
  misc_RNA (1)...(19): siRNA sense strand
gcagagugcucauuuaaaa

SEQ ID NO: 768625 - RNA, 19 nt, Homo sapiens
  misc_RNA (1)...(19): siRNA sense strand
caacuugucucugaaggaa

SEQ ID NO: 768626 - RNA, 19 nt, Homo sapiens
  misc_RNA (1)...(19): siRNA sense strand
cuauguagaucugauguua

SEQ ID NO: 768627 - RNA, 19 nt, Homo sapiens
  misc_RNA (1)...(19): siRNA sense strand
gggauaagaagcugaagua

SEQ ID NO: 768628 - RNA, 19 nt, Homo sapiens
  misc_RNA (1)...(19): siRNA sense strand
gaaugugccuucagaaacu

SEQ ID NO: 768629 - RNA, 19 nt, Homo sapiens
  misc_RNA (1)...(19): siRNA sense strand
guaauaauacccaaagaga

SEQ ID NO: 768630 - RNA, 19 nt, Homo sapiens
  misc_RNA (1)...(19): siRNA sense strand
cccaucacauccugaauua

SEQ ID NO: 768631 - RNA, 19 nt, Homo sapiens
  misc_RNA (1)...(19): siRNA sense strand
caagggcgaugacgauguu

SEQ ID NO: 768632 - RNA, 19 nt, Homo sapiens
  misc_RNA (1)...(19): siRNA sense strand
caacuugccggacagauuu

SEQ ID NO: 768633 - RNA, 19 nt, Homo sapiens
  misc_RNA (1)...(19): siRNA sense strand
gaaguaauaauacccaaag

SEQ ID NO: 768634 - RNA, 19 nt, Homo sapiens
  misc_RNA (1)...(19): siRNA sense strand
uauuugagaugccgcaauu

SEQ ID NO: 768635 - RNA, 19 nt, Homo sapiens
  misc_RNA (1)...(19): siRNA sense strand
ggacgucgaagaauaaagu

SEQ ID NO: 768636 - RNA, 19 nt, Homo sapiens
  misc_RNA (1)...(19): siRNA sense strand
aauaacaucugcuccuaug

SEQ ID NO: 768637 - RNA, 19 nt, Homo sapiens
  misc_RNA (1)...(19): siRNA sense strand
aagacuuucugcuguauuu

SEQ ID NO: 768638 - RNA, 19 nt, Homo sapiens
  misc_RNA (1)...(19): siRNA sense strand
guugcagagugcucauuua

SEQ ID NO: 768639 - RNA, 19 nt, Homo sapiens
  misc_RNA (1)...(19): siRNA sense strand
cuucauaggugaugugauc

SEQ ID NO: 768640 - RNA, 19 nt, Homo sapiens
  misc_RNA (1)...(19): siRNA sense strand
ggaacuacagagacacuuu

SEQ ID NO: 768641 - RNA, 19 nt, Homo sapiens
  misc_RNA (1)...(19): siRNA sense strand
ugaaggaagugcuguuucu

SEQ ID NO: 768642 - RNA, 19 nt, Homo sapiens
  misc_RNA (1)...(19): siRNA sense strand
gaaccgagagcaagagaag

SEQ ID NO: 768643 - RNA, 19 nt, Homo sapiens
  misc_RNA (1)...(19): siRNA sense strand
gcccugaggcuguaccaua

SEQ ID NO: 768644 - RNA, 19 nt, Homo sapiens
  misc_RNA (1)...(19): siRNA sense strand
gcaauuauucacugcuuau

SEQ ID NO: 768645 - RNA, 19 nt, Homo sapiens
  misc_RNA (1)...(19): siRNA sense strand
gaacuacagagacacuuuc

SEQ ID NO: 768646 - RNA, 19 nt, Homo sapiens
  misc_RNA (1)...(19): siRNA sense strand
cacaaaggcuucaggacau

SEQ ID NO: 768647 - RNA, 19 nt, Homo sapiens
  misc_RNA (1)...(19): siRNA sense strand
gagacacuuucuucaacuu

SEQ ID NO: 768648 - RNA, 19 nt, Homo sapiens
  misc_RNA (1)...(19): siRNA sense strand
gggcaggcucuccaauaua

SEQ ID NO: 768649 - RNA, 19 nt, Homo sapiens
  misc_RNA (1)...(19): siRNA sense strand
gaaguacuacaucccagaa

SEQ ID NO: 768650 - RNA, 19 nt, Homo sapiens
  misc_RNA (1)...(19): siRNA sense strand
gaugauggcaaaugucuuc

SEQ ID NO: 768651 - RNA, 19 nt, Homo sapiens
  misc_RNA (1)...(19): siRNA sense strand
cuacagagacacuuucuuc

SEQ ID NO: 768652 - RNA, 19 nt, Homo sapiens
  misc_RNA (1)...(19): siRNA sense strand
uaagccaucugaacuacug

SEQ ID NO: 768653 - RNA, 19 nt, Homo sapiens
  misc_RNA (1)...(19): siRNA sense strand
ccacaaugcuggaccucau

SEQ ID NO: 768654 - RNA, 19 nt, Homo sapiens
  misc_RNA (1)...(19): siRNA sense strand
cauuugauaucgaggagaa

SEQ ID NO: 768655 - RNA, 19 nt, Homo sapiens
  misc_RNA (1)...(19): siRNA sense strand
ggaaguaauaauacccaaa

SEQ ID NO: 768656 - RNA, 19 nt, Homo sapiens
  misc_RNA (1)...(19): siRNA sense strand
uagaaaaccucaagagaug

SEQ ID NO: 768657 - RNA, 19 nt, Homo sapiens
  misc_RNA (1)...(19): siRNA sense strand
gcgggcaggcucuccaaua

SEQ ID NO: 768658 - RNA, 19 nt, Homo sapiens
  misc_RNA (1)...(19): siRNA sense strand
ggaaugugccuucagaaac

SEQ ID NO: 768659 - RNA, 19 nt, Homo sapiens
  misc_RNA (1)...(19): siRNA sense strand
cagagacacuuucuucaac

SEQ ID NO: 768660 - RNA, 19 nt, Homo sapiens
  misc_RNA (1)...(19): siRNA sense strand
uguuggacgucgaagaaua

SEQ ID NO: 768661 - RNA, 19 nt, Homo sapiens
  misc_RNA (1)...(19): siRNA sense strand
cgggcaggcucuccaauau

SEQ ID NO: 768662 - RNA, 19 nt, Homo sapiens
  misc_RNA (1)...(19): siRNA sense strand
ugagaugccgcaauuauuc

SEQ ID NO: 768663 - RNA, 19 nt, Homo sapiens
  misc_RNA (1)...(19): siRNA sense strand
gaccucaucgggauaagaa

SEQ ID NO: 768664 - RNA, 19 nt, Homo sapiens
  misc_RNA (1)...(19): siRNA sense strand
caaaagcaguagccaagaa

SEQ ID NO: 768665 - RNA, 19 nt, Homo sapiens
  misc_RNA (1)...(19): siRNA sense strand
ccggauaagugugcaaaga

SEQ ID NO: 768666 - RNA, 19 nt, Homo sapiens
  misc_RNA (1)...(19): siRNA sense strand
guacuacaucccagaaguu

SEQ ID NO: 768667 - RNA, 19 nt, Homo sapiens
  misc_RNA (1)...(19): siRNA sense strand
cauccugaauuacuugaau

SEQ ID NO: 768668 - RNA, 19 nt, Homo sapiens
  misc_RNA (1)...(19): siRNA sense strand
uagaucagccggauaagug

SEQ ID NO: 768669 - RNA, 19 nt, Homo sapiens
  misc_RNA (1)...(19): siRNA sense strand
gauaagaagcugaaguacu

SEQ ID NO: 768670 - RNA, 19 nt, Homo sapiens
  misc_RNA (1)...(19): siRNA sense strand
cgcaauuauucacugcuua

SEQ ID NO: 768671 - RNA, 19 nt, Homo sapiens
  misc_RNA (1)...(19): siRNA sense strand
gaugacguuuauacuggaa

SEQ ID NO: 768672 - RNA, 19 nt, Homo sapiens
  misc_RNA (1)...(19): siRNA sense strand
gaccaaagccaaagaucuc

SEQ ID NO: 768673 - RNA, 19 nt, Homo sapiens
  misc_RNA (1)...(19): siRNA sense strand
ugagaagcaccaagacauu

SEQ ID NO: 768674 - RNA, 19 nt, Homo sapiens
  misc_RNA (1)...(19): siRNA sense strand
guuggacgucgaagaauaa

SEQ ID NO: 768675 - RNA, 19 nt, Homo sapiens
  misc_RNA (1)...(19): siRNA sense strand
cuacaucccagaaguuguu

SEQ ID NO: 768676 - RNA, 19 nt, Homo sapiens
  misc_RNA (1)...(19): siRNA sense strand
ucuuguugcuggcgauuaa

SEQ ID NO: 768677 - RNA, 19 nt, Homo sapiens
  misc_RNA (1)...(19): siRNA sense strand
acaaaggcuucaggacauu

SEQ ID NO: 768678 - RNA, 19 nt, Homo sapiens
  misc_RNA (1)...(19): siRNA sense strand
gagaagcaccaagacauuc

SEQ ID NO: 768679 - RNA, 19 nt, Homo sapiens
  misc_RNA (1)...(19): siRNA sense strand
cgucggugguuacggguuu

SEQ ID NO: 768680 - RNA, 19 nt, Homo sapiens
  misc_RNA (1)...(19): siRNA sense strand
gacacuuucuucaacuugu

SEQ ID NO: 768681 - RNA, 19 nt, Homo sapiens
  misc_RNA (1)...(19): siRNA sense strand
gaaauuugagagugagaag

SEQ ID NO: 768682 - RNA, 19 nt, Homo sapiens
  misc_RNA (1)...(19): siRNA sense strand
ugauugauauuuggucuca

SEQ ID NO: 768683 - RNA, 19 nt, Homo sapiens
  misc_RNA (1)...(19): siRNA sense strand
gcccagacacugaguuugu

SEQ ID NO: 768684 - RNA, 19 nt, Homo sapiens
  misc_RNA (1)...(19): siRNA sense strand
uuucucagguggguaagua

SEQ ID NO: 768685 - RNA, 19 nt, Homo sapiens
  misc_RNA (1)...(19): siRNA sense strand
caauauaagccaucugaac

SEQ ID NO: 768686 - RNA, 19 nt, Homo sapiens
  misc_RNA (1)...(19): siRNA sense strand
gagaugccgcaauuauuca

SEQ ID NO: 768687 - RNA, 19 nt, Homo sapiens
  misc_RNA (1)...(19): siRNA sense strand
guuguuggguauccugaug

SEQ ID NO: 768688 - RNA, 19 nt, Homo sapiens
  misc_RNA (1)...(19): siRNA sense strand
agagaugauugauauuugg

SEQ ID NO: 768689 - RNA, 19 nt, Homo sapiens
  misc_RNA (1)...(19): siRNA sense strand
ugacguuuauacuggaaug

SEQ ID NO: 768690 - RNA, 19 nt, Homo sapiens
  misc_RNA (1)...(19): siRNA sense strand
ggaaaaggggaaguaauaa

SEQ ID NO: 768691 - RNA, 19 nt, Homo sapiens
  misc_RNA (1)...(19): siRNA sense strand
acagagacacuuucuucaa

SEQ ID NO: 768692 - RNA, 19 nt, Homo sapiens
  misc_RNA (1)...(19): siRNA sense strand
gauaugcugaaauuugaga

SEQ ID NO: 768693 - RNA, 19 nt, Homo sapiens
  misc_RNA (1)...(19): siRNA sense strand
caucacauccugaauuacu

SEQ ID NO: 768694 - RNA, 19 nt, Homo sapiens
  misc_RNA (1)...(19): siRNA sense strand
aauaauacccaaagagaag

SEQ ID NO: 768695 - RNA, 19 nt, Homo sapiens
  misc_RNA (1)...(19): siRNA sense strand
gaaaaggggaaguaauaau

SEQ ID NO: 768696 - RNA, 19 nt, Homo sapiens
  misc_RNA (1)...(19): siRNA sense strand
ccggacagauuuaaagacu

SEQ ID NO: 768697 - RNA, 19 nt, Homo sapiens
  misc_RNA (1)...(19): siRNA sense strand
gaaacucggccucguucca

SEQ ID NO: 768698 - RNA, 19 nt, Homo sapiens
  misc_RNA (1)...(19): siRNA sense strand
cggauaagugugcaaagaa

SEQ ID NO: 768699 - RNA, 19 nt, Homo sapiens
  misc_RNA (1)...(19): siRNA sense strand
ccgcaauuauucacugcuu

SEQ ID NO: 768700 - RNA, 19 nt, Homo sapiens
  misc_RNA (1)...(19): siRNA sense strand
uugcagagugcucauuuaa

SEQ ID NO: 768701 - RNA, 19 nt, Homo sapiens
  misc_RNA (1)...(19): siRNA sense strand
aaaauaacaucugcuccua

SEQ ID NO: 768702 - RNA, 19 nt, Homo sapiens
  misc_RNA (1)...(19): siRNA sense strand
uggaaugugccuucagaaa

SEQ ID NO: 768703 - RNA, 19 nt, Homo sapiens
  misc_RNA (1)...(19): siRNA sense strand
cccugaggcuguaccauau

SEQ ID NO: 768704 - RNA, 19 nt, Homo sapiens
  misc_RNA (1)...(19): siRNA sense strand
gaagcugaaguacuacauc

SEQ ID NO: 768705 - RNA, 19 nt, Homo sapiens
  misc_RNA (1)...(19): siRNA sense strand
gucgaagaauaaaguuguu

SEQ ID NO: 768706 - RNA, 19 nt, Homo sapiens
  misc_RNA (1)...(19): siRNA sense strand
uggaaaaggggaaguaaua

SEQ ID NO: 768707 - RNA, 19 nt, Homo sapiens
  misc_RNA (1)...(19): siRNA sense strand
uauaagccaucugaacuac

SEQ ID NO: 768708 - RNA, 19 nt, Homo sapiens
  misc_RNA (1)...(19): siRNA sense strand
gcuccuauguagaucugau

SEQ ID NO: 768709 - RNA, 19 nt, Homo sapiens
  misc_RNA (1)...(19): siRNA sense strand
cggccucguuccagagaaa

SEQ ID NO: 768710 - RNA, 19 nt, Homo sapiens
  misc_RNA (1)...(19): siRNA sense strand
cccagaaguuguuuacucu

SEQ ID NO: 768711 - RNA, 19 nt, Homo sapiens
  misc_RNA (1)...(19): siRNA sense strand
acaacuugccggacagauu

SEQ ID NO: 768712 - RNA, 19 nt, Homo sapiens
  misc_RNA (1)...(19): siRNA sense strand
guagaaaaccucaagagau

SEQ ID NO: 768713 - RNA, 19 nt, Homo sapiens
  misc_RNA (1)...(19): siRNA sense strand
guagaucugauguuaguac

SEQ ID NO: 768714 - RNA, 19 nt, Homo sapiens
  misc_RNA (1)...(19): siRNA sense strand
caaaggcuucaggacauuu

SEQ ID NO: 768715 - RNA, 19 nt, Homo sapiens
  misc_RNA (1)...(19): siRNA sense strand
ucagaaacucggccucguu

SEQ ID NO: 768716 - RNA, 19 nt, Homo sapiens
  misc_RNA (1)...(19): siRNA sense strand
acuggaaugugccuucaga

SEQ ID NO: 768717 - RNA, 19 nt, Homo sapiens
  misc_RNA (1)...(19): siRNA sense strand
ucccagaaguuguuuacuc

SEQ ID NO: 768718 - RNA, 19 nt, Homo sapiens
  misc_RNA (1)...(19): siRNA sense strand
auucacugcuuauagauca

SEQ ID NO: 768719 - RNA, 19 nt, Homo sapiens
  misc_RNA (1)...(19): siRNA sense strand
gaauaaaguuguuggguau

SEQ ID NO: 768720 - RNA, 19 nt, Homo sapiens
  misc_RNA (1)...(19): siRNA sense strand
auaagaagcugaaguacua

SEQ ID NO: 768721 - RNA, 19 nt, Homo sapiens
  misc_RNA (1)...(19): siRNA sense strand
ggcaggcucuccaauauaa

SEQ ID NO: 768722 - RNA, 19 nt, Homo sapiens
  misc_RNA (1)...(19): siRNA sense strand
ggauaagugugcaaagaaa

SEQ ID NO: 768723 - RNA, 19 nt, Homo sapiens
  misc_RNA (1)...(19): siRNA sense strand
cagauaugcugaaauuuga

SEQ ID NO: 768724 - RNA, 19 nt, Homo sapiens
  misc_RNA (1)...(19): siRNA sense strand
gcagagugcucauuuaaaa

SEQ ID NO: 768725 - RNA, 19 nt, Homo sapiens
  misc_RNA (1)...(19): siRNA sense strand
caacuugucucugaaggaa

SEQ ID NO: 768726 - RNA, 19 nt, Homo sapiens
  misc_RNA (1)...(19): siRNA sense strand
cuauguagaucugauguua

SEQ ID NO: 768727 - RNA, 19 nt, Homo sapiens
  misc_RNA (1)...(19): siRNA sense strand
gggauaagaagcugaagua

SEQ ID NO: 768728 - RNA, 19 nt, Homo sapiens
  misc_RNA (1)...(19): siRNA sense strand
gaaugugccuucagaaacu

SEQ ID NO: 768729 - RNA, 19 nt, Homo sapiens
  misc_RNA (1)...(19): siRNA sense strand
guaauaauacccaaagaga

SEQ ID NO: 768730 - RNA, 19 nt, Homo sapiens
  misc_RNA (1)...(19): siRNA sense strand
cccaucacauccugaauua

SEQ ID NO: 768731 - RNA, 19 nt, Homo sapiens
  misc_RNA (1)...(19): siRNA sense strand
caagggcgaugacgauguu

SEQ ID NO: 768732 - RNA, 19 nt, Homo sapiens
  misc_RNA (1)...(19): siRNA sense strand
caacuugccggacagauuu

SEQ ID NO: 768733 - RNA, 19 nt, Homo sapiens
  misc_RNA (1)...(19): siRNA sense strand
gaaguaauaauacccaaag

SEQ ID NO: 768734 - RNA, 19 nt, Homo sapiens
  misc_RNA (1)...(19): siRNA sense strand
uauuugagaugccgcaauu

SEQ ID NO: 768735 - RNA, 19 nt, Homo sapiens
  misc_RNA (1)...(19): siRNA sense strand
ggacgucgaagaauaaagu

SEQ ID NO: 768736 - RNA, 19 nt, Homo sapiens
  misc_RNA (1)...(19): siRNA sense strand
aauaacaucugcuccuaug

SEQ ID NO: 768737 - RNA, 19 nt, Homo sapiens
  misc_RNA (1)...(19): siRNA sense strand
aagacuuucugcuguauuu

SEQ ID NO: 768738 - RNA, 19 nt, Homo sapiens
  misc_RNA (1)...(19): siRNA sense strand
guugcagagugcucauuua

SEQ ID NO: 768739 - RNA, 19 nt, Homo sapiens
  misc_RNA (1)...(19): siRNA sense strand
cuucauaggugaugugauc

SEQ ID NO: 768740 - RNA, 19 nt, Homo sapiens
  misc_RNA (1)...(19): siRNA sense strand
ggaacuacagagacacuuu

SEQ ID NO: 768741 - RNA, 19 nt, Homo sapiens
  misc_RNA (1)...(19): siRNA sense strand
ugaaggaagugcuguuucu

SEQ ID NO: 768742 - RNA, 19 nt, Homo sapiens
  misc_RNA (1)...(19): siRNA sense strand
gaaccgagagcaagagaag

SEQ ID NO: 768743 - RNA, 19 nt, Homo sapiens
  misc_RNA (1)...(19): siRNA sense strand
gcccugaggcuguaccaua

SEQ ID NO: 768744 - RNA, 19 nt, Homo sapiens
  misc_RNA (1)...(19): siRNA sense strand
gcaauuauucacugcuuau

SEQ ID NO: 768745 - RNA, 19 nt, Homo sapiens
  misc_RNA (1)...(19): siRNA sense strand
gaacuacagagacacuuuc

SEQ ID NO: 768746 - RNA, 19 nt, Homo sapiens
  misc_RNA (1)...(19): siRNA sense strand
cacaaaggcuucaggacau

SEQ ID NO: 768747 - RNA, 19 nt, Homo sapiens
  misc_RNA (1)...(19): siRNA sense strand
gagacacuuucuucaacuu

SEQ ID NO: 768748 - RNA, 19 nt, Homo sapiens
  misc_RNA (1)...(19): siRNA sense strand
gggcaggcucuccaauaua

SEQ ID NO: 768749 - RNA, 19 nt, Homo sapiens
  misc_RNA (1)...(19): siRNA sense strand
gaaguacuacaucccagaa

SEQ ID NO: 768750 - RNA, 19 nt, Homo sapiens
  misc_RNA (1)...(19): siRNA sense strand
gaugauggcaaaugucuuc

SEQ ID NO: 768751 - RNA, 19 nt, Homo sapiens
  misc_RNA (1)...(19): siRNA sense strand
cuacagagacacuuucuuc

SEQ ID NO: 768752 - RNA, 19 nt, Homo sapiens
  misc_RNA (1)...(19): siRNA sense strand
uaagccaucugaacuacug

SEQ ID NO: 768753 - RNA, 19 nt, Homo sapiens
  misc_RNA (1)...(19): siRNA sense strand
ccacaaugcuggaccucau

SEQ ID NO: 768754 - RNA, 19 nt, Homo sapiens
  misc_RNA (1)...(19): siRNA sense strand
cauuugauaucgaggagaa

SEQ ID NO: 768755 - RNA, 19 nt, Homo sapiens
  misc_RNA (1)...(19): siRNA sense strand
ggaaguaauaauacccaaa

SEQ ID NO: 768756 - RNA, 19 nt, Homo sapiens
  misc_RNA (1)...(19): siRNA sense strand
uagaaaaccucaagagaug

SEQ ID NO: 768757 - RNA, 19 nt, Homo sapiens
  misc_RNA (1)...(19): siRNA sense strand
gcgggcaggcucuccaaua

SEQ ID NO: 768758 - RNA, 19 nt, Homo sapiens
  misc_RNA (1)...(19): siRNA sense strand
ggaaugugccuucagaaac

SEQ ID NO: 768759 - RNA, 19 nt, Homo sapiens
  misc_RNA (1)...(19): siRNA sense strand
cagagacacuuucuucaac

SEQ ID NO: 768760 - RNA, 19 nt, Homo sapiens
  misc_RNA (1)...(19): siRNA sense strand
uguuggacgucgaagaaua

SEQ ID NO: 768761 - RNA, 19 nt, Homo sapiens
  misc_RNA (1)...(19): siRNA sense strand
cgggcaggcucuccaauau

SEQ ID NO: 768762 - RNA, 19 nt, Homo sapiens
  misc_RNA (1)...(19): siRNA sense strand
ugagaugccgcaauuauuc

SEQ ID NO: 768763 - RNA, 19 nt, Homo sapiens
  misc_RNA (1)...(19): siRNA sense strand
gaccucaucgggauaagaa

SEQ ID NO: 768764 - RNA, 19 nt, Homo sapiens
  misc_RNA (1)...(19): siRNA sense strand
caaaagcaguagccaagaa

SEQ ID NO: 768765 - RNA, 19 nt, Homo sapiens
  misc_RNA (1)...(19): siRNA sense strand
ccggauaagugugcaaaga

SEQ ID NO: 768766 - RNA, 19 nt, Homo sapiens
  misc_RNA (1)...(19): siRNA sense strand
guacuacaucccagaaguu

SEQ ID NO: 768767 - RNA, 19 nt, Homo sapiens
  misc_RNA (1)...(19): siRNA sense strand
cauccugaauuacuugaau

SEQ ID NO: 768768 - RNA, 19 nt, Homo sapiens
  misc_RNA (1)...(19): siRNA sense strand
uagaucagccggauaagug

SEQ ID NO: 768769 - RNA, 19 nt, Homo sapiens
  misc_RNA (1)...(19): siRNA sense strand
gauaagaagcugaaguacu

SEQ ID NO: 768770 - RNA, 19 nt, Homo sapiens
  misc_RNA (1)...(19): siRNA sense strand
cgcaauuauucacugcuua

SEQ ID NO: 768771 - RNA, 19 nt, Homo sapiens
  misc_RNA (1)...(19): siRNA sense strand
gaugacguuuauacuggaa

SEQ ID NO: 768772 - RNA, 19 nt, Homo sapiens
  misc_RNA (1)...(19): siRNA sense strand
gaccaaagccaaagaucuc

SEQ ID NO: 768773 - RNA, 19 nt, Homo sapiens
  misc_RNA (1)...(19): siRNA sense strand
ugagaagcaccaagacauu

SEQ ID NO: 768774 - RNA, 19 nt, Homo sapiens
  misc_RNA (1)...(19): siRNA sense strand
guuggacgucgaagaauaa

SEQ ID NO: 768775 - RNA, 19 nt, Homo sapiens
  misc_RNA (1)...(19): siRNA sense strand
cuacaucccagaaguuguu

SEQ ID NO: 768776 - RNA, 19 nt, Homo sapiens
  misc_RNA (1)...(19): siRNA sense strand
ucuuguugcuggcgauuaa

SEQ ID NO: 768777 - RNA, 19 nt, Homo sapiens
  misc_RNA (1)...(19): siRNA sense strand
acaaaggcuucaggacauu

SEQ ID NO: 768778 - RNA, 19 nt, Homo sapiens
  misc_RNA (1)...(19): siRNA sense strand
gagaagcaccaagacauuc

SEQ ID NO: 768779 - RNA, 19 nt, Homo sapiens
  misc_RNA (1)...(19): siRNA sense strand
cgucggugguuacggguuu

SEQ ID NO: 768780 - RNA, 19 nt, Homo sapiens
  misc_RNA (1)...(19): siRNA sense strand
gacacuuucuucaacuugu

SEQ ID NO: 768781 - RNA, 19 nt, Homo sapiens
  misc_RNA (1)...(19): siRNA sense strand
gaaauuugagagugagaag

SEQ ID NO: 768782 - RNA, 19 nt, Homo sapiens
  misc_RNA (1)...(19): siRNA sense strand
ugauugauauuuggucuca

SEQ ID NO: 768783 - RNA, 19 nt, Homo sapiens
  misc_RNA (1)...(19): siRNA sense strand
gcccagacacugaguuugu

SEQ ID NO: 768784 - RNA, 19 nt, Homo sapiens
  misc_RNA (1)...(19): siRNA sense strand
uuucucagguggguaagua

SEQ ID NO: 768785 - RNA, 19 nt, Homo sapiens
  misc_RNA (1)...(19): siRNA sense strand
caauauaagccaucugaac

SEQ ID NO: 768786 - RNA, 19 nt, Homo sapiens
  misc_RNA (1)...(19): siRNA sense strand
gagaugccgcaauuauuca

SEQ ID NO: 768787 - RNA, 19 nt, Homo sapiens
  misc_RNA (1)...(19): siRNA sense strand
guuguuggguauccugaug

SEQ ID NO: 768788 - RNA, 19 nt, Homo sapiens
  misc_RNA (1)...(19): siRNA sense strand
agagaugauugauauuugg

SEQ ID NO: 768789 - RNA, 19 nt, Homo sapiens
  misc_RNA (1)...(19): siRNA sense strand
ugacguuuauacuggaaug

SEQ ID NO: 768790 - RNA, 19 nt, Homo sapiens
  misc_RNA (1)...(19): siRNA sense strand
ggaaaaggggaaguaauaa

SEQ ID NO: 768791 - RNA, 19 nt, Homo sapiens
  misc_RNA (1)...(19): siRNA sense strand
acagagacacuuucuucaa

SEQ ID NO: 768792 - RNA, 19 nt, Homo sapiens
  misc_RNA (1)...(19): siRNA sense strand
gauaugcugaaauuugaga

SEQ ID NO: 768793 - RNA, 19 nt, Homo sapiens
  misc_RNA (1)...(19): siRNA sense strand
caucacauccugaauuacu

SEQ ID NO: 768794 - RNA, 19 nt, Homo sapiens
  misc_RNA (1)...(19): siRNA sense strand
aauaauacccaaagagaag

SEQ ID NO: 768795 - RNA, 19 nt, Homo sapiens
  misc_RNA (1)...(19): siRNA sense strand
gaaaaggggaaguaauaau

SEQ ID NO: 768796 - RNA, 19 nt, Homo sapiens
  misc_RNA (1)...(19): siRNA sense strand
ccggacagauuuaaagacu

SEQ ID NO: 768797 - RNA, 19 nt, Homo sapiens
  misc_RNA (1)...(19): siRNA sense strand
gaaacucggccucguucca

SEQ ID NO: 768798 - RNA, 19 nt, Homo sapiens
  misc_RNA (1)...(19): siRNA sense strand
cggauaagugugcaaagaa

SEQ ID NO: 768799 - RNA, 19 nt, Homo sapiens
  misc_RNA (1)...(19): siRNA sense strand
ccgcaauuauucacugcuu

SEQ ID NO: 768800 - RNA, 19 nt, Homo sapiens
  misc_RNA (1)...(19): siRNA sense strand
uugcagagugcucauuuaa

SEQ ID NO: 768801 - RNA, 19 nt, Homo sapiens
  misc_RNA (1)...(19): siRNA sense strand
aaaauaacaucugcuccua

SEQ ID NO: 768802 - RNA, 19 nt, Homo sapiens
  misc_RNA (1)...(19): siRNA sense strand
uggaaugugccuucagaaa

SEQ ID NO: 768803 - RNA, 19 nt, Homo sapiens
  misc_RNA (1)...(19): siRNA sense strand
cccugaggcuguaccauau

SEQ ID NO: 768804 - RNA, 19 nt, Homo sapiens
  misc_RNA (1)...(19): siRNA sense strand
gaagcugaaguacuacauc

SEQ ID NO: 768805 - RNA, 19 nt, Homo sapiens
  misc_RNA (1)...(19): siRNA sense strand
gucgaagaauaaaguuguu

SEQ ID NO: 768806 - RNA, 19 nt, Homo sapiens
  misc_RNA (1)...(19): siRNA sense strand
uggaaaaggggaaguaaua

SEQ ID NO: 768807 - RNA, 19 nt, Homo sapiens
  misc_RNA (1)...(19): siRNA sense strand
uauaagccaucugaacuac

SEQ ID NO: 768808 - RNA, 19 nt, Homo sapiens
  misc_RNA (1)...(19): siRNA sense strand
gcuccuauguagaucugau

SEQ ID NO: 768809 - RNA, 19 nt, Homo sapiens
  misc_RNA (1)...(19): siRNA sense strand
cggccucguuccagagaaa

SEQ ID NO: 768810 - RNA, 19 nt, Homo sapiens
  misc_RNA (1)...(19): siRNA sense strand
cccagaaguuguuuacucu

SEQ ID NO: 768811 - RNA, 19 nt, Homo sapiens
  misc_RNA (1)...(19): siRNA sense strand
acaacuugccggacagauu

SEQ ID NO: 768812 - RNA, 19 nt, Homo sapiens
  misc_RNA (1)...(19): siRNA sense strand
guagaaaaccucaagagau

SEQ ID NO: 768813 - RNA, 19 nt, Homo sapiens
  misc_RNA (1)...(19): siRNA sense strand
guagaucugauguuaguac

SEQ ID NO: 768814 - RNA, 19 nt, Homo sapiens
  misc_RNA (1)...(19): siRNA sense strand
caaaggcuucaggacauuu

SEQ ID NO: 768815 - RNA, 19 nt, Homo sapiens
  misc_RNA (1)...(19): siRNA sense strand
ucagaaacucggccucguu

SEQ ID NO: 768816 - RNA, 19 nt, Homo sapiens
  misc_RNA (1)...(19): siRNA sense strand
acuggaaugugccuucaga

SEQ ID NO: 768817 - RNA, 19 nt, Homo sapiens
  misc_RNA (1)...(19): siRNA sense strand
ucccagaaguuguuuacuc

SEQ ID NO: 768818 - RNA, 19 nt, Homo sapiens
  misc_RNA (1)...(19): siRNA sense strand
auucacugcuuauagauca

SEQ ID NO: 768819 - RNA, 19 nt, Homo sapiens
  misc_RNA (1)...(19): siRNA sense strand
gaauaaaguuguuggguau

SEQ ID NO: 768820 - RNA, 19 nt, Homo sapiens
  misc_RNA (1)...(19): siRNA sense strand
auaagaagcugaaguacua

SEQ ID NO: 768821 - RNA, 19 nt, Homo sapiens
  misc_RNA (1)...(19): siRNA sense strand
ggcaggcucuccaauauaa

SEQ ID NO: 768822 - RNA, 19 nt, Homo sapiens
  misc_RNA (1)...(19): siRNA sense strand
ggauaagugugcaaagaaa

SEQ ID NO: 768823 - RNA, 19 nt, Homo sapiens
  misc_RNA (1)...(19): siRNA sense strand
cagauaugcugaaauuuga

SEQ ID NO: 768824 - RNA, 19 nt, Homo sapiens
  misc_RNA (1)...(19): siRNA sense strand
gcagagugcucauuuaaaa

SEQ ID NO: 768825 - RNA, 19 nt, Homo sapiens
  misc_RNA (1)...(19): siRNA sense strand
caacuugucucugaaggaa

SEQ ID NO: 768826 - RNA, 19 nt, Homo sapiens
  misc_RNA (1)...(19): siRNA sense strand
cuauguagaucugauguua

SEQ ID NO: 768827 - RNA, 19 nt, Homo sapiens
  misc_RNA (1)...(19): siRNA sense strand
gggauaagaagcugaagua

SEQ ID NO: 768828 - RNA, 19 nt, Homo sapiens
  misc_RNA (1)...(19): siRNA sense strand
gaaugugccuucagaaacu

SEQ ID NO: 768829 - RNA, 19 nt, Homo sapiens
  misc_RNA (1)...(19): siRNA sense strand
guaauaauacccaaagaga

SEQ ID NO: 768830 - RNA, 19 nt, Homo sapiens
  misc_RNA (1)...(19): siRNA sense strand
cccaucacauccugaauua

SEQ ID NO: 768831 - RNA, 19 nt, Homo sapiens
  misc_RNA (1)...(19): siRNA sense strand
caagggcgaugacgauguu

SEQ ID NO: 768832 - RNA, 19 nt, Homo sapiens
  misc_RNA (1)...(19): siRNA sense strand
caacuugccggacagauuu

SEQ ID NO: 768833 - RNA, 19 nt, Homo sapiens
  misc_RNA (1)...(19): siRNA sense strand
gaaguaauaauacccaaag

SEQ ID NO: 768834 - RNA, 19 nt, Homo sapiens
  misc_RNA (1)...(19): siRNA sense strand
uauuugagaugccgcaauu

SEQ ID NO: 768835 - RNA, 19 nt, Homo sapiens
  misc_RNA (1)...(19): siRNA sense strand
ggacgucgaagaauaaagu

SEQ ID NO: 768836 - RNA, 19 nt, Homo sapiens
  misc_RNA (1)...(19): siRNA sense strand
aauaacaucugcuccuaug

SEQ ID NO: 768837 - RNA, 19 nt, Homo sapiens
  misc_RNA (1)...(19): siRNA sense strand
aagacuuucugcuguauuu

SEQ ID NO: 768838 - RNA, 19 nt, Homo sapiens
  misc_RNA (1)...(19): siRNA sense strand
guugcagagugcucauuua

SEQ ID NO: 768839 - RNA, 19 nt, Homo sapiens
  misc_RNA (1)...(19): siRNA sense strand
cuucauaggugaugugauc

SEQ ID NO: 768840 - RNA, 19 nt, Homo sapiens
  misc_RNA (1)...(19): siRNA sense strand
ggaacuacagagacacuuu

SEQ ID NO: 768841 - RNA, 19 nt, Homo sapiens
  misc_RNA (1)...(19): siRNA sense strand
ugaaggaagugcuguuucu

SEQ ID NO: 768842 - RNA, 19 nt, Homo sapiens
  misc_RNA (1)...(19): siRNA sense strand
gaaccgagagcaagagaag

SEQ ID NO: 768843 - RNA, 19 nt, Homo sapiens
  misc_RNA (1)...(19): siRNA sense strand
gcccugaggcuguaccaua

SEQ ID NO: 768844 - RNA, 19 nt, Homo sapiens
  misc_RNA (1)...(19): siRNA sense strand
gcaauuauucacugcuuau

SEQ ID NO: 768845 - RNA, 19 nt, Homo sapiens
  misc_RNA (1)...(19): siRNA sense strand
gaacuacagagacacuuuc

SEQ ID NO: 768846 - RNA, 19 nt, Homo sapiens
  misc_RNA (1)...(19): siRNA sense strand
cacaaaggcuucaggacau

SEQ ID NO: 768847 - RNA, 19 nt, Homo sapiens
  misc_RNA (1)...(19): siRNA sense strand
gagacacuuucuucaacuu

SEQ ID NO: 768848 - RNA, 19 nt, Homo sapiens
  misc_RNA (1)...(19): siRNA sense strand
gggcaggcucuccaauaua

SEQ ID NO: 768849 - RNA, 19 nt, Homo sapiens
  misc_RNA (1)...(19): siRNA sense strand
gaaguacuacaucccagaa

SEQ ID NO: 768850 - RNA, 19 nt, Homo sapiens
  misc_RNA (1)...(19): siRNA sense strand
gaugauggcaaaugucuuc

SEQ ID NO: 768851 - RNA, 19 nt, Homo sapiens
  misc_RNA (1)...(19): siRNA sense strand
cuacagagacacuuucuuc

SEQ ID NO: 768852 - RNA, 19 nt, Homo sapiens
  misc_RNA (1)...(19): siRNA sense strand
uaagccaucugaacuacug

SEQ ID NO: 768853 - RNA, 19 nt, Homo sapiens
  misc_RNA (1)...(19): siRNA sense strand
ccacaaugcuggaccucau

SEQ ID NO: 768854 - RNA, 19 nt, Homo sapiens
  misc_RNA (1)...(19): siRNA sense strand
cauuugauaucgaggagaa

SEQ ID NO: 768855 - RNA, 19 nt, Homo sapiens
  misc_RNA (1)...(19): siRNA sense strand
ggaaguaauaauacccaaa

SEQ ID NO: 768856 - RNA, 19 nt, Homo sapiens
  misc_RNA (1)...(19): siRNA sense strand
uagaaaaccucaagagaug

SEQ ID NO: 768857 - RNA, 19 nt, Homo sapiens
  misc_RNA (1)...(19): siRNA sense strand
gcgggcaggcucuccaaua

SEQ ID NO: 768858 - RNA, 19 nt, Homo sapiens
  misc_RNA (1)...(19): siRNA sense strand
ggaaugugccuucagaaac

SEQ ID NO: 768859 - RNA, 19 nt, Homo sapiens
  misc_RNA (1)...(19): siRNA sense strand
cagagacacuuucuucaac

SEQ ID NO: 768860 - RNA, 19 nt, Homo sapiens
  misc_RNA (1)...(19): siRNA sense strand
uguuggacgucgaagaaua

SEQ ID NO: 768861 - RNA, 19 nt, Homo sapiens
  misc_RNA (1)...(19): siRNA sense strand
cgggcaggcucuccaauau

SEQ ID NO: 768862 - RNA, 19 nt, Homo sapiens
  misc_RNA (1)...(19): siRNA sense strand
ugagaugccgcaauuauuc

SEQ ID NO: 768863 - RNA, 19 nt, Homo sapiens
  misc_RNA (1)...(19): siRNA sense strand
gaccucaucgggauaagaa

SEQ ID NO: 768864 - RNA, 19 nt, Homo sapiens
  misc_RNA (1)...(19): siRNA sense strand
caaaagcaguagccaagaa

SEQ ID NO: 768865 - RNA, 19 nt, Homo sapiens
  misc_RNA (1)...(19): siRNA sense strand
ccggauaagugugcaaaga

SEQ ID NO: 768866 - RNA, 19 nt, Homo sapiens
  misc_RNA (1)...(19): siRNA sense strand
guacuacaucccagaaguu

SEQ ID NO: 768867 - RNA, 19 nt, Homo sapiens
  misc_RNA (1)...(19): siRNA sense strand
cauccugaauuacuugaau

SEQ ID NO: 768868 - RNA, 19 nt, Homo sapiens
  misc_RNA (1)...(19): siRNA sense strand
uagaucagccggauaagug

SEQ ID NO: 768869 - RNA, 19 nt, Homo sapiens
  misc_RNA (1)...(19): siRNA sense strand
gauaagaagcugaaguacu

SEQ ID NO: 768870 - RNA, 19 nt, Homo sapiens
  misc_RNA (1)...(19): siRNA sense strand
cgcaauuauucacugcuua

SEQ ID NO: 768871 - RNA, 19 nt, Homo sapiens
  misc_RNA (1)...(19): siRNA sense strand
gaugacguuuauacuggaa

SEQ ID NO: 768872 - RNA, 19 nt, Homo sapiens
  misc_RNA (1)...(19): siRNA sense strand
gaccaaagccaaagaucuc

SEQ ID NO: 768873 - RNA, 19 nt, Homo sapiens
  misc_RNA (1)...(19): siRNA sense strand
ugagaagcaccaagacauu

SEQ ID NO: 768874 - RNA, 19 nt, Homo sapiens
  misc_RNA (1)...(19): siRNA sense strand
guuggacgucgaagaauaa

SEQ ID NO: 768875 - RNA, 19 nt, Homo sapiens
  misc_RNA (1)...(19): siRNA sense strand
cuacaucccagaaguuguu

SEQ ID NO: 768876 - RNA, 19 nt, Homo sapiens
  misc_RNA (1)...(19): siRNA sense strand
ucuuguugcuggcgauuaa

SEQ ID NO: 768877 - RNA, 19 nt, Homo sapiens
  misc_RNA (1)...(19): siRNA sense strand
acaaaggcuucaggacauu

SEQ ID NO: 768878 - RNA, 19 nt, Homo sapiens
  misc_RNA (1)...(19): siRNA sense strand
gagaagcaccaagacauuc

SEQ ID NO: 768879 - RNA, 19 nt, Homo sapiens
  misc_RNA (1)...(19): siRNA sense strand
cgucggugguuacggguuu

SEQ ID NO: 768880 - RNA, 19 nt, Homo sapiens
  misc_RNA (1)...(19): siRNA sense strand
gacacuuucuucaacuugu

SEQ ID NO: 768881 - RNA, 19 nt, Homo sapiens
  misc_RNA (1)...(19): siRNA sense strand
gaaauuugagagugagaag

SEQ ID NO: 768882 - RNA, 19 nt, Homo sapiens
  misc_RNA (1)...(19): siRNA sense strand
ugauugauauuuggucuca

SEQ ID NO: 768883 - RNA, 19 nt, Homo sapiens
  misc_RNA (1)...(19): siRNA sense strand
gcccagacacugaguuugu

SEQ ID NO: 768884 - RNA, 19 nt, Homo sapiens
  misc_RNA (1)...(19): siRNA sense strand
uuucucagguggguaagua

SEQ ID NO: 768885 - RNA, 19 nt, Homo sapiens
  misc_RNA (1)...(19): siRNA sense strand
caauauaagccaucugaac

SEQ ID NO: 768886 - RNA, 19 nt, Homo sapiens
  misc_RNA (1)...(19): siRNA sense strand
gagaugccgcaauuauuca

SEQ ID NO: 768887 - RNA, 19 nt, Homo sapiens
  misc_RNA (1)...(19): siRNA sense strand
guuguuggguauccugaug

SEQ ID NO: 768888 - RNA, 19 nt, Homo sapiens
  misc_RNA (1)...(19): siRNA sense strand
agagaugauugauauuugg

SEQ ID NO: 768889 - RNA, 19 nt, Homo sapiens
  misc_RNA (1)...(19): siRNA sense strand
ugacguuuauacuggaaug

SEQ ID NO: 768890 - RNA, 19 nt, Homo sapiens
  misc_RNA (1)...(19): siRNA sense strand
ggaaaaggggaaguaauaa

SEQ ID NO: 768891 - RNA, 19 nt, Homo sapiens
  misc_RNA (1)...(19): siRNA sense strand
acagagacacuuucuucaa

SEQ ID NO: 768892 - RNA, 19 nt, Homo sapiens
  misc_RNA (1)...(19): siRNA sense strand
gauaugcugaaauuugaga

SEQ ID NO: 768893 - RNA, 19 nt, Homo sapiens
  misc_RNA (1)...(19): siRNA sense strand
caucacauccugaauuacu

SEQ ID NO: 768894 - RNA, 19 nt, Homo sapiens
  misc_RNA (1)...(19): siRNA sense strand
aauaauacccaaagagaag

SEQ ID NO: 768895 - RNA, 19 nt, Homo sapiens
  misc_RNA (1)...(19): siRNA sense strand
gaaaaggggaaguaauaau

SEQ ID NO: 768896 - RNA, 19 nt, Homo sapiens
  misc_RNA (1)...(19): siRNA sense strand
ccggacagauuuaaagacu

SEQ ID NO: 768897 - RNA, 19 nt, Homo sapiens
  misc_RNA (1)...(19): siRNA sense strand
gaaacucggccucguucca

SEQ ID NO: 768898 - RNA, 19 nt, Homo sapiens
  misc_RNA (1)...(19): siRNA sense strand
cggauaagugugcaaagaa

SEQ ID NO: 768899 - RNA, 19 nt, Homo sapiens
  misc_RNA (1)...(19): siRNA sense strand
ccgcaauuauucacugcuu

SEQ ID NO: 768900 - RNA, 19 nt, Homo sapiens
  misc_RNA (1)...(19): siRNA sense strand
uugcagagugcucauuuaa

SEQ ID NO: 768901 - RNA, 19 nt, Homo sapiens
  misc_RNA (1)...(19): siRNA sense strand
aaaauaacaucugcuccua

SEQ ID NO: 768902 - RNA, 19 nt, Homo sapiens
  misc_RNA (1)...(19): siRNA sense strand
uggaaugugccuucagaaa

SEQ ID NO: 768903 - RNA, 19 nt, Homo sapiens
  misc_RNA (1)...(19): siRNA sense strand
cccugaggcuguaccauau

SEQ ID NO: 768904 - RNA, 19 nt, Homo sapiens
  misc_RNA (1)...(19): siRNA sense strand
gaagcugaaguacuacauc

SEQ ID NO: 768905 - RNA, 19 nt, Homo sapiens
  misc_RNA (1)...(19): siRNA sense strand
gucgaagaauaaaguuguu

SEQ ID NO: 768906 - RNA, 19 nt, Homo sapiens
  misc_RNA (1)...(19): siRNA sense strand
uggaaaaggggaaguaaua

SEQ ID NO: 768907 - RNA, 19 nt, Homo sapiens
  misc_RNA (1)...(19): siRNA sense strand
uauaagccaucugaacuac

SEQ ID NO: 768908 - RNA, 19 nt, Homo sapiens
  misc_RNA (1)...(19): siRNA sense strand
gcuccuauguagaucugau

SEQ ID NO: 768909 - RNA, 19 nt, Homo sapiens
  misc_RNA (1)...(19): siRNA sense strand
cggccucguuccagagaaa

SEQ ID NO: 768910 - RNA, 19 nt, Homo sapiens
  misc_RNA (1)...(19): siRNA sense strand
cccagaaguuguuuacucu

SEQ ID NO: 768911 - RNA, 19 nt, Homo sapiens
  misc_RNA (1)...(19): siRNA sense strand
acaacuugccggacagauu

SEQ ID NO: 768912 - RNA, 19 nt, Homo sapiens
  misc_RNA (1)...(19): siRNA sense strand
guagaaaaccucaagagau

SEQ ID NO: 768913 - RNA, 19 nt, Homo sapiens
  misc_RNA (1)...(19): siRNA sense strand
guagaucugauguuaguac

SEQ ID NO: 768914 - RNA, 19 nt, Homo sapiens
  misc_RNA (1)...(19): siRNA sense strand
caaaggcuucaggacauuu

SEQ ID NO: 768915 - RNA, 19 nt, Homo sapiens
  misc_RNA (1)...(19): siRNA sense strand
ucagaaacucggccucguu

SEQ ID NO: 768916 - RNA, 19 nt, Homo sapiens
  misc_RNA (1)...(19): siRNA sense strand
acuggaaugugccuucaga

SEQ ID NO: 768917 - RNA, 19 nt, Homo sapiens
  misc_RNA (1)...(19): siRNA sense strand
ucccagaaguuguuuacuc

SEQ ID NO: 768918 - RNA, 19 nt, Homo sapiens
  misc_RNA (1)...(19): siRNA sense strand
auucacugcuuauagauca

SEQ ID NO: 768919 - RNA, 19 nt, Homo sapiens
  misc_RNA (1)...(19): siRNA sense strand
gaauaaaguuguuggguau

SEQ ID NO: 768920 - RNA, 19 nt, Homo sapiens
  misc_RNA (1)...(19): siRNA sense strand
auaagaagcugaaguacua

SEQ ID NO: 768921 - RNA, 19 nt, Homo sapiens
  misc_RNA (1)...(19): siRNA sense strand
ggcaggcucuccaauauaa

SEQ ID NO: 768922 - RNA, 19 nt, Homo sapiens
  misc_RNA (1)...(19): siRNA sense strand
ggauaagugugcaaagaaa

SEQ ID NO: 768923 - RNA, 19 nt, Homo sapiens
  misc_RNA (1)...(19): siRNA sense strand
cagauaugcugaaauuuga

SEQ ID NO: 768924 - RNA, 19 nt, Homo sapiens
  misc_RNA (1)...(19): siRNA sense strand
gcagagugcucauuuaaaa

SEQ ID NO: 768925 - RNA, 19 nt, Homo sapiens
  misc_RNA (1)...(19): siRNA sense strand
caacuugucucugaaggaa

SEQ ID NO: 768926 - RNA, 19 nt, Homo sapiens
  misc_RNA (1)...(19): siRNA sense strand
cuauguagaucugauguua

SEQ ID NO: 768927 - RNA, 19 nt, Homo sapiens
  misc_RNA (1)...(19): siRNA sense strand
gggauaagaagcugaagua

SEQ ID NO: 768928 - RNA, 19 nt, Homo sapiens
  misc_RNA (1)...(19): siRNA sense strand
gaaugugccuucagaaacu

SEQ ID NO: 768929 - RNA, 19 nt, Homo sapiens
  misc_RNA (1)...(19): siRNA sense strand
guaauaauacccaaagaga

SEQ ID NO: 768930 - RNA, 19 nt, Homo sapiens
  misc_RNA (1)...(19): siRNA sense strand
cccaucacauccugaauua

SEQ ID NO: 768931 - RNA, 19 nt, Homo sapiens
  misc_RNA (1)...(19): siRNA sense strand
caagggcgaugacgauguu

SEQ ID NO: 768932 - RNA, 19 nt, Homo sapiens
  misc_RNA (1)...(19): siRNA sense strand
caacuugccggacagauuu

SEQ ID NO: 768933 - RNA, 19 nt, Homo sapiens
  misc_RNA (1)...(19): siRNA sense strand
gaaguaauaauacccaaag

SEQ ID NO: 768934 - RNA, 19 nt, Homo sapiens
  misc_RNA (1)...(19): siRNA sense strand
uauuugagaugccgcaauu

SEQ ID NO: 768935 - RNA, 19 nt, Homo sapiens
  misc_RNA (1)...(19): siRNA sense strand
ggacgucgaagaauaaagu

SEQ ID NO: 768936 - RNA, 19 nt, Homo sapiens
  misc_RNA (1)...(19): siRNA sense strand
aauaacaucugcuccuaug

SEQ ID NO: 768937 - RNA, 19 nt, Homo sapiens
  misc_RNA (1)...(19): siRNA sense strand
aagacuuucugcuguauuu

SEQ ID NO: 768938 - RNA, 19 nt, Homo sapiens
  misc_RNA (1)...(19): siRNA sense strand
guugcagagugcucauuua

SEQ ID NO: 768939 - RNA, 19 nt, Homo sapiens
  misc_RNA (1)...(19): siRNA sense strand
cuucauaggugaugugauc

SEQ ID NO: 768940 - RNA, 19 nt, Homo sapiens
  misc_RNA (1)...(19): siRNA sense strand
ggaacuacagagacacuuu

SEQ ID NO: 768941 - RNA, 19 nt, Homo sapiens
  misc_RNA (1)...(19): siRNA sense strand
ugaaggaagugcuguuucu

SEQ ID NO: 768942 - RNA, 19 nt, Homo sapiens
  misc_RNA (1)...(19): siRNA sense strand
gaaccgagagcaagagaag

SEQ ID NO: 768943 - RNA, 19 nt, Homo sapiens
  misc_RNA (1)...(19): siRNA sense strand
gcccugaggcuguaccaua

SEQ ID NO: 768944 - RNA, 19 nt, Homo sapiens
  misc_RNA (1)...(19): siRNA sense strand
gcaauuauucacugcuuau

SEQ ID NO: 768945 - RNA, 19 nt, Homo sapiens
  misc_RNA (1)...(19): siRNA sense strand
gaacuacagagacacuuuc

SEQ ID NO: 768946 - RNA, 19 nt, Homo sapiens
  misc_RNA (1)...(19): siRNA sense strand
cacaaaggcuucaggacau

SEQ ID NO: 768947 - RNA, 19 nt, Homo sapiens
  misc_RNA (1)...(19): siRNA sense strand
gagacacuuucuucaacuu

SEQ ID NO: 768948 - RNA, 19 nt, Homo sapiens
  misc_RNA (1)...(19): siRNA sense strand
gggcaggcucuccaauaua

SEQ ID NO: 768949 - RNA, 19 nt, Homo sapiens
  misc_RNA (1)...(19): siRNA sense strand
gaaguacuacaucccagaa

SEQ ID NO: 768950 - RNA, 19 nt, Homo sapiens
  misc_RNA (1)...(19): siRNA sense strand
gaugauggcaaaugucuuc

SEQ ID NO: 768951 - RNA, 19 nt, Homo sapiens
  misc_RNA (1)...(19): siRNA sense strand
cuacagagacacuuucuuc

SEQ ID NO: 768952 - RNA, 19 nt, Homo sapiens
  misc_RNA (1)...(19): siRNA sense strand
uaagccaucugaacuacug

SEQ ID NO: 768953 - RNA, 19 nt, Homo sapiens
  misc_RNA (1)...(19): siRNA sense strand
ccacaaugcuggaccucau

SEQ ID NO: 768954 - RNA, 19 nt, Homo sapiens
  misc_RNA (1)...(19): siRNA sense strand
cauuugauaucgaggagaa

SEQ ID NO: 768955 - RNA, 19 nt, Homo sapiens
  misc_RNA (1)...(19): siRNA sense strand
ggaaguaauaauacccaaa

SEQ ID NO: 768956 - RNA, 19 nt, Homo sapiens
  misc_RNA (1)...(19): siRNA sense strand
uagaaaaccucaagagaug

SEQ ID NO: 768957 - RNA, 19 nt, Homo sapiens
  misc_RNA (1)...(19): siRNA sense strand
gcgggcaggcucuccaaua

SEQ ID NO: 768958 - RNA, 19 nt, Homo sapiens
  misc_RNA (1)...(19): siRNA sense strand
ggaaugugccuucagaaac

SEQ ID NO: 768959 - RNA, 19 nt, Homo sapiens
  misc_RNA (1)...(19): siRNA sense strand
cagagacacuuucuucaac

SEQ ID NO: 768960 - RNA, 19 nt, Homo sapiens
  misc_RNA (1)...(19): siRNA sense strand
uguuggacgucgaagaaua

SEQ ID NO: 768961 - RNA, 19 nt, Homo sapiens
  misc_RNA (1)...(19): siRNA sense strand
cgggcaggcucuccaauau

SEQ ID NO: 768962 - RNA, 19 nt, Homo sapiens
  misc_RNA (1)...(19): siRNA sense strand
ugagaugccgcaauuauuc

SEQ ID NO: 768963 - RNA, 19 nt, Homo sapiens
  misc_RNA (1)...(19): siRNA sense strand
gaccucaucgggauaagaa

SEQ ID NO: 768964 - RNA, 19 nt, Homo sapiens
  misc_RNA (1)...(19): siRNA sense strand
caaaagcaguagccaagaa

SEQ ID NO: 768965 - RNA, 19 nt, Homo sapiens
  misc_RNA (1)...(19): siRNA sense strand
ccggauaagugugcaaaga

SEQ ID NO: 768966 - RNA, 19 nt, Homo sapiens
  misc_RNA (1)...(19): siRNA sense strand
guacuacaucccagaaguu

SEQ ID NO: 768967 - RNA, 19 nt, Homo sapiens
  misc_RNA (1)...(19): siRNA sense strand
cauccugaauuacuugaau

SEQ ID NO: 768968 - RNA, 19 nt, Homo sapiens
  misc_RNA (1)...(19): siRNA sense strand
uagaucagccggauaagug

SEQ ID NO: 768969 - RNA, 19 nt, Homo sapiens
  misc_RNA (1)...(19): siRNA sense strand
gauaagaagcugaaguacu

SEQ ID NO: 768970 - RNA, 19 nt, Homo sapiens
  misc_RNA (1)...(19): siRNA sense strand
cgcaauuauucacugcuua

SEQ ID NO: 768971 - RNA, 19 nt, Homo sapiens
  misc_RNA (1)...(19): siRNA sense strand
gaugacguuuauacuggaa

SEQ ID NO: 768972 - RNA, 19 nt, Homo sapiens
  misc_RNA (1)...(19): siRNA sense strand
gaccaaagccaaagaucuc

SEQ ID NO: 768973 - RNA, 19 nt, Homo sapiens
  misc_RNA (1)...(19): siRNA sense strand
ugagaagcaccaagacauu

SEQ ID NO: 768974 - RNA, 19 nt, Homo sapiens
  misc_RNA (1)...(19): siRNA sense strand
guuggacgucgaagaauaa

SEQ ID NO: 768975 - RNA, 19 nt, Homo sapiens
  misc_RNA (1)...(19): siRNA sense strand
cuacaucccagaaguuguu

SEQ ID NO: 768976 - RNA, 19 nt, Homo sapiens
  misc_RNA (1)...(19): siRNA sense strand
ucuuguugcuggcgauuaa

SEQ ID NO: 768977 - RNA, 19 nt, Homo sapiens
  misc_RNA (1)...(19): siRNA sense strand
acaaaggcuucaggacauu

SEQ ID NO: 768978 - RNA, 19 nt, Homo sapiens
  misc_RNA (1)...(19): siRNA sense strand
gagaagcaccaagacauuc

SEQ ID NO: 768979 - RNA, 19 nt, Homo sapiens
  misc_RNA (1)...(19): siRNA sense strand
cgucggugguuacggguuu

SEQ ID NO: 768980 - RNA, 19 nt, Homo sapiens
  misc_RNA (1)...(19): siRNA sense strand
gacacuuucuucaacuugu

SEQ ID NO: 768981 - RNA, 19 nt, Homo sapiens
  misc_RNA (1)...(19): siRNA sense strand
gaaauuugagagugagaag

SEQ ID NO: 768982 - RNA, 19 nt, Homo sapiens
  misc_RNA (1)...(19): siRNA sense strand
ugauugauauuuggucuca

SEQ ID NO: 768983 - RNA, 19 nt, Homo sapiens
  misc_RNA (1)...(19): siRNA sense strand
gcccagacacugaguuugu

SEQ ID NO: 768984 - RNA, 19 nt, Homo sapiens
  misc_RNA (1)...(19): siRNA sense strand
uuucucagguggguaagua

SEQ ID NO: 768985 - RNA, 19 nt, Homo sapiens
  misc_RNA (1)...(19): siRNA sense strand
caauauaagccaucugaac

SEQ ID NO: 768986 - RNA, 19 nt, Homo sapiens
  misc_RNA (1)...(19): siRNA sense strand
gagaugccgcaauuauuca

SEQ ID NO: 768987 - RNA, 19 nt, Homo sapiens
  misc_RNA (1)...(19): siRNA sense strand
guuguuggguauccugaug

SEQ ID NO: 768988 - RNA, 19 nt, Homo sapiens
  misc_RNA (1)...(19): siRNA sense strand
agagaugauugauauuugg

SEQ ID NO: 768989 - RNA, 19 nt, Homo sapiens
  misc_RNA (1)...(19): siRNA sense strand
ugacguuuauacuggaaug

SEQ ID NO: 768990 - RNA, 19 nt, Homo sapiens
  misc_RNA (1)...(19): siRNA sense strand
ggaaaaggggaaguaauaa

SEQ ID NO: 768991 - RNA, 19 nt, Homo sapiens
  misc_RNA (1)...(19): siRNA sense strand
acagagacacuuucuucaa

SEQ ID NO: 768992 - RNA, 19 nt, Homo sapiens
  misc_RNA (1)...(19): siRNA sense strand
gauaugcugaaauuugaga

SEQ ID NO: 768993 - RNA, 19 nt, Homo sapiens
  misc_RNA (1)...(19): siRNA sense strand
caucacauccugaauuacu

SEQ ID NO: 768994 - RNA, 19 nt, Homo sapiens
  misc_RNA (1)...(19): siRNA sense strand
aauaauacccaaagagaag

SEQ ID NO: 768995 - RNA, 19 nt, Homo sapiens
  misc_RNA (1)...(19): siRNA sense strand
gaaaaggggaaguaauaau

SEQ ID NO: 768996 - RNA, 19 nt, Homo sapiens
  misc_RNA (1)...(19): siRNA sense strand
ccggacagauuuaaagacu

SEQ ID NO: 768997 - RNA, 19 nt, Homo sapiens
  misc_RNA (1)...(19): siRNA sense strand
gaaacucggccucguucca

SEQ ID NO: 768998 - RNA, 19 nt, Homo sapiens
  misc_RNA (1)...(19): siRNA sense strand
cggauaagugugcaaagaa

SEQ ID NO: 768999 - RNA, 19 nt, Homo sapiens
  misc_RNA (1)...(19): siRNA sense strand
ccgcaauuauucacugcuu

SEQ ID NO: 769000 - RNA, 19 nt, Homo sapiens
  misc_RNA (1)...(19): siRNA sense strand
uugcagagugcucauuuaa

SEQ ID NO: 769001 - RNA, 19 nt, Homo sapiens
  misc_RNA (1)...(19): siRNA sense strand
aaaauaacaucugcuccua

SEQ ID NO: 769002 - RNA, 19 nt, Homo sapiens
  misc_RNA (1)...(19): siRNA sense strand
uggaaugugccuucagaaa

SEQ ID NO: 769003 - RNA, 19 nt, Homo sapiens
  misc_RNA (1)...(19): siRNA sense strand
cccugaggcuguaccauau

SEQ ID NO: 769004 - RNA, 19 nt, Homo sapiens
  misc_RNA (1)...(19): siRNA sense strand
gaagcugaaguacuacauc

SEQ ID NO: 769005 - RNA, 19 nt, Homo sapiens
  misc_RNA (1)...(19): siRNA sense strand
gucgaagaauaaaguuguu

SEQ ID NO: 769006 - RNA, 19 nt, Homo sapiens
  misc_RNA (1)...(19): siRNA sense strand
uggaaaaggggaaguaaua

SEQ ID NO: 769007 - RNA, 19 nt, Homo sapiens
  misc_RNA (1)...(19): siRNA sense strand
uauaagccaucugaacuac

SEQ ID NO: 769008 - RNA, 19 nt, Homo sapiens
  misc_RNA (1)...(19): siRNA sense strand
gcuccuauguagaucugau

SEQ ID NO: 769009 - RNA, 19 nt, Homo sapiens
  misc_RNA (1)...(19): siRNA sense strand
cggccucguuccagagaaa

SEQ ID NO: 769010 - RNA, 19 nt, Homo sapiens
  misc_RNA (1)...(19): siRNA sense strand
cccagaaguuguuuacucu

SEQ ID NO: 769011 - RNA, 19 nt, Homo sapiens
  misc_RNA (1)...(19): siRNA sense strand
acaacuugccggacagauu

SEQ ID NO: 769012 - RNA, 19 nt, Homo sapiens
  misc_RNA (1)...(19): siRNA sense strand
guagaaaaccucaagagau

SEQ ID NO: 769013 - RNA, 19 nt, Homo sapiens
  misc_RNA (1)...(19): siRNA sense strand
guagaucugauguuaguac

SEQ ID NO: 769014 - RNA, 19 nt, Homo sapiens
  misc_RNA (1)...(19): siRNA sense strand
caaaggcuucaggacauuu

SEQ ID NO: 769015 - RNA, 19 nt, Homo sapiens
  misc_RNA (1)...(19): siRNA sense strand
ucagaaacucggccucguu

SEQ ID NO: 769016 - RNA, 19 nt, Homo sapiens
  misc_RNA (1)...(19): siRNA sense strand
acuggaaugugccuucaga

SEQ ID NO: 769017 - RNA, 19 nt, Homo sapiens
  misc_RNA (1)...(19): siRNA sense strand
ucccagaaguuguuuacuc

SEQ ID NO: 769018 - RNA, 19 nt, Homo sapiens
  misc_RNA (1)...(19): siRNA sense strand
auucacugcuuauagauca

SEQ ID NO: 769019 - RNA, 19 nt, Homo sapiens
  misc_RNA (1)...(19): siRNA sense strand
ggacaaugcuggccuguuc

SEQ ID NO: 769020 - RNA, 19 nt, Homo sapiens
  misc_RNA (1)...(19): siRNA sense strand
gagaagcucauccaauuua

SEQ ID NO: 769021 - RNA, 19 nt, Homo sapiens
  misc_RNA (1)...(19): siRNA sense strand
gaagaagccugggucauug

SEQ ID NO: 769022 - RNA, 19 nt, Homo sapiens
  misc_RNA (1)...(19): siRNA sense strand
uaccaaagauccuggaaua

SEQ ID NO: 769023 - RNA, 19 nt, Homo sapiens
  misc_RNA (1)...(19): siRNA sense strand
ucaaaggucucacgaauuc

SEQ ID NO: 769024 - RNA, 19 nt, Homo sapiens
  misc_RNA (1)...(19): siRNA sense strand
caaagauccuggaauauuc

SEQ ID NO: 769025 - RNA, 19 nt, Homo sapiens
  misc_RNA (1)...(19): siRNA sense strand
ucaagagacuggagaacua

SEQ ID NO: 769026 - RNA, 19 nt, Homo sapiens
  misc_RNA (1)...(19): siRNA sense strand
ggaaauaugcccaacuuau

SEQ ID NO: 769027 - RNA, 19 nt, Homo sapiens
  misc_RNA (1)...(19): siRNA sense strand
ggaagaagccugggucauu

SEQ ID NO: 769028 - RNA, 19 nt, Homo sapiens
  misc_RNA (1)...(19): siRNA sense strand
gagguuacauggucucuug

SEQ ID NO: 769029 - RNA, 19 nt, Homo sapiens
  misc_RNA (1)...(19): siRNA sense strand
acaacaagcucuucaacaa

SEQ ID NO: 769030 - RNA, 19 nt, Homo sapiens
  misc_RNA (1)...(19): siRNA sense strand
ccacugugcugaacuguga

SEQ ID NO: 769031 - RNA, 19 nt, Homo sapiens
  misc_RNA (1)...(19): siRNA sense strand
ggaaggugguagaauuuga

SEQ ID NO: 769032 - RNA, 19 nt, Homo sapiens
  misc_RNA (1)...(19): siRNA sense strand
cagcaaagauagcagagaa

SEQ ID NO: 769033 - RNA, 19 nt, Homo sapiens
  misc_RNA (1)...(19): siRNA sense strand
cauggucucuugcauaauu

SEQ ID NO: 769034 - RNA, 19 nt, Homo sapiens
  misc_RNA (1)...(19): siRNA sense strand
gaaauaugcccaacuuauc

SEQ ID NO: 769035 - RNA, 19 nt, Homo sapiens
  misc_RNA (1)...(19): siRNA sense strand
guccagagccugacaagua

SEQ ID NO: 769036 - RNA, 19 nt, Homo sapiens
  misc_RNA (1)...(19): siRNA sense strand
aaaggaaacuauuggagaa

SEQ ID NO: 769037 - RNA, 19 nt, Homo sapiens
  misc_RNA (1)...(19): siRNA sense strand
ccaaagauccuggaauauu

SEQ ID NO: 769038 - RNA, 19 nt, Homo sapiens
  misc_RNA (1)...(19): siRNA sense strand
ugacugaugcgcagaauaa

SEQ ID NO: 769039 - RNA, 19 nt, Homo sapiens
  misc_RNA (1)...(19): siRNA sense strand
gcaggacacagcaaagaua

SEQ ID NO: 769040 - RNA, 19 nt, Homo sapiens
  misc_RNA (1)...(19): siRNA sense strand
gaaggaaaggaaacuauug

SEQ ID NO: 769041 - RNA, 19 nt, Homo sapiens
  misc_RNA (1)...(19): siRNA sense strand
cgacauaggcgaugacaug

SEQ ID NO: 769042 - RNA, 19 nt, Homo sapiens
  misc_RNA (1)...(19): siRNA sense strand
gaaaaucugugaaaaugga

SEQ ID NO: 769043 - RNA, 19 nt, Homo sapiens
  misc_RNA (1)...(19): siRNA sense strand
ggaagcuccuuuacacaug

SEQ ID NO: 769044 - RNA, 19 nt, Homo sapiens
  misc_RNA (1)...(19): siRNA sense strand
ucagugugcugucuccaua

SEQ ID NO: 769045 - RNA, 19 nt, Homo sapiens
  misc_RNA (1)...(19): siRNA sense strand
uacauggucucuugcauaa

SEQ ID NO: 769046 - RNA, 19 nt, Homo sapiens
  misc_RNA (1)...(19): siRNA sense strand
ggacucugcuuugcccuuu

SEQ ID NO: 769047 - RNA, 19 nt, Homo sapiens
  misc_RNA (1)...(19): siRNA sense strand
ggaaggaaaggaaacuauu

SEQ ID NO: 769048 - RNA, 19 nt, Homo sapiens
  misc_RNA (1)...(19): siRNA sense strand
gagcagcuguuuccuccuu

SEQ ID NO: 769049 - RNA, 19 nt, Homo sapiens
  misc_RNA (1)...(19): siRNA sense strand
gcgcaucgcuggucaucug

SEQ ID NO: 769050 - RNA, 19 nt, Homo sapiens
  misc_RNA (1)...(19): siRNA sense strand
ccacggcccugcacaacaa

SEQ ID NO: 769051 - RNA, 19 nt, Homo sapiens
  misc_RNA (1)...(19): siRNA sense strand
cagcauuucuuccuacuuc

SEQ ID NO: 769052 - RNA, 19 nt, Homo sapiens
  misc_RNA (1)...(19): siRNA sense strand
uggauacacugcauuuauu

SEQ ID NO: 769053 - RNA, 19 nt, Homo sapiens
  misc_RNA (1)...(19): siRNA sense strand
gggccaauauugauuauac

SEQ ID NO: 769054 - RNA, 19 nt, Homo sapiens
  misc_RNA (1)...(19): siRNA sense strand
gacaugguuucaggacuua

SEQ ID NO: 769055 - RNA, 19 nt, Homo sapiens
  misc_RNA (1)...(19): siRNA sense strand
ggaacgggcaugcuucuga

SEQ ID NO: 769056 - RNA, 19 nt, Homo sapiens
  misc_RNA (1)...(19): siRNA sense strand
ggagagcccuguuuucuau

SEQ ID NO: 769057 - RNA, 19 nt, Homo sapiens
  misc_RNA (1)...(19): siRNA sense strand
cauaggcgaugacaugguu

SEQ ID NO: 769058 - RNA, 19 nt, Homo sapiens
  misc_RNA (1)...(19): siRNA sense strand
gcucaugauccaaagcuua

SEQ ID NO: 769059 - RNA, 19 nt, Homo sapiens
  misc_RNA (1)...(19): siRNA sense strand
gcccagaguugcacaagau

SEQ ID NO: 769060 - RNA, 19 nt, Homo sapiens
  misc_RNA (1)...(19): siRNA sense strand
gugaugagguucaagaagu

SEQ ID NO: 769061 - RNA, 19 nt, Homo sapiens
  misc_RNA (1)...(19): siRNA sense strand
aguauaaccuuguucauca

SEQ ID NO: 769062 - RNA, 19 nt, Homo sapiens
  misc_RNA (1)...(19): siRNA sense strand
ugacaagaauggcugugaa

SEQ ID NO: 769063 - RNA, 19 nt, Homo sapiens
  misc_RNA (1)...(19): siRNA sense strand
ugacaugguuucaggacuu

SEQ ID NO: 769064 - RNA, 19 nt, Homo sapiens
  misc_RNA (1)...(19): siRNA sense strand
gguccaagcucucagugau

SEQ ID NO: 769065 - RNA, 19 nt, Homo sapiens
  misc_RNA (1)...(19): siRNA sense strand
ugaccaaccuugugaccuu

SEQ ID NO: 769066 - RNA, 19 nt, Homo sapiens
  misc_RNA (1)...(19): siRNA sense strand
ggagucagcaagagagaaa

SEQ ID NO: 769067 - RNA, 19 nt, Homo sapiens
  misc_RNA (1)...(19): siRNA sense strand
ggugaucgccguccuguug

SEQ ID NO: 769068 - RNA, 19 nt, Homo sapiens
  misc_RNA (1)...(19): siRNA sense strand
gaccagcucuugcccaucu

SEQ ID NO: 769069 - RNA, 19 nt, Homo sapiens
  misc_RNA (1)...(19): siRNA sense strand
guaugaugcugccuugaga

SEQ ID NO: 769070 - RNA, 19 nt, Homo sapiens
  misc_RNA (1)...(19): siRNA sense strand
ggaaacuauuggagaagug

SEQ ID NO: 769071 - RNA, 19 nt, Homo sapiens
  misc_RNA (1)...(19): siRNA sense strand
gaacaagguugauuuucga

SEQ ID NO: 769072 - RNA, 19 nt, Homo sapiens
  misc_RNA (1)...(19): siRNA sense strand
ucaccaaagucacgaggaa

SEQ ID NO: 769073 - RNA, 19 nt, Homo sapiens
  misc_RNA (1)...(19): siRNA sense strand
gggaaaaucugugaaaaug

SEQ ID NO: 769074 - RNA, 19 nt, Homo sapiens
  misc_RNA (1)...(19): siRNA sense strand
gguaagagcagccuguugu

SEQ ID NO: 769075 - RNA, 19 nt, Homo sapiens
  misc_RNA (1)...(19): siRNA sense strand
gaccagcgcauccguguga

SEQ ID NO: 769076 - RNA, 19 nt, Homo sapiens
  misc_RNA (1)...(19): siRNA sense strand
gggagaaaccauuugcaaa

SEQ ID NO: 769077 - RNA, 19 nt, Homo sapiens
  misc_RNA (1)...(19): siRNA sense strand
caaccuagaucccuuugac

SEQ ID NO: 769078 - RNA, 19 nt, Homo sapiens
  misc_RNA (1)...(19): siRNA sense strand
gaaauacagagacaacaca

SEQ ID NO: 769079 - RNA, 19 nt, Homo sapiens
  misc_RNA (1)...(19): siRNA sense strand
caccaucccuccacuguca

SEQ ID NO: 769080 - RNA, 19 nt, Homo sapiens
  misc_RNA (1)...(19): siRNA sense strand
auaacuaccugcuguuguu

SEQ ID NO: 769081 - RNA, 19 nt, Homo sapiens
  misc_RNA (1)...(19): siRNA sense strand
cagagaacaagguugauuu

SEQ ID NO: 769082 - RNA, 19 nt, Homo sapiens
  misc_RNA (1)...(19): siRNA sense strand
ggagacagaggcacaguuc

SEQ ID NO: 769083 - RNA, 19 nt, Homo sapiens
  misc_RNA (1)...(19): siRNA sense strand
ggagaaaccauuugcaaaa

SEQ ID NO: 769084 - RNA, 19 nt, Homo sapiens
  misc_RNA (1)...(19): siRNA sense strand
guacucgggccaauauuga

SEQ ID NO: 769085 - RNA, 19 nt, Homo sapiens
  misc_RNA (1)...(19): siRNA sense strand
gaccuaagaaggaaggaaa

SEQ ID NO: 769086 - RNA, 19 nt, Homo sapiens
  misc_RNA (1)...(19): siRNA sense strand
agucauggcugucaacauc

SEQ ID NO: 769087 - RNA, 19 nt, Homo sapiens
  misc_RNA (1)...(19): siRNA sense strand
gaauaacuaccugcuguug

SEQ ID NO: 769088 - RNA, 19 nt, Homo sapiens
  misc_RNA (1)...(19): siRNA sense strand
uagccggucuccuuuauuc

SEQ ID NO: 769089 - RNA, 19 nt, Homo sapiens
  misc_RNA (1)...(19): siRNA sense strand
gugcugaucgucuucuuaa

SEQ ID NO: 769090 - RNA, 19 nt, Homo sapiens
  misc_RNA (1)...(19): siRNA sense strand
gcagugaugagguucaaga

SEQ ID NO: 769091 - RNA, 19 nt, Homo sapiens
  misc_RNA (1)...(19): siRNA sense strand
ggcaucugcuucugcauug

SEQ ID NO: 769092 - RNA, 19 nt, Homo sapiens
  misc_RNA (1)...(19): siRNA sense strand
ucaggauuaucacaugaaa

SEQ ID NO: 769093 - RNA, 19 nt, Homo sapiens
  misc_RNA (1)...(19): siRNA sense strand
gaggagugcauuaagaaga

SEQ ID NO: 769094 - RNA, 19 nt, Homo sapiens
  misc_RNA (1)...(19): siRNA sense strand
agucaaaggucucacgaau

SEQ ID NO: 769095 - RNA, 19 nt, Homo sapiens
  misc_RNA (1)...(19): siRNA sense strand
uaagaaggaaggaaaggaa

SEQ ID NO: 769096 - RNA, 19 nt, Homo sapiens
  misc_RNA (1)...(19): siRNA sense strand
ggauacacugcauuuauug

SEQ ID NO: 769097 - RNA, 19 nt, Homo sapiens
  misc_RNA (1)...(19): siRNA sense strand
gaucaugaccaaccuugug

SEQ ID NO: 769098 - RNA, 19 nt, Homo sapiens
  misc_RNA (1)...(19): siRNA sense strand
uuacauggucucuugcaua

SEQ ID NO: 769099 - RNA, 19 nt, Homo sapiens
  misc_RNA (1)...(19): siRNA sense strand
agaagcucauccaauuuaa

SEQ ID NO: 769100 - RNA, 19 nt, Homo sapiens
  misc_RNA (1)...(19): siRNA sense strand
gcaaugggaaggugguaga

SEQ ID NO: 769101 - RNA, 19 nt, Homo sapiens
  misc_RNA (1)...(19): siRNA sense strand
uauagccggucuccuuuau

SEQ ID NO: 769102 - RNA, 19 nt, Homo sapiens
  misc_RNA (1)...(19): siRNA sense strand
cacuggagcuggagaggaa

SEQ ID NO: 769103 - RNA, 19 nt, Homo sapiens
  misc_RNA (1)...(19): siRNA sense strand
ugaugagguucaagaaguu

SEQ ID NO: 769104 - RNA, 19 nt, Homo sapiens
  misc_RNA (1)...(19): siRNA sense strand
cuggucaucugcagcauuu

SEQ ID NO: 769105 - RNA, 19 nt, Homo sapiens
  misc_RNA (1)...(19): siRNA sense strand
cggagucgcuuagaugaga

SEQ ID NO: 769106 - RNA, 19 nt, Homo sapiens
  misc_RNA (1)...(19): siRNA sense strand
ggauuggcuuggagacaga

SEQ ID NO: 769107 - RNA, 19 nt, Homo sapiens
  misc_RNA (1)...(19): siRNA sense strand
acagugaguuaaugcagaa

SEQ ID NO: 769108 - RNA, 19 nt, Homo sapiens
  misc_RNA (1)...(19): siRNA sense strand
gagaggaacgggcaugcuu

SEQ ID NO: 769109 - RNA, 19 nt, Homo sapiens
  misc_RNA (1)...(19): siRNA sense strand
gcagcuguuuccuccuuug

SEQ ID NO: 769110 - RNA, 19 nt, Homo sapiens
  misc_RNA (1)...(19): siRNA sense strand
caacacacccaccgugcuu

SEQ ID NO: 769111 - RNA, 19 nt, Homo sapiens
  misc_RNA (1)...(19): siRNA sense strand
cagagaagccaaagguaga

SEQ ID NO: 769112 - RNA, 19 nt, Homo sapiens
  misc_RNA (1)...(19): siRNA sense strand
uccagaagaugcacaagga

SEQ ID NO: 769113 - RNA, 19 nt, Homo sapiens
  misc_RNA (1)...(19): siRNA sense strand
gcugcaguacuuagaauuu

SEQ ID NO: 769114 - RNA, 19 nt, Homo sapiens
  misc_RNA (1)...(19): siRNA sense strand
gggaaauaugcccaacuua

SEQ ID NO: 769115 - RNA, 19 nt, Homo sapiens
  misc_RNA (1)...(19): siRNA sense strand
gcagacaauccucaacugu

SEQ ID NO: 769116 - RNA, 19 nt, Homo sapiens
  misc_RNA (1)...(19): siRNA sense strand
ggacacagcaaagauagca

SEQ ID NO: 769117 - RNA, 19 nt, Homo sapiens
  misc_RNA (1)...(19): siRNA sense strand
cuccauauauccuguuaau

SEQ ID NO: 769118 - RNA, 19 nt, Homo sapiens
  misc_RNA (1)...(19): siRNA sense strand
ggucugcuccucagggauu

SEQ ID NO: 769119 - RNA, 19 nt, Homo sapiens
  misc_RNA (1)...(19): siRNA sense strand
ggacaaugcuggccuguuc

SEQ ID NO: 769120 - RNA, 19 nt, Homo sapiens
  misc_RNA (1)...(19): siRNA sense strand
gagaagcucauccaauuua

SEQ ID NO: 769121 - RNA, 19 nt, Homo sapiens
  misc_RNA (1)...(19): siRNA sense strand
gaagaagccugggucauug

SEQ ID NO: 769122 - RNA, 19 nt, Homo sapiens
  misc_RNA (1)...(19): siRNA sense strand
uaccaaagauccuggaaua

SEQ ID NO: 769123 - RNA, 19 nt, Homo sapiens
  misc_RNA (1)...(19): siRNA sense strand
ucaaaggucucacgaauuc

SEQ ID NO: 769124 - RNA, 19 nt, Homo sapiens
  misc_RNA (1)...(19): siRNA sense strand
caaagauccuggaauauuc

SEQ ID NO: 769125 - RNA, 19 nt, Homo sapiens
  misc_RNA (1)...(19): siRNA sense strand
ucaagagacuggagaacua

SEQ ID NO: 769126 - RNA, 19 nt, Homo sapiens
  misc_RNA (1)...(19): siRNA sense strand
ggaaauaugcccaacuuau

SEQ ID NO: 769127 - RNA, 19 nt, Homo sapiens
  misc_RNA (1)...(19): siRNA sense strand
ggaagaagccugggucauu

SEQ ID NO: 769128 - RNA, 19 nt, Homo sapiens
  misc_RNA (1)...(19): siRNA sense strand
gagguuacauggucucuug

SEQ ID NO: 769129 - RNA, 19 nt, Homo sapiens
  misc_RNA (1)...(19): siRNA sense strand
acaacaagcucuucaacaa

SEQ ID NO: 769130 - RNA, 19 nt, Homo sapiens
  misc_RNA (1)...(19): siRNA sense strand
ccacugugcugaacuguga

SEQ ID NO: 769131 - RNA, 19 nt, Homo sapiens
  misc_RNA (1)...(19): siRNA sense strand
ggaaggugguagaauuuga

SEQ ID NO: 769132 - RNA, 19 nt, Homo sapiens
  misc_RNA (1)...(19): siRNA sense strand
cagcaaagauagcagagaa

SEQ ID NO: 769133 - RNA, 19 nt, Homo sapiens
  misc_RNA (1)...(19): siRNA sense strand
cauggucucuugcauaauu

SEQ ID NO: 769134 - RNA, 19 nt, Homo sapiens
  misc_RNA (1)...(19): siRNA sense strand
gaaauaugcccaacuuauc

SEQ ID NO: 769135 - RNA, 19 nt, Homo sapiens
  misc_RNA (1)...(19): siRNA sense strand
guccagagccugacaagua

SEQ ID NO: 769136 - RNA, 19 nt, Homo sapiens
  misc_RNA (1)...(19): siRNA sense strand
aaaggaaacuauuggagaa

SEQ ID NO: 769137 - RNA, 19 nt, Homo sapiens
  misc_RNA (1)...(19): siRNA sense strand
ccaaagauccuggaauauu

SEQ ID NO: 769138 - RNA, 19 nt, Homo sapiens
  misc_RNA (1)...(19): siRNA sense strand
ugacugaugcgcagaauaa

SEQ ID NO: 769139 - RNA, 19 nt, Homo sapiens
  misc_RNA (1)...(19): siRNA sense strand
gcaggacacagcaaagaua

SEQ ID NO: 769140 - RNA, 19 nt, Homo sapiens
  misc_RNA (1)...(19): siRNA sense strand
gaaggaaaggaaacuauug

SEQ ID NO: 769141 - RNA, 19 nt, Homo sapiens
  misc_RNA (1)...(19): siRNA sense strand
cgacauaggcgaugacaug

SEQ ID NO: 769142 - RNA, 19 nt, Homo sapiens
  misc_RNA (1)...(19): siRNA sense strand
gaaaaucugugaaaaugga

SEQ ID NO: 769143 - RNA, 19 nt, Homo sapiens
  misc_RNA (1)...(19): siRNA sense strand
ggaagcuccuuuacacaug

SEQ ID NO: 769144 - RNA, 19 nt, Homo sapiens
  misc_RNA (1)...(19): siRNA sense strand
ucagugugcugucuccaua

SEQ ID NO: 769145 - RNA, 19 nt, Homo sapiens
  misc_RNA (1)...(19): siRNA sense strand
uacauggucucuugcauaa

SEQ ID NO: 769146 - RNA, 19 nt, Homo sapiens
  misc_RNA (1)...(19): siRNA sense strand
ggacucugcuuugcccuuu

SEQ ID NO: 769147 - RNA, 19 nt, Homo sapiens
  misc_RNA (1)...(19): siRNA sense strand
ggaaggaaaggaaacuauu

SEQ ID NO: 769148 - RNA, 19 nt, Homo sapiens
  misc_RNA (1)...(19): siRNA sense strand
gagcagcuguuuccuccuu

SEQ ID NO: 769149 - RNA, 19 nt, Homo sapiens
  misc_RNA (1)...(19): siRNA sense strand
gcgcaucgcuggucaucug

SEQ ID NO: 769150 - RNA, 19 nt, Homo sapiens
  misc_RNA (1)...(19): siRNA sense strand
ccacggcccugcacaacaa

SEQ ID NO: 769151 - RNA, 19 nt, Homo sapiens
  misc_RNA (1)...(19): siRNA sense strand
cagcauuucuuccuacuuc

SEQ ID NO: 769152 - RNA, 19 nt, Homo sapiens
  misc_RNA (1)...(19): siRNA sense strand
uggauacacugcauuuauu

SEQ ID NO: 769153 - RNA, 19 nt, Homo sapiens
  misc_RNA (1)...(19): siRNA sense strand
gggccaauauugauuauac

SEQ ID NO: 769154 - RNA, 19 nt, Homo sapiens
  misc_RNA (1)...(19): siRNA sense strand
gacaugguuucaggacuua

SEQ ID NO: 769155 - RNA, 19 nt, Homo sapiens
  misc_RNA (1)...(19): siRNA sense strand
ggaacgggcaugcuucuga

SEQ ID NO: 769156 - RNA, 19 nt, Homo sapiens
  misc_RNA (1)...(19): siRNA sense strand
ggagagcccuguuuucuau

SEQ ID NO: 769157 - RNA, 19 nt, Homo sapiens
  misc_RNA (1)...(19): siRNA sense strand
cauaggcgaugacaugguu

SEQ ID NO: 769158 - RNA, 19 nt, Homo sapiens
  misc_RNA (1)...(19): siRNA sense strand
gcucaugauccaaagcuua

SEQ ID NO: 769159 - RNA, 19 nt, Homo sapiens
  misc_RNA (1)...(19): siRNA sense strand
gcccagaguugcacaagau

SEQ ID NO: 769160 - RNA, 19 nt, Homo sapiens
  misc_RNA (1)...(19): siRNA sense strand
gugaugagguucaagaagu

SEQ ID NO: 769161 - RNA, 19 nt, Homo sapiens
  misc_RNA (1)...(19): siRNA sense strand
aguauaaccuuguucauca

SEQ ID NO: 769162 - RNA, 19 nt, Homo sapiens
  misc_RNA (1)...(19): siRNA sense strand
ugacaagaauggcugugaa

SEQ ID NO: 769163 - RNA, 19 nt, Homo sapiens
  misc_RNA (1)...(19): siRNA sense strand
ugacaugguuucaggacuu

SEQ ID NO: 769164 - RNA, 19 nt, Homo sapiens
  misc_RNA (1)...(19): siRNA sense strand
gguccaagcucucagugau

SEQ ID NO: 769165 - RNA, 19 nt, Homo sapiens
  misc_RNA (1)...(19): siRNA sense strand
ugaccaaccuugugaccuu

SEQ ID NO: 769166 - RNA, 19 nt, Homo sapiens
  misc_RNA (1)...(19): siRNA sense strand
ggagucagcaagagagaaa

SEQ ID NO: 769167 - RNA, 19 nt, Homo sapiens
  misc_RNA (1)...(19): siRNA sense strand
ggugaucgccguccuguug

SEQ ID NO: 769168 - RNA, 19 nt, Homo sapiens
  misc_RNA (1)...(19): siRNA sense strand
gaccagcucuugcccaucu

SEQ ID NO: 769169 - RNA, 19 nt, Homo sapiens
  misc_RNA (1)...(19): siRNA sense strand
guaugaugcugccuugaga

SEQ ID NO: 769170 - RNA, 19 nt, Homo sapiens
  misc_RNA (1)...(19): siRNA sense strand
ggaaacuauuggagaagug

SEQ ID NO: 769171 - RNA, 19 nt, Homo sapiens
  misc_RNA (1)...(19): siRNA sense strand
gaacaagguugauuuucga

SEQ ID NO: 769172 - RNA, 19 nt, Homo sapiens
  misc_RNA (1)...(19): siRNA sense strand
ucaccaaagucacgaggaa

SEQ ID NO: 769173 - RNA, 19 nt, Homo sapiens
  misc_RNA (1)...(19): siRNA sense strand
gggaaaaucugugaaaaug

SEQ ID NO: 769174 - RNA, 19 nt, Homo sapiens
  misc_RNA (1)...(19): siRNA sense strand
gguaagagcagccuguugu

SEQ ID NO: 769175 - RNA, 19 nt, Homo sapiens
  misc_RNA (1)...(19): siRNA sense strand
gaccagcgcauccguguga

SEQ ID NO: 769176 - RNA, 19 nt, Homo sapiens
  misc_RNA (1)...(19): siRNA sense strand
gggagaaaccauuugcaaa

SEQ ID NO: 769177 - RNA, 19 nt, Homo sapiens
  misc_RNA (1)...(19): siRNA sense strand
caaccuagaucccuuugac

SEQ ID NO: 769178 - RNA, 19 nt, Homo sapiens
  misc_RNA (1)...(19): siRNA sense strand
gaaauacagagacaacaca

SEQ ID NO: 769179 - RNA, 19 nt, Homo sapiens
  misc_RNA (1)...(19): siRNA sense strand
caccaucccuccacuguca

SEQ ID NO: 769180 - RNA, 19 nt, Homo sapiens
  misc_RNA (1)...(19): siRNA sense strand
auaacuaccugcuguuguu

SEQ ID NO: 769181 - RNA, 19 nt, Homo sapiens
  misc_RNA (1)...(19): siRNA sense strand
cagagaacaagguugauuu

SEQ ID NO: 769182 - RNA, 19 nt, Homo sapiens
  misc_RNA (1)...(19): siRNA sense strand
ggagacagaggcacaguuc

SEQ ID NO: 769183 - RNA, 19 nt, Homo sapiens
  misc_RNA (1)...(19): siRNA sense strand
ggagaaaccauuugcaaaa

SEQ ID NO: 769184 - RNA, 19 nt, Homo sapiens
  misc_RNA (1)...(19): siRNA sense strand
guacucgggccaauauuga

SEQ ID NO: 769185 - RNA, 19 nt, Homo sapiens
  misc_RNA (1)...(19): siRNA sense strand
gaccuaagaaggaaggaaa

SEQ ID NO: 769186 - RNA, 19 nt, Homo sapiens
  misc_RNA (1)...(19): siRNA sense strand
agucauggcugucaacauc

SEQ ID NO: 769187 - RNA, 19 nt, Homo sapiens
  misc_RNA (1)...(19): siRNA sense strand
gaauaacuaccugcuguug

SEQ ID NO: 769188 - RNA, 19 nt, Homo sapiens
  misc_RNA (1)...(19): siRNA sense strand
uagccggucuccuuuauuc

SEQ ID NO: 769189 - RNA, 19 nt, Homo sapiens
  misc_RNA (1)...(19): siRNA sense strand
gugcugaucgucuucuuaa

SEQ ID NO: 769190 - RNA, 19 nt, Homo sapiens
  misc_RNA (1)...(19): siRNA sense strand
gcagugaugagguucaaga

SEQ ID NO: 769191 - RNA, 19 nt, Homo sapiens
  misc_RNA (1)...(19): siRNA sense strand
ggcaucugcuucugcauug

SEQ ID NO: 769192 - RNA, 19 nt, Homo sapiens
  misc_RNA (1)...(19): siRNA sense strand
ucaggauuaucacaugaaa

SEQ ID NO: 769193 - RNA, 19 nt, Homo sapiens
  misc_RNA (1)...(19): siRNA sense strand
gaggagugcauuaagaaga

SEQ ID NO: 769194 - RNA, 19 nt, Homo sapiens
  misc_RNA (1)...(19): siRNA sense strand
agucaaaggucucacgaau

SEQ ID NO: 769195 - RNA, 19 nt, Homo sapiens
  misc_RNA (1)...(19): siRNA sense strand
uaagaaggaaggaaaggaa

SEQ ID NO: 769196 - RNA, 19 nt, Homo sapiens
  misc_RNA (1)...(19): siRNA sense strand
ggauacacugcauuuauug

SEQ ID NO: 769197 - RNA, 19 nt, Homo sapiens
  misc_RNA (1)...(19): siRNA sense strand
gaucaugaccaaccuugug

SEQ ID NO: 769198 - RNA, 19 nt, Homo sapiens
  misc_RNA (1)...(19): siRNA sense strand
uuacauggucucuugcaua

SEQ ID NO: 769199 - RNA, 19 nt, Homo sapiens
  misc_RNA (1)...(19): siRNA sense strand
agaagcucauccaauuuaa

SEQ ID NO: 769200 - RNA, 19 nt, Homo sapiens
  misc_RNA (1)...(19): siRNA sense strand
gcaaugggaaggugguaga

SEQ ID NO: 769201 - RNA, 19 nt, Homo sapiens
  misc_RNA (1)...(19): siRNA sense strand
uauagccggucuccuuuau

SEQ ID NO: 769202 - RNA, 19 nt, Homo sapiens
  misc_RNA (1)...(19): siRNA sense strand
cacuggagcuggagaggaa

SEQ ID NO: 769203 - RNA, 19 nt, Homo sapiens
  misc_RNA (1)...(19): siRNA sense strand
ugaugagguucaagaaguu

SEQ ID NO: 769204 - RNA, 19 nt, Homo sapiens
  misc_RNA (1)...(19): siRNA sense strand
cuggucaucugcagcauuu

SEQ ID NO: 769205 - RNA, 19 nt, Homo sapiens
  misc_RNA (1)...(19): siRNA sense strand
cggagucgcuuagaugaga

SEQ ID NO: 769206 - RNA, 19 nt, Homo sapiens
  misc_RNA (1)...(19): siRNA sense strand
ggauuggcuuggagacaga

SEQ ID NO: 769207 - RNA, 19 nt, Homo sapiens
  misc_RNA (1)...(19): siRNA sense strand
acagugaguuaaugcagaa

SEQ ID NO: 769208 - RNA, 19 nt, Homo sapiens
  misc_RNA (1)...(19): siRNA sense strand
gagaggaacgggcaugcuu

SEQ ID NO: 769209 - RNA, 19 nt, Homo sapiens
  misc_RNA (1)...(19): siRNA sense strand
gcagcuguuuccuccuuug

SEQ ID NO: 769210 - RNA, 19 nt, Homo sapiens
  misc_RNA (1)...(19): siRNA sense strand
caacacacccaccgugcuu

SEQ ID NO: 769211 - RNA, 19 nt, Homo sapiens
  misc_RNA (1)...(19): siRNA sense strand
cagagaagccaaagguaga

SEQ ID NO: 769212 - RNA, 19 nt, Homo sapiens
  misc_RNA (1)...(19): siRNA sense strand
uccagaagaugcacaagga

SEQ ID NO: 769213 - RNA, 19 nt, Homo sapiens
  misc_RNA (1)...(19): siRNA sense strand
gcugcaguacuuagaauuu

SEQ ID NO: 769214 - RNA, 19 nt, Homo sapiens
  misc_RNA (1)...(19): siRNA sense strand
gggaaauaugcccaacuua

SEQ ID NO: 769215 - RNA, 19 nt, Homo sapiens
  misc_RNA (1)...(19): siRNA sense strand
gcagacaauccucaacugu

SEQ ID NO: 769216 - RNA, 19 nt, Homo sapiens
  misc_RNA (1)...(19): siRNA sense strand
ggacacagcaaagauagca

SEQ ID NO: 769217 - RNA, 19 nt, Homo sapiens
  misc_RNA (1)...(19): siRNA sense strand
cuccauauauccuguuaau

SEQ ID NO: 769218 - RNA, 19 nt, Homo sapiens
  misc_RNA (1)...(19): siRNA sense strand
ggucugcuccucagggauu

SEQ ID NO: 769219 - RNA, 19 nt, Homo sapiens
  misc_RNA (1)...(19): siRNA sense strand
ggacaaugcuggccuguuc

SEQ ID NO: 769220 - RNA, 19 nt, Homo sapiens
  misc_RNA (1)...(19): siRNA sense strand
gagaagcucauccaauuua

SEQ ID NO: 769221 - RNA, 19 nt, Homo sapiens
  misc_RNA (1)...(19): siRNA sense strand
gaagaagccugggucauug

SEQ ID NO: 769222 - RNA, 19 nt, Homo sapiens
  misc_RNA (1)...(19): siRNA sense strand
uaccaaagauccuggaaua

SEQ ID NO: 769223 - RNA, 19 nt, Homo sapiens
  misc_RNA (1)...(19): siRNA sense strand
ucaaaggucucacgaauuc

SEQ ID NO: 769224 - RNA, 19 nt, Homo sapiens
  misc_RNA (1)...(19): siRNA sense strand
caaagauccuggaauauuc

SEQ ID NO: 769225 - RNA, 19 nt, Homo sapiens
  misc_RNA (1)...(19): siRNA sense strand
ucaagagacuggagaacua

SEQ ID NO: 769226 - RNA, 19 nt, Homo sapiens
  misc_RNA (1)...(19): siRNA sense strand
ggaaauaugcccaacuuau

SEQ ID NO: 769227 - RNA, 19 nt, Homo sapiens
  misc_RNA (1)...(19): siRNA sense strand
ggaagaagccugggucauu

SEQ ID NO: 769228 - RNA, 19 nt, Homo sapiens
  misc_RNA (1)...(19): siRNA sense strand
gagguuacauggucucuug

SEQ ID NO: 769229 - RNA, 19 nt, Homo sapiens
  misc_RNA (1)...(19): siRNA sense strand
acaacaagcucuucaacaa

SEQ ID NO: 769230 - RNA, 19 nt, Homo sapiens
  misc_RNA (1)...(19): siRNA sense strand
ccacugugcugaacuguga

SEQ ID NO: 769231 - RNA, 19 nt, Homo sapiens
  misc_RNA (1)...(19): siRNA sense strand
ggaaggugguagaauuuga

SEQ ID NO: 769232 - RNA, 19 nt, Homo sapiens
  misc_RNA (1)...(19): siRNA sense strand
cagcaaagauagcagagaa

SEQ ID NO: 769233 - RNA, 19 nt, Homo sapiens
  misc_RNA (1)...(19): siRNA sense strand
cauggucucuugcauaauu

SEQ ID NO: 769234 - RNA, 19 nt, Homo sapiens
  misc_RNA (1)...(19): siRNA sense strand
gaaauaugcccaacuuauc

SEQ ID NO: 769235 - RNA, 19 nt, Homo sapiens
  misc_RNA (1)...(19): siRNA sense strand
guccagagccugacaagua

SEQ ID NO: 769236 - RNA, 19 nt, Homo sapiens
  misc_RNA (1)...(19): siRNA sense strand
aaaggaaacuauuggagaa

SEQ ID NO: 769237 - RNA, 19 nt, Homo sapiens
  misc_RNA (1)...(19): siRNA sense strand
ccaaagauccuggaauauu

SEQ ID NO: 769238 - RNA, 19 nt, Homo sapiens
  misc_RNA (1)...(19): siRNA sense strand
ugacugaugcgcagaauaa

SEQ ID NO: 769239 - RNA, 19 nt, Homo sapiens
  misc_RNA (1)...(19): siRNA sense strand
gcaggacacagcaaagaua

SEQ ID NO: 769240 - RNA, 19 nt, Homo sapiens
  misc_RNA (1)...(19): siRNA sense strand
gaaggaaaggaaacuauug

SEQ ID NO: 769241 - RNA, 19 nt, Homo sapiens
  misc_RNA (1)...(19): siRNA sense strand
cgacauaggcgaugacaug

SEQ ID NO: 769242 - RNA, 19 nt, Homo sapiens
  misc_RNA (1)...(19): siRNA sense strand
gaaaaucugugaaaaugga

SEQ ID NO: 769243 - RNA, 19 nt, Homo sapiens
  misc_RNA (1)...(19): siRNA sense strand
ggaagcuccuuuacacaug

SEQ ID NO: 769244 - RNA, 19 nt, Homo sapiens
  misc_RNA (1)...(19): siRNA sense strand
ucagugugcugucuccaua

SEQ ID NO: 769245 - RNA, 19 nt, Homo sapiens
  misc_RNA (1)...(19): siRNA sense strand
uacauggucucuugcauaa

SEQ ID NO: 769246 - RNA, 19 nt, Homo sapiens
  misc_RNA (1)...(19): siRNA sense strand
ggacucugcuuugcccuuu

SEQ ID NO: 769247 - RNA, 19 nt, Homo sapiens
  misc_RNA (1)...(19): siRNA sense strand
ggaaggaaaggaaacuauu

SEQ ID NO: 769248 - RNA, 19 nt, Homo sapiens
  misc_RNA (1)...(19): siRNA sense strand
gagcagcuguuuccuccuu

SEQ ID NO: 769249 - RNA, 19 nt, Homo sapiens
  misc_RNA (1)...(19): siRNA sense strand
gcgcaucgcuggucaucug

SEQ ID NO: 769250 - RNA, 19 nt, Homo sapiens
  misc_RNA (1)...(19): siRNA sense strand
ccacggcccugcacaacaa

SEQ ID NO: 769251 - RNA, 19 nt, Homo sapiens
  misc_RNA (1)...(19): siRNA sense strand
cagcauuucuuccuacuuc

SEQ ID NO: 769252 - RNA, 19 nt, Homo sapiens
  misc_RNA (1)...(19): siRNA sense strand
uggauacacugcauuuauu

SEQ ID NO: 769253 - RNA, 19 nt, Homo sapiens
  misc_RNA (1)...(19): siRNA sense strand
gggccaauauugauuauac

SEQ ID NO: 769254 - RNA, 19 nt, Homo sapiens
  misc_RNA (1)...(19): siRNA sense strand
gacaugguuucaggacuua

SEQ ID NO: 769255 - RNA, 19 nt, Homo sapiens
  misc_RNA (1)...(19): siRNA sense strand
ggaacgggcaugcuucuga

SEQ ID NO: 769256 - RNA, 19 nt, Homo sapiens
  misc_RNA (1)...(19): siRNA sense strand
ggagagcccuguuuucuau

SEQ ID NO: 769257 - RNA, 19 nt, Homo sapiens
  misc_RNA (1)...(19): siRNA sense strand
cauaggcgaugacaugguu

SEQ ID NO: 769258 - RNA, 19 nt, Homo sapiens
  misc_RNA (1)...(19): siRNA sense strand
gcucaugauccaaagcuua

SEQ ID NO: 769259 - RNA, 19 nt, Homo sapiens
  misc_RNA (1)...(19): siRNA sense strand
gcccagaguugcacaagau

SEQ ID NO: 769260 - RNA, 19 nt, Homo sapiens
  misc_RNA (1)...(19): siRNA sense strand
gugaugagguucaagaagu

SEQ ID NO: 769261 - RNA, 19 nt, Homo sapiens
  misc_RNA (1)...(19): siRNA sense strand
aguauaaccuuguucauca

SEQ ID NO: 769262 - RNA, 19 nt, Homo sapiens
  misc_RNA (1)...(19): siRNA sense strand
ugacaagaauggcugugaa

SEQ ID NO: 769263 - RNA, 19 nt, Homo sapiens
  misc_RNA (1)...(19): siRNA sense strand
ugacaugguuucaggacuu

SEQ ID NO: 769264 - RNA, 19 nt, Homo sapiens
  misc_RNA (1)...(19): siRNA sense strand
gguccaagcucucagugau

SEQ ID NO: 769265 - RNA, 19 nt, Homo sapiens
  misc_RNA (1)...(19): siRNA sense strand
ugaccaaccuugugaccuu

SEQ ID NO: 769266 - RNA, 19 nt, Homo sapiens
  misc_RNA (1)...(19): siRNA sense strand
ggagucagcaagagagaaa

SEQ ID NO: 769267 - RNA, 19 nt, Homo sapiens
  misc_RNA (1)...(19): siRNA sense strand
ggugaucgccguccuguug

SEQ ID NO: 769268 - RNA, 19 nt, Homo sapiens
  misc_RNA (1)...(19): siRNA sense strand
gaccagcucuugcccaucu

SEQ ID NO: 769269 - RNA, 19 nt, Homo sapiens
  misc_RNA (1)...(19): siRNA sense strand
guaugaugcugccuugaga

SEQ ID NO: 769270 - RNA, 19 nt, Homo sapiens
  misc_RNA (1)...(19): siRNA sense strand
ggaaacuauuggagaagug

SEQ ID NO: 769271 - RNA, 19 nt, Homo sapiens
  misc_RNA (1)...(19): siRNA sense strand
gaacaagguugauuuucga

SEQ ID NO: 769272 - RNA, 19 nt, Homo sapiens
  misc_RNA (1)...(19): siRNA sense strand
ucaccaaagucacgaggaa

SEQ ID NO: 769273 - RNA, 19 nt, Homo sapiens
  misc_RNA (1)...(19): siRNA sense strand
gggaaaaucugugaaaaug

SEQ ID NO: 769274 - RNA, 19 nt, Homo sapiens
  misc_RNA (1)...(19): siRNA sense strand
gguaagagcagccuguugu

SEQ ID NO: 769275 - RNA, 19 nt, Homo sapiens
  misc_RNA (1)...(19): siRNA sense strand
gaccagcgcauccguguga

SEQ ID NO: 769276 - RNA, 19 nt, Homo sapiens
  misc_RNA (1)...(19): siRNA sense strand
gggagaaaccauuugcaaa

SEQ ID NO: 769277 - RNA, 19 nt, Homo sapiens
  misc_RNA (1)...(19): siRNA sense strand
caaccuagaucccuuugac

SEQ ID NO: 769278 - RNA, 19 nt, Homo sapiens
  misc_RNA (1)...(19): siRNA sense strand
gaaauacagagacaacaca

SEQ ID NO: 769279 - RNA, 19 nt, Homo sapiens
  misc_RNA (1)...(19): siRNA sense strand
caccaucccuccacuguca

SEQ ID NO: 769280 - RNA, 19 nt, Homo sapiens
  misc_RNA (1)...(19): siRNA sense strand
auaacuaccugcuguuguu

SEQ ID NO: 769281 - RNA, 19 nt, Homo sapiens
  misc_RNA (1)...(19): siRNA sense strand
cagagaacaagguugauuu

SEQ ID NO: 769282 - RNA, 19 nt, Homo sapiens
  misc_RNA (1)...(19): siRNA sense strand
ggagacagaggcacaguuc

SEQ ID NO: 769283 - RNA, 19 nt, Homo sapiens
  misc_RNA (1)...(19): siRNA sense strand
ggagaaaccauuugcaaaa

SEQ ID NO: 769284 - RNA, 19 nt, Homo sapiens
  misc_RNA (1)...(19): siRNA sense strand
guacucgggccaauauuga

SEQ ID NO: 769285 - RNA, 19 nt, Homo sapiens
  misc_RNA (1)...(19): siRNA sense strand
gaccuaagaaggaaggaaa

SEQ ID NO: 769286 - RNA, 19 nt, Homo sapiens
  misc_RNA (1)...(19): siRNA sense strand
agucauggcugucaacauc

SEQ ID NO: 769287 - RNA, 19 nt, Homo sapiens
  misc_RNA (1)...(19): siRNA sense strand
gaauaacuaccugcuguug

SEQ ID NO: 769288 - RNA, 19 nt, Homo sapiens
  misc_RNA (1)...(19): siRNA sense strand
uagccggucuccuuuauuc

SEQ ID NO: 769289 - RNA, 19 nt, Homo sapiens
  misc_RNA (1)...(19): siRNA sense strand
gugcugaucgucuucuuaa

SEQ ID NO: 769290 - RNA, 19 nt, Homo sapiens
  misc_RNA (1)...(19): siRNA sense strand
gcagugaugagguucaaga

SEQ ID NO: 769291 - RNA, 19 nt, Homo sapiens
  misc_RNA (1)...(19): siRNA sense strand
ggcaucugcuucugcauug

SEQ ID NO: 769292 - RNA, 19 nt, Homo sapiens
  misc_RNA (1)...(19): siRNA sense strand
ucaggauuaucacaugaaa

SEQ ID NO: 769293 - RNA, 19 nt, Homo sapiens
  misc_RNA (1)...(19): siRNA sense strand
gaggagugcauuaagaaga

SEQ ID NO: 769294 - RNA, 19 nt, Homo sapiens
  misc_RNA (1)...(19): siRNA sense strand
agucaaaggucucacgaau

SEQ ID NO: 769295 - RNA, 19 nt, Homo sapiens
  misc_RNA (1)...(19): siRNA sense strand
uaagaaggaaggaaaggaa

SEQ ID NO: 769296 - RNA, 19 nt, Homo sapiens
  misc_RNA (1)...(19): siRNA sense strand
ggauacacugcauuuauug

SEQ ID NO: 769297 - RNA, 19 nt, Homo sapiens
  misc_RNA (1)...(19): siRNA sense strand
gaucaugaccaaccuugug

SEQ ID NO: 769298 - RNA, 19 nt, Homo sapiens
  misc_RNA (1)...(19): siRNA sense strand
uuacauggucucuugcaua

SEQ ID NO: 769299 - RNA, 19 nt, Homo sapiens
  misc_RNA (1)...(19): siRNA sense strand
agaagcucauccaauuuaa

SEQ ID NO: 769300 - RNA, 19 nt, Homo sapiens
  misc_RNA (1)...(19): siRNA sense strand
gcaaugggaaggugguaga

SEQ ID NO: 769301 - RNA, 19 nt, Homo sapiens
  misc_RNA (1)...(19): siRNA sense strand
uauagccggucuccuuuau

SEQ ID NO: 769302 - RNA, 19 nt, Homo sapiens
  misc_RNA (1)...(19): siRNA sense strand
cacuggagcuggagaggaa

SEQ ID NO: 769303 - RNA, 19 nt, Homo sapiens
  misc_RNA (1)...(19): siRNA sense strand
ugaugagguucaagaaguu

SEQ ID NO: 769304 - RNA, 19 nt, Homo sapiens
  misc_RNA (1)...(19): siRNA sense strand
cuggucaucugcagcauuu

SEQ ID NO: 769305 - RNA, 19 nt, Homo sapiens
  misc_RNA (1)...(19): siRNA sense strand
cggagucgcuuagaugaga

SEQ ID NO: 769306 - RNA, 19 nt, Homo sapiens
  misc_RNA (1)...(19): siRNA sense strand
ggauuggcuuggagacaga

SEQ ID NO: 769307 - RNA, 19 nt, Homo sapiens
  misc_RNA (1)...(19): siRNA sense strand
acagugaguuaaugcagaa

SEQ ID NO: 769308 - RNA, 19 nt, Homo sapiens
  misc_RNA (1)...(19): siRNA sense strand
gagaggaacgggcaugcuu

SEQ ID NO: 769309 - RNA, 19 nt, Homo sapiens
  misc_RNA (1)...(19): siRNA sense strand
gcagcuguuuccuccuuug

SEQ ID NO: 769310 - RNA, 19 nt, Homo sapiens
  misc_RNA (1)...(19): siRNA sense strand
caacacacccaccgugcuu

SEQ ID NO: 769311 - RNA, 19 nt, Homo sapiens
  misc_RNA (1)...(19): siRNA sense strand
cagagaagccaaagguaga

SEQ ID NO: 769312 - RNA, 19 nt, Homo sapiens
  misc_RNA (1)...(19): siRNA sense strand
uccagaagaugcacaagga

SEQ ID NO: 769313 - RNA, 19 nt, Homo sapiens
  misc_RNA (1)...(19): siRNA sense strand
gcugcaguacuuagaauuu

SEQ ID NO: 769314 - RNA, 19 nt, Homo sapiens
  misc_RNA (1)...(19): siRNA sense strand
gggaaauaugcccaacuua

SEQ ID NO: 769315 - RNA, 19 nt, Homo sapiens
  misc_RNA (1)...(19): siRNA sense strand
gcagacaauccucaacugu

SEQ ID NO: 769316 - RNA, 19 nt, Homo sapiens
  misc_RNA (1)...(19): siRNA sense strand
ggacacagcaaagauagca

SEQ ID NO: 769317 - RNA, 19 nt, Homo sapiens
  misc_RNA (1)...(19): siRNA sense strand
cuccauauauccuguuaau

SEQ ID NO: 769318 - RNA, 19 nt, Homo sapiens
  misc_RNA (1)...(19): siRNA sense strand
ggucugcuccucagggauu

SEQ ID NO: 769319 - RNA, 19 nt, Homo sapiens
  misc_RNA (1)...(19): siRNA sense strand
caagcaagguuacguuaua

SEQ ID NO: 769320 - RNA, 19 nt, Homo sapiens
  misc_RNA (1)...(19): siRNA sense strand
ccauaaagcuaucagaaga

SEQ ID NO: 769321 - RNA, 19 nt, Homo sapiens
  misc_RNA (1)...(19): siRNA sense strand
gcaagguuacguuauauau

SEQ ID NO: 769322 - RNA, 19 nt, Homo sapiens
  misc_RNA (1)...(19): siRNA sense strand
gaagauuccacauacaaau

SEQ ID NO: 769323 - RNA, 19 nt, Homo sapiens
  misc_RNA (1)...(19): siRNA sense strand
ggagaaggcgcaauacucu

SEQ ID NO: 769324 - RNA, 19 nt, Homo sapiens
  misc_RNA (1)...(19): siRNA sense strand
ucauugauccauuccauaa

SEQ ID NO: 769325 - RNA, 19 nt, Homo sapiens
  misc_RNA (1)...(19): siRNA sense strand
ccaaaccaguccacaagca

SEQ ID NO: 769326 - RNA, 19 nt, Homo sapiens
  misc_RNA (1)...(19): siRNA sense strand
gccaagcaagguuacguua

SEQ ID NO: 769327 - RNA, 19 nt, Homo sapiens
  misc_RNA (1)...(19): siRNA sense strand
ggagaugcgugggcugaca

SEQ ID NO: 769328 - RNA, 19 nt, Homo sapiens
  misc_RNA (1)...(19): siRNA sense strand
gcuuggagaaggcgcaaua

SEQ ID NO: 769329 - RNA, 19 nt, Homo sapiens
  misc_RNA (1)...(19): siRNA sense strand
aaagagccguggccuugga

SEQ ID NO: 769330 - RNA, 19 nt, Homo sapiens
  misc_RNA (1)...(19): siRNA sense strand
ggugaagauuccacauaca

SEQ ID NO: 769331 - RNA, 19 nt, Homo sapiens
  misc_RNA (1)...(19): siRNA sense strand
gugaagauuccacauacaa

SEQ ID NO: 769332 - RNA, 19 nt, Homo sapiens
  misc_RNA (1)...(19): siRNA sense strand
gaaaacgcccaguuccuaa

SEQ ID NO: 769333 - RNA, 19 nt, Homo sapiens
  misc_RNA (1)...(19): siRNA sense strand
uuacuggguuggugaagau

SEQ ID NO: 769334 - RNA, 19 nt, Homo sapiens
  misc_RNA (1)...(19): siRNA sense strand
aagcaagguuacguuauau

SEQ ID NO: 769335 - RNA, 19 nt, Homo sapiens
  misc_RNA (1)...(19): siRNA sense strand
ugaagauuccacauacaaa

SEQ ID NO: 769336 - RNA, 19 nt, Homo sapiens
  misc_RNA (1)...(19): siRNA sense strand
aaagcuaucagaagaaauc

SEQ ID NO: 769337 - RNA, 19 nt, Homo sapiens
  misc_RNA (1)...(19): siRNA sense strand
cggcaagccuguccaucau

SEQ ID NO: 769338 - RNA, 19 nt, Homo sapiens
  misc_RNA (1)...(19): siRNA sense strand
acaaggccaagcaagguua

SEQ ID NO: 769339 - RNA, 19 nt, Homo sapiens
  misc_RNA (1)...(19): siRNA sense strand
cauaaagcuaucagaagaa

SEQ ID NO: 769340 - RNA, 19 nt, Homo sapiens
  misc_RNA (1)...(19): siRNA sense strand
gauccauuccauaaagcua

SEQ ID NO: 769341 - RNA, 19 nt, Homo sapiens
  misc_RNA (1)...(19): siRNA sense strand
aagaagcagucugauguca

SEQ ID NO: 769342 - RNA, 19 nt, Homo sapiens
  misc_RNA (1)...(19): siRNA sense strand
ccucauugauccauuccau

SEQ ID NO: 769343 - RNA, 19 nt, Homo sapiens
  misc_RNA (1)...(19): siRNA sense strand
ccaagcaagguuacguuau

SEQ ID NO: 769344 - RNA, 19 nt, Homo sapiens
  misc_RNA (1)...(19): siRNA sense strand
uauccucauugauccauuc

SEQ ID NO: 769345 - RNA, 19 nt, Homo sapiens
  misc_RNA (1)...(19): siRNA sense strand
uggaaagggccacaaguuc

SEQ ID NO: 769346 - RNA, 19 nt, Homo sapiens
  misc_RNA (1)...(19): siRNA sense strand
uggugaagauuccacauac

SEQ ID NO: 769347 - RNA, 19 nt, Homo sapiens
  misc_RNA (1)...(19): siRNA sense strand
ucaccaaaccaguccacaa

SEQ ID NO: 769348 - RNA, 19 nt, Homo sapiens
  misc_RNA (1)...(19): siRNA sense strand
caccaaaccaguccacaag

SEQ ID NO: 769349 - RNA, 19 nt, Homo sapiens
  misc_RNA (1)...(19): siRNA sense strand
cgaaaacgcccaguuccua

SEQ ID NO: 769350 - RNA, 19 nt, Homo sapiens
  misc_RNA (1)...(19): siRNA sense strand
ggccaagcaagguuacguu

SEQ ID NO: 769351 - RNA, 19 nt, Homo sapiens
  misc_RNA (1)...(19): siRNA sense strand
gaagaugccuccucugacu

SEQ ID NO: 769352 - RNA, 19 nt, Homo sapiens
  misc_RNA (1)...(19): siRNA sense strand
gaucucagguccagcagaa

SEQ ID NO: 769353 - RNA, 19 nt, Homo sapiens
  misc_RNA (1)...(19): siRNA sense strand
ggaaaacaauucaucgaaa

SEQ ID NO: 769354 - RNA, 19 nt, Homo sapiens
  misc_RNA (1)...(19): siRNA sense strand
ccucuaagccuaaugaaga

SEQ ID NO: 769355 - RNA, 19 nt, Homo sapiens
  misc_RNA (1)...(19): siRNA sense strand
caacagcccaggagacuuc

SEQ ID NO: 769356 - RNA, 19 nt, Homo sapiens
  misc_RNA (1)...(19): siRNA sense strand
ggaccucuaagccuaauga

SEQ ID NO: 769357 - RNA, 19 nt, Homo sapiens
  misc_RNA (1)...(19): siRNA sense strand
caagcaggcaggaacuaaa

SEQ ID NO: 769358 - RNA, 19 nt, Homo sapiens
  misc_RNA (1)...(19): siRNA sense strand
uuaccacucuccucuucuu

SEQ ID NO: 769359 - RNA, 19 nt, Homo sapiens
  misc_RNA (1)...(19): siRNA sense strand
cugaagaugccuccucuga

SEQ ID NO: 769360 - RNA, 19 nt, Homo sapiens
  misc_RNA (1)...(19): siRNA sense strand
ucaagcaggcaggaacuaa

SEQ ID NO: 769361 - RNA, 19 nt, Homo sapiens
  misc_RNA (1)...(19): siRNA sense strand
ccuggucuaugcugaagau

SEQ ID NO: 769362 - RNA, 19 nt, Homo sapiens
  misc_RNA (1)...(19): siRNA sense strand
caucgaaaauggaagugaa

SEQ ID NO: 769363 - RNA, 19 nt, Homo sapiens
  misc_RNA (1)...(19): siRNA sense strand
gcaaaagcaggaaaaggaa

SEQ ID NO: 769364 - RNA, 19 nt, Homo sapiens
  misc_RNA (1)...(19): siRNA sense strand
guaucuuacuaacagaaca

SEQ ID NO: 769365 - RNA, 19 nt, Homo sapiens
  misc_RNA (1)...(19): siRNA sense strand
gcaagaauauggacagaaa

SEQ ID NO: 769366 - RNA, 19 nt, Homo sapiens
  misc_RNA (1)...(19): siRNA sense strand
gaggugaacuuucugguuu

SEQ ID NO: 769367 - RNA, 19 nt, Homo sapiens
  misc_RNA (1)...(19): siRNA sense strand
gcaaagagaucuacaccau

SEQ ID NO: 769368 - RNA, 19 nt, Homo sapiens
  misc_RNA (1)...(19): siRNA sense strand
gcaagugcuucauuugauu

SEQ ID NO: 769369 - RNA, 19 nt, Homo sapiens
  misc_RNA (1)...(19): siRNA sense strand
uugaagaucuggaguauga

SEQ ID NO: 769370 - RNA, 19 nt, Homo sapiens
  misc_RNA (1)...(19): siRNA sense strand
agacucaacugcaaggaua

SEQ ID NO: 769371 - RNA, 19 nt, Homo sapiens
  misc_RNA (1)...(19): siRNA sense strand
aaagagaucuacaccauca

SEQ ID NO: 769372 - RNA, 19 nt, Homo sapiens
  misc_RNA (1)...(19): siRNA sense strand
ucacucggcuuucacguuu

SEQ ID NO: 769373 - RNA, 19 nt, Homo sapiens
  misc_RNA (1)...(19): siRNA sense strand
caacaaagccacaguccuu

SEQ ID NO: 769374 - RNA, 19 nt, Homo sapiens
  misc_RNA (1)...(19): siRNA sense strand
caacaucaaugggacacua

SEQ ID NO: 769375 - RNA, 19 nt, Homo sapiens
  misc_RNA (1)...(19): siRNA sense strand
gaauggagcacaugaaauc

SEQ ID NO: 769376 - RNA, 19 nt, Homo sapiens
  misc_RNA (1)...(19): siRNA sense strand
ggaaaguacuuggcuagug

SEQ ID NO: 769377 - RNA, 19 nt, Homo sapiens
  misc_RNA (1)...(19): siRNA sense strand
guucauaucuggaauacuc

SEQ ID NO: 769378 - RNA, 19 nt, Homo sapiens
  misc_RNA (1)...(19): siRNA sense strand
gagaauggagcacaugaaa

SEQ ID NO: 769379 - RNA, 19 nt, Homo sapiens
  misc_RNA (1)...(19): siRNA sense strand
gagcacaugaaaucaauaa

SEQ ID NO: 769380 - RNA, 19 nt, Homo sapiens
  misc_RNA (1)...(19): siRNA sense strand
caaagccaauggaaauaga

SEQ ID NO: 769381 - RNA, 19 nt, Homo sapiens
  misc_RNA (1)...(19): siRNA sense strand
gcacaugaaaucaauaauc

SEQ ID NO: 769382 - RNA, 19 nt, Homo sapiens
  misc_RNA (1)...(19): siRNA sense strand
uauggaaccugaaugagaa

SEQ ID NO: 769383 - RNA, 19 nt, Homo sapiens
  misc_RNA (1)...(19): siRNA sense strand
ggauauggaaccugaauga

SEQ ID NO: 769384 - RNA, 19 nt, Homo sapiens
  misc_RNA (1)...(19): siRNA sense strand
agaagggacugcaguaugu

SEQ ID NO: 769385 - RNA, 19 nt, Homo sapiens
  misc_RNA (1)...(19): siRNA sense strand
ccugauaguugcugugauu

SEQ ID NO: 769386 - RNA, 19 nt, Homo sapiens
  misc_RNA (1)...(19): siRNA sense strand
ggaaauagauggggauguu

SEQ ID NO: 769387 - RNA, 19 nt, Homo sapiens
  misc_RNA (1)...(19): siRNA sense strand
cgaggucaaugccaucaaa

SEQ ID NO: 769388 - RNA, 19 nt, Homo sapiens
  misc_RNA (1)...(19): siRNA sense strand
gacaugacauugaagaucu

SEQ ID NO: 769389 - RNA, 19 nt, Homo sapiens
  misc_RNA (1)...(19): siRNA sense strand
guauguagaggcugagaua

SEQ ID NO: 769390 - RNA, 19 nt, Homo sapiens
  misc_RNA (1)...(19): siRNA sense strand
gcuaguggauccuuugaca

SEQ ID NO: 769391 - RNA, 19 nt, Homo sapiens
  misc_RNA (1)...(19): siRNA sense strand
ggaagagaauggagcacau

SEQ ID NO: 769392 - RNA, 19 nt, Homo sapiens
  misc_RNA (1)...(19): siRNA sense strand
gcaaaggcggcaaccauga

SEQ ID NO: 769393 - RNA, 19 nt, Homo sapiens
  misc_RNA (1)...(19): siRNA sense strand
agucugagguguucauuug

SEQ ID NO: 769394 - RNA, 19 nt, Homo sapiens
  misc_RNA (1)...(19): siRNA sense strand
guggauccuuugacaagua

SEQ ID NO: 769395 - RNA, 19 nt, Homo sapiens
  misc_RNA (1)...(19): siRNA sense strand
gauguggacuggcagaaca

SEQ ID NO: 769396 - RNA, 19 nt, Homo sapiens
  misc_RNA (1)...(19): siRNA sense strand
uaaccuggccagcaccuua

SEQ ID NO: 769397 - RNA, 19 nt, Homo sapiens
  misc_RNA (1)...(19): siRNA sense strand
guugagacauuguauacga

SEQ ID NO: 769398 - RNA, 19 nt, Homo sapiens
  misc_RNA (1)...(19): siRNA sense strand
ggcacgacgucccaaguaa

SEQ ID NO: 769399 - RNA, 19 nt, Homo sapiens
  misc_RNA (1)...(19): siRNA sense strand
ggcaagugcuucauuugau

SEQ ID NO: 769400 - RNA, 19 nt, Homo sapiens
  misc_RNA (1)...(19): siRNA sense strand
cggaugacaugacauugaa

SEQ ID NO: 769401 - RNA, 19 nt, Homo sapiens
  misc_RNA (1)...(19): siRNA sense strand
ggaacccugucagugauuu

SEQ ID NO: 769402 - RNA, 19 nt, Homo sapiens
  misc_RNA (1)...(19): siRNA sense strand
gaagucucguccacagcua

SEQ ID NO: 769403 - RNA, 19 nt, Homo sapiens
  misc_RNA (1)...(19): siRNA sense strand
guuggcaagugcuucauuu

SEQ ID NO: 769404 - RNA, 19 nt, Homo sapiens
  misc_RNA (1)...(19): siRNA sense strand
gaagcucacucagcagcaa

SEQ ID NO: 769405 - RNA, 19 nt, Homo sapiens
  misc_RNA (1)...(19): siRNA sense strand
caucuucgcucugaaaugg

SEQ ID NO: 769406 - RNA, 19 nt, Homo sapiens
  misc_RNA (1)...(19): siRNA sense strand
ucaccucacuggacuggaa

SEQ ID NO: 769407 - RNA, 19 nt, Homo sapiens
  misc_RNA (1)...(19): siRNA sense strand
ccacgagucugagguguuc

SEQ ID NO: 769408 - RNA, 19 nt, Homo sapiens
  misc_RNA (1)...(19): siRNA sense strand
gcucugaaauggaacaaaa

SEQ ID NO: 769409 - RNA, 19 nt, Homo sapiens
  misc_RNA (1)...(19): siRNA sense strand
caccuuaggccaacauaaa

SEQ ID NO: 769410 - RNA, 19 nt, Homo sapiens
  misc_RNA (1)...(19): siRNA sense strand
ggaacacuauuggcuaugg

SEQ ID NO: 769411 - RNA, 19 nt, Homo sapiens
  misc_RNA (1)...(19): siRNA sense strand
gaacgcccgaggagauaaa

SEQ ID NO: 769412 - RNA, 19 nt, Homo sapiens
  misc_RNA (1)...(19): siRNA sense strand
ccaaggcacuggcgguauc

SEQ ID NO: 769413 - RNA, 19 nt, Homo sapiens
  misc_RNA (1)...(19): siRNA sense strand
gggcacgacgucccaagua

SEQ ID NO: 769414 - RNA, 19 nt, Homo sapiens
  misc_RNA (1)...(19): siRNA sense strand
cagcucguguugagacauu

SEQ ID NO: 769415 - RNA, 19 nt, Homo sapiens
  misc_RNA (1)...(19): siRNA sense strand
cauugaagaucuggaguau

SEQ ID NO: 769416 - RNA, 19 nt, Homo sapiens
  misc_RNA (1)...(19): siRNA sense strand
gaagggacugcaguaugua

SEQ ID NO: 769417 - RNA, 19 nt, Homo sapiens
  misc_RNA (1)...(19): siRNA sense strand
gcucggaugacaugacauu

SEQ ID NO: 769418 - RNA, 19 nt, Homo sapiens
  misc_RNA (1)...(19): siRNA sense strand
cacgacgucccaaguaaua

SEQ ID NO: 769419 - RNA, 19 nt, Homo sapiens
  misc_RNA (1)...(19): siRNA sense strand
caacugcaaggauauggaa

SEQ ID NO: 769420 - RNA, 19 nt, Homo sapiens
  misc_RNA (1)...(19): siRNA sense strand
ccacagaggcaucagcaau

SEQ ID NO: 769421 - RNA, 19 nt, Homo sapiens
  misc_RNA (1)...(19): siRNA sense strand
gcaggcauuuggagagaag

SEQ ID NO: 769422 - RNA, 19 nt, Homo sapiens
  misc_RNA (1)...(19): siRNA sense strand
agauaagcaucaacaagga

SEQ ID NO: 769423 - RNA, 19 nt, Homo sapiens
  misc_RNA (1)...(19): siRNA sense strand
gaugacaugacauugaaga

SEQ ID NO: 769424 - RNA, 19 nt, Homo sapiens
  misc_RNA (1)...(19): siRNA sense strand
cagaacaacaugaccuuug

SEQ ID NO: 769425 - RNA, 19 nt, Homo sapiens
  misc_RNA (1)...(19): siRNA sense strand
gaugguuucgcaagaauau

SEQ ID NO: 769426 - RNA, 19 nt, Homo sapiens
  misc_RNA (1)...(19): siRNA sense strand
ccacccagcucguguugag

SEQ ID NO: 769427 - RNA, 19 nt, Homo sapiens
  misc_RNA (1)...(19): siRNA sense strand
gaagagaauggagcacaug

SEQ ID NO: 769428 - RNA, 19 nt, Homo sapiens
  misc_RNA (1)...(19): siRNA sense strand
ggauccuucuggaauguug

SEQ ID NO: 769429 - RNA, 19 nt, Homo sapiens
  misc_RNA (1)...(19): siRNA sense strand
ucacacaggagaagccaaa

SEQ ID NO: 769430 - RNA, 19 nt, Homo sapiens
  misc_RNA (1)...(19): siRNA sense strand
cagcaggcauuuggagaga

SEQ ID NO: 769431 - RNA, 19 nt, Homo sapiens
  misc_RNA (1)...(19): siRNA sense strand
ggugaacuuucugguuuau

SEQ ID NO: 769432 - RNA, 19 nt, Homo sapiens
  misc_RNA (1)...(19): siRNA sense strand
gugacgaggugaacuuucu

SEQ ID NO: 769433 - RNA, 19 nt, Homo sapiens
  misc_RNA (1)...(19): siRNA sense strand
gcagaacaacaugaccuuu

SEQ ID NO: 769434 - RNA, 19 nt, Homo sapiens
  misc_RNA (1)...(19): siRNA sense strand
uaugaugguuucgcaagaa

SEQ ID NO: 769435 - RNA, 19 nt, Homo sapiens
  misc_RNA (1)...(19): siRNA sense strand
cgacgucccaaguaauaaa

SEQ ID NO: 769436 - RNA, 19 nt, Homo sapiens
  misc_RNA (1)...(19): siRNA sense strand
gcacgacgucccaaguaau

SEQ ID NO: 769437 - RNA, 19 nt, Homo sapiens
  misc_RNA (1)...(19): siRNA sense strand
auaaagaugucaccucacu

SEQ ID NO: 769438 - RNA, 19 nt, Homo sapiens
  misc_RNA (1)...(19): siRNA sense strand
gagugcugguguagacaaa

SEQ ID NO: 769439 - RNA, 19 nt, Homo sapiens
  misc_RNA (1)...(19): siRNA sense strand
acucaaagccaauggaaau

SEQ ID NO: 769440 - RNA, 19 nt, Homo sapiens
  misc_RNA (1)...(19): siRNA sense strand
gcaguuuccuuuucauuca

SEQ ID NO: 769441 - RNA, 19 nt, Homo sapiens
  misc_RNA (1)...(19): siRNA sense strand
gcaccuuaggccaacauaa

SEQ ID NO: 769442 - RNA, 19 nt, Homo sapiens
  misc_RNA (1)...(19): siRNA sense strand
gagacauuguauacgagaa

SEQ ID NO: 769443 - RNA, 19 nt, Homo sapiens
  misc_RNA (1)...(19): siRNA sense strand
gaagaucuggaguaugaag

SEQ ID NO: 769444 - RNA, 19 nt, Homo sapiens
  misc_RNA (1)...(19): siRNA sense strand
gcaaaauccuccaaagaac

SEQ ID NO: 769445 - RNA, 19 nt, Homo sapiens
  misc_RNA (1)...(19): siRNA sense strand
gaaccugaaugagaauagc

SEQ ID NO: 769446 - RNA, 19 nt, Homo sapiens
  misc_RNA (1)...(19): siRNA sense strand
cagaagggacugcaguaug

SEQ ID NO: 769447 - RNA, 19 nt, Homo sapiens
  misc_RNA (1)...(19): siRNA sense strand
ccuggaacccugucaguga

SEQ ID NO: 769448 - RNA, 19 nt, Homo sapiens
  misc_RNA (1)...(19): siRNA sense strand
uggagcacaugaaaucaau

SEQ ID NO: 769449 - RNA, 19 nt, Homo sapiens
  misc_RNA (1)...(19): siRNA sense strand
aacccaaacuccagcauca

SEQ ID NO: 769450 - RNA, 19 nt, Homo sapiens
  misc_RNA (1)...(19): siRNA sense strand
ugaacuuucugguuuaucg

SEQ ID NO: 769451 - RNA, 19 nt, Homo sapiens
  misc_RNA (1)...(19): siRNA sense strand
gagauuccacccaacaaag

SEQ ID NO: 769452 - RNA, 19 nt, Homo sapiens
  misc_RNA (1)...(19): siRNA sense strand
ggguucauaugaugguuuc

SEQ ID NO: 769453 - RNA, 19 nt, Homo sapiens
  misc_RNA (1)...(19): siRNA sense strand
acacacucaugaagcauca

SEQ ID NO: 769454 - RNA, 19 nt, Homo sapiens
  misc_RNA (1)...(19): siRNA sense strand
ggacuggcagaacaacaug

SEQ ID NO: 769455 - RNA, 19 nt, Homo sapiens
  misc_RNA (1)...(19): siRNA sense strand
gagaagccaaacagcaguu

SEQ ID NO: 769456 - RNA, 19 nt, Homo sapiens
  misc_RNA (1)...(19): siRNA sense strand
aggugaacuuucugguuua

SEQ ID NO: 769457 - RNA, 19 nt, Homo sapiens
  misc_RNA (1)...(19): siRNA sense strand
ggagcacaugaaaucaaua

SEQ ID NO: 769458 - RNA, 19 nt, Homo sapiens
  misc_RNA (1)...(19): siRNA sense strand
uggcaagugcuucauuuga

SEQ ID NO: 769459 - RNA, 19 nt, Homo sapiens
  misc_RNA (1)...(19): siRNA sense strand
gcugagauaagcaucaaca

SEQ ID NO: 769460 - RNA, 19 nt, Homo sapiens
  misc_RNA (1)...(19): siRNA sense strand
uagagucccugucccugau

SEQ ID NO: 769461 - RNA, 19 nt, Homo sapiens
  misc_RNA (1)...(19): siRNA sense strand
ugagauuccacccaacaaa

SEQ ID NO: 769462 - RNA, 19 nt, Homo sapiens
  misc_RNA (1)...(19): siRNA sense strand
gugcuucauuugauucuac

SEQ ID NO: 769463 - RNA, 19 nt, Homo sapiens
  misc_RNA (1)...(19): siRNA sense strand
ggaacgcccgaggagauaa

SEQ ID NO: 769464 - RNA, 19 nt, Homo sapiens
  misc_RNA (1)...(19): siRNA sense strand
gcacccacacacucaugaa

SEQ ID NO: 769465 - RNA, 19 nt, Homo sapiens
  misc_RNA (1)...(19): siRNA sense strand
gcaagaauauggacagaaa

SEQ ID NO: 769466 - RNA, 19 nt, Homo sapiens
  misc_RNA (1)...(19): siRNA sense strand
gaggugaacuuucugguuu

SEQ ID NO: 769467 - RNA, 19 nt, Homo sapiens
  misc_RNA (1)...(19): siRNA sense strand
gcaaagagaucuacaccau

SEQ ID NO: 769468 - RNA, 19 nt, Homo sapiens
  misc_RNA (1)...(19): siRNA sense strand
gcaagugcuucauuugauu

SEQ ID NO: 769469 - RNA, 19 nt, Homo sapiens
  misc_RNA (1)...(19): siRNA sense strand
uugaagaucuggaguauga

SEQ ID NO: 769470 - RNA, 19 nt, Homo sapiens
  misc_RNA (1)...(19): siRNA sense strand
agacucaacugcaaggaua

SEQ ID NO: 769471 - RNA, 19 nt, Homo sapiens
  misc_RNA (1)...(19): siRNA sense strand
aaagagaucuacaccauca

SEQ ID NO: 769472 - RNA, 19 nt, Homo sapiens
  misc_RNA (1)...(19): siRNA sense strand
ucacucggcuuucacguuu

SEQ ID NO: 769473 - RNA, 19 nt, Homo sapiens
  misc_RNA (1)...(19): siRNA sense strand
caacaaagccacaguccuu

SEQ ID NO: 769474 - RNA, 19 nt, Homo sapiens
  misc_RNA (1)...(19): siRNA sense strand
caacaucaaugggacacua

SEQ ID NO: 769475 - RNA, 19 nt, Homo sapiens
  misc_RNA (1)...(19): siRNA sense strand
gaauggagcacaugaaauc

SEQ ID NO: 769476 - RNA, 19 nt, Homo sapiens
  misc_RNA (1)...(19): siRNA sense strand
ggaaaguacuuggcuagug

SEQ ID NO: 769477 - RNA, 19 nt, Homo sapiens
  misc_RNA (1)...(19): siRNA sense strand
guucauaucuggaauacuc

SEQ ID NO: 769478 - RNA, 19 nt, Homo sapiens
  misc_RNA (1)...(19): siRNA sense strand
gagaauggagcacaugaaa

SEQ ID NO: 769479 - RNA, 19 nt, Homo sapiens
  misc_RNA (1)...(19): siRNA sense strand
gagcacaugaaaucaauaa

SEQ ID NO: 769480 - RNA, 19 nt, Homo sapiens
  misc_RNA (1)...(19): siRNA sense strand
caaagccaauggaaauaga

SEQ ID NO: 769481 - RNA, 19 nt, Homo sapiens
  misc_RNA (1)...(19): siRNA sense strand
gcacaugaaaucaauaauc

SEQ ID NO: 769482 - RNA, 19 nt, Homo sapiens
  misc_RNA (1)...(19): siRNA sense strand
uauggaaccugaaugagaa

SEQ ID NO: 769483 - RNA, 19 nt, Homo sapiens
  misc_RNA (1)...(19): siRNA sense strand
ggauauggaaccugaauga

SEQ ID NO: 769484 - RNA, 19 nt, Homo sapiens
  misc_RNA (1)...(19): siRNA sense strand
agaagggacugcaguaugu

SEQ ID NO: 769485 - RNA, 19 nt, Homo sapiens
  misc_RNA (1)...(19): siRNA sense strand
ccugauaguugcugugauu

SEQ ID NO: 769486 - RNA, 19 nt, Homo sapiens
  misc_RNA (1)...(19): siRNA sense strand
ggaaauagauggggauguu

SEQ ID NO: 769487 - RNA, 19 nt, Homo sapiens
  misc_RNA (1)...(19): siRNA sense strand
cgaggucaaugccaucaaa

SEQ ID NO: 769488 - RNA, 19 nt, Homo sapiens
  misc_RNA (1)...(19): siRNA sense strand
gacaugacauugaagaucu

SEQ ID NO: 769489 - RNA, 19 nt, Homo sapiens
  misc_RNA (1)...(19): siRNA sense strand
guauguagaggcugagaua

SEQ ID NO: 769490 - RNA, 19 nt, Homo sapiens
  misc_RNA (1)...(19): siRNA sense strand
gcuaguggauccuuugaca

SEQ ID NO: 769491 - RNA, 19 nt, Homo sapiens
  misc_RNA (1)...(19): siRNA sense strand
ggaagagaauggagcacau

SEQ ID NO: 769492 - RNA, 19 nt, Homo sapiens
  misc_RNA (1)...(19): siRNA sense strand
gcaaaggcggcaaccauga

SEQ ID NO: 769493 - RNA, 19 nt, Homo sapiens
  misc_RNA (1)...(19): siRNA sense strand
agucugagguguucauuug

SEQ ID NO: 769494 - RNA, 19 nt, Homo sapiens
  misc_RNA (1)...(19): siRNA sense strand
guggauccuuugacaagua

SEQ ID NO: 769495 - RNA, 19 nt, Homo sapiens
  misc_RNA (1)...(19): siRNA sense strand
gauguggacuggcagaaca

SEQ ID NO: 769496 - RNA, 19 nt, Homo sapiens
  misc_RNA (1)...(19): siRNA sense strand
uaaccuggccagcaccuua

SEQ ID NO: 769497 - RNA, 19 nt, Homo sapiens
  misc_RNA (1)...(19): siRNA sense strand
guugagacauuguauacga

SEQ ID NO: 769498 - RNA, 19 nt, Homo sapiens
  misc_RNA (1)...(19): siRNA sense strand
ggcacgacgucccaaguaa

SEQ ID NO: 769499 - RNA, 19 nt, Homo sapiens
  misc_RNA (1)...(19): siRNA sense strand
ggcaagugcuucauuugau

SEQ ID NO: 769500 - RNA, 19 nt, Homo sapiens
  misc_RNA (1)...(19): siRNA sense strand
cggaugacaugacauugaa

SEQ ID NO: 769501 - RNA, 19 nt, Homo sapiens
  misc_RNA (1)...(19): siRNA sense strand
ggaacccugucagugauuu

SEQ ID NO: 769502 - RNA, 19 nt, Homo sapiens
  misc_RNA (1)...(19): siRNA sense strand
gaagucucguccacagcua

SEQ ID NO: 769503 - RNA, 19 nt, Homo sapiens
  misc_RNA (1)...(19): siRNA sense strand
guuggcaagugcuucauuu

SEQ ID NO: 769504 - RNA, 19 nt, Homo sapiens
  misc_RNA (1)...(19): siRNA sense strand
gaagcucacucagcagcaa

SEQ ID NO: 769505 - RNA, 19 nt, Homo sapiens
  misc_RNA (1)...(19): siRNA sense strand
caucuucgcucugaaaugg

SEQ ID NO: 769506 - RNA, 19 nt, Homo sapiens
  misc_RNA (1)...(19): siRNA sense strand
ucaccucacuggacuggaa

SEQ ID NO: 769507 - RNA, 19 nt, Homo sapiens
  misc_RNA (1)...(19): siRNA sense strand
ccacgagucugagguguuc

SEQ ID NO: 769508 - RNA, 19 nt, Homo sapiens
  misc_RNA (1)...(19): siRNA sense strand
gcucugaaauggaacaaaa

SEQ ID NO: 769509 - RNA, 19 nt, Homo sapiens
  misc_RNA (1)...(19): siRNA sense strand
caccuuaggccaacauaaa

SEQ ID NO: 769510 - RNA, 19 nt, Homo sapiens
  misc_RNA (1)...(19): siRNA sense strand
ggaacacuauuggcuaugg

SEQ ID NO: 769511 - RNA, 19 nt, Homo sapiens
  misc_RNA (1)...(19): siRNA sense strand
gaacgcccgaggagauaaa

SEQ ID NO: 769512 - RNA, 19 nt, Homo sapiens
  misc_RNA (1)...(19): siRNA sense strand
ccaaggcacuggcgguauc

SEQ ID NO: 769513 - RNA, 19 nt, Homo sapiens
  misc_RNA (1)...(19): siRNA sense strand
gggcacgacgucccaagua

SEQ ID NO: 769514 - RNA, 19 nt, Homo sapiens
  misc_RNA (1)...(19): siRNA sense strand
cagcucguguugagacauu

SEQ ID NO: 769515 - RNA, 19 nt, Homo sapiens
  misc_RNA (1)...(19): siRNA sense strand
cauugaagaucuggaguau

SEQ ID NO: 769516 - RNA, 19 nt, Homo sapiens
  misc_RNA (1)...(19): siRNA sense strand
gaagggacugcaguaugua

SEQ ID NO: 769517 - RNA, 19 nt, Homo sapiens
  misc_RNA (1)...(19): siRNA sense strand
gcucggaugacaugacauu

SEQ ID NO: 769518 - RNA, 19 nt, Homo sapiens
  misc_RNA (1)...(19): siRNA sense strand
cacgacgucccaaguaaua

SEQ ID NO: 769519 - RNA, 19 nt, Homo sapiens
  misc_RNA (1)...(19): siRNA sense strand
caacugcaaggauauggaa

SEQ ID NO: 769520 - RNA, 19 nt, Homo sapiens
  misc_RNA (1)...(19): siRNA sense strand
ccacagaggcaucagcaau

SEQ ID NO: 769521 - RNA, 19 nt, Homo sapiens
  misc_RNA (1)...(19): siRNA sense strand
gcaggcauuuggagagaag

SEQ ID NO: 769522 - RNA, 19 nt, Homo sapiens
  misc_RNA (1)...(19): siRNA sense strand
agauaagcaucaacaagga

SEQ ID NO: 769523 - RNA, 19 nt, Homo sapiens
  misc_RNA (1)...(19): siRNA sense strand
gaugacaugacauugaaga

SEQ ID NO: 769524 - RNA, 19 nt, Homo sapiens
  misc_RNA (1)...(19): siRNA sense strand
cagaacaacaugaccuuug

SEQ ID NO: 769525 - RNA, 19 nt, Homo sapiens
  misc_RNA (1)...(19): siRNA sense strand
gaugguuucgcaagaauau

SEQ ID NO: 769526 - RNA, 19 nt, Homo sapiens
  misc_RNA (1)...(19): siRNA sense strand
ccacccagcucguguugag

SEQ ID NO: 769527 - RNA, 19 nt, Homo sapiens
  misc_RNA (1)...(19): siRNA sense strand
gaagagaauggagcacaug

SEQ ID NO: 769528 - RNA, 19 nt, Homo sapiens
  misc_RNA (1)...(19): siRNA sense strand
ggauccuucuggaauguug

SEQ ID NO: 769529 - RNA, 19 nt, Homo sapiens
  misc_RNA (1)...(19): siRNA sense strand
ucacacaggagaagccaaa

SEQ ID NO: 769530 - RNA, 19 nt, Homo sapiens
  misc_RNA (1)...(19): siRNA sense strand
cagcaggcauuuggagaga

SEQ ID NO: 769531 - RNA, 19 nt, Homo sapiens
  misc_RNA (1)...(19): siRNA sense strand
ggugaacuuucugguuuau

SEQ ID NO: 769532 - RNA, 19 nt, Homo sapiens
  misc_RNA (1)...(19): siRNA sense strand
gugacgaggugaacuuucu

SEQ ID NO: 769533 - RNA, 19 nt, Homo sapiens
  misc_RNA (1)...(19): siRNA sense strand
gcagaacaacaugaccuuu

SEQ ID NO: 769534 - RNA, 19 nt, Homo sapiens
  misc_RNA (1)...(19): siRNA sense strand
uaugaugguuucgcaagaa

SEQ ID NO: 769535 - RNA, 19 nt, Homo sapiens
  misc_RNA (1)...(19): siRNA sense strand
cgacgucccaaguaauaaa

SEQ ID NO: 769536 - RNA, 19 nt, Homo sapiens
  misc_RNA (1)...(19): siRNA sense strand
gcacgacgucccaaguaau

SEQ ID NO: 769537 - RNA, 19 nt, Homo sapiens
  misc_RNA (1)...(19): siRNA sense strand
auaaagaugucaccucacu

SEQ ID NO: 769538 - RNA, 19 nt, Homo sapiens
  misc_RNA (1)...(19): siRNA sense strand
gagugcugguguagacaaa

SEQ ID NO: 769539 - RNA, 19 nt, Homo sapiens
  misc_RNA (1)...(19): siRNA sense strand
acucaaagccaauggaaau

SEQ ID NO: 769540 - RNA, 19 nt, Homo sapiens
  misc_RNA (1)...(19): siRNA sense strand
gcaguuuccuuuucauuca

SEQ ID NO: 769541 - RNA, 19 nt, Homo sapiens
  misc_RNA (1)...(19): siRNA sense strand
gcaccuuaggccaacauaa

SEQ ID NO: 769542 - RNA, 19 nt, Homo sapiens
  misc_RNA (1)...(19): siRNA sense strand
gagacauuguauacgagaa

SEQ ID NO: 769543 - RNA, 19 nt, Homo sapiens
  misc_RNA (1)...(19): siRNA sense strand
gaagaucuggaguaugaag

SEQ ID NO: 769544 - RNA, 19 nt, Homo sapiens
  misc_RNA (1)...(19): siRNA sense strand
gcaaaauccuccaaagaac

SEQ ID NO: 769545 - RNA, 19 nt, Homo sapiens
  misc_RNA (1)...(19): siRNA sense strand
gaaccugaaugagaauagc

SEQ ID NO: 769546 - RNA, 19 nt, Homo sapiens
  misc_RNA (1)...(19): siRNA sense strand
cagaagggacugcaguaug

SEQ ID NO: 769547 - RNA, 19 nt, Homo sapiens
  misc_RNA (1)...(19): siRNA sense strand
ccuggaacccugucaguga

SEQ ID NO: 769548 - RNA, 19 nt, Homo sapiens
  misc_RNA (1)...(19): siRNA sense strand
uggagcacaugaaaucaau

SEQ ID NO: 769549 - RNA, 19 nt, Homo sapiens
  misc_RNA (1)...(19): siRNA sense strand
aacccaaacuccagcauca

SEQ ID NO: 769550 - RNA, 19 nt, Homo sapiens
  misc_RNA (1)...(19): siRNA sense strand
ugaacuuucugguuuaucg

SEQ ID NO: 769551 - RNA, 19 nt, Homo sapiens
  misc_RNA (1)...(19): siRNA sense strand
gagauuccacccaacaaag

SEQ ID NO: 769552 - RNA, 19 nt, Homo sapiens
  misc_RNA (1)...(19): siRNA sense strand
ggguucauaugaugguuuc

SEQ ID NO: 769553 - RNA, 19 nt, Homo sapiens
  misc_RNA (1)...(19): siRNA sense strand
acacacucaugaagcauca

SEQ ID NO: 769554 - RNA, 19 nt, Homo sapiens
  misc_RNA (1)...(19): siRNA sense strand
ggacuggcagaacaacaug

SEQ ID NO: 769555 - RNA, 19 nt, Homo sapiens
  misc_RNA (1)...(19): siRNA sense strand
gagaagccaaacagcaguu

SEQ ID NO: 769556 - RNA, 19 nt, Homo sapiens
  misc_RNA (1)...(19): siRNA sense strand
aggugaacuuucugguuua

SEQ ID NO: 769557 - RNA, 19 nt, Homo sapiens
  misc_RNA (1)...(19): siRNA sense strand
ggagcacaugaaaucaaua

SEQ ID NO: 769558 - RNA, 19 nt, Homo sapiens
  misc_RNA (1)...(19): siRNA sense strand
uggcaagugcuucauuuga

SEQ ID NO: 769559 - RNA, 19 nt, Homo sapiens
  misc_RNA (1)...(19): siRNA sense strand
gcugagauaagcaucaaca

SEQ ID NO: 769560 - RNA, 19 nt, Homo sapiens
  misc_RNA (1)...(19): siRNA sense strand
uagagucccugucccugau

SEQ ID NO: 769561 - RNA, 19 nt, Homo sapiens
  misc_RNA (1)...(19): siRNA sense strand
ugagauuccacccaacaaa

SEQ ID NO: 769562 - RNA, 19 nt, Homo sapiens
  misc_RNA (1)...(19): siRNA sense strand
gugcuucauuugauucuac

SEQ ID NO: 769563 - RNA, 19 nt, Homo sapiens
  misc_RNA (1)...(19): siRNA sense strand
ggaacgcccgaggagauaa

SEQ ID NO: 769564 - RNA, 19 nt, Homo sapiens
  misc_RNA (1)...(19): siRNA sense strand
gcacccacacacucaugaa

SEQ ID NO: 769565 - RNA, 19 nt, Homo sapiens
  misc_RNA (1)...(19): siRNA sense strand
gcaagaauauggacagaaa

SEQ ID NO: 769566 - RNA, 19 nt, Homo sapiens
  misc_RNA (1)...(19): siRNA sense strand
gaggugaacuuucugguuu

SEQ ID NO: 769567 - RNA, 19 nt, Homo sapiens
  misc_RNA (1)...(19): siRNA sense strand
gcaaagagaucuacaccau

SEQ ID NO: 769568 - RNA, 19 nt, Homo sapiens
  misc_RNA (1)...(19): siRNA sense strand
gcaagugcuucauuugauu

SEQ ID NO: 769569 - RNA, 19 nt, Homo sapiens
  misc_RNA (1)...(19): siRNA sense strand
uugaagaucuggaguauga

SEQ ID NO: 769570 - RNA, 19 nt, Homo sapiens
  misc_RNA (1)...(19): siRNA sense strand
agacucaacugcaaggaua

SEQ ID NO: 769571 - RNA, 19 nt, Homo sapiens
  misc_RNA (1)...(19): siRNA sense strand
aaagagaucuacaccauca

SEQ ID NO: 769572 - RNA, 19 nt, Homo sapiens
  misc_RNA (1)...(19): siRNA sense strand
ucacucggcuuucacguuu

SEQ ID NO: 769573 - RNA, 19 nt, Homo sapiens
  misc_RNA (1)...(19): siRNA sense strand
caacaaagccacaguccuu

SEQ ID NO: 769574 - RNA, 19 nt, Homo sapiens
  misc_RNA (1)...(19): siRNA sense strand
caacaucaaugggacacua

SEQ ID NO: 769575 - RNA, 19 nt, Homo sapiens
  misc_RNA (1)...(19): siRNA sense strand
gaauggagcacaugaaauc

SEQ ID NO: 769576 - RNA, 19 nt, Homo sapiens
  misc_RNA (1)...(19): siRNA sense strand
ggaaaguacuuggcuagug

SEQ ID NO: 769577 - RNA, 19 nt, Homo sapiens
  misc_RNA (1)...(19): siRNA sense strand
guucauaucuggaauacuc

SEQ ID NO: 769578 - RNA, 19 nt, Homo sapiens
  misc_RNA (1)...(19): siRNA sense strand
gagaauggagcacaugaaa

SEQ ID NO: 769579 - RNA, 19 nt, Homo sapiens
  misc_RNA (1)...(19): siRNA sense strand
gagcacaugaaaucaauaa

SEQ ID NO: 769580 - RNA, 19 nt, Homo sapiens
  misc_RNA (1)...(19): siRNA sense strand
caaagccaauggaaauaga

SEQ ID NO: 769581 - RNA, 19 nt, Homo sapiens
  misc_RNA (1)...(19): siRNA sense strand
gcacaugaaaucaauaauc

SEQ ID NO: 769582 - RNA, 19 nt, Homo sapiens
  misc_RNA (1)...(19): siRNA sense strand
uauggaaccugaaugagaa

SEQ ID NO: 769583 - RNA, 19 nt, Homo sapiens
  misc_RNA (1)...(19): siRNA sense strand
ggauauggaaccugaauga

SEQ ID NO: 769584 - RNA, 19 nt, Homo sapiens
  misc_RNA (1)...(19): siRNA sense strand
agaagggacugcaguaugu

SEQ ID NO: 769585 - RNA, 19 nt, Homo sapiens
  misc_RNA (1)...(19): siRNA sense strand
ccugauaguugcugugauu

SEQ ID NO: 769586 - RNA, 19 nt, Homo sapiens
  misc_RNA (1)...(19): siRNA sense strand
ggaaauagauggggauguu

SEQ ID NO: 769587 - RNA, 19 nt, Homo sapiens
  misc_RNA (1)...(19): siRNA sense strand
cgaggucaaugccaucaaa

SEQ ID NO: 769588 - RNA, 19 nt, Homo sapiens
  misc_RNA (1)...(19): siRNA sense strand
gacaugacauugaagaucu

SEQ ID NO: 769589 - RNA, 19 nt, Homo sapiens
  misc_RNA (1)...(19): siRNA sense strand
guauguagaggcugagaua

SEQ ID NO: 769590 - RNA, 19 nt, Homo sapiens
  misc_RNA (1)...(19): siRNA sense strand
gcuaguggauccuuugaca

SEQ ID NO: 769591 - RNA, 19 nt, Homo sapiens
  misc_RNA (1)...(19): siRNA sense strand
ggaagagaauggagcacau

SEQ ID NO: 769592 - RNA, 19 nt, Homo sapiens
  misc_RNA (1)...(19): siRNA sense strand
gcaaaggcggcaaccauga

SEQ ID NO: 769593 - RNA, 19 nt, Homo sapiens
  misc_RNA (1)...(19): siRNA sense strand
agucugagguguucauuug

SEQ ID NO: 769594 - RNA, 19 nt, Homo sapiens
  misc_RNA (1)...(19): siRNA sense strand
guggauccuuugacaagua

SEQ ID NO: 769595 - RNA, 19 nt, Homo sapiens
  misc_RNA (1)...(19): siRNA sense strand
gauguggacuggcagaaca

SEQ ID NO: 769596 - RNA, 19 nt, Homo sapiens
  misc_RNA (1)...(19): siRNA sense strand
uaaccuggccagcaccuua

SEQ ID NO: 769597 - RNA, 19 nt, Homo sapiens
  misc_RNA (1)...(19): siRNA sense strand
guugagacauuguauacga

SEQ ID NO: 769598 - RNA, 19 nt, Homo sapiens
  misc_RNA (1)...(19): siRNA sense strand
ggcacgacgucccaaguaa

SEQ ID NO: 769599 - RNA, 19 nt, Homo sapiens
  misc_RNA (1)...(19): siRNA sense strand
ggcaagugcuucauuugau

SEQ ID NO: 769600 - RNA, 19 nt, Homo sapiens
  misc_RNA (1)...(19): siRNA sense strand
cggaugacaugacauugaa

SEQ ID NO: 769601 - RNA, 19 nt, Homo sapiens
  misc_RNA (1)...(19): siRNA sense strand
ggaacccugucagugauuu

SEQ ID NO: 769602 - RNA, 19 nt, Homo sapiens
  misc_RNA (1)...(19): siRNA sense strand
gaagucucguccacagcua

SEQ ID NO: 769603 - RNA, 19 nt, Homo sapiens
  misc_RNA (1)...(19): siRNA sense strand
guuggcaagugcuucauuu

SEQ ID NO: 769604 - RNA, 19 nt, Homo sapiens
  misc_RNA (1)...(19): siRNA sense strand
gaagcucacucagcagcaa

SEQ ID NO: 769605 - RNA, 19 nt, Homo sapiens
  misc_RNA (1)...(19): siRNA sense strand
caucuucgcucugaaaugg

SEQ ID NO: 769606 - RNA, 19 nt, Homo sapiens
  misc_RNA (1)...(19): siRNA sense strand
ucaccucacuggacuggaa

SEQ ID NO: 769607 - RNA, 19 nt, Homo sapiens
  misc_RNA (1)...(19): siRNA sense strand
ccacgagucugagguguuc

SEQ ID NO: 769608 - RNA, 19 nt, Homo sapiens
  misc_RNA (1)...(19): siRNA sense strand
gcucugaaauggaacaaaa

SEQ ID NO: 769609 - RNA, 19 nt, Homo sapiens
  misc_RNA (1)...(19): siRNA sense strand
caccuuaggccaacauaaa

SEQ ID NO: 769610 - RNA, 19 nt, Homo sapiens
  misc_RNA (1)...(19): siRNA sense strand
ggaacacuauuggcuaugg

SEQ ID NO: 769611 - RNA, 19 nt, Homo sapiens
  misc_RNA (1)...(19): siRNA sense strand
gaacgcccgaggagauaaa

SEQ ID NO: 769612 - RNA, 19 nt, Homo sapiens
  misc_RNA (1)...(19): siRNA sense strand
ccaaggcacuggcgguauc

SEQ ID NO: 769613 - RNA, 19 nt, Homo sapiens
  misc_RNA (1)...(19): siRNA sense strand
gggcacgacgucccaagua

SEQ ID NO: 769614 - RNA, 19 nt, Homo sapiens
  misc_RNA (1)...(19): siRNA sense strand
cagcucguguugagacauu

SEQ ID NO: 769615 - RNA, 19 nt, Homo sapiens
  misc_RNA (1)...(19): siRNA sense strand
cauugaagaucuggaguau

SEQ ID NO: 769616 - RNA, 19 nt, Homo sapiens
  misc_RNA (1)...(19): siRNA sense strand
gaagggacugcaguaugua

SEQ ID NO: 769617 - RNA, 19 nt, Homo sapiens
  misc_RNA (1)...(19): siRNA sense strand
gcucggaugacaugacauu

SEQ ID NO: 769618 - RNA, 19 nt, Homo sapiens
  misc_RNA (1)...(19): siRNA sense strand
cacgacgucccaaguaaua

SEQ ID NO: 769619 - RNA, 19 nt, Homo sapiens
  misc_RNA (1)...(19): siRNA sense strand
caacugcaaggauauggaa

SEQ ID NO: 769620 - RNA, 19 nt, Homo sapiens
  misc_RNA (1)...(19): siRNA sense strand
ccacagaggcaucagcaau

SEQ ID NO: 769621 - RNA, 19 nt, Homo sapiens
  misc_RNA (1)...(19): siRNA sense strand
gcaggcauuuggagagaag

SEQ ID NO: 769622 - RNA, 19 nt, Homo sapiens
  misc_RNA (1)...(19): siRNA sense strand
agauaagcaucaacaagga

SEQ ID NO: 769623 - RNA, 19 nt, Homo sapiens
  misc_RNA (1)...(19): siRNA sense strand
gaugacaugacauugaaga

SEQ ID NO: 769624 - RNA, 19 nt, Homo sapiens
  misc_RNA (1)...(19): siRNA sense strand
cagaacaacaugaccuuug

SEQ ID NO: 769625 - RNA, 19 nt, Homo sapiens
  misc_RNA (1)...(19): siRNA sense strand
gaugguuucgcaagaauau

SEQ ID NO: 769626 - RNA, 19 nt, Homo sapiens
  misc_RNA (1)...(19): siRNA sense strand
ccacccagcucguguugag

SEQ ID NO: 769627 - RNA, 19 nt, Homo sapiens
  misc_RNA (1)...(19): siRNA sense strand
gaagagaauggagcacaug

SEQ ID NO: 769628 - RNA, 19 nt, Homo sapiens
  misc_RNA (1)...(19): siRNA sense strand
ggauccuucuggaauguug

SEQ ID NO: 769629 - RNA, 19 nt, Homo sapiens
  misc_RNA (1)...(19): siRNA sense strand
ucacacaggagaagccaaa

SEQ ID NO: 769630 - RNA, 19 nt, Homo sapiens
  misc_RNA (1)...(19): siRNA sense strand
cagcaggcauuuggagaga

SEQ ID NO: 769631 - RNA, 19 nt, Homo sapiens
  misc_RNA (1)...(19): siRNA sense strand
ggugaacuuucugguuuau

SEQ ID NO: 769632 - RNA, 19 nt, Homo sapiens
  misc_RNA (1)...(19): siRNA sense strand
gugacgaggugaacuuucu

SEQ ID NO: 769633 - RNA, 19 nt, Homo sapiens
  misc_RNA (1)...(19): siRNA sense strand
gcagaacaacaugaccuuu

SEQ ID NO: 769634 - RNA, 19 nt, Homo sapiens
  misc_RNA (1)...(19): siRNA sense strand
uaugaugguuucgcaagaa

SEQ ID NO: 769635 - RNA, 19 nt, Homo sapiens
  misc_RNA (1)...(19): siRNA sense strand
cgacgucccaaguaauaaa

SEQ ID NO: 769636 - RNA, 19 nt, Homo sapiens
  misc_RNA (1)...(19): siRNA sense strand
gcacgacgucccaaguaau

SEQ ID NO: 769637 - RNA, 19 nt, Homo sapiens
  misc_RNA (1)...(19): siRNA sense strand
auaaagaugucaccucacu

SEQ ID NO: 769638 - RNA, 19 nt, Homo sapiens
  misc_RNA (1)...(19): siRNA sense strand
gagugcugguguagacaaa

SEQ ID NO: 769639 - RNA, 19 nt, Homo sapiens
  misc_RNA (1)...(19): siRNA sense strand
acucaaagccaauggaaau

SEQ ID NO: 769640 - RNA, 19 nt, Homo sapiens
  misc_RNA (1)...(19): siRNA sense strand
gcaguuuccuuuucauuca

SEQ ID NO: 769641 - RNA, 19 nt, Homo sapiens
  misc_RNA (1)...(19): siRNA sense strand
gcaccuuaggccaacauaa

SEQ ID NO: 769642 - RNA, 19 nt, Homo sapiens
  misc_RNA (1)...(19): siRNA sense strand
gagacauuguauacgagaa

SEQ ID NO: 769643 - RNA, 19 nt, Homo sapiens
  misc_RNA (1)...(19): siRNA sense strand
gaagaucuggaguaugaag

SEQ ID NO: 769644 - RNA, 19 nt, Homo sapiens
  misc_RNA (1)...(19): siRNA sense strand
gcaaaauccuccaaagaac

SEQ ID NO: 769645 - RNA, 19 nt, Homo sapiens
  misc_RNA (1)...(19): siRNA sense strand
gaaccugaaugagaauagc

SEQ ID NO: 769646 - RNA, 19 nt, Homo sapiens
  misc_RNA (1)...(19): siRNA sense strand
cagaagggacugcaguaug

SEQ ID NO: 769647 - RNA, 19 nt, Homo sapiens
  misc_RNA (1)...(19): siRNA sense strand
ccuggaacccugucaguga

SEQ ID NO: 769648 - RNA, 19 nt, Homo sapiens
  misc_RNA (1)...(19): siRNA sense strand
uggagcacaugaaaucaau

SEQ ID NO: 769649 - RNA, 19 nt, Homo sapiens
  misc_RNA (1)...(19): siRNA sense strand
aacccaaacuccagcauca

SEQ ID NO: 769650 - RNA, 19 nt, Homo sapiens
  misc_RNA (1)...(19): siRNA sense strand
ugaacuuucugguuuaucg

SEQ ID NO: 769651 - RNA, 19 nt, Homo sapiens
  misc_RNA (1)...(19): siRNA sense strand
gagauuccacccaacaaag

SEQ ID NO: 769652 - RNA, 19 nt, Homo sapiens
  misc_RNA (1)...(19): siRNA sense strand
ggguucauaugaugguuuc

SEQ ID NO: 769653 - RNA, 19 nt, Homo sapiens
  misc_RNA (1)...(19): siRNA sense strand
acacacucaugaagcauca

SEQ ID NO: 769654 - RNA, 19 nt, Homo sapiens
  misc_RNA (1)...(19): siRNA sense strand
ggacuggcagaacaacaug

SEQ ID NO: 769655 - RNA, 19 nt, Homo sapiens
  misc_RNA (1)...(19): siRNA sense strand
gagaagccaaacagcaguu

SEQ ID NO: 769656 - RNA, 19 nt, Homo sapiens
  misc_RNA (1)...(19): siRNA sense strand
aggugaacuuucugguuua

SEQ ID NO: 769657 - RNA, 19 nt, Homo sapiens
  misc_RNA (1)...(19): siRNA sense strand
ggagcacaugaaaucaaua

SEQ ID NO: 769658 - RNA, 19 nt, Homo sapiens
  misc_RNA (1)...(19): siRNA sense strand
uggcaagugcuucauuuga

SEQ ID NO: 769659 - RNA, 19 nt, Homo sapiens
  misc_RNA (1)...(19): siRNA sense strand
gcugagauaagcaucaaca

SEQ ID NO: 769660 - RNA, 19 nt, Homo sapiens
  misc_RNA (1)...(19): siRNA sense strand
uagagucccugucccugau

SEQ ID NO: 769661 - RNA, 19 nt, Homo sapiens
  misc_RNA (1)...(19): siRNA sense strand
ugagauuccacccaacaaa

SEQ ID NO: 769662 - RNA, 19 nt, Homo sapiens
  misc_RNA (1)...(19): siRNA sense strand
gugcuucauuugauucuac

SEQ ID NO: 769663 - RNA, 19 nt, Homo sapiens
  misc_RNA (1)...(19): siRNA sense strand
ggaacgcccgaggagauaa

SEQ ID NO: 769664 - RNA, 19 nt, Homo sapiens
  misc_RNA (1)...(19): siRNA sense strand
gcacccacacacucaugaa

SEQ ID NO: 769665 - RNA, 19 nt, Homo sapiens
  misc_RNA (1)...(19): siRNA sense strand
ggagggagcuggacaggua

SEQ ID NO: 769666 - RNA, 19 nt, Homo sapiens
  misc_RNA (1)...(19): siRNA sense strand
ggaauuagaggacugauua

SEQ ID NO: 769667 - RNA, 19 nt, Homo sapiens
  misc_RNA (1)...(19): siRNA sense strand
ccucguggcugauuauuua

SEQ ID NO: 769668 - RNA, 19 nt, Homo sapiens
  misc_RNA (1)...(19): siRNA sense strand
ugaaguauguggagcuuua

SEQ ID NO: 769669 - RNA, 19 nt, Homo sapiens
  misc_RNA (1)...(19): siRNA sense strand
gaacaccuccuucuuugaa

SEQ ID NO: 769670 - RNA, 19 nt, Homo sapiens
  misc_RNA (1)...(19): siRNA sense strand
gcaccaaauugcaucguuu

SEQ ID NO: 769671 - RNA, 19 nt, Homo sapiens
  misc_RNA (1)...(19): siRNA sense strand
ucauagagaucgccaacua

SEQ ID NO: 769672 - RNA, 19 nt, Homo sapiens
  misc_RNA (1)...(19): siRNA sense strand
gagaagaagaggaauguaa

SEQ ID NO: 769673 - RNA, 19 nt, Homo sapiens
  misc_RNA (1)...(19): siRNA sense strand
gaacuuaucauaccucagu

SEQ ID NO: 769674 - RNA, 19 nt, Homo sapiens
  misc_RNA (1)...(19): siRNA sense strand
gcagucaggugguggaaug

SEQ ID NO: 769675 - RNA, 19 nt, Homo sapiens
  misc_RNA (1)...(19): siRNA sense strand
gaucaacacuccggaaauc

SEQ ID NO: 769676 - RNA, 19 nt, Homo sapiens
  misc_RNA (1)...(19): siRNA sense strand
gauuuaaacuccaugaagu

SEQ ID NO: 769677 - RNA, 19 nt, Homo sapiens
  misc_RNA (1)...(19): siRNA sense strand
gggaacaugugugaaguuu

SEQ ID NO: 769678 - RNA, 19 nt, Homo sapiens
  misc_RNA (1)...(19): siRNA sense strand
ggacagguaucugcaguca

SEQ ID NO: 769679 - RNA, 19 nt, Homo sapiens
  misc_RNA (1)...(19): siRNA sense strand
ugacaacgcccaauuaauc

SEQ ID NO: 769680 - RNA, 19 nt, Homo sapiens
  misc_RNA (1)...(19): siRNA sense strand
ggagaagaaugagcaacuu

SEQ ID NO: 769681 - RNA, 19 nt, Homo sapiens
  misc_RNA (1)...(19): siRNA sense strand
cuacaaccauauuugcuuu

SEQ ID NO: 769682 - RNA, 19 nt, Homo sapiens
  misc_RNA (1)...(19): siRNA sense strand
uaaacuccaugaaguaugu

SEQ ID NO: 769683 - RNA, 19 nt, Homo sapiens
  misc_RNA (1)...(19): siRNA sense strand
gaguguggguccuguggua

SEQ ID NO: 769684 - RNA, 19 nt, Homo sapiens
  misc_RNA (1)...(19): siRNA sense strand
ugugguagcuggaguguug

SEQ ID NO: 769685 - RNA, 19 nt, Homo sapiens
  misc_RNA (1)...(19): siRNA sense strand
cgagaugggccacaacuuu

SEQ ID NO: 769686 - RNA, 19 nt, Homo sapiens
  misc_RNA (1)...(19): siRNA sense strand
ggagacaccuuuggaaacu

SEQ ID NO: 769687 - RNA, 19 nt, Homo sapiens
  misc_RNA (1)...(19): siRNA sense strand
ggacaugaauggugaacac

SEQ ID NO: 769688 - RNA, 19 nt, Homo sapiens
  misc_RNA (1)...(19): siRNA sense strand
cacaggaagugcaacauga

SEQ ID NO: 769689 - RNA, 19 nt, Homo sapiens
  misc_RNA (1)...(19): siRNA sense strand
ccaacgcggugcccauuga

SEQ ID NO: 769690 - RNA, 19 nt, Homo sapiens
  misc_RNA (1)...(19): siRNA sense strand
gagaagaaugagcaacuuu

SEQ ID NO: 769691 - RNA, 19 nt, Homo sapiens
  misc_RNA (1)...(19): siRNA sense strand
ccacugcccuaccaacuuc

SEQ ID NO: 769692 - RNA, 19 nt, Homo sapiens
  misc_RNA (1)...(19): siRNA sense strand
ugacaccacuaucaucaug

SEQ ID NO: 769693 - RNA, 19 nt, Homo sapiens
  misc_RNA (1)...(19): siRNA sense strand
gggaagauccagugucaga

SEQ ID NO: 769694 - RNA, 19 nt, Homo sapiens
  misc_RNA (1)...(19): siRNA sense strand
gaacacaggaagugcaaca

SEQ ID NO: 769695 - RNA, 19 nt, Homo sapiens
  misc_RNA (1)...(19): siRNA sense strand
ccaugacaacgcccaauua

SEQ ID NO: 769696 - RNA, 19 nt, Homo sapiens
  misc_RNA (1)...(19): siRNA sense strand
agaaggcacucccggcaaa

SEQ ID NO: 769697 - RNA, 19 nt, Homo sapiens
  misc_RNA (1)...(19): siRNA sense strand
gugggaagauccaguguca

SEQ ID NO: 769698 - RNA, 19 nt, Homo sapiens
  misc_RNA (1)...(19): siRNA sense strand
gagaugggccacaacuuug

SEQ ID NO: 769699 - RNA, 19 nt, Homo sapiens
  misc_RNA (1)...(19): siRNA sense strand
gccaacaccuuauuuacag

SEQ ID NO: 769700 - RNA, 19 nt, Homo sapiens
  misc_RNA (1)...(19): siRNA sense strand
caugagagaugcgaagugu

SEQ ID NO: 769701 - RNA, 19 nt, Homo sapiens
  misc_RNA (1)...(19): siRNA sense strand
aaacacaagcucauagaga

SEQ ID NO: 769702 - RNA, 19 nt, Homo sapiens
  misc_RNA (1)...(19): siRNA sense strand
gaugaaaagggaagauuua

SEQ ID NO: 769703 - RNA, 19 nt, Homo sapiens
  misc_RNA (1)...(19): siRNA sense strand
gaagaagaggaauguaaca

SEQ ID NO: 769704 - RNA, 19 nt, Homo sapiens
  misc_RNA (1)...(19): siRNA sense strand
caugacaacgcccaauuaa

SEQ ID NO: 769705 - RNA, 19 nt, Homo sapiens
  misc_RNA (1)...(19): siRNA sense strand
gaagauuuaaacuccauga

SEQ ID NO: 769706 - RNA, 19 nt, Homo sapiens
  misc_RNA (1)...(19): siRNA sense strand
ccucagcucucccuuccaa

SEQ ID NO: 769707 - RNA, 19 nt, Homo sapiens
  misc_RNA (1)...(19): siRNA sense strand
acacagaaacccauuauac

SEQ ID NO: 769708 - RNA, 19 nt, Homo sapiens
  misc_RNA (1)...(19): siRNA sense strand
caaacuaggccaacucaag

SEQ ID NO: 769709 - RNA, 19 nt, Homo sapiens
  misc_RNA (1)...(19): siRNA sense strand
ggaagugcaacaugagaga

SEQ ID NO: 769710 - RNA, 19 nt, Homo sapiens
  misc_RNA (1)...(19): siRNA sense strand
gcaggagacaccuuuggaa

SEQ ID NO: 769711 - RNA, 19 nt, Homo sapiens
  misc_RNA (1)...(19): siRNA sense strand
acagaaacccauuauacuu

SEQ ID NO: 769712 - RNA, 19 nt, Homo sapiens
  misc_RNA (1)...(19): siRNA sense strand
gcaugugccucaccuacca

SEQ ID NO: 769713 - RNA, 19 nt, Homo sapiens
  misc_RNA (1)...(19): siRNA sense strand
cagaaacccauuauacuuc

SEQ ID NO: 769714 - RNA, 19 nt, Homo sapiens
  misc_RNA (1)...(19): siRNA sense strand
agaaacccauuauacuuca

SEQ ID NO: 769715 - RNA, 19 nt, Homo sapiens
  misc_RNA (1)...(19): siRNA sense strand
gcagacagaacaacaaacu

SEQ ID NO: 769716 - RNA, 19 nt, Homo sapiens
  misc_RNA (1)...(19): siRNA sense strand
uuacacaacagaccaagaa

SEQ ID NO: 769717 - RNA, 19 nt, Homo sapiens
  misc_RNA (1)...(19): siRNA sense strand
gaaacccauuauacuucaa

SEQ ID NO: 769718 - RNA, 19 nt, Homo sapiens
  misc_RNA (1)...(19): siRNA sense strand
gggaagauuuaaacuccau

SEQ ID NO: 769719 - RNA, 19 nt, Homo sapiens
  misc_RNA (1)...(19): siRNA sense strand
gcccagaaguaccaugaca

SEQ ID NO: 769720 - RNA, 19 nt, Homo sapiens
  misc_RNA (1)...(19): siRNA sense strand
ggaacaccuccuucuuuga

SEQ ID NO: 769721 - RNA, 19 nt, Homo sapiens
  misc_RNA (1)...(19): siRNA sense strand
gcucuucaguuuacacaac

SEQ ID NO: 769722 - RNA, 19 nt, Homo sapiens
  misc_RNA (1)...(19): siRNA sense strand
aaguguggcuacaaccaua

SEQ ID NO: 769723 - RNA, 19 nt, Homo sapiens
  misc_RNA (1)...(19): siRNA sense strand
acaccaggauguuguaugg

SEQ ID NO: 769724 - RNA, 19 nt, Homo sapiens
  misc_RNA (1)...(19): siRNA sense strand
gacaacgcccaauuaauca

SEQ ID NO: 769725 - RNA, 19 nt, Homo sapiens
  misc_RNA (1)...(19): siRNA sense strand
aacacaagcucauagagau

SEQ ID NO: 769726 - RNA, 19 nt, Homo sapiens
  misc_RNA (1)...(19): siRNA sense strand
ccaaacacaagcucauaga

SEQ ID NO: 769727 - RNA, 19 nt, Homo sapiens
  misc_RNA (1)...(19): siRNA sense strand
gcuccuuccuacacagaaa

SEQ ID NO: 769728 - RNA, 19 nt, Homo sapiens
  misc_RNA (1)...(19): siRNA sense strand
caggagacaccuuuggaaa

SEQ ID NO: 769729 - RNA, 19 nt, Homo sapiens
  misc_RNA (1)...(19): siRNA sense strand
gaaccaaguguggcuacaa

SEQ ID NO: 769730 - RNA, 19 nt, Homo sapiens
  misc_RNA (1)...(19): siRNA sense strand
gcagcaaccucagcuacgu

SEQ ID NO: 769731 - RNA, 19 nt, Homo sapiens
  misc_RNA (1)...(19): siRNA sense strand
agacagaacaacaaacuag

SEQ ID NO: 769732 - RNA, 19 nt, Homo sapiens
  misc_RNA (1)...(19): siRNA sense strand
gaugcgaagugugggaaga

SEQ ID NO: 769733 - RNA, 19 nt, Homo sapiens
  misc_RNA (1)...(19): siRNA sense strand
ggccaacaccuuauuuaca

SEQ ID NO: 769734 - RNA, 19 nt, Homo sapiens
  misc_RNA (1)...(19): siRNA sense strand
gaaaagggaagauuuaaac

SEQ ID NO: 769735 - RNA, 19 nt, Homo sapiens
  misc_RNA (1)...(19): siRNA sense strand
caccauggcccacgagaug

SEQ ID NO: 769736 - RNA, 19 nt, Homo sapiens
  misc_RNA (1)...(19): siRNA sense strand
agagaucgccaacuauguu

SEQ ID NO: 769737 - RNA, 19 nt, Homo sapiens
  misc_RNA (1)...(19): siRNA sense strand
ggcugauuauuuagaguuu

SEQ ID NO: 769738 - RNA, 19 nt, Homo sapiens
  misc_RNA (1)...(19): siRNA sense strand
acaaccauauuugcuuuga

SEQ ID NO: 769739 - RNA, 19 nt, Homo sapiens
  misc_RNA (1)...(19): siRNA sense strand
gcuacaaccauauuugcuu

SEQ ID NO: 769740 - RNA, 19 nt, Homo sapiens
  misc_RNA (1)...(19): siRNA sense strand
ccaacaccuuauuuacaga

SEQ ID NO: 769741 - RNA, 19 nt, Homo sapiens
  misc_RNA (1)...(19): siRNA sense strand
agaaaagcauccacucaaa

SEQ ID NO: 769742 - RNA, 19 nt, Homo sapiens
  misc_RNA (1)...(19): siRNA sense strand
caaaccaccacacggaaau

SEQ ID NO: 769743 - RNA, 19 nt, Homo sapiens
  misc_RNA (1)...(19): siRNA sense strand
ggagaagaagaggaaugua

SEQ ID NO: 769744 - RNA, 19 nt, Homo sapiens
  misc_RNA (1)...(19): siRNA sense strand
gcacggugagggagacaga

SEQ ID NO: 769745 - RNA, 19 nt, Homo sapiens
  misc_RNA (1)...(19): siRNA sense strand
ggaaugugucucuccaaca

SEQ ID NO: 769746 - RNA, 19 nt, Homo sapiens
  misc_RNA (1)...(19): siRNA sense strand
cuacacagaaacccauuau

SEQ ID NO: 769747 - RNA, 19 nt, Homo sapiens
  misc_RNA (1)...(19): siRNA sense strand
agacaccuuuggaaacugu

SEQ ID NO: 769748 - RNA, 19 nt, Homo sapiens
  misc_RNA (1)...(19): siRNA sense strand
gccccaagcugcagcauga

SEQ ID NO: 769749 - RNA, 19 nt, Homo sapiens
  misc_RNA (1)...(19): siRNA sense strand
caccaaacacaagcucaua

SEQ ID NO: 769750 - RNA, 19 nt, Homo sapiens
  misc_RNA (1)...(19): siRNA sense strand
caacaaacuaggccaacuc

SEQ ID NO: 769751 - RNA, 19 nt, Homo sapiens
  misc_RNA (1)...(19): siRNA sense strand
gugugacuguggagaagaa

SEQ ID NO: 769752 - RNA, 19 nt, Homo sapiens
  misc_RNA (1)...(19): siRNA sense strand
ggaacggguaucuggaaga

SEQ ID NO: 769753 - RNA, 19 nt, Homo sapiens
  misc_RNA (1)...(19): siRNA sense strand
gagaaaagcauccacucaa

SEQ ID NO: 769754 - RNA, 19 nt, Homo sapiens
  misc_RNA (1)...(19): siRNA sense strand
ucaaaccaccacacggaaa

SEQ ID NO: 769755 - RNA, 19 nt, Homo sapiens
  misc_RNA (1)...(19): siRNA sense strand
ggucaugccaacccaacuu

SEQ ID NO: 769756 - RNA, 19 nt, Homo sapiens
  misc_RNA (1)...(19): siRNA sense strand
guggaaaggacaugaaugg

SEQ ID NO: 769757 - RNA, 19 nt, Homo sapiens
  misc_RNA (1)...(19): siRNA sense strand
cccaaaguguucaauggau

SEQ ID NO: 769758 - RNA, 19 nt, Homo sapiens
  misc_RNA (1)...(19): siRNA sense strand
gaacagcgggacuggucau

SEQ ID NO: 769759 - RNA, 19 nt, Homo sapiens
  misc_RNA (1)...(19): siRNA sense strand
gaguguugguggccaucuu

SEQ ID NO: 769760 - RNA, 19 nt, Homo sapiens
  misc_RNA (1)...(19): siRNA sense strand
acugaaggcugugggaaga

SEQ ID NO: 769761 - RNA, 19 nt, Homo sapiens
  misc_RNA (1)...(19): siRNA sense strand
ggaaccaaguguggcuaca

SEQ ID NO: 769762 - RNA, 19 nt, Homo sapiens
  misc_RNA (1)...(19): siRNA sense strand
cuaccaacuucuaccagau

SEQ ID NO: 769763 - RNA, 19 nt, Homo sapiens
  misc_RNA (1)...(19): siRNA sense strand
cacggaaauuggaggauca

SEQ ID NO: 769764 - RNA, 19 nt, Homo sapiens
  misc_RNA (1)...(19): siRNA sense strand
guaacaacaaccagaacug

SEQ ID NO: 769765 - RNA, 19 nt, Homo sapiens
  misc_RNA (1)...(19): siRNA sense strand
ggagggagcuggacaggua

SEQ ID NO: 769766 - RNA, 19 nt, Homo sapiens
  misc_RNA (1)...(19): siRNA sense strand
ggaauuagaggacugauua

SEQ ID NO: 769767 - RNA, 19 nt, Homo sapiens
  misc_RNA (1)...(19): siRNA sense strand
ccucguggcugauuauuua

SEQ ID NO: 769768 - RNA, 19 nt, Homo sapiens
  misc_RNA (1)...(19): siRNA sense strand
ugaaguauguggagcuuua

SEQ ID NO: 769769 - RNA, 19 nt, Homo sapiens
  misc_RNA (1)...(19): siRNA sense strand
gaacaccuccuucuuugaa

SEQ ID NO: 769770 - RNA, 19 nt, Homo sapiens
  misc_RNA (1)...(19): siRNA sense strand
gcaccaaauugcaucguuu

SEQ ID NO: 769771 - RNA, 19 nt, Homo sapiens
  misc_RNA (1)...(19): siRNA sense strand
ucauagagaucgccaacua

SEQ ID NO: 769772 - RNA, 19 nt, Homo sapiens
  misc_RNA (1)...(19): siRNA sense strand
gagaagaagaggaauguaa

SEQ ID NO: 769773 - RNA, 19 nt, Homo sapiens
  misc_RNA (1)...(19): siRNA sense strand
gaacuuaucauaccucagu

SEQ ID NO: 769774 - RNA, 19 nt, Homo sapiens
  misc_RNA (1)...(19): siRNA sense strand
gcagucaggugguggaaug

SEQ ID NO: 769775 - RNA, 19 nt, Homo sapiens
  misc_RNA (1)...(19): siRNA sense strand
gaucaacacuccggaaauc

SEQ ID NO: 769776 - RNA, 19 nt, Homo sapiens
  misc_RNA (1)...(19): siRNA sense strand
gauuuaaacuccaugaagu

SEQ ID NO: 769777 - RNA, 19 nt, Homo sapiens
  misc_RNA (1)...(19): siRNA sense strand
gggaacaugugugaaguuu

SEQ ID NO: 769778 - RNA, 19 nt, Homo sapiens
  misc_RNA (1)...(19): siRNA sense strand
ggacagguaucugcaguca

SEQ ID NO: 769779 - RNA, 19 nt, Homo sapiens
  misc_RNA (1)...(19): siRNA sense strand
ugacaacgcccaauuaauc

SEQ ID NO: 769780 - RNA, 19 nt, Homo sapiens
  misc_RNA (1)...(19): siRNA sense strand
ggagaagaaugagcaacuu

SEQ ID NO: 769781 - RNA, 19 nt, Homo sapiens
  misc_RNA (1)...(19): siRNA sense strand
cuacaaccauauuugcuuu

SEQ ID NO: 769782 - RNA, 19 nt, Homo sapiens
  misc_RNA (1)...(19): siRNA sense strand
uaaacuccaugaaguaugu

SEQ ID NO: 769783 - RNA, 19 nt, Homo sapiens
  misc_RNA (1)...(19): siRNA sense strand
gaguguggguccuguggua

SEQ ID NO: 769784 - RNA, 19 nt, Homo sapiens
  misc_RNA (1)...(19): siRNA sense strand
ugugguagcuggaguguug

SEQ ID NO: 769785 - RNA, 19 nt, Homo sapiens
  misc_RNA (1)...(19): siRNA sense strand
cgagaugggccacaacuuu

SEQ ID NO: 769786 - RNA, 19 nt, Homo sapiens
  misc_RNA (1)...(19): siRNA sense strand
ggagacaccuuuggaaacu

SEQ ID NO: 769787 - RNA, 19 nt, Homo sapiens
  misc_RNA (1)...(19): siRNA sense strand
ggacaugaauggugaacac

SEQ ID NO: 769788 - RNA, 19 nt, Homo sapiens
  misc_RNA (1)...(19): siRNA sense strand
cacaggaagugcaacauga

SEQ ID NO: 769789 - RNA, 19 nt, Homo sapiens
  misc_RNA (1)...(19): siRNA sense strand
ccaacgcggugcccauuga

SEQ ID NO: 769790 - RNA, 19 nt, Homo sapiens
  misc_RNA (1)...(19): siRNA sense strand
gagaagaaugagcaacuuu

SEQ ID NO: 769791 - RNA, 19 nt, Homo sapiens
  misc_RNA (1)...(19): siRNA sense strand
ccacugcccuaccaacuuc

SEQ ID NO: 769792 - RNA, 19 nt, Homo sapiens
  misc_RNA (1)...(19): siRNA sense strand
ugacaccacuaucaucaug

SEQ ID NO: 769793 - RNA, 19 nt, Homo sapiens
  misc_RNA (1)...(19): siRNA sense strand
gggaagauccagugucaga

SEQ ID NO: 769794 - RNA, 19 nt, Homo sapiens
  misc_RNA (1)...(19): siRNA sense strand
gaacacaggaagugcaaca

SEQ ID NO: 769795 - RNA, 19 nt, Homo sapiens
  misc_RNA (1)...(19): siRNA sense strand
ccaugacaacgcccaauua

SEQ ID NO: 769796 - RNA, 19 nt, Homo sapiens
  misc_RNA (1)...(19): siRNA sense strand
agaaggcacucccggcaaa

SEQ ID NO: 769797 - RNA, 19 nt, Homo sapiens
  misc_RNA (1)...(19): siRNA sense strand
gugggaagauccaguguca

SEQ ID NO: 769798 - RNA, 19 nt, Homo sapiens
  misc_RNA (1)...(19): siRNA sense strand
gagaugggccacaacuuug

SEQ ID NO: 769799 - RNA, 19 nt, Homo sapiens
  misc_RNA (1)...(19): siRNA sense strand
gccaacaccuuauuuacag

SEQ ID NO: 769800 - RNA, 19 nt, Homo sapiens
  misc_RNA (1)...(19): siRNA sense strand
caugagagaugcgaagugu

SEQ ID NO: 769801 - RNA, 19 nt, Homo sapiens
  misc_RNA (1)...(19): siRNA sense strand
aaacacaagcucauagaga

SEQ ID NO: 769802 - RNA, 19 nt, Homo sapiens
  misc_RNA (1)...(19): siRNA sense strand
gaugaaaagggaagauuua

SEQ ID NO: 769803 - RNA, 19 nt, Homo sapiens
  misc_RNA (1)...(19): siRNA sense strand
gaagaagaggaauguaaca

SEQ ID NO: 769804 - RNA, 19 nt, Homo sapiens
  misc_RNA (1)...(19): siRNA sense strand
caugacaacgcccaauuaa

SEQ ID NO: 769805 - RNA, 19 nt, Homo sapiens
  misc_RNA (1)...(19): siRNA sense strand
gaagauuuaaacuccauga

SEQ ID NO: 769806 - RNA, 19 nt, Homo sapiens
  misc_RNA (1)...(19): siRNA sense strand
ccucagcucucccuuccaa

SEQ ID NO: 769807 - RNA, 19 nt, Homo sapiens
  misc_RNA (1)...(19): siRNA sense strand
acacagaaacccauuauac

SEQ ID NO: 769808 - RNA, 19 nt, Homo sapiens
  misc_RNA (1)...(19): siRNA sense strand
caaacuaggccaacucaag

SEQ ID NO: 769809 - RNA, 19 nt, Homo sapiens
  misc_RNA (1)...(19): siRNA sense strand
ggaagugcaacaugagaga

SEQ ID NO: 769810 - RNA, 19 nt, Homo sapiens
  misc_RNA (1)...(19): siRNA sense strand
gcaggagacaccuuuggaa

SEQ ID NO: 769811 - RNA, 19 nt, Homo sapiens
  misc_RNA (1)...(19): siRNA sense strand
acagaaacccauuauacuu

SEQ ID NO: 769812 - RNA, 19 nt, Homo sapiens
  misc_RNA (1)...(19): siRNA sense strand
gcaugugccucaccuacca

SEQ ID NO: 769813 - RNA, 19 nt, Homo sapiens
  misc_RNA (1)...(19): siRNA sense strand
cagaaacccauuauacuuc

SEQ ID NO: 769814 - RNA, 19 nt, Homo sapiens
  misc_RNA (1)...(19): siRNA sense strand
agaaacccauuauacuuca

SEQ ID NO: 769815 - RNA, 19 nt, Homo sapiens
  misc_RNA (1)...(19): siRNA sense strand
gcagacagaacaacaaacu

SEQ ID NO: 769816 - RNA, 19 nt, Homo sapiens
  misc_RNA (1)...(19): siRNA sense strand
uuacacaacagaccaagaa

SEQ ID NO: 769817 - RNA, 19 nt, Homo sapiens
  misc_RNA (1)...(19): siRNA sense strand
gaaacccauuauacuucaa

SEQ ID NO: 769818 - RNA, 19 nt, Homo sapiens
  misc_RNA (1)...(19): siRNA sense strand
gggaagauuuaaacuccau

SEQ ID NO: 769819 - RNA, 19 nt, Homo sapiens
  misc_RNA (1)...(19): siRNA sense strand
gcccagaaguaccaugaca

SEQ ID NO: 769820 - RNA, 19 nt, Homo sapiens
  misc_RNA (1)...(19): siRNA sense strand
ggaacaccuccuucuuuga

SEQ ID NO: 769821 - RNA, 19 nt, Homo sapiens
  misc_RNA (1)...(19): siRNA sense strand
gcucuucaguuuacacaac

SEQ ID NO: 769822 - RNA, 19 nt, Homo sapiens
  misc_RNA (1)...(19): siRNA sense strand
aaguguggcuacaaccaua

SEQ ID NO: 769823 - RNA, 19 nt, Homo sapiens
  misc_RNA (1)...(19): siRNA sense strand
acaccaggauguuguaugg

SEQ ID NO: 769824 - RNA, 19 nt, Homo sapiens
  misc_RNA (1)...(19): siRNA sense strand
gacaacgcccaauuaauca

SEQ ID NO: 769825 - RNA, 19 nt, Homo sapiens
  misc_RNA (1)...(19): siRNA sense strand
aacacaagcucauagagau

SEQ ID NO: 769826 - RNA, 19 nt, Homo sapiens
  misc_RNA (1)...(19): siRNA sense strand
ccaaacacaagcucauaga

SEQ ID NO: 769827 - RNA, 19 nt, Homo sapiens
  misc_RNA (1)...(19): siRNA sense strand
gcuccuuccuacacagaaa

SEQ ID NO: 769828 - RNA, 19 nt, Homo sapiens
  misc_RNA (1)...(19): siRNA sense strand
caggagacaccuuuggaaa

SEQ ID NO: 769829 - RNA, 19 nt, Homo sapiens
  misc_RNA (1)...(19): siRNA sense strand
gaaccaaguguggcuacaa

SEQ ID NO: 769830 - RNA, 19 nt, Homo sapiens
  misc_RNA (1)...(19): siRNA sense strand
gcagcaaccucagcuacgu

SEQ ID NO: 769831 - RNA, 19 nt, Homo sapiens
  misc_RNA (1)...(19): siRNA sense strand
agacagaacaacaaacuag

SEQ ID NO: 769832 - RNA, 19 nt, Homo sapiens
  misc_RNA (1)...(19): siRNA sense strand
gaugcgaagugugggaaga

SEQ ID NO: 769833 - RNA, 19 nt, Homo sapiens
  misc_RNA (1)...(19): siRNA sense strand
ggccaacaccuuauuuaca

SEQ ID NO: 769834 - RNA, 19 nt, Homo sapiens
  misc_RNA (1)...(19): siRNA sense strand
gaaaagggaagauuuaaac

SEQ ID NO: 769835 - RNA, 19 nt, Homo sapiens
  misc_RNA (1)...(19): siRNA sense strand
caccauggcccacgagaug

SEQ ID NO: 769836 - RNA, 19 nt, Homo sapiens
  misc_RNA (1)...(19): siRNA sense strand
agagaucgccaacuauguu

SEQ ID NO: 769837 - RNA, 19 nt, Homo sapiens
  misc_RNA (1)...(19): siRNA sense strand
ggcugauuauuuagaguuu

SEQ ID NO: 769838 - RNA, 19 nt, Homo sapiens
  misc_RNA (1)...(19): siRNA sense strand
acaaccauauuugcuuuga

SEQ ID NO: 769839 - RNA, 19 nt, Homo sapiens
  misc_RNA (1)...(19): siRNA sense strand
gcuacaaccauauuugcuu

SEQ ID NO: 769840 - RNA, 19 nt, Homo sapiens
  misc_RNA (1)...(19): siRNA sense strand
ccaacaccuuauuuacaga

SEQ ID NO: 769841 - RNA, 19 nt, Homo sapiens
  misc_RNA (1)...(19): siRNA sense strand
agaaaagcauccacucaaa

SEQ ID NO: 769842 - RNA, 19 nt, Homo sapiens
  misc_RNA (1)...(19): siRNA sense strand
caaaccaccacacggaaau

SEQ ID NO: 769843 - RNA, 19 nt, Homo sapiens
  misc_RNA (1)...(19): siRNA sense strand
ggagaagaagaggaaugua

SEQ ID NO: 769844 - RNA, 19 nt, Homo sapiens
  misc_RNA (1)...(19): siRNA sense strand
gcacggugagggagacaga

SEQ ID NO: 769845 - RNA, 19 nt, Homo sapiens
  misc_RNA (1)...(19): siRNA sense strand
ggaaugugucucuccaaca

SEQ ID NO: 769846 - RNA, 19 nt, Homo sapiens
  misc_RNA (1)...(19): siRNA sense strand
cuacacagaaacccauuau

SEQ ID NO: 769847 - RNA, 19 nt, Homo sapiens
  misc_RNA (1)...(19): siRNA sense strand
agacaccuuuggaaacugu

SEQ ID NO: 769848 - RNA, 19 nt, Homo sapiens
  misc_RNA (1)...(19): siRNA sense strand
gccccaagcugcagcauga

SEQ ID NO: 769849 - RNA, 19 nt, Homo sapiens
  misc_RNA (1)...(19): siRNA sense strand
caccaaacacaagcucaua

SEQ ID NO: 769850 - RNA, 19 nt, Homo sapiens
  misc_RNA (1)...(19): siRNA sense strand
caacaaacuaggccaacuc

SEQ ID NO: 769851 - RNA, 19 nt, Homo sapiens
  misc_RNA (1)...(19): siRNA sense strand
gugugacuguggagaagaa

SEQ ID NO: 769852 - RNA, 19 nt, Homo sapiens
  misc_RNA (1)...(19): siRNA sense strand
ggaacggguaucuggaaga

SEQ ID NO: 769853 - RNA, 19 nt, Homo sapiens
  misc_RNA (1)...(19): siRNA sense strand
gagaaaagcauccacucaa

SEQ ID NO: 769854 - RNA, 19 nt, Homo sapiens
  misc_RNA (1)...(19): siRNA sense strand
ucaaaccaccacacggaaa

SEQ ID NO: 769855 - RNA, 19 nt, Homo sapiens
  misc_RNA (1)...(19): siRNA sense strand
ggucaugccaacccaacuu

SEQ ID NO: 769856 - RNA, 19 nt, Homo sapiens
  misc_RNA (1)...(19): siRNA sense strand
guggaaaggacaugaaugg

SEQ ID NO: 769857 - RNA, 19 nt, Homo sapiens
  misc_RNA (1)...(19): siRNA sense strand
cccaaaguguucaauggau

SEQ ID NO: 769858 - RNA, 19 nt, Homo sapiens
  misc_RNA (1)...(19): siRNA sense strand
gaacagcgggacuggucau

SEQ ID NO: 769859 - RNA, 19 nt, Homo sapiens
  misc_RNA (1)...(19): siRNA sense strand
gaguguugguggccaucuu

SEQ ID NO: 769860 - RNA, 19 nt, Homo sapiens
  misc_RNA (1)...(19): siRNA sense strand
acugaaggcugugggaaga

SEQ ID NO: 769861 - RNA, 19 nt, Homo sapiens
  misc_RNA (1)...(19): siRNA sense strand
ggaaccaaguguggcuaca

SEQ ID NO: 769862 - RNA, 19 nt, Homo sapiens
  misc_RNA (1)...(19): siRNA sense strand
cuaccaacuucuaccagau

SEQ ID NO: 769863 - RNA, 19 nt, Homo sapiens
  misc_RNA (1)...(19): siRNA sense strand
cacggaaauuggaggauca

SEQ ID NO: 769864 - RNA, 19 nt, Homo sapiens
  misc_RNA (1)...(19): siRNA sense strand
guaacaacaaccagaacug

SEQ ID NO: 769865 - RNA, 19 nt, Homo sapiens
  misc_RNA (1)...(19): siRNA sense strand
gaacugaccugcccuauuu

SEQ ID NO: 769866 - RNA, 19 nt, Homo sapiens
  misc_RNA (1)...(19): siRNA sense strand
cagcaaagacgacagauua

SEQ ID NO: 769867 - RNA, 19 nt, Homo sapiens
  misc_RNA (1)...(19): siRNA sense strand
gcugauagcuggaugauag

SEQ ID NO: 769868 - RNA, 19 nt, Homo sapiens
  misc_RNA (1)...(19): siRNA sense strand
gaacaagugucugacgauu

SEQ ID NO: 769869 - RNA, 19 nt, Homo sapiens
  misc_RNA (1)...(19): siRNA sense strand
acaaacagccaaccauuua

SEQ ID NO: 769870 - RNA, 19 nt, Homo sapiens
  misc_RNA (1)...(19): siRNA sense strand
agaagaaacugcuagaaug

SEQ ID NO: 769871 - RNA, 19 nt, Homo sapiens
  misc_RNA (1)...(19): siRNA sense strand
caugauaacuugacaguag

SEQ ID NO: 769872 - RNA, 19 nt, Homo sapiens
  misc_RNA (1)...(19): siRNA sense strand
ggagugugaucuucucauu

SEQ ID NO: 769873 - RNA, 19 nt, Homo sapiens
  misc_RNA (1)...(19): siRNA sense strand
gaaaucaaccucaaugaca

SEQ ID NO: 769874 - RNA, 19 nt, Homo sapiens
  misc_RNA (1)...(19): siRNA sense strand
gaaagccacucacccgaau

SEQ ID NO: 769875 - RNA, 19 nt, Homo sapiens
  misc_RNA (1)...(19): siRNA sense strand
gcacacagccucugcuuca

SEQ ID NO: 769876 - RNA, 19 nt, Homo sapiens
  misc_RNA (1)...(19): siRNA sense strand
caaacuggcucagcagauu

SEQ ID NO: 769877 - RNA, 19 nt, Homo sapiens
  misc_RNA (1)...(19): siRNA sense strand
uaacggcucuaucgccuuu

SEQ ID NO: 769878 - RNA, 19 nt, Homo sapiens
  misc_RNA (1)...(19): siRNA sense strand
gugaauauguacuguguga

SEQ ID NO: 769879 - RNA, 19 nt, Homo sapiens
  misc_RNA (1)...(19): siRNA sense strand
caaagacgacagauuauug

SEQ ID NO: 769880 - RNA, 19 nt, Homo sapiens
  misc_RNA (1)...(19): siRNA sense strand
gagaagaaacugcuagaau

SEQ ID NO: 769881 - RNA, 19 nt, Homo sapiens
  misc_RNA (1)...(19): siRNA sense strand
acaagugucugacgauuau

SEQ ID NO: 769882 - RNA, 19 nt, Homo sapiens
  misc_RNA (1)...(19): siRNA sense strand
gaagaaacugcuagaaugu

SEQ ID NO: 769883 - RNA, 19 nt, Homo sapiens
  misc_RNA (1)...(19): siRNA sense strand
ugacacauuugacaccuuu

SEQ ID NO: 769884 - RNA, 19 nt, Homo sapiens
  misc_RNA (1)...(19): siRNA sense strand
gcagugagccugggaaguu

SEQ ID NO: 769885 - RNA, 19 nt, Homo sapiens
  misc_RNA (1)...(19): siRNA sense strand
gaagaccugugucacuugu

SEQ ID NO: 769886 - RNA, 19 nt, Homo sapiens
  misc_RNA (1)...(19): siRNA sense strand
gcaaagacgacagauuauu

SEQ ID NO: 769887 - RNA, 19 nt, Homo sapiens
  misc_RNA (1)...(19): siRNA sense strand
gcaaggaaauccccauuga

SEQ ID NO: 769888 - RNA, 19 nt, Homo sapiens
  misc_RNA (1)...(19): siRNA sense strand
gaaguggucauaaguggaa

SEQ ID NO: 769889 - RNA, 19 nt, Homo sapiens
  misc_RNA (1)...(19): siRNA sense strand
ccaaaccugucaacauguu

SEQ ID NO: 769890 - RNA, 19 nt, Homo sapiens
  misc_RNA (1)...(19): siRNA sense strand
uaaacuggaucccaaaucu

SEQ ID NO: 769891 - RNA, 19 nt, Homo sapiens
  misc_RNA (1)...(19): siRNA sense strand
gacaaacagccaaccauuu

SEQ ID NO: 769892 - RNA, 19 nt, Homo sapiens
  misc_RNA (1)...(19): siRNA sense strand
ccacucacccgaauaagaa

SEQ ID NO: 769893 - RNA, 19 nt, Homo sapiens
  misc_RNA (1)...(19): siRNA sense strand
ugugaccgaugaccaguua

SEQ ID NO: 769894 - RNA, 19 nt, Homo sapiens
  misc_RNA (1)...(19): siRNA sense strand
uggaguagcuggaaaugug

SEQ ID NO: 769895 - RNA, 19 nt, Homo sapiens
  misc_RNA (1)...(19): siRNA sense strand
gaagguccucugccaguuu

SEQ ID NO: 769896 - RNA, 19 nt, Homo sapiens
  misc_RNA (1)...(19): siRNA sense strand
cuggaaauguguuuauuga

SEQ ID NO: 769897 - RNA, 19 nt, Homo sapiens
  misc_RNA (1)...(19): siRNA sense strand
gaugagaaggugaauaugu

SEQ ID NO: 769898 - RNA, 19 nt, Homo sapiens
  misc_RNA (1)...(19): siRNA sense strand
augagaaggugaauaugua

SEQ ID NO: 769899 - RNA, 19 nt, Homo sapiens
  misc_RNA (1)...(19): siRNA sense strand
gcauccugcuggacuauga

SEQ ID NO: 769900 - RNA, 19 nt, Homo sapiens
  misc_RNA (1)...(19): siRNA sense strand
cugaaggugucccaugaua

SEQ ID NO: 769901 - RNA, 19 nt, Homo sapiens
  misc_RNA (1)...(19): siRNA sense strand
ccaaguacaucuucauggu

SEQ ID NO: 769902 - RNA, 19 nt, Homo sapiens
  misc_RNA (1)...(19): siRNA sense strand
agugugaucuucucauuga

SEQ ID NO: 769903 - RNA, 19 nt, Homo sapiens
  misc_RNA (1)...(19): siRNA sense strand
gaaggugaauauguacugu

SEQ ID NO: 769904 - RNA, 19 nt, Homo sapiens
  misc_RNA (1)...(19): siRNA sense strand
cuacagacugcuaagaaua

SEQ ID NO: 769905 - RNA, 19 nt, Homo sapiens
  misc_RNA (1)...(19): siRNA sense strand
guuaaucugugccuugugu

SEQ ID NO: 769906 - RNA, 19 nt, Homo sapiens
  misc_RNA (1)...(19): siRNA sense strand
ccaaaucugcucaucgaaa

SEQ ID NO: 769907 - RNA, 19 nt, Homo sapiens
  misc_RNA (1)...(19): siRNA sense strand
gaaugucuggauuaccuua

SEQ ID NO: 769908 - RNA, 19 nt, Homo sapiens
  misc_RNA (1)...(19): siRNA sense strand
ugagcgcuaugacaaauug

SEQ ID NO: 769909 - RNA, 19 nt, Homo sapiens
  misc_RNA (1)...(19): siRNA sense strand
gaccuccgaugaugaguuc

SEQ ID NO: 769910 - RNA, 19 nt, Homo sapiens
  misc_RNA (1)...(19): siRNA sense strand
agaaugaucaugcgcguuu

SEQ ID NO: 769911 - RNA, 19 nt, Homo sapiens
  misc_RNA (1)...(19): siRNA sense strand
aaacagccaaccauuuaaa

SEQ ID NO: 769912 - RNA, 19 nt, Homo sapiens
  misc_RNA (1)...(19): siRNA sense strand
caaacagccaaccauuuaa

SEQ ID NO: 769913 - RNA, 19 nt, Homo sapiens
  misc_RNA (1)...(19): siRNA sense strand
gauaguacccaacaucaag

SEQ ID NO: 769914 - RNA, 19 nt, Homo sapiens
  misc_RNA (1)...(19): siRNA sense strand
caaaucugcucaucgaaaa

SEQ ID NO: 769915 - RNA, 19 nt, Homo sapiens
  misc_RNA (1)...(19): siRNA sense strand
gagacacaauagcaaggaa

SEQ ID NO: 769916 - RNA, 19 nt, Homo sapiens
  misc_RNA (1)...(19): siRNA sense strand
gaaggugucccaugauaac

SEQ ID NO: 769917 - RNA, 19 nt, Homo sapiens
  misc_RNA (1)...(19): siRNA sense strand
gagcuccaguacaccauau

SEQ ID NO: 769918 - RNA, 19 nt, Homo sapiens
  misc_RNA (1)...(19): siRNA sense strand
ucccaacccucccacaauu

SEQ ID NO: 769919 - RNA, 19 nt, Homo sapiens
  misc_RNA (1)...(19): siRNA sense strand
gcuuggagcaugaggauga

SEQ ID NO: 769920 - RNA, 19 nt, Homo sapiens
  misc_RNA (1)...(19): siRNA sense strand
ggugucccaugauaacuug

SEQ ID NO: 769921 - RNA, 19 nt, Homo sapiens
  misc_RNA (1)...(19): siRNA sense strand
gaugaggcuucgcaaacug

SEQ ID NO: 769922 - RNA, 19 nt, Homo sapiens
  misc_RNA (1)...(19): siRNA sense strand
gcuagaaugucuggauuac

SEQ ID NO: 769923 - RNA, 19 nt, Homo sapiens
  misc_RNA (1)...(19): siRNA sense strand
uaaccucaccaaccuuauu

SEQ ID NO: 769924 - RNA, 19 nt, Homo sapiens
  misc_RNA (1)...(19): siRNA sense strand
cgaauaagaagcccuuuac

SEQ ID NO: 769925 - RNA, 19 nt, Homo sapiens
  misc_RNA (1)...(19): siRNA sense strand
cugggaaguugaagacaaa

SEQ ID NO: 769926 - RNA, 19 nt, Homo sapiens
  misc_RNA (1)...(19): siRNA sense strand
gcucugcacagcuucauau

SEQ ID NO: 769927 - RNA, 19 nt, Homo sapiens
  misc_RNA (1)...(19): siRNA sense strand
gagagaagaaacugcuaga

SEQ ID NO: 769928 - RNA, 19 nt, Homo sapiens
  misc_RNA (1)...(19): siRNA sense strand
ugagaucauucagcaaaga

SEQ ID NO: 769929 - RNA, 19 nt, Homo sapiens
  misc_RNA (1)...(19): siRNA sense strand
caaugcaucacgucaagaa

SEQ ID NO: 769930 - RNA, 19 nt, Homo sapiens
  misc_RNA (1)...(19): siRNA sense strand
gaauaagaagcccuuuaca

SEQ ID NO: 769931 - RNA, 19 nt, Homo sapiens
  misc_RNA (1)...(19): siRNA sense strand
ccgaauaagaagcccuuua

SEQ ID NO: 769932 - RNA, 19 nt, Homo sapiens
  misc_RNA (1)...(19): siRNA sense strand
gcuggaaauguguuuauug

SEQ ID NO: 769933 - RNA, 19 nt, Homo sapiens
  misc_RNA (1)...(19): siRNA sense strand
uagaaugucuggauuaccu

SEQ ID NO: 769934 - RNA, 19 nt, Homo sapiens
  misc_RNA (1)...(19): siRNA sense strand
ccuacagacugcuaagaau

SEQ ID NO: 769935 - RNA, 19 nt, Homo sapiens
  misc_RNA (1)...(19): siRNA sense strand
uggcuaaacucauccaaac

SEQ ID NO: 769936 - RNA, 19 nt, Homo sapiens
  misc_RNA (1)...(19): siRNA sense strand
aagcaaaacuuagagagua

SEQ ID NO: 769937 - RNA, 19 nt, Homo sapiens
  misc_RNA (1)...(19): siRNA sense strand
ugagugagcgcuaugacaa

SEQ ID NO: 769938 - RNA, 19 nt, Homo sapiens
  misc_RNA (1)...(19): siRNA sense strand
ugacaccuuugccuuagau

SEQ ID NO: 769939 - RNA, 19 nt, Homo sapiens
  misc_RNA (1)...(19): siRNA sense strand
aguagaacgugaugaguca

SEQ ID NO: 769940 - RNA, 19 nt, Homo sapiens
  misc_RNA (1)...(19): siRNA sense strand
ucccaaaucugcucaucga

SEQ ID NO: 769941 - RNA, 19 nt, Homo sapiens
  misc_RNA (1)...(19): siRNA sense strand
agacaaacagccaaccauu

SEQ ID NO: 769942 - RNA, 19 nt, Homo sapiens
  misc_RNA (1)...(19): siRNA sense strand
cauaugacaccaucacugu

SEQ ID NO: 769943 - RNA, 19 nt, Homo sapiens
  misc_RNA (1)...(19): siRNA sense strand
auccaaaccugucaacaug

SEQ ID NO: 769944 - RNA, 19 nt, Homo sapiens
  misc_RNA (1)...(19): siRNA sense strand
caccuucgacgucgcauuu

SEQ ID NO: 769945 - RNA, 19 nt, Homo sapiens
  misc_RNA (1)...(19): siRNA sense strand
ugaacuccauccaccucua

SEQ ID NO: 769946 - RNA, 19 nt, Homo sapiens
  misc_RNA (1)...(19): siRNA sense strand
caacgucacccuacagaac

SEQ ID NO: 769947 - RNA, 19 nt, Homo sapiens
  misc_RNA (1)...(19): siRNA sense strand
uacaggccaucgucugauu

SEQ ID NO: 769948 - RNA, 19 nt, Homo sapiens
  misc_RNA (1)...(19): siRNA sense strand
ugaaggugucccaugauaa

SEQ ID NO: 769949 - RNA, 19 nt, Homo sapiens
  misc_RNA (1)...(19): siRNA sense strand
gaagacaaacagccaacca

SEQ ID NO: 769950 - RNA, 19 nt, Homo sapiens
  misc_RNA (1)...(19): siRNA sense strand
gcaaacuggcucagcagau

SEQ ID NO: 769951 - RNA, 19 nt, Homo sapiens
  misc_RNA (1)...(19): siRNA sense strand
ggaacaagugucugacgau

SEQ ID NO: 769952 - RNA, 19 nt, Homo sapiens
  misc_RNA (1)...(19): siRNA sense strand
gcauuugcgcagccuguuu

SEQ ID NO: 769953 - RNA, 19 nt, Homo sapiens
  misc_RNA (1)...(19): siRNA sense strand
ccugggaaguugaagacaa

SEQ ID NO: 769954 - RNA, 19 nt, Homo sapiens
  misc_RNA (1)...(19): siRNA sense strand
caaauugacagaggagugu

SEQ ID NO: 769955 - RNA, 19 nt, Homo sapiens
  misc_RNA (1)...(19): siRNA sense strand
uacccaacaucaagcagaa

SEQ ID NO: 769956 - RNA, 19 nt, Homo sapiens
  misc_RNA (1)...(19): siRNA sense strand
gucguuagucuguguaauu

SEQ ID NO: 769957 - RNA, 19 nt, Homo sapiens
  misc_RNA (1)...(19): siRNA sense strand
agaaacugcuagaaugucu

SEQ ID NO: 769958 - RNA, 19 nt, Homo sapiens
  misc_RNA (1)...(19): siRNA sense strand
aaccucaccaaccuuauua

SEQ ID NO: 769959 - RNA, 19 nt, Homo sapiens
  misc_RNA (1)...(19): siRNA sense strand
gaagagucacacaccugaa

SEQ ID NO: 769960 - RNA, 19 nt, Homo sapiens
  misc_RNA (1)...(19): siRNA sense strand
aacugaaggugucccauga

SEQ ID NO: 769961 - RNA, 19 nt, Homo sapiens
  misc_RNA (1)...(19): siRNA sense strand
gcagagcggcaccaaguac

SEQ ID NO: 769962 - RNA, 19 nt, Homo sapiens
  misc_RNA (1)...(19): siRNA sense strand
cauuggaccuccgaugaug

SEQ ID NO: 769963 - RNA, 19 nt, Homo sapiens
  misc_RNA (1)...(19): siRNA sense strand
caaagaagggaaggugaug

SEQ ID NO: 769964 - RNA, 19 nt, Homo sapiens
  misc_RNA (1)...(19): siRNA sense strand
gcauuggaccuccgaugau

SEQ ID NO: 769965 - RNA, 19 nt, Homo sapiens
  misc_RNA (1)...(19): siRNA sense strand
gaacugaccugcccuauuu

SEQ ID NO: 769966 - RNA, 19 nt, Homo sapiens
  misc_RNA (1)...(19): siRNA sense strand
cagcaaagacgacagauua

SEQ ID NO: 769967 - RNA, 19 nt, Homo sapiens
  misc_RNA (1)...(19): siRNA sense strand
gcugauagcuggaugauag

SEQ ID NO: 769968 - RNA, 19 nt, Homo sapiens
  misc_RNA (1)...(19): siRNA sense strand
gaacaagugucugacgauu

SEQ ID NO: 769969 - RNA, 19 nt, Homo sapiens
  misc_RNA (1)...(19): siRNA sense strand
acaaacagccaaccauuua

SEQ ID NO: 769970 - RNA, 19 nt, Homo sapiens
  misc_RNA (1)...(19): siRNA sense strand
agaagaaacugcuagaaug

SEQ ID NO: 769971 - RNA, 19 nt, Homo sapiens
  misc_RNA (1)...(19): siRNA sense strand
caugauaacuugacaguag

SEQ ID NO: 769972 - RNA, 19 nt, Homo sapiens
  misc_RNA (1)...(19): siRNA sense strand
ggagugugaucuucucauu

SEQ ID NO: 769973 - RNA, 19 nt, Homo sapiens
  misc_RNA (1)...(19): siRNA sense strand
gaaaucaaccucaaugaca

SEQ ID NO: 769974 - RNA, 19 nt, Homo sapiens
  misc_RNA (1)...(19): siRNA sense strand
gaaagccacucacccgaau

SEQ ID NO: 769975 - RNA, 19 nt, Homo sapiens
  misc_RNA (1)...(19): siRNA sense strand
gcacacagccucugcuuca

SEQ ID NO: 769976 - RNA, 19 nt, Homo sapiens
  misc_RNA (1)...(19): siRNA sense strand
caaacuggcucagcagauu

SEQ ID NO: 769977 - RNA, 19 nt, Homo sapiens
  misc_RNA (1)...(19): siRNA sense strand
uaacggcucuaucgccuuu

SEQ ID NO: 769978 - RNA, 19 nt, Homo sapiens
  misc_RNA (1)...(19): siRNA sense strand
gugaauauguacuguguga

SEQ ID NO: 769979 - RNA, 19 nt, Homo sapiens
  misc_RNA (1)...(19): siRNA sense strand
caaagacgacagauuauug

SEQ ID NO: 769980 - RNA, 19 nt, Homo sapiens
  misc_RNA (1)...(19): siRNA sense strand
gagaagaaacugcuagaau

SEQ ID NO: 769981 - RNA, 19 nt, Homo sapiens
  misc_RNA (1)...(19): siRNA sense strand
acaagugucugacgauuau

SEQ ID NO: 769982 - RNA, 19 nt, Homo sapiens
  misc_RNA (1)...(19): siRNA sense strand
gaagaaacugcuagaaugu

SEQ ID NO: 769983 - RNA, 19 nt, Homo sapiens
  misc_RNA (1)...(19): siRNA sense strand
ugacacauuugacaccuuu

SEQ ID NO: 769984 - RNA, 19 nt, Homo sapiens
  misc_RNA (1)...(19): siRNA sense strand
gcagugagccugggaaguu

SEQ ID NO: 769985 - RNA, 19 nt, Homo sapiens
  misc_RNA (1)...(19): siRNA sense strand
gaagaccugugucacuugu

SEQ ID NO: 769986 - RNA, 19 nt, Homo sapiens
  misc_RNA (1)...(19): siRNA sense strand
gcaaagacgacagauuauu

SEQ ID NO: 769987 - RNA, 19 nt, Homo sapiens
  misc_RNA (1)...(19): siRNA sense strand
gcaaggaaauccccauuga

SEQ ID NO: 769988 - RNA, 19 nt, Homo sapiens
  misc_RNA (1)...(19): siRNA sense strand
gaaguggucauaaguggaa

SEQ ID NO: 769989 - RNA, 19 nt, Homo sapiens
  misc_RNA (1)...(19): siRNA sense strand
ccaaaccugucaacauguu

SEQ ID NO: 769990 - RNA, 19 nt, Homo sapiens
  misc_RNA (1)...(19): siRNA sense strand
uaaacuggaucccaaaucu

SEQ ID NO: 769991 - RNA, 19 nt, Homo sapiens
  misc_RNA (1)...(19): siRNA sense strand
gacaaacagccaaccauuu

SEQ ID NO: 769992 - RNA, 19 nt, Homo sapiens
  misc_RNA (1)...(19): siRNA sense strand
ccacucacccgaauaagaa

SEQ ID NO: 769993 - RNA, 19 nt, Homo sapiens
  misc_RNA (1)...(19): siRNA sense strand
ugugaccgaugaccaguua

SEQ ID NO: 769994 - RNA, 19 nt, Homo sapiens
  misc_RNA (1)...(19): siRNA sense strand
uggaguagcuggaaaugug

SEQ ID NO: 769995 - RNA, 19 nt, Homo sapiens
  misc_RNA (1)...(19): siRNA sense strand
gaagguccucugccaguuu

SEQ ID NO: 769996 - RNA, 19 nt, Homo sapiens
  misc_RNA (1)...(19): siRNA sense strand
cuggaaauguguuuauuga

SEQ ID NO: 769997 - RNA, 19 nt, Homo sapiens
  misc_RNA (1)...(19): siRNA sense strand
gaugagaaggugaauaugu

SEQ ID NO: 769998 - RNA, 19 nt, Homo sapiens
  misc_RNA (1)...(19): siRNA sense strand
augagaaggugaauaugua

SEQ ID NO: 769999 - RNA, 19 nt, Homo sapiens
  misc_RNA (1)...(19): siRNA sense strand
gcauccugcuggacuauga

SEQ ID NO: 770000 - RNA, 19 nt, Homo sapiens
  misc_RNA (1)...(19): siRNA sense strand
cugaaggugucccaugaua

SEQ ID NO: 770001 - RNA, 19 nt, Homo sapiens
  misc_RNA (1)...(19): siRNA sense strand
ccaaguacaucuucauggu

SEQ ID NO: 770002 - RNA, 19 nt, Homo sapiens
  misc_RNA (1)...(19): siRNA sense strand
agugugaucuucucauuga

SEQ ID NO: 770003 - RNA, 19 nt, Homo sapiens
  misc_RNA (1)...(19): siRNA sense strand
gaaggugaauauguacugu

SEQ ID NO: 770004 - RNA, 19 nt, Homo sapiens
  misc_RNA (1)...(19): siRNA sense strand
cuacagacugcuaagaaua

SEQ ID NO: 770005 - RNA, 19 nt, Homo sapiens
  misc_RNA (1)...(19): siRNA sense strand
guuaaucugugccuugugu

SEQ ID NO: 770006 - RNA, 19 nt, Homo sapiens
  misc_RNA (1)...(19): siRNA sense strand
ccaaaucugcucaucgaaa

SEQ ID NO: 770007 - RNA, 19 nt, Homo sapiens
  misc_RNA (1)...(19): siRNA sense strand
gaaugucuggauuaccuua

SEQ ID NO: 770008 - RNA, 19 nt, Homo sapiens
  misc_RNA (1)...(19): siRNA sense strand
ugagcgcuaugacaaauug

SEQ ID NO: 770009 - RNA, 19 nt, Homo sapiens
  misc_RNA (1)...(19): siRNA sense strand
gaccuccgaugaugaguuc

SEQ ID NO: 770010 - RNA, 19 nt, Homo sapiens
  misc_RNA (1)...(19): siRNA sense strand
agaaugaucaugcgcguuu

SEQ ID NO: 770011 - RNA, 19 nt, Homo sapiens
  misc_RNA (1)...(19): siRNA sense strand
aaacagccaaccauuuaaa

SEQ ID NO: 770012 - RNA, 19 nt, Homo sapiens
  misc_RNA (1)...(19): siRNA sense strand
caaacagccaaccauuuaa

SEQ ID NO: 770013 - RNA, 19 nt, Homo sapiens
  misc_RNA (1)...(19): siRNA sense strand
gauaguacccaacaucaag

SEQ ID NO: 770014 - RNA, 19 nt, Homo sapiens
  misc_RNA (1)...(19): siRNA sense strand
caaaucugcucaucgaaaa

SEQ ID NO: 770015 - RNA, 19 nt, Homo sapiens
  misc_RNA (1)...(19): siRNA sense strand
gagacacaauagcaaggaa

SEQ ID NO: 770016 - RNA, 19 nt, Homo sapiens
  misc_RNA (1)...(19): siRNA sense strand
gaaggugucccaugauaac

SEQ ID NO: 770017 - RNA, 19 nt, Homo sapiens
  misc_RNA (1)...(19): siRNA sense strand
gagcuccaguacaccauau

SEQ ID NO: 770018 - RNA, 19 nt, Homo sapiens
  misc_RNA (1)...(19): siRNA sense strand
ucccaacccucccacaauu

SEQ ID NO: 770019 - RNA, 19 nt, Homo sapiens
  misc_RNA (1)...(19): siRNA sense strand
gcuuggagcaugaggauga

SEQ ID NO: 770020 - RNA, 19 nt, Homo sapiens
  misc_RNA (1)...(19): siRNA sense strand
ggugucccaugauaacuug

SEQ ID NO: 770021 - RNA, 19 nt, Homo sapiens
  misc_RNA (1)...(19): siRNA sense strand
gaugaggcuucgcaaacug

SEQ ID NO: 770022 - RNA, 19 nt, Homo sapiens
  misc_RNA (1)...(19): siRNA sense strand
gcuagaaugucuggauuac

SEQ ID NO: 770023 - RNA, 19 nt, Homo sapiens
  misc_RNA (1)...(19): siRNA sense strand
uaaccucaccaaccuuauu

SEQ ID NO: 770024 - RNA, 19 nt, Homo sapiens
  misc_RNA (1)...(19): siRNA sense strand
cgaauaagaagcccuuuac

SEQ ID NO: 770025 - RNA, 19 nt, Homo sapiens
  misc_RNA (1)...(19): siRNA sense strand
cugggaaguugaagacaaa

SEQ ID NO: 770026 - RNA, 19 nt, Homo sapiens
  misc_RNA (1)...(19): siRNA sense strand
gcucugcacagcuucauau

SEQ ID NO: 770027 - RNA, 19 nt, Homo sapiens
  misc_RNA (1)...(19): siRNA sense strand
gagagaagaaacugcuaga

SEQ ID NO: 770028 - RNA, 19 nt, Homo sapiens
  misc_RNA (1)...(19): siRNA sense strand
ugagaucauucagcaaaga

SEQ ID NO: 770029 - RNA, 19 nt, Homo sapiens
  misc_RNA (1)...(19): siRNA sense strand
caaugcaucacgucaagaa

SEQ ID NO: 770030 - RNA, 19 nt, Homo sapiens
  misc_RNA (1)...(19): siRNA sense strand
gaauaagaagcccuuuaca

SEQ ID NO: 770031 - RNA, 19 nt, Homo sapiens
  misc_RNA (1)...(19): siRNA sense strand
ccgaauaagaagcccuuua

SEQ ID NO: 770032 - RNA, 19 nt, Homo sapiens
  misc_RNA (1)...(19): siRNA sense strand
gcuggaaauguguuuauug

SEQ ID NO: 770033 - RNA, 19 nt, Homo sapiens
  misc_RNA (1)...(19): siRNA sense strand
uagaaugucuggauuaccu

SEQ ID NO: 770034 - RNA, 19 nt, Homo sapiens
  misc_RNA (1)...(19): siRNA sense strand
ccuacagacugcuaagaau

SEQ ID NO: 770035 - RNA, 19 nt, Homo sapiens
  misc_RNA (1)...(19): siRNA sense strand
uggcuaaacucauccaaac

SEQ ID NO: 770036 - RNA, 19 nt, Homo sapiens
  misc_RNA (1)...(19): siRNA sense strand
aagcaaaacuuagagagua

SEQ ID NO: 770037 - RNA, 19 nt, Homo sapiens
  misc_RNA (1)...(19): siRNA sense strand
ugagugagcgcuaugacaa

SEQ ID NO: 770038 - RNA, 19 nt, Homo sapiens
  misc_RNA (1)...(19): siRNA sense strand
ugacaccuuugccuuagau

SEQ ID NO: 770039 - RNA, 19 nt, Homo sapiens
  misc_RNA (1)...(19): siRNA sense strand
aguagaacgugaugaguca

SEQ ID NO: 770040 - RNA, 19 nt, Homo sapiens
  misc_RNA (1)...(19): siRNA sense strand
ucccaaaucugcucaucga

SEQ ID NO: 770041 - RNA, 19 nt, Homo sapiens
  misc_RNA (1)...(19): siRNA sense strand
agacaaacagccaaccauu

SEQ ID NO: 770042 - RNA, 19 nt, Homo sapiens
  misc_RNA (1)...(19): siRNA sense strand
cauaugacaccaucacugu

SEQ ID NO: 770043 - RNA, 19 nt, Homo sapiens
  misc_RNA (1)...(19): siRNA sense strand
auccaaaccugucaacaug

SEQ ID NO: 770044 - RNA, 19 nt, Homo sapiens
  misc_RNA (1)...(19): siRNA sense strand
caccuucgacgucgcauuu

SEQ ID NO: 770045 - RNA, 19 nt, Homo sapiens
  misc_RNA (1)...(19): siRNA sense strand
ugaacuccauccaccucua

SEQ ID NO: 770046 - RNA, 19 nt, Homo sapiens
  misc_RNA (1)...(19): siRNA sense strand
caacgucacccuacagaac

SEQ ID NO: 770047 - RNA, 19 nt, Homo sapiens
  misc_RNA (1)...(19): siRNA sense strand
uacaggccaucgucugauu

SEQ ID NO: 770048 - RNA, 19 nt, Homo sapiens
  misc_RNA (1)...(19): siRNA sense strand
ugaaggugucccaugauaa

SEQ ID NO: 770049 - RNA, 19 nt, Homo sapiens
  misc_RNA (1)...(19): siRNA sense strand
gaagacaaacagccaacca

SEQ ID NO: 770050 - RNA, 19 nt, Homo sapiens
  misc_RNA (1)...(19): siRNA sense strand
gcaaacuggcucagcagau

SEQ ID NO: 770051 - RNA, 19 nt, Homo sapiens
  misc_RNA (1)...(19): siRNA sense strand
ggaacaagugucugacgau

SEQ ID NO: 770052 - RNA, 19 nt, Homo sapiens
  misc_RNA (1)...(19): siRNA sense strand
gcauuugcgcagccuguuu

SEQ ID NO: 770053 - RNA, 19 nt, Homo sapiens
  misc_RNA (1)...(19): siRNA sense strand
ccugggaaguugaagacaa

SEQ ID NO: 770054 - RNA, 19 nt, Homo sapiens
  misc_RNA (1)...(19): siRNA sense strand
caaauugacagaggagugu

SEQ ID NO: 770055 - RNA, 19 nt, Homo sapiens
  misc_RNA (1)...(19): siRNA sense strand
uacccaacaucaagcagaa

SEQ ID NO: 770056 - RNA, 19 nt, Homo sapiens
  misc_RNA (1)...(19): siRNA sense strand
gucguuagucuguguaauu

SEQ ID NO: 770057 - RNA, 19 nt, Homo sapiens
  misc_RNA (1)...(19): siRNA sense strand
agaaacugcuagaaugucu

SEQ ID NO: 770058 - RNA, 19 nt, Homo sapiens
  misc_RNA (1)...(19): siRNA sense strand
aaccucaccaaccuuauua

SEQ ID NO: 770059 - RNA, 19 nt, Homo sapiens
  misc_RNA (1)...(19): siRNA sense strand
gaagagucacacaccugaa

SEQ ID NO: 770060 - RNA, 19 nt, Homo sapiens
  misc_RNA (1)...(19): siRNA sense strand
aacugaaggugucccauga

SEQ ID NO: 770061 - RNA, 19 nt, Homo sapiens
  misc_RNA (1)...(19): siRNA sense strand
gcagagcggcaccaaguac

SEQ ID NO: 770062 - RNA, 19 nt, Homo sapiens
  misc_RNA (1)...(19): siRNA sense strand
cauuggaccuccgaugaug

SEQ ID NO: 770063 - RNA, 19 nt, Homo sapiens
  misc_RNA (1)...(19): siRNA sense strand
caaagaagggaaggugaug

SEQ ID NO: 770064 - RNA, 19 nt, Homo sapiens
  misc_RNA (1)...(19): siRNA sense strand
gcauuggaccuccgaugau

SEQ ID NO: 770065 - RNA, 19 nt, Homo sapiens
  misc_RNA (1)...(19): siRNA sense strand
gaacugaccugcccuauuu

SEQ ID NO: 770066 - RNA, 19 nt, Homo sapiens
  misc_RNA (1)...(19): siRNA sense strand
cagcaaagacgacagauua

SEQ ID NO: 770067 - RNA, 19 nt, Homo sapiens
  misc_RNA (1)...(19): siRNA sense strand
gcugauagcuggaugauag

SEQ ID NO: 770068 - RNA, 19 nt, Homo sapiens
  misc_RNA (1)...(19): siRNA sense strand
acaaacagccaaccauuua

SEQ ID NO: 770069 - RNA, 19 nt, Homo sapiens
  misc_RNA (1)...(19): siRNA sense strand
agaagaaacugcuagaaug

SEQ ID NO: 770070 - RNA, 19 nt, Homo sapiens
  misc_RNA (1)...(19): siRNA sense strand
caugauaacuugacaguag

SEQ ID NO: 770071 - RNA, 19 nt, Homo sapiens
  misc_RNA (1)...(19): siRNA sense strand
ggagugugaucuucucauu

SEQ ID NO: 770072 - RNA, 19 nt, Homo sapiens
  misc_RNA (1)...(19): siRNA sense strand
gaaaucaaccucaaugaca

SEQ ID NO: 770073 - RNA, 19 nt, Homo sapiens
  misc_RNA (1)...(19): siRNA sense strand
gaaagccacucacccgaau

SEQ ID NO: 770074 - RNA, 19 nt, Homo sapiens
  misc_RNA (1)...(19): siRNA sense strand
gcacacagccucugcuuca

SEQ ID NO: 770075 - RNA, 19 nt, Homo sapiens
  misc_RNA (1)...(19): siRNA sense strand
caaacuggcucagcagauu

SEQ ID NO: 770076 - RNA, 19 nt, Homo sapiens
  misc_RNA (1)...(19): siRNA sense strand
gugaauauguacuguguga

SEQ ID NO: 770077 - RNA, 19 nt, Homo sapiens
  misc_RNA (1)...(19): siRNA sense strand
caaagacgacagauuauug

SEQ ID NO: 770078 - RNA, 19 nt, Homo sapiens
  misc_RNA (1)...(19): siRNA sense strand
gagaagaaacugcuagaau

SEQ ID NO: 770079 - RNA, 19 nt, Homo sapiens
  misc_RNA (1)...(19): siRNA sense strand
gaagaaacugcuagaaugu

SEQ ID NO: 770080 - RNA, 19 nt, Homo sapiens
  misc_RNA (1)...(19): siRNA sense strand
ugacacauuugacaccuuu

SEQ ID NO: 770081 - RNA, 19 nt, Homo sapiens
  misc_RNA (1)...(19): siRNA sense strand
gcagugagccugggaaguu

SEQ ID NO: 770082 - RNA, 19 nt, Homo sapiens
  misc_RNA (1)...(19): siRNA sense strand
gaagaccugugucacuugu

SEQ ID NO: 770083 - RNA, 19 nt, Homo sapiens
  misc_RNA (1)...(19): siRNA sense strand
gcaaagacgacagauuauu

SEQ ID NO: 770084 - RNA, 19 nt, Homo sapiens
  misc_RNA (1)...(19): siRNA sense strand
gaaguggucauaaguggaa

SEQ ID NO: 770085 - RNA, 19 nt, Homo sapiens
  misc_RNA (1)...(19): siRNA sense strand
ccaaaccugucaacauguu

SEQ ID NO: 770086 - RNA, 19 nt, Homo sapiens
  misc_RNA (1)...(19): siRNA sense strand
uaaacuggaucccaaaucu

SEQ ID NO: 770087 - RNA, 19 nt, Homo sapiens
  misc_RNA (1)...(19): siRNA sense strand
gacaaacagccaaccauuu

SEQ ID NO: 770088 - RNA, 19 nt, Homo sapiens
  misc_RNA (1)...(19): siRNA sense strand
ccacucacccgaauaagaa

SEQ ID NO: 770089 - RNA, 19 nt, Homo sapiens
  misc_RNA (1)...(19): siRNA sense strand
ugugaccgaugaccaguua

SEQ ID NO: 770090 - RNA, 19 nt, Homo sapiens
  misc_RNA (1)...(19): siRNA sense strand
uggaguagcuggaaaugug

SEQ ID NO: 770091 - RNA, 19 nt, Homo sapiens
  misc_RNA (1)...(19): siRNA sense strand
gaagguccucugccaguuu

SEQ ID NO: 770092 - RNA, 19 nt, Homo sapiens
  misc_RNA (1)...(19): siRNA sense strand
cuggaaauguguuuauuga

SEQ ID NO: 770093 - RNA, 19 nt, Homo sapiens
  misc_RNA (1)...(19): siRNA sense strand
gaugagaaggugaauaugu

SEQ ID NO: 770094 - RNA, 19 nt, Homo sapiens
  misc_RNA (1)...(19): siRNA sense strand
augagaaggugaauaugua

SEQ ID NO: 770095 - RNA, 19 nt, Homo sapiens
  misc_RNA (1)...(19): siRNA sense strand
cugaaggugucccaugaua

SEQ ID NO: 770096 - RNA, 19 nt, Homo sapiens
  misc_RNA (1)...(19): siRNA sense strand
ccaaguacaucuucauggu

SEQ ID NO: 770097 - RNA, 19 nt, Homo sapiens
  misc_RNA (1)...(19): siRNA sense strand
agugugaucuucucauuga

SEQ ID NO: 770098 - RNA, 19 nt, Homo sapiens
  misc_RNA (1)...(19): siRNA sense strand
gaaggugaauauguacugu

SEQ ID NO: 770099 - RNA, 19 nt, Homo sapiens
  misc_RNA (1)...(19): siRNA sense strand
cuacagacugcuaagaaua

SEQ ID NO: 770100 - RNA, 19 nt, Homo sapiens
  misc_RNA (1)...(19): siRNA sense strand
guuaaucugugccuugugu

SEQ ID NO: 770101 - RNA, 19 nt, Homo sapiens
  misc_RNA (1)...(19): siRNA sense strand
ccaaaucugcucaucgaaa

SEQ ID NO: 770102 - RNA, 19 nt, Homo sapiens
  misc_RNA (1)...(19): siRNA sense strand
gaaugucuggauuaccuua

SEQ ID NO: 770103 - RNA, 19 nt, Homo sapiens
  misc_RNA (1)...(19): siRNA sense strand
ugagcgcuaugacaaauug

SEQ ID NO: 770104 - RNA, 19 nt, Homo sapiens
  misc_RNA (1)...(19): siRNA sense strand
gaccuccgaugaugaguuc

SEQ ID NO: 770105 - RNA, 19 nt, Homo sapiens
  misc_RNA (1)...(19): siRNA sense strand
agaaugaucaugcgcguuu

SEQ ID NO: 770106 - RNA, 19 nt, Homo sapiens
  misc_RNA (1)...(19): siRNA sense strand
aaacagccaaccauuuaaa

SEQ ID NO: 770107 - RNA, 19 nt, Homo sapiens
  misc_RNA (1)...(19): siRNA sense strand
caaacagccaaccauuuaa

SEQ ID NO: 770108 - RNA, 19 nt, Homo sapiens
  misc_RNA (1)...(19): siRNA sense strand
gauaguacccaacaucaag

SEQ ID NO: 770109 - RNA, 19 nt, Homo sapiens
  misc_RNA (1)...(19): siRNA sense strand
caaaucugcucaucgaaaa

SEQ ID NO: 770110 - RNA, 19 nt, Homo sapiens
  misc_RNA (1)...(19): siRNA sense strand
gaaggugucccaugauaac

SEQ ID NO: 770111 - RNA, 19 nt, Homo sapiens
  misc_RNA (1)...(19): siRNA sense strand
gagcuccaguacaccauau

SEQ ID NO: 770112 - RNA, 19 nt, Homo sapiens
  misc_RNA (1)...(19): siRNA sense strand
ucccaacccucccacaauu

SEQ ID NO: 770113 - RNA, 19 nt, Homo sapiens
  misc_RNA (1)...(19): siRNA sense strand
gcuuggagcaugaggauga

SEQ ID NO: 770114 - RNA, 19 nt, Homo sapiens
  misc_RNA (1)...(19): siRNA sense strand
ggugucccaugauaacuug

SEQ ID NO: 770115 - RNA, 19 nt, Homo sapiens
  misc_RNA (1)...(19): siRNA sense strand
gaugaggcuucgcaaacug

SEQ ID NO: 770116 - RNA, 19 nt, Homo sapiens
  misc_RNA (1)...(19): siRNA sense strand
gcuagaaugucuggauuac

SEQ ID NO: 770117 - RNA, 19 nt, Homo sapiens
  misc_RNA (1)...(19): siRNA sense strand
uaaccucaccaaccuuauu

SEQ ID NO: 770118 - RNA, 19 nt, Homo sapiens
  misc_RNA (1)...(19): siRNA sense strand
cgaauaagaagcccuuuac

SEQ ID NO: 770119 - RNA, 19 nt, Homo sapiens
  misc_RNA (1)...(19): siRNA sense strand
cugggaaguugaagacaaa

SEQ ID NO: 770120 - RNA, 19 nt, Homo sapiens
  misc_RNA (1)...(19): siRNA sense strand
gcucugcacagcuucauau

SEQ ID NO: 770121 - RNA, 19 nt, Homo sapiens
  misc_RNA (1)...(19): siRNA sense strand
gagagaagaaacugcuaga

SEQ ID NO: 770122 - RNA, 19 nt, Homo sapiens
  misc_RNA (1)...(19): siRNA sense strand
ugagaucauucagcaaaga

SEQ ID NO: 770123 - RNA, 19 nt, Homo sapiens
  misc_RNA (1)...(19): siRNA sense strand
caaugcaucacgucaagaa

SEQ ID NO: 770124 - RNA, 19 nt, Homo sapiens
  misc_RNA (1)...(19): siRNA sense strand
gaauaagaagcccuuuaca

SEQ ID NO: 770125 - RNA, 19 nt, Homo sapiens
  misc_RNA (1)...(19): siRNA sense strand
ccgaauaagaagcccuuua

SEQ ID NO: 770126 - RNA, 19 nt, Homo sapiens
  misc_RNA (1)...(19): siRNA sense strand
gcuggaaauguguuuauug

SEQ ID NO: 770127 - RNA, 19 nt, Homo sapiens
  misc_RNA (1)...(19): siRNA sense strand
uagaaugucuggauuaccu

SEQ ID NO: 770128 - RNA, 19 nt, Homo sapiens
  misc_RNA (1)...(19): siRNA sense strand
ccuacagacugcuaagaau

SEQ ID NO: 770129 - RNA, 19 nt, Homo sapiens
  misc_RNA (1)...(19): siRNA sense strand
uggcuaaacucauccaaac

SEQ ID NO: 770130 - RNA, 19 nt, Homo sapiens
  misc_RNA (1)...(19): siRNA sense strand
aagcaaaacuuagagagua

SEQ ID NO: 770131 - RNA, 19 nt, Homo sapiens
  misc_RNA (1)...(19): siRNA sense strand
ugagugagcgcuaugacaa

SEQ ID NO: 770132 - RNA, 19 nt, Homo sapiens
  misc_RNA (1)...(19): siRNA sense strand
ugacaccuuugccuuagau

SEQ ID NO: 770133 - RNA, 19 nt, Homo sapiens
  misc_RNA (1)...(19): siRNA sense strand
aguagaacgugaugaguca

SEQ ID NO: 770134 - RNA, 19 nt, Homo sapiens
  misc_RNA (1)...(19): siRNA sense strand
ucccaaaucugcucaucga

SEQ ID NO: 770135 - RNA, 19 nt, Homo sapiens
  misc_RNA (1)...(19): siRNA sense strand
agacaaacagccaaccauu

SEQ ID NO: 770136 - RNA, 19 nt, Homo sapiens
  misc_RNA (1)...(19): siRNA sense strand
cauaugacaccaucacugu

SEQ ID NO: 770137 - RNA, 19 nt, Homo sapiens
  misc_RNA (1)...(19): siRNA sense strand
auccaaaccugucaacaug

SEQ ID NO: 770138 - RNA, 19 nt, Homo sapiens
  misc_RNA (1)...(19): siRNA sense strand
caacgucacccuacagaac

SEQ ID NO: 770139 - RNA, 19 nt, Homo sapiens
  misc_RNA (1)...(19): siRNA sense strand
uacaggccaucgucugauu

SEQ ID NO: 770140 - RNA, 19 nt, Homo sapiens
  misc_RNA (1)...(19): siRNA sense strand
ugaaggugucccaugauaa

SEQ ID NO: 770141 - RNA, 19 nt, Homo sapiens
  misc_RNA (1)...(19): siRNA sense strand
gaagacaaacagccaacca

SEQ ID NO: 770142 - RNA, 19 nt, Homo sapiens
  misc_RNA (1)...(19): siRNA sense strand
gcaaacuggcucagcagau

SEQ ID NO: 770143 - RNA, 19 nt, Homo sapiens
  misc_RNA (1)...(19): siRNA sense strand
ccugggaaguugaagacaa

SEQ ID NO: 770144 - RNA, 19 nt, Homo sapiens
  misc_RNA (1)...(19): siRNA sense strand
caaauugacagaggagugu

SEQ ID NO: 770145 - RNA, 19 nt, Homo sapiens
  misc_RNA (1)...(19): siRNA sense strand
uacccaacaucaagcagaa

SEQ ID NO: 770146 - RNA, 19 nt, Homo sapiens
  misc_RNA (1)...(19): siRNA sense strand
gucguuagucuguguaauu

SEQ ID NO: 770147 - RNA, 19 nt, Homo sapiens
  misc_RNA (1)...(19): siRNA sense strand
agaaacugcuagaaugucu

SEQ ID NO: 770148 - RNA, 19 nt, Homo sapiens
  misc_RNA (1)...(19): siRNA sense strand
aaccucaccaaccuuauua

SEQ ID NO: 770149 - RNA, 19 nt, Homo sapiens
  misc_RNA (1)...(19): siRNA sense strand
gaagagucacacaccugaa

SEQ ID NO: 770150 - RNA, 19 nt, Homo sapiens
  misc_RNA (1)...(19): siRNA sense strand
aacugaaggugucccauga

SEQ ID NO: 770151 - RNA, 19 nt, Homo sapiens
  misc_RNA (1)...(19): siRNA sense strand
gcagagcggcaccaaguac

SEQ ID NO: 770152 - RNA, 19 nt, Homo sapiens
  misc_RNA (1)...(19): siRNA sense strand
cauuggaccuccgaugaug

SEQ ID NO: 770153 - RNA, 19 nt, Homo sapiens
  misc_RNA (1)...(19): siRNA sense strand
caaagaagggaaggugaug

SEQ ID NO: 770154 - RNA, 19 nt, Homo sapiens
  misc_RNA (1)...(19): siRNA sense strand
aggaugagaaggugaauau

SEQ ID NO: 770155 - RNA, 19 nt, Homo sapiens
  misc_RNA (1)...(19): siRNA sense strand
gcauuggaccuccgaugau

SEQ ID NO: 770156 - RNA, 19 nt, Homo sapiens
  misc_RNA (1)...(19): siRNA sense strand
cugcacagcuucauaugac

SEQ ID NO: 770157 - RNA, 19 nt, Homo sapiens
  misc_RNA (1)...(19): siRNA sense strand
gguucuaauuccugaaauc

SEQ ID NO: 770158 - RNA, 19 nt, Homo sapiens
  misc_RNA (1)...(19): siRNA sense strand
gagugagcgcuaugacaaa

SEQ ID NO: 770159 - RNA, 19 nt, Homo sapiens
  misc_RNA (1)...(19): siRNA sense strand
ucuaauuccugaaaucaac

SEQ ID NO: 770160 - RNA, 19 nt, Homo sapiens
  misc_RNA (1)...(19): siRNA sense strand
gcccaccgcauccuaguau

SEQ ID NO: 770161 - RNA, 19 nt, Homo sapiens
  misc_RNA (1)...(19): siRNA sense strand
gaucccaaaucugcucauc

SEQ ID NO: 770162 - RNA, 19 nt, Homo sapiens
  misc_RNA (1)...(19): siRNA sense strand
ggaccuccgaugaugaguu

SEQ ID NO: 770163 - RNA, 19 nt, Homo sapiens
  misc_RNA (1)...(19): siRNA sense strand
cugcuagaaugucuggauu

SEQ ID NO: 770164 - RNA, 19 nt, Homo sapiens
  misc_RNA (1)...(19): siRNA sense strand
ggaaacacuggagucagaa

SEQ ID NO: 770165 - RNA, 19 nt, Homo sapiens
  misc_RNA (1)...(19): siRNA sense strand
gaacugaccugcccuauuu

SEQ ID NO: 770166 - RNA, 19 nt, Homo sapiens
  misc_RNA (1)...(19): siRNA sense strand
cagcaaagacgacagauua

SEQ ID NO: 770167 - RNA, 19 nt, Homo sapiens
  misc_RNA (1)...(19): siRNA sense strand
gcugauagcuggaugauag

SEQ ID NO: 770168 - RNA, 19 nt, Homo sapiens
  misc_RNA (1)...(19): siRNA sense strand
gaacaagugucugacgauu

SEQ ID NO: 770169 - RNA, 19 nt, Homo sapiens
  misc_RNA (1)...(19): siRNA sense strand
acaaacagccaaccauuua

SEQ ID NO: 770170 - RNA, 19 nt, Homo sapiens
  misc_RNA (1)...(19): siRNA sense strand
agaagaaacugcuagaaug

SEQ ID NO: 770171 - RNA, 19 nt, Homo sapiens
  misc_RNA (1)...(19): siRNA sense strand
caugauaacuugacaguag

SEQ ID NO: 770172 - RNA, 19 nt, Homo sapiens
  misc_RNA (1)...(19): siRNA sense strand
ggagugugaucuucucauu

SEQ ID NO: 770173 - RNA, 19 nt, Homo sapiens
  misc_RNA (1)...(19): siRNA sense strand
gaaaucaaccucaaugaca

SEQ ID NO: 770174 - RNA, 19 nt, Homo sapiens
  misc_RNA (1)...(19): siRNA sense strand
gaaagccacucacccgaau

SEQ ID NO: 770175 - RNA, 19 nt, Homo sapiens
  misc_RNA (1)...(19): siRNA sense strand
gcacacagccucugcuuca

SEQ ID NO: 770176 - RNA, 19 nt, Homo sapiens
  misc_RNA (1)...(19): siRNA sense strand
caaacuggcucagcagauu

SEQ ID NO: 770177 - RNA, 19 nt, Homo sapiens
  misc_RNA (1)...(19): siRNA sense strand
uaacggcucuaucgccuuu

SEQ ID NO: 770178 - RNA, 19 nt, Homo sapiens
  misc_RNA (1)...(19): siRNA sense strand
gugaauauguacuguguga

SEQ ID NO: 770179 - RNA, 19 nt, Homo sapiens
  misc_RNA (1)...(19): siRNA sense strand
caaagacgacagauuauug

SEQ ID NO: 770180 - RNA, 19 nt, Homo sapiens
  misc_RNA (1)...(19): siRNA sense strand
gagaagaaacugcuagaau

SEQ ID NO: 770181 - RNA, 19 nt, Homo sapiens
  misc_RNA (1)...(19): siRNA sense strand
acaagugucugacgauuau

SEQ ID NO: 770182 - RNA, 19 nt, Homo sapiens
  misc_RNA (1)...(19): siRNA sense strand
gaagaaacugcuagaaugu

SEQ ID NO: 770183 - RNA, 19 nt, Homo sapiens
  misc_RNA (1)...(19): siRNA sense strand
ugacacauuugacaccuuu

SEQ ID NO: 770184 - RNA, 19 nt, Homo sapiens
  misc_RNA (1)...(19): siRNA sense strand
gcagugagccugggaaguu

SEQ ID NO: 770185 - RNA, 19 nt, Homo sapiens
  misc_RNA (1)...(19): siRNA sense strand
gaagaccugugucacuugu

SEQ ID NO: 770186 - RNA, 19 nt, Homo sapiens
  misc_RNA (1)...(19): siRNA sense strand
gcaaagacgacagauuauu

SEQ ID NO: 770187 - RNA, 19 nt, Homo sapiens
  misc_RNA (1)...(19): siRNA sense strand
gcaaggaaauccccauuga

SEQ ID NO: 770188 - RNA, 19 nt, Homo sapiens
  misc_RNA (1)...(19): siRNA sense strand
gaaguggucauaaguggaa

SEQ ID NO: 770189 - RNA, 19 nt, Homo sapiens
  misc_RNA (1)...(19): siRNA sense strand
ccaaaccugucaacauguu

SEQ ID NO: 770190 - RNA, 19 nt, Homo sapiens
  misc_RNA (1)...(19): siRNA sense strand
uaaacuggaucccaaaucu

SEQ ID NO: 770191 - RNA, 19 nt, Homo sapiens
  misc_RNA (1)...(19): siRNA sense strand
gacaaacagccaaccauuu

SEQ ID NO: 770192 - RNA, 19 nt, Homo sapiens
  misc_RNA (1)...(19): siRNA sense strand
ccacucacccgaauaagaa

SEQ ID NO: 770193 - RNA, 19 nt, Homo sapiens
  misc_RNA (1)...(19): siRNA sense strand
ugugaccgaugaccaguua

SEQ ID NO: 770194 - RNA, 19 nt, Homo sapiens
  misc_RNA (1)...(19): siRNA sense strand
uggaguagcuggaaaugug

SEQ ID NO: 770195 - RNA, 19 nt, Homo sapiens
  misc_RNA (1)...(19): siRNA sense strand
gaagguccucugccaguuu

SEQ ID NO: 770196 - RNA, 19 nt, Homo sapiens
  misc_RNA (1)...(19): siRNA sense strand
cuggaaauguguuuauuga

SEQ ID NO: 770197 - RNA, 19 nt, Homo sapiens
  misc_RNA (1)...(19): siRNA sense strand
gaugagaaggugaauaugu

SEQ ID NO: 770198 - RNA, 19 nt, Homo sapiens
  misc_RNA (1)...(19): siRNA sense strand
augagaaggugaauaugua

SEQ ID NO: 770199 - RNA, 19 nt, Homo sapiens
  misc_RNA (1)...(19): siRNA sense strand
gcauccugcuggacuauga

SEQ ID NO: 770200 - RNA, 19 nt, Homo sapiens
  misc_RNA (1)...(19): siRNA sense strand
cugaaggugucccaugaua

SEQ ID NO: 770201 - RNA, 19 nt, Homo sapiens
  misc_RNA (1)...(19): siRNA sense strand
ccaaguacaucuucauggu

SEQ ID NO: 770202 - RNA, 19 nt, Homo sapiens
  misc_RNA (1)...(19): siRNA sense strand
agugugaucuucucauuga

SEQ ID NO: 770203 - RNA, 19 nt, Homo sapiens
  misc_RNA (1)...(19): siRNA sense strand
gaaggugaauauguacugu

SEQ ID NO: 770204 - RNA, 19 nt, Homo sapiens
  misc_RNA (1)...(19): siRNA sense strand
cuacagacugcuaagaaua

SEQ ID NO: 770205 - RNA, 19 nt, Homo sapiens
  misc_RNA (1)...(19): siRNA sense strand
guuaaucugugccuugugu

SEQ ID NO: 770206 - RNA, 19 nt, Homo sapiens
  misc_RNA (1)...(19): siRNA sense strand
ccaaaucugcucaucgaaa

SEQ ID NO: 770207 - RNA, 19 nt, Homo sapiens
  misc_RNA (1)...(19): siRNA sense strand
gaaugucuggauuaccuua

SEQ ID NO: 770208 - RNA, 19 nt, Homo sapiens
  misc_RNA (1)...(19): siRNA sense strand
ugagcgcuaugacaaauug

SEQ ID NO: 770209 - RNA, 19 nt, Homo sapiens
  misc_RNA (1)...(19): siRNA sense strand
gaccuccgaugaugaguuc

SEQ ID NO: 770210 - RNA, 19 nt, Homo sapiens
  misc_RNA (1)...(19): siRNA sense strand
agaaugaucaugcgcguuu

SEQ ID NO: 770211 - RNA, 19 nt, Homo sapiens
  misc_RNA (1)...(19): siRNA sense strand
aaacagccaaccauuuaaa

SEQ ID NO: 770212 - RNA, 19 nt, Homo sapiens
  misc_RNA (1)...(19): siRNA sense strand
caaacagccaaccauuuaa

SEQ ID NO: 770213 - RNA, 19 nt, Homo sapiens
  misc_RNA (1)...(19): siRNA sense strand
gauaguacccaacaucaag

SEQ ID NO: 770214 - RNA, 19 nt, Homo sapiens
  misc_RNA (1)...(19): siRNA sense strand
caaaucugcucaucgaaaa

SEQ ID NO: 770215 - RNA, 19 nt, Homo sapiens
  misc_RNA (1)...(19): siRNA sense strand
gagacacaauagcaaggaa

SEQ ID NO: 770216 - RNA, 19 nt, Homo sapiens
  misc_RNA (1)...(19): siRNA sense strand
gaaggugucccaugauaac

SEQ ID NO: 770217 - RNA, 19 nt, Homo sapiens
  misc_RNA (1)...(19): siRNA sense strand
gagcuccaguacaccauau

SEQ ID NO: 770218 - RNA, 19 nt, Homo sapiens
  misc_RNA (1)...(19): siRNA sense strand
ucccaacccucccacaauu

SEQ ID NO: 770219 - RNA, 19 nt, Homo sapiens
  misc_RNA (1)...(19): siRNA sense strand
gcuuggagcaugaggauga

SEQ ID NO: 770220 - RNA, 19 nt, Homo sapiens
  misc_RNA (1)...(19): siRNA sense strand
ggugucccaugauaacuug

SEQ ID NO: 770221 - RNA, 19 nt, Homo sapiens
  misc_RNA (1)...(19): siRNA sense strand
gaugaggcuucgcaaacug

SEQ ID NO: 770222 - RNA, 19 nt, Homo sapiens
  misc_RNA (1)...(19): siRNA sense strand
gcuagaaugucuggauuac

SEQ ID NO: 770223 - RNA, 19 nt, Homo sapiens
  misc_RNA (1)...(19): siRNA sense strand
uaaccucaccaaccuuauu

SEQ ID NO: 770224 - RNA, 19 nt, Homo sapiens
  misc_RNA (1)...(19): siRNA sense strand
cgaauaagaagcccuuuac

SEQ ID NO: 770225 - RNA, 19 nt, Homo sapiens
  misc_RNA (1)...(19): siRNA sense strand
cugggaaguugaagacaaa

SEQ ID NO: 770226 - RNA, 19 nt, Homo sapiens
  misc_RNA (1)...(19): siRNA sense strand
gcucugcacagcuucauau

SEQ ID NO: 770227 - RNA, 19 nt, Homo sapiens
  misc_RNA (1)...(19): siRNA sense strand
gagagaagaaacugcuaga

SEQ ID NO: 770228 - RNA, 19 nt, Homo sapiens
  misc_RNA (1)...(19): siRNA sense strand
ugagaucauucagcaaaga

SEQ ID NO: 770229 - RNA, 19 nt, Homo sapiens
  misc_RNA (1)...(19): siRNA sense strand
caaugcaucacgucaagaa

SEQ ID NO: 770230 - RNA, 19 nt, Homo sapiens
  misc_RNA (1)...(19): siRNA sense strand
gaauaagaagcccuuuaca

SEQ ID NO: 770231 - RNA, 19 nt, Homo sapiens
  misc_RNA (1)...(19): siRNA sense strand
ccgaauaagaagcccuuua

SEQ ID NO: 770232 - RNA, 19 nt, Homo sapiens
  misc_RNA (1)...(19): siRNA sense strand
gcuggaaauguguuuauug

SEQ ID NO: 770233 - RNA, 19 nt, Homo sapiens
  misc_RNA (1)...(19): siRNA sense strand
uagaaugucuggauuaccu

SEQ ID NO: 770234 - RNA, 19 nt, Homo sapiens
  misc_RNA (1)...(19): siRNA sense strand
ccuacagacugcuaagaau

SEQ ID NO: 770235 - RNA, 19 nt, Homo sapiens
  misc_RNA (1)...(19): siRNA sense strand
uggcuaaacucauccaaac

SEQ ID NO: 770236 - RNA, 19 nt, Homo sapiens
  misc_RNA (1)...(19): siRNA sense strand
aagcaaaacuuagagagua

SEQ ID NO: 770237 - RNA, 19 nt, Homo sapiens
  misc_RNA (1)...(19): siRNA sense strand
ugagugagcgcuaugacaa

SEQ ID NO: 770238 - RNA, 19 nt, Homo sapiens
  misc_RNA (1)...(19): siRNA sense strand
ugacaccuuugccuuagau

SEQ ID NO: 770239 - RNA, 19 nt, Homo sapiens
  misc_RNA (1)...(19): siRNA sense strand
aguagaacgugaugaguca

SEQ ID NO: 770240 - RNA, 19 nt, Homo sapiens
  misc_RNA (1)...(19): siRNA sense strand
ucccaaaucugcucaucga

SEQ ID NO: 770241 - RNA, 19 nt, Homo sapiens
  misc_RNA (1)...(19): siRNA sense strand
agacaaacagccaaccauu

SEQ ID NO: 770242 - RNA, 19 nt, Homo sapiens
  misc_RNA (1)...(19): siRNA sense strand
cauaugacaccaucacugu

SEQ ID NO: 770243 - RNA, 19 nt, Homo sapiens
  misc_RNA (1)...(19): siRNA sense strand
auccaaaccugucaacaug

SEQ ID NO: 770244 - RNA, 19 nt, Homo sapiens
  misc_RNA (1)...(19): siRNA sense strand
caccuucgacgucgcauuu

SEQ ID NO: 770245 - RNA, 19 nt, Homo sapiens
  misc_RNA (1)...(19): siRNA sense strand
ugaacuccauccaccucua

SEQ ID NO: 770246 - RNA, 19 nt, Homo sapiens
  misc_RNA (1)...(19): siRNA sense strand
caacgucacccuacagaac

SEQ ID NO: 770247 - RNA, 19 nt, Homo sapiens
  misc_RNA (1)...(19): siRNA sense strand
uacaggccaucgucugauu

SEQ ID NO: 770248 - RNA, 19 nt, Homo sapiens
  misc_RNA (1)...(19): siRNA sense strand
ugaaggugucccaugauaa

SEQ ID NO: 770249 - RNA, 19 nt, Homo sapiens
  misc_RNA (1)...(19): siRNA sense strand
gaagacaaacagccaacca

SEQ ID NO: 770250 - RNA, 19 nt, Homo sapiens
  misc_RNA (1)...(19): siRNA sense strand
gcaaacuggcucagcagau

SEQ ID NO: 770251 - RNA, 19 nt, Homo sapiens
  misc_RNA (1)...(19): siRNA sense strand
ggaacaagugucugacgau

SEQ ID NO: 770252 - RNA, 19 nt, Homo sapiens
  misc_RNA (1)...(19): siRNA sense strand
gcauuugcgcagccuguuu

SEQ ID NO: 770253 - RNA, 19 nt, Homo sapiens
  misc_RNA (1)...(19): siRNA sense strand
ccugggaaguugaagacaa

SEQ ID NO: 770254 - RNA, 19 nt, Homo sapiens
  misc_RNA (1)...(19): siRNA sense strand
caaauugacagaggagugu

SEQ ID NO: 770255 - RNA, 19 nt, Homo sapiens
  misc_RNA (1)...(19): siRNA sense strand
uacccaacaucaagcagaa

SEQ ID NO: 770256 - RNA, 19 nt, Homo sapiens
  misc_RNA (1)...(19): siRNA sense strand
gucguuagucuguguaauu

SEQ ID NO: 770257 - RNA, 19 nt, Homo sapiens
  misc_RNA (1)...(19): siRNA sense strand
agaaacugcuagaaugucu

SEQ ID NO: 770258 - RNA, 19 nt, Homo sapiens
  misc_RNA (1)...(19): siRNA sense strand
aaccucaccaaccuuauua

SEQ ID NO: 770259 - RNA, 19 nt, Homo sapiens
  misc_RNA (1)...(19): siRNA sense strand
gaagagucacacaccugaa

SEQ ID NO: 770260 - RNA, 19 nt, Homo sapiens
  misc_RNA (1)...(19): siRNA sense strand
aacugaaggugucccauga

SEQ ID NO: 770261 - RNA, 19 nt, Homo sapiens
  misc_RNA (1)...(19): siRNA sense strand
gcagagcggcaccaaguac

SEQ ID NO: 770262 - RNA, 19 nt, Homo sapiens
  misc_RNA (1)...(19): siRNA sense strand
cauuggaccuccgaugaug

SEQ ID NO: 770263 - RNA, 19 nt, Homo sapiens
  misc_RNA (1)...(19): siRNA sense strand
caaagaagggaaggugaug

SEQ ID NO: 770264 - RNA, 19 nt, Homo sapiens
  misc_RNA (1)...(19): siRNA sense strand
gcauuggaccuccgaugau

SEQ ID NO: 770265 - RNA, 19 nt, Homo sapiens
  misc_RNA (1)...(19): siRNA sense strand
gaacugaccugcccuauuu

SEQ ID NO: 770266 - RNA, 19 nt, Homo sapiens
  misc_RNA (1)...(19): siRNA sense strand
cagcaaagacgacagauua

SEQ ID NO: 770267 - RNA, 19 nt, Homo sapiens
  misc_RNA (1)...(19): siRNA sense strand
gcugauagcuggaugauag

SEQ ID NO: 770268 - RNA, 19 nt, Homo sapiens
  misc_RNA (1)...(19): siRNA sense strand
gaacaagugucugacgauu

SEQ ID NO: 770269 - RNA, 19 nt, Homo sapiens
  misc_RNA (1)...(19): siRNA sense strand
acaaacagccaaccauuua

SEQ ID NO: 770270 - RNA, 19 nt, Homo sapiens
  misc_RNA (1)...(19): siRNA sense strand
agaagaaacugcuagaaug

SEQ ID NO: 770271 - RNA, 19 nt, Homo sapiens
  misc_RNA (1)...(19): siRNA sense strand
caugauaacuugacaguag

SEQ ID NO: 770272 - RNA, 19 nt, Homo sapiens
  misc_RNA (1)...(19): siRNA sense strand
ggagugugaucuucucauu

SEQ ID NO: 770273 - RNA, 19 nt, Homo sapiens
  misc_RNA (1)...(19): siRNA sense strand
gaaaucaaccucaaugaca

SEQ ID NO: 770274 - RNA, 19 nt, Homo sapiens
  misc_RNA (1)...(19): siRNA sense strand
gaaagccacucacccgaau

SEQ ID NO: 770275 - RNA, 19 nt, Homo sapiens
  misc_RNA (1)...(19): siRNA sense strand
gcacacagccucugcuuca

SEQ ID NO: 770276 - RNA, 19 nt, Homo sapiens
  misc_RNA (1)...(19): siRNA sense strand
caaacuggcucagcagauu

SEQ ID NO: 770277 - RNA, 19 nt, Homo sapiens
  misc_RNA (1)...(19): siRNA sense strand
uaacggcucuaucgccuuu

SEQ ID NO: 770278 - RNA, 19 nt, Homo sapiens
  misc_RNA (1)...(19): siRNA sense strand
gugaauauguacuguguga

SEQ ID NO: 770279 - RNA, 19 nt, Homo sapiens
  misc_RNA (1)...(19): siRNA sense strand
caaagacgacagauuauug

SEQ ID NO: 770280 - RNA, 19 nt, Homo sapiens
  misc_RNA (1)...(19): siRNA sense strand
gagaagaaacugcuagaau

SEQ ID NO: 770281 - RNA, 19 nt, Homo sapiens
  misc_RNA (1)...(19): siRNA sense strand
acaagugucugacgauuau

SEQ ID NO: 770282 - RNA, 19 nt, Homo sapiens
  misc_RNA (1)...(19): siRNA sense strand
gaagaaacugcuagaaugu

SEQ ID NO: 770283 - RNA, 19 nt, Homo sapiens
  misc_RNA (1)...(19): siRNA sense strand
ugacacauuugacaccuuu

SEQ ID NO: 770284 - RNA, 19 nt, Homo sapiens
  misc_RNA (1)...(19): siRNA sense strand
gcagugagccugggaaguu

SEQ ID NO: 770285 - RNA, 19 nt, Homo sapiens
  misc_RNA (1)...(19): siRNA sense strand
gaagaccugugucacuugu

SEQ ID NO: 770286 - RNA, 19 nt, Homo sapiens
  misc_RNA (1)...(19): siRNA sense strand
gcaaagacgacagauuauu

SEQ ID NO: 770287 - RNA, 19 nt, Homo sapiens
  misc_RNA (1)...(19): siRNA sense strand
gcaaggaaauccccauuga

SEQ ID NO: 770288 - RNA, 19 nt, Homo sapiens
  misc_RNA (1)...(19): siRNA sense strand
gaaguggucauaaguggaa

SEQ ID NO: 770289 - RNA, 19 nt, Homo sapiens
  misc_RNA (1)...(19): siRNA sense strand
ccaaaccugucaacauguu

SEQ ID NO: 770290 - RNA, 19 nt, Homo sapiens
  misc_RNA (1)...(19): siRNA sense strand
uaaacuggaucccaaaucu

SEQ ID NO: 770291 - RNA, 19 nt, Homo sapiens
  misc_RNA (1)...(19): siRNA sense strand
gacaaacagccaaccauuu

SEQ ID NO: 770292 - RNA, 19 nt, Homo sapiens
  misc_RNA (1)...(19): siRNA sense strand
ccacucacccgaauaagaa

SEQ ID NO: 770293 - RNA, 19 nt, Homo sapiens
  misc_RNA (1)...(19): siRNA sense strand
ugugaccgaugaccaguua

SEQ ID NO: 770294 - RNA, 19 nt, Homo sapiens
  misc_RNA (1)...(19): siRNA sense strand
uggaguagcuggaaaugug

SEQ ID NO: 770295 - RNA, 19 nt, Homo sapiens
  misc_RNA (1)...(19): siRNA sense strand
gaagguccucugccaguuu

SEQ ID NO: 770296 - RNA, 19 nt, Homo sapiens
  misc_RNA (1)...(19): siRNA sense strand
cuggaaauguguuuauuga

SEQ ID NO: 770297 - RNA, 19 nt, Homo sapiens
  misc_RNA (1)...(19): siRNA sense strand
gaugagaaggugaauaugu

SEQ ID NO: 770298 - RNA, 19 nt, Homo sapiens
  misc_RNA (1)...(19): siRNA sense strand
augagaaggugaauaugua

SEQ ID NO: 770299 - RNA, 19 nt, Homo sapiens
  misc_RNA (1)...(19): siRNA sense strand
gcauccugcuggacuauga

SEQ ID NO: 770300 - RNA, 19 nt, Homo sapiens
  misc_RNA (1)...(19): siRNA sense strand
cugaaggugucccaugaua

SEQ ID NO: 770301 - RNA, 19 nt, Homo sapiens
  misc_RNA (1)...(19): siRNA sense strand
ccaaguacaucuucauggu

SEQ ID NO: 770302 - RNA, 19 nt, Homo sapiens
  misc_RNA (1)...(19): siRNA sense strand
agugugaucuucucauuga

SEQ ID NO: 770303 - RNA, 19 nt, Homo sapiens
  misc_RNA (1)...(19): siRNA sense strand
gaaggugaauauguacugu

SEQ ID NO: 770304 - RNA, 19 nt, Homo sapiens
  misc_RNA (1)...(19): siRNA sense strand
cuacagacugcuaagaaua

SEQ ID NO: 770305 - RNA, 19 nt, Homo sapiens
  misc_RNA (1)...(19): siRNA sense strand
guuaaucugugccuugugu

SEQ ID NO: 770306 - RNA, 19 nt, Homo sapiens
  misc_RNA (1)...(19): siRNA sense strand
ccaaaucugcucaucgaaa

SEQ ID NO: 770307 - RNA, 19 nt, Homo sapiens
  misc_RNA (1)...(19): siRNA sense strand
gaaugucuggauuaccuua

SEQ ID NO: 770308 - RNA, 19 nt, Homo sapiens
  misc_RNA (1)...(19): siRNA sense strand
ugagcgcuaugacaaauug

SEQ ID NO: 770309 - RNA, 19 nt, Homo sapiens
  misc_RNA (1)...(19): siRNA sense strand
gaccuccgaugaugaguuc

SEQ ID NO: 770310 - RNA, 19 nt, Homo sapiens
  misc_RNA (1)...(19): siRNA sense strand
agaaugaucaugcgcguuu

SEQ ID NO: 770311 - RNA, 19 nt, Homo sapiens
  misc_RNA (1)...(19): siRNA sense strand
aaacagccaaccauuuaaa

SEQ ID NO: 770312 - RNA, 19 nt, Homo sapiens
  misc_RNA (1)...(19): siRNA sense strand
caaacagccaaccauuuaa

SEQ ID NO: 770313 - RNA, 19 nt, Homo sapiens
  misc_RNA (1)...(19): siRNA sense strand
gauaguacccaacaucaag

SEQ ID NO: 770314 - RNA, 19 nt, Homo sapiens
  misc_RNA (1)...(19): siRNA sense strand
caaaucugcucaucgaaaa

SEQ ID NO: 770315 - RNA, 19 nt, Homo sapiens
  misc_RNA (1)...(19): siRNA sense strand
gagacacaauagcaaggaa

SEQ ID NO: 770316 - RNA, 19 nt, Homo sapiens
  misc_RNA (1)...(19): siRNA sense strand
gaaggugucccaugauaac

SEQ ID NO: 770317 - RNA, 19 nt, Homo sapiens
  misc_RNA (1)...(19): siRNA sense strand
gagcuccaguacaccauau

SEQ ID NO: 770318 - RNA, 19 nt, Homo sapiens
  misc_RNA (1)...(19): siRNA sense strand
ucccaacccucccacaauu

SEQ ID NO: 770319 - RNA, 19 nt, Homo sapiens
  misc_RNA (1)...(19): siRNA sense strand
gcuuggagcaugaggauga

SEQ ID NO: 770320 - RNA, 19 nt, Homo sapiens
  misc_RNA (1)...(19): siRNA sense strand
ggugucccaugauaacuug

SEQ ID NO: 770321 - RNA, 19 nt, Homo sapiens
  misc_RNA (1)...(19): siRNA sense strand
gaugaggcuucgcaaacug

SEQ ID NO: 770322 - RNA, 19 nt, Homo sapiens
  misc_RNA (1)...(19): siRNA sense strand
gcuagaaugucuggauuac

SEQ ID NO: 770323 - RNA, 19 nt, Homo sapiens
  misc_RNA (1)...(19): siRNA sense strand
uaaccucaccaaccuuauu

SEQ ID NO: 770324 - RNA, 19 nt, Homo sapiens
  misc_RNA (1)...(19): siRNA sense strand
cgaauaagaagcccuuuac

SEQ ID NO: 770325 - RNA, 19 nt, Homo sapiens
  misc_RNA (1)...(19): siRNA sense strand
cugggaaguugaagacaaa

SEQ ID NO: 770326 - RNA, 19 nt, Homo sapiens
  misc_RNA (1)...(19): siRNA sense strand
gcucugcacagcuucauau

SEQ ID NO: 770327 - RNA, 19 nt, Homo sapiens
  misc_RNA (1)...(19): siRNA sense strand
gagagaagaaacugcuaga

SEQ ID NO: 770328 - RNA, 19 nt, Homo sapiens
  misc_RNA (1)...(19): siRNA sense strand
ugagaucauucagcaaaga

SEQ ID NO: 770329 - RNA, 19 nt, Homo sapiens
  misc_RNA (1)...(19): siRNA sense strand
caaugcaucacgucaagaa

SEQ ID NO: 770330 - RNA, 19 nt, Homo sapiens
  misc_RNA (1)...(19): siRNA sense strand
gaauaagaagcccuuuaca

SEQ ID NO: 770331 - RNA, 19 nt, Homo sapiens
  misc_RNA (1)...(19): siRNA sense strand
ccgaauaagaagcccuuua

SEQ ID NO: 770332 - RNA, 19 nt, Homo sapiens
  misc_RNA (1)...(19): siRNA sense strand
gcuggaaauguguuuauug

SEQ ID NO: 770333 - RNA, 19 nt, Homo sapiens
  misc_RNA (1)...(19): siRNA sense strand
uagaaugucuggauuaccu

SEQ ID NO: 770334 - RNA, 19 nt, Homo sapiens
  misc_RNA (1)...(19): siRNA sense strand
ccuacagacugcuaagaau

SEQ ID NO: 770335 - RNA, 19 nt, Homo sapiens
  misc_RNA (1)...(19): siRNA sense strand
uggcuaaacucauccaaac

SEQ ID NO: 770336 - RNA, 19 nt, Homo sapiens
  misc_RNA (1)...(19): siRNA sense strand
aagcaaaacuuagagagua

SEQ ID NO: 770337 - RNA, 19 nt, Homo sapiens
  misc_RNA (1)...(19): siRNA sense strand
ugagugagcgcuaugacaa

SEQ ID NO: 770338 - RNA, 19 nt, Homo sapiens
  misc_RNA (1)...(19): siRNA sense strand
ugacaccuuugccuuagau

SEQ ID NO: 770339 - RNA, 19 nt, Homo sapiens
  misc_RNA (1)...(19): siRNA sense strand
aguagaacgugaugaguca

SEQ ID NO: 770340 - RNA, 19 nt, Homo sapiens
  misc_RNA (1)...(19): siRNA sense strand
ucccaaaucugcucaucga

SEQ ID NO: 770341 - RNA, 19 nt, Homo sapiens
  misc_RNA (1)...(19): siRNA sense strand
agacaaacagccaaccauu

SEQ ID NO: 770342 - RNA, 19 nt, Homo sapiens
  misc_RNA (1)...(19): siRNA sense strand
cauaugacaccaucacugu

SEQ ID NO: 770343 - RNA, 19 nt, Homo sapiens
  misc_RNA (1)...(19): siRNA sense strand
auccaaaccugucaacaug

SEQ ID NO: 770344 - RNA, 19 nt, Homo sapiens
  misc_RNA (1)...(19): siRNA sense strand
caccuucgacgucgcauuu

SEQ ID NO: 770345 - RNA, 19 nt, Homo sapiens
  misc_RNA (1)...(19): siRNA sense strand
ugaacuccauccaccucua

SEQ ID NO: 770346 - RNA, 19 nt, Homo sapiens
  misc_RNA (1)...(19): siRNA sense strand
caacgucacccuacagaac

SEQ ID NO: 770347 - RNA, 19 nt, Homo sapiens
  misc_RNA (1)...(19): siRNA sense strand
uacaggccaucgucugauu

SEQ ID NO: 770348 - RNA, 19 nt, Homo sapiens
  misc_RNA (1)...(19): siRNA sense strand
ugaaggugucccaugauaa

SEQ ID NO: 770349 - RNA, 19 nt, Homo sapiens
  misc_RNA (1)...(19): siRNA sense strand
gaagacaaacagccaacca

SEQ ID NO: 770350 - RNA, 19 nt, Homo sapiens
  misc_RNA (1)...(19): siRNA sense strand
gcaaacuggcucagcagau

SEQ ID NO: 770351 - RNA, 19 nt, Homo sapiens
  misc_RNA (1)...(19): siRNA sense strand
ggaacaagugucugacgau

SEQ ID NO: 770352 - RNA, 19 nt, Homo sapiens
  misc_RNA (1)...(19): siRNA sense strand
gcauuugcgcagccuguuu

SEQ ID NO: 770353 - RNA, 19 nt, Homo sapiens
  misc_RNA (1)...(19): siRNA sense strand
ccugggaaguugaagacaa

SEQ ID NO: 770354 - RNA, 19 nt, Homo sapiens
  misc_RNA (1)...(19): siRNA sense strand
caaauugacagaggagugu

SEQ ID NO: 770355 - RNA, 19 nt, Homo sapiens
  misc_RNA (1)...(19): siRNA sense strand
uacccaacaucaagcagaa

SEQ ID NO: 770356 - RNA, 19 nt, Homo sapiens
  misc_RNA (1)...(19): siRNA sense strand
gucguuagucuguguaauu

SEQ ID NO: 770357 - RNA, 19 nt, Homo sapiens
  misc_RNA (1)...(19): siRNA sense strand
agaaacugcuagaaugucu

SEQ ID NO: 770358 - RNA, 19 nt, Homo sapiens
  misc_RNA (1)...(19): siRNA sense strand
aaccucaccaaccuuauua

SEQ ID NO: 770359 - RNA, 19 nt, Homo sapiens
  misc_RNA (1)...(19): siRNA sense strand
gaagagucacacaccugaa

SEQ ID NO: 770360 - RNA, 19 nt, Homo sapiens
  misc_RNA (1)...(19): siRNA sense strand
aacugaaggugucccauga

SEQ ID NO: 770361 - RNA, 19 nt, Homo sapiens
  misc_RNA (1)...(19): siRNA sense strand
gcagagcggcaccaaguac

SEQ ID NO: 770362 - RNA, 19 nt, Homo sapiens
  misc_RNA (1)...(19): siRNA sense strand
cauuggaccuccgaugaug

SEQ ID NO: 770363 - RNA, 19 nt, Homo sapiens
  misc_RNA (1)...(19): siRNA sense strand
caaagaagggaaggugaug

SEQ ID NO: 770364 - RNA, 19 nt, Homo sapiens
  misc_RNA (1)...(19): siRNA sense strand
gcauuggaccuccgaugau

SEQ ID NO: 770365 - RNA, 19 nt, Homo sapiens
  misc_RNA (1)...(19): siRNA sense strand
gaacugaccugcccuauuu

SEQ ID NO: 770366 - RNA, 19 nt, Homo sapiens
  misc_RNA (1)...(19): siRNA sense strand
cagcaaagacgacagauua

SEQ ID NO: 770367 - RNA, 19 nt, Homo sapiens
  misc_RNA (1)...(19): siRNA sense strand
gcugauagcuggaugauag

SEQ ID NO: 770368 - RNA, 19 nt, Homo sapiens
  misc_RNA (1)...(19): siRNA sense strand
acaaacagccaaccauuua

SEQ ID NO: 770369 - RNA, 19 nt, Homo sapiens
  misc_RNA (1)...(19): siRNA sense strand
agaagaaacugcuagaaug

SEQ ID NO: 770370 - RNA, 19 nt, Homo sapiens
  misc_RNA (1)...(19): siRNA sense strand
caugauaacuugacaguag

SEQ ID NO: 770371 - RNA, 19 nt, Homo sapiens
  misc_RNA (1)...(19): siRNA sense strand
ggagugugaucuucucauu

SEQ ID NO: 770372 - RNA, 19 nt, Homo sapiens
  misc_RNA (1)...(19): siRNA sense strand
gaaaucaaccucaaugaca

SEQ ID NO: 770373 - RNA, 19 nt, Homo sapiens
  misc_RNA (1)...(19): siRNA sense strand
gaaagccacucacccgaau

SEQ ID NO: 770374 - RNA, 19 nt, Homo sapiens
  misc_RNA (1)...(19): siRNA sense strand
gcacacagccucugcuuca

SEQ ID NO: 770375 - RNA, 19 nt, Homo sapiens
  misc_RNA (1)...(19): siRNA sense strand
caaacuggcucagcagauu

SEQ ID NO: 770376 - RNA, 19 nt, Homo sapiens
  misc_RNA (1)...(19): siRNA sense strand
gugaauauguacuguguga

SEQ ID NO: 770377 - RNA, 19 nt, Homo sapiens
  misc_RNA (1)...(19): siRNA sense strand
caaagacgacagauuauug

SEQ ID NO: 770378 - RNA, 19 nt, Homo sapiens
  misc_RNA (1)...(19): siRNA sense strand
gagaagaaacugcuagaau

SEQ ID NO: 770379 - RNA, 19 nt, Homo sapiens
  misc_RNA (1)...(19): siRNA sense strand
gaagaaacugcuagaaugu

SEQ ID NO: 770380 - RNA, 19 nt, Homo sapiens
  misc_RNA (1)...(19): siRNA sense strand
ugacacauuugacaccuuu

SEQ ID NO: 770381 - RNA, 19 nt, Homo sapiens
  misc_RNA (1)...(19): siRNA sense strand
gcagugagccugggaaguu

SEQ ID NO: 770382 - RNA, 19 nt, Homo sapiens
  misc_RNA (1)...(19): siRNA sense strand
gaagaccugugucacuugu

SEQ ID NO: 770383 - RNA, 19 nt, Homo sapiens
  misc_RNA (1)...(19): siRNA sense strand
gcaaagacgacagauuauu

SEQ ID NO: 770384 - RNA, 19 nt, Homo sapiens
  misc_RNA (1)...(19): siRNA sense strand
gaaguggucauaaguggaa

SEQ ID NO: 770385 - RNA, 19 nt, Homo sapiens
  misc_RNA (1)...(19): siRNA sense strand
ccaaaccugucaacauguu

SEQ ID NO: 770386 - RNA, 19 nt, Homo sapiens
  misc_RNA (1)...(19): siRNA sense strand
uaaacuggaucccaaaucu

SEQ ID NO: 770387 - RNA, 19 nt, Homo sapiens
  misc_RNA (1)...(19): siRNA sense strand
gacaaacagccaaccauuu

SEQ ID NO: 770388 - RNA, 19 nt, Homo sapiens
  misc_RNA (1)...(19): siRNA sense strand
ccacucacccgaauaagaa

SEQ ID NO: 770389 - RNA, 19 nt, Homo sapiens
  misc_RNA (1)...(19): siRNA sense strand
ugugaccgaugaccaguua

SEQ ID NO: 770390 - RNA, 19 nt, Homo sapiens
  misc_RNA (1)...(19): siRNA sense strand
uggaguagcuggaaaugug

SEQ ID NO: 770391 - RNA, 19 nt, Homo sapiens
  misc_RNA (1)...(19): siRNA sense strand
gaagguccucugccaguuu

SEQ ID NO: 770392 - RNA, 19 nt, Homo sapiens
  misc_RNA (1)...(19): siRNA sense strand
cuggaaauguguuuauuga

SEQ ID NO: 770393 - RNA, 19 nt, Homo sapiens
  misc_RNA (1)...(19): siRNA sense strand
gaugagaaggugaauaugu

SEQ ID NO: 770394 - RNA, 19 nt, Homo sapiens
  misc_RNA (1)...(19): siRNA sense strand
augagaaggugaauaugua

SEQ ID NO: 770395 - RNA, 19 nt, Homo sapiens
  misc_RNA (1)...(19): siRNA sense strand
cugaaggugucccaugaua

SEQ ID NO: 770396 - RNA, 19 nt, Homo sapiens
  misc_RNA (1)...(19): siRNA sense strand
ccaaguacaucuucauggu

SEQ ID NO: 770397 - RNA, 19 nt, Homo sapiens
  misc_RNA (1)...(19): siRNA sense strand
agugugaucuucucauuga

SEQ ID NO: 770398 - RNA, 19 nt, Homo sapiens
  misc_RNA (1)...(19): siRNA sense strand
gaaggugaauauguacugu

SEQ ID NO: 770399 - RNA, 19 nt, Homo sapiens
  misc_RNA (1)...(19): siRNA sense strand
cuacagacugcuaagaaua

SEQ ID NO: 770400 - RNA, 19 nt, Homo sapiens
  misc_RNA (1)...(19): siRNA sense strand
guuaaucugugccuugugu

SEQ ID NO: 770401 - RNA, 19 nt, Homo sapiens
  misc_RNA (1)...(19): siRNA sense strand
ccaaaucugcucaucgaaa

SEQ ID NO: 770402 - RNA, 19 nt, Homo sapiens
  misc_RNA (1)...(19): siRNA sense strand
gaaugucuggauuaccuua

SEQ ID NO: 770403 - RNA, 19 nt, Homo sapiens
  misc_RNA (1)...(19): siRNA sense strand
ugagcgcuaugacaaauug

SEQ ID NO: 770404 - RNA, 19 nt, Homo sapiens
  misc_RNA (1)...(19): siRNA sense strand
gaccuccgaugaugaguuc

SEQ ID NO: 770405 - RNA, 19 nt, Homo sapiens
  misc_RNA (1)...(19): siRNA sense strand
agaaugaucaugcgcguuu

SEQ ID NO: 770406 - RNA, 19 nt, Homo sapiens
  misc_RNA (1)...(19): siRNA sense strand
aaacagccaaccauuuaaa

SEQ ID NO: 770407 - RNA, 19 nt, Homo sapiens
  misc_RNA (1)...(19): siRNA sense strand
caaacagccaaccauuuaa

SEQ ID NO: 770408 - RNA, 19 nt, Homo sapiens
  misc_RNA (1)...(19): siRNA sense strand
gauaguacccaacaucaag

SEQ ID NO: 770409 - RNA, 19 nt, Homo sapiens
  misc_RNA (1)...(19): siRNA sense strand
caaaucugcucaucgaaaa

SEQ ID NO: 770410 - RNA, 19 nt, Homo sapiens
  misc_RNA (1)...(19): siRNA sense strand
gaaggugucccaugauaac

SEQ ID NO: 770411 - RNA, 19 nt, Homo sapiens
  misc_RNA (1)...(19): siRNA sense strand
gagcuccaguacaccauau

SEQ ID NO: 770412 - RNA, 19 nt, Homo sapiens
  misc_RNA (1)...(19): siRNA sense strand
ucccaacccucccacaauu

SEQ ID NO: 770413 - RNA, 19 nt, Homo sapiens
  misc_RNA (1)...(19): siRNA sense strand
gcuuggagcaugaggauga

SEQ ID NO: 770414 - RNA, 19 nt, Homo sapiens
  misc_RNA (1)...(19): siRNA sense strand
ggugucccaugauaacuug

SEQ ID NO: 770415 - RNA, 19 nt, Homo sapiens
  misc_RNA (1)...(19): siRNA sense strand
gaugaggcuucgcaaacug

SEQ ID NO: 770416 - RNA, 19 nt, Homo sapiens
  misc_RNA (1)...(19): siRNA sense strand
gcuagaaugucuggauuac

SEQ ID NO: 770417 - RNA, 19 nt, Homo sapiens
  misc_RNA (1)...(19): siRNA sense strand
uaaccucaccaaccuuauu

SEQ ID NO: 770418 - RNA, 19 nt, Homo sapiens
  misc_RNA (1)...(19): siRNA sense strand
cgaauaagaagcccuuuac

SEQ ID NO: 770419 - RNA, 19 nt, Homo sapiens
  misc_RNA (1)...(19): siRNA sense strand
cugggaaguugaagacaaa

SEQ ID NO: 770420 - RNA, 19 nt, Homo sapiens
  misc_RNA (1)...(19): siRNA sense strand
gcucugcacagcuucauau

SEQ ID NO: 770421 - RNA, 19 nt, Homo sapiens
  misc_RNA (1)...(19): siRNA sense strand
gagagaagaaacugcuaga

SEQ ID NO: 770422 - RNA, 19 nt, Homo sapiens
  misc_RNA (1)...(19): siRNA sense strand
ugagaucauucagcaaaga

SEQ ID NO: 770423 - RNA, 19 nt, Homo sapiens
  misc_RNA (1)...(19): siRNA sense strand
caaugcaucacgucaagaa

SEQ ID NO: 770424 - RNA, 19 nt, Homo sapiens
  misc_RNA (1)...(19): siRNA sense strand
gaauaagaagcccuuuaca

SEQ ID NO: 770425 - RNA, 19 nt, Homo sapiens
  misc_RNA (1)...(19): siRNA sense strand
ccgaauaagaagcccuuua

SEQ ID NO: 770426 - RNA, 19 nt, Homo sapiens
  misc_RNA (1)...(19): siRNA sense strand
gcuggaaauguguuuauug

SEQ ID NO: 770427 - RNA, 19 nt, Homo sapiens
  misc_RNA (1)...(19): siRNA sense strand
uagaaugucuggauuaccu

SEQ ID NO: 770428 - RNA, 19 nt, Homo sapiens
  misc_RNA (1)...(19): siRNA sense strand
ccuacagacugcuaagaau

SEQ ID NO: 770429 - RNA, 19 nt, Homo sapiens
  misc_RNA (1)...(19): siRNA sense strand
uggcuaaacucauccaaac

SEQ ID NO: 770430 - RNA, 19 nt, Homo sapiens
  misc_RNA (1)...(19): siRNA sense strand
aagcaaaacuuagagagua

SEQ ID NO: 770431 - RNA, 19 nt, Homo sapiens
  misc_RNA (1)...(19): siRNA sense strand
ugagugagcgcuaugacaa

SEQ ID NO: 770432 - RNA, 19 nt, Homo sapiens
  misc_RNA (1)...(19): siRNA sense strand
ugacaccuuugccuuagau

SEQ ID NO: 770433 - RNA, 19 nt, Homo sapiens
  misc_RNA (1)...(19): siRNA sense strand
aguagaacgugaugaguca

SEQ ID NO: 770434 - RNA, 19 nt, Homo sapiens
  misc_RNA (1)...(19): siRNA sense strand
ucccaaaucugcucaucga

SEQ ID NO: 770435 - RNA, 19 nt, Homo sapiens
  misc_RNA (1)...(19): siRNA sense strand
agacaaacagccaaccauu

SEQ ID NO: 770436 - RNA, 19 nt, Homo sapiens
  misc_RNA (1)...(19): siRNA sense strand
cauaugacaccaucacugu

SEQ ID NO: 770437 - RNA, 19 nt, Homo sapiens
  misc_RNA (1)...(19): siRNA sense strand
auccaaaccugucaacaug

SEQ ID NO: 770438 - RNA, 19 nt, Homo sapiens
  misc_RNA (1)...(19): siRNA sense strand
caacgucacccuacagaac

SEQ ID NO: 770439 - RNA, 19 nt, Homo sapiens
  misc_RNA (1)...(19): siRNA sense strand
uacaggccaucgucugauu

SEQ ID NO: 770440 - RNA, 19 nt, Homo sapiens
  misc_RNA (1)...(19): siRNA sense strand
ugaaggugucccaugauaa

SEQ ID NO: 770441 - RNA, 19 nt, Homo sapiens
  misc_RNA (1)...(19): siRNA sense strand
gaagacaaacagccaacca

SEQ ID NO: 770442 - RNA, 19 nt, Homo sapiens
  misc_RNA (1)...(19): siRNA sense strand
gcaaacuggcucagcagau

SEQ ID NO: 770443 - RNA, 19 nt, Homo sapiens
  misc_RNA (1)...(19): siRNA sense strand
ccugggaaguugaagacaa

SEQ ID NO: 770444 - RNA, 19 nt, Homo sapiens
  misc_RNA (1)...(19): siRNA sense strand
caaauugacagaggagugu

SEQ ID NO: 770445 - RNA, 19 nt, Homo sapiens
  misc_RNA (1)...(19): siRNA sense strand
uacccaacaucaagcagaa

SEQ ID NO: 770446 - RNA, 19 nt, Homo sapiens
  misc_RNA (1)...(19): siRNA sense strand
gucguuagucuguguaauu

SEQ ID NO: 770447 - RNA, 19 nt, Homo sapiens
  misc_RNA (1)...(19): siRNA sense strand
agaaacugcuagaaugucu

SEQ ID NO: 770448 - RNA, 19 nt, Homo sapiens
  misc_RNA (1)...(19): siRNA sense strand
aaccucaccaaccuuauua

SEQ ID NO: 770449 - RNA, 19 nt, Homo sapiens
  misc_RNA (1)...(19): siRNA sense strand
gaagagucacacaccugaa

SEQ ID NO: 770450 - RNA, 19 nt, Homo sapiens
  misc_RNA (1)...(19): siRNA sense strand
aacugaaggugucccauga

SEQ ID NO: 770451 - RNA, 19 nt, Homo sapiens
  misc_RNA (1)...(19): siRNA sense strand
gcagagcggcaccaaguac

SEQ ID NO: 770452 - RNA, 19 nt, Homo sapiens
  misc_RNA (1)...(19): siRNA sense strand
cauuggaccuccgaugaug

SEQ ID NO: 770453 - RNA, 19 nt, Homo sapiens
  misc_RNA (1)...(19): siRNA sense strand
caaagaagggaaggugaug

SEQ ID NO: 770454 - RNA, 19 nt, Homo sapiens
  misc_RNA (1)...(19): siRNA sense strand
aggaugagaaggugaauau

SEQ ID NO: 770455 - RNA, 19 nt, Homo sapiens
  misc_RNA (1)...(19): siRNA sense strand
gcauuggaccuccgaugau

SEQ ID NO: 770456 - RNA, 19 nt, Homo sapiens
  misc_RNA (1)...(19): siRNA sense strand
cugcacagcuucauaugac

SEQ ID NO: 770457 - RNA, 19 nt, Homo sapiens
  misc_RNA (1)...(19): siRNA sense strand
gguucuaauuccugaaauc

SEQ ID NO: 770458 - RNA, 19 nt, Homo sapiens
  misc_RNA (1)...(19): siRNA sense strand
gagugagcgcuaugacaaa

SEQ ID NO: 770459 - RNA, 19 nt, Homo sapiens
  misc_RNA (1)...(19): siRNA sense strand
ucuaauuccugaaaucaac

SEQ ID NO: 770460 - RNA, 19 nt, Homo sapiens
  misc_RNA (1)...(19): siRNA sense strand
gcccaccgcauccuaguau

SEQ ID NO: 770461 - RNA, 19 nt, Homo sapiens
  misc_RNA (1)...(19): siRNA sense strand
gaucccaaaucugcucauc

SEQ ID NO: 770462 - RNA, 19 nt, Homo sapiens
  misc_RNA (1)...(19): siRNA sense strand
ggaccuccgaugaugaguu

SEQ ID NO: 770463 - RNA, 19 nt, Homo sapiens
  misc_RNA (1)...(19): siRNA sense strand
cugcuagaaugucuggauu

SEQ ID NO: 770464 - RNA, 19 nt, Homo sapiens
  misc_RNA (1)...(19): siRNA sense strand
ggaaacacuggagucagaa

SEQ ID NO: 770465 - RNA, 19 nt, Homo sapiens
  misc_RNA (1)...(19): siRNA sense strand
gagaagagaaagcuguuua

SEQ ID NO: 770466 - RNA, 19 nt, Homo sapiens
  misc_RNA (1)...(19): siRNA sense strand
gaagacucauugaacauau

SEQ ID NO: 770467 - RNA, 19 nt, Homo sapiens
  misc_RNA (1)...(19): siRNA sense strand
ggaagacucauugaacaua

SEQ ID NO: 770468 - RNA, 19 nt, Homo sapiens
  misc_RNA (1)...(19): siRNA sense strand
gaagagaaagcuguuuauc

SEQ ID NO: 770469 - RNA, 19 nt, Homo sapiens
  misc_RNA (1)...(19): siRNA sense strand
gcagaugcccaccacugaa

SEQ ID NO: 770470 - RNA, 19 nt, Homo sapiens
  misc_RNA (1)...(19): siRNA sense strand
agagugacuuugacaagau

SEQ ID NO: 770471 - RNA, 19 nt, Homo sapiens
  misc_RNA (1)...(19): siRNA sense strand
aagagugacuuugacaaga

SEQ ID NO: 770472 - RNA, 19 nt, Homo sapiens
  misc_RNA (1)...(19): siRNA sense strand
gagugacuuugacaagaug

SEQ ID NO: 770473 - RNA, 19 nt, Homo sapiens
  misc_RNA (1)...(19): siRNA sense strand
ccugugauguggaggaaau

SEQ ID NO: 770474 - RNA, 19 nt, Homo sapiens
  misc_RNA (1)...(19): siRNA sense strand
ggagaagagaaagcuguuu

SEQ ID NO: 770475 - RNA, 19 nt, Homo sapiens
  misc_RNA (1)...(19): siRNA sense strand
ucauugaacauaugcaaga

SEQ ID NO: 770476 - RNA, 19 nt, Homo sapiens
  misc_RNA (1)...(19): siRNA sense strand
ccucuucccaggacauuaa

SEQ ID NO: 770477 - RNA, 19 nt, Homo sapiens
  misc_RNA (1)...(19): siRNA sense strand
cagaugcccaccacugaaa

SEQ ID NO: 770478 - RNA, 19 nt, Homo sapiens
  misc_RNA (1)...(19): siRNA sense strand
uuggagacaucccacaaug

SEQ ID NO: 770479 - RNA, 19 nt, Homo sapiens
  misc_RNA (1)...(19): siRNA sense strand
cauugaacauaugcaagaa

SEQ ID NO: 770480 - RNA, 19 nt, Homo sapiens
  misc_RNA (1)...(19): siRNA sense strand
uuggaagacucauugaaca

SEQ ID NO: 770481 - RNA, 19 nt, Homo sapiens
  misc_RNA (1)...(19): siRNA sense strand
agaagagaaagcuguuuau

SEQ ID NO: 770482 - RNA, 19 nt, Homo sapiens
  misc_RNA (1)...(19): siRNA sense strand
ugacuuugacaagauguuu

SEQ ID NO: 770483 - RNA, 19 nt, Homo sapiens
  misc_RNA (1)...(19): siRNA sense strand
aagacucauugaacauaug

SEQ ID NO: 770484 - RNA, 19 nt, Homo sapiens
  misc_RNA (1)...(19): siRNA sense strand
gagaagagaaagcuguuua

SEQ ID NO: 770485 - RNA, 19 nt, Homo sapiens
  misc_RNA (1)...(19): siRNA sense strand
gaagacucauugaacauau

SEQ ID NO: 770486 - RNA, 19 nt, Homo sapiens
  misc_RNA (1)...(19): siRNA sense strand
ggaagacucauugaacaua

SEQ ID NO: 770487 - RNA, 19 nt, Homo sapiens
  misc_RNA (1)...(19): siRNA sense strand
gaagagaaagcuguuuauc

SEQ ID NO: 770488 - RNA, 19 nt, Homo sapiens
  misc_RNA (1)...(19): siRNA sense strand
gcagaugcccaccacugaa

SEQ ID NO: 770489 - RNA, 19 nt, Homo sapiens
  misc_RNA (1)...(19): siRNA sense strand
agagugacuuugacaagau

SEQ ID NO: 770490 - RNA, 19 nt, Homo sapiens
  misc_RNA (1)...(19): siRNA sense strand
aagagugacuuugacaaga

SEQ ID NO: 770491 - RNA, 19 nt, Homo sapiens
  misc_RNA (1)...(19): siRNA sense strand
gagugacuuugacaagaug

SEQ ID NO: 770492 - RNA, 19 nt, Homo sapiens
  misc_RNA (1)...(19): siRNA sense strand
ccugugauguggaggaaau

SEQ ID NO: 770493 - RNA, 19 nt, Homo sapiens
  misc_RNA (1)...(19): siRNA sense strand
ggagaagagaaagcuguuu

SEQ ID NO: 770494 - RNA, 19 nt, Homo sapiens
  misc_RNA (1)...(19): siRNA sense strand
ucauugaacauaugcaaga

SEQ ID NO: 770495 - RNA, 19 nt, Homo sapiens
  misc_RNA (1)...(19): siRNA sense strand
ccucuucccaggacauuaa

SEQ ID NO: 770496 - RNA, 19 nt, Homo sapiens
  misc_RNA (1)...(19): siRNA sense strand
cagaugcccaccacugaaa

SEQ ID NO: 770497 - RNA, 19 nt, Homo sapiens
  misc_RNA (1)...(19): siRNA sense strand
uuggagacaucccacaaug

SEQ ID NO: 770498 - RNA, 19 nt, Homo sapiens
  misc_RNA (1)...(19): siRNA sense strand
cauugaacauaugcaagaa

SEQ ID NO: 770499 - RNA, 19 nt, Homo sapiens
  misc_RNA (1)...(19): siRNA sense strand
uuggaagacucauugaaca

SEQ ID NO: 770500 - RNA, 19 nt, Homo sapiens
  misc_RNA (1)...(19): siRNA sense strand
agaagagaaagcuguuuau

SEQ ID NO: 770501 - RNA, 19 nt, Homo sapiens
  misc_RNA (1)...(19): siRNA sense strand
ugacuuugacaagauguuu

SEQ ID NO: 770502 - RNA, 19 nt, Homo sapiens
  misc_RNA (1)...(19): siRNA sense strand
aagacucauugaacauaug

SEQ ID NO: 770503 - RNA, 19 nt, Homo sapiens
  misc_RNA (1)...(19): siRNA sense strand
gagaagagaaagcuguuua

SEQ ID NO: 770504 - RNA, 19 nt, Homo sapiens
  misc_RNA (1)...(19): siRNA sense strand
gaagacucauugaacauau

SEQ ID NO: 770505 - RNA, 19 nt, Homo sapiens
  misc_RNA (1)...(19): siRNA sense strand
ggaagacucauugaacaua

SEQ ID NO: 770506 - RNA, 19 nt, Homo sapiens
  misc_RNA (1)...(19): siRNA sense strand
gaagagaaagcuguuuauc

SEQ ID NO: 770507 - RNA, 19 nt, Homo sapiens
  misc_RNA (1)...(19): siRNA sense strand
gcagaugcccaccacugaa

SEQ ID NO: 770508 - RNA, 19 nt, Homo sapiens
  misc_RNA (1)...(19): siRNA sense strand
agagugacuuugacaagau

SEQ ID NO: 770509 - RNA, 19 nt, Homo sapiens
  misc_RNA (1)...(19): siRNA sense strand
aagagugacuuugacaaga

SEQ ID NO: 770510 - RNA, 19 nt, Homo sapiens
  misc_RNA (1)...(19): siRNA sense strand
gagugacuuugacaagaug

SEQ ID NO: 770511 - RNA, 19 nt, Homo sapiens
  misc_RNA (1)...(19): siRNA sense strand
ccugugauguggaggaaau

SEQ ID NO: 770512 - RNA, 19 nt, Homo sapiens
  misc_RNA (1)...(19): siRNA sense strand
ggagaagagaaagcuguuu

SEQ ID NO: 770513 - RNA, 19 nt, Homo sapiens
  misc_RNA (1)...(19): siRNA sense strand
ucauugaacauaugcaaga

SEQ ID NO: 770514 - RNA, 19 nt, Homo sapiens
  misc_RNA (1)...(19): siRNA sense strand
ccucuucccaggacauuaa

SEQ ID NO: 770515 - RNA, 19 nt, Homo sapiens
  misc_RNA (1)...(19): siRNA sense strand
cagaugcccaccacugaaa

SEQ ID NO: 770516 - RNA, 19 nt, Homo sapiens
  misc_RNA (1)...(19): siRNA sense strand
uuggagacaucccacaaug

SEQ ID NO: 770517 - RNA, 19 nt, Homo sapiens
  misc_RNA (1)...(19): siRNA sense strand
cauugaacauaugcaagaa

SEQ ID NO: 770518 - RNA, 19 nt, Homo sapiens
  misc_RNA (1)...(19): siRNA sense strand
uuggaagacucauugaaca

SEQ ID NO: 770519 - RNA, 19 nt, Homo sapiens
  misc_RNA (1)...(19): siRNA sense strand
agaagagaaagcuguuuau

SEQ ID NO: 770520 - RNA, 19 nt, Homo sapiens
  misc_RNA (1)...(19): siRNA sense strand
ugacuuugacaagauguuu

SEQ ID NO: 770521 - RNA, 19 nt, Homo sapiens
  misc_RNA (1)...(19): siRNA sense strand
aagacucauugaacauaug

SEQ ID NO: 770522 - RNA, 19 nt, Homo sapiens
  misc_RNA (1)...(19): siRNA sense strand
gagaagagaaagcuguuua

SEQ ID NO: 770523 - RNA, 19 nt, Homo sapiens
  misc_RNA (1)...(19): siRNA sense strand
gaagacucauugaacauau

SEQ ID NO: 770524 - RNA, 19 nt, Homo sapiens
  misc_RNA (1)...(19): siRNA sense strand
ggaagacucauugaacaua

SEQ ID NO: 770525 - RNA, 19 nt, Homo sapiens
  misc_RNA (1)...(19): siRNA sense strand
gaagagaaagcuguuuauc

SEQ ID NO: 770526 - RNA, 19 nt, Homo sapiens
  misc_RNA (1)...(19): siRNA sense strand
gcagaugcccaccacugaa

SEQ ID NO: 770527 - RNA, 19 nt, Homo sapiens
  misc_RNA (1)...(19): siRNA sense strand
agagugacuuugacaagau

SEQ ID NO: 770528 - RNA, 19 nt, Homo sapiens
  misc_RNA (1)...(19): siRNA sense strand
aagagugacuuugacaaga

SEQ ID NO: 770529 - RNA, 19 nt, Homo sapiens
  misc_RNA (1)...(19): siRNA sense strand
gagugacuuugacaagaug

SEQ ID NO: 770530 - RNA, 19 nt, Homo sapiens
  misc_RNA (1)...(19): siRNA sense strand
ccugugauguggaggaaau

SEQ ID NO: 770531 - RNA, 19 nt, Homo sapiens
  misc_RNA (1)...(19): siRNA sense strand
ggagaagagaaagcuguuu

SEQ ID NO: 770532 - RNA, 19 nt, Homo sapiens
  misc_RNA (1)...(19): siRNA sense strand
ucauugaacauaugcaaga

SEQ ID NO: 770533 - RNA, 19 nt, Homo sapiens
  misc_RNA (1)...(19): siRNA sense strand
ccucuucccaggacauuaa

SEQ ID NO: 770534 - RNA, 19 nt, Homo sapiens
  misc_RNA (1)...(19): siRNA sense strand
cagaugcccaccacugaaa

SEQ ID NO: 770535 - RNA, 19 nt, Homo sapiens
  misc_RNA (1)...(19): siRNA sense strand
uuggagacaucccacaaug

SEQ ID NO: 770536 - RNA, 19 nt, Homo sapiens
  misc_RNA (1)...(19): siRNA sense strand
cauugaacauaugcaagaa

SEQ ID NO: 770537 - RNA, 19 nt, Homo sapiens
  misc_RNA (1)...(19): siRNA sense strand
uuggaagacucauugaaca

SEQ ID NO: 770538 - RNA, 19 nt, Homo sapiens
  misc_RNA (1)...(19): siRNA sense strand
agaagagaaagcuguuuau

SEQ ID NO: 770539 - RNA, 19 nt, Homo sapiens
  misc_RNA (1)...(19): siRNA sense strand
ugacuuugacaagauguuu

SEQ ID NO: 770540 - RNA, 19 nt, Homo sapiens
  misc_RNA (1)...(19): siRNA sense strand
aagacucauugaacauaug

SEQ ID NO: 770541 - RNA, 19 nt, Homo sapiens
  misc_RNA (1)...(19): siRNA sense strand
gagaagagaaagcuguuua

SEQ ID NO: 770542 - RNA, 19 nt, Homo sapiens
  misc_RNA (1)...(19): siRNA sense strand
gaagacucauugaacauau

SEQ ID NO: 770543 - RNA, 19 nt, Homo sapiens
  misc_RNA (1)...(19): siRNA sense strand
ggaagacucauugaacaua

SEQ ID NO: 770544 - RNA, 19 nt, Homo sapiens
  misc_RNA (1)...(19): siRNA sense strand
gaagagaaagcuguuuauc

SEQ ID NO: 770545 - RNA, 19 nt, Homo sapiens
  misc_RNA (1)...(19): siRNA sense strand
gcagaugcccaccacugaa

SEQ ID NO: 770546 - RNA, 19 nt, Homo sapiens
  misc_RNA (1)...(19): siRNA sense strand
agagugacuuugacaagau

SEQ ID NO: 770547 - RNA, 19 nt, Homo sapiens
  misc_RNA (1)...(19): siRNA sense strand
aagagugacuuugacaaga

SEQ ID NO: 770548 - RNA, 19 nt, Homo sapiens
  misc_RNA (1)...(19): siRNA sense strand
gagugacuuugacaagaug

SEQ ID NO: 770549 - RNA, 19 nt, Homo sapiens
  misc_RNA (1)...(19): siRNA sense strand
ccugugauguggaggaaau

SEQ ID NO: 770550 - RNA, 19 nt, Homo sapiens
  misc_RNA (1)...(19): siRNA sense strand
ggagaagagaaagcuguuu

SEQ ID NO: 770551 - RNA, 19 nt, Homo sapiens
  misc_RNA (1)...(19): siRNA sense strand
ucauugaacauaugcaaga

SEQ ID NO: 770552 - RNA, 19 nt, Homo sapiens
  misc_RNA (1)...(19): siRNA sense strand
ccucuucccaggacauuaa

SEQ ID NO: 770553 - RNA, 19 nt, Homo sapiens
  misc_RNA (1)...(19): siRNA sense strand
cagaugcccaccacugaaa

SEQ ID NO: 770554 - RNA, 19 nt, Homo sapiens
  misc_RNA (1)...(19): siRNA sense strand
uuggagacaucccacaaug

SEQ ID NO: 770555 - RNA, 19 nt, Homo sapiens
  misc_RNA (1)...(19): siRNA sense strand
cauugaacauaugcaagaa

SEQ ID NO: 770556 - RNA, 19 nt, Homo sapiens
  misc_RNA (1)...(19): siRNA sense strand
uuggaagacucauugaaca

SEQ ID NO: 770557 - RNA, 19 nt, Homo sapiens
  misc_RNA (1)...(19): siRNA sense strand
agaagagaaagcuguuuau

SEQ ID NO: 770558 - RNA, 19 nt, Homo sapiens
  misc_RNA (1)...(19): siRNA sense strand
ugacuuugacaagauguuu

SEQ ID NO: 770559 - RNA, 19 nt, Homo sapiens
  misc_RNA (1)...(19): siRNA sense strand
aagacucauugaacauaug

SEQ ID NO: 770560 - RNA, 19 nt, Homo sapiens
  misc_RNA (1)...(19): siRNA sense strand
gagaagagaaagcuguuua

SEQ ID NO: 770561 - RNA, 19 nt, Homo sapiens
  misc_RNA (1)...(19): siRNA sense strand
gaagacucauugaacauau

SEQ ID NO: 770562 - RNA, 19 nt, Homo sapiens
  misc_RNA (1)...(19): siRNA sense strand
ggaagacucauugaacaua

SEQ ID NO: 770563 - RNA, 19 nt, Homo sapiens
  misc_RNA (1)...(19): siRNA sense strand
gaagagaaagcuguuuauc

SEQ ID NO: 770564 - RNA, 19 nt, Homo sapiens
  misc_RNA (1)...(19): siRNA sense strand
gcagaugcccaccacugaa

SEQ ID NO: 770565 - RNA, 19 nt, Homo sapiens
  misc_RNA (1)...(19): siRNA sense strand
agagugacuuugacaagau

SEQ ID NO: 770566 - RNA, 19 nt, Homo sapiens
  misc_RNA (1)...(19): siRNA sense strand
aagagugacuuugacaaga

SEQ ID NO: 770567 - RNA, 19 nt, Homo sapiens
  misc_RNA (1)...(19): siRNA sense strand
gagugacuuugacaagaug

SEQ ID NO: 770568 - RNA, 19 nt, Homo sapiens
  misc_RNA (1)...(19): siRNA sense strand
ccugugauguggaggaaau

SEQ ID NO: 770569 - RNA, 19 nt, Homo sapiens
  misc_RNA (1)...(19): siRNA sense strand
ggagaagagaaagcuguuu

SEQ ID NO: 770570 - RNA, 19 nt, Homo sapiens
  misc_RNA (1)...(19): siRNA sense strand
ucauugaacauaugcaaga

SEQ ID NO: 770571 - RNA, 19 nt, Homo sapiens
  misc_RNA (1)...(19): siRNA sense strand
ccucuucccaggacauuaa

SEQ ID NO: 770572 - RNA, 19 nt, Homo sapiens
  misc_RNA (1)...(19): siRNA sense strand
cagaugcccaccacugaaa

SEQ ID NO: 770573 - RNA, 19 nt, Homo sapiens
  misc_RNA (1)...(19): siRNA sense strand
uuggagacaucccacaaug

SEQ ID NO: 770574 - RNA, 19 nt, Homo sapiens
  misc_RNA (1)...(19): siRNA sense strand
cauugaacauaugcaagaa

SEQ ID NO: 770575 - RNA, 19 nt, Homo sapiens
  misc_RNA (1)...(19): siRNA sense strand
uuggaagacucauugaaca

SEQ ID NO: 770576 - RNA, 19 nt, Homo sapiens
  misc_RNA (1)...(19): siRNA sense strand
agaagagaaagcuguuuau

SEQ ID NO: 770577 - RNA, 19 nt, Homo sapiens
  misc_RNA (1)...(19): siRNA sense strand
ugacuuugacaagauguuu

SEQ ID NO: 770578 - RNA, 19 nt, Homo sapiens
  misc_RNA (1)...(19): siRNA sense strand
aagacucauugaacauaug

SEQ ID NO: 770579 - RNA, 19 nt, Homo sapiens
  misc_RNA (1)...(19): siRNA sense strand
gagaagagaaagcuguuua

SEQ ID NO: 770580 - RNA, 19 nt, Homo sapiens
  misc_RNA (1)...(19): siRNA sense strand
gaagacucauugaacauau

SEQ ID NO: 770581 - RNA, 19 nt, Homo sapiens
  misc_RNA (1)...(19): siRNA sense strand
ggaagacucauugaacaua

SEQ ID NO: 770582 - RNA, 19 nt, Homo sapiens
  misc_RNA (1)...(19): siRNA sense strand
gaagagaaagcuguuuauc

SEQ ID NO: 770583 - RNA, 19 nt, Homo sapiens
  misc_RNA (1)...(19): siRNA sense strand
gcagaugcccaccacugaa

SEQ ID NO: 770584 - RNA, 19 nt, Homo sapiens
  misc_RNA (1)...(19): siRNA sense strand
agagugacuuugacaagau

SEQ ID NO: 770585 - RNA, 19 nt, Homo sapiens
  misc_RNA (1)...(19): siRNA sense strand
aagagugacuuugacaaga

SEQ ID NO: 770586 - RNA, 19 nt, Homo sapiens
  misc_RNA (1)...(19): siRNA sense strand
gagugacuuugacaagaug

SEQ ID NO: 770587 - RNA, 19 nt, Homo sapiens
  misc_RNA (1)...(19): siRNA sense strand
ccugugauguggaggaaau

SEQ ID NO: 770588 - RNA, 19 nt, Homo sapiens
  misc_RNA (1)...(19): siRNA sense strand
ggagaagagaaagcuguuu

SEQ ID NO: 770589 - RNA, 19 nt, Homo sapiens
  misc_RNA (1)...(19): siRNA sense strand
ucauugaacauaugcaaga

SEQ ID NO: 770590 - RNA, 19 nt, Homo sapiens
  misc_RNA (1)...(19): siRNA sense strand
ccucuucccaggacauuaa

SEQ ID NO: 770591 - RNA, 19 nt, Homo sapiens
  misc_RNA (1)...(19): siRNA sense strand
cagaugcccaccacugaaa

SEQ ID NO: 770592 - RNA, 19 nt, Homo sapiens
  misc_RNA (1)...(19): siRNA sense strand
uuggagacaucccacaaug

SEQ ID NO: 770593 - RNA, 19 nt, Homo sapiens
  misc_RNA (1)...(19): siRNA sense strand
cauugaacauaugcaagaa

SEQ ID NO: 770594 - RNA, 19 nt, Homo sapiens
  misc_RNA (1)...(19): siRNA sense strand
uuggaagacucauugaaca

SEQ ID NO: 770595 - RNA, 19 nt, Homo sapiens
  misc_RNA (1)...(19): siRNA sense strand
agaagagaaagcuguuuau

SEQ ID NO: 770596 - RNA, 19 nt, Homo sapiens
  misc_RNA (1)...(19): siRNA sense strand
ugacuuugacaagauguuu

SEQ ID NO: 770597 - RNA, 19 nt, Homo sapiens
  misc_RNA (1)...(19): siRNA sense strand
aagacucauugaacauaug

SEQ ID NO: 770598 - RNA, 19 nt, Homo sapiens
  misc_RNA (1)...(19): siRNA sense strand
gagaagagaaagcuguuua

SEQ ID NO: 770599 - RNA, 19 nt, Homo sapiens
  misc_RNA (1)...(19): siRNA sense strand
gaagacucauugaacauau

SEQ ID NO: 770600 - RNA, 19 nt, Homo sapiens
  misc_RNA (1)...(19): siRNA sense strand
ggaagacucauugaacaua

SEQ ID NO: 770601 - RNA, 19 nt, Homo sapiens
  misc_RNA (1)...(19): siRNA sense strand
gaagagaaagcuguuuauc

SEQ ID NO: 770602 - RNA, 19 nt, Homo sapiens
  misc_RNA (1)...(19): siRNA sense strand
gcagaugcccaccacugaa

SEQ ID NO: 770603 - RNA, 19 nt, Homo sapiens
  misc_RNA (1)...(19): siRNA sense strand
agagugacuuugacaagau

SEQ ID NO: 770604 - RNA, 19 nt, Homo sapiens
  misc_RNA (1)...(19): siRNA sense strand
aagagugacuuugacaaga

SEQ ID NO: 770605 - RNA, 19 nt, Homo sapiens
  misc_RNA (1)...(19): siRNA sense strand
gagugacuuugacaagaug

SEQ ID NO: 770606 - RNA, 19 nt, Homo sapiens
  misc_RNA (1)...(19): siRNA sense strand
ccugugauguggaggaaau

SEQ ID NO: 770607 - RNA, 19 nt, Homo sapiens
  misc_RNA (1)...(19): siRNA sense strand
ggagaagagaaagcuguuu

SEQ ID NO: 770608 - RNA, 19 nt, Homo sapiens
  misc_RNA (1)...(19): siRNA sense strand
ucauugaacauaugcaaga

SEQ ID NO: 770609 - RNA, 19 nt, Homo sapiens
  misc_RNA (1)...(19): siRNA sense strand
ccucuucccaggacauuaa

SEQ ID NO: 770610 - RNA, 19 nt, Homo sapiens
  misc_RNA (1)...(19): siRNA sense strand
cagaugcccaccacugaaa

SEQ ID NO: 770611 - RNA, 19 nt, Homo sapiens
  misc_RNA (1)...(19): siRNA sense strand
uuggagacaucccacaaug

SEQ ID NO: 770612 - RNA, 19 nt, Homo sapiens
  misc_RNA (1)...(19): siRNA sense strand
cauugaacauaugcaagaa

SEQ ID NO: 770613 - RNA, 19 nt, Homo sapiens
  misc_RNA (1)...(19): siRNA sense strand
uuggaagacucauugaaca

SEQ ID NO: 770614 - RNA, 19 nt, Homo sapiens
  misc_RNA (1)...(19): siRNA sense strand
agaagagaaagcuguuuau

SEQ ID NO: 770615 - RNA, 19 nt, Homo sapiens
  misc_RNA (1)...(19): siRNA sense strand
ugacuuugacaagauguuu

SEQ ID NO: 770616 - RNA, 19 nt, Homo sapiens
  misc_RNA (1)...(19): siRNA sense strand
aagacucauugaacauaug

SEQ ID NO: 770617 - RNA, 19 nt, Homo sapiens
  misc_RNA (1)...(19): siRNA sense strand
gagaagagaaagcuguuua

SEQ ID NO: 770618 - RNA, 19 nt, Homo sapiens
  misc_RNA (1)...(19): siRNA sense strand
gaagacucauugaacauau

SEQ ID NO: 770619 - RNA, 19 nt, Homo sapiens
  misc_RNA (1)...(19): siRNA sense strand
ggaagacucauugaacaua

SEQ ID NO: 770620 - RNA, 19 nt, Homo sapiens
  misc_RNA (1)...(19): siRNA sense strand
gaagagaaagcuguuuauc

SEQ ID NO: 770621 - RNA, 19 nt, Homo sapiens
  misc_RNA (1)...(19): siRNA sense strand
gcagaugcccaccacugaa

SEQ ID NO: 770622 - RNA, 19 nt, Homo sapiens
  misc_RNA (1)...(19): siRNA sense strand
agagugacuuugacaagau

SEQ ID NO: 770623 - RNA, 19 nt, Homo sapiens
  misc_RNA (1)...(19): siRNA sense strand
aagagugacuuugacaaga

SEQ ID NO: 770624 - RNA, 19 nt, Homo sapiens
  misc_RNA (1)...(19): siRNA sense strand
gagugacuuugacaagaug

SEQ ID NO: 770625 - RNA, 19 nt, Homo sapiens
  misc_RNA (1)...(19): siRNA sense strand
ccugugauguggaggaaau

SEQ ID NO: 770626 - RNA, 19 nt, Homo sapiens
  misc_RNA (1)...(19): siRNA sense strand
ggagaagagaaagcuguuu

SEQ ID NO: 770627 - RNA, 19 nt, Homo sapiens
  misc_RNA (1)...(19): siRNA sense strand
ucauugaacauaugcaaga

SEQ ID NO: 770628 - RNA, 19 nt, Homo sapiens
  misc_RNA (1)...(19): siRNA sense strand
ccucuucccaggacauuaa

SEQ ID NO: 770629 - RNA, 19 nt, Homo sapiens
  misc_RNA (1)...(19): siRNA sense strand
cagaugcccaccacugaaa

SEQ ID NO: 770630 - RNA, 19 nt, Homo sapiens
  misc_RNA (1)...(19): siRNA sense strand
uuggagacaucccacaaug

SEQ ID NO: 770631 - RNA, 19 nt, Homo sapiens
  misc_RNA (1)...(19): siRNA sense strand
cauugaacauaugcaagaa

SEQ ID NO: 770632 - RNA, 19 nt, Homo sapiens
  misc_RNA (1)...(19): siRNA sense strand
uuggaagacucauugaaca

SEQ ID NO: 770633 - RNA, 19 nt, Homo sapiens
  misc_RNA (1)...(19): siRNA sense strand
agaagagaaagcuguuuau

SEQ ID NO: 770634 - RNA, 19 nt, Homo sapiens
  misc_RNA (1)...(19): siRNA sense strand
ugacuuugacaagauguuu

SEQ ID NO: 770635 - RNA, 19 nt, Homo sapiens
  misc_RNA (1)...(19): siRNA sense strand
aagacucauugaacauaug

SEQ ID NO: 770636 - RNA, 19 nt, Homo sapiens
  misc_RNA (1)...(19): siRNA sense strand
gagaagagaaagcuguuua

SEQ ID NO: 770637 - RNA, 19 nt, Homo sapiens
  misc_RNA (1)...(19): siRNA sense strand
gaagacucauugaacauau

SEQ ID NO: 770638 - RNA, 19 nt, Homo sapiens
  misc_RNA (1)...(19): siRNA sense strand
ggaagacucauugaacaua

SEQ ID NO: 770639 - RNA, 19 nt, Homo sapiens
  misc_RNA (1)...(19): siRNA sense strand
gaagagaaagcuguuuauc

SEQ ID NO: 770640 - RNA, 19 nt, Homo sapiens
  misc_RNA (1)...(19): siRNA sense strand
gcagaugcccaccacugaa

SEQ ID NO: 770641 - RNA, 19 nt, Homo sapiens
  misc_RNA (1)...(19): siRNA sense strand
agagugacuuugacaagau

SEQ ID NO: 770642 - RNA, 19 nt, Homo sapiens
  misc_RNA (1)...(19): siRNA sense strand
aagagugacuuugacaaga

SEQ ID NO: 770643 - RNA, 19 nt, Homo sapiens
  misc_RNA (1)...(19): siRNA sense strand
gagugacuuugacaagaug

SEQ ID NO: 770644 - RNA, 19 nt, Homo sapiens
  misc_RNA (1)...(19): siRNA sense strand
ccugugauguggaggaaau

SEQ ID NO: 770645 - RNA, 19 nt, Homo sapiens
  misc_RNA (1)...(19): siRNA sense strand
ggagaagagaaagcuguuu

SEQ ID NO: 770646 - RNA, 19 nt, Homo sapiens
  misc_RNA (1)...(19): siRNA sense strand
ucauugaacauaugcaaga

SEQ ID NO: 770647 - RNA, 19 nt, Homo sapiens
  misc_RNA (1)...(19): siRNA sense strand
ccucuucccaggacauuaa

SEQ ID NO: 770648 - RNA, 19 nt, Homo sapiens
  misc_RNA (1)...(19): siRNA sense strand
cagaugcccaccacugaaa

SEQ ID NO: 770649 - RNA, 19 nt, Homo sapiens
  misc_RNA (1)...(19): siRNA sense strand
uuggagacaucccacaaug

SEQ ID NO: 770650 - RNA, 19 nt, Homo sapiens
  misc_RNA (1)...(19): siRNA sense strand
cauugaacauaugcaagaa

SEQ ID NO: 770651 - RNA, 19 nt, Homo sapiens
  misc_RNA (1)...(19): siRNA sense strand
uuggaagacucauugaaca

SEQ ID NO: 770652 - RNA, 19 nt, Homo sapiens
  misc_RNA (1)...(19): siRNA sense strand
agaagagaaagcuguuuau

SEQ ID NO: 770653 - RNA, 19 nt, Homo sapiens
  misc_RNA (1)...(19): siRNA sense strand
ugacuuugacaagauguuu

SEQ ID NO: 770654 - RNA, 19 nt, Homo sapiens
  misc_RNA (1)...(19): siRNA sense strand
aagacucauugaacauaug

SEQ ID NO: 770655 - RNA, 19 nt, Homo sapiens
  misc_RNA (1)...(19): siRNA sense strand
gagaagagaaagcuguuua

SEQ ID NO: 770656 - RNA, 19 nt, Homo sapiens
  misc_RNA (1)...(19): siRNA sense strand
gaagacucauugaacauau

SEQ ID NO: 770657 - RNA, 19 nt, Homo sapiens
  misc_RNA (1)...(19): siRNA sense strand
ggaagacucauugaacaua

SEQ ID NO: 770658 - RNA, 19 nt, Homo sapiens
  misc_RNA (1)...(19): siRNA sense strand
gaagagaaagcuguuuauc

SEQ ID NO: 770659 - RNA, 19 nt, Homo sapiens
  misc_RNA (1)...(19): siRNA sense strand
gcagaugcccaccacugaa

SEQ ID NO: 770660 - RNA, 19 nt, Homo sapiens
  misc_RNA (1)...(19): siRNA sense strand
agagugacuuugacaagau

SEQ ID NO: 770661 - RNA, 19 nt, Homo sapiens
  misc_RNA (1)...(19): siRNA sense strand
aagagugacuuugacaaga

SEQ ID NO: 770662 - RNA, 19 nt, Homo sapiens
  misc_RNA (1)...(19): siRNA sense strand
gagugacuuugacaagaug

SEQ ID NO: 770663 - RNA, 19 nt, Homo sapiens
  misc_RNA (1)...(19): siRNA sense strand
ccugugauguggaggaaau

SEQ ID NO: 770664 - RNA, 19 nt, Homo sapiens
  misc_RNA (1)...(19): siRNA sense strand
ggagaagagaaagcuguuu

SEQ ID NO: 770665 - RNA, 19 nt, Homo sapiens
  misc_RNA (1)...(19): siRNA sense strand
ucauugaacauaugcaaga

SEQ ID NO: 770666 - RNA, 19 nt, Homo sapiens
  misc_RNA (1)...(19): siRNA sense strand
ccucuucccaggacauuaa

SEQ ID NO: 770667 - RNA, 19 nt, Homo sapiens
  misc_RNA (1)...(19): siRNA sense strand
cagaugcccaccacugaaa

SEQ ID NO: 770668 - RNA, 19 nt, Homo sapiens
  misc_RNA (1)...(19): siRNA sense strand
uuggagacaucccacaaug

SEQ ID NO: 770669 - RNA, 19 nt, Homo sapiens
  misc_RNA (1)...(19): siRNA sense strand
cauugaacauaugcaagaa

SEQ ID NO: 770670 - RNA, 19 nt, Homo sapiens
  misc_RNA (1)...(19): siRNA sense strand
uuggaagacucauugaaca

SEQ ID NO: 770671 - RNA, 19 nt, Homo sapiens
  misc_RNA (1)...(19): siRNA sense strand
agaagagaaagcuguuuau

SEQ ID NO: 770672 - RNA, 19 nt, Homo sapiens
  misc_RNA (1)...(19): siRNA sense strand
ugacuuugacaagauguuu

SEQ ID NO: 770673 - RNA, 19 nt, Homo sapiens
  misc_RNA (1)...(19): siRNA sense strand
aagacucauugaacauaug

SEQ ID NO: 770674 - RNA, 19 nt, Homo sapiens
  misc_RNA (1)...(19): siRNA sense strand
gagaagagaaagcuguuua

SEQ ID NO: 770675 - RNA, 19 nt, Homo sapiens
  misc_RNA (1)...(19): siRNA sense strand
gaagacucauugaacauau

SEQ ID NO: 770676 - RNA, 19 nt, Homo sapiens
  misc_RNA (1)...(19): siRNA sense strand
ggaagacucauugaacaua

SEQ ID NO: 770677 - RNA, 19 nt, Homo sapiens
  misc_RNA (1)...(19): siRNA sense strand
gaagagaaagcuguuuauc

SEQ ID NO: 770678 - RNA, 19 nt, Homo sapiens
  misc_RNA (1)...(19): siRNA sense strand
gcagaugcccaccacugaa

SEQ ID NO: 770679 - RNA, 19 nt, Homo sapiens
  misc_RNA (1)...(19): siRNA sense strand
agagugacuuugacaagau

SEQ ID NO: 770680 - RNA, 19 nt, Homo sapiens
  misc_RNA (1)...(19): siRNA sense strand
aagagugacuuugacaaga

SEQ ID NO: 770681 - RNA, 19 nt, Homo sapiens
  misc_RNA (1)...(19): siRNA sense strand
gagugacuuugacaagaug

SEQ ID NO: 770682 - RNA, 19 nt, Homo sapiens
  misc_RNA (1)...(19): siRNA sense strand
ccugugauguggaggaaau

SEQ ID NO: 770683 - RNA, 19 nt, Homo sapiens
  misc_RNA (1)...(19): siRNA sense strand
ggagaagagaaagcuguuu

SEQ ID NO: 770684 - RNA, 19 nt, Homo sapiens
  misc_RNA (1)...(19): siRNA sense strand
ucauugaacauaugcaaga

SEQ ID NO: 770685 - RNA, 19 nt, Homo sapiens
  misc_RNA (1)...(19): siRNA sense strand
ccucuucccaggacauuaa

SEQ ID NO: 770686 - RNA, 19 nt, Homo sapiens
  misc_RNA (1)...(19): siRNA sense strand
cagaugcccaccacugaaa

SEQ ID NO: 770687 - RNA, 19 nt, Homo sapiens
  misc_RNA (1)...(19): siRNA sense strand
uuggagacaucccacaaug

SEQ ID NO: 770688 - RNA, 19 nt, Homo sapiens
  misc_RNA (1)...(19): siRNA sense strand
cauugaacauaugcaagaa

SEQ ID NO: 770689 - RNA, 19 nt, Homo sapiens
  misc_RNA (1)...(19): siRNA sense strand
uuggaagacucauugaaca

SEQ ID NO: 770690 - RNA, 19 nt, Homo sapiens
  misc_RNA (1)...(19): siRNA sense strand
agaagagaaagcuguuuau

SEQ ID NO: 770691 - RNA, 19 nt, Homo sapiens
  misc_RNA (1)...(19): siRNA sense strand
ugacuuugacaagauguuu

SEQ ID NO: 770692 - RNA, 19 nt, Homo sapiens
  misc_RNA (1)...(19): siRNA sense strand
aagacucauugaacauaug

SEQ ID NO: 770693 - RNA, 19 nt, Homo sapiens
  misc_RNA (1)...(19): siRNA sense strand
gagaagagaaagcuguuua

SEQ ID NO: 770694 - RNA, 19 nt, Homo sapiens
  misc_RNA (1)...(19): siRNA sense strand
gaagacucauugaacauau

SEQ ID NO: 770695 - RNA, 19 nt, Homo sapiens
  misc_RNA (1)...(19): siRNA sense strand
ggaagacucauugaacaua

SEQ ID NO: 770696 - RNA, 19 nt, Homo sapiens
  misc_RNA (1)...(19): siRNA sense strand
gaagagaaagcuguuuauc

SEQ ID NO: 770697 - RNA, 19 nt, Homo sapiens
  misc_RNA (1)...(19): siRNA sense strand
gcagaugcccaccacugaa

SEQ ID NO: 770698 - RNA, 19 nt, Homo sapiens
  misc_RNA (1)...(19): siRNA sense strand
agagugacuuugacaagau

SEQ ID NO: 770699 - RNA, 19 nt, Homo sapiens
  misc_RNA (1)...(19): siRNA sense strand
aagagugacuuugacaaga

SEQ ID NO: 770700 - RNA, 19 nt, Homo sapiens
  misc_RNA (1)...(19): siRNA sense strand
gagugacuuugacaagaug

SEQ ID NO: 770701 - RNA, 19 nt, Homo sapiens
  misc_RNA (1)...(19): siRNA sense strand
ccugugauguggaggaaau

SEQ ID NO: 770702 - RNA, 19 nt, Homo sapiens
  misc_RNA (1)...(19): siRNA sense strand
ggagaagagaaagcuguuu

SEQ ID NO: 770703 - RNA, 19 nt, Homo sapiens
  misc_RNA (1)...(19): siRNA sense strand
ucauugaacauaugcaaga

SEQ ID NO: 770704 - RNA, 19 nt, Homo sapiens
  misc_RNA (1)...(19): siRNA sense strand
ccucuucccaggacauuaa

SEQ ID NO: 770705 - RNA, 19 nt, Homo sapiens
  misc_RNA (1)...(19): siRNA sense strand
cagaugcccaccacugaaa

SEQ ID NO: 770706 - RNA, 19 nt, Homo sapiens
  misc_RNA (1)...(19): siRNA sense strand
uuggagacaucccacaaug

SEQ ID NO: 770707 - RNA, 19 nt, Homo sapiens
  misc_RNA (1)...(19): siRNA sense strand
cauugaacauaugcaagaa

SEQ ID NO: 770708 - RNA, 19 nt, Homo sapiens
  misc_RNA (1)...(19): siRNA sense strand
uuggaagacucauugaaca

SEQ ID NO: 770709 - RNA, 19 nt, Homo sapiens
  misc_RNA (1)...(19): siRNA sense strand
agaagagaaagcuguuuau

SEQ ID NO: 770710 - RNA, 19 nt, Homo sapiens
  misc_RNA (1)...(19): siRNA sense strand
ugacuuugacaagauguuu

SEQ ID NO: 770711 - RNA, 19 nt, Homo sapiens
  misc_RNA (1)...(19): siRNA sense strand
aagacucauugaacauaug

SEQ ID NO: 770712 - RNA, 19 nt, Homo sapiens
  misc_RNA (1)...(19): siRNA sense strand
gagaagagaaagcuguuua

SEQ ID NO: 770713 - RNA, 19 nt, Homo sapiens
  misc_RNA (1)...(19): siRNA sense strand
gaagacucauugaacauau

SEQ ID NO: 770714 - RNA, 19 nt, Homo sapiens
  misc_RNA (1)...(19): siRNA sense strand
ggaagacucauugaacaua

SEQ ID NO: 770715 - RNA, 19 nt, Homo sapiens
  misc_RNA (1)...(19): siRNA sense strand
gaagagaaagcuguuuauc

SEQ ID NO: 770716 - RNA, 19 nt, Homo sapiens
  misc_RNA (1)...(19): siRNA sense strand
gcagaugcccaccacugaa

SEQ ID NO: 770717 - RNA, 19 nt, Homo sapiens
  misc_RNA (1)...(19): siRNA sense strand
agagugacuuugacaagau

SEQ ID NO: 770718 - RNA, 19 nt, Homo sapiens
  misc_RNA (1)...(19): siRNA sense strand
aagagugacuuugacaaga

SEQ ID NO: 770719 - RNA, 19 nt, Homo sapiens
  misc_RNA (1)...(19): siRNA sense strand
gagugacuuugacaagaug

SEQ ID NO: 770720 - RNA, 19 nt, Homo sapiens
  misc_RNA (1)...(19): siRNA sense strand
ccugugauguggaggaaau

SEQ ID NO: 770721 - RNA, 19 nt, Homo sapiens
  misc_RNA (1)...(19): siRNA sense strand
ggagaagagaaagcuguuu

SEQ ID NO: 770722 - RNA, 19 nt, Homo sapiens
  misc_RNA (1)...(19): siRNA sense strand
ucauugaacauaugcaaga

SEQ ID NO: 770723 - RNA, 19 nt, Homo sapiens
  misc_RNA (1)...(19): siRNA sense strand
ccucuucccaggacauuaa

SEQ ID NO: 770724 - RNA, 19 nt, Homo sapiens
  misc_RNA (1)...(19): siRNA sense strand
cagaugcccaccacugaaa

SEQ ID NO: 770725 - RNA, 19 nt, Homo sapiens
  misc_RNA (1)...(19): siRNA sense strand
uuggagacaucccacaaug

SEQ ID NO: 770726 - RNA, 19 nt, Homo sapiens
  misc_RNA (1)...(19): siRNA sense strand
cauugaacauaugcaagaa

SEQ ID NO: 770727 - RNA, 19 nt, Homo sapiens
  misc_RNA (1)...(19): siRNA sense strand
uuggaagacucauugaaca

SEQ ID NO: 770728 - RNA, 19 nt, Homo sapiens
  misc_RNA (1)...(19): siRNA sense strand
agaagagaaagcuguuuau

SEQ ID NO: 770729 - RNA, 19 nt, Homo sapiens
  misc_RNA (1)...(19): siRNA sense strand
ugacuuugacaagauguuu

SEQ ID NO: 770730 - RNA, 19 nt, Homo sapiens
  misc_RNA (1)...(19): siRNA sense strand
aagacucauugaacauaug

SEQ ID NO: 770731 - RNA, 19 nt, Homo sapiens
  misc_RNA (1)...(19): siRNA sense strand
gagaagagaaagcuguuua

SEQ ID NO: 770732 - RNA, 19 nt, Homo sapiens
  misc_RNA (1)...(19): siRNA sense strand
gaagacucauugaacauau

SEQ ID NO: 770733 - RNA, 19 nt, Homo sapiens
  misc_RNA (1)...(19): siRNA sense strand
ggaagacucauugaacaua

SEQ ID NO: 770734 - RNA, 19 nt, Homo sapiens
  misc_RNA (1)...(19): siRNA sense strand
gaagagaaagcuguuuauc

SEQ ID NO: 770735 - RNA, 19 nt, Homo sapiens
  misc_RNA (1)...(19): siRNA sense strand
gcagaugcccaccacugaa

SEQ ID NO: 770736 - RNA, 19 nt, Homo sapiens
  misc_RNA (1)...(19): siRNA sense strand
agagugacuuugacaagau

SEQ ID NO: 770737 - RNA, 19 nt, Homo sapiens
  misc_RNA (1)...(19): siRNA sense strand
aagagugacuuugacaaga

SEQ ID NO: 770738 - RNA, 19 nt, Homo sapiens
  misc_RNA (1)...(19): siRNA sense strand
gagugacuuugacaagaug

SEQ ID NO: 770739 - RNA, 19 nt, Homo sapiens
  misc_RNA (1)...(19): siRNA sense strand
ccugugauguggaggaaau

SEQ ID NO: 770740 - RNA, 19 nt, Homo sapiens
  misc_RNA (1)...(19): siRNA sense strand
ggagaagagaaagcuguuu

SEQ ID NO: 770741 - RNA, 19 nt, Homo sapiens
  misc_RNA (1)...(19): siRNA sense strand
ucauugaacauaugcaaga

SEQ ID NO: 770742 - RNA, 19 nt, Homo sapiens
  misc_RNA (1)...(19): siRNA sense strand
ccucuucccaggacauuaa

SEQ ID NO: 770743 - RNA, 19 nt, Homo sapiens
  misc_RNA (1)...(19): siRNA sense strand
cagaugcccaccacugaaa

SEQ ID NO: 770744 - RNA, 19 nt, Homo sapiens
  misc_RNA (1)...(19): siRNA sense strand
uuggagacaucccacaaug

SEQ ID NO: 770745 - RNA, 19 nt, Homo sapiens
  misc_RNA (1)...(19): siRNA sense strand
cauugaacauaugcaagaa

SEQ ID NO: 770746 - RNA, 19 nt, Homo sapiens
  misc_RNA (1)...(19): siRNA sense strand
uuggaagacucauugaaca

SEQ ID NO: 770747 - RNA, 19 nt, Homo sapiens
  misc_RNA (1)...(19): siRNA sense strand
agaagagaaagcuguuuau

SEQ ID NO: 770748 - RNA, 19 nt, Homo sapiens
  misc_RNA (1)...(19): siRNA sense strand
ugacuuugacaagauguuu

SEQ ID NO: 770749 - RNA, 19 nt, Homo sapiens
  misc_RNA (1)...(19): siRNA sense strand
aagacucauugaacauaug

SEQ ID NO: 770750 - RNA, 19 nt, Homo sapiens
  misc_RNA (1)...(19): siRNA sense strand
gagaagagaaagcuguuua

SEQ ID NO: 770751 - RNA, 19 nt, Homo sapiens
  misc_RNA (1)...(19): siRNA sense strand
gaagacucauugaacauau

SEQ ID NO: 770752 - RNA, 19 nt, Homo sapiens
  misc_RNA (1)...(19): siRNA sense strand
ggaagacucauugaacaua

SEQ ID NO: 770753 - RNA, 19 nt, Homo sapiens
  misc_RNA (1)...(19): siRNA sense strand
gaagagaaagcuguuuauc

SEQ ID NO: 770754 - RNA, 19 nt, Homo sapiens
  misc_RNA (1)...(19): siRNA sense strand
gcagaugcccaccacugaa

SEQ ID NO: 770755 - RNA, 19 nt, Homo sapiens
  misc_RNA (1)...(19): siRNA sense strand
agagugacuuugacaagau

SEQ ID NO: 770756 - RNA, 19 nt, Homo sapiens
  misc_RNA (1)...(19): siRNA sense strand
aagagugacuuugacaaga

SEQ ID NO: 770757 - RNA, 19 nt, Homo sapiens
  misc_RNA (1)...(19): siRNA sense strand
gagugacuuugacaagaug

SEQ ID NO: 770758 - RNA, 19 nt, Homo sapiens
  misc_RNA (1)...(19): siRNA sense strand
ccugugauguggaggaaau

SEQ ID NO: 770759 - RNA, 19 nt, Homo sapiens
  misc_RNA (1)...(19): siRNA sense strand
ggagaagagaaagcuguuu

SEQ ID NO: 770760 - RNA, 19 nt, Homo sapiens
  misc_RNA (1)...(19): siRNA sense strand
ucauugaacauaugcaaga

SEQ ID NO: 770761 - RNA, 19 nt, Homo sapiens
  misc_RNA (1)...(19): siRNA sense strand
ccucuucccaggacauuaa

SEQ ID NO: 770762 - RNA, 19 nt, Homo sapiens
  misc_RNA (1)...(19): siRNA sense strand
cagaugcccaccacugaaa

SEQ ID NO: 770763 - RNA, 19 nt, Homo sapiens
  misc_RNA (1)...(19): siRNA sense strand
uuggagacaucccacaaug

SEQ ID NO: 770764 - RNA, 19 nt, Homo sapiens
  misc_RNA (1)...(19): siRNA sense strand
cauugaacauaugcaagaa

SEQ ID NO: 770765 - RNA, 19 nt, Homo sapiens
  misc_RNA (1)...(19): siRNA sense strand
uuggaagacucauugaaca

SEQ ID NO: 770766 - RNA, 19 nt, Homo sapiens
  misc_RNA (1)...(19): siRNA sense strand
agaagagaaagcuguuuau

SEQ ID NO: 770767 - RNA, 19 nt, Homo sapiens
  misc_RNA (1)...(19): siRNA sense strand
ugacuuugacaagauguuu

SEQ ID NO: 770768 - RNA, 19 nt, Homo sapiens
  misc_RNA (1)...(19): siRNA sense strand
aagacucauugaacauaug

SEQ ID NO: 770769 - RNA, 19 nt, Homo sapiens
  misc_RNA (1)...(19): siRNA sense strand
gagaagagaaagcuguuua

SEQ ID NO: 770770 - RNA, 19 nt, Homo sapiens
  misc_RNA (1)...(19): siRNA sense strand
gaagacucauugaacauau

SEQ ID NO: 770771 - RNA, 19 nt, Homo sapiens
  misc_RNA (1)...(19): siRNA sense strand
ggaagacucauugaacaua

SEQ ID NO: 770772 - RNA, 19 nt, Homo sapiens
  misc_RNA (1)...(19): siRNA sense strand
gaagagaaagcuguuuauc

SEQ ID NO: 770773 - RNA, 19 nt, Homo sapiens
  misc_RNA (1)...(19): siRNA sense strand
gcagaugcccaccacugaa

SEQ ID NO: 770774 - RNA, 19 nt, Homo sapiens
  misc_RNA (1)...(19): siRNA sense strand
agagugacuuugacaagau

SEQ ID NO: 770775 - RNA, 19 nt, Homo sapiens
  misc_RNA (1)...(19): siRNA sense strand
aagagugacuuugacaaga

SEQ ID NO: 770776 - RNA, 19 nt, Homo sapiens
  misc_RNA (1)...(19): siRNA sense strand
gagugacuuugacaagaug

SEQ ID NO: 770777 - RNA, 19 nt, Homo sapiens
  misc_RNA (1)...(19): siRNA sense strand
ccugugauguggaggaaau

SEQ ID NO: 770778 - RNA, 19 nt, Homo sapiens
  misc_RNA (1)...(19): siRNA sense strand
ggagaagagaaagcuguuu

SEQ ID NO: 770779 - RNA, 19 nt, Homo sapiens
  misc_RNA (1)...(19): siRNA sense strand
ucauugaacauaugcaaga

SEQ ID NO: 770780 - RNA, 19 nt, Homo sapiens
  misc_RNA (1)...(19): siRNA sense strand
ccucuucccaggacauuaa

SEQ ID NO: 770781 - RNA, 19 nt, Homo sapiens
  misc_RNA (1)...(19): siRNA sense strand
cagaugcccaccacugaaa

SEQ ID NO: 770782 - RNA, 19 nt, Homo sapiens
  misc_RNA (1)...(19): siRNA sense strand
uuggagacaucccacaaug

SEQ ID NO: 770783 - RNA, 19 nt, Homo sapiens
  misc_RNA (1)...(19): siRNA sense strand
cauugaacauaugcaagaa

SEQ ID NO: 770784 - RNA, 19 nt, Homo sapiens
  misc_RNA (1)...(19): siRNA sense strand
uuggaagacucauugaaca

SEQ ID NO: 770785 - RNA, 19 nt, Homo sapiens
  misc_RNA (1)...(19): siRNA sense strand
agaagagaaagcuguuuau

SEQ ID NO: 770786 - RNA, 19 nt, Homo sapiens
  misc_RNA (1)...(19): siRNA sense strand
ugacuuugacaagauguuu

SEQ ID NO: 770787 - RNA, 19 nt, Homo sapiens
  misc_RNA (1)...(19): siRNA sense strand
aagacucauugaacauaug

SEQ ID NO: 770788 - RNA, 19 nt, Homo sapiens
  misc_RNA (1)...(19): siRNA sense strand
gagaagagaaagcuguuua

SEQ ID NO: 770789 - RNA, 19 nt, Homo sapiens
  misc_RNA (1)...(19): siRNA sense strand
gaagacucauugaacauau

SEQ ID NO: 770790 - RNA, 19 nt, Homo sapiens
  misc_RNA (1)...(19): siRNA sense strand
ggaagacucauugaacaua

SEQ ID NO: 770791 - RNA, 19 nt, Homo sapiens
  misc_RNA (1)...(19): siRNA sense strand
gaagagaaagcuguuuauc

SEQ ID NO: 770792 - RNA, 19 nt, Homo sapiens
  misc_RNA (1)...(19): siRNA sense strand
gcagaugcccaccacugaa

SEQ ID NO: 770793 - RNA, 19 nt, Homo sapiens
  misc_RNA (1)...(19): siRNA sense strand
agagugacuuugacaagau

SEQ ID NO: 770794 - RNA, 19 nt, Homo sapiens
  misc_RNA (1)...(19): siRNA sense strand
aagagugacuuugacaaga

SEQ ID NO: 770795 - RNA, 19 nt, Homo sapiens
  misc_RNA (1)...(19): siRNA sense strand
gagugacuuugacaagaug

SEQ ID NO: 770796 - RNA, 19 nt, Homo sapiens
  misc_RNA (1)...(19): siRNA sense strand
ccugugauguggaggaaau

SEQ ID NO: 770797 - RNA, 19 nt, Homo sapiens
  misc_RNA (1)...(19): siRNA sense strand
ggagaagagaaagcuguuu

SEQ ID NO: 770798 - RNA, 19 nt, Homo sapiens
  misc_RNA (1)...(19): siRNA sense strand
ucauugaacauaugcaaga

SEQ ID NO: 770799 - RNA, 19 nt, Homo sapiens
  misc_RNA (1)...(19): siRNA sense strand
ccucuucccaggacauuaa

SEQ ID NO: 770800 - RNA, 19 nt, Homo sapiens
  misc_RNA (1)...(19): siRNA sense strand
cagaugcccaccacugaaa

SEQ ID NO: 770801 - RNA, 19 nt, Homo sapiens
  misc_RNA (1)...(19): siRNA sense strand
uuggagacaucccacaaug

SEQ ID NO: 770802 - RNA, 19 nt, Homo sapiens
  misc_RNA (1)...(19): siRNA sense strand
cauugaacauaugcaagaa

SEQ ID NO: 770803 - RNA, 19 nt, Homo sapiens
  misc_RNA (1)...(19): siRNA sense strand
uuggaagacucauugaaca

SEQ ID NO: 770804 - RNA, 19 nt, Homo sapiens
  misc_RNA (1)...(19): siRNA sense strand
agaagagaaagcuguuuau

SEQ ID NO: 770805 - RNA, 19 nt, Homo sapiens
  misc_RNA (1)...(19): siRNA sense strand
ugacuuugacaagauguuu

SEQ ID NO: 770806 - RNA, 19 nt, Homo sapiens
  misc_RNA (1)...(19): siRNA sense strand
aagacucauugaacauaug

SEQ ID NO: 770807 - RNA, 19 nt, Homo sapiens
  misc_RNA (1)...(19): siRNA sense strand
gagaagagaaagcuguuua

SEQ ID NO: 770808 - RNA, 19 nt, Homo sapiens
  misc_RNA (1)...(19): siRNA sense strand
gaagacucauugaacauau

SEQ ID NO: 770809 - RNA, 19 nt, Homo sapiens
  misc_RNA (1)...(19): siRNA sense strand
ggaagacucauugaacaua

SEQ ID NO: 770810 - RNA, 19 nt, Homo sapiens
  misc_RNA (1)...(19): siRNA sense strand
gaagagaaagcuguuuauc

SEQ ID NO: 770811 - RNA, 19 nt, Homo sapiens
  misc_RNA (1)...(19): siRNA sense strand
gcagaugcccaccacugaa

SEQ ID NO: 770812 - RNA, 19 nt, Homo sapiens
  misc_RNA (1)...(19): siRNA sense strand
agagugacuuugacaagau

SEQ ID NO: 770813 - RNA, 19 nt, Homo sapiens
  misc_RNA (1)...(19): siRNA sense strand
aagagugacuuugacaaga

SEQ ID NO: 770814 - RNA, 19 nt, Homo sapiens
  misc_RNA (1)...(19): siRNA sense strand
gagugacuuugacaagaug

SEQ ID NO: 770815 - RNA, 19 nt, Homo sapiens
  misc_RNA (1)...(19): siRNA sense strand
ccugugauguggaggaaau

SEQ ID NO: 770816 - RNA, 19 nt, Homo sapiens
  misc_RNA (1)...(19): siRNA sense strand
ggagaagagaaagcuguuu

SEQ ID NO: 770817 - RNA, 19 nt, Homo sapiens
  misc_RNA (1)...(19): siRNA sense strand
ucauugaacauaugcaaga

SEQ ID NO: 770818 - RNA, 19 nt, Homo sapiens
  misc_RNA (1)...(19): siRNA sense strand
ccucuucccaggacauuaa

SEQ ID NO: 770819 - RNA, 19 nt, Homo sapiens
  misc_RNA (1)...(19): siRNA sense strand
cagaugcccaccacugaaa

SEQ ID NO: 770820 - RNA, 19 nt, Homo sapiens
  misc_RNA (1)...(19): siRNA sense strand
uuggagacaucccacaaug

SEQ ID NO: 770821 - RNA, 19 nt, Homo sapiens
  misc_RNA (1)...(19): siRNA sense strand
cauugaacauaugcaagaa

SEQ ID NO: 770822 - RNA, 19 nt, Homo sapiens
  misc_RNA (1)...(19): siRNA sense strand
uuggaagacucauugaaca

SEQ ID NO: 770823 - RNA, 19 nt, Homo sapiens
  misc_RNA (1)...(19): siRNA sense strand
agaagagaaagcuguuuau

SEQ ID NO: 770824 - RNA, 19 nt, Homo sapiens
  misc_RNA (1)...(19): siRNA sense strand
ugacuuugacaagauguuu

SEQ ID NO: 770825 - RNA, 19 nt, Homo sapiens
  misc_RNA (1)...(19): siRNA sense strand
aagacucauugaacauaug

SEQ ID NO: 770826 - RNA, 19 nt, Homo sapiens
  misc_RNA (1)...(19): siRNA sense strand
gagaagagaaagcuguuua

SEQ ID NO: 770827 - RNA, 19 nt, Homo sapiens
  misc_RNA (1)...(19): siRNA sense strand
gaagacucauugaacauau

SEQ ID NO: 770828 - RNA, 19 nt, Homo sapiens
  misc_RNA (1)...(19): siRNA sense strand
ggaagacucauugaacaua

SEQ ID NO: 770829 - RNA, 19 nt, Homo sapiens
  misc_RNA (1)...(19): siRNA sense strand
gaagagaaagcuguuuauc

SEQ ID NO: 770830 - RNA, 19 nt, Homo sapiens
  misc_RNA (1)...(19): siRNA sense strand
gcagaugcccaccacugaa

SEQ ID NO: 770831 - RNA, 19 nt, Homo sapiens
  misc_RNA (1)...(19): siRNA sense strand
agagugacuuugacaagau

SEQ ID NO: 770832 - RNA, 19 nt, Homo sapiens
  misc_RNA (1)...(19): siRNA sense strand
aagagugacuuugacaaga

SEQ ID NO: 770833 - RNA, 19 nt, Homo sapiens
  misc_RNA (1)...(19): siRNA sense strand
gagugacuuugacaagaug

SEQ ID NO: 770834 - RNA, 19 nt, Homo sapiens
  misc_RNA (1)...(19): siRNA sense strand
ccugugauguggaggaaau

SEQ ID NO: 770835 - RNA, 19 nt, Homo sapiens
  misc_RNA (1)...(19): siRNA sense strand
ggagaagagaaagcuguuu

SEQ ID NO: 770836 - RNA, 19 nt, Homo sapiens
  misc_RNA (1)...(19): siRNA sense strand
ucauugaacauaugcaaga

SEQ ID NO: 770837 - RNA, 19 nt, Homo sapiens
  misc_RNA (1)...(19): siRNA sense strand
ccucuucccaggacauuaa

SEQ ID NO: 770838 - RNA, 19 nt, Homo sapiens
  misc_RNA (1)...(19): siRNA sense strand
cagaugcccaccacugaaa

SEQ ID NO: 770839 - RNA, 19 nt, Homo sapiens
  misc_RNA (1)...(19): siRNA sense strand
uuggagacaucccacaaug

SEQ ID NO: 770840 - RNA, 19 nt, Homo sapiens
  misc_RNA (1)...(19): siRNA sense strand
cauugaacauaugcaagaa

SEQ ID NO: 770841 - RNA, 19 nt, Homo sapiens
  misc_RNA (1)...(19): siRNA sense strand
uuggaagacucauugaaca

SEQ ID NO: 770842 - RNA, 19 nt, Homo sapiens
  misc_RNA (1)...(19): siRNA sense strand
agaagagaaagcuguuuau

SEQ ID NO: 770843 - RNA, 19 nt, Homo sapiens
  misc_RNA (1)...(19): siRNA sense strand
ugacuuugacaagauguuu

SEQ ID NO: 770844 - RNA, 19 nt, Homo sapiens
  misc_RNA (1)...(19): siRNA sense strand
aagacucauugaacauaug

SEQ ID NO: 770845 - RNA, 19 nt, Homo sapiens
  misc_RNA (1)...(19): siRNA sense strand
ccacagagcuuaccucaaa

SEQ ID NO: 770846 - RNA, 19 nt, Homo sapiens
  misc_RNA (1)...(19): siRNA sense strand
gcaaacaaguggauugaaa

SEQ ID NO: 770847 - RNA, 19 nt, Homo sapiens
  misc_RNA (1)...(19): siRNA sense strand
uaaagcaccuuaacaauga

SEQ ID NO: 770848 - RNA, 19 nt, Homo sapiens
  misc_RNA (1)...(19): siRNA sense strand
gacaggcaguuaacacuua

SEQ ID NO: 770849 - RNA, 19 nt, Homo sapiens
  misc_RNA (1)...(19): siRNA sense strand
gaaauuuacagcugguuua

SEQ ID NO: 770850 - RNA, 19 nt, Homo sapiens
  misc_RNA (1)...(19): siRNA sense strand
gaugaagacugcccaaugu

SEQ ID NO: 770851 - RNA, 19 nt, Homo sapiens
  misc_RNA (1)...(19): siRNA sense strand
cagcagagauggaagauca

SEQ ID NO: 770852 - RNA, 19 nt, Homo sapiens
  misc_RNA (1)...(19): siRNA sense strand
gaaagcauuugugaagauu

SEQ ID NO: 770853 - RNA, 19 nt, Homo sapiens
  misc_RNA (1)...(19): siRNA sense strand
gcaguuacaucuucagcuu

SEQ ID NO: 770854 - RNA, 19 nt, Homo sapiens
  misc_RNA (1)...(19): siRNA sense strand
acagagagauugaagaaga

SEQ ID NO: 770855 - RNA, 19 nt, Homo sapiens
  misc_RNA (1)...(19): siRNA sense strand
gaugucagaccuccauuua

SEQ ID NO: 770856 - RNA, 19 nt, Homo sapiens
  misc_RNA (1)...(19): siRNA sense strand
ggcuagaccucacuacuaa

SEQ ID NO: 770857 - RNA, 19 nt, Homo sapiens
  misc_RNA (1)...(19): siRNA sense strand
caaagcaucaccaccaaua

SEQ ID NO: 770858 - RNA, 19 nt, Homo sapiens
  misc_RNA (1)...(19): siRNA sense strand
gcagagagcaguuuaccuu

SEQ ID NO: 770859 - RNA, 19 nt, Homo sapiens
  misc_RNA (1)...(19): siRNA sense strand
aagaagagccuuuaucuga

SEQ ID NO: 770860 - RNA, 19 nt, Homo sapiens
  misc_RNA (1)...(19): siRNA sense strand
ggaaugagcacucuaagca

SEQ ID NO: 770861 - RNA, 19 nt, Homo sapiens
  misc_RNA (1)...(19): siRNA sense strand
gcaguacgucauaaucuua

SEQ ID NO: 770862 - RNA, 19 nt, Homo sapiens
  misc_RNA (1)...(19): siRNA sense strand
gaagagccuuuaucugaag

SEQ ID NO: 770863 - RNA, 19 nt, Homo sapiens
  misc_RNA (1)...(19): siRNA sense strand
gacaacagcuaaucacagu

SEQ ID NO: 770864 - RNA, 19 nt, Homo sapiens
  misc_RNA (1)...(19): siRNA sense strand
gacaccagcucugaaguaa

SEQ ID NO: 770865 - RNA, 19 nt, Homo sapiens
  misc_RNA (1)...(19): siRNA sense strand
ggacagucuucaguucuaa

SEQ ID NO: 770866 - RNA, 19 nt, Homo sapiens
  misc_RNA (1)...(19): siRNA sense strand
gagcagugauaaacagaga

SEQ ID NO: 770867 - RNA, 19 nt, Homo sapiens
  misc_RNA (1)...(19): siRNA sense strand
ggaaguccaaccuuaguaa

SEQ ID NO: 770868 - RNA, 19 nt, Homo sapiens
  misc_RNA (1)...(19): siRNA sense strand
gcaaauggccaggcuguga

SEQ ID NO: 770869 - RNA, 19 nt, Homo sapiens
  misc_RNA (1)...(19): siRNA sense strand
gcagguggugcaacaguua

SEQ ID NO: 770870 - RNA, 19 nt, Homo sapiens
  misc_RNA (1)...(19): siRNA sense strand
cgacagagagauugaagaa

SEQ ID NO: 770871 - RNA, 19 nt, Homo sapiens
  misc_RNA (1)...(19): siRNA sense strand
gaaagaagugacuggaguu

SEQ ID NO: 770872 - RNA, 19 nt, Homo sapiens
  misc_RNA (1)...(19): siRNA sense strand
gaaacagcaagagcaguua

SEQ ID NO: 770873 - RNA, 19 nt, Homo sapiens
  misc_RNA (1)...(19): siRNA sense strand
agaagagccuuuaucugaa

SEQ ID NO: 770874 - RNA, 19 nt, Homo sapiens
  misc_RNA (1)...(19): siRNA sense strand
caaggaagagccagugauu

SEQ ID NO: 770875 - RNA, 19 nt, Homo sapiens
  misc_RNA (1)...(19): siRNA sense strand
aacaggaaguccaaccuua

SEQ ID NO: 770876 - RNA, 19 nt, Homo sapiens
  misc_RNA (1)...(19): siRNA sense strand
gcagcaacuuggaagaaug

SEQ ID NO: 770877 - RNA, 19 nt, Homo sapiens
  misc_RNA (1)...(19): siRNA sense strand
ugaaagcauuugugaagau

SEQ ID NO: 770878 - RNA, 19 nt, Homo sapiens
  misc_RNA (1)...(19): siRNA sense strand
gggcuagaccucacuacua

SEQ ID NO: 770879 - RNA, 19 nt, Homo sapiens
  misc_RNA (1)...(19): siRNA sense strand
gacuguggaugaaguagaa

SEQ ID NO: 770880 - RNA, 19 nt, Homo sapiens
  misc_RNA (1)...(19): siRNA sense strand
gcgaacgucuucaagcaau

SEQ ID NO: 770881 - RNA, 19 nt, Homo sapiens
  misc_RNA (1)...(19): siRNA sense strand
ucagaccuccauuuacuua

SEQ ID NO: 770882 - RNA, 19 nt, Homo sapiens
  misc_RNA (1)...(19): siRNA sense strand
cgacagagacaauaagcaa

SEQ ID NO: 770883 - RNA, 19 nt, Homo sapiens
  misc_RNA (1)...(19): siRNA sense strand
ugacagcaauggaaacagu

SEQ ID NO: 770884 - RNA, 19 nt, Homo sapiens
  misc_RNA (1)...(19): siRNA sense strand
ggaugaagacugcccaaug

SEQ ID NO: 770885 - RNA, 19 nt, Homo sapiens
  misc_RNA (1)...(19): siRNA sense strand
gaagaagagccuuuaucug

SEQ ID NO: 770886 - RNA, 19 nt, Homo sapiens
  misc_RNA (1)...(19): siRNA sense strand
gcagauccuucagcaacaa

SEQ ID NO: 770887 - RNA, 19 nt, Homo sapiens
  misc_RNA (1)...(19): siRNA sense strand
gaaguccaaccuuaguaaa

SEQ ID NO: 770888 - RNA, 19 nt, Homo sapiens
  misc_RNA (1)...(19): siRNA sense strand
ucagacaaauacaacauuc

SEQ ID NO: 770889 - RNA, 19 nt, Homo sapiens
  misc_RNA (1)...(19): siRNA sense strand
gcaacagcauccuggaaag

SEQ ID NO: 770890 - RNA, 19 nt, Homo sapiens
  misc_RNA (1)...(19): siRNA sense strand
gaauggacagucuucaguu

SEQ ID NO: 770891 - RNA, 19 nt, Homo sapiens
  misc_RNA (1)...(19): siRNA sense strand
uaaaucuggugucuagugu

SEQ ID NO: 770892 - RNA, 19 nt, Homo sapiens
  misc_RNA (1)...(19): siRNA sense strand
ggugcaacaguuagaaaua

SEQ ID NO: 770893 - RNA, 19 nt, Homo sapiens
  misc_RNA (1)...(19): siRNA sense strand
uaagagcagugauaaacag

SEQ ID NO: 770894 - RNA, 19 nt, Homo sapiens
  misc_RNA (1)...(19): siRNA sense strand
agagagcaguuuaccuuug

SEQ ID NO: 770895 - RNA, 19 nt, Homo sapiens
  misc_RNA (1)...(19): siRNA sense strand
gaaguaagcacaguagaac

SEQ ID NO: 770896 - RNA, 19 nt, Homo sapiens
  misc_RNA (1)...(19): siRNA sense strand
gaagacgacagagagauug

SEQ ID NO: 770897 - RNA, 19 nt, Homo sapiens
  misc_RNA (1)...(19): siRNA sense strand
aauccuggacugauaaaua

SEQ ID NO: 770898 - RNA, 19 nt, Homo sapiens
  misc_RNA (1)...(19): siRNA sense strand
aaguaauccuggacugaua

SEQ ID NO: 770899 - RNA, 19 nt, Homo sapiens
  misc_RNA (1)...(19): siRNA sense strand
ugacaccagcucugaagua

SEQ ID NO: 770900 - RNA, 19 nt, Homo sapiens
  misc_RNA (1)...(19): siRNA sense strand
gcuacaagcccuucuccaa

SEQ ID NO: 770901 - RNA, 19 nt, Homo sapiens
  misc_RNA (1)...(19): siRNA sense strand
gaacgucuucaagcaauga

SEQ ID NO: 770902 - RNA, 19 nt, Homo sapiens
  misc_RNA (1)...(19): siRNA sense strand
auccuggacugauaaauaa

SEQ ID NO: 770903 - RNA, 19 nt, Homo sapiens
  misc_RNA (1)...(19): siRNA sense strand
gagagcaguuuaccuuugc

SEQ ID NO: 770904 - RNA, 19 nt, Homo sapiens
  misc_RNA (1)...(19): siRNA sense strand
gcagcaaacaaguggauug

SEQ ID NO: 770905 - RNA, 19 nt, Homo sapiens
  misc_RNA (1)...(19): siRNA sense strand
gauugaagaagagccuuua

SEQ ID NO: 770906 - RNA, 19 nt, Homo sapiens
  misc_RNA (1)...(19): siRNA sense strand
gcuaaucacaguccagaau

SEQ ID NO: 770907 - RNA, 19 nt, Homo sapiens
  misc_RNA (1)...(19): siRNA sense strand
ugucagaccuccauuuacu

SEQ ID NO: 770908 - RNA, 19 nt, Homo sapiens
  misc_RNA (1)...(19): siRNA sense strand
gugaaagcauuugugaaga

SEQ ID NO: 770909 - RNA, 19 nt, Homo sapiens
  misc_RNA (1)...(19): siRNA sense strand
cuuaaguccugcugagauu

SEQ ID NO: 770910 - RNA, 19 nt, Homo sapiens
  misc_RNA (1)...(19): siRNA sense strand
ugaaguaagcacaguagaa

SEQ ID NO: 770911 - RNA, 19 nt, Homo sapiens
  misc_RNA (1)...(19): siRNA sense strand
caaacaaguggauugaaau

SEQ ID NO: 770912 - RNA, 19 nt, Homo sapiens
  misc_RNA (1)...(19): siRNA sense strand
cagaagcgaaggucacaaa

SEQ ID NO: 770913 - RNA, 19 nt, Homo sapiens
  misc_RNA (1)...(19): siRNA sense strand
gucaccaugucgaagaaua

SEQ ID NO: 770914 - RNA, 19 nt, Homo sapiens
  misc_RNA (1)...(19): siRNA sense strand
gcccaaaccaucucccaaa

SEQ ID NO: 770915 - RNA, 19 nt, Homo sapiens
  misc_RNA (1)...(19): siRNA sense strand
ucacaguccagaauuagaa

SEQ ID NO: 770916 - RNA, 19 nt, Homo sapiens
  misc_RNA (1)...(19): siRNA sense strand
ugaagaagagccuuuaucu

SEQ ID NO: 770917 - RNA, 19 nt, Homo sapiens
  misc_RNA (1)...(19): siRNA sense strand
agaauuagaagacgacaga

SEQ ID NO: 770918 - RNA, 19 nt, Homo sapiens
  misc_RNA (1)...(19): siRNA sense strand
uacaagcccuucuccaaca

SEQ ID NO: 770919 - RNA, 19 nt, Homo sapiens
  misc_RNA (1)...(19): siRNA sense strand
uuacacggacauuugcuua

SEQ ID NO: 770920 - RNA, 19 nt, Homo sapiens
  misc_RNA (1)...(19): siRNA sense strand
gccaggcugugaaagcauu

SEQ ID NO: 770921 - RNA, 19 nt, Homo sapiens
  misc_RNA (1)...(19): siRNA sense strand
ccaccaauaacucaucauu

SEQ ID NO: 770922 - RNA, 19 nt, Homo sapiens
  misc_RNA (1)...(19): siRNA sense strand
gcaguuauggaaagaagug

SEQ ID NO: 770923 - RNA, 19 nt, Homo sapiens
  misc_RNA (1)...(19): siRNA sense strand
agaaugcaguacgucauaa

SEQ ID NO: 770924 - RNA, 19 nt, Homo sapiens
  misc_RNA (1)...(19): siRNA sense strand
caaaccaucucccaaaccu

SEQ ID NO: 770925 - RNA, 19 nt, Homo sapiens
  misc_RNA (1)...(19): siRNA sense strand
gagacaauaagcaacaguu

SEQ ID NO: 770926 - RNA, 19 nt, Homo sapiens
  misc_RNA (1)...(19): siRNA sense strand
gcugugaaagcauuuguga

SEQ ID NO: 770927 - RNA, 19 nt, Homo sapiens
  misc_RNA (1)...(19): siRNA sense strand
gcagcaacaacaacaacaa

SEQ ID NO: 770928 - RNA, 19 nt, Homo sapiens
  misc_RNA (1)...(19): siRNA sense strand
auaagcaacaguucaauga

SEQ ID NO: 770929 - RNA, 19 nt, Homo sapiens
  misc_RNA (1)...(19): siRNA sense strand
gaagaaugcaguacgucau

SEQ ID NO: 770930 - RNA, 19 nt, Homo sapiens
  misc_RNA (1)...(19): siRNA sense strand
agaccuccauuuacuuaug

SEQ ID NO: 770931 - RNA, 19 nt, Homo sapiens
  misc_RNA (1)...(19): siRNA sense strand
gacaauaagcaacaguuca

SEQ ID NO: 770932 - RNA, 19 nt, Homo sapiens
  misc_RNA (1)...(19): siRNA sense strand
caucagaaauugccccaaa

SEQ ID NO: 770933 - RNA, 19 nt, Homo sapiens
  misc_RNA (1)...(19): siRNA sense strand
gaaggcgacauucagacaa

SEQ ID NO: 770934 - RNA, 19 nt, Homo sapiens
  misc_RNA (1)...(19): siRNA sense strand
gugcaacaguuagaaauac

SEQ ID NO: 770935 - RNA, 19 nt, Homo sapiens
  misc_RNA (1)...(19): siRNA sense strand
caaauggccaggcugugaa

SEQ ID NO: 770936 - RNA, 19 nt, Homo sapiens
  misc_RNA (1)...(19): siRNA sense strand
uggacagucuucaguucua

SEQ ID NO: 770937 - RNA, 19 nt, Homo sapiens
  misc_RNA (1)...(19): siRNA sense strand
acucaucauuccauaguga

SEQ ID NO: 770938 - RNA, 19 nt, Homo sapiens
  misc_RNA (1)...(19): siRNA sense strand
uaacucaucauuccauagu

SEQ ID NO: 770939 - RNA, 19 nt, Homo sapiens
  misc_RNA (1)...(19): siRNA sense strand
gcagcagcuucuccagaug

SEQ ID NO: 770940 - RNA, 19 nt, Homo sapiens
  misc_RNA (1)...(19): siRNA sense strand
gaaauugccccaaacuaug

SEQ ID NO: 770941 - RNA, 19 nt, Homo sapiens
  misc_RNA (1)...(19): siRNA sense strand
caauccacgucaaggaaga

SEQ ID NO: 770942 - RNA, 19 nt, Homo sapiens
  misc_RNA (1)...(19): siRNA sense strand
caguuuaccuuugcuaagu

SEQ ID NO: 770943 - RNA, 19 nt, Homo sapiens
  misc_RNA (1)...(19): siRNA sense strand
aaucuuagccugcacaagu

SEQ ID NO: 770944 - RNA, 19 nt, Homo sapiens
  misc_RNA (1)...(19): siRNA sense strand
aagaaugcaguacgucaua

SEQ ID NO: 770945 - RNA, 19 nt, Homo sapiens
  misc_RNA (1)...(19): siRNA sense strand
ccacagagcuuaccucaaa

SEQ ID NO: 770946 - RNA, 19 nt, Homo sapiens
  misc_RNA (1)...(19): siRNA sense strand
gcaaacaaguggauugaaa

SEQ ID NO: 770947 - RNA, 19 nt, Homo sapiens
  misc_RNA (1)...(19): siRNA sense strand
uaaagcaccuuaacaauga

SEQ ID NO: 770948 - RNA, 19 nt, Homo sapiens
  misc_RNA (1)...(19): siRNA sense strand
gacaggcaguuaacacuua

SEQ ID NO: 770949 - RNA, 19 nt, Homo sapiens
  misc_RNA (1)...(19): siRNA sense strand
gaaauuuacagcugguuua

SEQ ID NO: 770950 - RNA, 19 nt, Homo sapiens
  misc_RNA (1)...(19): siRNA sense strand
gaugaagacugcccaaugu

SEQ ID NO: 770951 - RNA, 19 nt, Homo sapiens
  misc_RNA (1)...(19): siRNA sense strand
cagcagagauggaagauca

SEQ ID NO: 770952 - RNA, 19 nt, Homo sapiens
  misc_RNA (1)...(19): siRNA sense strand
gaaagcauuugugaagauu

SEQ ID NO: 770953 - RNA, 19 nt, Homo sapiens
  misc_RNA (1)...(19): siRNA sense strand
gcaguuacaucuucagcuu

SEQ ID NO: 770954 - RNA, 19 nt, Homo sapiens
  misc_RNA (1)...(19): siRNA sense strand
acagagagauugaagaaga

SEQ ID NO: 770955 - RNA, 19 nt, Homo sapiens
  misc_RNA (1)...(19): siRNA sense strand
gaugucagaccuccauuua

SEQ ID NO: 770956 - RNA, 19 nt, Homo sapiens
  misc_RNA (1)...(19): siRNA sense strand
ggcuagaccucacuacuaa

SEQ ID NO: 770957 - RNA, 19 nt, Homo sapiens
  misc_RNA (1)...(19): siRNA sense strand
caaagcaucaccaccaaua

SEQ ID NO: 770958 - RNA, 19 nt, Homo sapiens
  misc_RNA (1)...(19): siRNA sense strand
gcagagagcaguuuaccuu

SEQ ID NO: 770959 - RNA, 19 nt, Homo sapiens
  misc_RNA (1)...(19): siRNA sense strand
aagaagagccuuuaucuga

SEQ ID NO: 770960 - RNA, 19 nt, Homo sapiens
  misc_RNA (1)...(19): siRNA sense strand
ggaaugagcacucuaagca

SEQ ID NO: 770961 - RNA, 19 nt, Homo sapiens
  misc_RNA (1)...(19): siRNA sense strand
gcaguacgucauaaucuua

SEQ ID NO: 770962 - RNA, 19 nt, Homo sapiens
  misc_RNA (1)...(19): siRNA sense strand
gaagagccuuuaucugaag

SEQ ID NO: 770963 - RNA, 19 nt, Homo sapiens
  misc_RNA (1)...(19): siRNA sense strand
gacaacagcuaaucacagu

SEQ ID NO: 770964 - RNA, 19 nt, Homo sapiens
  misc_RNA (1)...(19): siRNA sense strand
gacaccagcucugaaguaa

SEQ ID NO: 770965 - RNA, 19 nt, Homo sapiens
  misc_RNA (1)...(19): siRNA sense strand
ggacagucuucaguucuaa

SEQ ID NO: 770966 - RNA, 19 nt, Homo sapiens
  misc_RNA (1)...(19): siRNA sense strand
gagcagugauaaacagaga

SEQ ID NO: 770967 - RNA, 19 nt, Homo sapiens
  misc_RNA (1)...(19): siRNA sense strand
ggaaguccaaccuuaguaa

SEQ ID NO: 770968 - RNA, 19 nt, Homo sapiens
  misc_RNA (1)...(19): siRNA sense strand
gcaaauggccaggcuguga

SEQ ID NO: 770969 - RNA, 19 nt, Homo sapiens
  misc_RNA (1)...(19): siRNA sense strand
gcagguggugcaacaguua

SEQ ID NO: 770970 - RNA, 19 nt, Homo sapiens
  misc_RNA (1)...(19): siRNA sense strand
cgacagagagauugaagaa

SEQ ID NO: 770971 - RNA, 19 nt, Homo sapiens
  misc_RNA (1)...(19): siRNA sense strand
gaaagaagugacuggaguu

SEQ ID NO: 770972 - RNA, 19 nt, Homo sapiens
  misc_RNA (1)...(19): siRNA sense strand
gaaacagcaagagcaguua

SEQ ID NO: 770973 - RNA, 19 nt, Homo sapiens
  misc_RNA (1)...(19): siRNA sense strand
agaagagccuuuaucugaa

SEQ ID NO: 770974 - RNA, 19 nt, Homo sapiens
  misc_RNA (1)...(19): siRNA sense strand
caaggaagagccagugauu

SEQ ID NO: 770975 - RNA, 19 nt, Homo sapiens
  misc_RNA (1)...(19): siRNA sense strand
aacaggaaguccaaccuua

SEQ ID NO: 770976 - RNA, 19 nt, Homo sapiens
  misc_RNA (1)...(19): siRNA sense strand
gcagcaacuuggaagaaug

SEQ ID NO: 770977 - RNA, 19 nt, Homo sapiens
  misc_RNA (1)...(19): siRNA sense strand
ugaaagcauuugugaagau

SEQ ID NO: 770978 - RNA, 19 nt, Homo sapiens
  misc_RNA (1)...(19): siRNA sense strand
gggcuagaccucacuacua

SEQ ID NO: 770979 - RNA, 19 nt, Homo sapiens
  misc_RNA (1)...(19): siRNA sense strand
gacuguggaugaaguagaa

SEQ ID NO: 770980 - RNA, 19 nt, Homo sapiens
  misc_RNA (1)...(19): siRNA sense strand
gcgaacgucuucaagcaau

SEQ ID NO: 770981 - RNA, 19 nt, Homo sapiens
  misc_RNA (1)...(19): siRNA sense strand
ucagaccuccauuuacuua

SEQ ID NO: 770982 - RNA, 19 nt, Homo sapiens
  misc_RNA (1)...(19): siRNA sense strand
cgacagagacaauaagcaa

SEQ ID NO: 770983 - RNA, 19 nt, Homo sapiens
  misc_RNA (1)...(19): siRNA sense strand
ugacagcaauggaaacagu

SEQ ID NO: 770984 - RNA, 19 nt, Homo sapiens
  misc_RNA (1)...(19): siRNA sense strand
ggaugaagacugcccaaug

SEQ ID NO: 770985 - RNA, 19 nt, Homo sapiens
  misc_RNA (1)...(19): siRNA sense strand
gaagaagagccuuuaucug

SEQ ID NO: 770986 - RNA, 19 nt, Homo sapiens
  misc_RNA (1)...(19): siRNA sense strand
gcagauccuucagcaacaa

SEQ ID NO: 770987 - RNA, 19 nt, Homo sapiens
  misc_RNA (1)...(19): siRNA sense strand
gaaguccaaccuuaguaaa

SEQ ID NO: 770988 - RNA, 19 nt, Homo sapiens
  misc_RNA (1)...(19): siRNA sense strand
ucagacaaauacaacauuc

SEQ ID NO: 770989 - RNA, 19 nt, Homo sapiens
  misc_RNA (1)...(19): siRNA sense strand
gcaacagcauccuggaaag

SEQ ID NO: 770990 - RNA, 19 nt, Homo sapiens
  misc_RNA (1)...(19): siRNA sense strand
gaauggacagucuucaguu

SEQ ID NO: 770991 - RNA, 19 nt, Homo sapiens
  misc_RNA (1)...(19): siRNA sense strand
uaaaucuggugucuagugu

SEQ ID NO: 770992 - RNA, 19 nt, Homo sapiens
  misc_RNA (1)...(19): siRNA sense strand
ggugcaacaguuagaaaua

SEQ ID NO: 770993 - RNA, 19 nt, Homo sapiens
  misc_RNA (1)...(19): siRNA sense strand
uaagagcagugauaaacag

SEQ ID NO: 770994 - RNA, 19 nt, Homo sapiens
  misc_RNA (1)...(19): siRNA sense strand
agagagcaguuuaccuuug

SEQ ID NO: 770995 - RNA, 19 nt, Homo sapiens
  misc_RNA (1)...(19): siRNA sense strand
gaaguaagcacaguagaac

SEQ ID NO: 770996 - RNA, 19 nt, Homo sapiens
  misc_RNA (1)...(19): siRNA sense strand
gaagacgacagagagauug

SEQ ID NO: 770997 - RNA, 19 nt, Homo sapiens
  misc_RNA (1)...(19): siRNA sense strand
aauccuggacugauaaaua

SEQ ID NO: 770998 - RNA, 19 nt, Homo sapiens
  misc_RNA (1)...(19): siRNA sense strand
aaguaauccuggacugaua

SEQ ID NO: 770999 - RNA, 19 nt, Homo sapiens
  misc_RNA (1)...(19): siRNA sense strand
ugacaccagcucugaagua

SEQ ID NO: 771000 - RNA, 19 nt, Homo sapiens
  misc_RNA (1)...(19): siRNA sense strand
gcuacaagcccuucuccaa

SEQ ID NO: 771001 - RNA, 19 nt, Homo sapiens
  misc_RNA (1)...(19): siRNA sense strand
gaacgucuucaagcaauga

SEQ ID NO: 771002 - RNA, 19 nt, Homo sapiens
  misc_RNA (1)...(19): siRNA sense strand
auccuggacugauaaauaa

SEQ ID NO: 771003 - RNA, 19 nt, Homo sapiens
  misc_RNA (1)...(19): siRNA sense strand
gagagcaguuuaccuuugc

SEQ ID NO: 771004 - RNA, 19 nt, Homo sapiens
  misc_RNA (1)...(19): siRNA sense strand
gcagcaaacaaguggauug

SEQ ID NO: 771005 - RNA, 19 nt, Homo sapiens
  misc_RNA (1)...(19): siRNA sense strand
gauugaagaagagccuuua

SEQ ID NO: 771006 - RNA, 19 nt, Homo sapiens
  misc_RNA (1)...(19): siRNA sense strand
gcuaaucacaguccagaau

SEQ ID NO: 771007 - RNA, 19 nt, Homo sapiens
  misc_RNA (1)...(19): siRNA sense strand
ugucagaccuccauuuacu

SEQ ID NO: 771008 - RNA, 19 nt, Homo sapiens
  misc_RNA (1)...(19): siRNA sense strand
gugaaagcauuugugaaga

SEQ ID NO: 771009 - RNA, 19 nt, Homo sapiens
  misc_RNA (1)...(19): siRNA sense strand
cuuaaguccugcugagauu

SEQ ID NO: 771010 - RNA, 19 nt, Homo sapiens
  misc_RNA (1)...(19): siRNA sense strand
ugaaguaagcacaguagaa

SEQ ID NO: 771011 - RNA, 19 nt, Homo sapiens
  misc_RNA (1)...(19): siRNA sense strand
caaacaaguggauugaaau

SEQ ID NO: 771012 - RNA, 19 nt, Homo sapiens
  misc_RNA (1)...(19): siRNA sense strand
cagaagcgaaggucacaaa

SEQ ID NO: 771013 - RNA, 19 nt, Homo sapiens
  misc_RNA (1)...(19): siRNA sense strand
gucaccaugucgaagaaua

SEQ ID NO: 771014 - RNA, 19 nt, Homo sapiens
  misc_RNA (1)...(19): siRNA sense strand
gcccaaaccaucucccaaa

SEQ ID NO: 771015 - RNA, 19 nt, Homo sapiens
  misc_RNA (1)...(19): siRNA sense strand
ucacaguccagaauuagaa

SEQ ID NO: 771016 - RNA, 19 nt, Homo sapiens
  misc_RNA (1)...(19): siRNA sense strand
ugaagaagagccuuuaucu

SEQ ID NO: 771017 - RNA, 19 nt, Homo sapiens
  misc_RNA (1)...(19): siRNA sense strand
agaauuagaagacgacaga

SEQ ID NO: 771018 - RNA, 19 nt, Homo sapiens
  misc_RNA (1)...(19): siRNA sense strand
uacaagcccuucuccaaca

SEQ ID NO: 771019 - RNA, 19 nt, Homo sapiens
  misc_RNA (1)...(19): siRNA sense strand
uuacacggacauuugcuua

SEQ ID NO: 771020 - RNA, 19 nt, Homo sapiens
  misc_RNA (1)...(19): siRNA sense strand
gccaggcugugaaagcauu

SEQ ID NO: 771021 - RNA, 19 nt, Homo sapiens
  misc_RNA (1)...(19): siRNA sense strand
ccaccaauaacucaucauu

SEQ ID NO: 771022 - RNA, 19 nt, Homo sapiens
  misc_RNA (1)...(19): siRNA sense strand
gcaguuauggaaagaagug

SEQ ID NO: 771023 - RNA, 19 nt, Homo sapiens
  misc_RNA (1)...(19): siRNA sense strand
agaaugcaguacgucauaa

SEQ ID NO: 771024 - RNA, 19 nt, Homo sapiens
  misc_RNA (1)...(19): siRNA sense strand
caaaccaucucccaaaccu

SEQ ID NO: 771025 - RNA, 19 nt, Homo sapiens
  misc_RNA (1)...(19): siRNA sense strand
gagacaauaagcaacaguu

SEQ ID NO: 771026 - RNA, 19 nt, Homo sapiens
  misc_RNA (1)...(19): siRNA sense strand
gcugugaaagcauuuguga

SEQ ID NO: 771027 - RNA, 19 nt, Homo sapiens
  misc_RNA (1)...(19): siRNA sense strand
gcagcaacaacaacaacaa

SEQ ID NO: 771028 - RNA, 19 nt, Homo sapiens
  misc_RNA (1)...(19): siRNA sense strand
auaagcaacaguucaauga

SEQ ID NO: 771029 - RNA, 19 nt, Homo sapiens
  misc_RNA (1)...(19): siRNA sense strand
gaagaaugcaguacgucau

SEQ ID NO: 771030 - RNA, 19 nt, Homo sapiens
  misc_RNA (1)...(19): siRNA sense strand
agaccuccauuuacuuaug

SEQ ID NO: 771031 - RNA, 19 nt, Homo sapiens
  misc_RNA (1)...(19): siRNA sense strand
gacaauaagcaacaguuca

SEQ ID NO: 771032 - RNA, 19 nt, Homo sapiens
  misc_RNA (1)...(19): siRNA sense strand
caucagaaauugccccaaa

SEQ ID NO: 771033 - RNA, 19 nt, Homo sapiens
  misc_RNA (1)...(19): siRNA sense strand
gaaggcgacauucagacaa

SEQ ID NO: 771034 - RNA, 19 nt, Homo sapiens
  misc_RNA (1)...(19): siRNA sense strand
gugcaacaguuagaaauac

SEQ ID NO: 771035 - RNA, 19 nt, Homo sapiens
  misc_RNA (1)...(19): siRNA sense strand
caaauggccaggcugugaa

SEQ ID NO: 771036 - RNA, 19 nt, Homo sapiens
  misc_RNA (1)...(19): siRNA sense strand
uggacagucuucaguucua

SEQ ID NO: 771037 - RNA, 19 nt, Homo sapiens
  misc_RNA (1)...(19): siRNA sense strand
acucaucauuccauaguga

SEQ ID NO: 771038 - RNA, 19 nt, Homo sapiens
  misc_RNA (1)...(19): siRNA sense strand
uaacucaucauuccauagu

SEQ ID NO: 771039 - RNA, 19 nt, Homo sapiens
  misc_RNA (1)...(19): siRNA sense strand
gcagcagcuucuccagaug

SEQ ID NO: 771040 - RNA, 19 nt, Homo sapiens
  misc_RNA (1)...(19): siRNA sense strand
gaaauugccccaaacuaug

SEQ ID NO: 771041 - RNA, 19 nt, Homo sapiens
  misc_RNA (1)...(19): siRNA sense strand
caauccacgucaaggaaga

SEQ ID NO: 771042 - RNA, 19 nt, Homo sapiens
  misc_RNA (1)...(19): siRNA sense strand
caguuuaccuuugcuaagu

SEQ ID NO: 771043 - RNA, 19 nt, Homo sapiens
  misc_RNA (1)...(19): siRNA sense strand
aaucuuagccugcacaagu

SEQ ID NO: 771044 - RNA, 19 nt, Homo sapiens
  misc_RNA (1)...(19): siRNA sense strand
aagaaugcaguacgucaua

SEQ ID NO: 771045 - RNA, 19 nt, Homo sapiens
  misc_RNA (1)...(19): siRNA sense strand
ccacagagcuuaccucaaa

SEQ ID NO: 771046 - RNA, 19 nt, Homo sapiens
  misc_RNA (1)...(19): siRNA sense strand
uaaagcaccuuaacaauga

SEQ ID NO: 771047 - RNA, 19 nt, Homo sapiens
  misc_RNA (1)...(19): siRNA sense strand
gacaggcaguuaacacuua

SEQ ID NO: 771048 - RNA, 19 nt, Homo sapiens
  misc_RNA (1)...(19): siRNA sense strand
gaaauuuacagcugguuua

SEQ ID NO: 771049 - RNA, 19 nt, Homo sapiens
  misc_RNA (1)...(19): siRNA sense strand
gaugaagacugcccaaugu

SEQ ID NO: 771050 - RNA, 19 nt, Homo sapiens
  misc_RNA (1)...(19): siRNA sense strand
gaaagcauuugugaagauu

SEQ ID NO: 771051 - RNA, 19 nt, Homo sapiens
  misc_RNA (1)...(19): siRNA sense strand
gcaguuacaucuucagcuu

SEQ ID NO: 771052 - RNA, 19 nt, Homo sapiens
  misc_RNA (1)...(19): siRNA sense strand
acagagagauugaagaaga

SEQ ID NO: 771053 - RNA, 19 nt, Homo sapiens
  misc_RNA (1)...(19): siRNA sense strand
gaugucagaccuccauuua

SEQ ID NO: 771054 - RNA, 19 nt, Homo sapiens
  misc_RNA (1)...(19): siRNA sense strand
ggcuagaccucacuacuaa

SEQ ID NO: 771055 - RNA, 19 nt, Homo sapiens
  misc_RNA (1)...(19): siRNA sense strand
caaagcaucaccaccaaua

SEQ ID NO: 771056 - RNA, 19 nt, Homo sapiens
  misc_RNA (1)...(19): siRNA sense strand
gcagagagcaguuuaccuu

SEQ ID NO: 771057 - RNA, 19 nt, Homo sapiens
  misc_RNA (1)...(19): siRNA sense strand
aagaagagccuuuaucuga

SEQ ID NO: 771058 - RNA, 19 nt, Homo sapiens
  misc_RNA (1)...(19): siRNA sense strand
gcaguacgucauaaucuua

SEQ ID NO: 771059 - RNA, 19 nt, Homo sapiens
  misc_RNA (1)...(19): siRNA sense strand
gaagagccuuuaucugaag

SEQ ID NO: 771060 - RNA, 19 nt, Homo sapiens
  misc_RNA (1)...(19): siRNA sense strand
gacaacagcuaaucacagu

SEQ ID NO: 771061 - RNA, 19 nt, Homo sapiens
  misc_RNA (1)...(19): siRNA sense strand
ggacagucuucaguucuaa

SEQ ID NO: 771062 - RNA, 19 nt, Homo sapiens
  misc_RNA (1)...(19): siRNA sense strand
ggaaguccaaccuuaguaa

SEQ ID NO: 771063 - RNA, 19 nt, Homo sapiens
  misc_RNA (1)...(19): siRNA sense strand
gcaaauggccaggcuguga

SEQ ID NO: 771064 - RNA, 19 nt, Homo sapiens
  misc_RNA (1)...(19): siRNA sense strand
gcagguggugcaacaguua

SEQ ID NO: 771065 - RNA, 19 nt, Homo sapiens
  misc_RNA (1)...(19): siRNA sense strand
cgacagagagauugaagaa

SEQ ID NO: 771066 - RNA, 19 nt, Homo sapiens
  misc_RNA (1)...(19): siRNA sense strand
gaaagaagugacuggaguu

SEQ ID NO: 771067 - RNA, 19 nt, Homo sapiens
  misc_RNA (1)...(19): siRNA sense strand
gaaacagcaagagcaguua

SEQ ID NO: 771068 - RNA, 19 nt, Homo sapiens
  misc_RNA (1)...(19): siRNA sense strand
agaagagccuuuaucugaa

SEQ ID NO: 771069 - RNA, 19 nt, Homo sapiens
  misc_RNA (1)...(19): siRNA sense strand
caaggaagagccagugauu

SEQ ID NO: 771070 - RNA, 19 nt, Homo sapiens
  misc_RNA (1)...(19): siRNA sense strand
aacaggaaguccaaccuua

SEQ ID NO: 771071 - RNA, 19 nt, Homo sapiens
  misc_RNA (1)...(19): siRNA sense strand
gcagcaacuuggaagaaug

SEQ ID NO: 771072 - RNA, 19 nt, Homo sapiens
  misc_RNA (1)...(19): siRNA sense strand
ugaaagcauuugugaagau

SEQ ID NO: 771073 - RNA, 19 nt, Homo sapiens
  misc_RNA (1)...(19): siRNA sense strand
gggcuagaccucacuacua

SEQ ID NO: 771074 - RNA, 19 nt, Homo sapiens
  misc_RNA (1)...(19): siRNA sense strand
gacuguggaugaaguagaa

SEQ ID NO: 771075 - RNA, 19 nt, Homo sapiens
  misc_RNA (1)...(19): siRNA sense strand
gcgaacgucuucaagcaau

SEQ ID NO: 771076 - RNA, 19 nt, Homo sapiens
  misc_RNA (1)...(19): siRNA sense strand
ucagaccuccauuuacuua

SEQ ID NO: 771077 - RNA, 19 nt, Homo sapiens
  misc_RNA (1)...(19): siRNA sense strand
ugacagcaauggaaacagu

SEQ ID NO: 771078 - RNA, 19 nt, Homo sapiens
  misc_RNA (1)...(19): siRNA sense strand
ggaugaagacugcccaaug

SEQ ID NO: 771079 - RNA, 19 nt, Homo sapiens
  misc_RNA (1)...(19): siRNA sense strand
gaagaagagccuuuaucug

SEQ ID NO: 771080 - RNA, 19 nt, Homo sapiens
  misc_RNA (1)...(19): siRNA sense strand
gcaacagcauccuggaaag

SEQ ID NO: 771081 - RNA, 19 nt, Homo sapiens
  misc_RNA (1)...(19): siRNA sense strand
gaaguccaaccuuaguaaa

SEQ ID NO: 771082 - RNA, 19 nt, Homo sapiens
  misc_RNA (1)...(19): siRNA sense strand
ucagacaaauacaacauuc

SEQ ID NO: 771083 - RNA, 19 nt, Homo sapiens
  misc_RNA (1)...(19): siRNA sense strand
gcagauccuucagcaacaa

SEQ ID NO: 771084 - RNA, 19 nt, Homo sapiens
  misc_RNA (1)...(19): siRNA sense strand
gaauggacagucuucaguu

SEQ ID NO: 771085 - RNA, 19 nt, Homo sapiens
  misc_RNA (1)...(19): siRNA sense strand
uaaaucuggugucuagugu

SEQ ID NO: 771086 - RNA, 19 nt, Homo sapiens
  misc_RNA (1)...(19): siRNA sense strand
ggugcaacaguuagaaaua

SEQ ID NO: 771087 - RNA, 19 nt, Homo sapiens
  misc_RNA (1)...(19): siRNA sense strand
agagagcaguuuaccuuug

SEQ ID NO: 771088 - RNA, 19 nt, Homo sapiens
  misc_RNA (1)...(19): siRNA sense strand
gcuacaagcccuucuccaa

SEQ ID NO: 771089 - RNA, 19 nt, Homo sapiens
  misc_RNA (1)...(19): siRNA sense strand
gaagacgacagagagauug

SEQ ID NO: 771090 - RNA, 19 nt, Homo sapiens
  misc_RNA (1)...(19): siRNA sense strand
aauccuggacugauaaaua

SEQ ID NO: 771091 - RNA, 19 nt, Homo sapiens
  misc_RNA (1)...(19): siRNA sense strand
aaguaauccuggacugaua

SEQ ID NO: 771092 - RNA, 19 nt, Homo sapiens
  misc_RNA (1)...(19): siRNA sense strand
gaacgucuucaagcaauga

SEQ ID NO: 771093 - RNA, 19 nt, Homo sapiens
  misc_RNA (1)...(19): siRNA sense strand
auccuggacugauaaauaa

SEQ ID NO: 771094 - RNA, 19 nt, Homo sapiens
  misc_RNA (1)...(19): siRNA sense strand
gagagcaguuuaccuuugc

SEQ ID NO: 771095 - RNA, 19 nt, Homo sapiens
  misc_RNA (1)...(19): siRNA sense strand
cuuaaguccugcugagauu

SEQ ID NO: 771096 - RNA, 19 nt, Homo sapiens
  misc_RNA (1)...(19): siRNA sense strand
gauugaagaagagccuuua

SEQ ID NO: 771097 - RNA, 19 nt, Homo sapiens
  misc_RNA (1)...(19): siRNA sense strand
gcuaaucacaguccagaau

SEQ ID NO: 771098 - RNA, 19 nt, Homo sapiens
  misc_RNA (1)...(19): siRNA sense strand
ugucagaccuccauuuacu

SEQ ID NO: 771099 - RNA, 19 nt, Homo sapiens
  misc_RNA (1)...(19): siRNA sense strand
gugaaagcauuugugaaga

SEQ ID NO: 771100 - RNA, 19 nt, Homo sapiens
  misc_RNA (1)...(19): siRNA sense strand
gcccaaaccaucucccaaa

SEQ ID NO: 771101 - RNA, 19 nt, Homo sapiens
  misc_RNA (1)...(19): siRNA sense strand
cagaagcgaaggucacaaa

SEQ ID NO: 771102 - RNA, 19 nt, Homo sapiens
  misc_RNA (1)...(19): siRNA sense strand
gucaccaugucgaagaaua

SEQ ID NO: 771103 - RNA, 19 nt, Homo sapiens
  misc_RNA (1)...(19): siRNA sense strand
ucacaguccagaauuagaa

SEQ ID NO: 771104 - RNA, 19 nt, Homo sapiens
  misc_RNA (1)...(19): siRNA sense strand
ugaagaagagccuuuaucu

SEQ ID NO: 771105 - RNA, 19 nt, Homo sapiens
  misc_RNA (1)...(19): siRNA sense strand
agaauuagaagacgacaga

SEQ ID NO: 771106 - RNA, 19 nt, Homo sapiens
  misc_RNA (1)...(19): siRNA sense strand
ccaccaauaacucaucauu

SEQ ID NO: 771107 - RNA, 19 nt, Homo sapiens
  misc_RNA (1)...(19): siRNA sense strand
uacaagcccuucuccaaca

SEQ ID NO: 771108 - RNA, 19 nt, Homo sapiens
  misc_RNA (1)...(19): siRNA sense strand
uuacacggacauuugcuua

SEQ ID NO: 771109 - RNA, 19 nt, Homo sapiens
  misc_RNA (1)...(19): siRNA sense strand
gccaggcugugaaagcauu

SEQ ID NO: 771110 - RNA, 19 nt, Homo sapiens
  misc_RNA (1)...(19): siRNA sense strand
gcaguuauggaaagaagug

SEQ ID NO: 771111 - RNA, 19 nt, Homo sapiens
  misc_RNA (1)...(19): siRNA sense strand
agaaugcaguacgucauaa

SEQ ID NO: 771112 - RNA, 19 nt, Homo sapiens
  misc_RNA (1)...(19): siRNA sense strand
caaaccaucucccaaaccu

SEQ ID NO: 771113 - RNA, 19 nt, Homo sapiens
  misc_RNA (1)...(19): siRNA sense strand
gcugugaaagcauuuguga

SEQ ID NO: 771114 - RNA, 19 nt, Homo sapiens
  misc_RNA (1)...(19): siRNA sense strand
gcagcaacaacaacaacaa

SEQ ID NO: 771115 - RNA, 19 nt, Homo sapiens
  misc_RNA (1)...(19): siRNA sense strand
gaagaaugcaguacgucau

SEQ ID NO: 771116 - RNA, 19 nt, Homo sapiens
  misc_RNA (1)...(19): siRNA sense strand
agaccuccauuuacuuaug

SEQ ID NO: 771117 - RNA, 19 nt, Homo sapiens
  misc_RNA (1)...(19): siRNA sense strand
caucagaaauugccccaaa

SEQ ID NO: 771118 - RNA, 19 nt, Homo sapiens
  misc_RNA (1)...(19): siRNA sense strand
gaaggcgacauucagacaa

SEQ ID NO: 771119 - RNA, 19 nt, Homo sapiens
  misc_RNA (1)...(19): siRNA sense strand
gugcaacaguuagaaauac

SEQ ID NO: 771120 - RNA, 19 nt, Homo sapiens
  misc_RNA (1)...(19): siRNA sense strand
caaauggccaggcugugaa

SEQ ID NO: 771121 - RNA, 19 nt, Homo sapiens
  misc_RNA (1)...(19): siRNA sense strand
uggacagucuucaguucua

SEQ ID NO: 771122 - RNA, 19 nt, Homo sapiens
  misc_RNA (1)...(19): siRNA sense strand
acucaucauuccauaguga

SEQ ID NO: 771123 - RNA, 19 nt, Homo sapiens
  misc_RNA (1)...(19): siRNA sense strand
uaacucaucauuccauagu

SEQ ID NO: 771124 - RNA, 19 nt, Homo sapiens
  misc_RNA (1)...(19): siRNA sense strand
gcagcagcuucuccagaug

SEQ ID NO: 771125 - RNA, 19 nt, Homo sapiens
  misc_RNA (1)...(19): siRNA sense strand
aacaauuccuccucgacua

SEQ ID NO: 771126 - RNA, 19 nt, Homo sapiens
  misc_RNA (1)...(19): siRNA sense strand
caauccacgucaaggaaga

SEQ ID NO: 771127 - RNA, 19 nt, Homo sapiens
  misc_RNA (1)...(19): siRNA sense strand
caguuuaccuuugcuaagu

SEQ ID NO: 771128 - RNA, 19 nt, Homo sapiens
  misc_RNA (1)...(19): siRNA sense strand
aaucuuagccugcacaagu

SEQ ID NO: 771129 - RNA, 19 nt, Homo sapiens
  misc_RNA (1)...(19): siRNA sense strand
aagaaugcaguacgucaua

SEQ ID NO: 771130 - RNA, 19 nt, Homo sapiens
  misc_RNA (1)...(19): siRNA sense strand
gaaauugccccaaacuaug

SEQ ID NO: 771131 - RNA, 19 nt, Homo sapiens
  misc_RNA (1)...(19): siRNA sense strand
gaacgcgaacgucuucaag

SEQ ID NO: 771132 - RNA, 19 nt, Homo sapiens
  misc_RNA (1)...(19): siRNA sense strand
cauagugaauggacagucu

SEQ ID NO: 771133 - RNA, 19 nt, Homo sapiens
  misc_RNA (1)...(19): siRNA sense strand
agaccucacuacuaacaau

SEQ ID NO: 771134 - RNA, 19 nt, Homo sapiens
  misc_RNA (1)...(19): siRNA sense strand
agaaacagcaagagcaguu

SEQ ID NO: 771135 - RNA, 19 nt, Homo sapiens
  misc_RNA (1)...(19): siRNA sense strand
ccacgaagaccucaauggu

SEQ ID NO: 771136 - RNA, 19 nt, Homo sapiens
  misc_RNA (1)...(19): siRNA sense strand
ugaaguagaauaccagaag

SEQ ID NO: 771137 - RNA, 19 nt, Homo sapiens
  misc_RNA (1)...(19): siRNA sense strand
cagcaguuauggaaagaag

SEQ ID NO: 771138 - RNA, 19 nt, Homo sapiens
  misc_RNA (1)...(19): siRNA sense strand
ggacugauaaauaaugcau

SEQ ID NO: 771139 - RNA, 19 nt, Homo sapiens
  misc_RNA (1)...(19): siRNA sense strand
guaaugcagcaacuuggaa

SEQ ID NO: 771140 - RNA, 19 nt, Homo sapiens
  misc_RNA (1)...(19): siRNA sense strand
aaggcgacauucagacaaa

SEQ ID NO: 771141 - RNA, 19 nt, Homo sapiens
  misc_RNA (1)...(19): siRNA sense strand
aaucuggugucuaguguca

SEQ ID NO: 771142 - RNA, 19 nt, Homo sapiens
  misc_RNA (1)...(19): siRNA sense strand
gccauggaguuugcaaaug

SEQ ID NO: 771143 - RNA, 19 nt, Homo sapiens
  misc_RNA (1)...(19): siRNA sense strand
gcgaaggucacaaaagaua

SEQ ID NO: 771144 - RNA, 19 nt, Homo sapiens
  misc_RNA (1)...(19): siRNA sense strand
uaacaggaaguccaaccuu

SEQ ID NO: 771145 - RNA, 19 nt, Homo sapiens
  misc_RNA (1)...(19): siRNA sense strand
ccacagagcuuaccucaaa

SEQ ID NO: 771146 - RNA, 19 nt, Homo sapiens
  misc_RNA (1)...(19): siRNA sense strand
uaaagcaccuuaacaauga

SEQ ID NO: 771147 - RNA, 19 nt, Homo sapiens
  misc_RNA (1)...(19): siRNA sense strand
gacaggcaguuaacacuua

SEQ ID NO: 771148 - RNA, 19 nt, Homo sapiens
  misc_RNA (1)...(19): siRNA sense strand
gaaauuuacagcugguuua

SEQ ID NO: 771149 - RNA, 19 nt, Homo sapiens
  misc_RNA (1)...(19): siRNA sense strand
gaugaagacugcccaaugu

SEQ ID NO: 771150 - RNA, 19 nt, Homo sapiens
  misc_RNA (1)...(19): siRNA sense strand
gaaagcauuugugaagauu

SEQ ID NO: 771151 - RNA, 19 nt, Homo sapiens
  misc_RNA (1)...(19): siRNA sense strand
gcaguuacaucuucagcuu

SEQ ID NO: 771152 - RNA, 19 nt, Homo sapiens
  misc_RNA (1)...(19): siRNA sense strand
acagagagauugaagaaga

SEQ ID NO: 771153 - RNA, 19 nt, Homo sapiens
  misc_RNA (1)...(19): siRNA sense strand
gaugucagaccuccauuua

SEQ ID NO: 771154 - RNA, 19 nt, Homo sapiens
  misc_RNA (1)...(19): siRNA sense strand
ggcuagaccucacuacuaa

SEQ ID NO: 771155 - RNA, 19 nt, Homo sapiens
  misc_RNA (1)...(19): siRNA sense strand
caaagcaucaccaccaaua

SEQ ID NO: 771156 - RNA, 19 nt, Homo sapiens
  misc_RNA (1)...(19): siRNA sense strand
gcagagagcaguuuaccuu

SEQ ID NO: 771157 - RNA, 19 nt, Homo sapiens
  misc_RNA (1)...(19): siRNA sense strand
aagaagagccuuuaucuga

SEQ ID NO: 771158 - RNA, 19 nt, Homo sapiens
  misc_RNA (1)...(19): siRNA sense strand
gcaguacgucauaaucuua

SEQ ID NO: 771159 - RNA, 19 nt, Homo sapiens
  misc_RNA (1)...(19): siRNA sense strand
gaagagccuuuaucugaag

SEQ ID NO: 771160 - RNA, 19 nt, Homo sapiens
  misc_RNA (1)...(19): siRNA sense strand
gacaacagcuaaucacagu

SEQ ID NO: 771161 - RNA, 19 nt, Homo sapiens
  misc_RNA (1)...(19): siRNA sense strand
ggacagucuucaguucuaa

SEQ ID NO: 771162 - RNA, 19 nt, Homo sapiens
  misc_RNA (1)...(19): siRNA sense strand
ggaaguccaaccuuaguaa

SEQ ID NO: 771163 - RNA, 19 nt, Homo sapiens
  misc_RNA (1)...(19): siRNA sense strand
gcaaauggccaggcuguga

SEQ ID NO: 771164 - RNA, 19 nt, Homo sapiens
  misc_RNA (1)...(19): siRNA sense strand
gcagguggugcaacaguua

SEQ ID NO: 771165 - RNA, 19 nt, Homo sapiens
  misc_RNA (1)...(19): siRNA sense strand
cgacagagagauugaagaa

SEQ ID NO: 771166 - RNA, 19 nt, Homo sapiens
  misc_RNA (1)...(19): siRNA sense strand
gaaagaagugacuggaguu

SEQ ID NO: 771167 - RNA, 19 nt, Homo sapiens
  misc_RNA (1)...(19): siRNA sense strand
gaaacagcaagagcaguua

SEQ ID NO: 771168 - RNA, 19 nt, Homo sapiens
  misc_RNA (1)...(19): siRNA sense strand
agaagagccuuuaucugaa

SEQ ID NO: 771169 - RNA, 19 nt, Homo sapiens
  misc_RNA (1)...(19): siRNA sense strand
caaggaagagccagugauu

SEQ ID NO: 771170 - RNA, 19 nt, Homo sapiens
  misc_RNA (1)...(19): siRNA sense strand
aacaggaaguccaaccuua

SEQ ID NO: 771171 - RNA, 19 nt, Homo sapiens
  misc_RNA (1)...(19): siRNA sense strand
gcagcaacuuggaagaaug

SEQ ID NO: 771172 - RNA, 19 nt, Homo sapiens
  misc_RNA (1)...(19): siRNA sense strand
ugaaagcauuugugaagau

SEQ ID NO: 771173 - RNA, 19 nt, Homo sapiens
  misc_RNA (1)...(19): siRNA sense strand
gggcuagaccucacuacua

SEQ ID NO: 771174 - RNA, 19 nt, Homo sapiens
  misc_RNA (1)...(19): siRNA sense strand
gacuguggaugaaguagaa

SEQ ID NO: 771175 - RNA, 19 nt, Homo sapiens
  misc_RNA (1)...(19): siRNA sense strand
gcgaacgucuucaagcaau

SEQ ID NO: 771176 - RNA, 19 nt, Homo sapiens
  misc_RNA (1)...(19): siRNA sense strand
ucagaccuccauuuacuua

SEQ ID NO: 771177 - RNA, 19 nt, Homo sapiens
  misc_RNA (1)...(19): siRNA sense strand
ugacagcaauggaaacagu

SEQ ID NO: 771178 - RNA, 19 nt, Homo sapiens
  misc_RNA (1)...(19): siRNA sense strand
ggaugaagacugcccaaug

SEQ ID NO: 771179 - RNA, 19 nt, Homo sapiens
  misc_RNA (1)...(19): siRNA sense strand
gaagaagagccuuuaucug

SEQ ID NO: 771180 - RNA, 19 nt, Homo sapiens
  misc_RNA (1)...(19): siRNA sense strand
gcaacagcauccuggaaag

SEQ ID NO: 771181 - RNA, 19 nt, Homo sapiens
  misc_RNA (1)...(19): siRNA sense strand
gaaguccaaccuuaguaaa

SEQ ID NO: 771182 - RNA, 19 nt, Homo sapiens
  misc_RNA (1)...(19): siRNA sense strand
ucagacaaauacaacauuc

SEQ ID NO: 771183 - RNA, 19 nt, Homo sapiens
  misc_RNA (1)...(19): siRNA sense strand
gcagauccuucagcaacaa

SEQ ID NO: 771184 - RNA, 19 nt, Homo sapiens
  misc_RNA (1)...(19): siRNA sense strand
gaauggacagucuucaguu

SEQ ID NO: 771185 - RNA, 19 nt, Homo sapiens
  misc_RNA (1)...(19): siRNA sense strand
uaaaucuggugucuagugu

SEQ ID NO: 771186 - RNA, 19 nt, Homo sapiens
  misc_RNA (1)...(19): siRNA sense strand
ggugcaacaguuagaaaua

SEQ ID NO: 771187 - RNA, 19 nt, Homo sapiens
  misc_RNA (1)...(19): siRNA sense strand
agagagcaguuuaccuuug

SEQ ID NO: 771188 - RNA, 19 nt, Homo sapiens
  misc_RNA (1)...(19): siRNA sense strand
gcuacaagcccuucuccaa

SEQ ID NO: 771189 - RNA, 19 nt, Homo sapiens
  misc_RNA (1)...(19): siRNA sense strand
gaagacgacagagagauug

SEQ ID NO: 771190 - RNA, 19 nt, Homo sapiens
  misc_RNA (1)...(19): siRNA sense strand
aauccuggacugauaaaua

SEQ ID NO: 771191 - RNA, 19 nt, Homo sapiens
  misc_RNA (1)...(19): siRNA sense strand
aaguaauccuggacugaua

SEQ ID NO: 771192 - RNA, 19 nt, Homo sapiens
  misc_RNA (1)...(19): siRNA sense strand
gaacgucuucaagcaauga

SEQ ID NO: 771193 - RNA, 19 nt, Homo sapiens
  misc_RNA (1)...(19): siRNA sense strand
auccuggacugauaaauaa

SEQ ID NO: 771194 - RNA, 19 nt, Homo sapiens
  misc_RNA (1)...(19): siRNA sense strand
gagagcaguuuaccuuugc

SEQ ID NO: 771195 - RNA, 19 nt, Homo sapiens
  misc_RNA (1)...(19): siRNA sense strand
cuuaaguccugcugagauu

SEQ ID NO: 771196 - RNA, 19 nt, Homo sapiens
  misc_RNA (1)...(19): siRNA sense strand
gauugaagaagagccuuua

SEQ ID NO: 771197 - RNA, 19 nt, Homo sapiens
  misc_RNA (1)...(19): siRNA sense strand
gcuaaucacaguccagaau

SEQ ID NO: 771198 - RNA, 19 nt, Homo sapiens
  misc_RNA (1)...(19): siRNA sense strand
ugucagaccuccauuuacu

SEQ ID NO: 771199 - RNA, 19 nt, Homo sapiens
  misc_RNA (1)...(19): siRNA sense strand
gugaaagcauuugugaaga

SEQ ID NO: 771200 - RNA, 19 nt, Homo sapiens
  misc_RNA (1)...(19): siRNA sense strand
gcccaaaccaucucccaaa

SEQ ID NO: 771201 - RNA, 19 nt, Homo sapiens
  misc_RNA (1)...(19): siRNA sense strand
cagaagcgaaggucacaaa

SEQ ID NO: 771202 - RNA, 19 nt, Homo sapiens
  misc_RNA (1)...(19): siRNA sense strand
gucaccaugucgaagaaua

SEQ ID NO: 771203 - RNA, 19 nt, Homo sapiens
  misc_RNA (1)...(19): siRNA sense strand
ucacaguccagaauuagaa

SEQ ID NO: 771204 - RNA, 19 nt, Homo sapiens
  misc_RNA (1)...(19): siRNA sense strand
ugaagaagagccuuuaucu

SEQ ID NO: 771205 - RNA, 19 nt, Homo sapiens
  misc_RNA (1)...(19): siRNA sense strand
agaauuagaagacgacaga

SEQ ID NO: 771206 - RNA, 19 nt, Homo sapiens
  misc_RNA (1)...(19): siRNA sense strand
ccaccaauaacucaucauu

SEQ ID NO: 771207 - RNA, 19 nt, Homo sapiens
  misc_RNA (1)...(19): siRNA sense strand
uacaagcccuucuccaaca

SEQ ID NO: 771208 - RNA, 19 nt, Homo sapiens
  misc_RNA (1)...(19): siRNA sense strand
uuacacggacauuugcuua

SEQ ID NO: 771209 - RNA, 19 nt, Homo sapiens
  misc_RNA (1)...(19): siRNA sense strand
gccaggcugugaaagcauu

SEQ ID NO: 771210 - RNA, 19 nt, Homo sapiens
  misc_RNA (1)...(19): siRNA sense strand
gcaguuauggaaagaagug

SEQ ID NO: 771211 - RNA, 19 nt, Homo sapiens
  misc_RNA (1)...(19): siRNA sense strand
agaaugcaguacgucauaa

SEQ ID NO: 771212 - RNA, 19 nt, Homo sapiens
  misc_RNA (1)...(19): siRNA sense strand
caaaccaucucccaaaccu

SEQ ID NO: 771213 - RNA, 19 nt, Homo sapiens
  misc_RNA (1)...(19): siRNA sense strand
gcugugaaagcauuuguga

SEQ ID NO: 771214 - RNA, 19 nt, Homo sapiens
  misc_RNA (1)...(19): siRNA sense strand
gcagcaacaacaacaacaa

SEQ ID NO: 771215 - RNA, 19 nt, Homo sapiens
  misc_RNA (1)...(19): siRNA sense strand
gaagaaugcaguacgucau

SEQ ID NO: 771216 - RNA, 19 nt, Homo sapiens
  misc_RNA (1)...(19): siRNA sense strand
agaccuccauuuacuuaug

SEQ ID NO: 771217 - RNA, 19 nt, Homo sapiens
  misc_RNA (1)...(19): siRNA sense strand
caucagaaauugccccaaa

SEQ ID NO: 771218 - RNA, 19 nt, Homo sapiens
  misc_RNA (1)...(19): siRNA sense strand
gaaggcgacauucagacaa

SEQ ID NO: 771219 - RNA, 19 nt, Homo sapiens
  misc_RNA (1)...(19): siRNA sense strand
gugcaacaguuagaaauac

SEQ ID NO: 771220 - RNA, 19 nt, Homo sapiens
  misc_RNA (1)...(19): siRNA sense strand
caaauggccaggcugugaa

SEQ ID NO: 771221 - RNA, 19 nt, Homo sapiens
  misc_RNA (1)...(19): siRNA sense strand
uggacagucuucaguucua

SEQ ID NO: 771222 - RNA, 19 nt, Homo sapiens
  misc_RNA (1)...(19): siRNA sense strand
acucaucauuccauaguga

SEQ ID NO: 771223 - RNA, 19 nt, Homo sapiens
  misc_RNA (1)...(19): siRNA sense strand
uaacucaucauuccauagu

SEQ ID NO: 771224 - RNA, 19 nt, Homo sapiens
  misc_RNA (1)...(19): siRNA sense strand
gcagcagcuucuccagaug

SEQ ID NO: 771225 - RNA, 19 nt, Homo sapiens
  misc_RNA (1)...(19): siRNA sense strand
aacaauuccuccucgacua

SEQ ID NO: 771226 - RNA, 19 nt, Homo sapiens
  misc_RNA (1)...(19): siRNA sense strand
caauccacgucaaggaaga

SEQ ID NO: 771227 - RNA, 19 nt, Homo sapiens
  misc_RNA (1)...(19): siRNA sense strand
caguuuaccuuugcuaagu

SEQ ID NO: 771228 - RNA, 19 nt, Homo sapiens
  misc_RNA (1)...(19): siRNA sense strand
aaucuuagccugcacaagu

SEQ ID NO: 771229 - RNA, 19 nt, Homo sapiens
  misc_RNA (1)...(19): siRNA sense strand
aagaaugcaguacgucaua

SEQ ID NO: 771230 - RNA, 19 nt, Homo sapiens
  misc_RNA (1)...(19): siRNA sense strand
gaaauugccccaaacuaug

SEQ ID NO: 771231 - RNA, 19 nt, Homo sapiens
  misc_RNA (1)...(19): siRNA sense strand
gaacgcgaacgucuucaag

SEQ ID NO: 771232 - RNA, 19 nt, Homo sapiens
  misc_RNA (1)...(19): siRNA sense strand
cauagugaauggacagucu

SEQ ID NO: 771233 - RNA, 19 nt, Homo sapiens
  misc_RNA (1)...(19): siRNA sense strand
agaccucacuacuaacaau

SEQ ID NO: 771234 - RNA, 19 nt, Homo sapiens
  misc_RNA (1)...(19): siRNA sense strand
agaaacagcaagagcaguu

SEQ ID NO: 771235 - RNA, 19 nt, Homo sapiens
  misc_RNA (1)...(19): siRNA sense strand
ccacgaagaccucaauggu

SEQ ID NO: 771236 - RNA, 19 nt, Homo sapiens
  misc_RNA (1)...(19): siRNA sense strand
ugaaguagaauaccagaag

SEQ ID NO: 771237 - RNA, 19 nt, Homo sapiens
  misc_RNA (1)...(19): siRNA sense strand
cagcaguuauggaaagaag

SEQ ID NO: 771238 - RNA, 19 nt, Homo sapiens
  misc_RNA (1)...(19): siRNA sense strand
ggacugauaaauaaugcau

SEQ ID NO: 771239 - RNA, 19 nt, Homo sapiens
  misc_RNA (1)...(19): siRNA sense strand
guaaugcagcaacuuggaa

SEQ ID NO: 771240 - RNA, 19 nt, Homo sapiens
  misc_RNA (1)...(19): siRNA sense strand
aaggcgacauucagacaaa

SEQ ID NO: 771241 - RNA, 19 nt, Homo sapiens
  misc_RNA (1)...(19): siRNA sense strand
aaucuggugucuaguguca

SEQ ID NO: 771242 - RNA, 19 nt, Homo sapiens
  misc_RNA (1)...(19): siRNA sense strand
gccauggaguuugcaaaug

SEQ ID NO: 771243 - RNA, 19 nt, Homo sapiens
  misc_RNA (1)...(19): siRNA sense strand
gcgaaggucacaaaagaua

SEQ ID NO: 771244 - RNA, 19 nt, Homo sapiens
  misc_RNA (1)...(19): siRNA sense strand
uaacaggaaguccaaccuu

SEQ ID NO: 771245 - RNA, 19 nt, Homo sapiens
  misc_RNA (1)...(19): siRNA sense strand
ggaaagacaacaaacauua

SEQ ID NO: 771246 - RNA, 19 nt, Homo sapiens
  misc_RNA (1)...(19): siRNA sense strand
gcaaaccagugaaaucaaa

SEQ ID NO: 771247 - RNA, 19 nt, Homo sapiens
  misc_RNA (1)...(19): siRNA sense strand
uaacagaggugaacauaca

SEQ ID NO: 771248 - RNA, 19 nt, Homo sapiens
  misc_RNA (1)...(19): siRNA sense strand
gaagauauacuccauagug

SEQ ID NO: 771249 - RNA, 19 nt, Homo sapiens
  misc_RNA (1)...(19): siRNA sense strand
gaacucaacucaaaacuug

SEQ ID NO: 771250 - RNA, 19 nt, Homo sapiens
  misc_RNA (1)...(19): siRNA sense strand
gagaagauauacuccauag

SEQ ID NO: 771251 - RNA, 19 nt, Homo sapiens
  misc_RNA (1)...(19): siRNA sense strand
caagacaauucaucauuug

SEQ ID NO: 771252 - RNA, 19 nt, Homo sapiens
  misc_RNA (1)...(19): siRNA sense strand
caacauauuugaucagucu

SEQ ID NO: 771253 - RNA, 19 nt, Homo sapiens
  misc_RNA (1)...(19): siRNA sense strand
gaaaacaaccuaaauggua

SEQ ID NO: 771254 - RNA, 19 nt, Homo sapiens
  misc_RNA (1)...(19): siRNA sense strand
gaacuacucccuuucuuca

SEQ ID NO: 771255 - RNA, 19 nt, Homo sapiens
  misc_RNA (1)...(19): siRNA sense strand
ccagugaaaucaaagaaga

SEQ ID NO: 771256 - RNA, 19 nt, Homo sapiens
  misc_RNA (1)...(19): siRNA sense strand
ccaacagcauagucaaaua

SEQ ID NO: 771257 - RNA, 19 nt, Homo sapiens
  misc_RNA (1)...(19): siRNA sense strand
gaacugagaagaacuacau

SEQ ID NO: 771258 - RNA, 19 nt, Homo sapiens
  misc_RNA (1)...(19): siRNA sense strand
ccaauggccuccuucaguu

SEQ ID NO: 771259 - RNA, 19 nt, Homo sapiens
  misc_RNA (1)...(19): siRNA sense strand
caacagcauagucaaauaa

SEQ ID NO: 771260 - RNA, 19 nt, Homo sapiens
  misc_RNA (1)...(19): siRNA sense strand
uagaagagcaacuaacuaa

SEQ ID NO: 771261 - RNA, 19 nt, Homo sapiens
  misc_RNA (1)...(19): siRNA sense strand
gaggcuugauggagaauuu

SEQ ID NO: 771262 - RNA, 19 nt, Homo sapiens
  misc_RNA (1)...(19): siRNA sense strand
caauuaagcuccuucuuuu

SEQ ID NO: 771263 - RNA, 19 nt, Homo sapiens
  misc_RNA (1)...(19): siRNA sense strand
guuauuuccuccagaauug

SEQ ID NO: 771264 - RNA, 19 nt, Homo sapiens
  misc_RNA (1)...(19): siRNA sense strand
ucaagaacccacagaaauu

SEQ ID NO: 771265 - RNA, 19 nt, Homo sapiens
  misc_RNA (1)...(19): siRNA sense strand
caauuaaaccaacagcaua

SEQ ID NO: 771266 - RNA, 19 nt, Homo sapiens
  misc_RNA (1)...(19): siRNA sense strand
gugaagcaaucuaauuaug

SEQ ID NO: 771267 - RNA, 19 nt, Homo sapiens
  misc_RNA (1)...(19): siRNA sense strand
ucgaauagauggaucacaa

SEQ ID NO: 771268 - RNA, 19 nt, Homo sapiens
  misc_RNA (1)...(19): siRNA sense strand
caagaacccacagaaauuu

SEQ ID NO: 771269 - RNA, 19 nt, Homo sapiens
  misc_RNA (1)...(19): siRNA sense strand
gggccaaauuaaugacaua

SEQ ID NO: 771270 - RNA, 19 nt, Homo sapiens
  misc_RNA (1)...(19): siRNA sense strand
gaaaucacgaaaccaacua

SEQ ID NO: 771271 - RNA, 19 nt, Homo sapiens
  misc_RNA (1)...(19): siRNA sense strand
gagcaacuaacuaacuuaa

SEQ ID NO: 771272 - RNA, 19 nt, Homo sapiens
  misc_RNA (1)...(19): siRNA sense strand
gaaagccuccuagaagaaa

SEQ ID NO: 771273 - RNA, 19 nt, Homo sapiens
  misc_RNA (1)...(19): siRNA sense strand
guaaagaauaugucacuug

SEQ ID NO: 771274 - RNA, 19 nt, Homo sapiens
  misc_RNA (1)...(19): siRNA sense strand
ugucuacugugauguuaua

SEQ ID NO: 771275 - RNA, 19 nt, Homo sapiens
  misc_RNA (1)...(19): siRNA sense strand
acaauuaagcuccuucuuu

SEQ ID NO: 771276 - RNA, 19 nt, Homo sapiens
  misc_RNA (1)...(19): siRNA sense strand
cagaaggacuaguauucaa

SEQ ID NO: 771277 - RNA, 19 nt, Homo sapiens
  misc_RNA (1)...(19): siRNA sense strand
guugggacauggucuuaaa

SEQ ID NO: 771278 - RNA, 19 nt, Homo sapiens
  misc_RNA (1)...(19): siRNA sense strand
gaagagcaacuaacuaacu

SEQ ID NO: 771279 - RNA, 19 nt, Homo sapiens
  misc_RNA (1)...(19): siRNA sense strand
gaagagguaaagaauaugu

SEQ ID NO: 771280 - RNA, 19 nt, Homo sapiens
  misc_RNA (1)...(19): siRNA sense strand
ggaagaccaauauaaacaa

SEQ ID NO: 771281 - RNA, 19 nt, Homo sapiens
  misc_RNA (1)...(19): siRNA sense strand
agacgaagggccaaauuaa

SEQ ID NO: 771282 - RNA, 19 nt, Homo sapiens
  misc_RNA (1)...(19): siRNA sense strand
gaaggacuaguauucaaga

SEQ ID NO: 771283 - RNA, 19 nt, Homo sapiens
  misc_RNA (1)...(19): siRNA sense strand
gaaaaggaacugagaagaa

SEQ ID NO: 771284 - RNA, 19 nt, Homo sapiens
  misc_RNA (1)...(19): siRNA sense strand
aauggaagguuauacucua

SEQ ID NO: 771285 - RNA, 19 nt, Homo sapiens
  misc_RNA (1)...(19): siRNA sense strand
aagauauacuccauaguga

SEQ ID NO: 771286 - RNA, 19 nt, Homo sapiens
  misc_RNA (1)...(19): siRNA sense strand
ccagaacacccagaaguaa

SEQ ID NO: 771287 - RNA, 19 nt, Homo sapiens
  misc_RNA (1)...(19): siRNA sense strand
gacauuaauucaacaucga

SEQ ID NO: 771288 - RNA, 19 nt, Homo sapiens
  misc_RNA (1)...(19): siRNA sense strand
gauguuauaucagguaguc

SEQ ID NO: 771289 - RNA, 19 nt, Homo sapiens
  misc_RNA (1)...(19): siRNA sense strand
ccaagagcaccaagaacua

SEQ ID NO: 771290 - RNA, 19 nt, Homo sapiens
  misc_RNA (1)...(19): siRNA sense strand
ugggagaacuacaaauaug

SEQ ID NO: 771291 - RNA, 19 nt, Homo sapiens
  misc_RNA (1)...(19): siRNA sense strand
cgugggagaacuacaaaua

SEQ ID NO: 771292 - RNA, 19 nt, Homo sapiens
  misc_RNA (1)...(19): siRNA sense strand
cgaagggccaaauuaauga

SEQ ID NO: 771293 - RNA, 19 nt, Homo sapiens
  misc_RNA (1)...(19): siRNA sense strand
uaugaucuaucgcugcaaa

SEQ ID NO: 771294 - RNA, 19 nt, Homo sapiens
  misc_RNA (1)...(19): siRNA sense strand
caacuauacgcuacaucua

SEQ ID NO: 771295 - RNA, 19 nt, Homo sapiens
  misc_RNA (1)...(19): siRNA sense strand
cuaguuauuuccuccagaa

SEQ ID NO: 771296 - RNA, 19 nt, Homo sapiens
  misc_RNA (1)...(19): siRNA sense strand
gaauaugucacuugaacuc

SEQ ID NO: 771297 - RNA, 19 nt, Homo sapiens
  misc_RNA (1)...(19): siRNA sense strand
accaagaacuacucccuuu

SEQ ID NO: 771298 - RNA, 19 nt, Homo sapiens
  misc_RNA (1)...(19): siRNA sense strand
cagcucagaaggacuagua

SEQ ID NO: 771299 - RNA, 19 nt, Homo sapiens
  misc_RNA (1)...(19): siRNA sense strand
cugagaagaacuacauaua

SEQ ID NO: 771300 - RNA, 19 nt, Homo sapiens
  misc_RNA (1)...(19): siRNA sense strand
caacagauucagaaagcuu

SEQ ID NO: 771301 - RNA, 19 nt, Homo sapiens
  misc_RNA (1)...(19): siRNA sense strand
gagaggagaagaggauuau

SEQ ID NO: 771302 - RNA, 19 nt, Homo sapiens
  misc_RNA (1)...(19): siRNA sense strand
caugucuacugugauguua

SEQ ID NO: 771303 - RNA, 19 nt, Homo sapiens
  misc_RNA (1)...(19): siRNA sense strand
uugaaagccuccuagaaga

SEQ ID NO: 771304 - RNA, 19 nt, Homo sapiens
  misc_RNA (1)...(19): siRNA sense strand
aagaauaugucacuugaac

SEQ ID NO: 771305 - RNA, 19 nt, Homo sapiens
  misc_RNA (1)...(19): siRNA sense strand
aagagcaacuaacuaacuu

SEQ ID NO: 771306 - RNA, 19 nt, Homo sapiens
  misc_RNA (1)...(19): siRNA sense strand
caugaugaguguggagaaa

SEQ ID NO: 771307 - RNA, 19 nt, Homo sapiens
  misc_RNA (1)...(19): siRNA sense strand
cuacaucuaguugcgauua

SEQ ID NO: 771308 - RNA, 19 nt, Homo sapiens
  misc_RNA (1)...(19): siRNA sense strand
gaaaaucagcucagaagga

SEQ ID NO: 771309 - RNA, 19 nt, Homo sapiens
  misc_RNA (1)...(19): siRNA sense strand
caagauuugcuauguuaga

SEQ ID NO: 771310 - RNA, 19 nt, Homo sapiens
  misc_RNA (1)...(19): siRNA sense strand
cguggaagaccaauauaaa

SEQ ID NO: 771311 - RNA, 19 nt, Homo sapiens
  misc_RNA (1)...(19): siRNA sense strand
gaccguggaagaccaauau

SEQ ID NO: 771312 - RNA, 19 nt, Homo sapiens
  misc_RNA (1)...(19): siRNA sense strand
uauaacagaggugaacaua

SEQ ID NO: 771313 - RNA, 19 nt, Homo sapiens
  misc_RNA (1)...(19): siRNA sense strand
uagagaagauauacuccau

SEQ ID NO: 771314 - RNA, 19 nt, Homo sapiens
  misc_RNA (1)...(19): siRNA sense strand
gaggagaagaggauuaucu

SEQ ID NO: 771315 - RNA, 19 nt, Homo sapiens
  misc_RNA (1)...(19): siRNA sense strand
gacgaagggccaaauuaau

SEQ ID NO: 771316 - RNA, 19 nt, Homo sapiens
  misc_RNA (1)...(19): siRNA sense strand
ucaacuguccagaggguua

SEQ ID NO: 771317 - RNA, 19 nt, Homo sapiens
  misc_RNA (1)...(19): siRNA sense strand
gauauacuccauagugaag

SEQ ID NO: 771318 - RNA, 19 nt, Homo sapiens
  misc_RNA (1)...(19): siRNA sense strand
guaccaccauuuauaacag

SEQ ID NO: 771319 - RNA, 19 nt, Homo sapiens
  misc_RNA (1)...(19): siRNA sense strand
ugaaagccuccuagaagaa

SEQ ID NO: 771320 - RNA, 19 nt, Homo sapiens
  misc_RNA (1)...(19): siRNA sense strand
aagacgaagggccaaauua

SEQ ID NO: 771321 - RNA, 19 nt, Homo sapiens
  misc_RNA (1)...(19): siRNA sense strand
gguaaagaauaugucacuu

SEQ ID NO: 771322 - RNA, 19 nt, Homo sapiens
  misc_RNA (1)...(19): siRNA sense strand
ccauggacauuaauucaac

SEQ ID NO: 771323 - RNA, 19 nt, Homo sapiens
  misc_RNA (1)...(19): siRNA sense strand
ggaaaucacgaaaccaacu

SEQ ID NO: 771324 - RNA, 19 nt, Homo sapiens
  misc_RNA (1)...(19): siRNA sense strand
caagauaauagcaucaaag

SEQ ID NO: 771325 - RNA, 19 nt, Homo sapiens
  misc_RNA (1)...(19): siRNA sense strand
ggagaaaacaaccuaaaug

SEQ ID NO: 771326 - RNA, 19 nt, Homo sapiens
  misc_RNA (1)...(19): siRNA sense strand
gcucagaaggacuaguauu

SEQ ID NO: 771327 - RNA, 19 nt, Homo sapiens
  misc_RNA (1)...(19): siRNA sense strand
caaagaagaagaaaaggaa

SEQ ID NO: 771328 - RNA, 19 nt, Homo sapiens
  misc_RNA (1)...(19): siRNA sense strand
ccauagugaagcaaucuaa

SEQ ID NO: 771329 - RNA, 19 nt, Homo sapiens
  misc_RNA (1)...(19): siRNA sense strand
aaacgugggagaacuacaa

SEQ ID NO: 771330 - RNA, 19 nt, Homo sapiens
  misc_RNA (1)...(19): siRNA sense strand
uaagacgaagggccaaauu

SEQ ID NO: 771331 - RNA, 19 nt, Homo sapiens
  misc_RNA (1)...(19): siRNA sense strand
uuucaugucuacugugaug

SEQ ID NO: 771332 - RNA, 19 nt, Homo sapiens
  misc_RNA (1)...(19): siRNA sense strand
uaaaccaacagcauaguca

SEQ ID NO: 771333 - RNA, 19 nt, Homo sapiens
  misc_RNA (1)...(19): siRNA sense strand
gaucacaaaacuucaauga

SEQ ID NO: 771334 - RNA, 19 nt, Homo sapiens
  misc_RNA (1)...(19): siRNA sense strand
ccagagaggagaagaggau

SEQ ID NO: 771335 - RNA, 19 nt, Homo sapiens
  misc_RNA (1)...(19): siRNA sense strand
gaucaagacaauucaucau

SEQ ID NO: 771336 - RNA, 19 nt, Homo sapiens
  misc_RNA (1)...(19): siRNA sense strand
acgaagggccaaauuaaug

SEQ ID NO: 771337 - RNA, 19 nt, Homo sapiens
  misc_RNA (1)...(19): siRNA sense strand
ccaaugcaaucccggaaaa

SEQ ID NO: 771338 - RNA, 19 nt, Homo sapiens
  misc_RNA (1)...(19): siRNA sense strand
cgaauagauggaucacaaa

SEQ ID NO: 771339 - RNA, 19 nt, Homo sapiens
  misc_RNA (1)...(19): siRNA sense strand
ccuccagaauugaucaaga

SEQ ID NO: 771340 - RNA, 19 nt, Homo sapiens
  misc_RNA (1)...(19): siRNA sense strand
agagaggagaagaggauua

SEQ ID NO: 771341 - RNA, 19 nt, Homo sapiens
  misc_RNA (1)...(19): siRNA sense strand
aaucagcucagaaggacua

SEQ ID NO: 771342 - RNA, 19 nt, Homo sapiens
  misc_RNA (1)...(19): siRNA sense strand
ggagaacuacaaauauggu

SEQ ID NO: 771343 - RNA, 19 nt, Homo sapiens
  misc_RNA (1)...(19): siRNA sense strand
caucagacccagcaacucu

SEQ ID NO: 771344 - RNA, 19 nt, Homo sapiens
  misc_RNA (1)...(19): siRNA sense strand
gccaagagcaccaagaacu

SEQ ID NO: 771345 - RNA, 19 nt, Homo sapiens
  misc_RNA (1)...(19): siRNA sense strand
ggacagaccuggagaacga

SEQ ID NO: 771346 - RNA, 19 nt, Homo sapiens
  misc_RNA (1)...(19): siRNA sense strand
gcacugaccucaagauugg

SEQ ID NO: 771347 - RNA, 19 nt, Homo sapiens
  misc_RNA (1)...(19): siRNA sense strand
cgaggacgaugacugcuua

SEQ ID NO: 771348 - RNA, 19 nt, Homo sapiens
  misc_RNA (1)...(19): siRNA sense strand
gaagaugagcuccauauag

SEQ ID NO: 771349 - RNA, 19 nt, Homo sapiens
  misc_RNA (1)...(19): siRNA sense strand
gcaauaagaccaucucagu

SEQ ID NO: 771350 - RNA, 19 nt, Homo sapiens
  misc_RNA (1)...(19): siRNA sense strand
caacaacccacaugacauu

SEQ ID NO: 771351 - RNA, 19 nt, Homo sapiens
  misc_RNA (1)...(19): siRNA sense strand
cauuaagccuugaagauga

SEQ ID NO: 771352 - RNA, 19 nt, Homo sapiens
  misc_RNA (1)...(19): siRNA sense strand
ggacugacucgggcaauaa

SEQ ID NO: 771353 - RNA, 19 nt, Homo sapiens
  misc_RNA (1)...(19): siRNA sense strand
gaaaacaacagaagaagaa

SEQ ID NO: 771354 - RNA, 19 nt, Homo sapiens
  misc_RNA (1)...(19): siRNA sense strand
gcaaaugaagacaguaaga

SEQ ID NO: 771355 - RNA, 19 nt, Homo sapiens
  misc_RNA (1)...(19): siRNA sense strand
gcauuaagccuugaagaug

SEQ ID NO: 771356 - RNA, 19 nt, Homo sapiens
  misc_RNA (1)...(19): siRNA sense strand
gcucacacaucugcacuga

SEQ ID NO: 771357 - RNA, 19 nt, Homo sapiens
  misc_RNA (1)...(19): siRNA sense strand
agggagaacugcucagauu

SEQ ID NO: 771358 - RNA, 19 nt, Homo sapiens
  misc_RNA (1)...(19): siRNA sense strand
aagaugggcucaacaguca

SEQ ID NO: 771359 - RNA, 19 nt, Homo sapiens
  misc_RNA (1)...(19): siRNA sense strand
aagaugagcuccauauagg

SEQ ID NO: 771360 - RNA, 19 nt, Homo sapiens
  misc_RNA (1)...(19): siRNA sense strand
ccagaucugugucaauuac

SEQ ID NO: 771361 - RNA, 19 nt, Homo sapiens
  misc_RNA (1)...(19): siRNA sense strand
ccuugaagaugauggacua

SEQ ID NO: 771362 - RNA, 19 nt, Homo sapiens
  misc_RNA (1)...(19): siRNA sense strand
gaacgagugucugcacaac

SEQ ID NO: 771363 - RNA, 19 nt, Homo sapiens
  misc_RNA (1)...(19): siRNA sense strand
ucaauuacaagggcuauuu

SEQ ID NO: 771364 - RNA, 19 nt, Homo sapiens
  misc_RNA (1)...(19): siRNA sense strand
caucugcacugaccucaag

SEQ ID NO: 771365 - RNA, 19 nt, Homo sapiens
  misc_RNA (1)...(19): siRNA sense strand
ggcacuagauguggaaguu

SEQ ID NO: 771366 - RNA, 19 nt, Homo sapiens
  misc_RNA (1)...(19): siRNA sense strand
gaacuauucacgccucauc

SEQ ID NO: 771367 - RNA, 19 nt, Homo sapiens
  misc_RNA (1)...(19): siRNA sense strand
caaggccagugacccgaaa

SEQ ID NO: 771368 - RNA, 19 nt, Homo sapiens
  misc_RNA (1)...(19): siRNA sense strand
aagaagaccugugcagaca

SEQ ID NO: 771369 - RNA, 19 nt, Homo sapiens
  misc_RNA (1)...(19): siRNA sense strand
gagccacccuuuugggaua

SEQ ID NO: 771370 - RNA, 19 nt, Homo sapiens
  misc_RNA (1)...(19): siRNA sense strand
gagcccaucccuaaucuuc

SEQ ID NO: 771371 - RNA, 19 nt, Homo sapiens
  misc_RNA (1)...(19): siRNA sense strand
agccagaucugugucaauu

SEQ ID NO: 771372 - RNA, 19 nt, Homo sapiens
  misc_RNA (1)...(19): siRNA sense strand
ggagaacugcucagauugg

SEQ ID NO: 771373 - RNA, 19 nt, Homo sapiens
  misc_RNA (1)...(19): siRNA sense strand
gaucaucgugcccauagug

SEQ ID NO: 771374 - RNA, 19 nt, Homo sapiens
  misc_RNA (1)...(19): siRNA sense strand
ucaauggccuggaaaucuc

SEQ ID NO: 771375 - RNA, 19 nt, Homo sapiens
  misc_RNA (1)...(19): siRNA sense strand
uaauggaggcugugaauac

SEQ ID NO: 771376 - RNA, 19 nt, Homo sapiens
  misc_RNA (1)...(19): siRNA sense strand
caaaugaagacaguaagau

SEQ ID NO: 771377 - RNA, 19 nt, Homo sapiens
  misc_RNA (1)...(19): siRNA sense strand
acgagugucugcacaacaa

SEQ ID NO: 771378 - RNA, 19 nt, Homo sapiens
  misc_RNA (1)...(19): siRNA sense strand
caacccagucuacaggaaa

SEQ ID NO: 771379 - RNA, 19 nt, Homo sapiens
  misc_RNA (1)...(19): siRNA sense strand
caagauuggcuuugaaugc

SEQ ID NO: 771380 - RNA, 19 nt, Homo sapiens
  misc_RNA (1)...(19): siRNA sense strand
cugcgaggguucauguauu

SEQ ID NO: 771381 - RNA, 19 nt, Homo sapiens
  misc_RNA (1)...(19): siRNA sense strand
gaccucuccuaccguaaga

SEQ ID NO: 771382 - RNA, 19 nt, Homo sapiens
  misc_RNA (1)...(19): siRNA sense strand
gggaccaggccaagauuga

SEQ ID NO: 771383 - RNA, 19 nt, Homo sapiens
  misc_RNA (1)...(19): siRNA sense strand
ugcgaggguucauguauug

SEQ ID NO: 771384 - RNA, 19 nt, Homo sapiens
  misc_RNA (1)...(19): siRNA sense strand
ggaagcggaagaacaccaa

SEQ ID NO: 771385 - RNA, 19 nt, Homo sapiens
  misc_RNA (1)...(19): siRNA sense strand
ggcauuaagccuugaagau

SEQ ID NO: 771386 - RNA, 19 nt, Homo sapiens
  misc_RNA (1)...(19): siRNA sense strand
ucagauuggccaugucuau

SEQ ID NO: 771387 - RNA, 19 nt, Homo sapiens
  misc_RNA (1)...(19): siRNA sense strand
gcagccagaucugugucaa

SEQ ID NO: 771388 - RNA, 19 nt, Homo sapiens
  misc_RNA (1)...(19): siRNA sense strand
aaaugaagacaguaagaug

SEQ ID NO: 771389 - RNA, 19 nt, Homo sapiens
  misc_RNA (1)...(19): siRNA sense strand
uggacugacucgggcaaua

SEQ ID NO: 771390 - RNA, 19 nt, Homo sapiens
  misc_RNA (1)...(19): siRNA sense strand
gcacucucuucagccguaa

SEQ ID NO: 771391 - RNA, 19 nt, Homo sapiens
  misc_RNA (1)...(19): siRNA sense strand
gggagaacugcucagauug

SEQ ID NO: 771392 - RNA, 19 nt, Homo sapiens
  misc_RNA (1)...(19): siRNA sense strand
aaacaacagaagaagaaga

SEQ ID NO: 771393 - RNA, 19 nt, Homo sapiens
  misc_RNA (1)...(19): siRNA sense strand
cagccacucucccaaguac

SEQ ID NO: 771394 - RNA, 19 nt, Homo sapiens
  misc_RNA (1)...(19): siRNA sense strand
aagauuggcuuugaaugca

SEQ ID NO: 771395 - RNA, 19 nt, Homo sapiens
  misc_RNA (1)...(19): siRNA sense strand
ugauagcccuccugugcau

SEQ ID NO: 771396 - RNA, 19 nt, Homo sapiens
  misc_RNA (1)...(19): siRNA sense strand
ugggauagcuguguuugag

SEQ ID NO: 771397 - RNA, 19 nt, Homo sapiens
  misc_RNA (1)...(19): siRNA sense strand
gaucuccuccacugacuuc

SEQ ID NO: 771398 - RNA, 19 nt, Homo sapiens
  misc_RNA (1)...(19): siRNA sense strand
gaccaggccaagauugaga

SEQ ID NO: 771399 - RNA, 19 nt, Homo sapiens
  misc_RNA (1)...(19): siRNA sense strand
gaucuauagcgccuacaug

SEQ ID NO: 771400 - RNA, 19 nt, Homo sapiens
  misc_RNA (1)...(19): siRNA sense strand
ccaccaaucgcaucuacug

SEQ ID NO: 771401 - RNA, 19 nt, Homo sapiens
  misc_RNA (1)...(19): siRNA sense strand
agauggaccuacugaccaa

SEQ ID NO: 771402 - RNA, 19 nt, Homo sapiens
  misc_RNA (1)...(19): siRNA sense strand
caagggcuauuuuaagugu

SEQ ID NO: 771403 - RNA, 19 nt, Homo sapiens
  misc_RNA (1)...(19): siRNA sense strand
ggacgaugacugcuuagac

SEQ ID NO: 771404 - RNA, 19 nt, Homo sapiens
  misc_RNA (1)...(19): siRNA sense strand
gccagaucugugucaauua

SEQ ID NO: 771405 - RNA, 19 nt, Homo sapiens
  misc_RNA (1)...(19): siRNA sense strand
ccugauggcuccgaugagu

SEQ ID NO: 771406 - RNA, 19 nt, Homo sapiens
  misc_RNA (1)...(19): siRNA sense strand
gguguguccugcagagaag

SEQ ID NO: 771407 - RNA, 19 nt, Homo sapiens
  misc_RNA (1)...(19): siRNA sense strand
gggaucaucgugcccauag

SEQ ID NO: 771408 - RNA, 19 nt, Homo sapiens
  misc_RNA (1)...(19): siRNA sense strand
gcacuagauguggaaguug

SEQ ID NO: 771409 - RNA, 19 nt, Homo sapiens
  misc_RNA (1)...(19): siRNA sense strand
gaugcgacgaggacgauga

SEQ ID NO: 771410 - RNA, 19 nt, Homo sapiens
  misc_RNA (1)...(19): siRNA sense strand
ggaaaacaacagaagaaga

SEQ ID NO: 771411 - RNA, 19 nt, Homo sapiens
  misc_RNA (1)...(19): siRNA sense strand
ggacccaccagccacaagu

SEQ ID NO: 771412 - RNA, 19 nt, Homo sapiens
  misc_RNA (1)...(19): siRNA sense strand
gaagcggaagaacaccaaa

SEQ ID NO: 771413 - RNA, 19 nt, Homo sapiens
  misc_RNA (1)...(19): siRNA sense strand
gagcuccagaugccuguga

SEQ ID NO: 771414 - RNA, 19 nt, Homo sapiens
  misc_RNA (1)...(19): siRNA sense strand
gucagacaauauugaaugg

SEQ ID NO: 771415 - RNA, 19 nt, Homo sapiens
  misc_RNA (1)...(19): siRNA sense strand
agaucugugucaauuacaa

SEQ ID NO: 771416 - RNA, 19 nt, Homo sapiens
  misc_RNA (1)...(19): siRNA sense strand
acaacccagucuacaggaa

SEQ ID NO: 771417 - RNA, 19 nt, Homo sapiens
  misc_RNA (1)...(19): siRNA sense strand
gaggacgacugccccaaga

SEQ ID NO: 771418 - RNA, 19 nt, Homo sapiens
  misc_RNA (1)...(19): siRNA sense strand
cuaauggaggcugugaaua

SEQ ID NO: 771419 - RNA, 19 nt, Homo sapiens
  misc_RNA (1)...(19): siRNA sense strand
ccuaauggaggcugugaau

SEQ ID NO: 771420 - RNA, 19 nt, Homo sapiens
  misc_RNA (1)...(19): siRNA sense strand
uagcuguguuugaggacaa

SEQ ID NO: 771421 - RNA, 19 nt, Homo sapiens
  misc_RNA (1)...(19): siRNA sense strand
caacagaaagacgcugauc

SEQ ID NO: 771422 - RNA, 19 nt, Homo sapiens
  misc_RNA (1)...(19): siRNA sense strand
caacggaaucacccuggau

SEQ ID NO: 771423 - RNA, 19 nt, Homo sapiens
  misc_RNA (1)...(19): siRNA sense strand
acaguaagaugggcucaac

SEQ ID NO: 771424 - RNA, 19 nt, Homo sapiens
  misc_RNA (1)...(19): siRNA sense strand
gaaccucaacaacccacau

SEQ ID NO: 771425 - RNA, 19 nt, Homo sapiens
  misc_RNA (1)...(19): siRNA sense strand
uacaagggcuauuuuaagu

SEQ ID NO: 771426 - RNA, 19 nt, Homo sapiens
  misc_RNA (1)...(19): siRNA sense strand
cagccaagagcuccagaug

SEQ ID NO: 771427 - RNA, 19 nt, Homo sapiens
  misc_RNA (1)...(19): siRNA sense strand
acagaaagacgcugaucuc

SEQ ID NO: 771428 - RNA, 19 nt, Homo sapiens
  misc_RNA (1)...(19): siRNA sense strand
gaauggcccaacggaauca

SEQ ID NO: 771429 - RNA, 19 nt, Homo sapiens
  misc_RNA (1)...(19): siRNA sense strand
uggugaagcggaacuauuc

SEQ ID NO: 771430 - RNA, 19 nt, Homo sapiens
  misc_RNA (1)...(19): siRNA sense strand
gaggaucgaccuggugaag

SEQ ID NO: 771431 - RNA, 19 nt, Homo sapiens
  misc_RNA (1)...(19): siRNA sense strand
gagaugcgacgaggacgau

SEQ ID NO: 771432 - RNA, 19 nt, Homo sapiens
  misc_RNA (1)...(19): siRNA sense strand
aauggcggcugcucacaca

SEQ ID NO: 771433 - RNA, 19 nt, Homo sapiens
  misc_RNA (1)...(19): siRNA sense strand
ccagccacucucccaagua

SEQ ID NO: 771434 - RNA, 19 nt, Homo sapiens
  misc_RNA (1)...(19): siRNA sense strand
gcucaauggccuggaaauc

SEQ ID NO: 771435 - RNA, 19 nt, Homo sapiens
  misc_RNA (1)...(19): siRNA sense strand
ucaguggaggcaacagaaa

SEQ ID NO: 771436 - RNA, 19 nt, Homo sapiens
  misc_RNA (1)...(19): siRNA sense strand
ugaauggcccaacggaauc

SEQ ID NO: 771437 - RNA, 19 nt, Homo sapiens
  misc_RNA (1)...(19): siRNA sense strand
ucuccuaccguaagaucua

SEQ ID NO: 771438 - RNA, 19 nt, Homo sapiens
  misc_RNA (1)...(19): siRNA sense strand
cuggguagacuccaagcua

SEQ ID NO: 771439 - RNA, 19 nt, Homo sapiens
  misc_RNA (1)...(19): siRNA sense strand
gcucagauuggccaugucu

SEQ ID NO: 771440 - RNA, 19 nt, Homo sapiens
  misc_RNA (1)...(19): siRNA sense strand
guaagaugggcucaacagu

SEQ ID NO: 771441 - RNA, 19 nt, Homo sapiens
  misc_RNA (1)...(19): siRNA sense strand
ggacagaccuggagaacga

SEQ ID NO: 771442 - RNA, 19 nt, Homo sapiens
  misc_RNA (1)...(19): siRNA sense strand
gcacugaccucaagauugg

SEQ ID NO: 771443 - RNA, 19 nt, Homo sapiens
  misc_RNA (1)...(19): siRNA sense strand
cgaggacgaugacugcuua

SEQ ID NO: 771444 - RNA, 19 nt, Homo sapiens
  misc_RNA (1)...(19): siRNA sense strand
gaagaugagcuccauauag

SEQ ID NO: 771445 - RNA, 19 nt, Homo sapiens
  misc_RNA (1)...(19): siRNA sense strand
gcaauaagaccaucucagu

SEQ ID NO: 771446 - RNA, 19 nt, Homo sapiens
  misc_RNA (1)...(19): siRNA sense strand
caacaacccacaugacauu

SEQ ID NO: 771447 - RNA, 19 nt, Homo sapiens
  misc_RNA (1)...(19): siRNA sense strand
cauuaagccuugaagauga

SEQ ID NO: 771448 - RNA, 19 nt, Homo sapiens
  misc_RNA (1)...(19): siRNA sense strand
ggacugacucgggcaauaa

SEQ ID NO: 771449 - RNA, 19 nt, Homo sapiens
  misc_RNA (1)...(19): siRNA sense strand
gaaaacaacagaagaagaa

SEQ ID NO: 771450 - RNA, 19 nt, Homo sapiens
  misc_RNA (1)...(19): siRNA sense strand
gcaaaugaagacaguaaga

SEQ ID NO: 771451 - RNA, 19 nt, Homo sapiens
  misc_RNA (1)...(19): siRNA sense strand
gcauuaagccuugaagaug

SEQ ID NO: 771452 - RNA, 19 nt, Homo sapiens
  misc_RNA (1)...(19): siRNA sense strand
gcucacacaucugcacuga

SEQ ID NO: 771453 - RNA, 19 nt, Homo sapiens
  misc_RNA (1)...(19): siRNA sense strand
agggagaacugcucagauu

SEQ ID NO: 771454 - RNA, 19 nt, Homo sapiens
  misc_RNA (1)...(19): siRNA sense strand
aagaugggcucaacaguca

SEQ ID NO: 771455 - RNA, 19 nt, Homo sapiens
  misc_RNA (1)...(19): siRNA sense strand
aagaugagcuccauauagg

SEQ ID NO: 771456 - RNA, 19 nt, Homo sapiens
  misc_RNA (1)...(19): siRNA sense strand
ccagaucugugucaauuac

SEQ ID NO: 771457 - RNA, 19 nt, Homo sapiens
  misc_RNA (1)...(19): siRNA sense strand
ccuugaagaugauggacua

SEQ ID NO: 771458 - RNA, 19 nt, Homo sapiens
  misc_RNA (1)...(19): siRNA sense strand
gaacgagugucugcacaac

SEQ ID NO: 771459 - RNA, 19 nt, Homo sapiens
  misc_RNA (1)...(19): siRNA sense strand
ucaauuacaagggcuauuu

SEQ ID NO: 771460 - RNA, 19 nt, Homo sapiens
  misc_RNA (1)...(19): siRNA sense strand
caucugcacugaccucaag

SEQ ID NO: 771461 - RNA, 19 nt, Homo sapiens
  misc_RNA (1)...(19): siRNA sense strand
ggcacuagauguggaaguu

SEQ ID NO: 771462 - RNA, 19 nt, Homo sapiens
  misc_RNA (1)...(19): siRNA sense strand
gaacuauucacgccucauc

SEQ ID NO: 771463 - RNA, 19 nt, Homo sapiens
  misc_RNA (1)...(19): siRNA sense strand
caaggccagugacccgaaa

SEQ ID NO: 771464 - RNA, 19 nt, Homo sapiens
  misc_RNA (1)...(19): siRNA sense strand
aagaagaccugugcagaca

SEQ ID NO: 771465 - RNA, 19 nt, Homo sapiens
  misc_RNA (1)...(19): siRNA sense strand
gagccacccuuuugggaua

SEQ ID NO: 771466 - RNA, 19 nt, Homo sapiens
  misc_RNA (1)...(19): siRNA sense strand
gagcccaucccuaaucuuc

SEQ ID NO: 771467 - RNA, 19 nt, Homo sapiens
  misc_RNA (1)...(19): siRNA sense strand
agccagaucugugucaauu

SEQ ID NO: 771468 - RNA, 19 nt, Homo sapiens
  misc_RNA (1)...(19): siRNA sense strand
ggagaacugcucagauugg

SEQ ID NO: 771469 - RNA, 19 nt, Homo sapiens
  misc_RNA (1)...(19): siRNA sense strand
gaucaucgugcccauagug

SEQ ID NO: 771470 - RNA, 19 nt, Homo sapiens
  misc_RNA (1)...(19): siRNA sense strand
ucaauggccuggaaaucuc

SEQ ID NO: 771471 - RNA, 19 nt, Homo sapiens
  misc_RNA (1)...(19): siRNA sense strand
uaauggaggcugugaauac

SEQ ID NO: 771472 - RNA, 19 nt, Homo sapiens
  misc_RNA (1)...(19): siRNA sense strand
caaaugaagacaguaagau

SEQ ID NO: 771473 - RNA, 19 nt, Homo sapiens
  misc_RNA (1)...(19): siRNA sense strand
acgagugucugcacaacaa

SEQ ID NO: 771474 - RNA, 19 nt, Homo sapiens
  misc_RNA (1)...(19): siRNA sense strand
caacccagucuacaggaaa

SEQ ID NO: 771475 - RNA, 19 nt, Homo sapiens
  misc_RNA (1)...(19): siRNA sense strand
caagauuggcuuugaaugc

SEQ ID NO: 771476 - RNA, 19 nt, Homo sapiens
  misc_RNA (1)...(19): siRNA sense strand
cugcgaggguucauguauu

SEQ ID NO: 771477 - RNA, 19 nt, Homo sapiens
  misc_RNA (1)...(19): siRNA sense strand
gaccucuccuaccguaaga

SEQ ID NO: 771478 - RNA, 19 nt, Homo sapiens
  misc_RNA (1)...(19): siRNA sense strand
gggaccaggccaagauuga

SEQ ID NO: 771479 - RNA, 19 nt, Homo sapiens
  misc_RNA (1)...(19): siRNA sense strand
ugcgaggguucauguauug

SEQ ID NO: 771480 - RNA, 19 nt, Homo sapiens
  misc_RNA (1)...(19): siRNA sense strand
ggaagcggaagaacaccaa

SEQ ID NO: 771481 - RNA, 19 nt, Homo sapiens
  misc_RNA (1)...(19): siRNA sense strand
ggcauuaagccuugaagau

SEQ ID NO: 771482 - RNA, 19 nt, Homo sapiens
  misc_RNA (1)...(19): siRNA sense strand
ucagauuggccaugucuau

SEQ ID NO: 771483 - RNA, 19 nt, Homo sapiens
  misc_RNA (1)...(19): siRNA sense strand
gcagccagaucugugucaa

SEQ ID NO: 771484 - RNA, 19 nt, Homo sapiens
  misc_RNA (1)...(19): siRNA sense strand
aaaugaagacaguaagaug

SEQ ID NO: 771485 - RNA, 19 nt, Homo sapiens
  misc_RNA (1)...(19): siRNA sense strand
uggacugacucgggcaaua

SEQ ID NO: 771486 - RNA, 19 nt, Homo sapiens
  misc_RNA (1)...(19): siRNA sense strand
gcacucucuucagccguaa

SEQ ID NO: 771487 - RNA, 19 nt, Homo sapiens
  misc_RNA (1)...(19): siRNA sense strand
gggagaacugcucagauug

SEQ ID NO: 771488 - RNA, 19 nt, Homo sapiens
  misc_RNA (1)...(19): siRNA sense strand
aaacaacagaagaagaaga

SEQ ID NO: 771489 - RNA, 19 nt, Homo sapiens
  misc_RNA (1)...(19): siRNA sense strand
cagccacucucccaaguac

SEQ ID NO: 771490 - RNA, 19 nt, Homo sapiens
  misc_RNA (1)...(19): siRNA sense strand
aagauuggcuuugaaugca

SEQ ID NO: 771491 - RNA, 19 nt, Homo sapiens
  misc_RNA (1)...(19): siRNA sense strand
ugauagcccuccugugcau

SEQ ID NO: 771492 - RNA, 19 nt, Homo sapiens
  misc_RNA (1)...(19): siRNA sense strand
ugggauagcuguguuugag

SEQ ID NO: 771493 - RNA, 19 nt, Homo sapiens
  misc_RNA (1)...(19): siRNA sense strand
gaucuccuccacugacuuc

SEQ ID NO: 771494 - RNA, 19 nt, Homo sapiens
  misc_RNA (1)...(19): siRNA sense strand
gaccaggccaagauugaga

SEQ ID NO: 771495 - RNA, 19 nt, Homo sapiens
  misc_RNA (1)...(19): siRNA sense strand
gaucuauagcgccuacaug

SEQ ID NO: 771496 - RNA, 19 nt, Homo sapiens
  misc_RNA (1)...(19): siRNA sense strand
ccaccaaucgcaucuacug

SEQ ID NO: 771497 - RNA, 19 nt, Homo sapiens
  misc_RNA (1)...(19): siRNA sense strand
agauggaccuacugaccaa

SEQ ID NO: 771498 - RNA, 19 nt, Homo sapiens
  misc_RNA (1)...(19): siRNA sense strand
caagggcuauuuuaagugu

SEQ ID NO: 771499 - RNA, 19 nt, Homo sapiens
  misc_RNA (1)...(19): siRNA sense strand
ggacgaugacugcuuagac

SEQ ID NO: 771500 - RNA, 19 nt, Homo sapiens
  misc_RNA (1)...(19): siRNA sense strand
gccagaucugugucaauua

SEQ ID NO: 771501 - RNA, 19 nt, Homo sapiens
  misc_RNA (1)...(19): siRNA sense strand
ccugauggcuccgaugagu

SEQ ID NO: 771502 - RNA, 19 nt, Homo sapiens
  misc_RNA (1)...(19): siRNA sense strand
gguguguccugcagagaag

SEQ ID NO: 771503 - RNA, 19 nt, Homo sapiens
  misc_RNA (1)...(19): siRNA sense strand
gggaucaucgugcccauag

SEQ ID NO: 771504 - RNA, 19 nt, Homo sapiens
  misc_RNA (1)...(19): siRNA sense strand
gcacuagauguggaaguug

SEQ ID NO: 771505 - RNA, 19 nt, Homo sapiens
  misc_RNA (1)...(19): siRNA sense strand
gaugcgacgaggacgauga

SEQ ID NO: 771506 - RNA, 19 nt, Homo sapiens
  misc_RNA (1)...(19): siRNA sense strand
ggaaaacaacagaagaaga

SEQ ID NO: 771507 - RNA, 19 nt, Homo sapiens
  misc_RNA (1)...(19): siRNA sense strand
ggacccaccagccacaagu

SEQ ID NO: 771508 - RNA, 19 nt, Homo sapiens
  misc_RNA (1)...(19): siRNA sense strand
gaagcggaagaacaccaaa

SEQ ID NO: 771509 - RNA, 19 nt, Homo sapiens
  misc_RNA (1)...(19): siRNA sense strand
gagcuccagaugccuguga

SEQ ID NO: 771510 - RNA, 19 nt, Homo sapiens
  misc_RNA (1)...(19): siRNA sense strand
gucagacaauauugaaugg

SEQ ID NO: 771511 - RNA, 19 nt, Homo sapiens
  misc_RNA (1)...(19): siRNA sense strand
agaucugugucaauuacaa

SEQ ID NO: 771512 - RNA, 19 nt, Homo sapiens
  misc_RNA (1)...(19): siRNA sense strand
acaacccagucuacaggaa

SEQ ID NO: 771513 - RNA, 19 nt, Homo sapiens
  misc_RNA (1)...(19): siRNA sense strand
gaggacgacugccccaaga

SEQ ID NO: 771514 - RNA, 19 nt, Homo sapiens
  misc_RNA (1)...(19): siRNA sense strand
cuaauggaggcugugaaua

SEQ ID NO: 771515 - RNA, 19 nt, Homo sapiens
  misc_RNA (1)...(19): siRNA sense strand
ccuaauggaggcugugaau

SEQ ID NO: 771516 - RNA, 19 nt, Homo sapiens
  misc_RNA (1)...(19): siRNA sense strand
uagcuguguuugaggacaa

SEQ ID NO: 771517 - RNA, 19 nt, Homo sapiens
  misc_RNA (1)...(19): siRNA sense strand
caacagaaagacgcugauc

SEQ ID NO: 771518 - RNA, 19 nt, Homo sapiens
  misc_RNA (1)...(19): siRNA sense strand
caacggaaucacccuggau

SEQ ID NO: 771519 - RNA, 19 nt, Homo sapiens
  misc_RNA (1)...(19): siRNA sense strand
acaguaagaugggcucaac

SEQ ID NO: 771520 - RNA, 19 nt, Homo sapiens
  misc_RNA (1)...(19): siRNA sense strand
gaaccucaacaacccacau

SEQ ID NO: 771521 - RNA, 19 nt, Homo sapiens
  misc_RNA (1)...(19): siRNA sense strand
uacaagggcuauuuuaagu

SEQ ID NO: 771522 - RNA, 19 nt, Homo sapiens
  misc_RNA (1)...(19): siRNA sense strand
cagccaagagcuccagaug

SEQ ID NO: 771523 - RNA, 19 nt, Homo sapiens
  misc_RNA (1)...(19): siRNA sense strand
acagaaagacgcugaucuc

SEQ ID NO: 771524 - RNA, 19 nt, Homo sapiens
  misc_RNA (1)...(19): siRNA sense strand
gaauggcccaacggaauca

SEQ ID NO: 771525 - RNA, 19 nt, Homo sapiens
  misc_RNA (1)...(19): siRNA sense strand
uggugaagcggaacuauuc

SEQ ID NO: 771526 - RNA, 19 nt, Homo sapiens
  misc_RNA (1)...(19): siRNA sense strand
gaggaucgaccuggugaag

SEQ ID NO: 771527 - RNA, 19 nt, Homo sapiens
  misc_RNA (1)...(19): siRNA sense strand
gagaugcgacgaggacgau

SEQ ID NO: 771528 - RNA, 19 nt, Homo sapiens
  misc_RNA (1)...(19): siRNA sense strand
aauggcggcugcucacaca

SEQ ID NO: 771529 - RNA, 19 nt, Homo sapiens
  misc_RNA (1)...(19): siRNA sense strand
ccagccacucucccaagua

SEQ ID NO: 771530 - RNA, 19 nt, Homo sapiens
  misc_RNA (1)...(19): siRNA sense strand
gcucaauggccuggaaauc

SEQ ID NO: 771531 - RNA, 19 nt, Homo sapiens
  misc_RNA (1)...(19): siRNA sense strand
ucaguggaggcaacagaaa

SEQ ID NO: 771532 - RNA, 19 nt, Homo sapiens
  misc_RNA (1)...(19): siRNA sense strand
ugaauggcccaacggaauc

SEQ ID NO: 771533 - RNA, 19 nt, Homo sapiens
  misc_RNA (1)...(19): siRNA sense strand
ucuccuaccguaagaucua

SEQ ID NO: 771534 - RNA, 19 nt, Homo sapiens
  misc_RNA (1)...(19): siRNA sense strand
cuggguagacuccaagcua

SEQ ID NO: 771535 - RNA, 19 nt, Homo sapiens
  misc_RNA (1)...(19): siRNA sense strand
gcucagauuggccaugucu

SEQ ID NO: 771536 - RNA, 19 nt, Homo sapiens
  misc_RNA (1)...(19): siRNA sense strand
guaagaugggcucaacagu

SEQ ID NO: 771537 - RNA, 19 nt, Homo sapiens
  misc_RNA (1)...(19): siRNA sense strand
ggacagaccuggagaacga

SEQ ID NO: 771538 - RNA, 19 nt, Homo sapiens
  misc_RNA (1)...(19): siRNA sense strand
gcacugaccucaagauugg

SEQ ID NO: 771539 - RNA, 19 nt, Homo sapiens
  misc_RNA (1)...(19): siRNA sense strand
cgaggacgaugacugcuua

SEQ ID NO: 771540 - RNA, 19 nt, Homo sapiens
  misc_RNA (1)...(19): siRNA sense strand
gaagaugagcuccauauag

SEQ ID NO: 771541 - RNA, 19 nt, Homo sapiens
  misc_RNA (1)...(19): siRNA sense strand
gcaauaagaccaucucagu

SEQ ID NO: 771542 - RNA, 19 nt, Homo sapiens
  misc_RNA (1)...(19): siRNA sense strand
caacaacccacaugacauu

SEQ ID NO: 771543 - RNA, 19 nt, Homo sapiens
  misc_RNA (1)...(19): siRNA sense strand
cauuaagccuugaagauga

SEQ ID NO: 771544 - RNA, 19 nt, Homo sapiens
  misc_RNA (1)...(19): siRNA sense strand
ggacugacucgggcaauaa

SEQ ID NO: 771545 - RNA, 19 nt, Homo sapiens
  misc_RNA (1)...(19): siRNA sense strand
gaaaacaacagaagaagaa

SEQ ID NO: 771546 - RNA, 19 nt, Homo sapiens
  misc_RNA (1)...(19): siRNA sense strand
gcaaaugaagacaguaaga

SEQ ID NO: 771547 - RNA, 19 nt, Homo sapiens
  misc_RNA (1)...(19): siRNA sense strand
gcauuaagccuugaagaug

SEQ ID NO: 771548 - RNA, 19 nt, Homo sapiens
  misc_RNA (1)...(19): siRNA sense strand
gcucacacaucugcacuga

SEQ ID NO: 771549 - RNA, 19 nt, Homo sapiens
  misc_RNA (1)...(19): siRNA sense strand
agggagaacugcucagauu

SEQ ID NO: 771550 - RNA, 19 nt, Homo sapiens
  misc_RNA (1)...(19): siRNA sense strand
aagaugggcucaacaguca

SEQ ID NO: 771551 - RNA, 19 nt, Homo sapiens
  misc_RNA (1)...(19): siRNA sense strand
aagaugagcuccauauagg

SEQ ID NO: 771552 - RNA, 19 nt, Homo sapiens
  misc_RNA (1)...(19): siRNA sense strand
ccagaucugugucaauuac

SEQ ID NO: 771553 - RNA, 19 nt, Homo sapiens
  misc_RNA (1)...(19): siRNA sense strand
ccuugaagaugauggacua

SEQ ID NO: 771554 - RNA, 19 nt, Homo sapiens
  misc_RNA (1)...(19): siRNA sense strand
gaacgagugucugcacaac

SEQ ID NO: 771555 - RNA, 19 nt, Homo sapiens
  misc_RNA (1)...(19): siRNA sense strand
ucaauuacaagggcuauuu

SEQ ID NO: 771556 - RNA, 19 nt, Homo sapiens
  misc_RNA (1)...(19): siRNA sense strand
caucugcacugaccucaag

SEQ ID NO: 771557 - RNA, 19 nt, Homo sapiens
  misc_RNA (1)...(19): siRNA sense strand
ggcacuagauguggaaguu

SEQ ID NO: 771558 - RNA, 19 nt, Homo sapiens
  misc_RNA (1)...(19): siRNA sense strand
gaacuauucacgccucauc

SEQ ID NO: 771559 - RNA, 19 nt, Homo sapiens
  misc_RNA (1)...(19): siRNA sense strand
caaggccagugacccgaaa

SEQ ID NO: 771560 - RNA, 19 nt, Homo sapiens
  misc_RNA (1)...(19): siRNA sense strand
aagaagaccugugcagaca

SEQ ID NO: 771561 - RNA, 19 nt, Homo sapiens
  misc_RNA (1)...(19): siRNA sense strand
gagccacccuuuugggaua

SEQ ID NO: 771562 - RNA, 19 nt, Homo sapiens
  misc_RNA (1)...(19): siRNA sense strand
gagcccaucccuaaucuuc

SEQ ID NO: 771563 - RNA, 19 nt, Homo sapiens
  misc_RNA (1)...(19): siRNA sense strand
agccagaucugugucaauu

SEQ ID NO: 771564 - RNA, 19 nt, Homo sapiens
  misc_RNA (1)...(19): siRNA sense strand
ggagaacugcucagauugg

SEQ ID NO: 771565 - RNA, 19 nt, Homo sapiens
  misc_RNA (1)...(19): siRNA sense strand
gaucaucgugcccauagug

SEQ ID NO: 771566 - RNA, 19 nt, Homo sapiens
  misc_RNA (1)...(19): siRNA sense strand
ucaauggccuggaaaucuc

SEQ ID NO: 771567 - RNA, 19 nt, Homo sapiens
  misc_RNA (1)...(19): siRNA sense strand
uaauggaggcugugaauac

SEQ ID NO: 771568 - RNA, 19 nt, Homo sapiens
  misc_RNA (1)...(19): siRNA sense strand
caaaugaagacaguaagau

SEQ ID NO: 771569 - RNA, 19 nt, Homo sapiens
  misc_RNA (1)...(19): siRNA sense strand
acgagugucugcacaacaa

SEQ ID NO: 771570 - RNA, 19 nt, Homo sapiens
  misc_RNA (1)...(19): siRNA sense strand
caacccagucuacaggaaa

SEQ ID NO: 771571 - RNA, 19 nt, Homo sapiens
  misc_RNA (1)...(19): siRNA sense strand
caagauuggcuuugaaugc

SEQ ID NO: 771572 - RNA, 19 nt, Homo sapiens
  misc_RNA (1)...(19): siRNA sense strand
cugcgaggguucauguauu

SEQ ID NO: 771573 - RNA, 19 nt, Homo sapiens
  misc_RNA (1)...(19): siRNA sense strand
gaccucuccuaccguaaga

SEQ ID NO: 771574 - RNA, 19 nt, Homo sapiens
  misc_RNA (1)...(19): siRNA sense strand
gggaccaggccaagauuga

SEQ ID NO: 771575 - RNA, 19 nt, Homo sapiens
  misc_RNA (1)...(19): siRNA sense strand
ugcgaggguucauguauug

SEQ ID NO: 771576 - RNA, 19 nt, Homo sapiens
  misc_RNA (1)...(19): siRNA sense strand
ggaagcggaagaacaccaa

SEQ ID NO: 771577 - RNA, 19 nt, Homo sapiens
  misc_RNA (1)...(19): siRNA sense strand
ggcauuaagccuugaagau

SEQ ID NO: 771578 - RNA, 19 nt, Homo sapiens
  misc_RNA (1)...(19): siRNA sense strand
ucagauuggccaugucuau

SEQ ID NO: 771579 - RNA, 19 nt, Homo sapiens
  misc_RNA (1)...(19): siRNA sense strand
gcagccagaucugugucaa

SEQ ID NO: 771580 - RNA, 19 nt, Homo sapiens
  misc_RNA (1)...(19): siRNA sense strand
aaaugaagacaguaagaug

SEQ ID NO: 771581 - RNA, 19 nt, Homo sapiens
  misc_RNA (1)...(19): siRNA sense strand
uggacugacucgggcaaua

SEQ ID NO: 771582 - RNA, 19 nt, Homo sapiens
  misc_RNA (1)...(19): siRNA sense strand
gcacucucuucagccguaa

SEQ ID NO: 771583 - RNA, 19 nt, Homo sapiens
  misc_RNA (1)...(19): siRNA sense strand
gggagaacugcucagauug

SEQ ID NO: 771584 - RNA, 19 nt, Homo sapiens
  misc_RNA (1)...(19): siRNA sense strand
aaacaacagaagaagaaga

SEQ ID NO: 771585 - RNA, 19 nt, Homo sapiens
  misc_RNA (1)...(19): siRNA sense strand
cagccacucucccaaguac

SEQ ID NO: 771586 - RNA, 19 nt, Homo sapiens
  misc_RNA (1)...(19): siRNA sense strand
aagauuggcuuugaaugca

SEQ ID NO: 771587 - RNA, 19 nt, Homo sapiens
  misc_RNA (1)...(19): siRNA sense strand
ugauagcccuccugugcau

SEQ ID NO: 771588 - RNA, 19 nt, Homo sapiens
  misc_RNA (1)...(19): siRNA sense strand
ugggauagcuguguuugag

SEQ ID NO: 771589 - RNA, 19 nt, Homo sapiens
  misc_RNA (1)...(19): siRNA sense strand
gaucuccuccacugacuuc

SEQ ID NO: 771590 - RNA, 19 nt, Homo sapiens
  misc_RNA (1)...(19): siRNA sense strand
gaccaggccaagauugaga

SEQ ID NO: 771591 - RNA, 19 nt, Homo sapiens
  misc_RNA (1)...(19): siRNA sense strand
gaucuauagcgccuacaug

SEQ ID NO: 771592 - RNA, 19 nt, Homo sapiens
  misc_RNA (1)...(19): siRNA sense strand
ccaccaaucgcaucuacug

SEQ ID NO: 771593 - RNA, 19 nt, Homo sapiens
  misc_RNA (1)...(19): siRNA sense strand
agauggaccuacugaccaa

SEQ ID NO: 771594 - RNA, 19 nt, Homo sapiens
  misc_RNA (1)...(19): siRNA sense strand
caagggcuauuuuaagugu

SEQ ID NO: 771595 - RNA, 19 nt, Homo sapiens
  misc_RNA (1)...(19): siRNA sense strand
ggacgaugacugcuuagac

SEQ ID NO: 771596 - RNA, 19 nt, Homo sapiens
  misc_RNA (1)...(19): siRNA sense strand
gccagaucugugucaauua

SEQ ID NO: 771597 - RNA, 19 nt, Homo sapiens
  misc_RNA (1)...(19): siRNA sense strand
ccugauggcuccgaugagu

SEQ ID NO: 771598 - RNA, 19 nt, Homo sapiens
  misc_RNA (1)...(19): siRNA sense strand
gguguguccugcagagaag

SEQ ID NO: 771599 - RNA, 19 nt, Homo sapiens
  misc_RNA (1)...(19): siRNA sense strand
gggaucaucgugcccauag

SEQ ID NO: 771600 - RNA, 19 nt, Homo sapiens
  misc_RNA (1)...(19): siRNA sense strand
gcacuagauguggaaguug

SEQ ID NO: 771601 - RNA, 19 nt, Homo sapiens
  misc_RNA (1)...(19): siRNA sense strand
gaugcgacgaggacgauga

SEQ ID NO: 771602 - RNA, 19 nt, Homo sapiens
  misc_RNA (1)...(19): siRNA sense strand
ggaaaacaacagaagaaga

SEQ ID NO: 771603 - RNA, 19 nt, Homo sapiens
  misc_RNA (1)...(19): siRNA sense strand
ggacccaccagccacaagu

SEQ ID NO: 771604 - RNA, 19 nt, Homo sapiens
  misc_RNA (1)...(19): siRNA sense strand
gaagcggaagaacaccaaa

SEQ ID NO: 771605 - RNA, 19 nt, Homo sapiens
  misc_RNA (1)...(19): siRNA sense strand
gagcuccagaugccuguga

SEQ ID NO: 771606 - RNA, 19 nt, Homo sapiens
  misc_RNA (1)...(19): siRNA sense strand
gucagacaauauugaaugg

SEQ ID NO: 771607 - RNA, 19 nt, Homo sapiens
  misc_RNA (1)...(19): siRNA sense strand
agaucugugucaauuacaa

SEQ ID NO: 771608 - RNA, 19 nt, Homo sapiens
  misc_RNA (1)...(19): siRNA sense strand
acaacccagucuacaggaa

SEQ ID NO: 771609 - RNA, 19 nt, Homo sapiens
  misc_RNA (1)...(19): siRNA sense strand
gaggacgacugccccaaga

SEQ ID NO: 771610 - RNA, 19 nt, Homo sapiens
  misc_RNA (1)...(19): siRNA sense strand
cuaauggaggcugugaaua

SEQ ID NO: 771611 - RNA, 19 nt, Homo sapiens
  misc_RNA (1)...(19): siRNA sense strand
ccuaauggaggcugugaau

SEQ ID NO: 771612 - RNA, 19 nt, Homo sapiens
  misc_RNA (1)...(19): siRNA sense strand
uagcuguguuugaggacaa

SEQ ID NO: 771613 - RNA, 19 nt, Homo sapiens
  misc_RNA (1)...(19): siRNA sense strand
caacagaaagacgcugauc

SEQ ID NO: 771614 - RNA, 19 nt, Homo sapiens
  misc_RNA (1)...(19): siRNA sense strand
caacggaaucacccuggau

SEQ ID NO: 771615 - RNA, 19 nt, Homo sapiens
  misc_RNA (1)...(19): siRNA sense strand
acaguaagaugggcucaac

SEQ ID NO: 771616 - RNA, 19 nt, Homo sapiens
  misc_RNA (1)...(19): siRNA sense strand
gaaccucaacaacccacau

SEQ ID NO: 771617 - RNA, 19 nt, Homo sapiens
  misc_RNA (1)...(19): siRNA sense strand
uacaagggcuauuuuaagu

SEQ ID NO: 771618 - RNA, 19 nt, Homo sapiens
  misc_RNA (1)...(19): siRNA sense strand
cagccaagagcuccagaug

SEQ ID NO: 771619 - RNA, 19 nt, Homo sapiens
  misc_RNA (1)...(19): siRNA sense strand
acagaaagacgcugaucuc

SEQ ID NO: 771620 - RNA, 19 nt, Homo sapiens
  misc_RNA (1)...(19): siRNA sense strand
gaauggcccaacggaauca

SEQ ID NO: 771621 - RNA, 19 nt, Homo sapiens
  misc_RNA (1)...(19): siRNA sense strand
uggugaagcggaacuauuc

SEQ ID NO: 771622 - RNA, 19 nt, Homo sapiens
  misc_RNA (1)...(19): siRNA sense strand
gaggaucgaccuggugaag

SEQ ID NO: 771623 - RNA, 19 nt, Homo sapiens
  misc_RNA (1)...(19): siRNA sense strand
gagaugcgacgaggacgau

SEQ ID NO: 771624 - RNA, 19 nt, Homo sapiens
  misc_RNA (1)...(19): siRNA sense strand
aauggcggcugcucacaca

SEQ ID NO: 771625 - RNA, 19 nt, Homo sapiens
  misc_RNA (1)...(19): siRNA sense strand
ccagccacucucccaagua

SEQ ID NO: 771626 - RNA, 19 nt, Homo sapiens
  misc_RNA (1)...(19): siRNA sense strand
gcucaauggccuggaaauc

SEQ ID NO: 771627 - RNA, 19 nt, Homo sapiens
  misc_RNA (1)...(19): siRNA sense strand
ucaguggaggcaacagaaa

SEQ ID NO: 771628 - RNA, 19 nt, Homo sapiens
  misc_RNA (1)...(19): siRNA sense strand
ugaauggcccaacggaauc

SEQ ID NO: 771629 - RNA, 19 nt, Homo sapiens
  misc_RNA (1)...(19): siRNA sense strand
ucuccuaccguaagaucua

SEQ ID NO: 771630 - RNA, 19 nt, Homo sapiens
  misc_RNA (1)...(19): siRNA sense strand
cuggguagacuccaagcua

SEQ ID NO: 771631 - RNA, 19 nt, Homo sapiens
  misc_RNA (1)...(19): siRNA sense strand
gcucagauuggccaugucu

SEQ ID NO: 771632 - RNA, 19 nt, Homo sapiens
  misc_RNA (1)...(19): siRNA sense strand
guaagaugggcucaacagu

SEQ ID NO: 771633 - RNA, 19 nt, Homo sapiens
  misc_RNA (1)...(19): siRNA sense strand
ggacggagcuguucauugc

SEQ ID NO: 771634 - RNA, 19 nt, Homo sapiens
  misc_RNA (1)...(19): siRNA sense strand
gaacugcuggccacgagua

SEQ ID NO: 771635 - RNA, 19 nt, Homo sapiens
  misc_RNA (1)...(19): siRNA sense strand
ccaagacugugcaggagaa

SEQ ID NO: 771636 - RNA, 19 nt, Homo sapiens
  misc_RNA (1)...(19): siRNA sense strand
gcaagaaggcccagcucaa

SEQ ID NO: 771637 - RNA, 19 nt, Homo sapiens
  misc_RNA (1)...(19): siRNA sense strand
gaacuaugccaccguuauc

SEQ ID NO: 771638 - RNA, 19 nt, Homo sapiens
  misc_RNA (1)...(19): siRNA sense strand
ggagguggccgaauugaca

SEQ ID NO: 771639 - RNA, 19 nt, Homo sapiens
  misc_RNA (1)...(19): siRNA sense strand
ggaacuaugccaccguuau

SEQ ID NO: 771640 - RNA, 19 nt, Homo sapiens
  misc_RNA (1)...(19): siRNA sense strand
ucaagggcaucgucaagga

SEQ ID NO: 771641 - RNA, 19 nt, Homo sapiens
  misc_RNA (1)...(19): siRNA sense strand
caaagugggucucauugcu

SEQ ID NO: 771642 - RNA, 19 nt, Homo sapiens
  misc_RNA (1)...(19): siRNA sense strand
caagaagacccgugugaag

SEQ ID NO: 771643 - RNA, 19 nt, Homo sapiens
  misc_RNA (1)...(19): siRNA sense strand
cgggauccguaucgguuua

SEQ ID NO: 771644 - RNA, 19 nt, Homo sapiens
  misc_RNA (1)...(19): siRNA sense strand
ugacaaacccaucuugaag

SEQ ID NO: 771645 - RNA, 19 nt, Homo sapiens
  misc_RNA (1)...(19): siRNA sense strand
gcacgugaagcaccguaaa

SEQ ID NO: 771646 - RNA, 19 nt, Homo sapiens
  misc_RNA (1)...(19): siRNA sense strand
ggcuggagguggccgaauu

SEQ ID NO: 771647 - RNA, 19 nt, Homo sapiens
  misc_RNA (1)...(19): siRNA sense strand
gaaggcccagcucaacauu

SEQ ID NO: 771648 - RNA, 19 nt, Homo sapiens
  misc_RNA (1)...(19): siRNA sense strand
gagcggcacggcuacauca

SEQ ID NO: 771649 - RNA, 19 nt, Homo sapiens
  misc_RNA (1)...(19): siRNA sense strand
ccaagaagacccgugugaa

SEQ ID NO: 771650 - RNA, 19 nt, Homo sapiens
  misc_RNA (1)...(19): siRNA sense strand
aauauaaggcaaagaggaa

SEQ ID NO: 771651 - RNA, 19 nt, Homo sapiens
  misc_RNA (1)...(19): siRNA sense strand
ccgcaaagugggucucauu

SEQ ID NO: 771652 - RNA, 19 nt, Homo sapiens
  misc_RNA (1)...(19): siRNA sense strand
gaauugacaaacccaucuu

SEQ ID NO: 771653 - RNA, 19 nt, Homo sapiens
  misc_RNA (1)...(19): siRNA sense strand
caagaaggcccagcucaac

SEQ ID NO: 771654 - RNA, 19 nt, Homo sapiens
  misc_RNA (1)...(19): siRNA sense strand
ccaccguuaucucccacaa

SEQ ID NO: 771655 - RNA, 19 nt, Homo sapiens
  misc_RNA (1)...(19): siRNA sense strand
gaagcggacggagcuguuc

SEQ ID NO: 771656 - RNA, 19 nt, Homo sapiens
  misc_RNA (1)...(19): siRNA sense strand
gcuggagguggccgaauug

SEQ ID NO: 771657 - RNA, 19 nt, Homo sapiens
  misc_RNA (1)...(19): siRNA sense strand
gauccguaucgguuuaaga

SEQ ID NO: 771658 - RNA, 19 nt, Homo sapiens
  misc_RNA (1)...(19): siRNA sense strand
caucaagggcaucgucaag

SEQ ID NO: 771659 - RNA, 19 nt, Homo sapiens
  misc_RNA (1)...(19): siRNA sense strand
caccaugccugaggguaca

SEQ ID NO: 771660 - RNA, 19 nt, Homo sapiens
  misc_RNA (1)...(19): siRNA sense strand
cgaauugacaaacccaucu

SEQ ID NO: 771661 - RNA, 19 nt, Homo sapiens
  misc_RNA (1)...(19): siRNA sense strand
ggacggagcuguucauugc

SEQ ID NO: 771662 - RNA, 19 nt, Homo sapiens
  misc_RNA (1)...(19): siRNA sense strand
gaacugcuggccacgagua

SEQ ID NO: 771663 - RNA, 19 nt, Homo sapiens
  misc_RNA (1)...(19): siRNA sense strand
ccaagacugugcaggagaa

SEQ ID NO: 771664 - RNA, 19 nt, Homo sapiens
  misc_RNA (1)...(19): siRNA sense strand
gcaagaaggcccagcucaa

SEQ ID NO: 771665 - RNA, 19 nt, Homo sapiens
  misc_RNA (1)...(19): siRNA sense strand
gaacuaugccaccguuauc

SEQ ID NO: 771666 - RNA, 19 nt, Homo sapiens
  misc_RNA (1)...(19): siRNA sense strand
ggagguggccgaauugaca

SEQ ID NO: 771667 - RNA, 19 nt, Homo sapiens
  misc_RNA (1)...(19): siRNA sense strand
ggaacuaugccaccguuau

SEQ ID NO: 771668 - RNA, 19 nt, Homo sapiens
  misc_RNA (1)...(19): siRNA sense strand
ucaagggcaucgucaagga

SEQ ID NO: 771669 - RNA, 19 nt, Homo sapiens
  misc_RNA (1)...(19): siRNA sense strand
caaagugggucucauugcu

SEQ ID NO: 771670 - RNA, 19 nt, Homo sapiens
  misc_RNA (1)...(19): siRNA sense strand
caagaagacccgugugaag

SEQ ID NO: 771671 - RNA, 19 nt, Homo sapiens
  misc_RNA (1)...(19): siRNA sense strand
cgggauccguaucgguuua

SEQ ID NO: 771672 - RNA, 19 nt, Homo sapiens
  misc_RNA (1)...(19): siRNA sense strand
ugacaaacccaucuugaag

SEQ ID NO: 771673 - RNA, 19 nt, Homo sapiens
  misc_RNA (1)...(19): siRNA sense strand
gcacgugaagcaccguaaa

SEQ ID NO: 771674 - RNA, 19 nt, Homo sapiens
  misc_RNA (1)...(19): siRNA sense strand
ggcuggagguggccgaauu

SEQ ID NO: 771675 - RNA, 19 nt, Homo sapiens
  misc_RNA (1)...(19): siRNA sense strand
gaaggcccagcucaacauu

SEQ ID NO: 771676 - RNA, 19 nt, Homo sapiens
  misc_RNA (1)...(19): siRNA sense strand
gagcggcacggcuacauca

SEQ ID NO: 771677 - RNA, 19 nt, Homo sapiens
  misc_RNA (1)...(19): siRNA sense strand
ccaagaagacccgugugaa

SEQ ID NO: 771678 - RNA, 19 nt, Homo sapiens
  misc_RNA (1)...(19): siRNA sense strand
aauauaaggcaaagaggaa

SEQ ID NO: 771679 - RNA, 19 nt, Homo sapiens
  misc_RNA (1)...(19): siRNA sense strand
ccgcaaagugggucucauu

SEQ ID NO: 771680 - RNA, 19 nt, Homo sapiens
  misc_RNA (1)...(19): siRNA sense strand
gaauugacaaacccaucuu

SEQ ID NO: 771681 - RNA, 19 nt, Homo sapiens
  misc_RNA (1)...(19): siRNA sense strand
caagaaggcccagcucaac

SEQ ID NO: 771682 - RNA, 19 nt, Homo sapiens
  misc_RNA (1)...(19): siRNA sense strand
ccaccguuaucucccacaa

SEQ ID NO: 771683 - RNA, 19 nt, Homo sapiens
  misc_RNA (1)...(19): siRNA sense strand
gaagcggacggagcuguuc

SEQ ID NO: 771684 - RNA, 19 nt, Homo sapiens
  misc_RNA (1)...(19): siRNA sense strand
gcuggagguggccgaauug

SEQ ID NO: 771685 - RNA, 19 nt, Homo sapiens
  misc_RNA (1)...(19): siRNA sense strand
gauccguaucgguuuaaga

SEQ ID NO: 771686 - RNA, 19 nt, Homo sapiens
  misc_RNA (1)...(19): siRNA sense strand
caucaagggcaucgucaag

SEQ ID NO: 771687 - RNA, 19 nt, Homo sapiens
  misc_RNA (1)...(19): siRNA sense strand
caccaugccugaggguaca

SEQ ID NO: 771688 - RNA, 19 nt, Homo sapiens
  misc_RNA (1)...(19): siRNA sense strand
cgaauugacaaacccaucu

SEQ ID NO: 771689 - RNA, 19 nt, Homo sapiens
  misc_RNA (1)...(19): siRNA sense strand
ggacggagcuguucauugc

SEQ ID NO: 771690 - RNA, 19 nt, Homo sapiens
  misc_RNA (1)...(19): siRNA sense strand
gaacugcuggccacgagua

SEQ ID NO: 771691 - RNA, 19 nt, Homo sapiens
  misc_RNA (1)...(19): siRNA sense strand
ccaagacugugcaggagaa

SEQ ID NO: 771692 - RNA, 19 nt, Homo sapiens
  misc_RNA (1)...(19): siRNA sense strand
gcaagaaggcccagcucaa

SEQ ID NO: 771693 - RNA, 19 nt, Homo sapiens
  misc_RNA (1)...(19): siRNA sense strand
gaacuaugccaccguuauc

SEQ ID NO: 771694 - RNA, 19 nt, Homo sapiens
  misc_RNA (1)...(19): siRNA sense strand
ggagguggccgaauugaca

SEQ ID NO: 771695 - RNA, 19 nt, Homo sapiens
  misc_RNA (1)...(19): siRNA sense strand
ggaacuaugccaccguuau

SEQ ID NO: 771696 - RNA, 19 nt, Homo sapiens
  misc_RNA (1)...(19): siRNA sense strand
ucaagggcaucgucaagga

SEQ ID NO: 771697 - RNA, 19 nt, Homo sapiens
  misc_RNA (1)...(19): siRNA sense strand
caaagugggucucauugcu

SEQ ID NO: 771698 - RNA, 19 nt, Homo sapiens
  misc_RNA (1)...(19): siRNA sense strand
caagaagacccgugugaag

SEQ ID NO: 771699 - RNA, 19 nt, Homo sapiens
  misc_RNA (1)...(19): siRNA sense strand
cgggauccguaucgguuua

SEQ ID NO: 771700 - RNA, 19 nt, Homo sapiens
  misc_RNA (1)...(19): siRNA sense strand
ugacaaacccaucuugaag

SEQ ID NO: 771701 - RNA, 19 nt, Homo sapiens
  misc_RNA (1)...(19): siRNA sense strand
gcacgugaagcaccguaaa

SEQ ID NO: 771702 - RNA, 19 nt, Homo sapiens
  misc_RNA (1)...(19): siRNA sense strand
ggcuggagguggccgaauu

SEQ ID NO: 771703 - RNA, 19 nt, Homo sapiens
  misc_RNA (1)...(19): siRNA sense strand
gaaggcccagcucaacauu

SEQ ID NO: 771704 - RNA, 19 nt, Homo sapiens
  misc_RNA (1)...(19): siRNA sense strand
gagcggcacggcuacauca

SEQ ID NO: 771705 - RNA, 19 nt, Homo sapiens
  misc_RNA (1)...(19): siRNA sense strand
ccaagaagacccgugugaa

SEQ ID NO: 771706 - RNA, 19 nt, Homo sapiens
  misc_RNA (1)...(19): siRNA sense strand
aauauaaggcaaagaggaa

SEQ ID NO: 771707 - RNA, 19 nt, Homo sapiens
  misc_RNA (1)...(19): siRNA sense strand
ccgcaaagugggucucauu

SEQ ID NO: 771708 - RNA, 19 nt, Homo sapiens
  misc_RNA (1)...(19): siRNA sense strand
gaauugacaaacccaucuu

SEQ ID NO: 771709 - RNA, 19 nt, Homo sapiens
  misc_RNA (1)...(19): siRNA sense strand
caagaaggcccagcucaac

SEQ ID NO: 771710 - RNA, 19 nt, Homo sapiens
  misc_RNA (1)...(19): siRNA sense strand
ccaccguuaucucccacaa

SEQ ID NO: 771711 - RNA, 19 nt, Homo sapiens
  misc_RNA (1)...(19): siRNA sense strand
gaagcggacggagcuguuc

SEQ ID NO: 771712 - RNA, 19 nt, Homo sapiens
  misc_RNA (1)...(19): siRNA sense strand
gcuggagguggccgaauug

SEQ ID NO: 771713 - RNA, 19 nt, Homo sapiens
  misc_RNA (1)...(19): siRNA sense strand
gauccguaucgguuuaaga

SEQ ID NO: 771714 - RNA, 19 nt, Homo sapiens
  misc_RNA (1)...(19): siRNA sense strand
caucaagggcaucgucaag

SEQ ID NO: 771715 - RNA, 19 nt, Homo sapiens
  misc_RNA (1)...(19): siRNA sense strand
caccaugccugaggguaca

SEQ ID NO: 771716 - RNA, 19 nt, Homo sapiens
  misc_RNA (1)...(19): siRNA sense strand
cgaauugacaaacccaucu

SEQ ID NO: 771717 - RNA, 19 nt, Homo sapiens
  misc_RNA (1)...(19): siRNA sense strand
ggacggagcuguucauugc

SEQ ID NO: 771718 - RNA, 19 nt, Homo sapiens
  misc_RNA (1)...(19): siRNA sense strand
gaacugcuggccacgagua

SEQ ID NO: 771719 - RNA, 19 nt, Homo sapiens
  misc_RNA (1)...(19): siRNA sense strand
ccaagacugugcaggagaa

SEQ ID NO: 771720 - RNA, 19 nt, Homo sapiens
  misc_RNA (1)...(19): siRNA sense strand
gcaagaaggcccagcucaa

SEQ ID NO: 771721 - RNA, 19 nt, Homo sapiens
  misc_RNA (1)...(19): siRNA sense strand
gaacuaugccaccguuauc

SEQ ID NO: 771722 - RNA, 19 nt, Homo sapiens
  misc_RNA (1)...(19): siRNA sense strand
ggagguggccgaauugaca

SEQ ID NO: 771723 - RNA, 19 nt, Homo sapiens
  misc_RNA (1)...(19): siRNA sense strand
ggaacuaugccaccguuau

SEQ ID NO: 771724 - RNA, 19 nt, Homo sapiens
  misc_RNA (1)...(19): siRNA sense strand
ucaagggcaucgucaagga

SEQ ID NO: 771725 - RNA, 19 nt, Homo sapiens
  misc_RNA (1)...(19): siRNA sense strand
caaagugggucucauugcu

SEQ ID NO: 771726 - RNA, 19 nt, Homo sapiens
  misc_RNA (1)...(19): siRNA sense strand
caagaagacccgugugaag

SEQ ID NO: 771727 - RNA, 19 nt, Homo sapiens
  misc_RNA (1)...(19): siRNA sense strand
cgggauccguaucgguuua

SEQ ID NO: 771728 - RNA, 19 nt, Homo sapiens
  misc_RNA (1)...(19): siRNA sense strand
ugacaaacccaucuugaag

SEQ ID NO: 771729 - RNA, 19 nt, Homo sapiens
  misc_RNA (1)...(19): siRNA sense strand
gcacgugaagcaccguaaa

SEQ ID NO: 771730 - RNA, 19 nt, Homo sapiens
  misc_RNA (1)...(19): siRNA sense strand
ggcuggagguggccgaauu

SEQ ID NO: 771731 - RNA, 19 nt, Homo sapiens
  misc_RNA (1)...(19): siRNA sense strand
gaaggcccagcucaacauu

SEQ ID NO: 771732 - RNA, 19 nt, Homo sapiens
  misc_RNA (1)...(19): siRNA sense strand
gagcggcacggcuacauca

SEQ ID NO: 771733 - RNA, 19 nt, Homo sapiens
  misc_RNA (1)...(19): siRNA sense strand
ccaagaagacccgugugaa

SEQ ID NO: 771734 - RNA, 19 nt, Homo sapiens
  misc_RNA (1)...(19): siRNA sense strand
aauauaaggcaaagaggaa

SEQ ID NO: 771735 - RNA, 19 nt, Homo sapiens
  misc_RNA (1)...(19): siRNA sense strand
ccgcaaagugggucucauu

SEQ ID NO: 771736 - RNA, 19 nt, Homo sapiens
  misc_RNA (1)...(19): siRNA sense strand
gaauugacaaacccaucuu

SEQ ID NO: 771737 - RNA, 19 nt, Homo sapiens
  misc_RNA (1)...(19): siRNA sense strand
caagaaggcccagcucaac

SEQ ID NO: 771738 - RNA, 19 nt, Homo sapiens
  misc_RNA (1)...(19): siRNA sense strand
ccaccguuaucucccacaa

SEQ ID NO: 771739 - RNA, 19 nt, Homo sapiens
  misc_RNA (1)...(19): siRNA sense strand
gaagcggacggagcuguuc

SEQ ID NO: 771740 - RNA, 19 nt, Homo sapiens
  misc_RNA (1)...(19): siRNA sense strand
gcuggagguggccgaauug

SEQ ID NO: 771741 - RNA, 19 nt, Homo sapiens
  misc_RNA (1)...(19): siRNA sense strand
gauccguaucgguuuaaga

SEQ ID NO: 771742 - RNA, 19 nt, Homo sapiens
  misc_RNA (1)...(19): siRNA sense strand
caucaagggcaucgucaag

SEQ ID NO: 771743 - RNA, 19 nt, Homo sapiens
  misc_RNA (1)...(19): siRNA sense strand
caccaugccugaggguaca

SEQ ID NO: 771744 - RNA, 19 nt, Homo sapiens
  misc_RNA (1)...(19): siRNA sense strand
cgaauugacaaacccaucu

SEQ ID NO: 771745 - RNA, 19 nt, Homo sapiens
  misc_RNA (1)...(19): siRNA sense strand
gcagaaagcagucuuccaa

SEQ ID NO: 771746 - RNA, 19 nt, Homo sapiens
  misc_RNA (1)...(19): siRNA sense strand
gaaagcagucuuccaaaca

SEQ ID NO: 771747 - RNA, 19 nt, Homo sapiens
  misc_RNA (1)...(19): siRNA sense strand
caagacggauggcguuugu

SEQ ID NO: 771748 - RNA, 19 nt, Homo sapiens
  misc_RNA (1)...(19): siRNA sense strand
cagaaugucuugagaaucc

SEQ ID NO: 771749 - RNA, 19 nt, Homo sapiens
  misc_RNA (1)...(19): siRNA sense strand
ggucuuucuucccugauuu

SEQ ID NO: 771750 - RNA, 19 nt, Homo sapiens
  misc_RNA (1)...(19): siRNA sense strand
caagcccucugaaacaguu

SEQ ID NO: 771751 - RNA, 19 nt, Homo sapiens
  misc_RNA (1)...(19): siRNA sense strand
ggauggcguuugugaaugg

SEQ ID NO: 771752 - RNA, 19 nt, Homo sapiens
  misc_RNA (1)...(19): siRNA sense strand
caagagagaccuucuacag

SEQ ID NO: 771753 - RNA, 19 nt, Homo sapiens
  misc_RNA (1)...(19): siRNA sense strand
gaucaagagagaccuucua

SEQ ID NO: 771754 - RNA, 19 nt, Homo sapiens
  misc_RNA (1)...(19): siRNA sense strand
gaacauuuccaaggccauu

SEQ ID NO: 771755 - RNA, 19 nt, Homo sapiens
  misc_RNA (1)...(19): siRNA sense strand
gagagaccuucuacaggau

SEQ ID NO: 771756 - RNA, 19 nt, Homo sapiens
  misc_RNA (1)...(19): siRNA sense strand
ccucaagucuggccucaag

SEQ ID NO: 771757 - RNA, 19 nt, Homo sapiens
  misc_RNA (1)...(19): siRNA sense strand
gaccaauccuccuguacca

SEQ ID NO: 771758 - RNA, 19 nt, Homo sapiens
  misc_RNA (1)...(19): siRNA sense strand
gaccaagacgcacuucuca

SEQ ID NO: 771759 - RNA, 19 nt, Homo sapiens
  misc_RNA (1)...(19): siRNA sense strand
aaagcagucuuccaaacau

SEQ ID NO: 771760 - RNA, 19 nt, Homo sapiens
  misc_RNA (1)...(19): siRNA sense strand
cggcaccggugaacauuuc

SEQ ID NO: 771761 - RNA, 19 nt, Homo sapiens
  misc_RNA (1)...(19): siRNA sense strand
uaucuaaacagcugcauca

SEQ ID NO: 771762 - RNA, 19 nt, Homo sapiens
  misc_RNA (1)...(19): siRNA sense strand
agaaagcagucuuccaaac

SEQ ID NO: 771763 - RNA, 19 nt, Homo sapiens
  misc_RNA (1)...(19): siRNA sense strand
ggugcuggguaacauccua

SEQ ID NO: 771764 - RNA, 19 nt, Homo sapiens
  misc_RNA (1)...(19): siRNA sense strand
ccguggaucugccaggauu

SEQ ID NO: 771765 - RNA, 19 nt, Homo sapiens
  misc_RNA (1)...(19): siRNA sense strand
ccaagacgcacuucucagu

SEQ ID NO: 771766 - RNA, 19 nt, Homo sapiens
  misc_RNA (1)...(19): siRNA sense strand
gcaucaaccccaucauaua

SEQ ID NO: 771767 - RNA, 19 nt, Homo sapiens
  misc_RNA (1)...(19): siRNA sense strand
cagaaagcagucuuccaaa

SEQ ID NO: 771768 - RNA, 19 nt, Homo sapiens
  misc_RNA (1)...(19): siRNA sense strand
agacggauggcguuuguga

SEQ ID NO: 771769 - RNA, 19 nt, Homo sapiens
  misc_RNA (1)...(19): siRNA sense strand
gaagaaagcggccaaaacg

SEQ ID NO: 771770 - RNA, 19 nt, Homo sapiens
  misc_RNA (1)...(19): siRNA sense strand
gggucuuucuucccugauu

SEQ ID NO: 771771 - RNA, 19 nt, Homo sapiens
  misc_RNA (1)...(19): siRNA sense strand
ucucagcgcugggcuccuu

SEQ ID NO: 771772 - RNA, 19 nt, Homo sapiens
  misc_RNA (1)...(19): siRNA sense strand
ggagaagaaagcggccaaa

SEQ ID NO: 771773 - RNA, 19 nt, Homo sapiens
  misc_RNA (1)...(19): siRNA sense strand
uuucuucccugauuucaag

SEQ ID NO: 771774 - RNA, 19 nt, Homo sapiens
  misc_RNA (1)...(19): siRNA sense strand
gcccuucuccgccaucuuc

SEQ ID NO: 771775 - RNA, 19 nt, Homo sapiens
  misc_RNA (1)...(19): siRNA sense strand
gcacuacuacaucgucaac

SEQ ID NO: 771776 - RNA, 19 nt, Homo sapiens
  misc_RNA (1)...(19): siRNA sense strand
uucagaaugucuugagaau

SEQ ID NO: 771777 - RNA, 19 nt, Homo sapiens
  misc_RNA (1)...(19): siRNA sense strand
cccgugggaucaagagaga

SEQ ID NO: 771778 - RNA, 19 nt, Homo sapiens
  misc_RNA (1)...(19): siRNA sense strand
gaucugccaggauuacagu

SEQ ID NO: 771779 - RNA, 19 nt, Homo sapiens
  misc_RNA (1)...(19): siRNA sense strand
aagcagucuuccaaacaug

SEQ ID NO: 771780 - RNA, 19 nt, Homo sapiens
  misc_RNA (1)...(19): siRNA sense strand
uggcguuugugaauggaaa

SEQ ID NO: 771781 - RNA, 19 nt, Homo sapiens
  misc_RNA (1)...(19): siRNA sense strand
uggcucggauaucuaaaca

SEQ ID NO: 771782 - RNA, 19 nt, Homo sapiens
  misc_RNA (1)...(19): siRNA sense strand
cggauggcguuugugaaug

SEQ ID NO: 771783 - RNA, 19 nt, Homo sapiens
  misc_RNA (1)...(19): siRNA sense strand
cuggguaacauccuaguga

SEQ ID NO: 771784 - RNA, 19 nt, Homo sapiens
  misc_RNA (1)...(19): siRNA sense strand
gcagaaagcagucuuccaa

SEQ ID NO: 771785 - RNA, 19 nt, Homo sapiens
  misc_RNA (1)...(19): siRNA sense strand
ggauuacaguguccaaaga

SEQ ID NO: 771786 - RNA, 19 nt, Homo sapiens
  misc_RNA (1)...(19): siRNA sense strand
gaaagcagucuuccaaaca

SEQ ID NO: 771787 - RNA, 19 nt, Homo sapiens
  misc_RNA (1)...(19): siRNA sense strand
caagacggauggcguuugu

SEQ ID NO: 771788 - RNA, 19 nt, Homo sapiens
  misc_RNA (1)...(19): siRNA sense strand
cagaaugucuugagaaucc

SEQ ID NO: 771789 - RNA, 19 nt, Homo sapiens
  misc_RNA (1)...(19): siRNA sense strand
ggucuuucuucccugauuu

SEQ ID NO: 771790 - RNA, 19 nt, Homo sapiens
  misc_RNA (1)...(19): siRNA sense strand
aaagaccaauccuccugua

SEQ ID NO: 771791 - RNA, 19 nt, Homo sapiens
  misc_RNA (1)...(19): siRNA sense strand
caagcccucugaaacaguu

SEQ ID NO: 771792 - RNA, 19 nt, Homo sapiens
  misc_RNA (1)...(19): siRNA sense strand
ggauggcguuugugaaugg

SEQ ID NO: 771793 - RNA, 19 nt, Homo sapiens
  misc_RNA (1)...(19): siRNA sense strand
caagagagaccuucuacag

SEQ ID NO: 771794 - RNA, 19 nt, Homo sapiens
  misc_RNA (1)...(19): siRNA sense strand
gaucaagagagaccuucua

SEQ ID NO: 771795 - RNA, 19 nt, Homo sapiens
  misc_RNA (1)...(19): siRNA sense strand
gaacauuuccaaggccauu

SEQ ID NO: 771796 - RNA, 19 nt, Homo sapiens
  misc_RNA (1)...(19): siRNA sense strand
gagagaccuucuacaggau

SEQ ID NO: 771797 - RNA, 19 nt, Homo sapiens
  misc_RNA (1)...(19): siRNA sense strand
ccucaagucuggccucaag

SEQ ID NO: 771798 - RNA, 19 nt, Homo sapiens
  misc_RNA (1)...(19): siRNA sense strand
gaccaauccuccuguacca

SEQ ID NO: 771799 - RNA, 19 nt, Homo sapiens
  misc_RNA (1)...(19): siRNA sense strand
gaccaagacgcacuucuca

SEQ ID NO: 771800 - RNA, 19 nt, Homo sapiens
  misc_RNA (1)...(19): siRNA sense strand
aaagcagucuuccaaacau

SEQ ID NO: 771801 - RNA, 19 nt, Homo sapiens
  misc_RNA (1)...(19): siRNA sense strand
cggcaccggugaacauuuc

SEQ ID NO: 771802 - RNA, 19 nt, Homo sapiens
  misc_RNA (1)...(19): siRNA sense strand
uaucuaaacagcugcauca

SEQ ID NO: 771803 - RNA, 19 nt, Homo sapiens
  misc_RNA (1)...(19): siRNA sense strand
agaaagcagucuuccaaac

SEQ ID NO: 771804 - RNA, 19 nt, Homo sapiens
  misc_RNA (1)...(19): siRNA sense strand
ggugcuggguaacauccua

SEQ ID NO: 771805 - RNA, 19 nt, Homo sapiens
  misc_RNA (1)...(19): siRNA sense strand
ccguggaucugccaggauu

SEQ ID NO: 771806 - RNA, 19 nt, Homo sapiens
  misc_RNA (1)...(19): siRNA sense strand
ccaagacgcacuucucagu

SEQ ID NO: 771807 - RNA, 19 nt, Homo sapiens
  misc_RNA (1)...(19): siRNA sense strand
gcaucaaccccaucauaua

SEQ ID NO: 771808 - RNA, 19 nt, Homo sapiens
  misc_RNA (1)...(19): siRNA sense strand
cagaaagcagucuuccaaa

SEQ ID NO: 771809 - RNA, 19 nt, Homo sapiens
  misc_RNA (1)...(19): siRNA sense strand
agacggauggcguuuguga

SEQ ID NO: 771810 - RNA, 19 nt, Homo sapiens
  misc_RNA (1)...(19): siRNA sense strand
gaagaaagcggccaaaacg

SEQ ID NO: 771811 - RNA, 19 nt, Homo sapiens
  misc_RNA (1)...(19): siRNA sense strand
gggucuuucuucccugauu

SEQ ID NO: 771812 - RNA, 19 nt, Homo sapiens
  misc_RNA (1)...(19): siRNA sense strand
ucucagcgcugggcuccuu

SEQ ID NO: 771813 - RNA, 19 nt, Homo sapiens
  misc_RNA (1)...(19): siRNA sense strand
ggagaagaaagcggccaaa

SEQ ID NO: 771814 - RNA, 19 nt, Homo sapiens
  misc_RNA (1)...(19): siRNA sense strand
uuucuucccugauuucaag

SEQ ID NO: 771815 - RNA, 19 nt, Homo sapiens
  misc_RNA (1)...(19): siRNA sense strand
gcccuucuccgccaucuuc

SEQ ID NO: 771816 - RNA, 19 nt, Homo sapiens
  misc_RNA (1)...(19): siRNA sense strand
gcacuacuacaucgucaac

SEQ ID NO: 771817 - RNA, 19 nt, Homo sapiens
  misc_RNA (1)...(19): siRNA sense strand
uucagaaugucuugagaau

SEQ ID NO: 771818 - RNA, 19 nt, Homo sapiens
  misc_RNA (1)...(19): siRNA sense strand
cccgugggaucaagagaga

SEQ ID NO: 771819 - RNA, 19 nt, Homo sapiens
  misc_RNA (1)...(19): siRNA sense strand
gaucugccaggauuacagu

SEQ ID NO: 771820 - RNA, 19 nt, Homo sapiens
  misc_RNA (1)...(19): siRNA sense strand
aagcagucuuccaaacaug

SEQ ID NO: 771821 - RNA, 19 nt, Homo sapiens
  misc_RNA (1)...(19): siRNA sense strand
uggcguuugugaauggaaa

SEQ ID NO: 771822 - RNA, 19 nt, Homo sapiens
  misc_RNA (1)...(19): siRNA sense strand
uggcucggauaucuaaaca

SEQ ID NO: 771823 - RNA, 19 nt, Homo sapiens
  misc_RNA (1)...(19): siRNA sense strand
cggauggcguuugugaaug

SEQ ID NO: 771824 - RNA, 19 nt, Homo sapiens
  misc_RNA (1)...(19): siRNA sense strand
cuggguaacauccuaguga

SEQ ID NO: 771825 - RNA, 19 nt, Homo sapiens
  misc_RNA (1)...(19): siRNA sense strand
gcagaaagcagucuuccaa

SEQ ID NO: 771826 - RNA, 19 nt, Homo sapiens
  misc_RNA (1)...(19): siRNA sense strand
ggauuacaguguccaaaga

SEQ ID NO: 771827 - RNA, 19 nt, Homo sapiens
  misc_RNA (1)...(19): siRNA sense strand
gaaagcagucuuccaaaca

SEQ ID NO: 771828 - RNA, 19 nt, Homo sapiens
  misc_RNA (1)...(19): siRNA sense strand
caagacggauggcguuugu

SEQ ID NO: 771829 - RNA, 19 nt, Homo sapiens
  misc_RNA (1)...(19): siRNA sense strand
cagaaugucuugagaaucc

SEQ ID NO: 771830 - RNA, 19 nt, Homo sapiens
  misc_RNA (1)...(19): siRNA sense strand
ggucuuucuucccugauuu

SEQ ID NO: 771831 - RNA, 19 nt, Homo sapiens
  misc_RNA (1)...(19): siRNA sense strand
aaagaccaauccuccugua

SEQ ID NO: 771832 - RNA, 19 nt, Homo sapiens
  misc_RNA (1)...(19): siRNA sense strand
caagcccucugaaacaguu

SEQ ID NO: 771833 - RNA, 19 nt, Homo sapiens
  misc_RNA (1)...(19): siRNA sense strand
ggauggcguuugugaaugg

SEQ ID NO: 771834 - RNA, 19 nt, Homo sapiens
  misc_RNA (1)...(19): siRNA sense strand
caagagagaccuucuacag

SEQ ID NO: 771835 - RNA, 19 nt, Homo sapiens
  misc_RNA (1)...(19): siRNA sense strand
gaucaagagagaccuucua

SEQ ID NO: 771836 - RNA, 19 nt, Homo sapiens
  misc_RNA (1)...(19): siRNA sense strand
gaacauuuccaaggccauu

SEQ ID NO: 771837 - RNA, 19 nt, Homo sapiens
  misc_RNA (1)...(19): siRNA sense strand
gagagaccuucuacaggau

SEQ ID NO: 771838 - RNA, 19 nt, Homo sapiens
  misc_RNA (1)...(19): siRNA sense strand
ccucaagucuggccucaag

SEQ ID NO: 771839 - RNA, 19 nt, Homo sapiens
  misc_RNA (1)...(19): siRNA sense strand
gaccaauccuccuguacca

SEQ ID NO: 771840 - RNA, 19 nt, Homo sapiens
  misc_RNA (1)...(19): siRNA sense strand
gaccaagacgcacuucuca

SEQ ID NO: 771841 - RNA, 19 nt, Homo sapiens
  misc_RNA (1)...(19): siRNA sense strand
aaagcagucuuccaaacau

SEQ ID NO: 771842 - RNA, 19 nt, Homo sapiens
  misc_RNA (1)...(19): siRNA sense strand
cggcaccggugaacauuuc

SEQ ID NO: 771843 - RNA, 19 nt, Homo sapiens
  misc_RNA (1)...(19): siRNA sense strand
uaucuaaacagcugcauca

SEQ ID NO: 771844 - RNA, 19 nt, Homo sapiens
  misc_RNA (1)...(19): siRNA sense strand
agaaagcagucuuccaaac

SEQ ID NO: 771845 - RNA, 19 nt, Homo sapiens
  misc_RNA (1)...(19): siRNA sense strand
ggugcuggguaacauccua

SEQ ID NO: 771846 - RNA, 19 nt, Homo sapiens
  misc_RNA (1)...(19): siRNA sense strand
ccguggaucugccaggauu

SEQ ID NO: 771847 - RNA, 19 nt, Homo sapiens
  misc_RNA (1)...(19): siRNA sense strand
ccaagacgcacuucucagu

SEQ ID NO: 771848 - RNA, 19 nt, Homo sapiens
  misc_RNA (1)...(19): siRNA sense strand
gcaucaaccccaucauaua

SEQ ID NO: 771849 - RNA, 19 nt, Homo sapiens
  misc_RNA (1)...(19): siRNA sense strand
cagaaagcagucuuccaaa

SEQ ID NO: 771850 - RNA, 19 nt, Homo sapiens
  misc_RNA (1)...(19): siRNA sense strand
agacggauggcguuuguga

SEQ ID NO: 771851 - RNA, 19 nt, Homo sapiens
  misc_RNA (1)...(19): siRNA sense strand
gaagaaagcggccaaaacg

SEQ ID NO: 771852 - RNA, 19 nt, Homo sapiens
  misc_RNA (1)...(19): siRNA sense strand
gggucuuucuucccugauu

SEQ ID NO: 771853 - RNA, 19 nt, Homo sapiens
  misc_RNA (1)...(19): siRNA sense strand
ucucagcgcugggcuccuu

SEQ ID NO: 771854 - RNA, 19 nt, Homo sapiens
  misc_RNA (1)...(19): siRNA sense strand
ggagaagaaagcggccaaa

SEQ ID NO: 771855 - RNA, 19 nt, Homo sapiens
  misc_RNA (1)...(19): siRNA sense strand
uuucuucccugauuucaag

SEQ ID NO: 771856 - RNA, 19 nt, Homo sapiens
  misc_RNA (1)...(19): siRNA sense strand
gcccuucuccgccaucuuc

SEQ ID NO: 771857 - RNA, 19 nt, Homo sapiens
  misc_RNA (1)...(19): siRNA sense strand
gcacuacuacaucgucaac

SEQ ID NO: 771858 - RNA, 19 nt, Homo sapiens
  misc_RNA (1)...(19): siRNA sense strand
uucagaaugucuugagaau

SEQ ID NO: 771859 - RNA, 19 nt, Homo sapiens
  misc_RNA (1)...(19): siRNA sense strand
cccgugggaucaagagaga

SEQ ID NO: 771860 - RNA, 19 nt, Homo sapiens
  misc_RNA (1)...(19): siRNA sense strand
gaucugccaggauuacagu

SEQ ID NO: 771861 - RNA, 19 nt, Homo sapiens
  misc_RNA (1)...(19): siRNA sense strand
aagcagucuuccaaacaug

SEQ ID NO: 771862 - RNA, 19 nt, Homo sapiens
  misc_RNA (1)...(19): siRNA sense strand
uggcguuugugaauggaaa

SEQ ID NO: 771863 - RNA, 19 nt, Homo sapiens
  misc_RNA (1)...(19): siRNA sense strand
uggcucggauaucuaaaca

SEQ ID NO: 771864 - RNA, 19 nt, Homo sapiens
  misc_RNA (1)...(19): siRNA sense strand
cggauggcguuugugaaug

SEQ ID NO: 771865 - RNA, 19 nt, Homo sapiens
  misc_RNA (1)...(19): siRNA sense strand
cuggguaacauccuaguga

SEQ ID NO: 771866 - RNA, 19 nt, Homo sapiens
  misc_RNA (1)...(19): siRNA sense strand
gcagaaagcagucuuccaa

SEQ ID NO: 771867 - RNA, 19 nt, Homo sapiens
  misc_RNA (1)...(19): siRNA sense strand
ggauuacaguguccaaaga

SEQ ID NO: 771868 - RNA, 19 nt, Homo sapiens
  misc_RNA (1)...(19): siRNA sense strand
gaaagcagucuuccaaaca

SEQ ID NO: 771869 - RNA, 19 nt, Homo sapiens
  misc_RNA (1)...(19): siRNA sense strand
caagacggauggcguuugu

SEQ ID NO: 771870 - RNA, 19 nt, Homo sapiens
  misc_RNA (1)...(19): siRNA sense strand
cagaaugucuugagaaucc

SEQ ID NO: 771871 - RNA, 19 nt, Homo sapiens
  misc_RNA (1)...(19): siRNA sense strand
ggucuuucuucccugauuu

SEQ ID NO: 771872 - RNA, 19 nt, Homo sapiens
  misc_RNA (1)...(19): siRNA sense strand
aaagaccaauccuccugua

SEQ ID NO: 771873 - RNA, 19 nt, Homo sapiens
  misc_RNA (1)...(19): siRNA sense strand
caagcccucugaaacaguu

SEQ ID NO: 771874 - RNA, 19 nt, Homo sapiens
  misc_RNA (1)...(19): siRNA sense strand
ggauggcguuugugaaugg

SEQ ID NO: 771875 - RNA, 19 nt, Homo sapiens
  misc_RNA (1)...(19): siRNA sense strand
caagagagaccuucuacag

SEQ ID NO: 771876 - RNA, 19 nt, Homo sapiens
  misc_RNA (1)...(19): siRNA sense strand
gaucaagagagaccuucua

SEQ ID NO: 771877 - RNA, 19 nt, Homo sapiens
  misc_RNA (1)...(19): siRNA sense strand
gaacauuuccaaggccauu

SEQ ID NO: 771878 - RNA, 19 nt, Homo sapiens
  misc_RNA (1)...(19): siRNA sense strand
gagagaccuucuacaggau

SEQ ID NO: 771879 - RNA, 19 nt, Homo sapiens
  misc_RNA (1)...(19): siRNA sense strand
ccucaagucuggccucaag

SEQ ID NO: 771880 - RNA, 19 nt, Homo sapiens
  misc_RNA (1)...(19): siRNA sense strand
gaccaauccuccuguacca

SEQ ID NO: 771881 - RNA, 19 nt, Homo sapiens
  misc_RNA (1)...(19): siRNA sense strand
gaccaagacgcacuucuca

SEQ ID NO: 771882 - RNA, 19 nt, Homo sapiens
  misc_RNA (1)...(19): siRNA sense strand
aaagcagucuuccaaacau

SEQ ID NO: 771883 - RNA, 19 nt, Homo sapiens
  misc_RNA (1)...(19): siRNA sense strand
cggcaccggugaacauuuc

SEQ ID NO: 771884 - RNA, 19 nt, Homo sapiens
  misc_RNA (1)...(19): siRNA sense strand
uaucuaaacagcugcauca

SEQ ID NO: 771885 - RNA, 19 nt, Homo sapiens
  misc_RNA (1)...(19): siRNA sense strand
agaaagcagucuuccaaac

SEQ ID NO: 771886 - RNA, 19 nt, Homo sapiens
  misc_RNA (1)...(19): siRNA sense strand
ggugcuggguaacauccua

SEQ ID NO: 771887 - RNA, 19 nt, Homo sapiens
  misc_RNA (1)...(19): siRNA sense strand
ccguggaucugccaggauu

SEQ ID NO: 771888 - RNA, 19 nt, Homo sapiens
  misc_RNA (1)...(19): siRNA sense strand
ccaagacgcacuucucagu

SEQ ID NO: 771889 - RNA, 19 nt, Homo sapiens
  misc_RNA (1)...(19): siRNA sense strand
gcaucaaccccaucauaua

SEQ ID NO: 771890 - RNA, 19 nt, Homo sapiens
  misc_RNA (1)...(19): siRNA sense strand
cagaaagcagucuuccaaa

SEQ ID NO: 771891 - RNA, 19 nt, Homo sapiens
  misc_RNA (1)...(19): siRNA sense strand
agacggauggcguuuguga

SEQ ID NO: 771892 - RNA, 19 nt, Homo sapiens
  misc_RNA (1)...(19): siRNA sense strand
gaagaaagcggccaaaacg

SEQ ID NO: 771893 - RNA, 19 nt, Homo sapiens
  misc_RNA (1)...(19): siRNA sense strand
gggucuuucuucccugauu

SEQ ID NO: 771894 - RNA, 19 nt, Homo sapiens
  misc_RNA (1)...(19): siRNA sense strand
ucucagcgcugggcuccuu

SEQ ID NO: 771895 - RNA, 19 nt, Homo sapiens
  misc_RNA (1)...(19): siRNA sense strand
ggagaagaaagcggccaaa

SEQ ID NO: 771896 - RNA, 19 nt, Homo sapiens
  misc_RNA (1)...(19): siRNA sense strand
uuucuucccugauuucaag

SEQ ID NO: 771897 - RNA, 19 nt, Homo sapiens
  misc_RNA (1)...(19): siRNA sense strand
gcccuucuccgccaucuuc

SEQ ID NO: 771898 - RNA, 19 nt, Homo sapiens
  misc_RNA (1)...(19): siRNA sense strand
gcacuacuacaucgucaac

SEQ ID NO: 771899 - RNA, 19 nt, Homo sapiens
  misc_RNA (1)...(19): siRNA sense strand
uucagaaugucuugagaau

SEQ ID NO: 771900 - RNA, 19 nt, Homo sapiens
  misc_RNA (1)...(19): siRNA sense strand
cccgugggaucaagagaga

SEQ ID NO: 771901 - RNA, 19 nt, Homo sapiens
  misc_RNA (1)...(19): siRNA sense strand
gaucugccaggauuacagu

SEQ ID NO: 771902 - RNA, 19 nt, Homo sapiens
  misc_RNA (1)...(19): siRNA sense strand
aagcagucuuccaaacaug

SEQ ID NO: 771903 - RNA, 19 nt, Homo sapiens
  misc_RNA (1)...(19): siRNA sense strand
uggcguuugugaauggaaa

SEQ ID NO: 771904 - RNA, 19 nt, Homo sapiens
  misc_RNA (1)...(19): siRNA sense strand
uggcucggauaucuaaaca

SEQ ID NO: 771905 - RNA, 19 nt, Homo sapiens
  misc_RNA (1)...(19): siRNA sense strand
cggauggcguuugugaaug

SEQ ID NO: 771906 - RNA, 19 nt, Homo sapiens
  misc_RNA (1)...(19): siRNA sense strand
cuggguaacauccuaguga

SEQ ID NO: 771907 - RNA, 19 nt, Homo sapiens
  misc_RNA (1)...(19): siRNA sense strand
gcagaaagcagucuuccaa

SEQ ID NO: 771908 - RNA, 19 nt, Homo sapiens
  misc_RNA (1)...(19): siRNA sense strand
gaaagcagucuuccaaaca

SEQ ID NO: 771909 - RNA, 19 nt, Homo sapiens
  misc_RNA (1)...(19): siRNA sense strand
caagacggauggcguuugu

SEQ ID NO: 771910 - RNA, 19 nt, Homo sapiens
  misc_RNA (1)...(19): siRNA sense strand
cagaaugucuugagaaucc

SEQ ID NO: 771911 - RNA, 19 nt, Homo sapiens
  misc_RNA (1)...(19): siRNA sense strand
ggucuuucuucccugauuu

SEQ ID NO: 771912 - RNA, 19 nt, Homo sapiens
  misc_RNA (1)...(19): siRNA sense strand
caagcccucugaaacaguu

SEQ ID NO: 771913 - RNA, 19 nt, Homo sapiens
  misc_RNA (1)...(19): siRNA sense strand
ggauggcguuugugaaugg

SEQ ID NO: 771914 - RNA, 19 nt, Homo sapiens
  misc_RNA (1)...(19): siRNA sense strand
caagagagaccuucuacag

SEQ ID NO: 771915 - RNA, 19 nt, Homo sapiens
  misc_RNA (1)...(19): siRNA sense strand
gaucaagagagaccuucua

SEQ ID NO: 771916 - RNA, 19 nt, Homo sapiens
  misc_RNA (1)...(19): siRNA sense strand
gaacauuuccaaggccauu

SEQ ID NO: 771917 - RNA, 19 nt, Homo sapiens
  misc_RNA (1)...(19): siRNA sense strand
gagagaccuucuacaggau

SEQ ID NO: 771918 - RNA, 19 nt, Homo sapiens
  misc_RNA (1)...(19): siRNA sense strand
ccucaagucuggccucaag

SEQ ID NO: 771919 - RNA, 19 nt, Homo sapiens
  misc_RNA (1)...(19): siRNA sense strand
gaccaauccuccuguacca

SEQ ID NO: 771920 - RNA, 19 nt, Homo sapiens
  misc_RNA (1)...(19): siRNA sense strand
gaccaagacgcacuucuca

SEQ ID NO: 771921 - RNA, 19 nt, Homo sapiens
  misc_RNA (1)...(19): siRNA sense strand
aaagcagucuuccaaacau

SEQ ID NO: 771922 - RNA, 19 nt, Homo sapiens
  misc_RNA (1)...(19): siRNA sense strand
cggcaccggugaacauuuc

SEQ ID NO: 771923 - RNA, 19 nt, Homo sapiens
  misc_RNA (1)...(19): siRNA sense strand
uaucuaaacagcugcauca

SEQ ID NO: 771924 - RNA, 19 nt, Homo sapiens
  misc_RNA (1)...(19): siRNA sense strand
agaaagcagucuuccaaac

SEQ ID NO: 771925 - RNA, 19 nt, Homo sapiens
  misc_RNA (1)...(19): siRNA sense strand
ggugcuggguaacauccua

SEQ ID NO: 771926 - RNA, 19 nt, Homo sapiens
  misc_RNA (1)...(19): siRNA sense strand
ccguggaucugccaggauu

SEQ ID NO: 771927 - RNA, 19 nt, Homo sapiens
  misc_RNA (1)...(19): siRNA sense strand
ccaagacgcacuucucagu

SEQ ID NO: 771928 - RNA, 19 nt, Homo sapiens
  misc_RNA (1)...(19): siRNA sense strand
gcaucaaccccaucauaua

SEQ ID NO: 771929 - RNA, 19 nt, Homo sapiens
  misc_RNA (1)...(19): siRNA sense strand
cagaaagcagucuuccaaa

SEQ ID NO: 771930 - RNA, 19 nt, Homo sapiens
  misc_RNA (1)...(19): siRNA sense strand
agacggauggcguuuguga

SEQ ID NO: 771931 - RNA, 19 nt, Homo sapiens
  misc_RNA (1)...(19): siRNA sense strand
gaagaaagcggccaaaacg

SEQ ID NO: 771932 - RNA, 19 nt, Homo sapiens
  misc_RNA (1)...(19): siRNA sense strand
gggucuuucuucccugauu

SEQ ID NO: 771933 - RNA, 19 nt, Homo sapiens
  misc_RNA (1)...(19): siRNA sense strand
ucucagcgcugggcuccuu

SEQ ID NO: 771934 - RNA, 19 nt, Homo sapiens
  misc_RNA (1)...(19): siRNA sense strand
ggagaagaaagcggccaaa

SEQ ID NO: 771935 - RNA, 19 nt, Homo sapiens
  misc_RNA (1)...(19): siRNA sense strand
uuucuucccugauuucaag

SEQ ID NO: 771936 - RNA, 19 nt, Homo sapiens
  misc_RNA (1)...(19): siRNA sense strand
gcccuucuccgccaucuuc

SEQ ID NO: 771937 - RNA, 19 nt, Homo sapiens
  misc_RNA (1)...(19): siRNA sense strand
gcacuacuacaucgucaac

SEQ ID NO: 771938 - RNA, 19 nt, Homo sapiens
  misc_RNA (1)...(19): siRNA sense strand
uucagaaugucuugagaau

SEQ ID NO: 771939 - RNA, 19 nt, Homo sapiens
  misc_RNA (1)...(19): siRNA sense strand
cccgugggaucaagagaga

SEQ ID NO: 771940 - RNA, 19 nt, Homo sapiens
  misc_RNA (1)...(19): siRNA sense strand
gaucugccaggauuacagu

SEQ ID NO: 771941 - RNA, 19 nt, Homo sapiens
  misc_RNA (1)...(19): siRNA sense strand
aagcagucuuccaaacaug

SEQ ID NO: 771942 - RNA, 19 nt, Homo sapiens
  misc_RNA (1)...(19): siRNA sense strand
uggcguuugugaauggaaa

SEQ ID NO: 771943 - RNA, 19 nt, Homo sapiens
  misc_RNA (1)...(19): siRNA sense strand
uggcucggauaucuaaaca

SEQ ID NO: 771944 - RNA, 19 nt, Homo sapiens
  misc_RNA (1)...(19): siRNA sense strand
cggauggcguuugugaaug

SEQ ID NO: 771945 - RNA, 19 nt, Homo sapiens
  misc_RNA (1)...(19): siRNA sense strand
cuggguaacauccuaguga

SEQ ID NO: 771946 - RNA, 19 nt, Homo sapiens
  misc_RNA (1)...(19): siRNA sense strand
gcagaaagcagucuuccaa

SEQ ID NO: 771947 - RNA, 19 nt, Homo sapiens
  misc_RNA (1)...(19): siRNA sense strand
ggauuacaguguccaaaga

SEQ ID NO: 771948 - RNA, 19 nt, Homo sapiens
  misc_RNA (1)...(19): siRNA sense strand
gaaagcagucuuccaaaca

SEQ ID NO: 771949 - RNA, 19 nt, Homo sapiens
  misc_RNA (1)...(19): siRNA sense strand
caagacggauggcguuugu

SEQ ID NO: 771950 - RNA, 19 nt, Homo sapiens
  misc_RNA (1)...(19): siRNA sense strand
cagaaugucuugagaaucc

SEQ ID NO: 771951 - RNA, 19 nt, Homo sapiens
  misc_RNA (1)...(19): siRNA sense strand
ggucuuucuucccugauuu

SEQ ID NO: 771952 - RNA, 19 nt, Homo sapiens
  misc_RNA (1)...(19): siRNA sense strand
aaagaccaauccuccugua

SEQ ID NO: 771953 - RNA, 19 nt, Homo sapiens
  misc_RNA (1)...(19): siRNA sense strand
caagcccucugaaacaguu

SEQ ID NO: 771954 - RNA, 19 nt, Homo sapiens
  misc_RNA (1)...(19): siRNA sense strand
ggauggcguuugugaaugg

SEQ ID NO: 771955 - RNA, 19 nt, Homo sapiens
  misc_RNA (1)...(19): siRNA sense strand
caagagagaccuucuacag

SEQ ID NO: 771956 - RNA, 19 nt, Homo sapiens
  misc_RNA (1)...(19): siRNA sense strand
gaucaagagagaccuucua

SEQ ID NO: 771957 - RNA, 19 nt, Homo sapiens
  misc_RNA (1)...(19): siRNA sense strand
gaacauuuccaaggccauu

SEQ ID NO: 771958 - RNA, 19 nt, Homo sapiens
  misc_RNA (1)...(19): siRNA sense strand
gagagaccuucuacaggau

SEQ ID NO: 771959 - RNA, 19 nt, Homo sapiens
  misc_RNA (1)...(19): siRNA sense strand
ccucaagucuggccucaag

SEQ ID NO: 771960 - RNA, 19 nt, Homo sapiens
  misc_RNA (1)...(19): siRNA sense strand
gaccaauccuccuguacca

SEQ ID NO: 771961 - RNA, 19 nt, Homo sapiens
  misc_RNA (1)...(19): siRNA sense strand
gaccaagacgcacuucuca

SEQ ID NO: 771962 - RNA, 19 nt, Homo sapiens
  misc_RNA (1)...(19): siRNA sense strand
aaagcagucuuccaaacau

SEQ ID NO: 771963 - RNA, 19 nt, Homo sapiens
  misc_RNA (1)...(19): siRNA sense strand
cggcaccggugaacauuuc

SEQ ID NO: 771964 - RNA, 19 nt, Homo sapiens
  misc_RNA (1)...(19): siRNA sense strand
uaucuaaacagcugcauca

SEQ ID NO: 771965 - RNA, 19 nt, Homo sapiens
  misc_RNA (1)...(19): siRNA sense strand
agaaagcagucuuccaaac

SEQ ID NO: 771966 - RNA, 19 nt, Homo sapiens
  misc_RNA (1)...(19): siRNA sense strand
ggugcuggguaacauccua

SEQ ID NO: 771967 - RNA, 19 nt, Homo sapiens
  misc_RNA (1)...(19): siRNA sense strand
ccguggaucugccaggauu

SEQ ID NO: 771968 - RNA, 19 nt, Homo sapiens
  misc_RNA (1)...(19): siRNA sense strand
ccaagacgcacuucucagu

SEQ ID NO: 771969 - RNA, 19 nt, Homo sapiens
  misc_RNA (1)...(19): siRNA sense strand
gcaucaaccccaucauaua

SEQ ID NO: 771970 - RNA, 19 nt, Homo sapiens
  misc_RNA (1)...(19): siRNA sense strand
cagaaagcagucuuccaaa

SEQ ID NO: 771971 - RNA, 19 nt, Homo sapiens
  misc_RNA (1)...(19): siRNA sense strand
agacggauggcguuuguga

SEQ ID NO: 771972 - RNA, 19 nt, Homo sapiens
  misc_RNA (1)...(19): siRNA sense strand
gaagaaagcggccaaaacg

SEQ ID NO: 771973 - RNA, 19 nt, Homo sapiens
  misc_RNA (1)...(19): siRNA sense strand
gggucuuucuucccugauu

SEQ ID NO: 771974 - RNA, 19 nt, Homo sapiens
  misc_RNA (1)...(19): siRNA sense strand
ucucagcgcugggcuccuu

SEQ ID NO: 771975 - RNA, 19 nt, Homo sapiens
  misc_RNA (1)...(19): siRNA sense strand
ggagaagaaagcggccaaa

SEQ ID NO: 771976 - RNA, 19 nt, Homo sapiens
  misc_RNA (1)...(19): siRNA sense strand
uuucuucccugauuucaag

SEQ ID NO: 771977 - RNA, 19 nt, Homo sapiens
  misc_RNA (1)...(19): siRNA sense strand
gcccuucuccgccaucuuc

SEQ ID NO: 771978 - RNA, 19 nt, Homo sapiens
  misc_RNA (1)...(19): siRNA sense strand
gcacuacuacaucgucaac

SEQ ID NO: 771979 - RNA, 19 nt, Homo sapiens
  misc_RNA (1)...(19): siRNA sense strand
uucagaaugucuugagaau

SEQ ID NO: 771980 - RNA, 19 nt, Homo sapiens
  misc_RNA (1)...(19): siRNA sense strand
cccgugggaucaagagaga

SEQ ID NO: 771981 - RNA, 19 nt, Homo sapiens
  misc_RNA (1)...(19): siRNA sense strand
gaucugccaggauuacagu

SEQ ID NO: 771982 - RNA, 19 nt, Homo sapiens
  misc_RNA (1)...(19): siRNA sense strand
aagcagucuuccaaacaug

SEQ ID NO: 771983 - RNA, 19 nt, Homo sapiens
  misc_RNA (1)...(19): siRNA sense strand
uggcguuugugaauggaaa

SEQ ID NO: 771984 - RNA, 19 nt, Homo sapiens
  misc_RNA (1)...(19): siRNA sense strand
uggcucggauaucuaaaca

SEQ ID NO: 771985 - RNA, 19 nt, Homo sapiens
  misc_RNA (1)...(19): siRNA sense strand
cggauggcguuugugaaug

SEQ ID NO: 771986 - RNA, 19 nt, Homo sapiens
  misc_RNA (1)...(19): siRNA sense strand
cuggguaacauccuaguga

SEQ ID NO: 771987 - RNA, 19 nt, Homo sapiens
  misc_RNA (1)...(19): siRNA sense strand
gcagaaagcagucuuccaa

SEQ ID NO: 771988 - RNA, 19 nt, Homo sapiens
  misc_RNA (1)...(19): siRNA sense strand
ggauuacaguguccaaaga

SEQ ID NO: 771989 - RNA, 19 nt, Homo sapiens
  misc_RNA (1)...(19): siRNA sense strand
gaaagcagucuuccaaaca

SEQ ID NO: 771990 - RNA, 19 nt, Homo sapiens
  misc_RNA (1)...(19): siRNA sense strand
caagacggauggcguuugu

SEQ ID NO: 771991 - RNA, 19 nt, Homo sapiens
  misc_RNA (1)...(19): siRNA sense strand
cagaaugucuugagaaucc

SEQ ID NO: 771992 - RNA, 19 nt, Homo sapiens
  misc_RNA (1)...(19): siRNA sense strand
ggucuuucuucccugauuu

SEQ ID NO: 771993 - RNA, 19 nt, Homo sapiens
  misc_RNA (1)...(19): siRNA sense strand
aaagaccaauccuccugua

SEQ ID NO: 771994 - RNA, 19 nt, Homo sapiens
  misc_RNA (1)...(19): siRNA sense strand
caagcccucugaaacaguu

SEQ ID NO: 771995 - RNA, 19 nt, Homo sapiens
  misc_RNA (1)...(19): siRNA sense strand
ggauggcguuugugaaugg

SEQ ID NO: 771996 - RNA, 19 nt, Homo sapiens
  misc_RNA (1)...(19): siRNA sense strand
caagagagaccuucuacag

SEQ ID NO: 771997 - RNA, 19 nt, Homo sapiens
  misc_RNA (1)...(19): siRNA sense strand
gaucaagagagaccuucua

SEQ ID NO: 771998 - RNA, 19 nt, Homo sapiens
  misc_RNA (1)...(19): siRNA sense strand
gaacauuuccaaggccauu

SEQ ID NO: 771999 - RNA, 19 nt, Homo sapiens
  misc_RNA (1)...(19): siRNA sense strand
gagagaccuucuacaggau

SEQ ID NO: 772000 - RNA, 19 nt, Homo sapiens
  misc_RNA (1)...(19): siRNA sense strand
ccucaagucuggccucaag

SEQ ID NO: 772001 - RNA, 19 nt, Homo sapiens
  misc_RNA (1)...(19): siRNA sense strand
gaccaauccuccuguacca

SEQ ID NO: 772002 - RNA, 19 nt, Homo sapiens
  misc_RNA (1)...(19): siRNA sense strand
gaccaagacgcacuucuca

SEQ ID NO: 772003 - RNA, 19 nt, Homo sapiens
  misc_RNA (1)...(19): siRNA sense strand
aaagcagucuuccaaacau

SEQ ID NO: 772004 - RNA, 19 nt, Homo sapiens
  misc_RNA (1)...(19): siRNA sense strand
cggcaccggugaacauuuc

SEQ ID NO: 772005 - RNA, 19 nt, Homo sapiens
  misc_RNA (1)...(19): siRNA sense strand
uaucuaaacagcugcauca

SEQ ID NO: 772006 - RNA, 19 nt, Homo sapiens
  misc_RNA (1)...(19): siRNA sense strand
agaaagcagucuuccaaac

SEQ ID NO: 772007 - RNA, 19 nt, Homo sapiens
  misc_RNA (1)...(19): siRNA sense strand
ggugcuggguaacauccua

SEQ ID NO: 772008 - RNA, 19 nt, Homo sapiens
  misc_RNA (1)...(19): siRNA sense strand
ccguggaucugccaggauu

SEQ ID NO: 772009 - RNA, 19 nt, Homo sapiens
  misc_RNA (1)...(19): siRNA sense strand
ccaagacgcacuucucagu

SEQ ID NO: 772010 - RNA, 19 nt, Homo sapiens
  misc_RNA (1)...(19): siRNA sense strand
gcaucaaccccaucauaua

SEQ ID NO: 772011 - RNA, 19 nt, Homo sapiens
  misc_RNA (1)...(19): siRNA sense strand
cagaaagcagucuuccaaa

SEQ ID NO: 772012 - RNA, 19 nt, Homo sapiens
  misc_RNA (1)...(19): siRNA sense strand
agacggauggcguuuguga

SEQ ID NO: 772013 - RNA, 19 nt, Homo sapiens
  misc_RNA (1)...(19): siRNA sense strand
gaagaaagcggccaaaacg

SEQ ID NO: 772014 - RNA, 19 nt, Homo sapiens
  misc_RNA (1)...(19): siRNA sense strand
gggucuuucuucccugauu

SEQ ID NO: 772015 - RNA, 19 nt, Homo sapiens
  misc_RNA (1)...(19): siRNA sense strand
ucucagcgcugggcuccuu

SEQ ID NO: 772016 - RNA, 19 nt, Homo sapiens
  misc_RNA (1)...(19): siRNA sense strand
ggagaagaaagcggccaaa

SEQ ID NO: 772017 - RNA, 19 nt, Homo sapiens
  misc_RNA (1)...(19): siRNA sense strand
uuucuucccugauuucaag

SEQ ID NO: 772018 - RNA, 19 nt, Homo sapiens
  misc_RNA (1)...(19): siRNA sense strand
gcccuucuccgccaucuuc

SEQ ID NO: 772019 - RNA, 19 nt, Homo sapiens
  misc_RNA (1)...(19): siRNA sense strand
gcacuacuacaucgucaac

SEQ ID NO: 772020 - RNA, 19 nt, Homo sapiens
  misc_RNA (1)...(19): siRNA sense strand
uucagaaugucuugagaau

SEQ ID NO: 772021 - RNA, 19 nt, Homo sapiens
  misc_RNA (1)...(19): siRNA sense strand
cccgugggaucaagagaga

SEQ ID NO: 772022 - RNA, 19 nt, Homo sapiens
  misc_RNA (1)...(19): siRNA sense strand
gaucugccaggauuacagu

SEQ ID NO: 772023 - RNA, 19 nt, Homo sapiens
  misc_RNA (1)...(19): siRNA sense strand
aagcagucuuccaaacaug

SEQ ID NO: 772024 - RNA, 19 nt, Homo sapiens
  misc_RNA (1)...(19): siRNA sense strand
uggcguuugugaauggaaa

SEQ ID NO: 772025 - RNA, 19 nt, Homo sapiens
  misc_RNA (1)...(19): siRNA sense strand
uggcucggauaucuaaaca

SEQ ID NO: 772026 - RNA, 19 nt, Homo sapiens
  misc_RNA (1)...(19): siRNA sense strand
cggauggcguuugugaaug

SEQ ID NO: 772027 - RNA, 19 nt, Homo sapiens
  misc_RNA (1)...(19): siRNA sense strand
cuggguaacauccuaguga

SEQ ID NO: 772028 - RNA, 19 nt, Homo sapiens
  misc_RNA (1)...(19): siRNA sense strand
gcagaaagcagucuuccaa

SEQ ID NO: 772029 - RNA, 19 nt, Homo sapiens
  misc_RNA (1)...(19): siRNA sense strand
ggauuacaguguccaaaga

SEQ ID NO: 772030 - RNA, 19 nt, Homo sapiens
  misc_RNA (1)...(19): siRNA sense strand
gaaagcagucuuccaaaca

SEQ ID NO: 772031 - RNA, 19 nt, Homo sapiens
  misc_RNA (1)...(19): siRNA sense strand
caagacggauggcguuugu

SEQ ID NO: 772032 - RNA, 19 nt, Homo sapiens
  misc_RNA (1)...(19): siRNA sense strand
cagaaugucuugagaaucc

SEQ ID NO: 772033 - RNA, 19 nt, Homo sapiens
  misc_RNA (1)...(19): siRNA sense strand
ggucuuucuucccugauuu

SEQ ID NO: 772034 - RNA, 19 nt, Homo sapiens
  misc_RNA (1)...(19): siRNA sense strand
aaagaccaauccuccugua

SEQ ID NO: 772035 - RNA, 19 nt, Homo sapiens
  misc_RNA (1)...(19): siRNA sense strand
caagcccucugaaacaguu

SEQ ID NO: 772036 - RNA, 19 nt, Homo sapiens
  misc_RNA (1)...(19): siRNA sense strand
ggauggcguuugugaaugg

SEQ ID NO: 772037 - RNA, 19 nt, Homo sapiens
  misc_RNA (1)...(19): siRNA sense strand
caagagagaccuucuacag

SEQ ID NO: 772038 - RNA, 19 nt, Homo sapiens
  misc_RNA (1)...(19): siRNA sense strand
gaucaagagagaccuucua

SEQ ID NO: 772039 - RNA, 19 nt, Homo sapiens
  misc_RNA (1)...(19): siRNA sense strand
gaacauuuccaaggccauu

SEQ ID NO: 772040 - RNA, 19 nt, Homo sapiens
  misc_RNA (1)...(19): siRNA sense strand
gagagaccuucuacaggau

SEQ ID NO: 772041 - RNA, 19 nt, Homo sapiens
  misc_RNA (1)...(19): siRNA sense strand
ccucaagucuggccucaag

SEQ ID NO: 772042 - RNA, 19 nt, Homo sapiens
  misc_RNA (1)...(19): siRNA sense strand
gaccaauccuccuguacca

SEQ ID NO: 772043 - RNA, 19 nt, Homo sapiens
  misc_RNA (1)...(19): siRNA sense strand
gaccaagacgcacuucuca

SEQ ID NO: 772044 - RNA, 19 nt, Homo sapiens
  misc_RNA (1)...(19): siRNA sense strand
aaagcagucuuccaaacau

SEQ ID NO: 772045 - RNA, 19 nt, Homo sapiens
  misc_RNA (1)...(19): siRNA sense strand
cggcaccggugaacauuuc

SEQ ID NO: 772046 - RNA, 19 nt, Homo sapiens
  misc_RNA (1)...(19): siRNA sense strand
uaucuaaacagcugcauca

SEQ ID NO: 772047 - RNA, 19 nt, Homo sapiens
  misc_RNA (1)...(19): siRNA sense strand
agaaagcagucuuccaaac

SEQ ID NO: 772048 - RNA, 19 nt, Homo sapiens
  misc_RNA (1)...(19): siRNA sense strand
ggugcuggguaacauccua

SEQ ID NO: 772049 - RNA, 19 nt, Homo sapiens
  misc_RNA (1)...(19): siRNA sense strand
ccguggaucugccaggauu

SEQ ID NO: 772050 - RNA, 19 nt, Homo sapiens
  misc_RNA (1)...(19): siRNA sense strand
ccaagacgcacuucucagu

SEQ ID NO: 772051 - RNA, 19 nt, Homo sapiens
  misc_RNA (1)...(19): siRNA sense strand
gcaucaaccccaucauaua

SEQ ID NO: 772052 - RNA, 19 nt, Homo sapiens
  misc_RNA (1)...(19): siRNA sense strand
cagaaagcagucuuccaaa

SEQ ID NO: 772053 - RNA, 19 nt, Homo sapiens
  misc_RNA (1)...(19): siRNA sense strand
agacggauggcguuuguga

SEQ ID NO: 772054 - RNA, 19 nt, Homo sapiens
  misc_RNA (1)...(19): siRNA sense strand
gaagaaagcggccaaaacg

SEQ ID NO: 772055 - RNA, 19 nt, Homo sapiens
  misc_RNA (1)...(19): siRNA sense strand
gggucuuucuucccugauu

SEQ ID NO: 772056 - RNA, 19 nt, Homo sapiens
  misc_RNA (1)...(19): siRNA sense strand
ucucagcgcugggcuccuu

SEQ ID NO: 772057 - RNA, 19 nt, Homo sapiens
  misc_RNA (1)...(19): siRNA sense strand
ggagaagaaagcggccaaa

SEQ ID NO: 772058 - RNA, 19 nt, Homo sapiens
  misc_RNA (1)...(19): siRNA sense strand
uuucuucccugauuucaag

SEQ ID NO: 772059 - RNA, 19 nt, Homo sapiens
  misc_RNA (1)...(19): siRNA sense strand
gcccuucuccgccaucuuc

SEQ ID NO: 772060 - RNA, 19 nt, Homo sapiens
  misc_RNA (1)...(19): siRNA sense strand
gcacuacuacaucgucaac

SEQ ID NO: 772061 - RNA, 19 nt, Homo sapiens
  misc_RNA (1)...(19): siRNA sense strand
uucagaaugucuugagaau

SEQ ID NO: 772062 - RNA, 19 nt, Homo sapiens
  misc_RNA (1)...(19): siRNA sense strand
cccgugggaucaagagaga

SEQ ID NO: 772063 - RNA, 19 nt, Homo sapiens
  misc_RNA (1)...(19): siRNA sense strand
gaucugccaggauuacagu

SEQ ID NO: 772064 - RNA, 19 nt, Homo sapiens
  misc_RNA (1)...(19): siRNA sense strand
aagcagucuuccaaacaug

SEQ ID NO: 772065 - RNA, 19 nt, Homo sapiens
  misc_RNA (1)...(19): siRNA sense strand
uggcguuugugaauggaaa

SEQ ID NO: 772066 - RNA, 19 nt, Homo sapiens
  misc_RNA (1)...(19): siRNA sense strand
uggcucggauaucuaaaca

SEQ ID NO: 772067 - RNA, 19 nt, Homo sapiens
  misc_RNA (1)...(19): siRNA sense strand
cggauggcguuugugaaug

SEQ ID NO: 772068 - RNA, 19 nt, Homo sapiens
  misc_RNA (1)...(19): siRNA sense strand
cuggguaacauccuaguga

SEQ ID NO: 772069 - RNA, 19 nt, Homo sapiens
  misc_RNA (1)...(19): siRNA sense strand
gcagaaagcagucuuccaa

SEQ ID NO: 772070 - RNA, 19 nt, Homo sapiens
  misc_RNA (1)...(19): siRNA sense strand
gaaagcagucuuccaaaca

SEQ ID NO: 772071 - RNA, 19 nt, Homo sapiens
  misc_RNA (1)...(19): siRNA sense strand
caagacggauggcguuugu

SEQ ID NO: 772072 - RNA, 19 nt, Homo sapiens
  misc_RNA (1)...(19): siRNA sense strand
cagaaugucuugagaaucc

SEQ ID NO: 772073 - RNA, 19 nt, Homo sapiens
  misc_RNA (1)...(19): siRNA sense strand
ggucuuucuucccugauuu

SEQ ID NO: 772074 - RNA, 19 nt, Homo sapiens
  misc_RNA (1)...(19): siRNA sense strand
caagcccucugaaacaguu

SEQ ID NO: 772075 - RNA, 19 nt, Homo sapiens
  misc_RNA (1)...(19): siRNA sense strand
ggauggcguuugugaaugg

SEQ ID NO: 772076 - RNA, 19 nt, Homo sapiens
  misc_RNA (1)...(19): siRNA sense strand
caagagagaccuucuacag

SEQ ID NO: 772077 - RNA, 19 nt, Homo sapiens
  misc_RNA (1)...(19): siRNA sense strand
gaucaagagagaccuucua

SEQ ID NO: 772078 - RNA, 19 nt, Homo sapiens
  misc_RNA (1)...(19): siRNA sense strand
gaacauuuccaaggccauu

SEQ ID NO: 772079 - RNA, 19 nt, Homo sapiens
  misc_RNA (1)...(19): siRNA sense strand
gagagaccuucuacaggau

SEQ ID NO: 772080 - RNA, 19 nt, Homo sapiens
  misc_RNA (1)...(19): siRNA sense strand
ccucaagucuggccucaag

SEQ ID NO: 772081 - RNA, 19 nt, Homo sapiens
  misc_RNA (1)...(19): siRNA sense strand
gaccaauccuccuguacca

SEQ ID NO: 772082 - RNA, 19 nt, Homo sapiens
  misc_RNA (1)...(19): siRNA sense strand
gaccaagacgcacuucuca

SEQ ID NO: 772083 - RNA, 19 nt, Homo sapiens
  misc_RNA (1)...(19): siRNA sense strand
aaagcagucuuccaaacau

SEQ ID NO: 772084 - RNA, 19 nt, Homo sapiens
  misc_RNA (1)...(19): siRNA sense strand
cggcaccggugaacauuuc

SEQ ID NO: 772085 - RNA, 19 nt, Homo sapiens
  misc_RNA (1)...(19): siRNA sense strand
uaucuaaacagcugcauca

SEQ ID NO: 772086 - RNA, 19 nt, Homo sapiens
  misc_RNA (1)...(19): siRNA sense strand
agaaagcagucuuccaaac

SEQ ID NO: 772087 - RNA, 19 nt, Homo sapiens
  misc_RNA (1)...(19): siRNA sense strand
ggugcuggguaacauccua

SEQ ID NO: 772088 - RNA, 19 nt, Homo sapiens
  misc_RNA (1)...(19): siRNA sense strand
ccguggaucugccaggauu

SEQ ID NO: 772089 - RNA, 19 nt, Homo sapiens
  misc_RNA (1)...(19): siRNA sense strand
ccaagacgcacuucucagu

SEQ ID NO: 772090 - RNA, 19 nt, Homo sapiens
  misc_RNA (1)...(19): siRNA sense strand
gcaucaaccccaucauaua

SEQ ID NO: 772091 - RNA, 19 nt, Homo sapiens
  misc_RNA (1)...(19): siRNA sense strand
cagaaagcagucuuccaaa

SEQ ID NO: 772092 - RNA, 19 nt, Homo sapiens
  misc_RNA (1)...(19): siRNA sense strand
agacggauggcguuuguga

SEQ ID NO: 772093 - RNA, 19 nt, Homo sapiens
  misc_RNA (1)...(19): siRNA sense strand
gaagaaagcggccaaaacg

SEQ ID NO: 772094 - RNA, 19 nt, Homo sapiens
  misc_RNA (1)...(19): siRNA sense strand
gggucuuucuucccugauu

SEQ ID NO: 772095 - RNA, 19 nt, Homo sapiens
  misc_RNA (1)...(19): siRNA sense strand
ucucagcgcugggcuccuu

SEQ ID NO: 772096 - RNA, 19 nt, Homo sapiens
  misc_RNA (1)...(19): siRNA sense strand
ggagaagaaagcggccaaa

SEQ ID NO: 772097 - RNA, 19 nt, Homo sapiens
  misc_RNA (1)...(19): siRNA sense strand
uuucuucccugauuucaag

SEQ ID NO: 772098 - RNA, 19 nt, Homo sapiens
  misc_RNA (1)...(19): siRNA sense strand
gcccuucuccgccaucuuc

SEQ ID NO: 772099 - RNA, 19 nt, Homo sapiens
  misc_RNA (1)...(19): siRNA sense strand
gcacuacuacaucgucaac

SEQ ID NO: 772100 - RNA, 19 nt, Homo sapiens
  misc_RNA (1)...(19): siRNA sense strand
uucagaaugucuugagaau

SEQ ID NO: 772101 - RNA, 19 nt, Homo sapiens
  misc_RNA (1)...(19): siRNA sense strand
cccgugggaucaagagaga

SEQ ID NO: 772102 - RNA, 19 nt, Homo sapiens
  misc_RNA (1)...(19): siRNA sense strand
gaucugccaggauuacagu

SEQ ID NO: 772103 - RNA, 19 nt, Homo sapiens
  misc_RNA (1)...(19): siRNA sense strand
aagcagucuuccaaacaug

SEQ ID NO: 772104 - RNA, 19 nt, Homo sapiens
  misc_RNA (1)...(19): siRNA sense strand
uggcguuugugaauggaaa

SEQ ID NO: 772105 - RNA, 19 nt, Homo sapiens
  misc_RNA (1)...(19): siRNA sense strand
uggcucggauaucuaaaca

SEQ ID NO: 772106 - RNA, 19 nt, Homo sapiens
  misc_RNA (1)...(19): siRNA sense strand
cggauggcguuugugaaug

SEQ ID NO: 772107 - RNA, 19 nt, Homo sapiens
  misc_RNA (1)...(19): siRNA sense strand
cuggguaacauccuaguga

SEQ ID NO: 772108 - RNA, 19 nt, Homo sapiens
  misc_RNA (1)...(19): siRNA sense strand
gcagaaagcagucuuccaa

SEQ ID NO: 772109 - RNA, 19 nt, Homo sapiens
  misc_RNA (1)...(19): siRNA sense strand
ggauuacaguguccaaaga

SEQ ID NO: 772110 - RNA, 19 nt, Homo sapiens
  misc_RNA (1)...(19): siRNA sense strand
gaaagcagucuuccaaaca

SEQ ID NO: 772111 - RNA, 19 nt, Homo sapiens
  misc_RNA (1)...(19): siRNA sense strand
caagacggauggcguuugu

SEQ ID NO: 772112 - RNA, 19 nt, Homo sapiens
  misc_RNA (1)...(19): siRNA sense strand
cagaaugucuugagaaucc

SEQ ID NO: 772113 - RNA, 19 nt, Homo sapiens
  misc_RNA (1)...(19): siRNA sense strand
ggucuuucuucccugauuu

SEQ ID NO: 772114 - RNA, 19 nt, Homo sapiens
  misc_RNA (1)...(19): siRNA sense strand
aaagaccaauccuccugua

SEQ ID NO: 772115 - RNA, 19 nt, Homo sapiens
  misc_RNA (1)...(19): siRNA sense strand
caagcccucugaaacaguu

SEQ ID NO: 772116 - RNA, 19 nt, Homo sapiens
  misc_RNA (1)...(19): siRNA sense strand
ggauggcguuugugaaugg

SEQ ID NO: 772117 - RNA, 19 nt, Homo sapiens
  misc_RNA (1)...(19): siRNA sense strand
caagagagaccuucuacag

SEQ ID NO: 772118 - RNA, 19 nt, Homo sapiens
  misc_RNA (1)...(19): siRNA sense strand
gaucaagagagaccuucua

SEQ ID NO: 772119 - RNA, 19 nt, Homo sapiens
  misc_RNA (1)...(19): siRNA sense strand
gaacauuuccaaggccauu

SEQ ID NO: 772120 - RNA, 19 nt, Homo sapiens
  misc_RNA (1)...(19): siRNA sense strand
gagagaccuucuacaggau

SEQ ID NO: 772121 - RNA, 19 nt, Homo sapiens
  misc_RNA (1)...(19): siRNA sense strand
ccucaagucuggccucaag

SEQ ID NO: 772122 - RNA, 19 nt, Homo sapiens
  misc_RNA (1)...(19): siRNA sense strand
gaccaauccuccuguacca

SEQ ID NO: 772123 - RNA, 19 nt, Homo sapiens
  misc_RNA (1)...(19): siRNA sense strand
gaccaagacgcacuucuca

SEQ ID NO: 772124 - RNA, 19 nt, Homo sapiens
  misc_RNA (1)...(19): siRNA sense strand
aaagcagucuuccaaacau

SEQ ID NO: 772125 - RNA, 19 nt, Homo sapiens
  misc_RNA (1)...(19): siRNA sense strand
cggcaccggugaacauuuc

SEQ ID NO: 772126 - RNA, 19 nt, Homo sapiens
  misc_RNA (1)...(19): siRNA sense strand
uaucuaaacagcugcauca

SEQ ID NO: 772127 - RNA, 19 nt, Homo sapiens
  misc_RNA (1)...(19): siRNA sense strand
agaaagcagucuuccaaac

SEQ ID NO: 772128 - RNA, 19 nt, Homo sapiens
  misc_RNA (1)...(19): siRNA sense strand
ggugcuggguaacauccua

SEQ ID NO: 772129 - RNA, 19 nt, Homo sapiens
  misc_RNA (1)...(19): siRNA sense strand
ccguggaucugccaggauu

SEQ ID NO: 772130 - RNA, 19 nt, Homo sapiens
  misc_RNA (1)...(19): siRNA sense strand
ccaagacgcacuucucagu

SEQ ID NO: 772131 - RNA, 19 nt, Homo sapiens
  misc_RNA (1)...(19): siRNA sense strand
gcaucaaccccaucauaua

SEQ ID NO: 772132 - RNA, 19 nt, Homo sapiens
  misc_RNA (1)...(19): siRNA sense strand
cagaaagcagucuuccaaa

SEQ ID NO: 772133 - RNA, 19 nt, Homo sapiens
  misc_RNA (1)...(19): siRNA sense strand
agacggauggcguuuguga

SEQ ID NO: 772134 - RNA, 19 nt, Homo sapiens
  misc_RNA (1)...(19): siRNA sense strand
gaagaaagcggccaaaacg

SEQ ID NO: 772135 - RNA, 19 nt, Homo sapiens
  misc_RNA (1)...(19): siRNA sense strand
gggucuuucuucccugauu

SEQ ID NO: 772136 - RNA, 19 nt, Homo sapiens
  misc_RNA (1)...(19): siRNA sense strand
ucucagcgcugggcuccuu

SEQ ID NO: 772137 - RNA, 19 nt, Homo sapiens
  misc_RNA (1)...(19): siRNA sense strand
ggagaagaaagcggccaaa

SEQ ID NO: 772138 - RNA, 19 nt, Homo sapiens
  misc_RNA (1)...(19): siRNA sense strand
uuucuucccugauuucaag

SEQ ID NO: 772139 - RNA, 19 nt, Homo sapiens
  misc_RNA (1)...(19): siRNA sense strand
gcccuucuccgccaucuuc

SEQ ID NO: 772140 - RNA, 19 nt, Homo sapiens
  misc_RNA (1)...(19): siRNA sense strand
gcacuacuacaucgucaac

SEQ ID NO: 772141 - RNA, 19 nt, Homo sapiens
  misc_RNA (1)...(19): siRNA sense strand
uucagaaugucuugagaau

SEQ ID NO: 772142 - RNA, 19 nt, Homo sapiens
  misc_RNA (1)...(19): siRNA sense strand
cccgugggaucaagagaga

SEQ ID NO: 772143 - RNA, 19 nt, Homo sapiens
  misc_RNA (1)...(19): siRNA sense strand
gaucugccaggauuacagu

SEQ ID NO: 772144 - RNA, 19 nt, Homo sapiens
  misc_RNA (1)...(19): siRNA sense strand
aagcagucuuccaaacaug

SEQ ID NO: 772145 - RNA, 19 nt, Homo sapiens
  misc_RNA (1)...(19): siRNA sense strand
uggcguuugugaauggaaa

SEQ ID NO: 772146 - RNA, 19 nt, Homo sapiens
  misc_RNA (1)...(19): siRNA sense strand
uggcucggauaucuaaaca

SEQ ID NO: 772147 - RNA, 19 nt, Homo sapiens
  misc_RNA (1)...(19): siRNA sense strand
cggauggcguuugugaaug

SEQ ID NO: 772148 - RNA, 19 nt, Homo sapiens
  misc_RNA (1)...(19): siRNA sense strand
cuggguaacauccuaguga

SEQ ID NO: 772149 - RNA, 19 nt, Homo sapiens
  misc_RNA (1)...(19): siRNA sense strand
gcagaaagcagucuuccaa

SEQ ID NO: 772150 - RNA, 19 nt, Homo sapiens
  misc_RNA (1)...(19): siRNA sense strand
ggauuacaguguccaaaga

SEQ ID NO: 772151 - RNA, 19 nt, Homo sapiens
  misc_RNA (1)...(19): siRNA sense strand
gaaagcagucuuccaaaca

SEQ ID NO: 772152 - RNA, 19 nt, Homo sapiens
  misc_RNA (1)...(19): siRNA sense strand
caagacggauggcguuugu

SEQ ID NO: 772153 - RNA, 19 nt, Homo sapiens
  misc_RNA (1)...(19): siRNA sense strand
cagaaugucuugagaaucc

SEQ ID NO: 772154 - RNA, 19 nt, Homo sapiens
  misc_RNA (1)...(19): siRNA sense strand
ggucuuucuucccugauuu

SEQ ID NO: 772155 - RNA, 19 nt, Homo sapiens
  misc_RNA (1)...(19): siRNA sense strand
aaagaccaauccuccugua

SEQ ID NO: 772156 - RNA, 19 nt, Homo sapiens
  misc_RNA (1)...(19): siRNA sense strand
caagcccucugaaacaguu

SEQ ID NO: 772157 - RNA, 19 nt, Homo sapiens
  misc_RNA (1)...(19): siRNA sense strand
ggauggcguuugugaaugg

SEQ ID NO: 772158 - RNA, 19 nt, Homo sapiens
  misc_RNA (1)...(19): siRNA sense strand
caagagagaccuucuacag

SEQ ID NO: 772159 - RNA, 19 nt, Homo sapiens
  misc_RNA (1)...(19): siRNA sense strand
gaucaagagagaccuucua

SEQ ID NO: 772160 - RNA, 19 nt, Homo sapiens
  misc_RNA (1)...(19): siRNA sense strand
gaacauuuccaaggccauu

SEQ ID NO: 772161 - RNA, 19 nt, Homo sapiens
  misc_RNA (1)...(19): siRNA sense strand
gagagaccuucuacaggau

SEQ ID NO: 772162 - RNA, 19 nt, Homo sapiens
  misc_RNA (1)...(19): siRNA sense strand
ccucaagucuggccucaag

SEQ ID NO: 772163 - RNA, 19 nt, Homo sapiens
  misc_RNA (1)...(19): siRNA sense strand
gaccaauccuccuguacca

SEQ ID NO: 772164 - RNA, 19 nt, Homo sapiens
  misc_RNA (1)...(19): siRNA sense strand
gaccaagacgcacuucuca

SEQ ID NO: 772165 - RNA, 19 nt, Homo sapiens
  misc_RNA (1)...(19): siRNA sense strand
aaagcagucuuccaaacau

SEQ ID NO: 772166 - RNA, 19 nt, Homo sapiens
  misc_RNA (1)...(19): siRNA sense strand
cggcaccggugaacauuuc

SEQ ID NO: 772167 - RNA, 19 nt, Homo sapiens
  misc_RNA (1)...(19): siRNA sense strand
uaucuaaacagcugcauca

SEQ ID NO: 772168 - RNA, 19 nt, Homo sapiens
  misc_RNA (1)...(19): siRNA sense strand
agaaagcagucuuccaaac

SEQ ID NO: 772169 - RNA, 19 nt, Homo sapiens
  misc_RNA (1)...(19): siRNA sense strand
ggugcuggguaacauccua

SEQ ID NO: 772170 - RNA, 19 nt, Homo sapiens
  misc_RNA (1)...(19): siRNA sense strand
ccguggaucugccaggauu

SEQ ID NO: 772171 - RNA, 19 nt, Homo sapiens
  misc_RNA (1)...(19): siRNA sense strand
ccaagacgcacuucucagu

SEQ ID NO: 772172 - RNA, 19 nt, Homo sapiens
  misc_RNA (1)...(19): siRNA sense strand
gcaucaaccccaucauaua

SEQ ID NO: 772173 - RNA, 19 nt, Homo sapiens
  misc_RNA (1)...(19): siRNA sense strand
cagaaagcagucuuccaaa

SEQ ID NO: 772174 - RNA, 19 nt, Homo sapiens
  misc_RNA (1)...(19): siRNA sense strand
agacggauggcguuuguga

SEQ ID NO: 772175 - RNA, 19 nt, Homo sapiens
  misc_RNA (1)...(19): siRNA sense strand
gaagaaagcggccaaaacg

SEQ ID NO: 772176 - RNA, 19 nt, Homo sapiens
  misc_RNA (1)...(19): siRNA sense strand
gggucuuucuucccugauu

SEQ ID NO: 772177 - RNA, 19 nt, Homo sapiens
  misc_RNA (1)...(19): siRNA sense strand
ucucagcgcugggcuccuu

SEQ ID NO: 772178 - RNA, 19 nt, Homo sapiens
  misc_RNA (1)...(19): siRNA sense strand
ggagaagaaagcggccaaa

SEQ ID NO: 772179 - RNA, 19 nt, Homo sapiens
  misc_RNA (1)...(19): siRNA sense strand
uuucuucccugauuucaag

SEQ ID NO: 772180 - RNA, 19 nt, Homo sapiens
  misc_RNA (1)...(19): siRNA sense strand
gcccuucuccgccaucuuc

SEQ ID NO: 772181 - RNA, 19 nt, Homo sapiens
  misc_RNA (1)...(19): siRNA sense strand
gcacuacuacaucgucaac

SEQ ID NO: 772182 - RNA, 19 nt, Homo sapiens
  misc_RNA (1)...(19): siRNA sense strand
uucagaaugucuugagaau

SEQ ID NO: 772183 - RNA, 19 nt, Homo sapiens
  misc_RNA (1)...(19): siRNA sense strand
cccgugggaucaagagaga

SEQ ID NO: 772184 - RNA, 19 nt, Homo sapiens
  misc_RNA (1)...(19): siRNA sense strand
gaucugccaggauuacagu

SEQ ID NO: 772185 - RNA, 19 nt, Homo sapiens
  misc_RNA (1)...(19): siRNA sense strand
aagcagucuuccaaacaug

SEQ ID NO: 772186 - RNA, 19 nt, Homo sapiens
  misc_RNA (1)...(19): siRNA sense strand
uggcguuugugaauggaaa

SEQ ID NO: 772187 - RNA, 19 nt, Homo sapiens
  misc_RNA (1)...(19): siRNA sense strand
uggcucggauaucuaaaca

SEQ ID NO: 772188 - RNA, 19 nt, Homo sapiens
  misc_RNA (1)...(19): siRNA sense strand
cggauggcguuugugaaug

SEQ ID NO: 772189 - RNA, 19 nt, Homo sapiens
  misc_RNA (1)...(19): siRNA sense strand
cuggguaacauccuaguga

SEQ ID NO: 772190 - RNA, 19 nt, Homo sapiens
  misc_RNA (1)...(19): siRNA sense strand
gcagaaagcagucuuccaa

SEQ ID NO: 772191 - RNA, 19 nt, Homo sapiens
  misc_RNA (1)...(19): siRNA sense strand
ggauuacaguguccaaaga

SEQ ID NO: 772192 - RNA, 19 nt, Homo sapiens
  misc_RNA (1)...(19): siRNA sense strand
gaaagcagucuuccaaaca

SEQ ID NO: 772193 - RNA, 19 nt, Homo sapiens
  misc_RNA (1)...(19): siRNA sense strand
caagacggauggcguuugu

SEQ ID NO: 772194 - RNA, 19 nt, Homo sapiens
  misc_RNA (1)...(19): siRNA sense strand
cagaaugucuugagaaucc

SEQ ID NO: 772195 - RNA, 19 nt, Homo sapiens
  misc_RNA (1)...(19): siRNA sense strand
ggucuuucuucccugauuu

SEQ ID NO: 772196 - RNA, 19 nt, Homo sapiens
  misc_RNA (1)...(19): siRNA sense strand
aaagaccaauccuccugua

SEQ ID NO: 772197 - RNA, 19 nt, Homo sapiens
  misc_RNA (1)...(19): siRNA sense strand
caagcccucugaaacaguu

SEQ ID NO: 772198 - RNA, 19 nt, Homo sapiens
  misc_RNA (1)...(19): siRNA sense strand
ggauggcguuugugaaugg

SEQ ID NO: 772199 - RNA, 19 nt, Homo sapiens
  misc_RNA (1)...(19): siRNA sense strand
caagagagaccuucuacag

SEQ ID NO: 772200 - RNA, 19 nt, Homo sapiens
  misc_RNA (1)...(19): siRNA sense strand
gaucaagagagaccuucua

SEQ ID NO: 772201 - RNA, 19 nt, Homo sapiens
  misc_RNA (1)...(19): siRNA sense strand
gaacauuuccaaggccauu

SEQ ID NO: 772202 - RNA, 19 nt, Homo sapiens
  misc_RNA (1)...(19): siRNA sense strand
gagagaccuucuacaggau

SEQ ID NO: 772203 - RNA, 19 nt, Homo sapiens
  misc_RNA (1)...(19): siRNA sense strand
ccucaagucuggccucaag

SEQ ID NO: 772204 - RNA, 19 nt, Homo sapiens
  misc_RNA (1)...(19): siRNA sense strand
gaccaauccuccuguacca

SEQ ID NO: 772205 - RNA, 19 nt, Homo sapiens
  misc_RNA (1)...(19): siRNA sense strand
gaccaagacgcacuucuca

SEQ ID NO: 772206 - RNA, 19 nt, Homo sapiens
  misc_RNA (1)...(19): siRNA sense strand
aaagcagucuuccaaacau

SEQ ID NO: 772207 - RNA, 19 nt, Homo sapiens
  misc_RNA (1)...(19): siRNA sense strand
cggcaccggugaacauuuc

SEQ ID NO: 772208 - RNA, 19 nt, Homo sapiens
  misc_RNA (1)...(19): siRNA sense strand
uaucuaaacagcugcauca

SEQ ID NO: 772209 - RNA, 19 nt, Homo sapiens
  misc_RNA (1)...(19): siRNA sense strand
agaaagcagucuuccaaac

SEQ ID NO: 772210 - RNA, 19 nt, Homo sapiens
  misc_RNA (1)...(19): siRNA sense strand
ggugcuggguaacauccua

SEQ ID NO: 772211 - RNA, 19 nt, Homo sapiens
  misc_RNA (1)...(19): siRNA sense strand
ccguggaucugccaggauu

SEQ ID NO: 772212 - RNA, 19 nt, Homo sapiens
  misc_RNA (1)...(19): siRNA sense strand
ccaagacgcacuucucagu

SEQ ID NO: 772213 - RNA, 19 nt, Homo sapiens
  misc_RNA (1)...(19): siRNA sense strand
gcaucaaccccaucauaua

SEQ ID NO: 772214 - RNA, 19 nt, Homo sapiens
  misc_RNA (1)...(19): siRNA sense strand
cagaaagcagucuuccaaa

SEQ ID NO: 772215 - RNA, 19 nt, Homo sapiens
  misc_RNA (1)...(19): siRNA sense strand
agacggauggcguuuguga

SEQ ID NO: 772216 - RNA, 19 nt, Homo sapiens
  misc_RNA (1)...(19): siRNA sense strand
gaagaaagcggccaaaacg

SEQ ID NO: 772217 - RNA, 19 nt, Homo sapiens
  misc_RNA (1)...(19): siRNA sense strand
gggucuuucuucccugauu

SEQ ID NO: 772218 - RNA, 19 nt, Homo sapiens
  misc_RNA (1)...(19): siRNA sense strand
ucucagcgcugggcuccuu

SEQ ID NO: 772219 - RNA, 19 nt, Homo sapiens
  misc_RNA (1)...(19): siRNA sense strand
ggagaagaaagcggccaaa

SEQ ID NO: 772220 - RNA, 19 nt, Homo sapiens
  misc_RNA (1)...(19): siRNA sense strand
uuucuucccugauuucaag

SEQ ID NO: 772221 - RNA, 19 nt, Homo sapiens
  misc_RNA (1)...(19): siRNA sense strand
gcccuucuccgccaucuuc

SEQ ID NO: 772222 - RNA, 19 nt, Homo sapiens
  misc_RNA (1)...(19): siRNA sense strand
gcacuacuacaucgucaac

SEQ ID NO: 772223 - RNA, 19 nt, Homo sapiens
  misc_RNA (1)...(19): siRNA sense strand
uucagaaugucuugagaau

SEQ ID NO: 772224 - RNA, 19 nt, Homo sapiens
  misc_RNA (1)...(19): siRNA sense strand
cccgugggaucaagagaga

SEQ ID NO: 772225 - RNA, 19 nt, Homo sapiens
  misc_RNA (1)...(19): siRNA sense strand
gaucugccaggauuacagu

SEQ ID NO: 772226 - RNA, 19 nt, Homo sapiens
  misc_RNA (1)...(19): siRNA sense strand
aagcagucuuccaaacaug

SEQ ID NO: 772227 - RNA, 19 nt, Homo sapiens
  misc_RNA (1)...(19): siRNA sense strand
uggcguuugugaauggaaa

SEQ ID NO: 772228 - RNA, 19 nt, Homo sapiens
  misc_RNA (1)...(19): siRNA sense strand
uggcucggauaucuaaaca

SEQ ID NO: 772229 - RNA, 19 nt, Homo sapiens
  misc_RNA (1)...(19): siRNA sense strand
cggauggcguuugugaaug

SEQ ID NO: 772230 - RNA, 19 nt, Homo sapiens
  misc_RNA (1)...(19): siRNA sense strand
cuggguaacauccuaguga

SEQ ID NO: 772231 - RNA, 19 nt, Homo sapiens
  misc_RNA (1)...(19): siRNA sense strand
gcacaucaaucaucauuua

SEQ ID NO: 772232 - RNA, 19 nt, Homo sapiens
  misc_RNA (1)...(19): siRNA sense strand
gaaauuaucuuccagcauu

SEQ ID NO: 772233 - RNA, 19 nt, Homo sapiens
  misc_RNA (1)...(19): siRNA sense strand
cauagaagcugaaccuuua

SEQ ID NO: 772234 - RNA, 19 nt, Homo sapiens
  misc_RNA (1)...(19): siRNA sense strand
caaaggagaugucauuaaa

SEQ ID NO: 772235 - RNA, 19 nt, Homo sapiens
  misc_RNA (1)...(19): siRNA sense strand
aaagaaagcuggauacaaa

SEQ ID NO: 772236 - RNA, 19 nt, Homo sapiens
  misc_RNA (1)...(19): siRNA sense strand
gaaagcauccaccuaauua

SEQ ID NO: 772237 - RNA, 19 nt, Homo sapiens
  misc_RNA (1)...(19): siRNA sense strand
gaagagaagccaugaauaa

SEQ ID NO: 772238 - RNA, 19 nt, Homo sapiens
  misc_RNA (1)...(19): siRNA sense strand
ggauagagcuuaugauuca

SEQ ID NO: 772239 - RNA, 19 nt, Homo sapiens
  misc_RNA (1)...(19): siRNA sense strand
gcaauuggcuauagugaaa

SEQ ID NO: 772240 - RNA, 19 nt, Homo sapiens
  misc_RNA (1)...(19): siRNA sense strand
uaacagaccuuaugacaga

SEQ ID NO: 772241 - RNA, 19 nt, Homo sapiens
  misc_RNA (1)...(19): siRNA sense strand
gaauggcacuggauauuaa

SEQ ID NO: 772242 - RNA, 19 nt, Homo sapiens
  misc_RNA (1)...(19): siRNA sense strand
gaaauaaacgcaaagcuaa

SEQ ID NO: 772243 - RNA, 19 nt, Homo sapiens
  misc_RNA (1)...(19): siRNA sense strand
gaaagcaacuccucgaaug

SEQ ID NO: 772244 - RNA, 19 nt, Homo sapiens
  misc_RNA (1)...(19): siRNA sense strand
ucacgugccuuacuaguua

SEQ ID NO: 772245 - RNA, 19 nt, Homo sapiens
  misc_RNA (1)...(19): siRNA sense strand
ggagaaaguuuaaguaugg

SEQ ID NO: 772246 - RNA, 19 nt, Homo sapiens
  misc_RNA (1)...(19): siRNA sense strand
agaaauggaucucagguua

SEQ ID NO: 772247 - RNA, 19 nt, Homo sapiens
  misc_RNA (1)...(19): siRNA sense strand
gaugagaacuaucaaaugu

SEQ ID NO: 772248 - RNA, 19 nt, Homo sapiens
  misc_RNA (1)...(19): siRNA sense strand
aaacaaagcccaagaagaa

SEQ ID NO: 772249 - RNA, 19 nt, Homo sapiens
  misc_RNA (1)...(19): siRNA sense strand
gcagauguauguacucauu

SEQ ID NO: 772250 - RNA, 19 nt, Homo sapiens
  misc_RNA (1)...(19): siRNA sense strand
ccacaguauuucaguauua

SEQ ID NO: 772251 - RNA, 19 nt, Homo sapiens
  misc_RNA (1)...(19): siRNA sense strand
gcagacaacugaucaauac

SEQ ID NO: 772252 - RNA, 19 nt, Homo sapiens
  misc_RNA (1)...(19): siRNA sense strand
gaaguuagagagagaauuu

SEQ ID NO: 772253 - RNA, 19 nt, Homo sapiens
  misc_RNA (1)...(19): siRNA sense strand
gcaaagcuaaggaauauaa

SEQ ID NO: 772254 - RNA, 19 nt, Homo sapiens
  misc_RNA (1)...(19): siRNA sense strand
uaacaucucuaucagugua

SEQ ID NO: 772255 - RNA, 19 nt, Homo sapiens
  misc_RNA (1)...(19): siRNA sense strand
ccaaggguauuuaaaguaa

SEQ ID NO: 772256 - RNA, 19 nt, Homo sapiens
  misc_RNA (1)...(19): siRNA sense strand
guacaaagcagacggaauu

SEQ ID NO: 772257 - RNA, 19 nt, Homo sapiens
  misc_RNA (1)...(19): siRNA sense strand
ggcaauauaugguaugaaa

SEQ ID NO: 772258 - RNA, 19 nt, Homo sapiens
  misc_RNA (1)...(19): siRNA sense strand
gaaaucuucuuccuuacaa

SEQ ID NO: 772259 - RNA, 19 nt, Homo sapiens
  misc_RNA (1)...(19): siRNA sense strand
ggaaaguuaccucuuauuu

SEQ ID NO: 772260 - RNA, 19 nt, Homo sapiens
  misc_RNA (1)...(19): siRNA sense strand
gacuggaaaucaaauguua

SEQ ID NO: 772261 - RNA, 19 nt, Homo sapiens
  misc_RNA (1)...(19): siRNA sense strand
uguaauagcucuacgaaga

SEQ ID NO: 772262 - RNA, 19 nt, Homo sapiens
  misc_RNA (1)...(19): siRNA sense strand
ggaacugccucaccugaaa

SEQ ID NO: 772263 - RNA, 19 nt, Homo sapiens
  misc_RNA (1)...(19): siRNA sense strand
uaauaaaucugcacuguca

SEQ ID NO: 772264 - RNA, 19 nt, Homo sapiens
  misc_RNA (1)...(19): siRNA sense strand
cuauacagaucucgauuua

SEQ ID NO: 772265 - RNA, 19 nt, Homo sapiens
  misc_RNA (1)...(19): siRNA sense strand
caauaaagcugagugaaau

SEQ ID NO: 772266 - RNA, 19 nt, Homo sapiens
  misc_RNA (1)...(19): siRNA sense strand
ucccagauaucacguauua

SEQ ID NO: 772267 - RNA, 19 nt, Homo sapiens
  misc_RNA (1)...(19): siRNA sense strand
uaacacaucugcacaucaa

SEQ ID NO: 772268 - RNA, 19 nt, Homo sapiens
  misc_RNA (1)...(19): siRNA sense strand
gcaagaaguagccuauaua

SEQ ID NO: 772269 - RNA, 19 nt, Homo sapiens
  misc_RNA (1)...(19): siRNA sense strand
ggaauugacuuugaagaga

SEQ ID NO: 772270 - RNA, 19 nt, Homo sapiens
  misc_RNA (1)...(19): siRNA sense strand
gcaaggacagugaauagua

SEQ ID NO: 772271 - RNA, 19 nt, Homo sapiens
  misc_RNA (1)...(19): siRNA sense strand
gaugaugccuauagauuug

SEQ ID NO: 772272 - RNA, 19 nt, Homo sapiens
  misc_RNA (1)...(19): siRNA sense strand
uaaaggaucuagcaccauu

SEQ ID NO: 772273 - RNA, 19 nt, Homo sapiens
  misc_RNA (1)...(19): siRNA sense strand
cuaaagguuucaccaguua

SEQ ID NO: 772274 - RNA, 19 nt, Homo sapiens
  misc_RNA (1)...(19): siRNA sense strand
gaaaauaauuccucucuug

SEQ ID NO: 772275 - RNA, 19 nt, Homo sapiens
  misc_RNA (1)...(19): siRNA sense strand
uauggaaaguuaccucuua

SEQ ID NO: 772276 - RNA, 19 nt, Homo sapiens
  misc_RNA (1)...(19): siRNA sense strand
gaauguacccgacuugaaa

SEQ ID NO: 772277 - RNA, 19 nt, Homo sapiens
  misc_RNA (1)...(19): siRNA sense strand
gcagcuacauuccucuuaa

SEQ ID NO: 772278 - RNA, 19 nt, Homo sapiens
  misc_RNA (1)...(19): siRNA sense strand
caacuuaugguaacugaua

SEQ ID NO: 772279 - RNA, 19 nt, Homo sapiens
  misc_RNA (1)...(19): siRNA sense strand
caaauguggucuuguaaug

SEQ ID NO: 772280 - RNA, 19 nt, Homo sapiens
  misc_RNA (1)...(19): siRNA sense strand
ucagugaagugggaaauua

SEQ ID NO: 772281 - RNA, 19 nt, Homo sapiens
  misc_RNA (1)...(19): siRNA sense strand
ucaaaugugugaaggaauu

SEQ ID NO: 772282 - RNA, 19 nt, Homo sapiens
  misc_RNA (1)...(19): siRNA sense strand
ggaauugauugaaagcauu

SEQ ID NO: 772283 - RNA, 19 nt, Homo sapiens
  misc_RNA (1)...(19): siRNA sense strand
gcaaauaccauauaucagu

SEQ ID NO: 772284 - RNA, 19 nt, Homo sapiens
  misc_RNA (1)...(19): siRNA sense strand
caaaggaguuccagaaugg

SEQ ID NO: 772285 - RNA, 19 nt, Homo sapiens
  misc_RNA (1)...(19): siRNA sense strand
gcacaaaggaguuccagaa

SEQ ID NO: 772286 - RNA, 19 nt, Homo sapiens
  misc_RNA (1)...(19): siRNA sense strand
caucacagauuucacagaa

SEQ ID NO: 772287 - RNA, 19 nt, Homo sapiens
  misc_RNA (1)...(19): siRNA sense strand
agaagaagcuaaagauuca

SEQ ID NO: 772288 - RNA, 19 nt, Homo sapiens
  misc_RNA (1)...(19): siRNA sense strand
ucauggagcuguuaaaugu

SEQ ID NO: 772289 - RNA, 19 nt, Homo sapiens
  misc_RNA (1)...(19): siRNA sense strand
gaucuacuccugccauuaa

SEQ ID NO: 772290 - RNA, 19 nt, Homo sapiens
  misc_RNA (1)...(19): siRNA sense strand
gaucuuggguuuaucuaug

SEQ ID NO: 772291 - RNA, 19 nt, Homo sapiens
  misc_RNA (1)...(19): siRNA sense strand
gaacaucacagauuucaca

SEQ ID NO: 772292 - RNA, 19 nt, Homo sapiens
  misc_RNA (1)...(19): siRNA sense strand
ugaaagaguucugcuuaaa

SEQ ID NO: 772293 - RNA, 19 nt, Homo sapiens
  misc_RNA (1)...(19): siRNA sense strand
auaaauggcucucucuuga

SEQ ID NO: 772294 - RNA, 19 nt, Homo sapiens
  misc_RNA (1)...(19): siRNA sense strand
cagguuagaucuuggguuu

SEQ ID NO: 772295 - RNA, 19 nt, Homo sapiens
  misc_RNA (1)...(19): siRNA sense strand
ucaacuggauguaccauuu

SEQ ID NO: 772296 - RNA, 19 nt, Homo sapiens
  misc_RNA (1)...(19): siRNA sense strand
ggacuuacuauuucuguuu

SEQ ID NO: 772297 - RNA, 19 nt, Homo sapiens
  misc_RNA (1)...(19): siRNA sense strand
gaugaagacuaccaacaga

SEQ ID NO: 772298 - RNA, 19 nt, Homo sapiens
  misc_RNA (1)...(19): siRNA sense strand
gagaagaagcuaaagauuc

SEQ ID NO: 772299 - RNA, 19 nt, Homo sapiens
  misc_RNA (1)...(19): siRNA sense strand
gaagauccaaggguauuua

SEQ ID NO: 772300 - RNA, 19 nt, Homo sapiens
  misc_RNA (1)...(19): siRNA sense strand
uccgaaaucuucuuccuua

SEQ ID NO: 772301 - RNA, 19 nt, Homo sapiens
  misc_RNA (1)...(19): siRNA sense strand
caaggacagugaauaguau

SEQ ID NO: 772302 - RNA, 19 nt, Homo sapiens
  misc_RNA (1)...(19): siRNA sense strand
guagaucaaucacaaguca

SEQ ID NO: 772303 - RNA, 19 nt, Homo sapiens
  misc_RNA (1)...(19): siRNA sense strand
ggaaaagacugauuuagau

SEQ ID NO: 772304 - RNA, 19 nt, Homo sapiens
  misc_RNA (1)...(19): siRNA sense strand
gaaaugcgacuauacagau

SEQ ID NO: 772305 - RNA, 19 nt, Homo sapiens
  misc_RNA (1)...(19): siRNA sense strand
ggucuacuguauauuauug

SEQ ID NO: 772306 - RNA, 19 nt, Homo sapiens
  misc_RNA (1)...(19): siRNA sense strand
gaaacaaggugaggccaau

SEQ ID NO: 772307 - RNA, 19 nt, Homo sapiens
  misc_RNA (1)...(19): siRNA sense strand
gagaagccaugaauaagca

SEQ ID NO: 772308 - RNA, 19 nt, Homo sapiens
  misc_RNA (1)...(19): siRNA sense strand
ggucacauagguaaucuua

SEQ ID NO: 772309 - RNA, 19 nt, Homo sapiens
  misc_RNA (1)...(19): siRNA sense strand
caaagucggucaccaugga

SEQ ID NO: 772310 - RNA, 19 nt, Homo sapiens
  misc_RNA (1)...(19): siRNA sense strand
gaaacaaagcccaagaaga

SEQ ID NO: 772311 - RNA, 19 nt, Homo sapiens
  misc_RNA (1)...(19): siRNA sense strand
gaaguaagaaggucacaau

SEQ ID NO: 772312 - RNA, 19 nt, Homo sapiens
  misc_RNA (1)...(19): siRNA sense strand
ggaguucccuaauaaaucu

SEQ ID NO: 772313 - RNA, 19 nt, Homo sapiens
  misc_RNA (1)...(19): siRNA sense strand
aaaugaugcuccugcuuua

SEQ ID NO: 772314 - RNA, 19 nt, Homo sapiens
  misc_RNA (1)...(19): siRNA sense strand
gugcaaacauggacugcua

SEQ ID NO: 772315 - RNA, 19 nt, Homo sapiens
  misc_RNA (1)...(19): siRNA sense strand
gaagauaucauuacuuugc

SEQ ID NO: 772316 - RNA, 19 nt, Homo sapiens
  misc_RNA (1)...(19): siRNA sense strand
gaagcaauauaaagaacug

SEQ ID NO: 772317 - RNA, 19 nt, Homo sapiens
  misc_RNA (1)...(19): siRNA sense strand
caaugaagauggaguuauc

SEQ ID NO: 772318 - RNA, 19 nt, Homo sapiens
  misc_RNA (1)...(19): siRNA sense strand
gcaguggcauuacaagaug

SEQ ID NO: 772319 - RNA, 19 nt, Homo sapiens
  misc_RNA (1)...(19): siRNA sense strand
gagugaagauccucccaaa

SEQ ID NO: 772320 - RNA, 19 nt, Homo sapiens
  misc_RNA (1)...(19): siRNA sense strand
gugaaggaauugacuuuga

SEQ ID NO: 772321 - RNA, 19 nt, Homo sapiens
  misc_RNA (1)...(19): siRNA sense strand
guaagaaggucacaauucg

SEQ ID NO: 772322 - RNA, 19 nt, Homo sapiens
  misc_RNA (1)...(19): siRNA sense strand
guacagcugcuuuacagua

SEQ ID NO: 772323 - RNA, 19 nt, Homo sapiens
  misc_RNA (1)...(19): siRNA sense strand
ugacaaaacuggaagaauu

SEQ ID NO: 772324 - RNA, 19 nt, Homo sapiens
  misc_RNA (1)...(19): siRNA sense strand
gcaaagaccaggagcacaa

SEQ ID NO: 772325 - RNA, 19 nt, Homo sapiens
  misc_RNA (1)...(19): siRNA sense strand
gaaccaaggacaaugauca

SEQ ID NO: 772326 - RNA, 19 nt, Homo sapiens
  misc_RNA (1)...(19): siRNA sense strand
ggaauggcacuaggacuua

SEQ ID NO: 772327 - RNA, 19 nt, Homo sapiens
  misc_RNA (1)...(19): siRNA sense strand
uaaaacagccucauuagua

SEQ ID NO: 772328 - RNA, 19 nt, Homo sapiens
  misc_RNA (1)...(19): siRNA sense strand
gaauacagauccaaaauca

SEQ ID NO: 772329 - RNA, 19 nt, Homo sapiens
  misc_RNA (1)...(19): siRNA sense strand
ucaaguuggugucacuaua

SEQ ID NO: 772330 - RNA, 19 nt, Homo sapiens
  misc_RNA (1)...(19): siRNA sense strand
gaaaauggacuaucaaguu

SEQ ID NO: 772331 - RNA, 19 nt, Homo sapiens
  misc_RNA (1)...(19): siRNA sense strand
gcacaucaaucaucauuua

SEQ ID NO: 772332 - RNA, 19 nt, Homo sapiens
  misc_RNA (1)...(19): siRNA sense strand
gaaauuaucuuccagcauu

SEQ ID NO: 772333 - RNA, 19 nt, Homo sapiens
  misc_RNA (1)...(19): siRNA sense strand
cauagaagcugaaccuuua

SEQ ID NO: 772334 - RNA, 19 nt, Homo sapiens
  misc_RNA (1)...(19): siRNA sense strand
caaaggagaugucauuaaa

SEQ ID NO: 772335 - RNA, 19 nt, Homo sapiens
  misc_RNA (1)...(19): siRNA sense strand
aaagaaagcuggauacaaa

SEQ ID NO: 772336 - RNA, 19 nt, Homo sapiens
  misc_RNA (1)...(19): siRNA sense strand
gaaagcauccaccuaauua

SEQ ID NO: 772337 - RNA, 19 nt, Homo sapiens
  misc_RNA (1)...(19): siRNA sense strand
gaagagaagccaugaauaa

SEQ ID NO: 772338 - RNA, 19 nt, Homo sapiens
  misc_RNA (1)...(19): siRNA sense strand
ggauagagcuuaugauuca

SEQ ID NO: 772339 - RNA, 19 nt, Homo sapiens
  misc_RNA (1)...(19): siRNA sense strand
gcaauuggcuauagugaaa

SEQ ID NO: 772340 - RNA, 19 nt, Homo sapiens
  misc_RNA (1)...(19): siRNA sense strand
uaacagaccuuaugacaga

SEQ ID NO: 772341 - RNA, 19 nt, Homo sapiens
  misc_RNA (1)...(19): siRNA sense strand
gaauggcacuggauauuaa

SEQ ID NO: 772342 - RNA, 19 nt, Homo sapiens
  misc_RNA (1)...(19): siRNA sense strand
gaaauaaacgcaaagcuaa

SEQ ID NO: 772343 - RNA, 19 nt, Homo sapiens
  misc_RNA (1)...(19): siRNA sense strand
gaaagcaacuccucgaaug

SEQ ID NO: 772344 - RNA, 19 nt, Homo sapiens
  misc_RNA (1)...(19): siRNA sense strand
ucacgugccuuacuaguua

SEQ ID NO: 772345 - RNA, 19 nt, Homo sapiens
  misc_RNA (1)...(19): siRNA sense strand
ggagaaaguuuaaguaugg

SEQ ID NO: 772346 - RNA, 19 nt, Homo sapiens
  misc_RNA (1)...(19): siRNA sense strand
agaaauggaucucagguua

SEQ ID NO: 772347 - RNA, 19 nt, Homo sapiens
  misc_RNA (1)...(19): siRNA sense strand
gaugagaacuaucaaaugu

SEQ ID NO: 772348 - RNA, 19 nt, Homo sapiens
  misc_RNA (1)...(19): siRNA sense strand
aaacaaagcccaagaagaa

SEQ ID NO: 772349 - RNA, 19 nt, Homo sapiens
  misc_RNA (1)...(19): siRNA sense strand
gcagauguauguacucauu

SEQ ID NO: 772350 - RNA, 19 nt, Homo sapiens
  misc_RNA (1)...(19): siRNA sense strand
ccacaguauuucaguauua

SEQ ID NO: 772351 - RNA, 19 nt, Homo sapiens
  misc_RNA (1)...(19): siRNA sense strand
gcagacaacugaucaauac

SEQ ID NO: 772352 - RNA, 19 nt, Homo sapiens
  misc_RNA (1)...(19): siRNA sense strand
gaaguuagagagagaauuu

SEQ ID NO: 772353 - RNA, 19 nt, Homo sapiens
  misc_RNA (1)...(19): siRNA sense strand
gcaaagcuaaggaauauaa

SEQ ID NO: 772354 - RNA, 19 nt, Homo sapiens
  misc_RNA (1)...(19): siRNA sense strand
uaacaucucuaucagugua

SEQ ID NO: 772355 - RNA, 19 nt, Homo sapiens
  misc_RNA (1)...(19): siRNA sense strand
ccaaggguauuuaaaguaa

SEQ ID NO: 772356 - RNA, 19 nt, Homo sapiens
  misc_RNA (1)...(19): siRNA sense strand
guacaaagcagacggaauu

SEQ ID NO: 772357 - RNA, 19 nt, Homo sapiens
  misc_RNA (1)...(19): siRNA sense strand
ggcaauauaugguaugaaa

SEQ ID NO: 772358 - RNA, 19 nt, Homo sapiens
  misc_RNA (1)...(19): siRNA sense strand
gaaaucuucuuccuuacaa

SEQ ID NO: 772359 - RNA, 19 nt, Homo sapiens
  misc_RNA (1)...(19): siRNA sense strand
ggaaaguuaccucuuauuu

SEQ ID NO: 772360 - RNA, 19 nt, Homo sapiens
  misc_RNA (1)...(19): siRNA sense strand
gacuggaaaucaaauguua

SEQ ID NO: 772361 - RNA, 19 nt, Homo sapiens
  misc_RNA (1)...(19): siRNA sense strand
uguaauagcucuacgaaga

SEQ ID NO: 772362 - RNA, 19 nt, Homo sapiens
  misc_RNA (1)...(19): siRNA sense strand
ggaacugccucaccugaaa

SEQ ID NO: 772363 - RNA, 19 nt, Homo sapiens
  misc_RNA (1)...(19): siRNA sense strand
uaauaaaucugcacuguca

SEQ ID NO: 772364 - RNA, 19 nt, Homo sapiens
  misc_RNA (1)...(19): siRNA sense strand
cuauacagaucucgauuua

SEQ ID NO: 772365 - RNA, 19 nt, Homo sapiens
  misc_RNA (1)...(19): siRNA sense strand
caauaaagcugagugaaau

SEQ ID NO: 772366 - RNA, 19 nt, Homo sapiens
  misc_RNA (1)...(19): siRNA sense strand
ucccagauaucacguauua

SEQ ID NO: 772367 - RNA, 19 nt, Homo sapiens
  misc_RNA (1)...(19): siRNA sense strand
uaacacaucugcacaucaa

SEQ ID NO: 772368 - RNA, 19 nt, Homo sapiens
  misc_RNA (1)...(19): siRNA sense strand
gcaagaaguagccuauaua

SEQ ID NO: 772369 - RNA, 19 nt, Homo sapiens
  misc_RNA (1)...(19): siRNA sense strand
ggaauugacuuugaagaga

SEQ ID NO: 772370 - RNA, 19 nt, Homo sapiens
  misc_RNA (1)...(19): siRNA sense strand
gcaaggacagugaauagua

SEQ ID NO: 772371 - RNA, 19 nt, Homo sapiens
  misc_RNA (1)...(19): siRNA sense strand
gaugaugccuauagauuug

SEQ ID NO: 772372 - RNA, 19 nt, Homo sapiens
  misc_RNA (1)...(19): siRNA sense strand
uaaaggaucuagcaccauu

SEQ ID NO: 772373 - RNA, 19 nt, Homo sapiens
  misc_RNA (1)...(19): siRNA sense strand
cuaaagguuucaccaguua

SEQ ID NO: 772374 - RNA, 19 nt, Homo sapiens
  misc_RNA (1)...(19): siRNA sense strand
gaaaauaauuccucucuug

SEQ ID NO: 772375 - RNA, 19 nt, Homo sapiens
  misc_RNA (1)...(19): siRNA sense strand
uauggaaaguuaccucuua

SEQ ID NO: 772376 - RNA, 19 nt, Homo sapiens
  misc_RNA (1)...(19): siRNA sense strand
gaauguacccgacuugaaa

SEQ ID NO: 772377 - RNA, 19 nt, Homo sapiens
  misc_RNA (1)...(19): siRNA sense strand
gcagcuacauuccucuuaa

SEQ ID NO: 772378 - RNA, 19 nt, Homo sapiens
  misc_RNA (1)...(19): siRNA sense strand
caacuuaugguaacugaua

SEQ ID NO: 772379 - RNA, 19 nt, Homo sapiens
  misc_RNA (1)...(19): siRNA sense strand
caaauguggucuuguaaug

SEQ ID NO: 772380 - RNA, 19 nt, Homo sapiens
  misc_RNA (1)...(19): siRNA sense strand
ucagugaagugggaaauua

SEQ ID NO: 772381 - RNA, 19 nt, Homo sapiens
  misc_RNA (1)...(19): siRNA sense strand
ucaaaugugugaaggaauu

SEQ ID NO: 772382 - RNA, 19 nt, Homo sapiens
  misc_RNA (1)...(19): siRNA sense strand
ggaauugauugaaagcauu

SEQ ID NO: 772383 - RNA, 19 nt, Homo sapiens
  misc_RNA (1)...(19): siRNA sense strand
gcaaauaccauauaucagu

SEQ ID NO: 772384 - RNA, 19 nt, Homo sapiens
  misc_RNA (1)...(19): siRNA sense strand
caaaggaguuccagaaugg

SEQ ID NO: 772385 - RNA, 19 nt, Homo sapiens
  misc_RNA (1)...(19): siRNA sense strand
gcacaaaggaguuccagaa

SEQ ID NO: 772386 - RNA, 19 nt, Homo sapiens
  misc_RNA (1)...(19): siRNA sense strand
caucacagauuucacagaa

SEQ ID NO: 772387 - RNA, 19 nt, Homo sapiens
  misc_RNA (1)...(19): siRNA sense strand
agaagaagcuaaagauuca

SEQ ID NO: 772388 - RNA, 19 nt, Homo sapiens
  misc_RNA (1)...(19): siRNA sense strand
ucauggagcuguuaaaugu

SEQ ID NO: 772389 - RNA, 19 nt, Homo sapiens
  misc_RNA (1)...(19): siRNA sense strand
gaucuacuccugccauuaa

SEQ ID NO: 772390 - RNA, 19 nt, Homo sapiens
  misc_RNA (1)...(19): siRNA sense strand
gaucuuggguuuaucuaug

SEQ ID NO: 772391 - RNA, 19 nt, Homo sapiens
  misc_RNA (1)...(19): siRNA sense strand
gaacaucacagauuucaca

SEQ ID NO: 772392 - RNA, 19 nt, Homo sapiens
  misc_RNA (1)...(19): siRNA sense strand
ugaaagaguucugcuuaaa

SEQ ID NO: 772393 - RNA, 19 nt, Homo sapiens
  misc_RNA (1)...(19): siRNA sense strand
auaaauggcucucucuuga

SEQ ID NO: 772394 - RNA, 19 nt, Homo sapiens
  misc_RNA (1)...(19): siRNA sense strand
cagguuagaucuuggguuu

SEQ ID NO: 772395 - RNA, 19 nt, Homo sapiens
  misc_RNA (1)...(19): siRNA sense strand
ucaacuggauguaccauuu

SEQ ID NO: 772396 - RNA, 19 nt, Homo sapiens
  misc_RNA (1)...(19): siRNA sense strand
ggacuuacuauuucuguuu

SEQ ID NO: 772397 - RNA, 19 nt, Homo sapiens
  misc_RNA (1)...(19): siRNA sense strand
gaugaagacuaccaacaga

SEQ ID NO: 772398 - RNA, 19 nt, Homo sapiens
  misc_RNA (1)...(19): siRNA sense strand
gagaagaagcuaaagauuc

SEQ ID NO: 772399 - RNA, 19 nt, Homo sapiens
  misc_RNA (1)...(19): siRNA sense strand
gaagauccaaggguauuua

SEQ ID NO: 772400 - RNA, 19 nt, Homo sapiens
  misc_RNA (1)...(19): siRNA sense strand
uccgaaaucuucuuccuua

SEQ ID NO: 772401 - RNA, 19 nt, Homo sapiens
  misc_RNA (1)...(19): siRNA sense strand
caaggacagugaauaguau

SEQ ID NO: 772402 - RNA, 19 nt, Homo sapiens
  misc_RNA (1)...(19): siRNA sense strand
guagaucaaucacaaguca

SEQ ID NO: 772403 - RNA, 19 nt, Homo sapiens
  misc_RNA (1)...(19): siRNA sense strand
ggaaaagacugauuuagau

SEQ ID NO: 772404 - RNA, 19 nt, Homo sapiens
  misc_RNA (1)...(19): siRNA sense strand
gaaaugcgacuauacagau

SEQ ID NO: 772405 - RNA, 19 nt, Homo sapiens
  misc_RNA (1)...(19): siRNA sense strand
ggucuacuguauauuauug

SEQ ID NO: 772406 - RNA, 19 nt, Homo sapiens
  misc_RNA (1)...(19): siRNA sense strand
gaaacaaggugaggccaau

SEQ ID NO: 772407 - RNA, 19 nt, Homo sapiens
  misc_RNA (1)...(19): siRNA sense strand
gagaagccaugaauaagca

SEQ ID NO: 772408 - RNA, 19 nt, Homo sapiens
  misc_RNA (1)...(19): siRNA sense strand
ggucacauagguaaucuua

SEQ ID NO: 772409 - RNA, 19 nt, Homo sapiens
  misc_RNA (1)...(19): siRNA sense strand
caaagucggucaccaugga

SEQ ID NO: 772410 - RNA, 19 nt, Homo sapiens
  misc_RNA (1)...(19): siRNA sense strand
gaaacaaagcccaagaaga

SEQ ID NO: 772411 - RNA, 19 nt, Homo sapiens
  misc_RNA (1)...(19): siRNA sense strand
gaaguaagaaggucacaau

SEQ ID NO: 772412 - RNA, 19 nt, Homo sapiens
  misc_RNA (1)...(19): siRNA sense strand
ggaguucccuaauaaaucu

SEQ ID NO: 772413 - RNA, 19 nt, Homo sapiens
  misc_RNA (1)...(19): siRNA sense strand
aaaugaugcuccugcuuua

SEQ ID NO: 772414 - RNA, 19 nt, Homo sapiens
  misc_RNA (1)...(19): siRNA sense strand
gugcaaacauggacugcua

SEQ ID NO: 772415 - RNA, 19 nt, Homo sapiens
  misc_RNA (1)...(19): siRNA sense strand
gaagauaucauuacuuugc

SEQ ID NO: 772416 - RNA, 19 nt, Homo sapiens
  misc_RNA (1)...(19): siRNA sense strand
gaagcaauauaaagaacug

SEQ ID NO: 772417 - RNA, 19 nt, Homo sapiens
  misc_RNA (1)...(19): siRNA sense strand
caaugaagauggaguuauc

SEQ ID NO: 772418 - RNA, 19 nt, Homo sapiens
  misc_RNA (1)...(19): siRNA sense strand
gcaguggcauuacaagaug

SEQ ID NO: 772419 - RNA, 19 nt, Homo sapiens
  misc_RNA (1)...(19): siRNA sense strand
gagugaagauccucccaaa

SEQ ID NO: 772420 - RNA, 19 nt, Homo sapiens
  misc_RNA (1)...(19): siRNA sense strand
gugaaggaauugacuuuga

SEQ ID NO: 772421 - RNA, 19 nt, Homo sapiens
  misc_RNA (1)...(19): siRNA sense strand
guaagaaggucacaauucg

SEQ ID NO: 772422 - RNA, 19 nt, Homo sapiens
  misc_RNA (1)...(19): siRNA sense strand
guacagcugcuuuacagua

SEQ ID NO: 772423 - RNA, 19 nt, Homo sapiens
  misc_RNA (1)...(19): siRNA sense strand
ugacaaaacuggaagaauu

SEQ ID NO: 772424 - RNA, 19 nt, Homo sapiens
  misc_RNA (1)...(19): siRNA sense strand
gcaaagaccaggagcacaa

SEQ ID NO: 772425 - RNA, 19 nt, Homo sapiens
  misc_RNA (1)...(19): siRNA sense strand
gaaccaaggacaaugauca

SEQ ID NO: 772426 - RNA, 19 nt, Homo sapiens
  misc_RNA (1)...(19): siRNA sense strand
ggaauggcacuaggacuua

SEQ ID NO: 772427 - RNA, 19 nt, Homo sapiens
  misc_RNA (1)...(19): siRNA sense strand
uaaaacagccucauuagua

SEQ ID NO: 772428 - RNA, 19 nt, Homo sapiens
  misc_RNA (1)...(19): siRNA sense strand
gaauacagauccaaaauca

SEQ ID NO: 772429 - RNA, 19 nt, Homo sapiens
  misc_RNA (1)...(19): siRNA sense strand
ucaaguuggugucacuaua

SEQ ID NO: 772430 - RNA, 19 nt, Homo sapiens
  misc_RNA (1)...(19): siRNA sense strand
gaaaauggacuaucaaguu

SEQ ID NO: 772431 - RNA, 19 nt, Homo sapiens
  misc_RNA (1)...(19): siRNA sense strand
gaagagaucuauccaauaa

SEQ ID NO: 772432 - RNA, 19 nt, Homo sapiens
  misc_RNA (1)...(19): siRNA sense strand
guacagcaaucauuugaaa

SEQ ID NO: 772433 - RNA, 19 nt, Homo sapiens
  misc_RNA (1)...(19): siRNA sense strand
ggacaaaugcuucuucaaa

SEQ ID NO: 772434 - RNA, 19 nt, Homo sapiens
  misc_RNA (1)...(19): siRNA sense strand
agaaagagcugaagagauc

SEQ ID NO: 772435 - RNA, 19 nt, Homo sapiens
  misc_RNA (1)...(19): siRNA sense strand
ucacaugcuuccagaaaua

SEQ ID NO: 772436 - RNA, 19 nt, Homo sapiens
  misc_RNA (1)...(19): siRNA sense strand
ggacuauaguguagaugua

SEQ ID NO: 772437 - RNA, 19 nt, Homo sapiens
  misc_RNA (1)...(19): siRNA sense strand
gaagguacagcaaucauuu

SEQ ID NO: 772438 - RNA, 19 nt, Homo sapiens
  misc_RNA (1)...(19): siRNA sense strand
ggaagaugcuguuuacaag

SEQ ID NO: 772439 - RNA, 19 nt, Homo sapiens
  misc_RNA (1)...(19): siRNA sense strand
ggaaguauuucggaaggua

SEQ ID NO: 772440 - RNA, 19 nt, Homo sapiens
  misc_RNA (1)...(19): siRNA sense strand
cagaugugcugcuuuauga

SEQ ID NO: 772441 - RNA, 19 nt, Homo sapiens
  misc_RNA (1)...(19): siRNA sense strand
ucacacaacucaucacaug

SEQ ID NO: 772442 - RNA, 19 nt, Homo sapiens
  misc_RNA (1)...(19): siRNA sense strand
gaagaauuccugagacuau

SEQ ID NO: 772443 - RNA, 19 nt, Homo sapiens
  misc_RNA (1)...(19): siRNA sense strand
gagacuauguaaagaaaga

SEQ ID NO: 772444 - RNA, 19 nt, Homo sapiens
  misc_RNA (1)...(19): siRNA sense strand
gaauggagcugacuuugac

SEQ ID NO: 772445 - RNA, 19 nt, Homo sapiens
  misc_RNA (1)...(19): siRNA sense strand
gaacugugcaugaugagaa

SEQ ID NO: 772446 - RNA, 19 nt, Homo sapiens
  misc_RNA (1)...(19): siRNA sense strand
gggcaaagauuuccucacu

SEQ ID NO: 772447 - RNA, 19 nt, Homo sapiens
  misc_RNA (1)...(19): siRNA sense strand
aaccagaugugcugcuuua

SEQ ID NO: 772448 - RNA, 19 nt, Homo sapiens
  misc_RNA (1)...(19): siRNA sense strand
ccaccuagaggaaguauuu

SEQ ID NO: 772449 - RNA, 19 nt, Homo sapiens
  misc_RNA (1)...(19): siRNA sense strand
gcucucaucauaugcaaua

SEQ ID NO: 772450 - RNA, 19 nt, Homo sapiens
  misc_RNA (1)...(19): siRNA sense strand
ggaauggagcugacuuuga

SEQ ID NO: 772451 - RNA, 19 nt, Homo sapiens
  misc_RNA (1)...(19): siRNA sense strand
cauaugcaauacagaguuu

SEQ ID NO: 772452 - RNA, 19 nt, Homo sapiens
  misc_RNA (1)...(19): siRNA sense strand
acaaugggcucuaucuuca

SEQ ID NO: 772453 - RNA, 19 nt, Homo sapiens
  misc_RNA (1)...(19): siRNA sense strand
gcggaacugugcaugauga

SEQ ID NO: 772454 - RNA, 19 nt, Homo sapiens
  misc_RNA (1)...(19): siRNA sense strand
gagcacaaguccucugaca

SEQ ID NO: 772455 - RNA, 19 nt, Homo sapiens
  misc_RNA (1)...(19): siRNA sense strand
gacaaaugcuucuucaaac

SEQ ID NO: 772456 - RNA, 19 nt, Homo sapiens
  misc_RNA (1)...(19): siRNA sense strand
uaacauagaccaaauaucc

SEQ ID NO: 772457 - RNA, 19 nt, Homo sapiens
  misc_RNA (1)...(19): siRNA sense strand
cagaugcccucaagcuuug

SEQ ID NO: 772458 - RNA, 19 nt, Homo sapiens
  misc_RNA (1)...(19): siRNA sense strand
ugacagcacauucuuggua

SEQ ID NO: 772459 - RNA, 19 nt, Homo sapiens
  misc_RNA (1)...(19): siRNA sense strand
gaacuggaaggaagaggaa

SEQ ID NO: 772460 - RNA, 19 nt, Homo sapiens
  misc_RNA (1)...(19): siRNA sense strand
ggucuggacuauaguguag

SEQ ID NO: 772461 - RNA, 19 nt, Homo sapiens
  misc_RNA (1)...(19): siRNA sense strand
ggaagguacagcaaucauu

SEQ ID NO: 772462 - RNA, 19 nt, Homo sapiens
  misc_RNA (1)...(19): siRNA sense strand
cugaagagaucuauccaau

SEQ ID NO: 772463 - RNA, 19 nt, Homo sapiens
  misc_RNA (1)...(19): siRNA sense strand
gaagaugcuguuuacaaga

SEQ ID NO: 772464 - RNA, 19 nt, Homo sapiens
  misc_RNA (1)...(19): siRNA sense strand
acgccuggcucucaucaua

SEQ ID NO: 772465 - RNA, 19 nt, Homo sapiens
  misc_RNA (1)...(19): siRNA sense strand
ucaaaugcccaccauagaa

SEQ ID NO: 772466 - RNA, 19 nt, Homo sapiens
  misc_RNA (1)...(19): siRNA sense strand
ggagcugacuuugacauca

SEQ ID NO: 772467 - RNA, 19 nt, Homo sapiens
  misc_RNA (1)...(19): siRNA sense strand
guaaagaaagagcugaaga

SEQ ID NO: 772468 - RNA, 19 nt, Homo sapiens
  misc_RNA (1)...(19): siRNA sense strand
agagaucuauccaauaaag

SEQ ID NO: 772469 - RNA, 19 nt, Homo sapiens
  misc_RNA (1)...(19): siRNA sense strand
ugaagagaucuauccaaua

SEQ ID NO: 772470 - RNA, 19 nt, Homo sapiens
  misc_RNA (1)...(19): siRNA sense strand
ggacaaacccaaggucauc

SEQ ID NO: 772471 - RNA, 19 nt, Homo sapiens
  misc_RNA (1)...(19): siRNA sense strand
gagggaaucugcggaacug

SEQ ID NO: 772472 - RNA, 19 nt, Homo sapiens
  misc_RNA (1)...(19): siRNA sense strand
gcacacgccuggcucucau

SEQ ID NO: 772473 - RNA, 19 nt, Homo sapiens
  misc_RNA (1)...(19): siRNA sense strand
gcucaaaugcccaccauag

SEQ ID NO: 772474 - RNA, 19 nt, Homo sapiens
  misc_RNA (1)...(19): siRNA sense strand
ggaugaaggagcuacuuga

SEQ ID NO: 772475 - RNA, 19 nt, Homo sapiens
  misc_RNA (1)...(19): siRNA sense strand
caucacaugcuuccagaaa

SEQ ID NO: 772476 - RNA, 19 nt, Homo sapiens
  misc_RNA (1)...(19): siRNA sense strand
gcuuuguccucaugaagaa

SEQ ID NO: 772477 - RNA, 19 nt, Homo sapiens
  misc_RNA (1)...(19): siRNA sense strand
ccucuuuccuggcaauuga

SEQ ID NO: 772478 - RNA, 19 nt, Homo sapiens
  misc_RNA (1)...(19): siRNA sense strand
auacagaguuugaccaucu

SEQ ID NO: 772479 - RNA, 19 nt, Homo sapiens
  misc_RNA (1)...(19): siRNA sense strand
ggucauggcagacucuaug

SEQ ID NO: 772480 - RNA, 19 nt, Homo sapiens
  misc_RNA (1)...(19): siRNA sense strand
gcgcugagggcauuugcua

SEQ ID NO: 772481 - RNA, 19 nt, Homo sapiens
  misc_RNA (1)...(19): siRNA sense strand
gaggaauggagcugacuuu

SEQ ID NO: 772482 - RNA, 19 nt, Homo sapiens
  misc_RNA (1)...(19): siRNA sense strand
cugagacuauguaaagaaa

SEQ ID NO: 772483 - RNA, 19 nt, Homo sapiens
  misc_RNA (1)...(19): siRNA sense strand
caagagaagcaacguaugg

SEQ ID NO: 772484 - RNA, 19 nt, Homo sapiens
  misc_RNA (1)...(19): siRNA sense strand
acagaugcccucaagcuuu

SEQ ID NO: 772485 - RNA, 19 nt, Homo sapiens
  misc_RNA (1)...(19): siRNA sense strand
caggacaaaugcuucuuca

SEQ ID NO: 772486 - RNA, 19 nt, Homo sapiens
  misc_RNA (1)...(19): siRNA sense strand
gcacaaugggcucuaucuu

SEQ ID NO: 772487 - RNA, 19 nt, Homo sapiens
  misc_RNA (1)...(19): siRNA sense strand
caacguauggcaggacaaa

SEQ ID NO: 772488 - RNA, 19 nt, Homo sapiens
  misc_RNA (1)...(19): siRNA sense strand
caauaaaggagagaaacaa

SEQ ID NO: 772489 - RNA, 19 nt, Homo sapiens
  misc_RNA (1)...(19): siRNA sense strand
uggaaucccugggcaaaga

SEQ ID NO: 772490 - RNA, 19 nt, Homo sapiens
  misc_RNA (1)...(19): siRNA sense strand
ucacugguguuuuggauaa

SEQ ID NO: 772491 - RNA, 19 nt, Homo sapiens
  misc_RNA (1)...(19): siRNA sense strand
guguagauguagaagagaa

SEQ ID NO: 772492 - RNA, 19 nt, Homo sapiens
  misc_RNA (1)...(19): siRNA sense strand
gaauuccugagacuaugua

SEQ ID NO: 772493 - RNA, 19 nt, Homo sapiens
  misc_RNA (1)...(19): siRNA sense strand
caagcuuuguccucaugaa

SEQ ID NO: 772494 - RNA, 19 nt, Homo sapiens
  misc_RNA (1)...(19): siRNA sense strand
gcacauucuugguacucau

SEQ ID NO: 772495 - RNA, 19 nt, Homo sapiens
  misc_RNA (1)...(19): siRNA sense strand
gcaagagaagcaacguaug

SEQ ID NO: 772496 - RNA, 19 nt, Homo sapiens
  misc_RNA (1)...(19): siRNA sense strand
aaagaaagagcugaagaga

SEQ ID NO: 772497 - RNA, 19 nt, Homo sapiens
  misc_RNA (1)...(19): siRNA sense strand
ccagaugugcugcuuuaug

SEQ ID NO: 772498 - RNA, 19 nt, Homo sapiens
  misc_RNA (1)...(19): siRNA sense strand
uaguguagauguagaagag

SEQ ID NO: 772499 - RNA, 19 nt, Homo sapiens
  misc_RNA (1)...(19): siRNA sense strand
gcaggacaaaugcuucuuc

SEQ ID NO: 772500 - RNA, 19 nt, Homo sapiens
  misc_RNA (1)...(19): siRNA sense strand
uaaagaaagagcugaagag

SEQ ID NO: 772501 - RNA, 19 nt, Homo sapiens
  misc_RNA (1)...(19): siRNA sense strand
uugagggucuggacuauag

SEQ ID NO: 772502 - RNA, 19 nt, Homo sapiens
  misc_RNA (1)...(19): siRNA sense strand
cacaaugggcucuaucuuc

SEQ ID NO: 772503 - RNA, 19 nt, Homo sapiens
  misc_RNA (1)...(19): siRNA sense strand
cagaaggcaaccacagaaa

SEQ ID NO: 772504 - RNA, 19 nt, Homo sapiens
  misc_RNA (1)...(19): siRNA sense strand
auagaacgacuguccauga

SEQ ID NO: 772505 - RNA, 19 nt, Homo sapiens
  misc_RNA (1)...(19): siRNA sense strand
cacuuaagguguuggaauc

SEQ ID NO: 772506 - RNA, 19 nt, Homo sapiens
  misc_RNA (1)...(19): siRNA sense strand
ccaauaaaggagagaaaca

SEQ ID NO: 772507 - RNA, 19 nt, Homo sapiens
  misc_RNA (1)...(19): siRNA sense strand
gccuggcucucaucauaug

SEQ ID NO: 772508 - RNA, 19 nt, Homo sapiens
  misc_RNA (1)...(19): siRNA sense strand
ccacuuaagguguuggaau

SEQ ID NO: 772509 - RNA, 19 nt, Homo sapiens
  misc_RNA (1)...(19): siRNA sense strand
gagcugacuuugacaucac

SEQ ID NO: 772510 - RNA, 19 nt, Homo sapiens
  misc_RNA (1)...(19): siRNA sense strand
aacccaaggucaucauugu

SEQ ID NO: 772511 - RNA, 19 nt, Homo sapiens
  misc_RNA (1)...(19): siRNA sense strand
aaaauguacugaacuggaa

SEQ ID NO: 772512 - RNA, 19 nt, Homo sapiens
  misc_RNA (1)...(19): siRNA sense strand
caaaugcccaccauagaac

SEQ ID NO: 772513 - RNA, 19 nt, Homo sapiens
  misc_RNA (1)...(19): siRNA sense strand
ggaacaaaauguacugaac

SEQ ID NO: 772514 - RNA, 19 nt, Homo sapiens
  misc_RNA (1)...(19): siRNA sense strand
aggaagaugcuguuuacaa

SEQ ID NO: 772515 - RNA, 19 nt, Homo sapiens
  misc_RNA (1)...(19): siRNA sense strand
gauguagaagagaaucuga

SEQ ID NO: 772516 - RNA, 19 nt, Homo sapiens
  misc_RNA (1)...(19): siRNA sense strand
gggaugaaggagcuacuug

SEQ ID NO: 772517 - RNA, 19 nt, Homo sapiens
  misc_RNA (1)...(19): siRNA sense strand
ucaugaagaauuccugaga

SEQ ID NO: 772518 - RNA, 19 nt, Homo sapiens
  misc_RNA (1)...(19): siRNA sense strand
ccucuucacagucaucuga

SEQ ID NO: 772519 - RNA, 19 nt, Homo sapiens
  misc_RNA (1)...(19): siRNA sense strand
gaugugcugcuuuaugaca

SEQ ID NO: 772520 - RNA, 19 nt, Homo sapiens
  misc_RNA (1)...(19): siRNA sense strand
agacccacguggagaagga

SEQ ID NO: 772521 - RNA, 19 nt, Homo sapiens
  misc_RNA (1)...(19): siRNA sense strand
ugaagaauuccugagacua

SEQ ID NO: 772522 - RNA, 19 nt, Homo sapiens
  misc_RNA (1)...(19): siRNA sense strand
gcucuaucuucaucacaca

SEQ ID NO: 772523 - RNA, 19 nt, Homo sapiens
  misc_RNA (1)...(19): siRNA sense strand
gaacugugggucagagacu

SEQ ID NO: 772524 - RNA, 19 nt, Homo sapiens
  misc_RNA (1)...(19): siRNA sense strand
aaucugacagccagggaua

SEQ ID NO: 772525 - RNA, 19 nt, Homo sapiens
  misc_RNA (1)...(19): siRNA sense strand
gaugaaggagcuacuugag

SEQ ID NO: 772526 - RNA, 19 nt, Homo sapiens
  misc_RNA (1)...(19): siRNA sense strand
caaacccaaggucaucauu

SEQ ID NO: 772527 - RNA, 19 nt, Homo sapiens
  misc_RNA (1)...(19): siRNA sense strand
aagaauuccugagacuaug

SEQ ID NO: 772528 - RNA, 19 nt, Homo sapiens
  misc_RNA (1)...(19): siRNA sense strand
gcucuucaacgccacacaa

SEQ ID NO: 772529 - RNA, 19 nt, Homo sapiens
  misc_RNA (1)...(19): siRNA sense strand
caauacagaguuugaccau

SEQ ID NO: 772530 - RNA, 19 nt, Homo sapiens
  misc_RNA (1)...(19): siRNA sense strand
agauauuucuaccucuuuc

SEQ ID NO: 772531 - RNA, 19 nt, Homo sapiens
  misc_RNA (1)...(19): siRNA sense strand
gaagagaucuauccaauaa

SEQ ID NO: 772532 - RNA, 19 nt, Homo sapiens
  misc_RNA (1)...(19): siRNA sense strand
guacagcaaucauuugaaa

SEQ ID NO: 772533 - RNA, 19 nt, Homo sapiens
  misc_RNA (1)...(19): siRNA sense strand
ggacaaaugcuucuucaaa

SEQ ID NO: 772534 - RNA, 19 nt, Homo sapiens
  misc_RNA (1)...(19): siRNA sense strand
agaaagagcugaagagauc

SEQ ID NO: 772535 - RNA, 19 nt, Homo sapiens
  misc_RNA (1)...(19): siRNA sense strand
ucacaugcuuccagaaaua

SEQ ID NO: 772536 - RNA, 19 nt, Homo sapiens
  misc_RNA (1)...(19): siRNA sense strand
ggacuauaguguagaugua

SEQ ID NO: 772537 - RNA, 19 nt, Homo sapiens
  misc_RNA (1)...(19): siRNA sense strand
gaagguacagcaaucauuu

SEQ ID NO: 772538 - RNA, 19 nt, Homo sapiens
  misc_RNA (1)...(19): siRNA sense strand
ggaagaugcuguuuacaag

SEQ ID NO: 772539 - RNA, 19 nt, Homo sapiens
  misc_RNA (1)...(19): siRNA sense strand
ggaaguauuucggaaggua

SEQ ID NO: 772540 - RNA, 19 nt, Homo sapiens
  misc_RNA (1)...(19): siRNA sense strand
cagaugugcugcuuuauga

SEQ ID NO: 772541 - RNA, 19 nt, Homo sapiens
  misc_RNA (1)...(19): siRNA sense strand
ucacacaacucaucacaug

SEQ ID NO: 772542 - RNA, 19 nt, Homo sapiens
  misc_RNA (1)...(19): siRNA sense strand
gaagaauuccugagacuau

SEQ ID NO: 772543 - RNA, 19 nt, Homo sapiens
  misc_RNA (1)...(19): siRNA sense strand
gagacuauguaaagaaaga

SEQ ID NO: 772544 - RNA, 19 nt, Homo sapiens
  misc_RNA (1)...(19): siRNA sense strand
gaauggagcugacuuugac

SEQ ID NO: 772545 - RNA, 19 nt, Homo sapiens
  misc_RNA (1)...(19): siRNA sense strand
gaacugugcaugaugagaa

SEQ ID NO: 772546 - RNA, 19 nt, Homo sapiens
  misc_RNA (1)...(19): siRNA sense strand
aaccagaugugcugcuuua

SEQ ID NO: 772547 - RNA, 19 nt, Homo sapiens
  misc_RNA (1)...(19): siRNA sense strand
ccaccuagaggaaguauuu

SEQ ID NO: 772548 - RNA, 19 nt, Homo sapiens
  misc_RNA (1)...(19): siRNA sense strand
gcucucaucauaugcaaua

SEQ ID NO: 772549 - RNA, 19 nt, Homo sapiens
  misc_RNA (1)...(19): siRNA sense strand
ggaauggagcugacuuuga

SEQ ID NO: 772550 - RNA, 19 nt, Homo sapiens
  misc_RNA (1)...(19): siRNA sense strand
cauaugcaauacagaguuu

SEQ ID NO: 772551 - RNA, 19 nt, Homo sapiens
  misc_RNA (1)...(19): siRNA sense strand
acaaugggcucuaucuuca

SEQ ID NO: 772552 - RNA, 19 nt, Homo sapiens
  misc_RNA (1)...(19): siRNA sense strand
gcggaacugugcaugauga

SEQ ID NO: 772553 - RNA, 19 nt, Homo sapiens
  misc_RNA (1)...(19): siRNA sense strand
gagcacaaguccucugaca

SEQ ID NO: 772554 - RNA, 19 nt, Homo sapiens
  misc_RNA (1)...(19): siRNA sense strand
gacaaaugcuucuucaaac

SEQ ID NO: 772555 - RNA, 19 nt, Homo sapiens
  misc_RNA (1)...(19): siRNA sense strand
uaacauagaccaaauaucc

SEQ ID NO: 772556 - RNA, 19 nt, Homo sapiens
  misc_RNA (1)...(19): siRNA sense strand
cagaugcccucaagcuuug

SEQ ID NO: 772557 - RNA, 19 nt, Homo sapiens
  misc_RNA (1)...(19): siRNA sense strand
ugacagcacauucuuggua

SEQ ID NO: 772558 - RNA, 19 nt, Homo sapiens
  misc_RNA (1)...(19): siRNA sense strand
ggucuggacuauaguguag

SEQ ID NO: 772559 - RNA, 19 nt, Homo sapiens
  misc_RNA (1)...(19): siRNA sense strand
ggaagguacagcaaucauu

SEQ ID NO: 772560 - RNA, 19 nt, Homo sapiens
  misc_RNA (1)...(19): siRNA sense strand
cugaagagaucuauccaau

SEQ ID NO: 772561 - RNA, 19 nt, Homo sapiens
  misc_RNA (1)...(19): siRNA sense strand
gaagaugcuguuuacaaga

SEQ ID NO: 772562 - RNA, 19 nt, Homo sapiens
  misc_RNA (1)...(19): siRNA sense strand
acgccuggcucucaucaua

SEQ ID NO: 772563 - RNA, 19 nt, Homo sapiens
  misc_RNA (1)...(19): siRNA sense strand
ucaaaugcccaccauagaa

SEQ ID NO: 772564 - RNA, 19 nt, Homo sapiens
  misc_RNA (1)...(19): siRNA sense strand
ggagcugacuuugacauca

SEQ ID NO: 772565 - RNA, 19 nt, Homo sapiens
  misc_RNA (1)...(19): siRNA sense strand
guaaagaaagagcugaaga

SEQ ID NO: 772566 - RNA, 19 nt, Homo sapiens
  misc_RNA (1)...(19): siRNA sense strand
agagaucuauccaauaaag

SEQ ID NO: 772567 - RNA, 19 nt, Homo sapiens
  misc_RNA (1)...(19): siRNA sense strand
ugaagagaucuauccaaua

SEQ ID NO: 772568 - RNA, 19 nt, Homo sapiens
  misc_RNA (1)...(19): siRNA sense strand
ggacaaacccaaggucauc

SEQ ID NO: 772569 - RNA, 19 nt, Homo sapiens
  misc_RNA (1)...(19): siRNA sense strand
gagggaaucugcggaacug

SEQ ID NO: 772570 - RNA, 19 nt, Homo sapiens
  misc_RNA (1)...(19): siRNA sense strand
gcacacgccuggcucucau

SEQ ID NO: 772571 - RNA, 19 nt, Homo sapiens
  misc_RNA (1)...(19): siRNA sense strand
gcucaaaugcccaccauag

SEQ ID NO: 772572 - RNA, 19 nt, Homo sapiens
  misc_RNA (1)...(19): siRNA sense strand
ggaugaaggagcuacuuga

SEQ ID NO: 772573 - RNA, 19 nt, Homo sapiens
  misc_RNA (1)...(19): siRNA sense strand
caucacaugcuuccagaaa

SEQ ID NO: 772574 - RNA, 19 nt, Homo sapiens
  misc_RNA (1)...(19): siRNA sense strand
auacagaguuugaccaucu

SEQ ID NO: 772575 - RNA, 19 nt, Homo sapiens
  misc_RNA (1)...(19): siRNA sense strand
ccucuuuccuggcaauuga

SEQ ID NO: 772576 - RNA, 19 nt, Homo sapiens
  misc_RNA (1)...(19): siRNA sense strand
gcuuuguccucaugaagaa

SEQ ID NO: 772577 - RNA, 19 nt, Homo sapiens
  misc_RNA (1)...(19): siRNA sense strand
cugagacuauguaaagaaa

SEQ ID NO: 772578 - RNA, 19 nt, Homo sapiens
  misc_RNA (1)...(19): siRNA sense strand
gcgcugagggcauuugcua

SEQ ID NO: 772579 - RNA, 19 nt, Homo sapiens
  misc_RNA (1)...(19): siRNA sense strand
gaggaauggagcugacuuu

SEQ ID NO: 772580 - RNA, 19 nt, Homo sapiens
  misc_RNA (1)...(19): siRNA sense strand
caagagaagcaacguaugg

SEQ ID NO: 772581 - RNA, 19 nt, Homo sapiens
  misc_RNA (1)...(19): siRNA sense strand
acagaugcccucaagcuuu

SEQ ID NO: 772582 - RNA, 19 nt, Homo sapiens
  misc_RNA (1)...(19): siRNA sense strand
caggacaaaugcuucuuca

SEQ ID NO: 772583 - RNA, 19 nt, Homo sapiens
  misc_RNA (1)...(19): siRNA sense strand
gcacaaugggcucuaucuu

SEQ ID NO: 772584 - RNA, 19 nt, Homo sapiens
  misc_RNA (1)...(19): siRNA sense strand
caauaaaggagagaaacaa

SEQ ID NO: 772585 - RNA, 19 nt, Homo sapiens
  misc_RNA (1)...(19): siRNA sense strand
caacguauggcaggacaaa

SEQ ID NO: 772586 - RNA, 19 nt, Homo sapiens
  misc_RNA (1)...(19): siRNA sense strand
gaauuccugagacuaugua

SEQ ID NO: 772587 - RNA, 19 nt, Homo sapiens
  misc_RNA (1)...(19): siRNA sense strand
guguagauguagaagagaa

SEQ ID NO: 772588 - RNA, 19 nt, Homo sapiens
  misc_RNA (1)...(19): siRNA sense strand
caagcuuuguccucaugaa

SEQ ID NO: 772589 - RNA, 19 nt, Homo sapiens
  misc_RNA (1)...(19): siRNA sense strand
gcaagagaagcaacguaug

SEQ ID NO: 772590 - RNA, 19 nt, Homo sapiens
  misc_RNA (1)...(19): siRNA sense strand
gcacauucuugguacucau

SEQ ID NO: 772591 - RNA, 19 nt, Homo sapiens
  misc_RNA (1)...(19): siRNA sense strand
aaagaaagagcugaagaga

SEQ ID NO: 772592 - RNA, 19 nt, Homo sapiens
  misc_RNA (1)...(19): siRNA sense strand
ccagaugugcugcuuuaug

SEQ ID NO: 772593 - RNA, 19 nt, Homo sapiens
  misc_RNA (1)...(19): siRNA sense strand
uaguguagauguagaagag

SEQ ID NO: 772594 - RNA, 19 nt, Homo sapiens
  misc_RNA (1)...(19): siRNA sense strand
uaaagaaagagcugaagag

SEQ ID NO: 772595 - RNA, 19 nt, Homo sapiens
  misc_RNA (1)...(19): siRNA sense strand
gcaggacaaaugcuucuuc

SEQ ID NO: 772596 - RNA, 19 nt, Homo sapiens
  misc_RNA (1)...(19): siRNA sense strand
uugagggucuggacuauag

SEQ ID NO: 772597 - RNA, 19 nt, Homo sapiens
  misc_RNA (1)...(19): siRNA sense strand
cacaaugggcucuaucuuc

SEQ ID NO: 772598 - RNA, 19 nt, Homo sapiens
  misc_RNA (1)...(19): siRNA sense strand
ccaauaaaggagagaaaca

SEQ ID NO: 772599 - RNA, 19 nt, Homo sapiens
  misc_RNA (1)...(19): siRNA sense strand
auagaacgacuguccauga

SEQ ID NO: 772600 - RNA, 19 nt, Homo sapiens
  misc_RNA (1)...(19): siRNA sense strand
gccuggcucucaucauaug

SEQ ID NO: 772601 - RNA, 19 nt, Homo sapiens
  misc_RNA (1)...(19): siRNA sense strand
gagcugacuuugacaucac

SEQ ID NO: 772602 - RNA, 19 nt, Homo sapiens
  misc_RNA (1)...(19): siRNA sense strand
aacccaaggucaucauugu

SEQ ID NO: 772603 - RNA, 19 nt, Homo sapiens
  misc_RNA (1)...(19): siRNA sense strand
gggaugaaggagcuacuug

SEQ ID NO: 772604 - RNA, 19 nt, Homo sapiens
  misc_RNA (1)...(19): siRNA sense strand
caaaugcccaccauagaac

SEQ ID NO: 772605 - RNA, 19 nt, Homo sapiens
  misc_RNA (1)...(19): siRNA sense strand
aggaagaugcuguuuacaa

SEQ ID NO: 772606 - RNA, 19 nt, Homo sapiens
  misc_RNA (1)...(19): siRNA sense strand
gauguagaagagaaucuga

SEQ ID NO: 772607 - RNA, 19 nt, Homo sapiens
  misc_RNA (1)...(19): siRNA sense strand
ucaugaagaauuccugaga

SEQ ID NO: 772608 - RNA, 19 nt, Homo sapiens
  misc_RNA (1)...(19): siRNA sense strand
ccucuucacagucaucuga

SEQ ID NO: 772609 - RNA, 19 nt, Homo sapiens
  misc_RNA (1)...(19): siRNA sense strand
gaugugcugcuuuaugaca

SEQ ID NO: 772610 - RNA, 19 nt, Homo sapiens
  misc_RNA (1)...(19): siRNA sense strand
agacccacguggagaagga

SEQ ID NO: 772611 - RNA, 19 nt, Homo sapiens
  misc_RNA (1)...(19): siRNA sense strand
aaucugacagccagggaua

SEQ ID NO: 772612 - RNA, 19 nt, Homo sapiens
  misc_RNA (1)...(19): siRNA sense strand
gcucuaucuucaucacaca

SEQ ID NO: 772613 - RNA, 19 nt, Homo sapiens
  misc_RNA (1)...(19): siRNA sense strand
gaacugugggucagagacu

SEQ ID NO: 772614 - RNA, 19 nt, Homo sapiens
  misc_RNA (1)...(19): siRNA sense strand
ugaagaauuccugagacua

SEQ ID NO: 772615 - RNA, 19 nt, Homo sapiens
  misc_RNA (1)...(19): siRNA sense strand
gaugaaggagcuacuugag

SEQ ID NO: 772616 - RNA, 19 nt, Homo sapiens
  misc_RNA (1)...(19): siRNA sense strand
caaacccaaggucaucauu

SEQ ID NO: 772617 - RNA, 19 nt, Homo sapiens
  misc_RNA (1)...(19): siRNA sense strand
caauacagaguuugaccau

SEQ ID NO: 772618 - RNA, 19 nt, Homo sapiens
  misc_RNA (1)...(19): siRNA sense strand
gcucuucaacgccacacaa

SEQ ID NO: 772619 - RNA, 19 nt, Homo sapiens
  misc_RNA (1)...(19): siRNA sense strand
aagaauuccugagacuaug

SEQ ID NO: 772620 - RNA, 19 nt, Homo sapiens
  misc_RNA (1)...(19): siRNA sense strand
gagcugaagagaucuaucc

SEQ ID NO: 772621 - RNA, 19 nt, Homo sapiens
  misc_RNA (1)...(19): siRNA sense strand
agauauuucuaccucuuuc

SEQ ID NO: 772622 - RNA, 19 nt, Homo sapiens
  misc_RNA (1)...(19): siRNA sense strand
uagaacgacuguccaugac

SEQ ID NO: 772623 - RNA, 19 nt, Homo sapiens
  misc_RNA (1)...(19): siRNA sense strand
ccugagacuauguaaagaa

SEQ ID NO: 772624 - RNA, 19 nt, Homo sapiens
  misc_RNA (1)...(19): siRNA sense strand
acaagacccacguggagaa

SEQ ID NO: 772625 - RNA, 19 nt, Homo sapiens
  misc_RNA (1)...(19): siRNA sense strand
aaacccaaggucaucauug

SEQ ID NO: 772626 - RNA, 19 nt, Homo sapiens
  misc_RNA (1)...(19): siRNA sense strand
aaaugcuucuucaaaccuu

SEQ ID NO: 772627 - RNA, 19 nt, Homo sapiens
  misc_RNA (1)...(19): siRNA sense strand
aagaugcuguuuacaagac

SEQ ID NO: 772628 - RNA, 19 nt, Homo sapiens
  misc_RNA (1)...(19): siRNA sense strand
aaagagcugaagagaucua

SEQ ID NO: 772629 - RNA, 19 nt, Homo sapiens
  misc_RNA (1)...(19): siRNA sense strand
aaugggcucuaucuucauc

SEQ ID NO: 772630 - RNA, 19 nt, Homo sapiens
  misc_RNA (1)...(19): siRNA sense strand
acaaaugcuucuucaaacc

SEQ ID NO: 772631 - RNA, 19 nt, Homo sapiens
  misc_RNA (1)...(19): siRNA sense strand
gaagagaucuauccaauaa

SEQ ID NO: 772632 - RNA, 19 nt, Homo sapiens
  misc_RNA (1)...(19): siRNA sense strand
guacagcaaucauuugaaa

SEQ ID NO: 772633 - RNA, 19 nt, Homo sapiens
  misc_RNA (1)...(19): siRNA sense strand
agaaagagcugaagagauc

SEQ ID NO: 772634 - RNA, 19 nt, Homo sapiens
  misc_RNA (1)...(19): siRNA sense strand
ucacaugcuuccagaaaua

SEQ ID NO: 772635 - RNA, 19 nt, Homo sapiens
  misc_RNA (1)...(19): siRNA sense strand
ggacuauaguguagaugua

SEQ ID NO: 772636 - RNA, 19 nt, Homo sapiens
  misc_RNA (1)...(19): siRNA sense strand
gaagguacagcaaucauuu

SEQ ID NO: 772637 - RNA, 19 nt, Homo sapiens
  misc_RNA (1)...(19): siRNA sense strand
ggaagaugcuguuuacaag

SEQ ID NO: 772638 - RNA, 19 nt, Homo sapiens
  misc_RNA (1)...(19): siRNA sense strand
ggaaguauuucggaaggua

SEQ ID NO: 772639 - RNA, 19 nt, Homo sapiens
  misc_RNA (1)...(19): siRNA sense strand
cagaugugcugcuuuauga

SEQ ID NO: 772640 - RNA, 19 nt, Homo sapiens
  misc_RNA (1)...(19): siRNA sense strand
ucacacaacucaucacaug

SEQ ID NO: 772641 - RNA, 19 nt, Homo sapiens
  misc_RNA (1)...(19): siRNA sense strand
gaagaauuccugagacuau

SEQ ID NO: 772642 - RNA, 19 nt, Homo sapiens
  misc_RNA (1)...(19): siRNA sense strand
gagacuauguaaagaaaga

SEQ ID NO: 772643 - RNA, 19 nt, Homo sapiens
  misc_RNA (1)...(19): siRNA sense strand
gaauggagcugacuuugac

SEQ ID NO: 772644 - RNA, 19 nt, Homo sapiens
  misc_RNA (1)...(19): siRNA sense strand
gaacugugcaugaugagaa

SEQ ID NO: 772645 - RNA, 19 nt, Homo sapiens
  misc_RNA (1)...(19): siRNA sense strand
aaccagaugugcugcuuua

SEQ ID NO: 772646 - RNA, 19 nt, Homo sapiens
  misc_RNA (1)...(19): siRNA sense strand
ccaccuagaggaaguauuu

SEQ ID NO: 772647 - RNA, 19 nt, Homo sapiens
  misc_RNA (1)...(19): siRNA sense strand
gcucucaucauaugcaaua

SEQ ID NO: 772648 - RNA, 19 nt, Homo sapiens
  misc_RNA (1)...(19): siRNA sense strand
ggaauggagcugacuuuga

SEQ ID NO: 772649 - RNA, 19 nt, Homo sapiens
  misc_RNA (1)...(19): siRNA sense strand
cauaugcaauacagaguuu

SEQ ID NO: 772650 - RNA, 19 nt, Homo sapiens
  misc_RNA (1)...(19): siRNA sense strand
acaaugggcucuaucuuca

SEQ ID NO: 772651 - RNA, 19 nt, Homo sapiens
  misc_RNA (1)...(19): siRNA sense strand
gcggaacugugcaugauga

SEQ ID NO: 772652 - RNA, 19 nt, Homo sapiens
  misc_RNA (1)...(19): siRNA sense strand
gagcacaaguccucugaca

SEQ ID NO: 772653 - RNA, 19 nt, Homo sapiens
  misc_RNA (1)...(19): siRNA sense strand
ugacagcacauucuuggua

SEQ ID NO: 772654 - RNA, 19 nt, Homo sapiens
  misc_RNA (1)...(19): siRNA sense strand
cagaugcccucaagcuuug

SEQ ID NO: 772655 - RNA, 19 nt, Homo sapiens
  misc_RNA (1)...(19): siRNA sense strand
ggucuggacuauaguguag

SEQ ID NO: 772656 - RNA, 19 nt, Homo sapiens
  misc_RNA (1)...(19): siRNA sense strand
ggaagguacagcaaucauu

SEQ ID NO: 772657 - RNA, 19 nt, Homo sapiens
  misc_RNA (1)...(19): siRNA sense strand
cugaagagaucuauccaau

SEQ ID NO: 772658 - RNA, 19 nt, Homo sapiens
  misc_RNA (1)...(19): siRNA sense strand
gaagaugcuguuuacaaga

SEQ ID NO: 772659 - RNA, 19 nt, Homo sapiens
  misc_RNA (1)...(19): siRNA sense strand
acgccuggcucucaucaua

SEQ ID NO: 772660 - RNA, 19 nt, Homo sapiens
  misc_RNA (1)...(19): siRNA sense strand
ucaaaugcccaccauagaa

SEQ ID NO: 772661 - RNA, 19 nt, Homo sapiens
  misc_RNA (1)...(19): siRNA sense strand
ggagcugacuuugacauca

SEQ ID NO: 772662 - RNA, 19 nt, Homo sapiens
  misc_RNA (1)...(19): siRNA sense strand
guaaagaaagagcugaaga

SEQ ID NO: 772663 - RNA, 19 nt, Homo sapiens
  misc_RNA (1)...(19): siRNA sense strand
agagaucuauccaauaaag

SEQ ID NO: 772664 - RNA, 19 nt, Homo sapiens
  misc_RNA (1)...(19): siRNA sense strand
ugaagagaucuauccaaua

SEQ ID NO: 772665 - RNA, 19 nt, Homo sapiens
  misc_RNA (1)...(19): siRNA sense strand
ggacaaacccaaggucauc

SEQ ID NO: 772666 - RNA, 19 nt, Homo sapiens
  misc_RNA (1)...(19): siRNA sense strand
gagggaaucugcggaacug

SEQ ID NO: 772667 - RNA, 19 nt, Homo sapiens
  misc_RNA (1)...(19): siRNA sense strand
gcacacgccuggcucucau

SEQ ID NO: 772668 - RNA, 19 nt, Homo sapiens
  misc_RNA (1)...(19): siRNA sense strand
gcucaaaugcccaccauag

SEQ ID NO: 772669 - RNA, 19 nt, Homo sapiens
  misc_RNA (1)...(19): siRNA sense strand
ggaugaaggagcuacuuga

SEQ ID NO: 772670 - RNA, 19 nt, Homo sapiens
  misc_RNA (1)...(19): siRNA sense strand
caucacaugcuuccagaaa

SEQ ID NO: 772671 - RNA, 19 nt, Homo sapiens
  misc_RNA (1)...(19): siRNA sense strand
gcuuuguccucaugaagaa

SEQ ID NO: 772672 - RNA, 19 nt, Homo sapiens
  misc_RNA (1)...(19): siRNA sense strand
ccucuuuccuggcaauuga

SEQ ID NO: 772673 - RNA, 19 nt, Homo sapiens
  misc_RNA (1)...(19): siRNA sense strand
auacagaguuugaccaucu

SEQ ID NO: 772674 - RNA, 19 nt, Homo sapiens
  misc_RNA (1)...(19): siRNA sense strand
cugagacuauguaaagaaa

SEQ ID NO: 772675 - RNA, 19 nt, Homo sapiens
  misc_RNA (1)...(19): siRNA sense strand
gcgcugagggcauuugcua

SEQ ID NO: 772676 - RNA, 19 nt, Homo sapiens
  misc_RNA (1)...(19): siRNA sense strand
gaggaauggagcugacuuu

SEQ ID NO: 772677 - RNA, 19 nt, Homo sapiens
  misc_RNA (1)...(19): siRNA sense strand
acagaugcccucaagcuuu

SEQ ID NO: 772678 - RNA, 19 nt, Homo sapiens
  misc_RNA (1)...(19): siRNA sense strand
gcacaaugggcucuaucuu

SEQ ID NO: 772679 - RNA, 19 nt, Homo sapiens
  misc_RNA (1)...(19): siRNA sense strand
caauaaaggagagaaacaa

SEQ ID NO: 772680 - RNA, 19 nt, Homo sapiens
  misc_RNA (1)...(19): siRNA sense strand
gaauuccugagacuaugua

SEQ ID NO: 772681 - RNA, 19 nt, Homo sapiens
  misc_RNA (1)...(19): siRNA sense strand
guguagauguagaagagaa

SEQ ID NO: 772682 - RNA, 19 nt, Homo sapiens
  misc_RNA (1)...(19): siRNA sense strand
gcacauucuugguacucau

SEQ ID NO: 772683 - RNA, 19 nt, Homo sapiens
  misc_RNA (1)...(19): siRNA sense strand
caagcuuuguccucaugaa

SEQ ID NO: 772684 - RNA, 19 nt, Homo sapiens
  misc_RNA (1)...(19): siRNA sense strand
uaguguagauguagaagag

SEQ ID NO: 772685 - RNA, 19 nt, Homo sapiens
  misc_RNA (1)...(19): siRNA sense strand
ccagaugugcugcuuuaug

SEQ ID NO: 772686 - RNA, 19 nt, Homo sapiens
  misc_RNA (1)...(19): siRNA sense strand
aaagaaagagcugaagaga

SEQ ID NO: 772687 - RNA, 19 nt, Homo sapiens
  misc_RNA (1)...(19): siRNA sense strand
uaaagaaagagcugaagag

SEQ ID NO: 772688 - RNA, 19 nt, Homo sapiens
  misc_RNA (1)...(19): siRNA sense strand
uugagggucuggacuauag

SEQ ID NO: 772689 - RNA, 19 nt, Homo sapiens
  misc_RNA (1)...(19): siRNA sense strand
cacaaugggcucuaucuuc

SEQ ID NO: 772690 - RNA, 19 nt, Homo sapiens
  misc_RNA (1)...(19): siRNA sense strand
ccaauaaaggagagaaaca

SEQ ID NO: 772691 - RNA, 19 nt, Homo sapiens
  misc_RNA (1)...(19): siRNA sense strand
auagaacgacuguccauga

SEQ ID NO: 772692 - RNA, 19 nt, Homo sapiens
  misc_RNA (1)...(19): siRNA sense strand
gccuggcucucaucauaug

SEQ ID NO: 772693 - RNA, 19 nt, Homo sapiens
  misc_RNA (1)...(19): siRNA sense strand
gagcugacuuugacaucac

SEQ ID NO: 772694 - RNA, 19 nt, Homo sapiens
  misc_RNA (1)...(19): siRNA sense strand
aacccaaggucaucauugu

SEQ ID NO: 772695 - RNA, 19 nt, Homo sapiens
  misc_RNA (1)...(19): siRNA sense strand
gggaugaaggagcuacuug

SEQ ID NO: 772696 - RNA, 19 nt, Homo sapiens
  misc_RNA (1)...(19): siRNA sense strand
caaaugcccaccauagaac

SEQ ID NO: 772697 - RNA, 19 nt, Homo sapiens
  misc_RNA (1)...(19): siRNA sense strand
aggaagaugcuguuuacaa

SEQ ID NO: 772698 - RNA, 19 nt, Homo sapiens
  misc_RNA (1)...(19): siRNA sense strand
gauguagaagagaaucuga

SEQ ID NO: 772699 - RNA, 19 nt, Homo sapiens
  misc_RNA (1)...(19): siRNA sense strand
ucaugaagaauuccugaga

SEQ ID NO: 772700 - RNA, 19 nt, Homo sapiens
  misc_RNA (1)...(19): siRNA sense strand
ccucuucacagucaucuga

SEQ ID NO: 772701 - RNA, 19 nt, Homo sapiens
  misc_RNA (1)...(19): siRNA sense strand
gaugugcugcuuuaugaca

SEQ ID NO: 772702 - RNA, 19 nt, Homo sapiens
  misc_RNA (1)...(19): siRNA sense strand
agacccacguggagaagga

SEQ ID NO: 772703 - RNA, 19 nt, Homo sapiens
  misc_RNA (1)...(19): siRNA sense strand
ugaagaauuccugagacua

SEQ ID NO: 772704 - RNA, 19 nt, Homo sapiens
  misc_RNA (1)...(19): siRNA sense strand
gcucuaucuucaucacaca

SEQ ID NO: 772705 - RNA, 19 nt, Homo sapiens
  misc_RNA (1)...(19): siRNA sense strand
gaacugugggucagagacu

SEQ ID NO: 772706 - RNA, 19 nt, Homo sapiens
  misc_RNA (1)...(19): siRNA sense strand
aaucugacagccagggaua

SEQ ID NO: 772707 - RNA, 19 nt, Homo sapiens
  misc_RNA (1)...(19): siRNA sense strand
gaugaaggagcuacuugag

SEQ ID NO: 772708 - RNA, 19 nt, Homo sapiens
  misc_RNA (1)...(19): siRNA sense strand
caaacccaaggucaucauu

SEQ ID NO: 772709 - RNA, 19 nt, Homo sapiens
  misc_RNA (1)...(19): siRNA sense strand
caauacagaguuugaccau

SEQ ID NO: 772710 - RNA, 19 nt, Homo sapiens
  misc_RNA (1)...(19): siRNA sense strand
gcucuucaacgccacacaa

SEQ ID NO: 772711 - RNA, 19 nt, Homo sapiens
  misc_RNA (1)...(19): siRNA sense strand
aagaauuccugagacuaug

SEQ ID NO: 772712 - RNA, 19 nt, Homo sapiens
  misc_RNA (1)...(19): siRNA sense strand
gagcugaagagaucuaucc

SEQ ID NO: 772713 - RNA, 19 nt, Homo sapiens
  misc_RNA (1)...(19): siRNA sense strand
agauauuucuaccucuuuc

SEQ ID NO: 772714 - RNA, 19 nt, Homo sapiens
  misc_RNA (1)...(19): siRNA sense strand
uagaacgacuguccaugac

SEQ ID NO: 772715 - RNA, 19 nt, Homo sapiens
  misc_RNA (1)...(19): siRNA sense strand
acaagacccacguggagaa

SEQ ID NO: 772716 - RNA, 19 nt, Homo sapiens
  misc_RNA (1)...(19): siRNA sense strand
aaacccaaggucaucauug

SEQ ID NO: 772717 - RNA, 19 nt, Homo sapiens
  misc_RNA (1)...(19): siRNA sense strand
ccugagacuauguaaagaa

SEQ ID NO: 772718 - RNA, 19 nt, Homo sapiens
  misc_RNA (1)...(19): siRNA sense strand
gcugaagagaucuauccaa

SEQ ID NO: 772719 - RNA, 19 nt, Homo sapiens
  misc_RNA (1)...(19): siRNA sense strand
cuacagaugcccucaagcu

SEQ ID NO: 772720 - RNA, 19 nt, Homo sapiens
  misc_RNA (1)...(19): siRNA sense strand
aaugggcucuaucuucauc

SEQ ID NO: 772721 - RNA, 19 nt, Homo sapiens
  misc_RNA (1)...(19): siRNA sense strand
aaagagcugaagagaucua

SEQ ID NO: 772722 - RNA, 19 nt, Homo sapiens
  misc_RNA (1)...(19): siRNA sense strand
aagaugcuguuuacaagac

SEQ ID NO: 772723 - RNA, 19 nt, Homo sapiens
  misc_RNA (1)...(19): siRNA sense strand
ugacagccagggauaugga

SEQ ID NO: 772724 - RNA, 19 nt, Homo sapiens
  misc_RNA (1)...(19): siRNA sense strand
gguacagcaaucauuugaa

SEQ ID NO: 772725 - RNA, 19 nt, Homo sapiens
  misc_RNA (1)...(19): siRNA sense strand
caucacacaacucaucaca

SEQ ID NO: 772726 - RNA, 19 nt, Homo sapiens
  misc_RNA (1)...(19): siRNA sense strand
ggagggaaucugcggaacu

SEQ ID NO: 772727 - RNA, 19 nt, Homo sapiens
  misc_RNA (1)...(19): siRNA sense strand
cagcaaucauuugaaacuc

SEQ ID NO: 772728 - RNA, 19 nt, Homo sapiens
  misc_RNA (1)...(19): siRNA sense strand
gcugccaccuagaggaagu

SEQ ID NO: 772729 - RNA, 19 nt, Homo sapiens
  misc_RNA (1)...(19): siRNA sense strand
ucauaugcaauacagaguu

SEQ ID NO: 772730 - RNA, 19 nt, Homo sapiens
  misc_RNA (1)...(19): siRNA sense strand
cugcggaacugugcaugau

SEQ ID NO: 772731 - RNA, 19 nt, Homo sapiens
  misc_RNA (1)...(19): siRNA sense strand
gaagagaucuauccaauaa

SEQ ID NO: 772732 - RNA, 19 nt, Homo sapiens
  misc_RNA (1)...(19): siRNA sense strand
guacagcaaucauuugaaa

SEQ ID NO: 772733 - RNA, 19 nt, Homo sapiens
  misc_RNA (1)...(19): siRNA sense strand
ggacaaaugcuucuucaaa

SEQ ID NO: 772734 - RNA, 19 nt, Homo sapiens
  misc_RNA (1)...(19): siRNA sense strand
agaaagagcugaagagauc

SEQ ID NO: 772735 - RNA, 19 nt, Homo sapiens
  misc_RNA (1)...(19): siRNA sense strand
ucacaugcuuccagaaaua

SEQ ID NO: 772736 - RNA, 19 nt, Homo sapiens
  misc_RNA (1)...(19): siRNA sense strand
ggacuauaguguagaugua

SEQ ID NO: 772737 - RNA, 19 nt, Homo sapiens
  misc_RNA (1)...(19): siRNA sense strand
gaagguacagcaaucauuu

SEQ ID NO: 772738 - RNA, 19 nt, Homo sapiens
  misc_RNA (1)...(19): siRNA sense strand
ggaagaugcuguuuacaag

SEQ ID NO: 772739 - RNA, 19 nt, Homo sapiens
  misc_RNA (1)...(19): siRNA sense strand
ggaaguauuucggaaggua

SEQ ID NO: 772740 - RNA, 19 nt, Homo sapiens
  misc_RNA (1)...(19): siRNA sense strand
cagaugugcugcuuuauga

SEQ ID NO: 772741 - RNA, 19 nt, Homo sapiens
  misc_RNA (1)...(19): siRNA sense strand
ucacacaacucaucacaug

SEQ ID NO: 772742 - RNA, 19 nt, Homo sapiens
  misc_RNA (1)...(19): siRNA sense strand
gaagaauuccugagacuau

SEQ ID NO: 772743 - RNA, 19 nt, Homo sapiens
  misc_RNA (1)...(19): siRNA sense strand
gagacuauguaaagaaaga

SEQ ID NO: 772744 - RNA, 19 nt, Homo sapiens
  misc_RNA (1)...(19): siRNA sense strand
gaauggagcugacuuugac

SEQ ID NO: 772745 - RNA, 19 nt, Homo sapiens
  misc_RNA (1)...(19): siRNA sense strand
gaacugugcaugaugagaa

SEQ ID NO: 772746 - RNA, 19 nt, Homo sapiens
  misc_RNA (1)...(19): siRNA sense strand
gggcaaagauuuccucacu

SEQ ID NO: 772747 - RNA, 19 nt, Homo sapiens
  misc_RNA (1)...(19): siRNA sense strand
aaccagaugugcugcuuua

SEQ ID NO: 772748 - RNA, 19 nt, Homo sapiens
  misc_RNA (1)...(19): siRNA sense strand
ccaccuagaggaaguauuu

SEQ ID NO: 772749 - RNA, 19 nt, Homo sapiens
  misc_RNA (1)...(19): siRNA sense strand
gcucucaucauaugcaaua

SEQ ID NO: 772750 - RNA, 19 nt, Homo sapiens
  misc_RNA (1)...(19): siRNA sense strand
ggaauggagcugacuuuga

SEQ ID NO: 772751 - RNA, 19 nt, Homo sapiens
  misc_RNA (1)...(19): siRNA sense strand
cauaugcaauacagaguuu

SEQ ID NO: 772752 - RNA, 19 nt, Homo sapiens
  misc_RNA (1)...(19): siRNA sense strand
acaaugggcucuaucuuca

SEQ ID NO: 772753 - RNA, 19 nt, Homo sapiens
  misc_RNA (1)...(19): siRNA sense strand
gcggaacugugcaugauga

SEQ ID NO: 772754 - RNA, 19 nt, Homo sapiens
  misc_RNA (1)...(19): siRNA sense strand
gagcacaaguccucugaca

SEQ ID NO: 772755 - RNA, 19 nt, Homo sapiens
  misc_RNA (1)...(19): siRNA sense strand
gacaaaugcuucuucaaac

SEQ ID NO: 772756 - RNA, 19 nt, Homo sapiens
  misc_RNA (1)...(19): siRNA sense strand
uaacauagaccaaauaucc

SEQ ID NO: 772757 - RNA, 19 nt, Homo sapiens
  misc_RNA (1)...(19): siRNA sense strand
cagaugcccucaagcuuug

SEQ ID NO: 772758 - RNA, 19 nt, Homo sapiens
  misc_RNA (1)...(19): siRNA sense strand
ugacagcacauucuuggua

SEQ ID NO: 772759 - RNA, 19 nt, Homo sapiens
  misc_RNA (1)...(19): siRNA sense strand
gaacuggaaggaagaggaa

SEQ ID NO: 772760 - RNA, 19 nt, Homo sapiens
  misc_RNA (1)...(19): siRNA sense strand
ggucuggacuauaguguag

SEQ ID NO: 772761 - RNA, 19 nt, Homo sapiens
  misc_RNA (1)...(19): siRNA sense strand
ggaagguacagcaaucauu

SEQ ID NO: 772762 - RNA, 19 nt, Homo sapiens
  misc_RNA (1)...(19): siRNA sense strand
cugaagagaucuauccaau

SEQ ID NO: 772763 - RNA, 19 nt, Homo sapiens
  misc_RNA (1)...(19): siRNA sense strand
gaagaugcuguuuacaaga

SEQ ID NO: 772764 - RNA, 19 nt, Homo sapiens
  misc_RNA (1)...(19): siRNA sense strand
acgccuggcucucaucaua

SEQ ID NO: 772765 - RNA, 19 nt, Homo sapiens
  misc_RNA (1)...(19): siRNA sense strand
ucaaaugcccaccauagaa

SEQ ID NO: 772766 - RNA, 19 nt, Homo sapiens
  misc_RNA (1)...(19): siRNA sense strand
ggagcugacuuugacauca

SEQ ID NO: 772767 - RNA, 19 nt, Homo sapiens
  misc_RNA (1)...(19): siRNA sense strand
guaaagaaagagcugaaga

SEQ ID NO: 772768 - RNA, 19 nt, Homo sapiens
  misc_RNA (1)...(19): siRNA sense strand
agagaucuauccaauaaag

SEQ ID NO: 772769 - RNA, 19 nt, Homo sapiens
  misc_RNA (1)...(19): siRNA sense strand
ugaagagaucuauccaaua

SEQ ID NO: 772770 - RNA, 19 nt, Homo sapiens
  misc_RNA (1)...(19): siRNA sense strand
ggacaaacccaaggucauc

SEQ ID NO: 772771 - RNA, 19 nt, Homo sapiens
  misc_RNA (1)...(19): siRNA sense strand
gagggaaucugcggaacug

SEQ ID NO: 772772 - RNA, 19 nt, Homo sapiens
  misc_RNA (1)...(19): siRNA sense strand
gcacacgccuggcucucau

SEQ ID NO: 772773 - RNA, 19 nt, Homo sapiens
  misc_RNA (1)...(19): siRNA sense strand
gcucaaaugcccaccauag

SEQ ID NO: 772774 - RNA, 19 nt, Homo sapiens
  misc_RNA (1)...(19): siRNA sense strand
ggaugaaggagcuacuuga

SEQ ID NO: 772775 - RNA, 19 nt, Homo sapiens
  misc_RNA (1)...(19): siRNA sense strand
caucacaugcuuccagaaa

SEQ ID NO: 772776 - RNA, 19 nt, Homo sapiens
  misc_RNA (1)...(19): siRNA sense strand
gcuuuguccucaugaagaa

SEQ ID NO: 772777 - RNA, 19 nt, Homo sapiens
  misc_RNA (1)...(19): siRNA sense strand
ccucuuuccuggcaauuga

SEQ ID NO: 772778 - RNA, 19 nt, Homo sapiens
  misc_RNA (1)...(19): siRNA sense strand
auacagaguuugaccaucu

SEQ ID NO: 772779 - RNA, 19 nt, Homo sapiens
  misc_RNA (1)...(19): siRNA sense strand
ggucauggcagacucuaug

SEQ ID NO: 772780 - RNA, 19 nt, Homo sapiens
  misc_RNA (1)...(19): siRNA sense strand
gcgcugagggcauuugcua

SEQ ID NO: 772781 - RNA, 19 nt, Homo sapiens
  misc_RNA (1)...(19): siRNA sense strand
gaggaauggagcugacuuu

SEQ ID NO: 772782 - RNA, 19 nt, Homo sapiens
  misc_RNA (1)...(19): siRNA sense strand
cugagacuauguaaagaaa

SEQ ID NO: 772783 - RNA, 19 nt, Homo sapiens
  misc_RNA (1)...(19): siRNA sense strand
caagagaagcaacguaugg

SEQ ID NO: 772784 - RNA, 19 nt, Homo sapiens
  misc_RNA (1)...(19): siRNA sense strand
acagaugcccucaagcuuu

SEQ ID NO: 772785 - RNA, 19 nt, Homo sapiens
  misc_RNA (1)...(19): siRNA sense strand
caggacaaaugcuucuuca

SEQ ID NO: 772786 - RNA, 19 nt, Homo sapiens
  misc_RNA (1)...(19): siRNA sense strand
gcacaaugggcucuaucuu

SEQ ID NO: 772787 - RNA, 19 nt, Homo sapiens
  misc_RNA (1)...(19): siRNA sense strand
caacguauggcaggacaaa

SEQ ID NO: 772788 - RNA, 19 nt, Homo sapiens
  misc_RNA (1)...(19): siRNA sense strand
caauaaaggagagaaacaa

SEQ ID NO: 772789 - RNA, 19 nt, Homo sapiens
  misc_RNA (1)...(19): siRNA sense strand
uggaaucccugggcaaaga

SEQ ID NO: 772790 - RNA, 19 nt, Homo sapiens
  misc_RNA (1)...(19): siRNA sense strand
ucacugguguuuuggauaa

SEQ ID NO: 772791 - RNA, 19 nt, Homo sapiens
  misc_RNA (1)...(19): siRNA sense strand
guguagauguagaagagaa

SEQ ID NO: 772792 - RNA, 19 nt, Homo sapiens
  misc_RNA (1)...(19): siRNA sense strand
gaauuccugagacuaugua

SEQ ID NO: 772793 - RNA, 19 nt, Homo sapiens
  misc_RNA (1)...(19): siRNA sense strand
caagcuuuguccucaugaa

SEQ ID NO: 772794 - RNA, 19 nt, Homo sapiens
  misc_RNA (1)...(19): siRNA sense strand
gcacauucuugguacucau

SEQ ID NO: 772795 - RNA, 19 nt, Homo sapiens
  misc_RNA (1)...(19): siRNA sense strand
gcaagagaagcaacguaug

SEQ ID NO: 772796 - RNA, 19 nt, Homo sapiens
  misc_RNA (1)...(19): siRNA sense strand
aaagaaagagcugaagaga

SEQ ID NO: 772797 - RNA, 19 nt, Homo sapiens
  misc_RNA (1)...(19): siRNA sense strand
ccagaugugcugcuuuaug

SEQ ID NO: 772798 - RNA, 19 nt, Homo sapiens
  misc_RNA (1)...(19): siRNA sense strand
uaguguagauguagaagag

SEQ ID NO: 772799 - RNA, 19 nt, Homo sapiens
  misc_RNA (1)...(19): siRNA sense strand
gcaggacaaaugcuucuuc

SEQ ID NO: 772800 - RNA, 19 nt, Homo sapiens
  misc_RNA (1)...(19): siRNA sense strand
uaaagaaagagcugaagag

SEQ ID NO: 772801 - RNA, 19 nt, Homo sapiens
  misc_RNA (1)...(19): siRNA sense strand
uugagggucuggacuauag

SEQ ID NO: 772802 - RNA, 19 nt, Homo sapiens
  misc_RNA (1)...(19): siRNA sense strand
cacaaugggcucuaucuuc

SEQ ID NO: 772803 - RNA, 19 nt, Homo sapiens
  misc_RNA (1)...(19): siRNA sense strand
cagaaggcaaccacagaaa

SEQ ID NO: 772804 - RNA, 19 nt, Homo sapiens
  misc_RNA (1)...(19): siRNA sense strand
auagaacgacuguccauga

SEQ ID NO: 772805 - RNA, 19 nt, Homo sapiens
  misc_RNA (1)...(19): siRNA sense strand
cacuuaagguguuggaauc

SEQ ID NO: 772806 - RNA, 19 nt, Homo sapiens
  misc_RNA (1)...(19): siRNA sense strand
ccaauaaaggagagaaaca

SEQ ID NO: 772807 - RNA, 19 nt, Homo sapiens
  misc_RNA (1)...(19): siRNA sense strand
gccuggcucucaucauaug

SEQ ID NO: 772808 - RNA, 19 nt, Homo sapiens
  misc_RNA (1)...(19): siRNA sense strand
ccacuuaagguguuggaau

SEQ ID NO: 772809 - RNA, 19 nt, Homo sapiens
  misc_RNA (1)...(19): siRNA sense strand
gagcugacuuugacaucac

SEQ ID NO: 772810 - RNA, 19 nt, Homo sapiens
  misc_RNA (1)...(19): siRNA sense strand
aacccaaggucaucauugu

SEQ ID NO: 772811 - RNA, 19 nt, Homo sapiens
  misc_RNA (1)...(19): siRNA sense strand
aaaauguacugaacuggaa

SEQ ID NO: 772812 - RNA, 19 nt, Homo sapiens
  misc_RNA (1)...(19): siRNA sense strand
caaaugcccaccauagaac

SEQ ID NO: 772813 - RNA, 19 nt, Homo sapiens
  misc_RNA (1)...(19): siRNA sense strand
ggaacaaaauguacugaac

SEQ ID NO: 772814 - RNA, 19 nt, Homo sapiens
  misc_RNA (1)...(19): siRNA sense strand
aggaagaugcuguuuacaa

SEQ ID NO: 772815 - RNA, 19 nt, Homo sapiens
  misc_RNA (1)...(19): siRNA sense strand
gauguagaagagaaucuga

SEQ ID NO: 772816 - RNA, 19 nt, Homo sapiens
  misc_RNA (1)...(19): siRNA sense strand
gggaugaaggagcuacuug

SEQ ID NO: 772817 - RNA, 19 nt, Homo sapiens
  misc_RNA (1)...(19): siRNA sense strand
ucaugaagaauuccugaga

SEQ ID NO: 772818 - RNA, 19 nt, Homo sapiens
  misc_RNA (1)...(19): siRNA sense strand
ccucuucacagucaucuga

SEQ ID NO: 772819 - RNA, 19 nt, Homo sapiens
  misc_RNA (1)...(19): siRNA sense strand
gaugugcugcuuuaugaca

SEQ ID NO: 772820 - RNA, 19 nt, Homo sapiens
  misc_RNA (1)...(19): siRNA sense strand
agacccacguggagaagga

SEQ ID NO: 772821 - RNA, 19 nt, Homo sapiens
  misc_RNA (1)...(19): siRNA sense strand
ugaagaauuccugagacua

SEQ ID NO: 772822 - RNA, 19 nt, Homo sapiens
  misc_RNA (1)...(19): siRNA sense strand
gcucuaucuucaucacaca

SEQ ID NO: 772823 - RNA, 19 nt, Homo sapiens
  misc_RNA (1)...(19): siRNA sense strand
gaacugugggucagagacu

SEQ ID NO: 772824 - RNA, 19 nt, Homo sapiens
  misc_RNA (1)...(19): siRNA sense strand
aaucugacagccagggaua

SEQ ID NO: 772825 - RNA, 19 nt, Homo sapiens
  misc_RNA (1)...(19): siRNA sense strand
gaugaaggagcuacuugag

SEQ ID NO: 772826 - RNA, 19 nt, Homo sapiens
  misc_RNA (1)...(19): siRNA sense strand
caaacccaaggucaucauu

SEQ ID NO: 772827 - RNA, 19 nt, Homo sapiens
  misc_RNA (1)...(19): siRNA sense strand
aagaauuccugagacuaug

SEQ ID NO: 772828 - RNA, 19 nt, Homo sapiens
  misc_RNA (1)...(19): siRNA sense strand
gcucuucaacgccacacaa

SEQ ID NO: 772829 - RNA, 19 nt, Homo sapiens
  misc_RNA (1)...(19): siRNA sense strand
caauacagaguuugaccau

SEQ ID NO: 772830 - RNA, 19 nt, Homo sapiens
  misc_RNA (1)...(19): siRNA sense strand
agauauuucuaccucuuuc

SEQ ID NO: 772831 - RNA, 19 nt, Homo sapiens
  misc_RNA (1)...(19): siRNA sense strand
gaagagaucuauccaauaa

SEQ ID NO: 772832 - RNA, 19 nt, Homo sapiens
  misc_RNA (1)...(19): siRNA sense strand
guacagcaaucauuugaaa

SEQ ID NO: 772833 - RNA, 19 nt, Homo sapiens
  misc_RNA (1)...(19): siRNA sense strand
ggacaaaugcuucuucaaa

SEQ ID NO: 772834 - RNA, 19 nt, Homo sapiens
  misc_RNA (1)...(19): siRNA sense strand
agaaagagcugaagagauc

SEQ ID NO: 772835 - RNA, 19 nt, Homo sapiens
  misc_RNA (1)...(19): siRNA sense strand
ucacaugcuuccagaaaua

SEQ ID NO: 772836 - RNA, 19 nt, Homo sapiens
  misc_RNA (1)...(19): siRNA sense strand
ggacuauaguguagaugua

SEQ ID NO: 772837 - RNA, 19 nt, Homo sapiens
  misc_RNA (1)...(19): siRNA sense strand
gaagguacagcaaucauuu

SEQ ID NO: 772838 - RNA, 19 nt, Homo sapiens
  misc_RNA (1)...(19): siRNA sense strand
ggaagaugcuguuuacaag

SEQ ID NO: 772839 - RNA, 19 nt, Homo sapiens
  misc_RNA (1)...(19): siRNA sense strand
ggaaguauuucggaaggua

SEQ ID NO: 772840 - RNA, 19 nt, Homo sapiens
  misc_RNA (1)...(19): siRNA sense strand
cagaugugcugcuuuauga

SEQ ID NO: 772841 - RNA, 19 nt, Homo sapiens
  misc_RNA (1)...(19): siRNA sense strand
ucacacaacucaucacaug

SEQ ID NO: 772842 - RNA, 19 nt, Homo sapiens
  misc_RNA (1)...(19): siRNA sense strand
gaagaauuccugagacuau

SEQ ID NO: 772843 - RNA, 19 nt, Homo sapiens
  misc_RNA (1)...(19): siRNA sense strand
gagacuauguaaagaaaga

SEQ ID NO: 772844 - RNA, 19 nt, Homo sapiens
  misc_RNA (1)...(19): siRNA sense strand
gaauggagcugacuuugac

SEQ ID NO: 772845 - RNA, 19 nt, Homo sapiens
  misc_RNA (1)...(19): siRNA sense strand
gaacugugcaugaugagaa

SEQ ID NO: 772846 - RNA, 19 nt, Homo sapiens
  misc_RNA (1)...(19): siRNA sense strand
aaccagaugugcugcuuua

SEQ ID NO: 772847 - RNA, 19 nt, Homo sapiens
  misc_RNA (1)...(19): siRNA sense strand
ccaccuagaggaaguauuu

SEQ ID NO: 772848 - RNA, 19 nt, Homo sapiens
  misc_RNA (1)...(19): siRNA sense strand
gcucucaucauaugcaaua

SEQ ID NO: 772849 - RNA, 19 nt, Homo sapiens
  misc_RNA (1)...(19): siRNA sense strand
ggaauggagcugacuuuga

SEQ ID NO: 772850 - RNA, 19 nt, Homo sapiens
  misc_RNA (1)...(19): siRNA sense strand
cauaugcaauacagaguuu

SEQ ID NO: 772851 - RNA, 19 nt, Homo sapiens
  misc_RNA (1)...(19): siRNA sense strand
acaaugggcucuaucuuca

SEQ ID NO: 772852 - RNA, 19 nt, Homo sapiens
  misc_RNA (1)...(19): siRNA sense strand
gcggaacugugcaugauga

SEQ ID NO: 772853 - RNA, 19 nt, Homo sapiens
  misc_RNA (1)...(19): siRNA sense strand
gagcacaaguccucugaca

SEQ ID NO: 772854 - RNA, 19 nt, Homo sapiens
  misc_RNA (1)...(19): siRNA sense strand
gacaaaugcuucuucaaac

SEQ ID NO: 772855 - RNA, 19 nt, Homo sapiens
  misc_RNA (1)...(19): siRNA sense strand
uaacauagaccaaauaucc

SEQ ID NO: 772856 - RNA, 19 nt, Homo sapiens
  misc_RNA (1)...(19): siRNA sense strand
cagaugcccucaagcuuug

SEQ ID NO: 772857 - RNA, 19 nt, Homo sapiens
  misc_RNA (1)...(19): siRNA sense strand
ugacagcacauucuuggua

SEQ ID NO: 772858 - RNA, 19 nt, Homo sapiens
  misc_RNA (1)...(19): siRNA sense strand
ggucuggacuauaguguag

SEQ ID NO: 772859 - RNA, 19 nt, Homo sapiens
  misc_RNA (1)...(19): siRNA sense strand
ggaagguacagcaaucauu

SEQ ID NO: 772860 - RNA, 19 nt, Homo sapiens
  misc_RNA (1)...(19): siRNA sense strand
cugaagagaucuauccaau

SEQ ID NO: 772861 - RNA, 19 nt, Homo sapiens
  misc_RNA (1)...(19): siRNA sense strand
gaagaugcuguuuacaaga

SEQ ID NO: 772862 - RNA, 19 nt, Homo sapiens
  misc_RNA (1)...(19): siRNA sense strand
acgccuggcucucaucaua

SEQ ID NO: 772863 - RNA, 19 nt, Homo sapiens
  misc_RNA (1)...(19): siRNA sense strand
ucaaaugcccaccauagaa

SEQ ID NO: 772864 - RNA, 19 nt, Homo sapiens
  misc_RNA (1)...(19): siRNA sense strand
ggagcugacuuugacauca

SEQ ID NO: 772865 - RNA, 19 nt, Homo sapiens
  misc_RNA (1)...(19): siRNA sense strand
guaaagaaagagcugaaga

SEQ ID NO: 772866 - RNA, 19 nt, Homo sapiens
  misc_RNA (1)...(19): siRNA sense strand
agagaucuauccaauaaag

SEQ ID NO: 772867 - RNA, 19 nt, Homo sapiens
  misc_RNA (1)...(19): siRNA sense strand
ugaagagaucuauccaaua

SEQ ID NO: 772868 - RNA, 19 nt, Homo sapiens
  misc_RNA (1)...(19): siRNA sense strand
ggacaaacccaaggucauc

SEQ ID NO: 772869 - RNA, 19 nt, Homo sapiens
  misc_RNA (1)...(19): siRNA sense strand
gagggaaucugcggaacug

SEQ ID NO: 772870 - RNA, 19 nt, Homo sapiens
  misc_RNA (1)...(19): siRNA sense strand
gcacacgccuggcucucau

SEQ ID NO: 772871 - RNA, 19 nt, Homo sapiens
  misc_RNA (1)...(19): siRNA sense strand
gcucaaaugcccaccauag

SEQ ID NO: 772872 - RNA, 19 nt, Homo sapiens
  misc_RNA (1)...(19): siRNA sense strand
ggaugaaggagcuacuuga

SEQ ID NO: 772873 - RNA, 19 nt, Homo sapiens
  misc_RNA (1)...(19): siRNA sense strand
caucacaugcuuccagaaa

SEQ ID NO: 772874 - RNA, 19 nt, Homo sapiens
  misc_RNA (1)...(19): siRNA sense strand
auacagaguuugaccaucu

SEQ ID NO: 772875 - RNA, 19 nt, Homo sapiens
  misc_RNA (1)...(19): siRNA sense strand
ccucuuuccuggcaauuga

SEQ ID NO: 772876 - RNA, 19 nt, Homo sapiens
  misc_RNA (1)...(19): siRNA sense strand
gcuuuguccucaugaagaa

SEQ ID NO: 772877 - RNA, 19 nt, Homo sapiens
  misc_RNA (1)...(19): siRNA sense strand
cugagacuauguaaagaaa

SEQ ID NO: 772878 - RNA, 19 nt, Homo sapiens
  misc_RNA (1)...(19): siRNA sense strand
gcgcugagggcauuugcua

SEQ ID NO: 772879 - RNA, 19 nt, Homo sapiens
  misc_RNA (1)...(19): siRNA sense strand
gaggaauggagcugacuuu

SEQ ID NO: 772880 - RNA, 19 nt, Homo sapiens
  misc_RNA (1)...(19): siRNA sense strand
caagagaagcaacguaugg

SEQ ID NO: 772881 - RNA, 19 nt, Homo sapiens
  misc_RNA (1)...(19): siRNA sense strand
acagaugcccucaagcuuu

SEQ ID NO: 772882 - RNA, 19 nt, Homo sapiens
  misc_RNA (1)...(19): siRNA sense strand
caggacaaaugcuucuuca

SEQ ID NO: 772883 - RNA, 19 nt, Homo sapiens
  misc_RNA (1)...(19): siRNA sense strand
gcacaaugggcucuaucuu

SEQ ID NO: 772884 - RNA, 19 nt, Homo sapiens
  misc_RNA (1)...(19): siRNA sense strand
caauaaaggagagaaacaa

SEQ ID NO: 772885 - RNA, 19 nt, Homo sapiens
  misc_RNA (1)...(19): siRNA sense strand
caacguauggcaggacaaa

SEQ ID NO: 772886 - RNA, 19 nt, Homo sapiens
  misc_RNA (1)...(19): siRNA sense strand
gaauuccugagacuaugua

SEQ ID NO: 772887 - RNA, 19 nt, Homo sapiens
  misc_RNA (1)...(19): siRNA sense strand
guguagauguagaagagaa

SEQ ID NO: 772888 - RNA, 19 nt, Homo sapiens
  misc_RNA (1)...(19): siRNA sense strand
caagcuuuguccucaugaa

SEQ ID NO: 772889 - RNA, 19 nt, Homo sapiens
  misc_RNA (1)...(19): siRNA sense strand
gcaagagaagcaacguaug

SEQ ID NO: 772890 - RNA, 19 nt, Homo sapiens
  misc_RNA (1)...(19): siRNA sense strand
gcacauucuugguacucau

SEQ ID NO: 772891 - RNA, 19 nt, Homo sapiens
  misc_RNA (1)...(19): siRNA sense strand
aaagaaagagcugaagaga

SEQ ID NO: 772892 - RNA, 19 nt, Homo sapiens
  misc_RNA (1)...(19): siRNA sense strand
ccagaugugcugcuuuaug

SEQ ID NO: 772893 - RNA, 19 nt, Homo sapiens
  misc_RNA (1)...(19): siRNA sense strand
uaguguagauguagaagag

SEQ ID NO: 772894 - RNA, 19 nt, Homo sapiens
  misc_RNA (1)...(19): siRNA sense strand
uaaagaaagagcugaagag

SEQ ID NO: 772895 - RNA, 19 nt, Homo sapiens
  misc_RNA (1)...(19): siRNA sense strand
gcaggacaaaugcuucuuc

SEQ ID NO: 772896 - RNA, 19 nt, Homo sapiens
  misc_RNA (1)...(19): siRNA sense strand
uugagggucuggacuauag

SEQ ID NO: 772897 - RNA, 19 nt, Homo sapiens
  misc_RNA (1)...(19): siRNA sense strand
cacaaugggcucuaucuuc

SEQ ID NO: 772898 - RNA, 19 nt, Homo sapiens
  misc_RNA (1)...(19): siRNA sense strand
ccaauaaaggagagaaaca

SEQ ID NO: 772899 - RNA, 19 nt, Homo sapiens
  misc_RNA (1)...(19): siRNA sense strand
auagaacgacuguccauga

SEQ ID NO: 772900 - RNA, 19 nt, Homo sapiens
  misc_RNA (1)...(19): siRNA sense strand
gccuggcucucaucauaug

SEQ ID NO: 772901 - RNA, 19 nt, Homo sapiens
  misc_RNA (1)...(19): siRNA sense strand
gagcugacuuugacaucac

SEQ ID NO: 772902 - RNA, 19 nt, Homo sapiens
  misc_RNA (1)...(19): siRNA sense strand
aacccaaggucaucauugu

SEQ ID NO: 772903 - RNA, 19 nt, Homo sapiens
  misc_RNA (1)...(19): siRNA sense strand
gggaugaaggagcuacuug

SEQ ID NO: 772904 - RNA, 19 nt, Homo sapiens
  misc_RNA (1)...(19): siRNA sense strand
caaaugcccaccauagaac

SEQ ID NO: 772905 - RNA, 19 nt, Homo sapiens
  misc_RNA (1)...(19): siRNA sense strand
aggaagaugcuguuuacaa

SEQ ID NO: 772906 - RNA, 19 nt, Homo sapiens
  misc_RNA (1)...(19): siRNA sense strand
gauguagaagagaaucuga

SEQ ID NO: 772907 - RNA, 19 nt, Homo sapiens
  misc_RNA (1)...(19): siRNA sense strand
ucaugaagaauuccugaga

SEQ ID NO: 772908 - RNA, 19 nt, Homo sapiens
  misc_RNA (1)...(19): siRNA sense strand
ccucuucacagucaucuga

SEQ ID NO: 772909 - RNA, 19 nt, Homo sapiens
  misc_RNA (1)...(19): siRNA sense strand
gaugugcugcuuuaugaca

SEQ ID NO: 772910 - RNA, 19 nt, Homo sapiens
  misc_RNA (1)...(19): siRNA sense strand
agacccacguggagaagga

SEQ ID NO: 772911 - RNA, 19 nt, Homo sapiens
  misc_RNA (1)...(19): siRNA sense strand
aaucugacagccagggaua

SEQ ID NO: 772912 - RNA, 19 nt, Homo sapiens
  misc_RNA (1)...(19): siRNA sense strand
gcucuaucuucaucacaca

SEQ ID NO: 772913 - RNA, 19 nt, Homo sapiens
  misc_RNA (1)...(19): siRNA sense strand
gaacugugggucagagacu

SEQ ID NO: 772914 - RNA, 19 nt, Homo sapiens
  misc_RNA (1)...(19): siRNA sense strand
ugaagaauuccugagacua

SEQ ID NO: 772915 - RNA, 19 nt, Homo sapiens
  misc_RNA (1)...(19): siRNA sense strand
gaugaaggagcuacuugag

SEQ ID NO: 772916 - RNA, 19 nt, Homo sapiens
  misc_RNA (1)...(19): siRNA sense strand
caaacccaaggucaucauu

SEQ ID NO: 772917 - RNA, 19 nt, Homo sapiens
  misc_RNA (1)...(19): siRNA sense strand
caauacagaguuugaccau

SEQ ID NO: 772918 - RNA, 19 nt, Homo sapiens
  misc_RNA (1)...(19): siRNA sense strand
gcucuucaacgccacacaa

SEQ ID NO: 772919 - RNA, 19 nt, Homo sapiens
  misc_RNA (1)...(19): siRNA sense strand
aagaauuccugagacuaug

SEQ ID NO: 772920 - RNA, 19 nt, Homo sapiens
  misc_RNA (1)...(19): siRNA sense strand
gagcugaagagaucuaucc

SEQ ID NO: 772921 - RNA, 19 nt, Homo sapiens
  misc_RNA (1)...(19): siRNA sense strand
agauauuucuaccucuuuc

SEQ ID NO: 772922 - RNA, 19 nt, Homo sapiens
  misc_RNA (1)...(19): siRNA sense strand
uagaacgacuguccaugac

SEQ ID NO: 772923 - RNA, 19 nt, Homo sapiens
  misc_RNA (1)...(19): siRNA sense strand
ccugagacuauguaaagaa

SEQ ID NO: 772924 - RNA, 19 nt, Homo sapiens
  misc_RNA (1)...(19): siRNA sense strand
acaagacccacguggagaa

SEQ ID NO: 772925 - RNA, 19 nt, Homo sapiens
  misc_RNA (1)...(19): siRNA sense strand
aaacccaaggucaucauug

SEQ ID NO: 772926 - RNA, 19 nt, Homo sapiens
  misc_RNA (1)...(19): siRNA sense strand
aaaugcuucuucaaaccuu

SEQ ID NO: 772927 - RNA, 19 nt, Homo sapiens
  misc_RNA (1)...(19): siRNA sense strand
aagaugcuguuuacaagac

SEQ ID NO: 772928 - RNA, 19 nt, Homo sapiens
  misc_RNA (1)...(19): siRNA sense strand
aaagagcugaagagaucua

SEQ ID NO: 772929 - RNA, 19 nt, Homo sapiens
  misc_RNA (1)...(19): siRNA sense strand
aaugggcucuaucuucauc

SEQ ID NO: 772930 - RNA, 19 nt, Homo sapiens
  misc_RNA (1)...(19): siRNA sense strand
acaaaugcuucuucaaacc

SEQ ID NO: 772931 - RNA, 19 nt, Homo sapiens
  misc_RNA (1)...(19): siRNA sense strand
gaagagaucuauccaauaa

SEQ ID NO: 772932 - RNA, 19 nt, Homo sapiens
  misc_RNA (1)...(19): siRNA sense strand
guacagcaaucauuugaaa

SEQ ID NO: 772933 - RNA, 19 nt, Homo sapiens
  misc_RNA (1)...(19): siRNA sense strand
agaaagagcugaagagauc

SEQ ID NO: 772934 - RNA, 19 nt, Homo sapiens
  misc_RNA (1)...(19): siRNA sense strand
ucacaugcuuccagaaaua

SEQ ID NO: 772935 - RNA, 19 nt, Homo sapiens
  misc_RNA (1)...(19): siRNA sense strand
ggacuauaguguagaugua

SEQ ID NO: 772936 - RNA, 19 nt, Homo sapiens
  misc_RNA (1)...(19): siRNA sense strand
gaagguacagcaaucauuu

SEQ ID NO: 772937 - RNA, 19 nt, Homo sapiens
  misc_RNA (1)...(19): siRNA sense strand
ggaagaugcuguuuacaag

SEQ ID NO: 772938 - RNA, 19 nt, Homo sapiens
  misc_RNA (1)...(19): siRNA sense strand
ggaaguauuucggaaggua

SEQ ID NO: 772939 - RNA, 19 nt, Homo sapiens
  misc_RNA (1)...(19): siRNA sense strand
cagaugugcugcuuuauga

SEQ ID NO: 772940 - RNA, 19 nt, Homo sapiens
  misc_RNA (1)...(19): siRNA sense strand
ucacacaacucaucacaug

SEQ ID NO: 772941 - RNA, 19 nt, Homo sapiens
  misc_RNA (1)...(19): siRNA sense strand
gaagaauuccugagacuau

SEQ ID NO: 772942 - RNA, 19 nt, Homo sapiens
  misc_RNA (1)...(19): siRNA sense strand
gagacuauguaaagaaaga

SEQ ID NO: 772943 - RNA, 19 nt, Homo sapiens
  misc_RNA (1)...(19): siRNA sense strand
gaauggagcugacuuugac

SEQ ID NO: 772944 - RNA, 19 nt, Homo sapiens
  misc_RNA (1)...(19): siRNA sense strand
gaacugugcaugaugagaa

SEQ ID NO: 772945 - RNA, 19 nt, Homo sapiens
  misc_RNA (1)...(19): siRNA sense strand
aaccagaugugcugcuuua

SEQ ID NO: 772946 - RNA, 19 nt, Homo sapiens
  misc_RNA (1)...(19): siRNA sense strand
ccaccuagaggaaguauuu

SEQ ID NO: 772947 - RNA, 19 nt, Homo sapiens
  misc_RNA (1)...(19): siRNA sense strand
gcucucaucauaugcaaua

SEQ ID NO: 772948 - RNA, 19 nt, Homo sapiens
  misc_RNA (1)...(19): siRNA sense strand
ggaauggagcugacuuuga

SEQ ID NO: 772949 - RNA, 19 nt, Homo sapiens
  misc_RNA (1)...(19): siRNA sense strand
cauaugcaauacagaguuu

SEQ ID NO: 772950 - RNA, 19 nt, Homo sapiens
  misc_RNA (1)...(19): siRNA sense strand
acaaugggcucuaucuuca

SEQ ID NO: 772951 - RNA, 19 nt, Homo sapiens
  misc_RNA (1)...(19): siRNA sense strand
gcggaacugugcaugauga

SEQ ID NO: 772952 - RNA, 19 nt, Homo sapiens
  misc_RNA (1)...(19): siRNA sense strand
gagcacaaguccucugaca

SEQ ID NO: 772953 - RNA, 19 nt, Homo sapiens
  misc_RNA (1)...(19): siRNA sense strand
ugacagcacauucuuggua

SEQ ID NO: 772954 - RNA, 19 nt, Homo sapiens
  misc_RNA (1)...(19): siRNA sense strand
cagaugcccucaagcuuug

SEQ ID NO: 772955 - RNA, 19 nt, Homo sapiens
  misc_RNA (1)...(19): siRNA sense strand
ggucuggacuauaguguag

SEQ ID NO: 772956 - RNA, 19 nt, Homo sapiens
  misc_RNA (1)...(19): siRNA sense strand
ggaagguacagcaaucauu

SEQ ID NO: 772957 - RNA, 19 nt, Homo sapiens
  misc_RNA (1)...(19): siRNA sense strand
cugaagagaucuauccaau

SEQ ID NO: 772958 - RNA, 19 nt, Homo sapiens
  misc_RNA (1)...(19): siRNA sense strand
gaagaugcuguuuacaaga

SEQ ID NO: 772959 - RNA, 19 nt, Homo sapiens
  misc_RNA (1)...(19): siRNA sense strand
acgccuggcucucaucaua

SEQ ID NO: 772960 - RNA, 19 nt, Homo sapiens
  misc_RNA (1)...(19): siRNA sense strand
ucaaaugcccaccauagaa

SEQ ID NO: 772961 - RNA, 19 nt, Homo sapiens
  misc_RNA (1)...(19): siRNA sense strand
ggagcugacuuugacauca

SEQ ID NO: 772962 - RNA, 19 nt, Homo sapiens
  misc_RNA (1)...(19): siRNA sense strand
guaaagaaagagcugaaga

SEQ ID NO: 772963 - RNA, 19 nt, Homo sapiens
  misc_RNA (1)...(19): siRNA sense strand
agagaucuauccaauaaag

SEQ ID NO: 772964 - RNA, 19 nt, Homo sapiens
  misc_RNA (1)...(19): siRNA sense strand
ugaagagaucuauccaaua

SEQ ID NO: 772965 - RNA, 19 nt, Homo sapiens
  misc_RNA (1)...(19): siRNA sense strand
ggacaaacccaaggucauc

SEQ ID NO: 772966 - RNA, 19 nt, Homo sapiens
  misc_RNA (1)...(19): siRNA sense strand
gagggaaucugcggaacug

SEQ ID NO: 772967 - RNA, 19 nt, Homo sapiens
  misc_RNA (1)...(19): siRNA sense strand
gcacacgccuggcucucau

SEQ ID NO: 772968 - RNA, 19 nt, Homo sapiens
  misc_RNA (1)...(19): siRNA sense strand
gcucaaaugcccaccauag

SEQ ID NO: 772969 - RNA, 19 nt, Homo sapiens
  misc_RNA (1)...(19): siRNA sense strand
ggaugaaggagcuacuuga

SEQ ID NO: 772970 - RNA, 19 nt, Homo sapiens
  misc_RNA (1)...(19): siRNA sense strand
caucacaugcuuccagaaa

SEQ ID NO: 772971 - RNA, 19 nt, Homo sapiens
  misc_RNA (1)...(19): siRNA sense strand
gcuuuguccucaugaagaa

SEQ ID NO: 772972 - RNA, 19 nt, Homo sapiens
  misc_RNA (1)...(19): siRNA sense strand
ccucuuuccuggcaauuga

SEQ ID NO: 772973 - RNA, 19 nt, Homo sapiens
  misc_RNA (1)...(19): siRNA sense strand
auacagaguuugaccaucu

SEQ ID NO: 772974 - RNA, 19 nt, Homo sapiens
  misc_RNA (1)...(19): siRNA sense strand
cugagacuauguaaagaaa

SEQ ID NO: 772975 - RNA, 19 nt, Homo sapiens
  misc_RNA (1)...(19): siRNA sense strand
gcgcugagggcauuugcua

SEQ ID NO: 772976 - RNA, 19 nt, Homo sapiens
  misc_RNA (1)...(19): siRNA sense strand
gaggaauggagcugacuuu

SEQ ID NO: 772977 - RNA, 19 nt, Homo sapiens
  misc_RNA (1)...(19): siRNA sense strand
acagaugcccucaagcuuu

SEQ ID NO: 772978 - RNA, 19 nt, Homo sapiens
  misc_RNA (1)...(19): siRNA sense strand
gcacaaugggcucuaucuu

SEQ ID NO: 772979 - RNA, 19 nt, Homo sapiens
  misc_RNA (1)...(19): siRNA sense strand
caauaaaggagagaaacaa

SEQ ID NO: 772980 - RNA, 19 nt, Homo sapiens
  misc_RNA (1)...(19): siRNA sense strand
gaauuccugagacuaugua

SEQ ID NO: 772981 - RNA, 19 nt, Homo sapiens
  misc_RNA (1)...(19): siRNA sense strand
guguagauguagaagagaa

SEQ ID NO: 772982 - RNA, 19 nt, Homo sapiens
  misc_RNA (1)...(19): siRNA sense strand
gcacauucuugguacucau

SEQ ID NO: 772983 - RNA, 19 nt, Homo sapiens
  misc_RNA (1)...(19): siRNA sense strand
caagcuuuguccucaugaa

SEQ ID NO: 772984 - RNA, 19 nt, Homo sapiens
  misc_RNA (1)...(19): siRNA sense strand
uaguguagauguagaagag

SEQ ID NO: 772985 - RNA, 19 nt, Homo sapiens
  misc_RNA (1)...(19): siRNA sense strand
ccagaugugcugcuuuaug

SEQ ID NO: 772986 - RNA, 19 nt, Homo sapiens
  misc_RNA (1)...(19): siRNA sense strand
aaagaaagagcugaagaga

SEQ ID NO: 772987 - RNA, 19 nt, Homo sapiens
  misc_RNA (1)...(19): siRNA sense strand
uaaagaaagagcugaagag

SEQ ID NO: 772988 - RNA, 19 nt, Homo sapiens
  misc_RNA (1)...(19): siRNA sense strand
uugagggucuggacuauag

SEQ ID NO: 772989 - RNA, 19 nt, Homo sapiens
  misc_RNA (1)...(19): siRNA sense strand
cacaaugggcucuaucuuc

SEQ ID NO: 772990 - RNA, 19 nt, Homo sapiens
  misc_RNA (1)...(19): siRNA sense strand
ccaauaaaggagagaaaca

SEQ ID NO: 772991 - RNA, 19 nt, Homo sapiens
  misc_RNA (1)...(19): siRNA sense strand
auagaacgacuguccauga

SEQ ID NO: 772992 - RNA, 19 nt, Homo sapiens
  misc_RNA (1)...(19): siRNA sense strand
gccuggcucucaucauaug

SEQ ID NO: 772993 - RNA, 19 nt, Homo sapiens
  misc_RNA (1)...(19): siRNA sense strand
gagcugacuuugacaucac

SEQ ID NO: 772994 - RNA, 19 nt, Homo sapiens
  misc_RNA (1)...(19): siRNA sense strand
aacccaaggucaucauugu

SEQ ID NO: 772995 - RNA, 19 nt, Homo sapiens
  misc_RNA (1)...(19): siRNA sense strand
gggaugaaggagcuacuug

SEQ ID NO: 772996 - RNA, 19 nt, Homo sapiens
  misc_RNA (1)...(19): siRNA sense strand
caaaugcccaccauagaac

SEQ ID NO: 772997 - RNA, 19 nt, Homo sapiens
  misc_RNA (1)...(19): siRNA sense strand
aggaagaugcuguuuacaa

SEQ ID NO: 772998 - RNA, 19 nt, Homo sapiens
  misc_RNA (1)...(19): siRNA sense strand
gauguagaagagaaucuga

SEQ ID NO: 772999 - RNA, 19 nt, Homo sapiens
  misc_RNA (1)...(19): siRNA sense strand
ucaugaagaauuccugaga

SEQ ID NO: 773000 - RNA, 19 nt, Homo sapiens
  misc_RNA (1)...(19): siRNA sense strand
ccucuucacagucaucuga

SEQ ID NO: 773001 - RNA, 19 nt, Homo sapiens
  misc_RNA (1)...(19): siRNA sense strand
gaugugcugcuuuaugaca

SEQ ID NO: 773002 - RNA, 19 nt, Homo sapiens
  misc_RNA (1)...(19): siRNA sense strand
agacccacguggagaagga

SEQ ID NO: 773003 - RNA, 19 nt, Homo sapiens
  misc_RNA (1)...(19): siRNA sense strand
ugaagaauuccugagacua

SEQ ID NO: 773004 - RNA, 19 nt, Homo sapiens
  misc_RNA (1)...(19): siRNA sense strand
gcucuaucuucaucacaca

SEQ ID NO: 773005 - RNA, 19 nt, Homo sapiens
  misc_RNA (1)...(19): siRNA sense strand
gaacugugggucagagacu

SEQ ID NO: 773006 - RNA, 19 nt, Homo sapiens
  misc_RNA (1)...(19): siRNA sense strand
aaucugacagccagggaua

SEQ ID NO: 773007 - RNA, 19 nt, Homo sapiens
  misc_RNA (1)...(19): siRNA sense strand
gaugaaggagcuacuugag

SEQ ID NO: 773008 - RNA, 19 nt, Homo sapiens
  misc_RNA (1)...(19): siRNA sense strand
caaacccaaggucaucauu

SEQ ID NO: 773009 - RNA, 19 nt, Homo sapiens
  misc_RNA (1)...(19): siRNA sense strand
caauacagaguuugaccau

SEQ ID NO: 773010 - RNA, 19 nt, Homo sapiens
  misc_RNA (1)...(19): siRNA sense strand
gcucuucaacgccacacaa

SEQ ID NO: 773011 - RNA, 19 nt, Homo sapiens
  misc_RNA (1)...(19): siRNA sense strand
aagaauuccugagacuaug

SEQ ID NO: 773012 - RNA, 19 nt, Homo sapiens
  misc_RNA (1)...(19): siRNA sense strand
gagcugaagagaucuaucc

SEQ ID NO: 773013 - RNA, 19 nt, Homo sapiens
  misc_RNA (1)...(19): siRNA sense strand
agauauuucuaccucuuuc

SEQ ID NO: 773014 - RNA, 19 nt, Homo sapiens
  misc_RNA (1)...(19): siRNA sense strand
uagaacgacuguccaugac

SEQ ID NO: 773015 - RNA, 19 nt, Homo sapiens
  misc_RNA (1)...(19): siRNA sense strand
acaagacccacguggagaa

SEQ ID NO: 773016 - RNA, 19 nt, Homo sapiens
  misc_RNA (1)...(19): siRNA sense strand
aaacccaaggucaucauug

SEQ ID NO: 773017 - RNA, 19 nt, Homo sapiens
  misc_RNA (1)...(19): siRNA sense strand
ccugagacuauguaaagaa

SEQ ID NO: 773018 - RNA, 19 nt, Homo sapiens
  misc_RNA (1)...(19): siRNA sense strand
gcugaagagaucuauccaa

SEQ ID NO: 773019 - RNA, 19 nt, Homo sapiens
  misc_RNA (1)...(19): siRNA sense strand
cuacagaugcccucaagcu

SEQ ID NO: 773020 - RNA, 19 nt, Homo sapiens
  misc_RNA (1)...(19): siRNA sense strand
aaugggcucuaucuucauc

SEQ ID NO: 773021 - RNA, 19 nt, Homo sapiens
  misc_RNA (1)...(19): siRNA sense strand
aaagagcugaagagaucua

SEQ ID NO: 773022 - RNA, 19 nt, Homo sapiens
  misc_RNA (1)...(19): siRNA sense strand
aagaugcuguuuacaagac

SEQ ID NO: 773023 - RNA, 19 nt, Homo sapiens
  misc_RNA (1)...(19): siRNA sense strand
ugacagccagggauaugga

SEQ ID NO: 773024 - RNA, 19 nt, Homo sapiens
  misc_RNA (1)...(19): siRNA sense strand
gguacagcaaucauuugaa

SEQ ID NO: 773025 - RNA, 19 nt, Homo sapiens
  misc_RNA (1)...(19): siRNA sense strand
caucacacaacucaucaca

SEQ ID NO: 773026 - RNA, 19 nt, Homo sapiens
  misc_RNA (1)...(19): siRNA sense strand
ggagggaaucugcggaacu

SEQ ID NO: 773027 - RNA, 19 nt, Homo sapiens
  misc_RNA (1)...(19): siRNA sense strand
cagcaaucauuugaaacuc

SEQ ID NO: 773028 - RNA, 19 nt, Homo sapiens
  misc_RNA (1)...(19): siRNA sense strand
gcugccaccuagaggaagu

SEQ ID NO: 773029 - RNA, 19 nt, Homo sapiens
  misc_RNA (1)...(19): siRNA sense strand
ucauaugcaauacagaguu

SEQ ID NO: 773030 - RNA, 19 nt, Homo sapiens
  misc_RNA (1)...(19): siRNA sense strand
cugcggaacugugcaugau

SEQ ID NO: 773031 - RNA, 19 nt, Homo sapiens
  misc_RNA (1)...(19): siRNA sense strand
ggacauguguaacuacuug

SEQ ID NO: 773032 - RNA, 19 nt, Homo sapiens
  misc_RNA (1)...(19): siRNA sense strand
caaaggugcugguagaaga

SEQ ID NO: 773033 - RNA, 19 nt, Homo sapiens
  misc_RNA (1)...(19): siRNA sense strand
guacagggcugggcacuga

SEQ ID NO: 773034 - RNA, 19 nt, Homo sapiens
  misc_RNA (1)...(19): siRNA sense strand
ggccauggcugaugccuuu

SEQ ID NO: 773035 - RNA, 19 nt, Homo sapiens
  misc_RNA (1)...(19): siRNA sense strand
ccaaggagcagcuguuuga

SEQ ID NO: 773036 - RNA, 19 nt, Homo sapiens
  misc_RNA (1)...(19): siRNA sense strand
gagcacgucugguucuaug

SEQ ID NO: 773037 - RNA, 19 nt, Homo sapiens
  misc_RNA (1)...(19): siRNA sense strand
gaggugagccggaucuuga

SEQ ID NO: 773038 - RNA, 19 nt, Homo sapiens
  misc_RNA (1)...(19): siRNA sense strand
ggacacagauauggaggau

SEQ ID NO: 773039 - RNA, 19 nt, Homo sapiens
  misc_RNA (1)...(19): siRNA sense strand
ggagggccguucagugaug

SEQ ID NO: 773040 - RNA, 19 nt, Homo sapiens
  misc_RNA (1)...(19): siRNA sense strand
gaugcaggaugaaggaaga

SEQ ID NO: 773041 - RNA, 19 nt, Homo sapiens
  misc_RNA (1)...(19): siRNA sense strand
uggaggagguauucuugua

SEQ ID NO: 773042 - RNA, 19 nt, Homo sapiens
  misc_RNA (1)...(19): siRNA sense strand
ggacccagccgugguguuu

SEQ ID NO: 773043 - RNA, 19 nt, Homo sapiens
  misc_RNA (1)...(19): siRNA sense strand
gcucagguguccuucuuca

SEQ ID NO: 773044 - RNA, 19 nt, Homo sapiens
  misc_RNA (1)...(19): siRNA sense strand
cuacuggcuuggcaacuuu

SEQ ID NO: 773045 - RNA, 19 nt, Homo sapiens
  misc_RNA (1)...(19): siRNA sense strand
cuaagaagugggugaauga

SEQ ID NO: 773046 - RNA, 19 nt, Homo sapiens
  misc_RNA (1)...(19): siRNA sense strand
guacccagccuccuucuuc

SEQ ID NO: 773047 - RNA, 19 nt, Homo sapiens
  misc_RNA (1)...(19): siRNA sense strand
guuugaggcugcauugaug

SEQ ID NO: 773048 - RNA, 19 nt, Homo sapiens
  misc_RNA (1)...(19): siRNA sense strand
ccaccacccuguccaucuu

SEQ ID NO: 773049 - RNA, 19 nt, Homo sapiens
  misc_RNA (1)...(19): siRNA sense strand
gagaggaggacgaggaugu

SEQ ID NO: 773050 - RNA, 19 nt, Homo sapiens
  misc_RNA (1)...(19): siRNA sense strand
gccggaaccugucugacuu

SEQ ID NO: 773051 - RNA, 19 nt, Homo sapiens
  misc_RNA (1)...(19): siRNA sense strand
caucuugaguggccucuuc

SEQ ID NO: 773052 - RNA, 19 nt, Homo sapiens
  misc_RNA (1)...(19): siRNA sense strand
gcagaugcaggaugaagga

SEQ ID NO: 773053 - RNA, 19 nt, Homo sapiens
  misc_RNA (1)...(19): siRNA sense strand
gcucaggacagucucaaga

SEQ ID NO: 773054 - RNA, 19 nt, Homo sapiens
  misc_RNA (1)...(19): siRNA sense strand
agaaguuccugcugaagug

SEQ ID NO: 773055 - RNA, 19 nt, Homo sapiens
  misc_RNA (1)...(19): siRNA sense strand
gcucaaauaccgagaaggu

SEQ ID NO: 773056 - RNA, 19 nt, Homo sapiens
  misc_RNA (1)...(19): siRNA sense strand
cucaagaucugguucaaca

SEQ ID NO: 773057 - RNA, 19 nt, Homo sapiens
  misc_RNA (1)...(19): siRNA sense strand
ugcuugagcucuucucuga

SEQ ID NO: 773058 - RNA, 19 nt, Homo sapiens
  misc_RNA (1)...(19): siRNA sense strand
uaagaucagggacagguuu

SEQ ID NO: 773059 - RNA, 19 nt, Homo sapiens
  misc_RNA (1)...(19): siRNA sense strand
gaucacaccgcucauguac

SEQ ID NO: 773060 - RNA, 19 nt, Homo sapiens
  misc_RNA (1)...(19): siRNA sense strand
gugcucagguguccuucuu

SEQ ID NO: 773061 - RNA, 19 nt, Homo sapiens
  misc_RNA (1)...(19): siRNA sense strand
ccucgaccguguccugaaa

SEQ ID NO: 773062 - RNA, 19 nt, Homo sapiens
  misc_RNA (1)...(19): siRNA sense strand
gagguauucuuguacuucu

SEQ ID NO: 773063 - RNA, 19 nt, Homo sapiens
  misc_RNA (1)...(19): siRNA sense strand
ucacgaggaccaauaagau

SEQ ID NO: 773064 - RNA, 19 nt, Homo sapiens
  misc_RNA (1)...(19): siRNA sense strand
gaggagguauucuuguacu

SEQ ID NO: 773065 - RNA, 19 nt, Homo sapiens
  misc_RNA (1)...(19): siRNA sense strand
ggaagcauggccaccuuug

SEQ ID NO: 773066 - RNA, 19 nt, Homo sapiens
  misc_RNA (1)...(19): siRNA sense strand
ccggccagcuucacucuug

SEQ ID NO: 773067 - RNA, 19 nt, Homo sapiens
  misc_RNA (1)...(19): siRNA sense strand
ucacucuuguccucauuga

SEQ ID NO: 773068 - RNA, 19 nt, Homo sapiens
  misc_RNA (1)...(19): siRNA sense strand
ccaagcaccugcagcucau

SEQ ID NO: 773069 - RNA, 19 nt, Homo sapiens
  misc_RNA (1)...(19): siRNA sense strand
gaucugguucaacaacaaa

SEQ ID NO: 773070 - RNA, 19 nt, Homo sapiens
  misc_RNA (1)...(19): siRNA sense strand
ucagccaguuccucgauga

SEQ ID NO: 773071 - RNA, 19 nt, Homo sapiens
  misc_RNA (1)...(19): siRNA sense strand
aguacaacgugcuguuuga

SEQ ID NO: 773072 - RNA, 19 nt, Homo sapiens
  misc_RNA (1)...(19): siRNA sense strand
cgugcugccugcccucuuu

SEQ ID NO: 773073 - RNA, 19 nt, Homo sapiens
  misc_RNA (1)...(19): siRNA sense strand
cggagugccuguccuugga

SEQ ID NO: 773074 - RNA, 19 nt, Homo sapiens
  misc_RNA (1)...(19): siRNA sense strand
ccaaacgcgucagccaguu

SEQ ID NO: 773075 - RNA, 19 nt, Homo sapiens
  misc_RNA (1)...(19): siRNA sense strand
ggagguauucuuguacuuc

SEQ ID NO: 773076 - RNA, 19 nt, Homo sapiens
  misc_RNA (1)...(19): siRNA sense strand
gggagguggucggcaagaa

SEQ ID NO: 773077 - RNA, 19 nt, Homo sapiens
  misc_RNA (1)...(19): siRNA sense strand
ucaggacagucucaagauc

SEQ ID NO: 773078 - RNA, 19 nt, Homo sapiens
  misc_RNA (1)...(19): siRNA sense strand
gggcgucuguccucaguac

SEQ ID NO: 773079 - RNA, 19 nt, Homo sapiens
  misc_RNA (1)...(19): siRNA sense strand
acccaaaggugcugguaga

SEQ ID NO: 773080 - RNA, 19 nt, Homo sapiens
  misc_RNA (1)...(19): siRNA sense strand
gucugggacucucauggua

SEQ ID NO: 773081 - RNA, 19 nt, Homo sapiens
  misc_RNA (1)...(19): siRNA sense strand
cuguauggcuggucgauca

SEQ ID NO: 773082 - RNA, 19 nt, Homo sapiens
  misc_RNA (1)...(19): siRNA sense strand
gaagcuguccguggccauu

SEQ ID NO: 773083 - RNA, 19 nt, Homo sapiens
  misc_RNA (1)...(19): siRNA sense strand
acuaagaagugggugaaug

SEQ ID NO: 773084 - RNA, 19 nt, Homo sapiens
  misc_RNA (1)...(19): siRNA sense strand
ggacgaggacaccgaagag

SEQ ID NO: 773085 - RNA, 19 nt, Homo sapiens
  misc_RNA (1)...(19): siRNA sense strand
gaagcauggccaccuuugu

SEQ ID NO: 773086 - RNA, 19 nt, Homo sapiens
  misc_RNA (1)...(19): siRNA sense strand
caucguggugcucaucuuu

SEQ ID NO: 773087 - RNA, 19 nt, Homo sapiens
  misc_RNA (1)...(19): siRNA sense strand
ucugggacauguguaacua

SEQ ID NO: 773088 - RNA, 19 nt, Homo sapiens
  misc_RNA (1)...(19): siRNA sense strand
cagcuucgccacacucuuc

SEQ ID NO: 773089 - RNA, 19 nt, Homo sapiens
  misc_RNA (1)...(19): siRNA sense strand
gcuggaggagguauucuug

SEQ ID NO: 773090 - RNA, 19 nt, Homo sapiens
  misc_RNA (1)...(19): siRNA sense strand
cuugagcucuucucugauc

SEQ ID NO: 773091 - RNA, 19 nt, Homo sapiens
  misc_RNA (1)...(19): siRNA sense strand
gagaaggucgcacgcugau

SEQ ID NO: 773092 - RNA, 19 nt, Homo sapiens
  misc_RNA (1)...(19): siRNA sense strand
gcaggacgcacacgcugau

SEQ ID NO: 773093 - RNA, 19 nt, Homo sapiens
  misc_RNA (1)...(19): siRNA sense strand
ccucuuggccauggugaua

SEQ ID NO: 773094 - RNA, 19 nt, Homo sapiens
  misc_RNA (1)...(19): siRNA sense strand
gcaucguggugcucaucuu

SEQ ID NO: 773095 - RNA, 19 nt, Homo sapiens
  misc_RNA (1)...(19): siRNA sense strand
gcaacuuucucugggacau

SEQ ID NO: 773096 - RNA, 19 nt, Homo sapiens
  misc_RNA (1)...(19): siRNA sense strand
caacgugcuguuugacaug

SEQ ID NO: 773097 - RNA, 19 nt, Homo sapiens
  misc_RNA (1)...(19): siRNA sense strand
ggaggugagccggaucuug

SEQ ID NO: 773098 - RNA, 19 nt, Homo sapiens
  misc_RNA (1)...(19): siRNA sense strand
acaccagccucgaggagau

SEQ ID NO: 773099 - RNA, 19 nt, Homo sapiens
  misc_RNA (1)...(19): siRNA sense strand
ccacccaccaccuggauga

SEQ ID NO: 773100 - RNA, 19 nt, Homo sapiens
  misc_RNA (1)...(19): siRNA sense strand
acaacgugcuguuugacau

SEQ ID NO: 773101 - RNA, 19 nt, Homo sapiens
  misc_RNA (1)...(19): siRNA sense strand
cgaucacaccgcucaugua

SEQ ID NO: 773102 - RNA, 19 nt, Homo sapiens
  misc_RNA (1)...(19): siRNA sense strand
gaaggcugacacugacaug

SEQ ID NO: 773103 - RNA, 19 nt, Homo sapiens
  misc_RNA (1)...(19): siRNA sense strand
ucuacuggcuuggcaacuu

SEQ ID NO: 773104 - RNA, 19 nt, Homo sapiens
  misc_RNA (1)...(19): siRNA sense strand
gggcguggucuuccuguuc

SEQ ID NO: 773105 - RNA, 19 nt, Homo sapiens
  misc_RNA (1)...(19): siRNA sense strand
ggaggagguauucuuguac

SEQ ID NO: 773106 - RNA, 19 nt, Homo sapiens
  misc_RNA (1)...(19): siRNA sense strand
ggucuuugccauguccuuu

SEQ ID NO: 773107 - RNA, 19 nt, Homo sapiens
  misc_RNA (1)...(19): siRNA sense strand
gggugaaugaggucaggua

SEQ ID NO: 773108 - RNA, 19 nt, Homo sapiens
  misc_RNA (1)...(19): siRNA sense strand
gccugaagacuaagaagug

SEQ ID NO: 773109 - RNA, 19 nt, Homo sapiens
  misc_RNA (1)...(19): siRNA sense strand
ggacccaaaggugcuggua

SEQ ID NO: 773110 - RNA, 19 nt, Homo sapiens
  misc_RNA (1)...(19): siRNA sense strand
ucaguacaacgugcuguuu

SEQ ID NO: 773111 - RNA, 19 nt, Homo sapiens
  misc_RNA (1)...(19): siRNA sense strand
cuacagcggagggaacaaa

SEQ ID NO: 773112 - RNA, 19 nt, Homo sapiens
  misc_RNA (1)...(19): siRNA sense strand
cagaggaugccagcuguug

SEQ ID NO: 773113 - RNA, 19 nt, Homo sapiens
  misc_RNA (1)...(19): siRNA sense strand
gugcucaccugcauaaacc

SEQ ID NO: 773114 - RNA, 19 nt, Homo sapiens
  misc_RNA (1)...(19): siRNA sense strand
gcuacucuuugcaccagau

SEQ ID NO: 773115 - RNA, 19 nt, Homo sapiens
  misc_RNA (1)...(19): siRNA sense strand
cuccaucuguguggucuuu

SEQ ID NO: 773116 - RNA, 19 nt, Homo sapiens
  misc_RNA (1)...(19): siRNA sense strand
cagaaguuccugcugaagu

SEQ ID NO: 773117 - RNA, 19 nt, Homo sapiens
  misc_RNA (1)...(19): siRNA sense strand
ggagacagcgcuggagaac

SEQ ID NO: 773118 - RNA, 19 nt, Homo sapiens
  misc_RNA (1)...(19): siRNA sense strand
guccguggccauugccuuu

SEQ ID NO: 773119 - RNA, 19 nt, Homo sapiens
  misc_RNA (1)...(19): siRNA sense strand
aaauccgcauggacauuga

SEQ ID NO: 773120 - RNA, 19 nt, Homo sapiens
  misc_RNA (1)...(19): siRNA sense strand
gaaccaggccauggcugau

SEQ ID NO: 773121 - RNA, 19 nt, Homo sapiens
  misc_RNA (1)...(19): siRNA sense strand
caagaucugguucaacaac

SEQ ID NO: 773122 - RNA, 19 nt, Homo sapiens
  misc_RNA (1)...(19): siRNA sense strand
ucagguguccuucuucagu

SEQ ID NO: 773123 - RNA, 19 nt, Homo sapiens
  misc_RNA (1)...(19): siRNA sense strand
gugcugcggacacagauau

SEQ ID NO: 773124 - RNA, 19 nt, Homo sapiens
  misc_RNA (1)...(19): siRNA sense strand
ucgggaagcuacucuuugc

SEQ ID NO: 773125 - RNA, 19 nt, Homo sapiens
  misc_RNA (1)...(19): siRNA sense strand
augagaaggcugacacuga

SEQ ID NO: 773126 - RNA, 19 nt, Homo sapiens
  misc_RNA (1)...(19): siRNA sense strand
gcucauggcccaggucaac

SEQ ID NO: 773127 - RNA, 19 nt, Homo sapiens
  misc_RNA (1)...(19): siRNA sense strand
gcagaggaugccagcuguu

SEQ ID NO: 773128 - RNA, 19 nt, Homo sapiens
  misc_RNA (1)...(19): siRNA sense strand
aagcauggccaccuuugug

SEQ ID NO: 773129 - RNA, 19 nt, Homo sapiens
  misc_RNA (1)...(19): siRNA sense strand
caccaaggagcagcuguuu

SEQ ID NO: 773130 - RNA, 19 nt, Homo sapiens
  misc_RNA (1)...(19): siRNA sense strand
ccucuuccuucucuucaca

SEQ ID NO: 773131 - RNA, 19 nt, Homo sapiens
  misc_RNA (1)...(19): siRNA sense strand
ggacauguguaacuacuug

SEQ ID NO: 773132 - RNA, 19 nt, Homo sapiens
  misc_RNA (1)...(19): siRNA sense strand
caaaggugcugguagaaga

SEQ ID NO: 773133 - RNA, 19 nt, Homo sapiens
  misc_RNA (1)...(19): siRNA sense strand
guacagggcugggcacuga

SEQ ID NO: 773134 - RNA, 19 nt, Homo sapiens
  misc_RNA (1)...(19): siRNA sense strand
ggccauggcugaugccuuu

SEQ ID NO: 773135 - RNA, 19 nt, Homo sapiens
  misc_RNA (1)...(19): siRNA sense strand
ccaaggagcagcuguuuga

SEQ ID NO: 773136 - RNA, 19 nt, Homo sapiens
  misc_RNA (1)...(19): siRNA sense strand
gagcacgucugguucuaug

SEQ ID NO: 773137 - RNA, 19 nt, Homo sapiens
  misc_RNA (1)...(19): siRNA sense strand
gaggugagccggaucuuga

SEQ ID NO: 773138 - RNA, 19 nt, Homo sapiens
  misc_RNA (1)...(19): siRNA sense strand
ggacacagauauggaggau

SEQ ID NO: 773139 - RNA, 19 nt, Homo sapiens
  misc_RNA (1)...(19): siRNA sense strand
ggagggccguucagugaug

SEQ ID NO: 773140 - RNA, 19 nt, Homo sapiens
  misc_RNA (1)...(19): siRNA sense strand
gaugcaggaugaaggaaga

SEQ ID NO: 773141 - RNA, 19 nt, Homo sapiens
  misc_RNA (1)...(19): siRNA sense strand
uggaggagguauucuugua

SEQ ID NO: 773142 - RNA, 19 nt, Homo sapiens
  misc_RNA (1)...(19): siRNA sense strand
ggacccagccgugguguuu

SEQ ID NO: 773143 - RNA, 19 nt, Homo sapiens
  misc_RNA (1)...(19): siRNA sense strand
gcucagguguccuucuuca

SEQ ID NO: 773144 - RNA, 19 nt, Homo sapiens
  misc_RNA (1)...(19): siRNA sense strand
cuacuggcuuggcaacuuu

SEQ ID NO: 773145 - RNA, 19 nt, Homo sapiens
  misc_RNA (1)...(19): siRNA sense strand
cuaagaagugggugaauga

SEQ ID NO: 773146 - RNA, 19 nt, Homo sapiens
  misc_RNA (1)...(19): siRNA sense strand
guacccagccuccuucuuc

SEQ ID NO: 773147 - RNA, 19 nt, Homo sapiens
  misc_RNA (1)...(19): siRNA sense strand
guuugaggcugcauugaug

SEQ ID NO: 773148 - RNA, 19 nt, Homo sapiens
  misc_RNA (1)...(19): siRNA sense strand
ccaccacccuguccaucuu

SEQ ID NO: 773149 - RNA, 19 nt, Homo sapiens
  misc_RNA (1)...(19): siRNA sense strand
gagaggaggacgaggaugu

SEQ ID NO: 773150 - RNA, 19 nt, Homo sapiens
  misc_RNA (1)...(19): siRNA sense strand
gccggaaccugucugacuu

SEQ ID NO: 773151 - RNA, 19 nt, Homo sapiens
  misc_RNA (1)...(19): siRNA sense strand
caucuugaguggccucuuc

SEQ ID NO: 773152 - RNA, 19 nt, Homo sapiens
  misc_RNA (1)...(19): siRNA sense strand
gcagaugcaggaugaagga

SEQ ID NO: 773153 - RNA, 19 nt, Homo sapiens
  misc_RNA (1)...(19): siRNA sense strand
gcucaggacagucucaaga

SEQ ID NO: 773154 - RNA, 19 nt, Homo sapiens
  misc_RNA (1)...(19): siRNA sense strand
agaaguuccugcugaagug

SEQ ID NO: 773155 - RNA, 19 nt, Homo sapiens
  misc_RNA (1)...(19): siRNA sense strand
gcucaaauaccgagaaggu

SEQ ID NO: 773156 - RNA, 19 nt, Homo sapiens
  misc_RNA (1)...(19): siRNA sense strand
cucaagaucugguucaaca

SEQ ID NO: 773157 - RNA, 19 nt, Homo sapiens
  misc_RNA (1)...(19): siRNA sense strand
ugcuugagcucuucucuga

SEQ ID NO: 773158 - RNA, 19 nt, Homo sapiens
  misc_RNA (1)...(19): siRNA sense strand
uaagaucagggacagguuu

SEQ ID NO: 773159 - RNA, 19 nt, Homo sapiens
  misc_RNA (1)...(19): siRNA sense strand
gaucacaccgcucauguac

SEQ ID NO: 773160 - RNA, 19 nt, Homo sapiens
  misc_RNA (1)...(19): siRNA sense strand
gugcucagguguccuucuu

SEQ ID NO: 773161 - RNA, 19 nt, Homo sapiens
  misc_RNA (1)...(19): siRNA sense strand
ccucgaccguguccugaaa

SEQ ID NO: 773162 - RNA, 19 nt, Homo sapiens
  misc_RNA (1)...(19): siRNA sense strand
gagguauucuuguacuucu

SEQ ID NO: 773163 - RNA, 19 nt, Homo sapiens
  misc_RNA (1)...(19): siRNA sense strand
ucacgaggaccaauaagau

SEQ ID NO: 773164 - RNA, 19 nt, Homo sapiens
  misc_RNA (1)...(19): siRNA sense strand
gaggagguauucuuguacu

SEQ ID NO: 773165 - RNA, 19 nt, Homo sapiens
  misc_RNA (1)...(19): siRNA sense strand
ggaagcauggccaccuuug

SEQ ID NO: 773166 - RNA, 19 nt, Homo sapiens
  misc_RNA (1)...(19): siRNA sense strand
ccggccagcuucacucuug

SEQ ID NO: 773167 - RNA, 19 nt, Homo sapiens
  misc_RNA (1)...(19): siRNA sense strand
ucacucuuguccucauuga

SEQ ID NO: 773168 - RNA, 19 nt, Homo sapiens
  misc_RNA (1)...(19): siRNA sense strand
ccaagcaccugcagcucau

SEQ ID NO: 773169 - RNA, 19 nt, Homo sapiens
  misc_RNA (1)...(19): siRNA sense strand
gaucugguucaacaacaaa

SEQ ID NO: 773170 - RNA, 19 nt, Homo sapiens
  misc_RNA (1)...(19): siRNA sense strand
ucagccaguuccucgauga

SEQ ID NO: 773171 - RNA, 19 nt, Homo sapiens
  misc_RNA (1)...(19): siRNA sense strand
aguacaacgugcuguuuga

SEQ ID NO: 773172 - RNA, 19 nt, Homo sapiens
  misc_RNA (1)...(19): siRNA sense strand
cgugcugccugcccucuuu

SEQ ID NO: 773173 - RNA, 19 nt, Homo sapiens
  misc_RNA (1)...(19): siRNA sense strand
cggagugccuguccuugga

SEQ ID NO: 773174 - RNA, 19 nt, Homo sapiens
  misc_RNA (1)...(19): siRNA sense strand
ccaaacgcgucagccaguu

SEQ ID NO: 773175 - RNA, 19 nt, Homo sapiens
  misc_RNA (1)...(19): siRNA sense strand
ggagguauucuuguacuuc

SEQ ID NO: 773176 - RNA, 19 nt, Homo sapiens
  misc_RNA (1)...(19): siRNA sense strand
gggagguggucggcaagaa

SEQ ID NO: 773177 - RNA, 19 nt, Homo sapiens
  misc_RNA (1)...(19): siRNA sense strand
ucaggacagucucaagauc

SEQ ID NO: 773178 - RNA, 19 nt, Homo sapiens
  misc_RNA (1)...(19): siRNA sense strand
gggcgucuguccucaguac

SEQ ID NO: 773179 - RNA, 19 nt, Homo sapiens
  misc_RNA (1)...(19): siRNA sense strand
acccaaaggugcugguaga

SEQ ID NO: 773180 - RNA, 19 nt, Homo sapiens
  misc_RNA (1)...(19): siRNA sense strand
gucugggacucucauggua

SEQ ID NO: 773181 - RNA, 19 nt, Homo sapiens
  misc_RNA (1)...(19): siRNA sense strand
cuguauggcuggucgauca

SEQ ID NO: 773182 - RNA, 19 nt, Homo sapiens
  misc_RNA (1)...(19): siRNA sense strand
gaagcuguccguggccauu

SEQ ID NO: 773183 - RNA, 19 nt, Homo sapiens
  misc_RNA (1)...(19): siRNA sense strand
acuaagaagugggugaaug

SEQ ID NO: 773184 - RNA, 19 nt, Homo sapiens
  misc_RNA (1)...(19): siRNA sense strand
ggacgaggacaccgaagag

SEQ ID NO: 773185 - RNA, 19 nt, Homo sapiens
  misc_RNA (1)...(19): siRNA sense strand
gaagcauggccaccuuugu

SEQ ID NO: 773186 - RNA, 19 nt, Homo sapiens
  misc_RNA (1)...(19): siRNA sense strand
caucguggugcucaucuuu

SEQ ID NO: 773187 - RNA, 19 nt, Homo sapiens
  misc_RNA (1)...(19): siRNA sense strand
ucugggacauguguaacua

SEQ ID NO: 773188 - RNA, 19 nt, Homo sapiens
  misc_RNA (1)...(19): siRNA sense strand
cagcuucgccacacucuuc

SEQ ID NO: 773189 - RNA, 19 nt, Homo sapiens
  misc_RNA (1)...(19): siRNA sense strand
gcuggaggagguauucuug

SEQ ID NO: 773190 - RNA, 19 nt, Homo sapiens
  misc_RNA (1)...(19): siRNA sense strand
cuugagcucuucucugauc

SEQ ID NO: 773191 - RNA, 19 nt, Homo sapiens
  misc_RNA (1)...(19): siRNA sense strand
gagaaggucgcacgcugau

SEQ ID NO: 773192 - RNA, 19 nt, Homo sapiens
  misc_RNA (1)...(19): siRNA sense strand
gcaggacgcacacgcugau

SEQ ID NO: 773193 - RNA, 19 nt, Homo sapiens
  misc_RNA (1)...(19): siRNA sense strand
ccucuuggccauggugaua

SEQ ID NO: 773194 - RNA, 19 nt, Homo sapiens
  misc_RNA (1)...(19): siRNA sense strand
gcaucguggugcucaucuu

SEQ ID NO: 773195 - RNA, 19 nt, Homo sapiens
  misc_RNA (1)...(19): siRNA sense strand
gcaacuuucucugggacau

SEQ ID NO: 773196 - RNA, 19 nt, Homo sapiens
  misc_RNA (1)...(19): siRNA sense strand
caacgugcuguuugacaug

SEQ ID NO: 773197 - RNA, 19 nt, Homo sapiens
  misc_RNA (1)...(19): siRNA sense strand
ggaggugagccggaucuug

SEQ ID NO: 773198 - RNA, 19 nt, Homo sapiens
  misc_RNA (1)...(19): siRNA sense strand
acaccagccucgaggagau

SEQ ID NO: 773199 - RNA, 19 nt, Homo sapiens
  misc_RNA (1)...(19): siRNA sense strand
ccacccaccaccuggauga

SEQ ID NO: 773200 - RNA, 19 nt, Homo sapiens
  misc_RNA (1)...(19): siRNA sense strand
acaacgugcuguuugacau

SEQ ID NO: 773201 - RNA, 19 nt, Homo sapiens
  misc_RNA (1)...(19): siRNA sense strand
cgaucacaccgcucaugua

SEQ ID NO: 773202 - RNA, 19 nt, Homo sapiens
  misc_RNA (1)...(19): siRNA sense strand
gaaggcugacacugacaug

SEQ ID NO: 773203 - RNA, 19 nt, Homo sapiens
  misc_RNA (1)...(19): siRNA sense strand
ucuacuggcuuggcaacuu

SEQ ID NO: 773204 - RNA, 19 nt, Homo sapiens
  misc_RNA (1)...(19): siRNA sense strand
gggcguggucuuccuguuc

SEQ ID NO: 773205 - RNA, 19 nt, Homo sapiens
  misc_RNA (1)...(19): siRNA sense strand
ggaggagguauucuuguac

SEQ ID NO: 773206 - RNA, 19 nt, Homo sapiens
  misc_RNA (1)...(19): siRNA sense strand
ggucuuugccauguccuuu

SEQ ID NO: 773207 - RNA, 19 nt, Homo sapiens
  misc_RNA (1)...(19): siRNA sense strand
gggugaaugaggucaggua

SEQ ID NO: 773208 - RNA, 19 nt, Homo sapiens
  misc_RNA (1)...(19): siRNA sense strand
gccugaagacuaagaagug

SEQ ID NO: 773209 - RNA, 19 nt, Homo sapiens
  misc_RNA (1)...(19): siRNA sense strand
ggacccaaaggugcuggua

SEQ ID NO: 773210 - RNA, 19 nt, Homo sapiens
  misc_RNA (1)...(19): siRNA sense strand
ucaguacaacgugcuguuu

SEQ ID NO: 773211 - RNA, 19 nt, Homo sapiens
  misc_RNA (1)...(19): siRNA sense strand
cuacagcggagggaacaaa

SEQ ID NO: 773212 - RNA, 19 nt, Homo sapiens
  misc_RNA (1)...(19): siRNA sense strand
cagaggaugccagcuguug

SEQ ID NO: 773213 - RNA, 19 nt, Homo sapiens
  misc_RNA (1)...(19): siRNA sense strand
gugcucaccugcauaaacc

SEQ ID NO: 773214 - RNA, 19 nt, Homo sapiens
  misc_RNA (1)...(19): siRNA sense strand
gcuacucuuugcaccagau

SEQ ID NO: 773215 - RNA, 19 nt, Homo sapiens
  misc_RNA (1)...(19): siRNA sense strand
cuccaucuguguggucuuu

SEQ ID NO: 773216 - RNA, 19 nt, Homo sapiens
  misc_RNA (1)...(19): siRNA sense strand
cagaaguuccugcugaagu

SEQ ID NO: 773217 - RNA, 19 nt, Homo sapiens
  misc_RNA (1)...(19): siRNA sense strand
ggagacagcgcuggagaac

SEQ ID NO: 773218 - RNA, 19 nt, Homo sapiens
  misc_RNA (1)...(19): siRNA sense strand
guccguggccauugccuuu

SEQ ID NO: 773219 - RNA, 19 nt, Homo sapiens
  misc_RNA (1)...(19): siRNA sense strand
aaauccgcauggacauuga

SEQ ID NO: 773220 - RNA, 19 nt, Homo sapiens
  misc_RNA (1)...(19): siRNA sense strand
gaaccaggccauggcugau

SEQ ID NO: 773221 - RNA, 19 nt, Homo sapiens
  misc_RNA (1)...(19): siRNA sense strand
caagaucugguucaacaac

SEQ ID NO: 773222 - RNA, 19 nt, Homo sapiens
  misc_RNA (1)...(19): siRNA sense strand
ucagguguccuucuucagu

SEQ ID NO: 773223 - RNA, 19 nt, Homo sapiens
  misc_RNA (1)...(19): siRNA sense strand
gugcugcggacacagauau

SEQ ID NO: 773224 - RNA, 19 nt, Homo sapiens
  misc_RNA (1)...(19): siRNA sense strand
ucgggaagcuacucuuugc

SEQ ID NO: 773225 - RNA, 19 nt, Homo sapiens
  misc_RNA (1)...(19): siRNA sense strand
augagaaggcugacacuga

SEQ ID NO: 773226 - RNA, 19 nt, Homo sapiens
  misc_RNA (1)...(19): siRNA sense strand
gcucauggcccaggucaac

SEQ ID NO: 773227 - RNA, 19 nt, Homo sapiens
  misc_RNA (1)...(19): siRNA sense strand
gcagaggaugccagcuguu

SEQ ID NO: 773228 - RNA, 19 nt, Homo sapiens
  misc_RNA (1)...(19): siRNA sense strand
aagcauggccaccuuugug

SEQ ID NO: 773229 - RNA, 19 nt, Homo sapiens
  misc_RNA (1)...(19): siRNA sense strand
caccaaggagcagcuguuu

SEQ ID NO: 773230 - RNA, 19 nt, Homo sapiens
  misc_RNA (1)...(19): siRNA sense strand
ccucuuccuucucuucaca

SEQ ID NO: 773231 - RNA, 19 nt, Homo sapiens
  misc_RNA (1)...(19): siRNA sense strand
gcaaauguugucugacuua

SEQ ID NO: 773232 - RNA, 19 nt, Homo sapiens
  misc_RNA (1)...(19): siRNA sense strand
gaagauggacguacuuugu

SEQ ID NO: 773233 - RNA, 19 nt, Homo sapiens
  misc_RNA (1)...(19): siRNA sense strand
uaagcuggcuguccugaaa

SEQ ID NO: 773234 - RNA, 19 nt, Homo sapiens
  misc_RNA (1)...(19): siRNA sense strand
uggcuguccugaaauauua

SEQ ID NO: 773235 - RNA, 19 nt, Homo sapiens
  misc_RNA (1)...(19): siRNA sense strand
agaauaagcacaagagaaa

SEQ ID NO: 773236 - RNA, 19 nt, Homo sapiens
  misc_RNA (1)...(19): siRNA sense strand
caacaaaccagaagacaag

SEQ ID NO: 773237 - RNA, 19 nt, Homo sapiens
  misc_RNA (1)...(19): siRNA sense strand
caaaccagaagacaaguaa

SEQ ID NO: 773238 - RNA, 19 nt, Homo sapiens
  misc_RNA (1)...(19): siRNA sense strand
cagcagagacugaucuuug

SEQ ID NO: 773239 - RNA, 19 nt, Homo sapiens
  misc_RNA (1)...(19): siRNA sense strand
ggacguacuuugucugacu

SEQ ID NO: 773240 - RNA, 19 nt, Homo sapiens
  misc_RNA (1)...(19): siRNA sense strand
cacaagagaaagaagguua

SEQ ID NO: 773241 - RNA, 19 nt, Homo sapiens
  misc_RNA (1)...(19): siRNA sense strand
ccaagaagaauaagcacaa

SEQ ID NO: 773242 - RNA, 19 nt, Homo sapiens
  misc_RNA (1)...(19): siRNA sense strand
gaagaauaagcacaagaga

SEQ ID NO: 773243 - RNA, 19 nt, Homo sapiens
  misc_RNA (1)...(19): siRNA sense strand
gaccaucacccucgagguu

SEQ ID NO: 773244 - RNA, 19 nt, Homo sapiens
  misc_RNA (1)...(19): siRNA sense strand
gaugagaauggcaaaauua

SEQ ID NO: 773245 - RNA, 19 nt, Homo sapiens
  misc_RNA (1)...(19): siRNA sense strand
auuauaagguggaugagaa

SEQ ID NO: 773246 - RNA, 19 nt, Homo sapiens
  misc_RNA (1)...(19): siRNA sense strand
gacguacuuugucugacua

SEQ ID NO: 773247 - RNA, 19 nt, Homo sapiens
  misc_RNA (1)...(19): siRNA sense strand
ggaugagaauggcaaaauu

SEQ ID NO: 773248 - RNA, 19 nt, Homo sapiens
  misc_RNA (1)...(19): siRNA sense strand
ccacucccaagaagaauaa

SEQ ID NO: 773249 - RNA, 19 nt, Homo sapiens
  misc_RNA (1)...(19): siRNA sense strand
ggaagauggacguacuuug

SEQ ID NO: 773250 - RNA, 19 nt, Homo sapiens
  misc_RNA (1)...(19): siRNA sense strand
uuacaccacucccaagaag

SEQ ID NO: 773251 - RNA, 19 nt, Homo sapiens
  misc_RNA (1)...(19): siRNA sense strand
caagaagaauaagcacaag

SEQ ID NO: 773252 - RNA, 19 nt, Homo sapiens
  misc_RNA (1)...(19): siRNA sense strand
gcuggaagauggacguacu

SEQ ID NO: 773253 - RNA, 19 nt, Homo sapiens
  misc_RNA (1)...(19): siRNA sense strand
aauguugucugacuuacug

SEQ ID NO: 773254 - RNA, 19 nt, Homo sapiens
  misc_RNA (1)...(19): siRNA sense strand
ggcaaauguugucugacuu

SEQ ID NO: 773255 - RNA, 19 nt, Homo sapiens
  misc_RNA (1)...(19): siRNA sense strand
uguggcaaauguugucuga

SEQ ID NO: 773256 - RNA, 19 nt, Homo sapiens
  misc_RNA (1)...(19): siRNA sense strand
ccaucacccucgagguuga

SEQ ID NO: 773257 - RNA, 19 nt, Homo sapiens
  misc_RNA (1)...(19): siRNA sense strand
uggcaaauguugucugacu

SEQ ID NO: 773258 - RNA, 19 nt, Homo sapiens
  misc_RNA (1)...(19): siRNA sense strand
acaccacucccaagaagaa

SEQ ID NO: 773259 - RNA, 19 nt, Homo sapiens
  misc_RNA (1)...(19): siRNA sense strand
aagaauaagcacaagagaa

SEQ ID NO: 773260 - RNA, 19 nt, Homo sapiens
  misc_RNA (1)...(19): siRNA sense strand
acaagagaaagaagguuaa

SEQ ID NO: 773261 - RNA, 19 nt, Homo sapiens
  misc_RNA (1)...(19): siRNA sense strand
ucaacaaaccagaagacaa

SEQ ID NO: 773262 - RNA, 19 nt, Homo sapiens
  misc_RNA (1)...(19): siRNA sense strand
cagacauuauuguggcaaa

SEQ ID NO: 773263 - RNA, 19 nt, Homo sapiens
  misc_RNA (1)...(19): siRNA sense strand
guccugaaauauuauaagg

SEQ ID NO: 773264 - RNA, 19 nt, Homo sapiens
  misc_RNA (1)...(19): siRNA sense strand
aauaagcacaagagaaaga

SEQ ID NO: 773265 - RNA, 19 nt, Homo sapiens
  misc_RNA (1)...(19): siRNA sense strand
guugaacccucggauacga

SEQ ID NO: 773266 - RNA, 19 nt, Homo sapiens
  misc_RNA (1)...(19): siRNA sense strand
gcacaagagaaagaagguu

SEQ ID NO: 773267 - RNA, 19 nt, Homo sapiens
  misc_RNA (1)...(19): siRNA sense strand
ucacuuugacagacauuau

SEQ ID NO: 773268 - RNA, 19 nt, Homo sapiens
  misc_RNA (1)...(19): siRNA sense strand
caaauguugucugacuuac

SEQ ID NO: 773269 - RNA, 19 nt, Homo sapiens
  misc_RNA (1)...(19): siRNA sense strand
ugucugacuuacuguuuca

SEQ ID NO: 773270 - RNA, 19 nt, Homo sapiens
  misc_RNA (1)...(19): siRNA sense strand
acaaaccagaagacaagua

SEQ ID NO: 773271 - RNA, 19 nt, Homo sapiens
  misc_RNA (1)...(19): siRNA sense strand
ugaacccucggauacgaua

SEQ ID NO: 773272 - RNA, 19 nt, Homo sapiens
  misc_RNA (1)...(19): siRNA sense strand
gaauaagcacaagagaaag

SEQ ID NO: 773273 - RNA, 19 nt, Homo sapiens
  misc_RNA (1)...(19): siRNA sense strand
ggguguuuauggcaaguca

SEQ ID NO: 773274 - RNA, 19 nt, Homo sapiens
  misc_RNA (1)...(19): siRNA sense strand
gcuguccugaaauauuaua

SEQ ID NO: 773275 - RNA, 19 nt, Homo sapiens
  misc_RNA (1)...(19): siRNA sense strand
agaagaauaagcacaagag

SEQ ID NO: 773276 - RNA, 19 nt, Homo sapiens
  misc_RNA (1)...(19): siRNA sense strand
guugucugacuuacuguuu

SEQ ID NO: 773277 - RNA, 19 nt, Homo sapiens
  misc_RNA (1)...(19): siRNA sense strand
agacauuauuguggcaaau

SEQ ID NO: 773278 - RNA, 19 nt, Homo sapiens
  misc_RNA (1)...(19): siRNA sense strand
agagaaagaagguuaagcu

SEQ ID NO: 773279 - RNA, 19 nt, Homo sapiens
  misc_RNA (1)...(19): siRNA sense strand
gcuaagaaaaggaagaaga

SEQ ID NO: 773280 - RNA, 19 nt, Homo sapiens
  misc_RNA (1)...(19): siRNA sense strand
gagaauggcaaaauuaguc

SEQ ID NO: 773281 - RNA, 19 nt, Homo sapiens
  misc_RNA (1)...(19): siRNA sense strand
agcuggcuguccugaaaua

SEQ ID NO: 773282 - RNA, 19 nt, Homo sapiens
  misc_RNA (1)...(19): siRNA sense strand
gcaagcagcuggccaccaa

SEQ ID NO: 773283 - RNA, 19 nt, Homo sapiens
  misc_RNA (1)...(19): siRNA sense strand
ccaccgagcugcugaucag

SEQ ID NO: 773284 - RNA, 19 nt, Homo sapiens
  misc_RNA (1)...(19): siRNA sense strand
ccgagcugcugaucagaaa

SEQ ID NO: 773285 - RNA, 19 nt, Homo sapiens
  misc_RNA (1)...(19): siRNA sense strand
ugacuaucaugcccaagga

SEQ ID NO: 773286 - RNA, 19 nt, Homo sapiens
  misc_RNA (1)...(19): siRNA sense strand
ccaagcgggugacuaucau

SEQ ID NO: 773287 - RNA, 19 nt, Homo sapiens
  misc_RNA (1)...(19): siRNA sense strand
gccaagcgggugacuauca

SEQ ID NO: 773288 - RNA, 19 nt, Homo sapiens
  misc_RNA (1)...(19): siRNA sense strand
ugagaucgcgcaggacuuc

SEQ ID NO: 773289 - RNA, 19 nt, Homo sapiens
  misc_RNA (1)...(19): siRNA sense strand
caagaagccccaucgcuau

SEQ ID NO: 773290 - RNA, 19 nt, Homo sapiens
  misc_RNA (1)...(19): siRNA sense strand
gcaauuuccuagacaauga

SEQ ID NO: 773291 - RNA, 19 nt, Homo sapiens
  misc_RNA (1)...(19): siRNA sense strand
ggaugaggaugaugacaaa

SEQ ID NO: 773292 - RNA, 19 nt, Homo sapiens
  misc_RNA (1)...(19): siRNA sense strand
ccaucuaccuggauaagua

SEQ ID NO: 773293 - RNA, 19 nt, Homo sapiens
  misc_RNA (1)...(19): siRNA sense strand
gcugguguguggacaaaua

SEQ ID NO: 773294 - RNA, 19 nt, Homo sapiens
  misc_RNA (1)...(19): siRNA sense strand
uggaugaccuagaauauga

SEQ ID NO: 773295 - RNA, 19 nt, Homo sapiens
  misc_RNA (1)...(19): siRNA sense strand
gaggagggcuauuacaaag

SEQ ID NO: 773296 - RNA, 19 nt, Homo sapiens
  misc_RNA (1)...(19): siRNA sense strand
ggacaaauaugggaaugag

SEQ ID NO: 773297 - RNA, 19 nt, Homo sapiens
  misc_RNA (1)...(19): siRNA sense strand
caacaagcccuuugaccaa

SEQ ID NO: 773298 - RNA, 19 nt, Homo sapiens
  misc_RNA (1)...(19): siRNA sense strand
caaggcagguuugacacua

SEQ ID NO: 773299 - RNA, 19 nt, Homo sapiens
  misc_RNA (1)...(19): siRNA sense strand
gaaacuggaaucccaacaa

SEQ ID NO: 773300 - RNA, 19 nt, Homo sapiens
  misc_RNA (1)...(19): siRNA sense strand
agacgaugauuauuucaga

SEQ ID NO: 773301 - RNA, 19 nt, Homo sapiens
  misc_RNA (1)...(19): siRNA sense strand
gacagaggaugaugaggau

SEQ ID NO: 773302 - RNA, 19 nt, Homo sapiens
  misc_RNA (1)...(19): siRNA sense strand
gaacuaugaccuccugcuu

SEQ ID NO: 773303 - RNA, 19 nt, Homo sapiens
  misc_RNA (1)...(19): siRNA sense strand
cgaauuuggucaagugcaa

SEQ ID NO: 773304 - RNA, 19 nt, Homo sapiens
  misc_RNA (1)...(19): siRNA sense strand
gguuggaccuucgaauuug

SEQ ID NO: 773305 - RNA, 19 nt, Homo sapiens
  misc_RNA (1)...(19): siRNA sense strand
gaugaggucggguacauau

SEQ ID NO: 773306 - RNA, 19 nt, Homo sapiens
  misc_RNA (1)...(19): siRNA sense strand
gaaccgcuuucgagacgau

SEQ ID NO: 773307 - RNA, 19 nt, Homo sapiens
  misc_RNA (1)...(19): siRNA sense strand
acuaugaccuccugcuuga

SEQ ID NO: 773308 - RNA, 19 nt, Homo sapiens
  misc_RNA (1)...(19): siRNA sense strand
ggguuggaccuucgaauuu

SEQ ID NO: 773309 - RNA, 19 nt, Homo sapiens
  misc_RNA (1)...(19): siRNA sense strand
ccacgaggaugcgaacaga

SEQ ID NO: 773310 - RNA, 19 nt, Homo sapiens
  misc_RNA (1)...(19): siRNA sense strand
ucgagacgaugauuauuuc

SEQ ID NO: 773311 - RNA, 19 nt, Homo sapiens
  misc_RNA (1)...(19): siRNA sense strand
ggcaagcuuucuaacaaug

SEQ ID NO: 773312 - RNA, 19 nt, Homo sapiens
  misc_RNA (1)...(19): siRNA sense strand
aaacuggaaucccaacaag

SEQ ID NO: 773313 - RNA, 19 nt, Homo sapiens
  misc_RNA (1)...(19): siRNA sense strand
ggaguuccaugcuuguucu

SEQ ID NO: 773314 - RNA, 19 nt, Homo sapiens
  misc_RNA (1)...(19): siRNA sense strand
acaaauaugggaaugaguu

SEQ ID NO: 773315 - RNA, 19 nt, Homo sapiens
  misc_RNA (1)...(19): siRNA sense strand
gacgaugauuauuucagaa

SEQ ID NO: 773316 - RNA, 19 nt, Homo sapiens
  misc_RNA (1)...(19): siRNA sense strand
gcugaaggauugguuugga

SEQ ID NO: 773317 - RNA, 19 nt, Homo sapiens
  misc_RNA (1)...(19): siRNA sense strand
gcucagauggccacuccua

SEQ ID NO: 773318 - RNA, 19 nt, Homo sapiens
  misc_RNA (1)...(19): siRNA sense strand
gcaagcuuucuaacaauga

SEQ ID NO: 773319 - RNA, 19 nt, Homo sapiens
  misc_RNA (1)...(19): siRNA sense strand
ugaggagggcuauuacaaa

SEQ ID NO: 773320 - RNA, 19 nt, Homo sapiens
  misc_RNA (1)...(19): siRNA sense strand
guacgagcccuguaucaag

SEQ ID NO: 773321 - RNA, 19 nt, Homo sapiens
  misc_RNA (1)...(19): siRNA sense strand
caaccacggcaauuuccua

SEQ ID NO: 773322 - RNA, 19 nt, Homo sapiens
  misc_RNA (1)...(19): siRNA sense strand
cuucaaggauggcaagcuu

SEQ ID NO: 773323 - RNA, 19 nt, Homo sapiens
  misc_RNA (1)...(19): siRNA sense strand
caaauaugggaaugaguug

SEQ ID NO: 773324 - RNA, 19 nt, Homo sapiens
  misc_RNA (1)...(19): siRNA sense strand
gaacguggcccagaaacac

SEQ ID NO: 773325 - RNA, 19 nt, Homo sapiens
  misc_RNA (1)...(19): siRNA sense strand
cagaggaugaugaggauga

SEQ ID NO: 773326 - RNA, 19 nt, Homo sapiens
  misc_RNA (1)...(19): siRNA sense strand
ccacggcaauuuccuagac

SEQ ID NO: 773327 - RNA, 19 nt, Homo sapiens
  misc_RNA (1)...(19): siRNA sense strand
cagaaugaaaugaacagaa

SEQ ID NO: 773328 - RNA, 19 nt, Homo sapiens
  misc_RNA (1)...(19): siRNA sense strand
gcuugacccuucagagauc

SEQ ID NO: 773329 - RNA, 19 nt, Homo sapiens
  misc_RNA (1)...(19): siRNA sense strand
ugagcaccgucucccagua

SEQ ID NO: 773330 - RNA, 19 nt, Homo sapiens
  misc_RNA (1)...(19): siRNA sense strand
ccucccggcugaaggauug

SEQ ID NO: 773331 - RNA, 19 nt, Homo sapiens
  misc_RNA (1)...(19): siRNA sense strand
gauaaguacgagcccugua

SEQ ID NO: 773332 - RNA, 19 nt, Homo sapiens
  misc_RNA (1)...(19): siRNA sense strand
gcuggaugaccuagaauau

SEQ ID NO: 773333 - RNA, 19 nt, Homo sapiens
  misc_RNA (1)...(19): siRNA sense strand
gauggcaagcuuucuaaca

SEQ ID NO: 773334 - RNA, 19 nt, Homo sapiens
  misc_RNA (1)...(19): siRNA sense strand
gauggccacuccuacacau

SEQ ID NO: 773335 - RNA, 19 nt, Homo sapiens
  misc_RNA (1)...(19): siRNA sense strand
ggaugaggucggguacaua

SEQ ID NO: 773336 - RNA, 19 nt, Homo sapiens
  misc_RNA (1)...(19): siRNA sense strand
cuucauaccucgguguaau

SEQ ID NO: 773337 - RNA, 19 nt, Homo sapiens
  misc_RNA (1)...(19): siRNA sense strand
ccugcuggaugaccuagaa

SEQ ID NO: 773338 - RNA, 19 nt, Homo sapiens
  misc_RNA (1)...(19): siRNA sense strand
auggcaagcuuucuaacaa

SEQ ID NO: 773339 - RNA, 19 nt, Homo sapiens
  misc_RNA (1)...(19): siRNA sense strand
gugcugguguguggacaaa

SEQ ID NO: 773340 - RNA, 19 nt, Homo sapiens
  misc_RNA (1)...(19): siRNA sense strand
uggcaagcuuucuaacaau

SEQ ID NO: 773341 - RNA, 19 nt, Homo sapiens
  misc_RNA (1)...(19): siRNA sense strand
ggaacguggcccagaaaca

SEQ ID NO: 773342 - RNA, 19 nt, Homo sapiens
  misc_RNA (1)...(19): siRNA sense strand
ugaggaugaugacaaagag

SEQ ID NO: 773343 - RNA, 19 nt, Homo sapiens
  misc_RNA (1)...(19): siRNA sense strand
gaacgggagcugggaccaa

SEQ ID NO: 773344 - RNA, 19 nt, Homo sapiens
  misc_RNA (1)...(19): siRNA sense strand
cuucgaauuuggucaagug

SEQ ID NO: 773345 - RNA, 19 nt, Homo sapiens
  misc_RNA (1)...(19): siRNA sense strand
augcagcccucacaaagug

SEQ ID NO: 773346 - RNA, 19 nt, Homo sapiens
  misc_RNA (1)...(19): siRNA sense strand
aaugccaucuaccuggaua

SEQ ID NO: 773347 - RNA, 19 nt, Homo sapiens
  misc_RNA (1)...(19): siRNA sense strand
ccaaagcacaaggcagaaa

SEQ ID NO: 773348 - RNA, 19 nt, Homo sapiens
  misc_RNA (1)...(19): siRNA sense strand
gcccaaggcagguuugaca

SEQ ID NO: 773349 - RNA, 19 nt, Homo sapiens
  misc_RNA (1)...(19): siRNA sense strand
ggucucccuugccagaaug

SEQ ID NO: 773350 - RNA, 19 nt, Homo sapiens
  misc_RNA (1)...(19): siRNA sense strand
acacauccaagugcaaauu

SEQ ID NO: 773351 - RNA, 19 nt, Homo sapiens
  misc_RNA (1)...(19): siRNA sense strand
ucccugggcuggauguuca

SEQ ID NO: 773352 - RNA, 19 nt, Homo sapiens
  misc_RNA (1)...(19): siRNA sense strand
caaagcacaaggcagaaag

SEQ ID NO: 773353 - RNA, 19 nt, Homo sapiens
  misc_RNA (1)...(19): siRNA sense strand
aacgggagcugggaccaaa

SEQ ID NO: 773354 - RNA, 19 nt, Homo sapiens
  misc_RNA (1)...(19): siRNA sense strand
caaguacuggaaccgcuuu

SEQ ID NO: 773355 - RNA, 19 nt, Homo sapiens
  misc_RNA (1)...(19): siRNA sense strand
cuacacauccaagugcaaa

SEQ ID NO: 773356 - RNA, 19 nt, Homo sapiens
  misc_RNA (1)...(19): siRNA sense strand
ucaaggauggcaagcuuuc

SEQ ID NO: 773357 - RNA, 19 nt, Homo sapiens
  misc_RNA (1)...(19): siRNA sense strand
guacuggaaccgcuuucga

SEQ ID NO: 773358 - RNA, 19 nt, Homo sapiens
  misc_RNA (1)...(19): siRNA sense strand
aaaugcagcccucacaaag

SEQ ID NO: 773359 - RNA, 19 nt, Homo sapiens
  misc_RNA (1)...(19): siRNA sense strand
gcuuucgagacgaugauua

SEQ ID NO: 773360 - RNA, 19 nt, Homo sapiens
  misc_RNA (1)...(19): siRNA sense strand
caagcuuucuaacaaugag

SEQ ID NO: 773361 - RNA, 19 nt, Homo sapiens
  misc_RNA (1)...(19): siRNA sense strand
aguacgaccgggacaagua

SEQ ID NO: 773362 - RNA, 19 nt, Homo sapiens
  misc_RNA (1)...(19): siRNA sense strand
ucagauggccacuccuaca

SEQ ID NO: 773363 - RNA, 19 nt, Homo sapiens
  misc_RNA (1)...(19): siRNA sense strand
gaggucggguacauauggu

SEQ ID NO: 773364 - RNA, 19 nt, Homo sapiens
  misc_RNA (1)...(19): siRNA sense strand
ggaugaccuagaauaugaa

SEQ ID NO: 773365 - RNA, 19 nt, Homo sapiens
  misc_RNA (1)...(19): siRNA sense strand
gagcaccgucucccaguac

SEQ ID NO: 773366 - RNA, 19 nt, Homo sapiens
  misc_RNA (1)...(19): siRNA sense strand
gagccgugacagaggauga

SEQ ID NO: 773367 - RNA, 19 nt, Homo sapiens
  misc_RNA (1)...(19): siRNA sense strand
gugaagaggagcaggaaac

SEQ ID NO: 773368 - RNA, 19 nt, Homo sapiens
  misc_RNA (1)...(19): siRNA sense strand
guggacaaauaugggaaug

SEQ ID NO: 773369 - RNA, 19 nt, Homo sapiens
  misc_RNA (1)...(19): siRNA sense strand
aaggauggcaagcuuucua

SEQ ID NO: 773370 - RNA, 19 nt, Homo sapiens
  misc_RNA (1)...(19): siRNA sense strand
uucgagacgaugauuauuu

SEQ ID NO: 773371 - RNA, 19 nt, Homo sapiens
  misc_RNA (1)...(19): siRNA sense strand
ggcaauuuccuagacaaug

SEQ ID NO: 773372 - RNA, 19 nt, Homo sapiens
  misc_RNA (1)...(19): siRNA sense strand
ggaaaccucaggggauuuu

SEQ ID NO: 773373 - RNA, 19 nt, Homo sapiens
  misc_RNA (1)...(19): siRNA sense strand
caggaaaccucaggggauu

SEQ ID NO: 773374 - RNA, 19 nt, Homo sapiens
  misc_RNA (1)...(19): siRNA sense strand
gcuauuacaaagccacaca

SEQ ID NO: 773375 - RNA, 19 nt, Homo sapiens
  misc_RNA (1)...(19): siRNA sense strand
auaaguacgagcccuguau

SEQ ID NO: 773376 - RNA, 19 nt, Homo sapiens
  misc_RNA (1)...(19): siRNA sense strand
gggaagagcuguuugauca

SEQ ID NO: 773377 - RNA, 19 nt, Homo sapiens
  misc_RNA (1)...(19): siRNA sense strand
ggaaggagaugaagaaugg

SEQ ID NO: 773378 - RNA, 19 nt, Homo sapiens
  misc_RNA (1)...(19): siRNA sense strand
gcaagugaaucaugagaaa

SEQ ID NO: 773379 - RNA, 19 nt, Homo sapiens
  misc_RNA (1)...(19): siRNA sense strand
gggaggauguguaucaaua

SEQ ID NO: 773380 - RNA, 19 nt, Homo sapiens
  misc_RNA (1)...(19): siRNA sense strand
gaaguuaccugugggauuc

SEQ ID NO: 773381 - RNA, 19 nt, Homo sapiens
  misc_RNA (1)...(19): siRNA sense strand
gcacaacaaugccgugguu

SEQ ID NO: 773382 - RNA, 19 nt, Homo sapiens
  misc_RNA (1)...(19): siRNA sense strand
ugaaggaacugucaccaaa

SEQ ID NO: 773383 - RNA, 19 nt, Homo sapiens
  misc_RNA (1)...(19): siRNA sense strand
uggagacgauggaucauua

SEQ ID NO: 773384 - RNA, 19 nt, Homo sapiens
  misc_RNA (1)...(19): siRNA sense strand
cgacggaucucuuuacaag

SEQ ID NO: 773385 - RNA, 19 nt, Homo sapiens
  misc_RNA (1)...(19): siRNA sense strand
gagcagauguggucaaacu

SEQ ID NO: 773386 - RNA, 19 nt, Homo sapiens
  misc_RNA (1)...(19): siRNA sense strand
gaucaaggacaagaaguua

SEQ ID NO: 773387 - RNA, 19 nt, Homo sapiens
  misc_RNA (1)...(19): siRNA sense strand
gagaagaugaucaguggua

SEQ ID NO: 773388 - RNA, 19 nt, Homo sapiens
  misc_RNA (1)...(19): siRNA sense strand
aaacaaagguaugagaaga

SEQ ID NO: 773389 - RNA, 19 nt, Homo sapiens
  misc_RNA (1)...(19): siRNA sense strand
gcacauugaucugguggaa

SEQ ID NO: 773390 - RNA, 19 nt, Homo sapiens
  misc_RNA (1)...(19): siRNA sense strand
aaaggaagaucaaggacaa

SEQ ID NO: 773391 - RNA, 19 nt, Homo sapiens
  misc_RNA (1)...(19): siRNA sense strand
gaacugaggcacauugauc

SEQ ID NO: 773392 - RNA, 19 nt, Homo sapiens
  misc_RNA (1)...(19): siRNA sense strand
gaagagcuguuugaucaca

SEQ ID NO: 773393 - RNA, 19 nt, Homo sapiens
  misc_RNA (1)...(19): siRNA sense strand
ggaaacaaagguaugagaa

SEQ ID NO: 773394 - RNA, 19 nt, Homo sapiens
  misc_RNA (1)...(19): siRNA sense strand
ggacaaagcgauuuaaagc

SEQ ID NO: 773395 - RNA, 19 nt, Homo sapiens
  misc_RNA (1)...(19): siRNA sense strand
ggaagcagacgcacaacaa

SEQ ID NO: 773396 - RNA, 19 nt, Homo sapiens
  misc_RNA (1)...(19): siRNA sense strand
gaagacauccggacagagu

SEQ ID NO: 773397 - RNA, 19 nt, Homo sapiens
  misc_RNA (1)...(19): siRNA sense strand
caucguagcuguggugaau

SEQ ID NO: 773398 - RNA, 19 nt, Homo sapiens
  misc_RNA (1)...(19): siRNA sense strand
ggacuggaccgucugaaug

SEQ ID NO: 773399 - RNA, 19 nt, Homo sapiens
  misc_RNA (1)...(19): siRNA sense strand
gaucuacgccauuccuauu

SEQ ID NO: 773400 - RNA, 19 nt, Homo sapiens
  misc_RNA (1)...(19): siRNA sense strand
gaugaucagugguauguac

SEQ ID NO: 773401 - RNA, 19 nt, Homo sapiens
  misc_RNA (1)...(19): siRNA sense strand
gacgauggaucauuagaag

SEQ ID NO: 773402 - RNA, 19 nt, Homo sapiens
  misc_RNA (1)...(19): siRNA sense strand
gcacagaggcaagcagcua

SEQ ID NO: 773403 - RNA, 19 nt, Homo sapiens
  misc_RNA (1)...(19): siRNA sense strand
cugcaucucugacuucuug

SEQ ID NO: 773404 - RNA, 19 nt, Homo sapiens
  misc_RNA (1)...(19): siRNA sense strand
gaguggagccguccgauga

SEQ ID NO: 773405 - RNA, 19 nt, Homo sapiens
  misc_RNA (1)...(19): siRNA sense strand
gaaacucucauagauauca

SEQ ID NO: 773406 - RNA, 19 nt, Homo sapiens
  misc_RNA (1)...(19): siRNA sense strand
caccaaugcuugcuacaug

SEQ ID NO: 773407 - RNA, 19 nt, Homo sapiens
  misc_RNA (1)...(19): siRNA sense strand
gaaaauccguagugggaaa

SEQ ID NO: 773408 - RNA, 19 nt, Homo sapiens
  misc_RNA (1)...(19): siRNA sense strand
uggcugcgguuguggauaa

SEQ ID NO: 773409 - RNA, 19 nt, Homo sapiens
  misc_RNA (1)...(19): siRNA sense strand
gggcuucacguucucauuu

SEQ ID NO: 773410 - RNA, 19 nt, Homo sapiens
  misc_RNA (1)...(19): siRNA sense strand
gagguuggacucauuguug

SEQ ID NO: 773411 - RNA, 19 nt, Homo sapiens
  misc_RNA (1)...(19): siRNA sense strand
gagcagcaccggcagauag

SEQ ID NO: 773412 - RNA, 19 nt, Homo sapiens
  misc_RNA (1)...(19): siRNA sense strand
gauaagauccgcgagaaca

SEQ ID NO: 773413 - RNA, 19 nt, Homo sapiens
  misc_RNA (1)...(19): siRNA sense strand
gaaaucguccgcaacaucu

SEQ ID NO: 773414 - RNA, 19 nt, Homo sapiens
  misc_RNA (1)...(19): siRNA sense strand
gaggagacccuggcucauu

SEQ ID NO: 773415 - RNA, 19 nt, Homo sapiens
  misc_RNA (1)...(19): siRNA sense strand
ggucaaacugcuuaacaaa

SEQ ID NO: 773416 - RNA, 19 nt, Homo sapiens
  misc_RNA (1)...(19): siRNA sense strand
ccaaguuucucucucagau

SEQ ID NO: 773417 - RNA, 19 nt, Homo sapiens
  misc_RNA (1)...(19): siRNA sense strand
guauguaccugggugaaau

SEQ ID NO: 773418 - RNA, 19 nt, Homo sapiens
  misc_RNA (1)...(19): siRNA sense strand
gaaacaaagguaugagaag

SEQ ID NO: 773419 - RNA, 19 nt, Homo sapiens
  misc_RNA (1)...(19): siRNA sense strand
gaccgagaauggugacuuc

SEQ ID NO: 773420 - RNA, 19 nt, Homo sapiens
  misc_RNA (1)...(19): siRNA sense strand
gauguggucaaacugcuua

SEQ ID NO: 773421 - RNA, 19 nt, Homo sapiens
  misc_RNA (1)...(19): siRNA sense strand
ccaugcggcucuccgauga

SEQ ID NO: 773422 - RNA, 19 nt, Homo sapiens
  misc_RNA (1)...(19): siRNA sense strand
caacaagaucuacgccauu

SEQ ID NO: 773423 - RNA, 19 nt, Homo sapiens
  misc_RNA (1)...(19): siRNA sense strand
ggagagcugguucgacuga

SEQ ID NO: 773424 - RNA, 19 nt, Homo sapiens
  misc_RNA (1)...(19): siRNA sense strand
uuaaucgacuucaccaaga

SEQ ID NO: 773425 - RNA, 19 nt, Homo sapiens
  misc_RNA (1)...(19): siRNA sense strand
gaaaugcacaacaagaucu

SEQ ID NO: 773426 - RNA, 19 nt, Homo sapiens
  misc_RNA (1)...(19): siRNA sense strand
ggaaaugcacaacaagauc

SEQ ID NO: 773427 - RNA, 19 nt, Homo sapiens
  misc_RNA (1)...(19): siRNA sense strand
aggagacccuggcucauuu

SEQ ID NO: 773428 - RNA, 19 nt, Homo sapiens
  misc_RNA (1)...(19): siRNA sense strand
gaagaucaaggacaagaag

SEQ ID NO: 773429 - RNA, 19 nt, Homo sapiens
  misc_RNA (1)...(19): siRNA sense strand
agaccaaguuucucucuca

SEQ ID NO: 773430 - RNA, 19 nt, Homo sapiens
  misc_RNA (1)...(19): siRNA sense strand
ccacaaugccaaagaaauc

SEQ ID NO: 773431 - RNA, 19 nt, Homo sapiens
  misc_RNA (1)...(19): siRNA sense strand
uaaggaaggccuccacaau

SEQ ID NO: 773432 - RNA, 19 nt, Homo sapiens
  misc_RNA (1)...(19): siRNA sense strand
uagaagacauccggacaga

SEQ ID NO: 773433 - RNA, 19 nt, Homo sapiens
  misc_RNA (1)...(19): siRNA sense strand
cagcagcuaggucugaaua

SEQ ID NO: 773434 - RNA, 19 nt, Homo sapiens
  misc_RNA (1)...(19): siRNA sense strand
gggugcaagugaaucauga

SEQ ID NO: 773435 - RNA, 19 nt, Homo sapiens
  misc_RNA (1)...(19): siRNA sense strand
uaaucgacuucaccaagaa

SEQ ID NO: 773436 - RNA, 19 nt, Homo sapiens
  misc_RNA (1)...(19): siRNA sense strand
acaaagguaugagaagaug

SEQ ID NO: 773437 - RNA, 19 nt, Homo sapiens
  misc_RNA (1)...(19): siRNA sense strand
ccuaaaugcugggaaacaa

SEQ ID NO: 773438 - RNA, 19 nt, Homo sapiens
  misc_RNA (1)...(19): siRNA sense strand
acaagacgcacccacagua

SEQ ID NO: 773439 - RNA, 19 nt, Homo sapiens
  misc_RNA (1)...(19): siRNA sense strand
ucaggaaggagaugaagaa

SEQ ID NO: 773440 - RNA, 19 nt, Homo sapiens
  misc_RNA (1)...(19): siRNA sense strand
ugaagaacguggagauggu

SEQ ID NO: 773441 - RNA, 19 nt, Homo sapiens
  misc_RNA (1)...(19): siRNA sense strand
acaaugccgugguuaagau

SEQ ID NO: 773442 - RNA, 19 nt, Homo sapiens
  misc_RNA (1)...(19): siRNA sense strand
ggaaguuuaacaccaguga

SEQ ID NO: 773443 - RNA, 19 nt, Homo sapiens
  misc_RNA (1)...(19): siRNA sense strand
ggaagaucaaggacaagaa

SEQ ID NO: 773444 - RNA, 19 nt, Homo sapiens
  misc_RNA (1)...(19): siRNA sense strand
gaagcagacgcacaacaau

SEQ ID NO: 773445 - RNA, 19 nt, Homo sapiens
  misc_RNA (1)...(19): siRNA sense strand
caucggcacuggcaccaau

SEQ ID NO: 773446 - RNA, 19 nt, Homo sapiens
  misc_RNA (1)...(19): siRNA sense strand
gauggucaguggcauguac

SEQ ID NO: 773447 - RNA, 19 nt, Homo sapiens
  misc_RNA (1)...(19): siRNA sense strand
gacaguauccucgucaaga

SEQ ID NO: 773448 - RNA, 19 nt, Homo sapiens
  misc_RNA (1)...(19): siRNA sense strand
aaagagaacgguggaaaug

SEQ ID NO: 773449 - RNA, 19 nt, Homo sapiens
  misc_RNA (1)...(19): siRNA sense strand
caacagccacagucaagau

SEQ ID NO: 773450 - RNA, 19 nt, Homo sapiens
  misc_RNA (1)...(19): siRNA sense strand
ucucugacuucuuggacua

SEQ ID NO: 773451 - RNA, 19 nt, Homo sapiens
  misc_RNA (1)...(19): siRNA sense strand
uuaagaugcugcccuccuu

SEQ ID NO: 773452 - RNA, 19 nt, Homo sapiens
  misc_RNA (1)...(19): siRNA sense strand
cagcacguuugcaccauug

SEQ ID NO: 773453 - RNA, 19 nt, Homo sapiens
  misc_RNA (1)...(19): siRNA sense strand
gaugauaucaggacacacu

SEQ ID NO: 773454 - RNA, 19 nt, Homo sapiens
  misc_RNA (1)...(19): siRNA sense strand
ggacgggacacucuacaag

SEQ ID NO: 773455 - RNA, 19 nt, Homo sapiens
  misc_RNA (1)...(19): siRNA sense strand
gaggaacugaggcacauug

SEQ ID NO: 773456 - RNA, 19 nt, Homo sapiens
  misc_RNA (1)...(19): siRNA sense strand
gaagaugaucagugguaug

SEQ ID NO: 773457 - RNA, 19 nt, Homo sapiens
  misc_RNA (1)...(19): siRNA sense strand
gggaaacaaagguaugaga

SEQ ID NO: 773458 - RNA, 19 nt, Homo sapiens
  misc_RNA (1)...(19): siRNA sense strand
caugaugaccugugcuuau

SEQ ID NO: 773459 - RNA, 19 nt, Homo sapiens
  misc_RNA (1)...(19): siRNA sense strand
agagaacgguggaaaugca

SEQ ID NO: 773460 - RNA, 19 nt, Homo sapiens
  misc_RNA (1)...(19): siRNA sense strand
ugaaccgccugcgugauaa

SEQ ID NO: 773461 - RNA, 19 nt, Homo sapiens
  misc_RNA (1)...(19): siRNA sense strand
ugggagauuucauggagaa

SEQ ID NO: 773462 - RNA, 19 nt, Homo sapiens
  misc_RNA (1)...(19): siRNA sense strand
ggugaaaucguccgcaaca

SEQ ID NO: 773463 - RNA, 19 nt, Homo sapiens
  misc_RNA (1)...(19): siRNA sense strand
caacgggugucuggaugau

SEQ ID NO: 773464 - RNA, 19 nt, Homo sapiens
  misc_RNA (1)...(19): siRNA sense strand
ucacauggaguccgagguu

SEQ ID NO: 773465 - RNA, 19 nt, Homo sapiens
  misc_RNA (1)...(19): siRNA sense strand
ucacguggacaaaggguuu

SEQ ID NO: 773466 - RNA, 19 nt, Homo sapiens
  misc_RNA (1)...(19): siRNA sense strand
caacaaugccgugguuaag

SEQ ID NO: 773467 - RNA, 19 nt, Homo sapiens
  misc_RNA (1)...(19): siRNA sense strand
ucguagcuguggugaauga

SEQ ID NO: 773468 - RNA, 19 nt, Homo sapiens
  misc_RNA (1)...(19): siRNA sense strand
cacauugucuccugcaucu

SEQ ID NO: 773469 - RNA, 19 nt, Homo sapiens
  misc_RNA (1)...(19): siRNA sense strand
cagccacagucaagauguu

SEQ ID NO: 773470 - RNA, 19 nt, Homo sapiens
  misc_RNA (1)...(19): siRNA sense strand
caagacgcacccacaguau

SEQ ID NO: 773471 - RNA, 19 nt, Homo sapiens
  misc_RNA (1)...(19): siRNA sense strand
ccagcacguuugcaccauu

SEQ ID NO: 773472 - RNA, 19 nt, Homo sapiens
  misc_RNA (1)...(19): siRNA sense strand
ccuccacaaugccaaagaa

SEQ ID NO: 773473 - RNA, 19 nt, Homo sapiens
  misc_RNA (1)...(19): siRNA sense strand
caugaugaccuguggcuau

SEQ ID NO: 773474 - RNA, 19 nt, Homo sapiens
  misc_RNA (1)...(19): siRNA sense strand
caagcuucauccacacuuc

SEQ ID NO: 773475 - RNA, 19 nt, Homo sapiens
  misc_RNA (1)...(19): siRNA sense strand
gaacugucaccaaaaugua

SEQ ID NO: 773476 - RNA, 19 nt, Homo sapiens
  misc_RNA (1)...(19): siRNA sense strand
gggaagagcuguuugauca

SEQ ID NO: 773477 - RNA, 19 nt, Homo sapiens
  misc_RNA (1)...(19): siRNA sense strand
ggaaggagaugaagaaugg

SEQ ID NO: 773478 - RNA, 19 nt, Homo sapiens
  misc_RNA (1)...(19): siRNA sense strand
gcaagugaaucaugagaaa

SEQ ID NO: 773479 - RNA, 19 nt, Homo sapiens
  misc_RNA (1)...(19): siRNA sense strand
gggaggauguguaucaaua

SEQ ID NO: 773480 - RNA, 19 nt, Homo sapiens
  misc_RNA (1)...(19): siRNA sense strand
gaaguuaccugugggauuc

SEQ ID NO: 773481 - RNA, 19 nt, Homo sapiens
  misc_RNA (1)...(19): siRNA sense strand
gcacaacaaugccgugguu

SEQ ID NO: 773482 - RNA, 19 nt, Homo sapiens
  misc_RNA (1)...(19): siRNA sense strand
ugaaggaacugucaccaaa

SEQ ID NO: 773483 - RNA, 19 nt, Homo sapiens
  misc_RNA (1)...(19): siRNA sense strand
uggagacgauggaucauua

SEQ ID NO: 773484 - RNA, 19 nt, Homo sapiens
  misc_RNA (1)...(19): siRNA sense strand
cgacggaucucuuuacaag

SEQ ID NO: 773485 - RNA, 19 nt, Homo sapiens
  misc_RNA (1)...(19): siRNA sense strand
gagcagauguggucaaacu

SEQ ID NO: 773486 - RNA, 19 nt, Homo sapiens
  misc_RNA (1)...(19): siRNA sense strand
gaucaaggacaagaaguua

SEQ ID NO: 773487 - RNA, 19 nt, Homo sapiens
  misc_RNA (1)...(19): siRNA sense strand
gagaagaugaucaguggua

SEQ ID NO: 773488 - RNA, 19 nt, Homo sapiens
  misc_RNA (1)...(19): siRNA sense strand
aaacaaagguaugagaaga

SEQ ID NO: 773489 - RNA, 19 nt, Homo sapiens
  misc_RNA (1)...(19): siRNA sense strand
gcacauugaucugguggaa

SEQ ID NO: 773490 - RNA, 19 nt, Homo sapiens
  misc_RNA (1)...(19): siRNA sense strand
aaaggaagaucaaggacaa

SEQ ID NO: 773491 - RNA, 19 nt, Homo sapiens
  misc_RNA (1)...(19): siRNA sense strand
gaacugaggcacauugauc

SEQ ID NO: 773492 - RNA, 19 nt, Homo sapiens
  misc_RNA (1)...(19): siRNA sense strand
gaagagcuguuugaucaca

SEQ ID NO: 773493 - RNA, 19 nt, Homo sapiens
  misc_RNA (1)...(19): siRNA sense strand
ggaaacaaagguaugagaa

SEQ ID NO: 773494 - RNA, 19 nt, Homo sapiens
  misc_RNA (1)...(19): siRNA sense strand
ggacaaagcgauuuaaagc

SEQ ID NO: 773495 - RNA, 19 nt, Homo sapiens
  misc_RNA (1)...(19): siRNA sense strand
ggaagcagacgcacaacaa

SEQ ID NO: 773496 - RNA, 19 nt, Homo sapiens
  misc_RNA (1)...(19): siRNA sense strand
gaagacauccggacagagu

SEQ ID NO: 773497 - RNA, 19 nt, Homo sapiens
  misc_RNA (1)...(19): siRNA sense strand
caucguagcuguggugaau

SEQ ID NO: 773498 - RNA, 19 nt, Homo sapiens
  misc_RNA (1)...(19): siRNA sense strand
ggacuggaccgucugaaug

SEQ ID NO: 773499 - RNA, 19 nt, Homo sapiens
  misc_RNA (1)...(19): siRNA sense strand
gaucuacgccauuccuauu

SEQ ID NO: 773500 - RNA, 19 nt, Homo sapiens
  misc_RNA (1)...(19): siRNA sense strand
gaugaucagugguauguac

SEQ ID NO: 773501 - RNA, 19 nt, Homo sapiens
  misc_RNA (1)...(19): siRNA sense strand
gacgauggaucauuagaag

SEQ ID NO: 773502 - RNA, 19 nt, Homo sapiens
  misc_RNA (1)...(19): siRNA sense strand
gcacagaggcaagcagcua

SEQ ID NO: 773503 - RNA, 19 nt, Homo sapiens
  misc_RNA (1)...(19): siRNA sense strand
cugcaucucugacuucuug

SEQ ID NO: 773504 - RNA, 19 nt, Homo sapiens
  misc_RNA (1)...(19): siRNA sense strand
gaguggagccguccgauga

SEQ ID NO: 773505 - RNA, 19 nt, Homo sapiens
  misc_RNA (1)...(19): siRNA sense strand
gaaacucucauagauauca

SEQ ID NO: 773506 - RNA, 19 nt, Homo sapiens
  misc_RNA (1)...(19): siRNA sense strand
caccaaugcuugcuacaug

SEQ ID NO: 773507 - RNA, 19 nt, Homo sapiens
  misc_RNA (1)...(19): siRNA sense strand
gaaaauccguagugggaaa

SEQ ID NO: 773508 - RNA, 19 nt, Homo sapiens
  misc_RNA (1)...(19): siRNA sense strand
uggcugcgguuguggauaa

SEQ ID NO: 773509 - RNA, 19 nt, Homo sapiens
  misc_RNA (1)...(19): siRNA sense strand
gggcuucacguucucauuu

SEQ ID NO: 773510 - RNA, 19 nt, Homo sapiens
  misc_RNA (1)...(19): siRNA sense strand
gagguuggacucauuguug

SEQ ID NO: 773511 - RNA, 19 nt, Homo sapiens
  misc_RNA (1)...(19): siRNA sense strand
gagcagcaccggcagauag

SEQ ID NO: 773512 - RNA, 19 nt, Homo sapiens
  misc_RNA (1)...(19): siRNA sense strand
gauaagauccgcgagaaca

SEQ ID NO: 773513 - RNA, 19 nt, Homo sapiens
  misc_RNA (1)...(19): siRNA sense strand
gaaaucguccgcaacaucu

SEQ ID NO: 773514 - RNA, 19 nt, Homo sapiens
  misc_RNA (1)...(19): siRNA sense strand
gaggagacccuggcucauu

SEQ ID NO: 773515 - RNA, 19 nt, Homo sapiens
  misc_RNA (1)...(19): siRNA sense strand
ggucaaacugcuuaacaaa

SEQ ID NO: 773516 - RNA, 19 nt, Homo sapiens
  misc_RNA (1)...(19): siRNA sense strand
ccaaguuucucucucagau

SEQ ID NO: 773517 - RNA, 19 nt, Homo sapiens
  misc_RNA (1)...(19): siRNA sense strand
guauguaccugggugaaau

SEQ ID NO: 773518 - RNA, 19 nt, Homo sapiens
  misc_RNA (1)...(19): siRNA sense strand
gaaacaaagguaugagaag

SEQ ID NO: 773519 - RNA, 19 nt, Homo sapiens
  misc_RNA (1)...(19): siRNA sense strand
gaccgagaauggugacuuc

SEQ ID NO: 773520 - RNA, 19 nt, Homo sapiens
  misc_RNA (1)...(19): siRNA sense strand
gauguggucaaacugcuua

SEQ ID NO: 773521 - RNA, 19 nt, Homo sapiens
  misc_RNA (1)...(19): siRNA sense strand
ccaugcggcucuccgauga

SEQ ID NO: 773522 - RNA, 19 nt, Homo sapiens
  misc_RNA (1)...(19): siRNA sense strand
caacaagaucuacgccauu

SEQ ID NO: 773523 - RNA, 19 nt, Homo sapiens
  misc_RNA (1)...(19): siRNA sense strand
ggagagcugguucgacuga

SEQ ID NO: 773524 - RNA, 19 nt, Homo sapiens
  misc_RNA (1)...(19): siRNA sense strand
uuaaucgacuucaccaaga

SEQ ID NO: 773525 - RNA, 19 nt, Homo sapiens
  misc_RNA (1)...(19): siRNA sense strand
gaaaugcacaacaagaucu

SEQ ID NO: 773526 - RNA, 19 nt, Homo sapiens
  misc_RNA (1)...(19): siRNA sense strand
ggaaaugcacaacaagauc

SEQ ID NO: 773527 - RNA, 19 nt, Homo sapiens
  misc_RNA (1)...(19): siRNA sense strand
aggagacccuggcucauuu

SEQ ID NO: 773528 - RNA, 19 nt, Homo sapiens
  misc_RNA (1)...(19): siRNA sense strand
gaagaucaaggacaagaag

SEQ ID NO: 773529 - RNA, 19 nt, Homo sapiens
  misc_RNA (1)...(19): siRNA sense strand
agaccaaguuucucucuca

SEQ ID NO: 773530 - RNA, 19 nt, Homo sapiens
  misc_RNA (1)...(19): siRNA sense strand
ccacaaugccaaagaaauc

SEQ ID NO: 773531 - RNA, 19 nt, Homo sapiens
  misc_RNA (1)...(19): siRNA sense strand
uaaggaaggccuccacaau

SEQ ID NO: 773532 - RNA, 19 nt, Homo sapiens
  misc_RNA (1)...(19): siRNA sense strand
uagaagacauccggacaga

SEQ ID NO: 773533 - RNA, 19 nt, Homo sapiens
  misc_RNA (1)...(19): siRNA sense strand
cagcagcuaggucugaaua

SEQ ID NO: 773534 - RNA, 19 nt, Homo sapiens
  misc_RNA (1)...(19): siRNA sense strand
gggugcaagugaaucauga

SEQ ID NO: 773535 - RNA, 19 nt, Homo sapiens
  misc_RNA (1)...(19): siRNA sense strand
uaaucgacuucaccaagaa

SEQ ID NO: 773536 - RNA, 19 nt, Homo sapiens
  misc_RNA (1)...(19): siRNA sense strand
acaaagguaugagaagaug

SEQ ID NO: 773537 - RNA, 19 nt, Homo sapiens
  misc_RNA (1)...(19): siRNA sense strand
ccuaaaugcugggaaacaa

SEQ ID NO: 773538 - RNA, 19 nt, Homo sapiens
  misc_RNA (1)...(19): siRNA sense strand
acaagacgcacccacagua

SEQ ID NO: 773539 - RNA, 19 nt, Homo sapiens
  misc_RNA (1)...(19): siRNA sense strand
ucaggaaggagaugaagaa

SEQ ID NO: 773540 - RNA, 19 nt, Homo sapiens
  misc_RNA (1)...(19): siRNA sense strand
ugaagaacguggagauggu

SEQ ID NO: 773541 - RNA, 19 nt, Homo sapiens
  misc_RNA (1)...(19): siRNA sense strand
acaaugccgugguuaagau

SEQ ID NO: 773542 - RNA, 19 nt, Homo sapiens
  misc_RNA (1)...(19): siRNA sense strand
ggaaguuuaacaccaguga

SEQ ID NO: 773543 - RNA, 19 nt, Homo sapiens
  misc_RNA (1)...(19): siRNA sense strand
ggaagaucaaggacaagaa

SEQ ID NO: 773544 - RNA, 19 nt, Homo sapiens
  misc_RNA (1)...(19): siRNA sense strand
gaagcagacgcacaacaau

SEQ ID NO: 773545 - RNA, 19 nt, Homo sapiens
  misc_RNA (1)...(19): siRNA sense strand
caucggcacuggcaccaau

SEQ ID NO: 773546 - RNA, 19 nt, Homo sapiens
  misc_RNA (1)...(19): siRNA sense strand
gauggucaguggcauguac

SEQ ID NO: 773547 - RNA, 19 nt, Homo sapiens
  misc_RNA (1)...(19): siRNA sense strand
gacaguauccucgucaaga

SEQ ID NO: 773548 - RNA, 19 nt, Homo sapiens
  misc_RNA (1)...(19): siRNA sense strand
aaagagaacgguggaaaug

SEQ ID NO: 773549 - RNA, 19 nt, Homo sapiens
  misc_RNA (1)...(19): siRNA sense strand
caacagccacagucaagau

SEQ ID NO: 773550 - RNA, 19 nt, Homo sapiens
  misc_RNA (1)...(19): siRNA sense strand
ucucugacuucuuggacua

SEQ ID NO: 773551 - RNA, 19 nt, Homo sapiens
  misc_RNA (1)...(19): siRNA sense strand
uuaagaugcugcccuccuu

SEQ ID NO: 773552 - RNA, 19 nt, Homo sapiens
  misc_RNA (1)...(19): siRNA sense strand
cagcacguuugcaccauug

SEQ ID NO: 773553 - RNA, 19 nt, Homo sapiens
  misc_RNA (1)...(19): siRNA sense strand
gaugauaucaggacacacu

SEQ ID NO: 773554 - RNA, 19 nt, Homo sapiens
  misc_RNA (1)...(19): siRNA sense strand
ggacgggacacucuacaag

SEQ ID NO: 773555 - RNA, 19 nt, Homo sapiens
  misc_RNA (1)...(19): siRNA sense strand
gaggaacugaggcacauug

SEQ ID NO: 773556 - RNA, 19 nt, Homo sapiens
  misc_RNA (1)...(19): siRNA sense strand
gaagaugaucagugguaug

SEQ ID NO: 773557 - RNA, 19 nt, Homo sapiens
  misc_RNA (1)...(19): siRNA sense strand
gggaaacaaagguaugaga

SEQ ID NO: 773558 - RNA, 19 nt, Homo sapiens
  misc_RNA (1)...(19): siRNA sense strand
caugaugaccugugcuuau

SEQ ID NO: 773559 - RNA, 19 nt, Homo sapiens
  misc_RNA (1)...(19): siRNA sense strand
agagaacgguggaaaugca

SEQ ID NO: 773560 - RNA, 19 nt, Homo sapiens
  misc_RNA (1)...(19): siRNA sense strand
ugaaccgccugcgugauaa

SEQ ID NO: 773561 - RNA, 19 nt, Homo sapiens
  misc_RNA (1)...(19): siRNA sense strand
ugggagauuucauggagaa

SEQ ID NO: 773562 - RNA, 19 nt, Homo sapiens
  misc_RNA (1)...(19): siRNA sense strand
ggugaaaucguccgcaaca

SEQ ID NO: 773563 - RNA, 19 nt, Homo sapiens
  misc_RNA (1)...(19): siRNA sense strand
caacgggugucuggaugau

SEQ ID NO: 773564 - RNA, 19 nt, Homo sapiens
  misc_RNA (1)...(19): siRNA sense strand
ucacauggaguccgagguu

SEQ ID NO: 773565 - RNA, 19 nt, Homo sapiens
  misc_RNA (1)...(19): siRNA sense strand
ucacguggacaaaggguuu

SEQ ID NO: 773566 - RNA, 19 nt, Homo sapiens
  misc_RNA (1)...(19): siRNA sense strand
caacaaugccgugguuaag

SEQ ID NO: 773567 - RNA, 19 nt, Homo sapiens
  misc_RNA (1)...(19): siRNA sense strand
ucguagcuguggugaauga

SEQ ID NO: 773568 - RNA, 19 nt, Homo sapiens
  misc_RNA (1)...(19): siRNA sense strand
cacauugucuccugcaucu

SEQ ID NO: 773569 - RNA, 19 nt, Homo sapiens
  misc_RNA (1)...(19): siRNA sense strand
cagccacagucaagauguu

SEQ ID NO: 773570 - RNA, 19 nt, Homo sapiens
  misc_RNA (1)...(19): siRNA sense strand
caagacgcacccacaguau

SEQ ID NO: 773571 - RNA, 19 nt, Homo sapiens
  misc_RNA (1)...(19): siRNA sense strand
ccagcacguuugcaccauu

SEQ ID NO: 773572 - RNA, 19 nt, Homo sapiens
  misc_RNA (1)...(19): siRNA sense strand
ccuccacaaugccaaagaa

SEQ ID NO: 773573 - RNA, 19 nt, Homo sapiens
  misc_RNA (1)...(19): siRNA sense strand
caugaugaccuguggcuau

SEQ ID NO: 773574 - RNA, 19 nt, Homo sapiens
  misc_RNA (1)...(19): siRNA sense strand
caagcuucauccacacuuc

SEQ ID NO: 773575 - RNA, 19 nt, Homo sapiens
  misc_RNA (1)...(19): siRNA sense strand
gaacugucaccaaaaugua

SEQ ID NO: 773576 - RNA, 19 nt, Homo sapiens
  misc_RNA (1)...(19): siRNA sense strand
gggaagagcuguuugauca

SEQ ID NO: 773577 - RNA, 19 nt, Homo sapiens
  misc_RNA (1)...(19): siRNA sense strand
ggaaggagaugaagaaugg

SEQ ID NO: 773578 - RNA, 19 nt, Homo sapiens
  misc_RNA (1)...(19): siRNA sense strand
gcaagugaaucaugagaaa

SEQ ID NO: 773579 - RNA, 19 nt, Homo sapiens
  misc_RNA (1)...(19): siRNA sense strand
gggaggauguguaucaaua

SEQ ID NO: 773580 - RNA, 19 nt, Homo sapiens
  misc_RNA (1)...(19): siRNA sense strand
gaaguuaccugugggauuc

SEQ ID NO: 773581 - RNA, 19 nt, Homo sapiens
  misc_RNA (1)...(19): siRNA sense strand
gcacaacaaugccgugguu

SEQ ID NO: 773582 - RNA, 19 nt, Homo sapiens
  misc_RNA (1)...(19): siRNA sense strand
ugaaggaacugucaccaaa

SEQ ID NO: 773583 - RNA, 19 nt, Homo sapiens
  misc_RNA (1)...(19): siRNA sense strand
uggagacgauggaucauua

SEQ ID NO: 773584 - RNA, 19 nt, Homo sapiens
  misc_RNA (1)...(19): siRNA sense strand
cgacggaucucuuuacaag

SEQ ID NO: 773585 - RNA, 19 nt, Homo sapiens
  misc_RNA (1)...(19): siRNA sense strand
gagcagauguggucaaacu

SEQ ID NO: 773586 - RNA, 19 nt, Homo sapiens
  misc_RNA (1)...(19): siRNA sense strand
gaucaaggacaagaaguua

SEQ ID NO: 773587 - RNA, 19 nt, Homo sapiens
  misc_RNA (1)...(19): siRNA sense strand
gagaagaugaucaguggua

SEQ ID NO: 773588 - RNA, 19 nt, Homo sapiens
  misc_RNA (1)...(19): siRNA sense strand
aaacaaagguaugagaaga

SEQ ID NO: 773589 - RNA, 19 nt, Homo sapiens
  misc_RNA (1)...(19): siRNA sense strand
gcacauugaucugguggaa

SEQ ID NO: 773590 - RNA, 19 nt, Homo sapiens
  misc_RNA (1)...(19): siRNA sense strand
aaaggaagaucaaggacaa

SEQ ID NO: 773591 - RNA, 19 nt, Homo sapiens
  misc_RNA (1)...(19): siRNA sense strand
gaacugaggcacauugauc

SEQ ID NO: 773592 - RNA, 19 nt, Homo sapiens
  misc_RNA (1)...(19): siRNA sense strand
gaagagcuguuugaucaca

SEQ ID NO: 773593 - RNA, 19 nt, Homo sapiens
  misc_RNA (1)...(19): siRNA sense strand
ggaaacaaagguaugagaa

SEQ ID NO: 773594 - RNA, 19 nt, Homo sapiens
  misc_RNA (1)...(19): siRNA sense strand
ggacaaagcgauuuaaagc

SEQ ID NO: 773595 - RNA, 19 nt, Homo sapiens
  misc_RNA (1)...(19): siRNA sense strand
ggaagcagacgcacaacaa

SEQ ID NO: 773596 - RNA, 19 nt, Homo sapiens
  misc_RNA (1)...(19): siRNA sense strand
gaagacauccggacagagu

SEQ ID NO: 773597 - RNA, 19 nt, Homo sapiens
  misc_RNA (1)...(19): siRNA sense strand
caucguagcuguggugaau

SEQ ID NO: 773598 - RNA, 19 nt, Homo sapiens
  misc_RNA (1)...(19): siRNA sense strand
ggacuggaccgucugaaug

SEQ ID NO: 773599 - RNA, 19 nt, Homo sapiens
  misc_RNA (1)...(19): siRNA sense strand
gaucuacgccauuccuauu

SEQ ID NO: 773600 - RNA, 19 nt, Homo sapiens
  misc_RNA (1)...(19): siRNA sense strand
gaugaucagugguauguac

SEQ ID NO: 773601 - RNA, 19 nt, Homo sapiens
  misc_RNA (1)...(19): siRNA sense strand
gacgauggaucauuagaag

SEQ ID NO: 773602 - RNA, 19 nt, Homo sapiens
  misc_RNA (1)...(19): siRNA sense strand
gcacagaggcaagcagcua

SEQ ID NO: 773603 - RNA, 19 nt, Homo sapiens
  misc_RNA (1)...(19): siRNA sense strand
cugcaucucugacuucuug

SEQ ID NO: 773604 - RNA, 19 nt, Homo sapiens
  misc_RNA (1)...(19): siRNA sense strand
gaguggagccguccgauga

SEQ ID NO: 773605 - RNA, 19 nt, Homo sapiens
  misc_RNA (1)...(19): siRNA sense strand
gaaacucucauagauauca

SEQ ID NO: 773606 - RNA, 19 nt, Homo sapiens
  misc_RNA (1)...(19): siRNA sense strand
caccaaugcuugcuacaug

SEQ ID NO: 773607 - RNA, 19 nt, Homo sapiens
  misc_RNA (1)...(19): siRNA sense strand
gaaaauccguagugggaaa

SEQ ID NO: 773608 - RNA, 19 nt, Homo sapiens
  misc_RNA (1)...(19): siRNA sense strand
uggcugcgguuguggauaa

SEQ ID NO: 773609 - RNA, 19 nt, Homo sapiens
  misc_RNA (1)...(19): siRNA sense strand
gggcuucacguucucauuu

SEQ ID NO: 773610 - RNA, 19 nt, Homo sapiens
  misc_RNA (1)...(19): siRNA sense strand
gagguuggacucauuguug

SEQ ID NO: 773611 - RNA, 19 nt, Homo sapiens
  misc_RNA (1)...(19): siRNA sense strand
gagcagcaccggcagauag

SEQ ID NO: 773612 - RNA, 19 nt, Homo sapiens
  misc_RNA (1)...(19): siRNA sense strand
gauaagauccgcgagaaca

SEQ ID NO: 773613 - RNA, 19 nt, Homo sapiens
  misc_RNA (1)...(19): siRNA sense strand
gaaaucguccgcaacaucu

SEQ ID NO: 773614 - RNA, 19 nt, Homo sapiens
  misc_RNA (1)...(19): siRNA sense strand
gaggagacccuggcucauu

SEQ ID NO: 773615 - RNA, 19 nt, Homo sapiens
  misc_RNA (1)...(19): siRNA sense strand
ggucaaacugcuuaacaaa

SEQ ID NO: 773616 - RNA, 19 nt, Homo sapiens
  misc_RNA (1)...(19): siRNA sense strand
ccaaguuucucucucagau

SEQ ID NO: 773617 - RNA, 19 nt, Homo sapiens
  misc_RNA (1)...(19): siRNA sense strand
guauguaccugggugaaau

SEQ ID NO: 773618 - RNA, 19 nt, Homo sapiens
  misc_RNA (1)...(19): siRNA sense strand
gaaacaaagguaugagaag

SEQ ID NO: 773619 - RNA, 19 nt, Homo sapiens
  misc_RNA (1)...(19): siRNA sense strand
gaccgagaauggugacuuc

SEQ ID NO: 773620 - RNA, 19 nt, Homo sapiens
  misc_RNA (1)...(19): siRNA sense strand
gauguggucaaacugcuua

SEQ ID NO: 773621 - RNA, 19 nt, Homo sapiens
  misc_RNA (1)...(19): siRNA sense strand
ccaugcggcucuccgauga

SEQ ID NO: 773622 - RNA, 19 nt, Homo sapiens
  misc_RNA (1)...(19): siRNA sense strand
caacaagaucuacgccauu

SEQ ID NO: 773623 - RNA, 19 nt, Homo sapiens
  misc_RNA (1)...(19): siRNA sense strand
ggagagcugguucgacuga

SEQ ID NO: 773624 - RNA, 19 nt, Homo sapiens
  misc_RNA (1)...(19): siRNA sense strand
uuaaucgacuucaccaaga

SEQ ID NO: 773625 - RNA, 19 nt, Homo sapiens
  misc_RNA (1)...(19): siRNA sense strand
gaaaugcacaacaagaucu

SEQ ID NO: 773626 - RNA, 19 nt, Homo sapiens
  misc_RNA (1)...(19): siRNA sense strand
ggaaaugcacaacaagauc

SEQ ID NO: 773627 - RNA, 19 nt, Homo sapiens
  misc_RNA (1)...(19): siRNA sense strand
aggagacccuggcucauuu

SEQ ID NO: 773628 - RNA, 19 nt, Homo sapiens
  misc_RNA (1)...(19): siRNA sense strand
gaagaucaaggacaagaag

SEQ ID NO: 773629 - RNA, 19 nt, Homo sapiens
  misc_RNA (1)...(19): siRNA sense strand
agaccaaguuucucucuca

SEQ ID NO: 773630 - RNA, 19 nt, Homo sapiens
  misc_RNA (1)...(19): siRNA sense strand
ccacaaugccaaagaaauc

SEQ ID NO: 773631 - RNA, 19 nt, Homo sapiens
  misc_RNA (1)...(19): siRNA sense strand
uaaggaaggccuccacaau

SEQ ID NO: 773632 - RNA, 19 nt, Homo sapiens
  misc_RNA (1)...(19): siRNA sense strand
uagaagacauccggacaga

SEQ ID NO: 773633 - RNA, 19 nt, Homo sapiens
  misc_RNA (1)...(19): siRNA sense strand
cagcagcuaggucugaaua

SEQ ID NO: 773634 - RNA, 19 nt, Homo sapiens
  misc_RNA (1)...(19): siRNA sense strand
gggugcaagugaaucauga

SEQ ID NO: 773635 - RNA, 19 nt, Homo sapiens
  misc_RNA (1)...(19): siRNA sense strand
uaaucgacuucaccaagaa

SEQ ID NO: 773636 - RNA, 19 nt, Homo sapiens
  misc_RNA (1)...(19): siRNA sense strand
acaaagguaugagaagaug

SEQ ID NO: 773637 - RNA, 19 nt, Homo sapiens
  misc_RNA (1)...(19): siRNA sense strand
ccuaaaugcugggaaacaa

SEQ ID NO: 773638 - RNA, 19 nt, Homo sapiens
  misc_RNA (1)...(19): siRNA sense strand
acaagacgcacccacagua

SEQ ID NO: 773639 - RNA, 19 nt, Homo sapiens
  misc_RNA (1)...(19): siRNA sense strand
ucaggaaggagaugaagaa

SEQ ID NO: 773640 - RNA, 19 nt, Homo sapiens
  misc_RNA (1)...(19): siRNA sense strand
ugaagaacguggagauggu

SEQ ID NO: 773641 - RNA, 19 nt, Homo sapiens
  misc_RNA (1)...(19): siRNA sense strand
acaaugccgugguuaagau

SEQ ID NO: 773642 - RNA, 19 nt, Homo sapiens
  misc_RNA (1)...(19): siRNA sense strand
ggaaguuuaacaccaguga

SEQ ID NO: 773643 - RNA, 19 nt, Homo sapiens
  misc_RNA (1)...(19): siRNA sense strand
ggaagaucaaggacaagaa

SEQ ID NO: 773644 - RNA, 19 nt, Homo sapiens
  misc_RNA (1)...(19): siRNA sense strand
gaagcagacgcacaacaau

SEQ ID NO: 773645 - RNA, 19 nt, Homo sapiens
  misc_RNA (1)...(19): siRNA sense strand
caucggcacuggcaccaau

SEQ ID NO: 773646 - RNA, 19 nt, Homo sapiens
  misc_RNA (1)...(19): siRNA sense strand
gauggucaguggcauguac

SEQ ID NO: 773647 - RNA, 19 nt, Homo sapiens
  misc_RNA (1)...(19): siRNA sense strand
gacaguauccucgucaaga

SEQ ID NO: 773648 - RNA, 19 nt, Homo sapiens
  misc_RNA (1)...(19): siRNA sense strand
aaagagaacgguggaaaug

SEQ ID NO: 773649 - RNA, 19 nt, Homo sapiens
  misc_RNA (1)...(19): siRNA sense strand
caacagccacagucaagau

SEQ ID NO: 773650 - RNA, 19 nt, Homo sapiens
  misc_RNA (1)...(19): siRNA sense strand
ucucugacuucuuggacua

SEQ ID NO: 773651 - RNA, 19 nt, Homo sapiens
  misc_RNA (1)...(19): siRNA sense strand
uuaagaugcugcccuccuu

SEQ ID NO: 773652 - RNA, 19 nt, Homo sapiens
  misc_RNA (1)...(19): siRNA sense strand
cagcacguuugcaccauug

SEQ ID NO: 773653 - RNA, 19 nt, Homo sapiens
  misc_RNA (1)...(19): siRNA sense strand
gaugauaucaggacacacu

SEQ ID NO: 773654 - RNA, 19 nt, Homo sapiens
  misc_RNA (1)...(19): siRNA sense strand
ggacgggacacucuacaag

SEQ ID NO: 773655 - RNA, 19 nt, Homo sapiens
  misc_RNA (1)...(19): siRNA sense strand
gaggaacugaggcacauug

SEQ ID NO: 773656 - RNA, 19 nt, Homo sapiens
  misc_RNA (1)...(19): siRNA sense strand
gaagaugaucagugguaug

SEQ ID NO: 773657 - RNA, 19 nt, Homo sapiens
  misc_RNA (1)...(19): siRNA sense strand
gggaaacaaagguaugaga

SEQ ID NO: 773658 - RNA, 19 nt, Homo sapiens
  misc_RNA (1)...(19): siRNA sense strand
caugaugaccugugcuuau

SEQ ID NO: 773659 - RNA, 19 nt, Homo sapiens
  misc_RNA (1)...(19): siRNA sense strand
agagaacgguggaaaugca

SEQ ID NO: 773660 - RNA, 19 nt, Homo sapiens
  misc_RNA (1)...(19): siRNA sense strand
ugaaccgccugcgugauaa

SEQ ID NO: 773661 - RNA, 19 nt, Homo sapiens
  misc_RNA (1)...(19): siRNA sense strand
ugggagauuucauggagaa

SEQ ID NO: 773662 - RNA, 19 nt, Homo sapiens
  misc_RNA (1)...(19): siRNA sense strand
ggugaaaucguccgcaaca

SEQ ID NO: 773663 - RNA, 19 nt, Homo sapiens
  misc_RNA (1)...(19): siRNA sense strand
caacgggugucuggaugau

SEQ ID NO: 773664 - RNA, 19 nt, Homo sapiens
  misc_RNA (1)...(19): siRNA sense strand
ucacauggaguccgagguu

SEQ ID NO: 773665 - RNA, 19 nt, Homo sapiens
  misc_RNA (1)...(19): siRNA sense strand
ucacguggacaaaggguuu

SEQ ID NO: 773666 - RNA, 19 nt, Homo sapiens
  misc_RNA (1)...(19): siRNA sense strand
caacaaugccgugguuaag

SEQ ID NO: 773667 - RNA, 19 nt, Homo sapiens
  misc_RNA (1)...(19): siRNA sense strand
ucguagcuguggugaauga

SEQ ID NO: 773668 - RNA, 19 nt, Homo sapiens
  misc_RNA (1)...(19): siRNA sense strand
cacauugucuccugcaucu

SEQ ID NO: 773669 - RNA, 19 nt, Homo sapiens
  misc_RNA (1)...(19): siRNA sense strand
cagccacagucaagauguu

SEQ ID NO: 773670 - RNA, 19 nt, Homo sapiens
  misc_RNA (1)...(19): siRNA sense strand
caagacgcacccacaguau

SEQ ID NO: 773671 - RNA, 19 nt, Homo sapiens
  misc_RNA (1)...(19): siRNA sense strand
ccagcacguuugcaccauu

SEQ ID NO: 773672 - RNA, 19 nt, Homo sapiens
  misc_RNA (1)...(19): siRNA sense strand
ccuccacaaugccaaagaa

SEQ ID NO: 773673 - RNA, 19 nt, Homo sapiens
  misc_RNA (1)...(19): siRNA sense strand
caugaugaccuguggcuau

SEQ ID NO: 773674 - RNA, 19 nt, Homo sapiens
  misc_RNA (1)...(19): siRNA sense strand
caagcuucauccacacuuc

SEQ ID NO: 773675 - RNA, 19 nt, Homo sapiens
  misc_RNA (1)...(19): siRNA sense strand
gaacugucaccaaaaugua

SEQ ID NO: 773676 - RNA, 19 nt, Homo sapiens
  misc_RNA (1)...(19): siRNA sense strand
gggaagagcuguuugauca

SEQ ID NO: 773677 - RNA, 19 nt, Homo sapiens
  misc_RNA (1)...(19): siRNA sense strand
ggaaggagaugaagaaugg

SEQ ID NO: 773678 - RNA, 19 nt, Homo sapiens
  misc_RNA (1)...(19): siRNA sense strand
gcaagugaaucaugagaaa

SEQ ID NO: 773679 - RNA, 19 nt, Homo sapiens
  misc_RNA (1)...(19): siRNA sense strand
gggaggauguguaucaaua

SEQ ID NO: 773680 - RNA, 19 nt, Homo sapiens
  misc_RNA (1)...(19): siRNA sense strand
gaaguuaccugugggauuc

SEQ ID NO: 773681 - RNA, 19 nt, Homo sapiens
  misc_RNA (1)...(19): siRNA sense strand
gcacaacaaugccgugguu

SEQ ID NO: 773682 - RNA, 19 nt, Homo sapiens
  misc_RNA (1)...(19): siRNA sense strand
ugaaggaacugucaccaaa

SEQ ID NO: 773683 - RNA, 19 nt, Homo sapiens
  misc_RNA (1)...(19): siRNA sense strand
uggagacgauggaucauua

SEQ ID NO: 773684 - RNA, 19 nt, Homo sapiens
  misc_RNA (1)...(19): siRNA sense strand
cgacggaucucuuuacaag

SEQ ID NO: 773685 - RNA, 19 nt, Homo sapiens
  misc_RNA (1)...(19): siRNA sense strand
gagcagauguggucaaacu

SEQ ID NO: 773686 - RNA, 19 nt, Homo sapiens
  misc_RNA (1)...(19): siRNA sense strand
gaucaaggacaagaaguua

SEQ ID NO: 773687 - RNA, 19 nt, Homo sapiens
  misc_RNA (1)...(19): siRNA sense strand
gagaagaugaucaguggua

SEQ ID NO: 773688 - RNA, 19 nt, Homo sapiens
  misc_RNA (1)...(19): siRNA sense strand
aaacaaagguaugagaaga

SEQ ID NO: 773689 - RNA, 19 nt, Homo sapiens
  misc_RNA (1)...(19): siRNA sense strand
gcacauugaucugguggaa

SEQ ID NO: 773690 - RNA, 19 nt, Homo sapiens
  misc_RNA (1)...(19): siRNA sense strand
aaaggaagaucaaggacaa

SEQ ID NO: 773691 - RNA, 19 nt, Homo sapiens
  misc_RNA (1)...(19): siRNA sense strand
gaacugaggcacauugauc

SEQ ID NO: 773692 - RNA, 19 nt, Homo sapiens
  misc_RNA (1)...(19): siRNA sense strand
gaagagcuguuugaucaca

SEQ ID NO: 773693 - RNA, 19 nt, Homo sapiens
  misc_RNA (1)...(19): siRNA sense strand
ggaaacaaagguaugagaa

SEQ ID NO: 773694 - RNA, 19 nt, Homo sapiens
  misc_RNA (1)...(19): siRNA sense strand
ggacaaagcgauuuaaagc

SEQ ID NO: 773695 - RNA, 19 nt, Homo sapiens
  misc_RNA (1)...(19): siRNA sense strand
ggaagcagacgcacaacaa

SEQ ID NO: 773696 - RNA, 19 nt, Homo sapiens
  misc_RNA (1)...(19): siRNA sense strand
gaagacauccggacagagu

SEQ ID NO: 773697 - RNA, 19 nt, Homo sapiens
  misc_RNA (1)...(19): siRNA sense strand
caucguagcuguggugaau

SEQ ID NO: 773698 - RNA, 19 nt, Homo sapiens
  misc_RNA (1)...(19): siRNA sense strand
ggacuggaccgucugaaug

SEQ ID NO: 773699 - RNA, 19 nt, Homo sapiens
  misc_RNA (1)...(19): siRNA sense strand
gaucuacgccauuccuauu

SEQ ID NO: 773700 - RNA, 19 nt, Homo sapiens
  misc_RNA (1)...(19): siRNA sense strand
gaugaucagugguauguac

SEQ ID NO: 773701 - RNA, 19 nt, Homo sapiens
  misc_RNA (1)...(19): siRNA sense strand
gacgauggaucauuagaag

SEQ ID NO: 773702 - RNA, 19 nt, Homo sapiens
  misc_RNA (1)...(19): siRNA sense strand
gcacagaggcaagcagcua

SEQ ID NO: 773703 - RNA, 19 nt, Homo sapiens
  misc_RNA (1)...(19): siRNA sense strand
cugcaucucugacuucuug

SEQ ID NO: 773704 - RNA, 19 nt, Homo sapiens
  misc_RNA (1)...(19): siRNA sense strand
gaguggagccguccgauga

SEQ ID NO: 773705 - RNA, 19 nt, Homo sapiens
  misc_RNA (1)...(19): siRNA sense strand
gaaacucucauagauauca

SEQ ID NO: 773706 - RNA, 19 nt, Homo sapiens
  misc_RNA (1)...(19): siRNA sense strand
caccaaugcuugcuacaug

SEQ ID NO: 773707 - RNA, 19 nt, Homo sapiens
  misc_RNA (1)...(19): siRNA sense strand
gaaaauccguagugggaaa

SEQ ID NO: 773708 - RNA, 19 nt, Homo sapiens
  misc_RNA (1)...(19): siRNA sense strand
uggcugcgguuguggauaa

SEQ ID NO: 773709 - RNA, 19 nt, Homo sapiens
  misc_RNA (1)...(19): siRNA sense strand
gggcuucacguucucauuu

SEQ ID NO: 773710 - RNA, 19 nt, Homo sapiens
  misc_RNA (1)...(19): siRNA sense strand
gagguuggacucauuguug

SEQ ID NO: 773711 - RNA, 19 nt, Homo sapiens
  misc_RNA (1)...(19): siRNA sense strand
gagcagcaccggcagauag

SEQ ID NO: 773712 - RNA, 19 nt, Homo sapiens
  misc_RNA (1)...(19): siRNA sense strand
gauaagauccgcgagaaca

SEQ ID NO: 773713 - RNA, 19 nt, Homo sapiens
  misc_RNA (1)...(19): siRNA sense strand
gaaaucguccgcaacaucu

SEQ ID NO: 773714 - RNA, 19 nt, Homo sapiens
  misc_RNA (1)...(19): siRNA sense strand
gaggagacccuggcucauu

SEQ ID NO: 773715 - RNA, 19 nt, Homo sapiens
  misc_RNA (1)...(19): siRNA sense strand
ggucaaacugcuuaacaaa

SEQ ID NO: 773716 - RNA, 19 nt, Homo sapiens
  misc_RNA (1)...(19): siRNA sense strand
ccaaguuucucucucagau

SEQ ID NO: 773717 - RNA, 19 nt, Homo sapiens
  misc_RNA (1)...(19): siRNA sense strand
guauguaccugggugaaau

SEQ ID NO: 773718 - RNA, 19 nt, Homo sapiens
  misc_RNA (1)...(19): siRNA sense strand
gaaacaaagguaugagaag

SEQ ID NO: 773719 - RNA, 19 nt, Homo sapiens
  misc_RNA (1)...(19): siRNA sense strand
gaccgagaauggugacuuc

SEQ ID NO: 773720 - RNA, 19 nt, Homo sapiens
  misc_RNA (1)...(19): siRNA sense strand
gauguggucaaacugcuua

SEQ ID NO: 773721 - RNA, 19 nt, Homo sapiens
  misc_RNA (1)...(19): siRNA sense strand
ccaugcggcucuccgauga

SEQ ID NO: 773722 - RNA, 19 nt, Homo sapiens
  misc_RNA (1)...(19): siRNA sense strand
caacaagaucuacgccauu

SEQ ID NO: 773723 - RNA, 19 nt, Homo sapiens
  misc_RNA (1)...(19): siRNA sense strand
ggagagcugguucgacuga

SEQ ID NO: 773724 - RNA, 19 nt, Homo sapiens
  misc_RNA (1)...(19): siRNA sense strand
uuaaucgacuucaccaaga

SEQ ID NO: 773725 - RNA, 19 nt, Homo sapiens
  misc_RNA (1)...(19): siRNA sense strand
gaaaugcacaacaagaucu

SEQ ID NO: 773726 - RNA, 19 nt, Homo sapiens
  misc_RNA (1)...(19): siRNA sense strand
ggaaaugcacaacaagauc

SEQ ID NO: 773727 - RNA, 19 nt, Homo sapiens
  misc_RNA (1)...(19): siRNA sense strand
aggagacccuggcucauuu

SEQ ID NO: 773728 - RNA, 19 nt, Homo sapiens
  misc_RNA (1)...(19): siRNA sense strand
gaagaucaaggacaagaag

SEQ ID NO: 773729 - RNA, 19 nt, Homo sapiens
  misc_RNA (1)...(19): siRNA sense strand
agaccaaguuucucucuca

SEQ ID NO: 773730 - RNA, 19 nt, Homo sapiens
  misc_RNA (1)...(19): siRNA sense strand
ccacaaugccaaagaaauc

SEQ ID NO: 773731 - RNA, 19 nt, Homo sapiens
  misc_RNA (1)...(19): siRNA sense strand
uaaggaaggccuccacaau

SEQ ID NO: 773732 - RNA, 19 nt, Homo sapiens
  misc_RNA (1)...(19): siRNA sense strand
uagaagacauccggacaga

SEQ ID NO: 773733 - RNA, 19 nt, Homo sapiens
  misc_RNA (1)...(19): siRNA sense strand
cagcagcuaggucugaaua

SEQ ID NO: 773734 - RNA, 19 nt, Homo sapiens
  misc_RNA (1)...(19): siRNA sense strand
gggugcaagugaaucauga

SEQ ID NO: 773735 - RNA, 19 nt, Homo sapiens
  misc_RNA (1)...(19): siRNA sense strand
uaaucgacuucaccaagaa

SEQ ID NO: 773736 - RNA, 19 nt, Homo sapiens
  misc_RNA (1)...(19): siRNA sense strand
acaaagguaugagaagaug

SEQ ID NO: 773737 - RNA, 19 nt, Homo sapiens
  misc_RNA (1)...(19): siRNA sense strand
ccuaaaugcugggaaacaa

SEQ ID NO: 773738 - RNA, 19 nt, Homo sapiens
  misc_RNA (1)...(19): siRNA sense strand
acaagacgcacccacagua

SEQ ID NO: 773739 - RNA, 19 nt, Homo sapiens
  misc_RNA (1)...(19): siRNA sense strand
ucaggaaggagaugaagaa

SEQ ID NO: 773740 - RNA, 19 nt, Homo sapiens
  misc_RNA (1)...(19): siRNA sense strand
ugaagaacguggagauggu

SEQ ID NO: 773741 - RNA, 19 nt, Homo sapiens
  misc_RNA (1)...(19): siRNA sense strand
acaaugccgugguuaagau

SEQ ID NO: 773742 - RNA, 19 nt, Homo sapiens
  misc_RNA (1)...(19): siRNA sense strand
ggaaguuuaacaccaguga

SEQ ID NO: 773743 - RNA, 19 nt, Homo sapiens
  misc_RNA (1)...(19): siRNA sense strand
ggaagaucaaggacaagaa

SEQ ID NO: 773744 - RNA, 19 nt, Homo sapiens
  misc_RNA (1)...(19): siRNA sense strand
gaagcagacgcacaacaau

SEQ ID NO: 773745 - RNA, 19 nt, Homo sapiens
  misc_RNA (1)...(19): siRNA sense strand
caucggcacuggcaccaau

SEQ ID NO: 773746 - RNA, 19 nt, Homo sapiens
  misc_RNA (1)...(19): siRNA sense strand
gauggucaguggcauguac

SEQ ID NO: 773747 - RNA, 19 nt, Homo sapiens
  misc_RNA (1)...(19): siRNA sense strand
gacaguauccucgucaaga

SEQ ID NO: 773748 - RNA, 19 nt, Homo sapiens
  misc_RNA (1)...(19): siRNA sense strand
aaagagaacgguggaaaug

SEQ ID NO: 773749 - RNA, 19 nt, Homo sapiens
  misc_RNA (1)...(19): siRNA sense strand
caacagccacagucaagau

SEQ ID NO: 773750 - RNA, 19 nt, Homo sapiens
  misc_RNA (1)...(19): siRNA sense strand
ucucugacuucuuggacua

SEQ ID NO: 773751 - RNA, 19 nt, Homo sapiens
  misc_RNA (1)...(19): siRNA sense strand
uuaagaugcugcccuccuu

SEQ ID NO: 773752 - RNA, 19 nt, Homo sapiens
  misc_RNA (1)...(19): siRNA sense strand
cagcacguuugcaccauug

SEQ ID NO: 773753 - RNA, 19 nt, Homo sapiens
  misc_RNA (1)...(19): siRNA sense strand
gaugauaucaggacacacu

SEQ ID NO: 773754 - RNA, 19 nt, Homo sapiens
  misc_RNA (1)...(19): siRNA sense strand
ggacgggacacucuacaag

SEQ ID NO: 773755 - RNA, 19 nt, Homo sapiens
  misc_RNA (1)...(19): siRNA sense strand
gaggaacugaggcacauug

SEQ ID NO: 773756 - RNA, 19 nt, Homo sapiens
  misc_RNA (1)...(19): siRNA sense strand
gaagaugaucagugguaug

SEQ ID NO: 773757 - RNA, 19 nt, Homo sapiens
  misc_RNA (1)...(19): siRNA sense strand
gggaaacaaagguaugaga

SEQ ID NO: 773758 - RNA, 19 nt, Homo sapiens
  misc_RNA (1)...(19): siRNA sense strand
caugaugaccugugcuuau

SEQ ID NO: 773759 - RNA, 19 nt, Homo sapiens
  misc_RNA (1)...(19): siRNA sense strand
agagaacgguggaaaugca

SEQ ID NO: 773760 - RNA, 19 nt, Homo sapiens
  misc_RNA (1)...(19): siRNA sense strand
ugaaccgccugcgugauaa

SEQ ID NO: 773761 - RNA, 19 nt, Homo sapiens
  misc_RNA (1)...(19): siRNA sense strand
ugggagauuucauggagaa

SEQ ID NO: 773762 - RNA, 19 nt, Homo sapiens
  misc_RNA (1)...(19): siRNA sense strand
ggugaaaucguccgcaaca

SEQ ID NO: 773763 - RNA, 19 nt, Homo sapiens
  misc_RNA (1)...(19): siRNA sense strand
caacgggugucuggaugau

SEQ ID NO: 773764 - RNA, 19 nt, Homo sapiens
  misc_RNA (1)...(19): siRNA sense strand
ucacauggaguccgagguu

SEQ ID NO: 773765 - RNA, 19 nt, Homo sapiens
  misc_RNA (1)...(19): siRNA sense strand
ucacguggacaaaggguuu

SEQ ID NO: 773766 - RNA, 19 nt, Homo sapiens
  misc_RNA (1)...(19): siRNA sense strand
caacaaugccgugguuaag

SEQ ID NO: 773767 - RNA, 19 nt, Homo sapiens
  misc_RNA (1)...(19): siRNA sense strand
ucguagcuguggugaauga

SEQ ID NO: 773768 - RNA, 19 nt, Homo sapiens
  misc_RNA (1)...(19): siRNA sense strand
cacauugucuccugcaucu

SEQ ID NO: 773769 - RNA, 19 nt, Homo sapiens
  misc_RNA (1)...(19): siRNA sense strand
cagccacagucaagauguu

SEQ ID NO: 773770 - RNA, 19 nt, Homo sapiens
  misc_RNA (1)...(19): siRNA sense strand
caagacgcacccacaguau

SEQ ID NO: 773771 - RNA, 19 nt, Homo sapiens
  misc_RNA (1)...(19): siRNA sense strand
ccagcacguuugcaccauu

SEQ ID NO: 773772 - RNA, 19 nt, Homo sapiens
  misc_RNA (1)...(19): siRNA sense strand
ccuccacaaugccaaagaa

SEQ ID NO: 773773 - RNA, 19 nt, Homo sapiens
  misc_RNA (1)...(19): siRNA sense strand
caugaugaccuguggcuau

SEQ ID NO: 773774 - RNA, 19 nt, Homo sapiens
  misc_RNA (1)...(19): siRNA sense strand
caagcuucauccacacuuc

SEQ ID NO: 773775 - RNA, 19 nt, Homo sapiens
  misc_RNA (1)...(19): siRNA sense strand
gaacugucaccaaaaugua

SEQ ID NO: 773776 - RNA, 19 nt, Homo sapiens
  misc_RNA (1)...(19): siRNA sense strand
gggaagagcuguuugauca

SEQ ID NO: 773777 - RNA, 19 nt, Homo sapiens
  misc_RNA (1)...(19): siRNA sense strand
ggaaggagaugaagaaugg

SEQ ID NO: 773778 - RNA, 19 nt, Homo sapiens
  misc_RNA (1)...(19): siRNA sense strand
gcaagugaaucaugagaaa

SEQ ID NO: 773779 - RNA, 19 nt, Homo sapiens
  misc_RNA (1)...(19): siRNA sense strand
gggaggauguguaucaaua

SEQ ID NO: 773780 - RNA, 19 nt, Homo sapiens
  misc_RNA (1)...(19): siRNA sense strand
gaaguuaccugugggauuc

SEQ ID NO: 773781 - RNA, 19 nt, Homo sapiens
  misc_RNA (1)...(19): siRNA sense strand
gcacaacaaugccgugguu

SEQ ID NO: 773782 - RNA, 19 nt, Homo sapiens
  misc_RNA (1)...(19): siRNA sense strand
ugaaggaacugucaccaaa

SEQ ID NO: 773783 - RNA, 19 nt, Homo sapiens
  misc_RNA (1)...(19): siRNA sense strand
uggagacgauggaucauua

SEQ ID NO: 773784 - RNA, 19 nt, Homo sapiens
  misc_RNA (1)...(19): siRNA sense strand
cgacggaucucuuuacaag

SEQ ID NO: 773785 - RNA, 19 nt, Homo sapiens
  misc_RNA (1)...(19): siRNA sense strand
gagcagauguggucaaacu

SEQ ID NO: 773786 - RNA, 19 nt, Homo sapiens
  misc_RNA (1)...(19): siRNA sense strand
gaucaaggacaagaaguua

SEQ ID NO: 773787 - RNA, 19 nt, Homo sapiens
  misc_RNA (1)...(19): siRNA sense strand
gagaagaugaucaguggua

SEQ ID NO: 773788 - RNA, 19 nt, Homo sapiens
  misc_RNA (1)...(19): siRNA sense strand
aaacaaagguaugagaaga

SEQ ID NO: 773789 - RNA, 19 nt, Homo sapiens
  misc_RNA (1)...(19): siRNA sense strand
gcacauugaucugguggaa

SEQ ID NO: 773790 - RNA, 19 nt, Homo sapiens
  misc_RNA (1)...(19): siRNA sense strand
aaaggaagaucaaggacaa

SEQ ID NO: 773791 - RNA, 19 nt, Homo sapiens
  misc_RNA (1)...(19): siRNA sense strand
gaacugaggcacauugauc

SEQ ID NO: 773792 - RNA, 19 nt, Homo sapiens
  misc_RNA (1)...(19): siRNA sense strand
gaagagcuguuugaucaca

SEQ ID NO: 773793 - RNA, 19 nt, Homo sapiens
  misc_RNA (1)...(19): siRNA sense strand
ggaaacaaagguaugagaa

SEQ ID NO: 773794 - RNA, 19 nt, Homo sapiens
  misc_RNA (1)...(19): siRNA sense strand
ggacaaagcgauuuaaagc

SEQ ID NO: 773795 - RNA, 19 nt, Homo sapiens
  misc_RNA (1)...(19): siRNA sense strand
ggaagcagacgcacaacaa

SEQ ID NO: 773796 - RNA, 19 nt, Homo sapiens
  misc_RNA (1)...(19): siRNA sense strand
gaagacauccggacagagu

SEQ ID NO: 773797 - RNA, 19 nt, Homo sapiens
  misc_RNA (1)...(19): siRNA sense strand
caucguagcuguggugaau

SEQ ID NO: 773798 - RNA, 19 nt, Homo sapiens
  misc_RNA (1)...(19): siRNA sense strand
ggacuggaccgucugaaug

SEQ ID NO: 773799 - RNA, 19 nt, Homo sapiens
  misc_RNA (1)...(19): siRNA sense strand
gaucuacgccauuccuauu

SEQ ID NO: 773800 - RNA, 19 nt, Homo sapiens
  misc_RNA (1)...(19): siRNA sense strand
gaugaucagugguauguac

SEQ ID NO: 773801 - RNA, 19 nt, Homo sapiens
  misc_RNA (1)...(19): siRNA sense strand
gacgauggaucauuagaag

SEQ ID NO: 773802 - RNA, 19 nt, Homo sapiens
  misc_RNA (1)...(19): siRNA sense strand
gcacagaggcaagcagcua

SEQ ID NO: 773803 - RNA, 19 nt, Homo sapiens
  misc_RNA (1)...(19): siRNA sense strand
cugcaucucugacuucuug

SEQ ID NO: 773804 - RNA, 19 nt, Homo sapiens
  misc_RNA (1)...(19): siRNA sense strand
gaguggagccguccgauga

SEQ ID NO: 773805 - RNA, 19 nt, Homo sapiens
  misc_RNA (1)...(19): siRNA sense strand
gaaacucucauagauauca

SEQ ID NO: 773806 - RNA, 19 nt, Homo sapiens
  misc_RNA (1)...(19): siRNA sense strand
caccaaugcuugcuacaug

SEQ ID NO: 773807 - RNA, 19 nt, Homo sapiens
  misc_RNA (1)...(19): siRNA sense strand
gaaaauccguagugggaaa

SEQ ID NO: 773808 - RNA, 19 nt, Homo sapiens
  misc_RNA (1)...(19): siRNA sense strand
uggcugcgguuguggauaa

SEQ ID NO: 773809 - RNA, 19 nt, Homo sapiens
  misc_RNA (1)...(19): siRNA sense strand
gggcuucacguucucauuu

SEQ ID NO: 773810 - RNA, 19 nt, Homo sapiens
  misc_RNA (1)...(19): siRNA sense strand
gagguuggacucauuguug

SEQ ID NO: 773811 - RNA, 19 nt, Homo sapiens
  misc_RNA (1)...(19): siRNA sense strand
gagcagcaccggcagauag

SEQ ID NO: 773812 - RNA, 19 nt, Homo sapiens
  misc_RNA (1)...(19): siRNA sense strand
gauaagauccgcgagaaca

SEQ ID NO: 773813 - RNA, 19 nt, Homo sapiens
  misc_RNA (1)...(19): siRNA sense strand
gaaaucguccgcaacaucu

SEQ ID NO: 773814 - RNA, 19 nt, Homo sapiens
  misc_RNA (1)...(19): siRNA sense strand
gaggagacccuggcucauu

SEQ ID NO: 773815 - RNA, 19 nt, Homo sapiens
  misc_RNA (1)...(19): siRNA sense strand
ggucaaacugcuuaacaaa

SEQ ID NO: 773816 - RNA, 19 nt, Homo sapiens
  misc_RNA (1)...(19): siRNA sense strand
ccaaguuucucucucagau

SEQ ID NO: 773817 - RNA, 19 nt, Homo sapiens
  misc_RNA (1)...(19): siRNA sense strand
guauguaccugggugaaau

SEQ ID NO: 773818 - RNA, 19 nt, Homo sapiens
  misc_RNA (1)...(19): siRNA sense strand
gaaacaaagguaugagaag

SEQ ID NO: 773819 - RNA, 19 nt, Homo sapiens
  misc_RNA (1)...(19): siRNA sense strand
gaccgagaauggugacuuc

SEQ ID NO: 773820 - RNA, 19 nt, Homo sapiens
  misc_RNA (1)...(19): siRNA sense strand
gauguggucaaacugcuua

SEQ ID NO: 773821 - RNA, 19 nt, Homo sapiens
  misc_RNA (1)...(19): siRNA sense strand
ccaugcggcucuccgauga

SEQ ID NO: 773822 - RNA, 19 nt, Homo sapiens
  misc_RNA (1)...(19): siRNA sense strand
caacaagaucuacgccauu

SEQ ID NO: 773823 - RNA, 19 nt, Homo sapiens
  misc_RNA (1)...(19): siRNA sense strand
ggagagcugguucgacuga

SEQ ID NO: 773824 - RNA, 19 nt, Homo sapiens
  misc_RNA (1)...(19): siRNA sense strand
uuaaucgacuucaccaaga

SEQ ID NO: 773825 - RNA, 19 nt, Homo sapiens
  misc_RNA (1)...(19): siRNA sense strand
gaaaugcacaacaagaucu

SEQ ID NO: 773826 - RNA, 19 nt, Homo sapiens
  misc_RNA (1)...(19): siRNA sense strand
ggaaaugcacaacaagauc

SEQ ID NO: 773827 - RNA, 19 nt, Homo sapiens
  misc_RNA (1)...(19): siRNA sense strand
aggagacccuggcucauuu

SEQ ID NO: 773828 - RNA, 19 nt, Homo sapiens
  misc_RNA (1)...(19): siRNA sense strand
gaagaucaaggacaagaag

SEQ ID NO: 773829 - RNA, 19 nt, Homo sapiens
  misc_RNA (1)...(19): siRNA sense strand
agaccaaguuucucucuca

SEQ ID NO: 773830 - RNA, 19 nt, Homo sapiens
  misc_RNA (1)...(19): siRNA sense strand
ccacaaugccaaagaaauc

SEQ ID NO: 773831 - RNA, 19 nt, Homo sapiens
  misc_RNA (1)...(19): siRNA sense strand
uaaggaaggccuccacaau

SEQ ID NO: 773832 - RNA, 19 nt, Homo sapiens
  misc_RNA (1)...(19): siRNA sense strand
uagaagacauccggacaga

SEQ ID NO: 773833 - RNA, 19 nt, Homo sapiens
  misc_RNA (1)...(19): siRNA sense strand
cagcagcuaggucugaaua

SEQ ID NO: 773834 - RNA, 19 nt, Homo sapiens
  misc_RNA (1)...(19): siRNA sense strand
gggugcaagugaaucauga

SEQ ID NO: 773835 - RNA, 19 nt, Homo sapiens
  misc_RNA (1)...(19): siRNA sense strand
uaaucgacuucaccaagaa

SEQ ID NO: 773836 - RNA, 19 nt, Homo sapiens
  misc_RNA (1)...(19): siRNA sense strand
acaaagguaugagaagaug

SEQ ID NO: 773837 - RNA, 19 nt, Homo sapiens
  misc_RNA (1)...(19): siRNA sense strand
ccuaaaugcugggaaacaa

SEQ ID NO: 773838 - RNA, 19 nt, Homo sapiens
  misc_RNA (1)...(19): siRNA sense strand
acaagacgcacccacagua

SEQ ID NO: 773839 - RNA, 19 nt, Homo sapiens
  misc_RNA (1)...(19): siRNA sense strand
ucaggaaggagaugaagaa

SEQ ID NO: 773840 - RNA, 19 nt, Homo sapiens
  misc_RNA (1)...(19): siRNA sense strand
ugaagaacguggagauggu

SEQ ID NO: 773841 - RNA, 19 nt, Homo sapiens
  misc_RNA (1)...(19): siRNA sense strand
acaaugccgugguuaagau

SEQ ID NO: 773842 - RNA, 19 nt, Homo sapiens
  misc_RNA (1)...(19): siRNA sense strand
ggaaguuuaacaccaguga

SEQ ID NO: 773843 - RNA, 19 nt, Homo sapiens
  misc_RNA (1)...(19): siRNA sense strand
ggaagaucaaggacaagaa

SEQ ID NO: 773844 - RNA, 19 nt, Homo sapiens
  misc_RNA (1)...(19): siRNA sense strand
gaagcagacgcacaacaau

SEQ ID NO: 773845 - RNA, 19 nt, Homo sapiens
  misc_RNA (1)...(19): siRNA sense strand
caucggcacuggcaccaau

SEQ ID NO: 773846 - RNA, 19 nt, Homo sapiens
  misc_RNA (1)...(19): siRNA sense strand
gauggucaguggcauguac

SEQ ID NO: 773847 - RNA, 19 nt, Homo sapiens
  misc_RNA (1)...(19): siRNA sense strand
gacaguauccucgucaaga

SEQ ID NO: 773848 - RNA, 19 nt, Homo sapiens
  misc_RNA (1)...(19): siRNA sense strand
aaagagaacgguggaaaug

SEQ ID NO: 773849 - RNA, 19 nt, Homo sapiens
  misc_RNA (1)...(19): siRNA sense strand
caacagccacagucaagau

SEQ ID NO: 773850 - RNA, 19 nt, Homo sapiens
  misc_RNA (1)...(19): siRNA sense strand
ucucugacuucuuggacua

SEQ ID NO: 773851 - RNA, 19 nt, Homo sapiens
  misc_RNA (1)...(19): siRNA sense strand
uuaagaugcugcccuccuu

SEQ ID NO: 773852 - RNA, 19 nt, Homo sapiens
  misc_RNA (1)...(19): siRNA sense strand
cagcacguuugcaccauug

SEQ ID NO: 773853 - RNA, 19 nt, Homo sapiens
  misc_RNA (1)...(19): siRNA sense strand
gaugauaucaggacacacu

SEQ ID NO: 773854 - RNA, 19 nt, Homo sapiens
  misc_RNA (1)...(19): siRNA sense strand
ggacgggacacucuacaag

SEQ ID NO: 773855 - RNA, 19 nt, Homo sapiens
  misc_RNA (1)...(19): siRNA sense strand
gaggaacugaggcacauug

SEQ ID NO: 773856 - RNA, 19 nt, Homo sapiens
  misc_RNA (1)...(19): siRNA sense strand
gaagaugaucagugguaug

SEQ ID NO: 773857 - RNA, 19 nt, Homo sapiens
  misc_RNA (1)...(19): siRNA sense strand
gggaaacaaagguaugaga

SEQ ID NO: 773858 - RNA, 19 nt, Homo sapiens
  misc_RNA (1)...(19): siRNA sense strand
caugaugaccugugcuuau

SEQ ID NO: 773859 - RNA, 19 nt, Homo sapiens
  misc_RNA (1)...(19): siRNA sense strand
agagaacgguggaaaugca

SEQ ID NO: 773860 - RNA, 19 nt, Homo sapiens
  misc_RNA (1)...(19): siRNA sense strand
ugaaccgccugcgugauaa

SEQ ID NO: 773861 - RNA, 19 nt, Homo sapiens
  misc_RNA (1)...(19): siRNA sense strand
ugggagauuucauggagaa

SEQ ID NO: 773862 - RNA, 19 nt, Homo sapiens
  misc_RNA (1)...(19): siRNA sense strand
ggugaaaucguccgcaaca

SEQ ID NO: 773863 - RNA, 19 nt, Homo sapiens
  misc_RNA (1)...(19): siRNA sense strand
caacgggugucuggaugau

SEQ ID NO: 773864 - RNA, 19 nt, Homo sapiens
  misc_RNA (1)...(19): siRNA sense strand
ucacauggaguccgagguu

SEQ ID NO: 773865 - RNA, 19 nt, Homo sapiens
  misc_RNA (1)...(19): siRNA sense strand
ucacguggacaaaggguuu

SEQ ID NO: 773866 - RNA, 19 nt, Homo sapiens
  misc_RNA (1)...(19): siRNA sense strand
caacaaugccgugguuaag

SEQ ID NO: 773867 - RNA, 19 nt, Homo sapiens
  misc_RNA (1)...(19): siRNA sense strand
ucguagcuguggugaauga

SEQ ID NO: 773868 - RNA, 19 nt, Homo sapiens
  misc_RNA (1)...(19): siRNA sense strand
cacauugucuccugcaucu

SEQ ID NO: 773869 - RNA, 19 nt, Homo sapiens
  misc_RNA (1)...(19): siRNA sense strand
cagccacagucaagauguu

SEQ ID NO: 773870 - RNA, 19 nt, Homo sapiens
  misc_RNA (1)...(19): siRNA sense strand
caagacgcacccacaguau

SEQ ID NO: 773871 - RNA, 19 nt, Homo sapiens
  misc_RNA (1)...(19): siRNA sense strand
ccagcacguuugcaccauu

SEQ ID NO: 773872 - RNA, 19 nt, Homo sapiens
  misc_RNA (1)...(19): siRNA sense strand
ccuccacaaugccaaagaa

SEQ ID NO: 773873 - RNA, 19 nt, Homo sapiens
  misc_RNA (1)...(19): siRNA sense strand
caugaugaccuguggcuau

SEQ ID NO: 773874 - RNA, 19 nt, Homo sapiens
  misc_RNA (1)...(19): siRNA sense strand
caagcuucauccacacuuc

SEQ ID NO: 773875 - RNA, 19 nt, Homo sapiens
  misc_RNA (1)...(19): siRNA sense strand
gaacugucaccaaaaugua

SEQ ID NO: 773876 - RNA, 19 nt, Homo sapiens
  misc_RNA (1)...(19): siRNA sense strand
ggaccuacauuccucagua

SEQ ID NO: 773877 - RNA, 19 nt, Homo sapiens
  misc_RNA (1)...(19): siRNA sense strand
cagcagagguguuggcuuu

SEQ ID NO: 773878 - RNA, 19 nt, Homo sapiens
  misc_RNA (1)...(19): siRNA sense strand
cgacagcuguuucuauuga

SEQ ID NO: 773879 - RNA, 19 nt, Homo sapiens
  misc_RNA (1)...(19): siRNA sense strand
gcaaauauacccagaaugg

SEQ ID NO: 773880 - RNA, 19 nt, Homo sapiens
  misc_RNA (1)...(19): siRNA sense strand
caacaaaccuauacaucuc

SEQ ID NO: 773881 - RNA, 19 nt, Homo sapiens
  misc_RNA (1)...(19): siRNA sense strand
caaaggcaauucuugacaa

SEQ ID NO: 773882 - RNA, 19 nt, Homo sapiens
  misc_RNA (1)...(19): siRNA sense strand
uagcaucucucaaggcaaa

SEQ ID NO: 773883 - RNA, 19 nt, Homo sapiens
  misc_RNA (1)...(19): siRNA sense strand
caaaucagugcaaagguua

SEQ ID NO: 773884 - RNA, 19 nt, Homo sapiens
  misc_RNA (1)...(19): siRNA sense strand
ccacaagaauacuaagaga

SEQ ID NO: 773885 - RNA, 19 nt, Homo sapiens
  misc_RNA (1)...(19): siRNA sense strand
ggacaugucauuuccacaa

SEQ ID NO: 773886 - RNA, 19 nt, Homo sapiens
  misc_RNA (1)...(19): siRNA sense strand
gaagugguaauucaacauu

SEQ ID NO: 773887 - RNA, 19 nt, Homo sapiens
  misc_RNA (1)...(19): siRNA sense strand
gcauggcuuugaccuauga

SEQ ID NO: 773888 - RNA, 19 nt, Homo sapiens
  misc_RNA (1)...(19): siRNA sense strand
acaaaucagugcaaagguu

SEQ ID NO: 773889 - RNA, 19 nt, Homo sapiens
  misc_RNA (1)...(19): siRNA sense strand
ugacacagcagaugaauca

SEQ ID NO: 773890 - RNA, 19 nt, Homo sapiens
  misc_RNA (1)...(19): siRNA sense strand
agcaggagcuugagaauau

SEQ ID NO: 773891 - RNA, 19 nt, Homo sapiens
  misc_RNA (1)...(19): siRNA sense strand
agaauggagucuacugaaa

SEQ ID NO: 773892 - RNA, 19 nt, Homo sapiens
  misc_RNA (1)...(19): siRNA sense strand
aaacacaaaucagugcaaa

SEQ ID NO: 773893 - RNA, 19 nt, Homo sapiens
  misc_RNA (1)...(19): siRNA sense strand
agacaucuaucacgccauu

SEQ ID NO: 773894 - RNA, 19 nt, Homo sapiens
  misc_RNA (1)...(19): siRNA sense strand
gcacaacaggaacguauau

SEQ ID NO: 773895 - RNA, 19 nt, Homo sapiens
  misc_RNA (1)...(19): siRNA sense strand
gagcaggagcuugagaaua

SEQ ID NO: 773896 - RNA, 19 nt, Homo sapiens
  misc_RNA (1)...(19): siRNA sense strand
gacagaaucaaagcaaaua

SEQ ID NO: 773897 - RNA, 19 nt, Homo sapiens
  misc_RNA (1)...(19): siRNA sense strand
gcagaugaaucaccuuucg

SEQ ID NO: 773898 - RNA, 19 nt, Homo sapiens
  misc_RNA (1)...(19): siRNA sense strand
gugcaaagguuaugguuuu

SEQ ID NO: 773899 - RNA, 19 nt, Homo sapiens
  misc_RNA (1)...(19): siRNA sense strand
cuacaaaggcaauucuuga

SEQ ID NO: 773900 - RNA, 19 nt, Homo sapiens
  misc_RNA (1)...(19): siRNA sense strand
ggacacauccaacgaacau

SEQ ID NO: 773901 - RNA, 19 nt, Homo sapiens
  misc_RNA (1)...(19): siRNA sense strand
gcaaccaaccgcaugauuc

SEQ ID NO: 773902 - RNA, 19 nt, Homo sapiens
  misc_RNA (1)...(19): siRNA sense strand
aaaggcaauucuugacaaa

SEQ ID NO: 773903 - RNA, 19 nt, Homo sapiens
  misc_RNA (1)...(19): siRNA sense strand
gcaagacccaacaaaccua

SEQ ID NO: 773904 - RNA, 19 nt, Homo sapiens
  misc_RNA (1)...(19): siRNA sense strand
gcgacagaaucaaagcaaa

SEQ ID NO: 773905 - RNA, 19 nt, Homo sapiens
  misc_RNA (1)...(19): siRNA sense strand
aaaccaaccuguacauucg

SEQ ID NO: 773906 - RNA, 19 nt, Homo sapiens
  misc_RNA (1)...(19): siRNA sense strand
aagcaaauauacccagaau

SEQ ID NO: 773907 - RNA, 19 nt, Homo sapiens
  misc_RNA (1)...(19): siRNA sense strand
ccacagcugccauacagaa

SEQ ID NO: 773908 - RNA, 19 nt, Homo sapiens
  misc_RNA (1)...(19): siRNA sense strand
uccgacagcuguuucuauu

SEQ ID NO: 773909 - RNA, 19 nt, Homo sapiens
  misc_RNA (1)...(19): siRNA sense strand
acagauggcuaagcaacaa

SEQ ID NO: 773910 - RNA, 19 nt, Homo sapiens
  misc_RNA (1)...(19): siRNA sense strand
ccacugacacagcagauga

SEQ ID NO: 773911 - RNA, 19 nt, Homo sapiens
  misc_RNA (1)...(19): siRNA sense strand
ccucauccgccauacguua

SEQ ID NO: 773912 - RNA, 19 nt, Homo sapiens
  misc_RNA (1)...(19): siRNA sense strand
uggcauggcuuugaccuau

SEQ ID NO: 773913 - RNA, 19 nt, Homo sapiens
  misc_RNA (1)...(19): siRNA sense strand
ggagucagcagagguguug

SEQ ID NO: 773914 - RNA, 19 nt, Homo sapiens
  misc_RNA (1)...(19): siRNA sense strand
caugucauuuccacaagaa

SEQ ID NO: 773915 - RNA, 19 nt, Homo sapiens
  misc_RNA (1)...(19): siRNA sense strand
ccaacaaaccuauacaucu

SEQ ID NO: 773916 - RNA, 19 nt, Homo sapiens
  misc_RNA (1)...(19): siRNA sense strand
gaagguguuguugcugaua

SEQ ID NO: 773917 - RNA, 19 nt, Homo sapiens
  misc_RNA (1)...(19): siRNA sense strand
ggggaacaguugaguaaaa

SEQ ID NO: 773918 - RNA, 19 nt, Homo sapiens
  misc_RNA (1)...(19): siRNA sense strand
gcacaaacagcagcagcaa

SEQ ID NO: 773919 - RNA, 19 nt, Homo sapiens
  misc_RNA (1)...(19): siRNA sense strand
gcaggagcuugagaauaug

SEQ ID NO: 773920 - RNA, 19 nt, Homo sapiens
  misc_RNA (1)...(19): siRNA sense strand
agaaagcgguagcaucucu

SEQ ID NO: 773921 - RNA, 19 nt, Homo sapiens
  misc_RNA (1)...(19): siRNA sense strand
gggcacaacaggaacguau

SEQ ID NO: 773922 - RNA, 19 nt, Homo sapiens
  misc_RNA (1)...(19): siRNA sense strand
cucauuaucuccaaaccaa

SEQ ID NO: 773923 - RNA, 19 nt, Homo sapiens
  misc_RNA (1)...(19): siRNA sense strand
gcagccagccaacaugaug

SEQ ID NO: 773924 - RNA, 19 nt, Homo sapiens
  misc_RNA (1)...(19): siRNA sense strand
cgacagaaucaaagcaaau

SEQ ID NO: 773925 - RNA, 19 nt, Homo sapiens
  misc_RNA (1)...(19): siRNA sense strand
gcugaaacccuuuggacau

SEQ ID NO: 773926 - RNA, 19 nt, Homo sapiens
  misc_RNA (1)...(19): siRNA sense strand
gaauaugcugaaacccuuu

SEQ ID NO: 773927 - RNA, 19 nt, Homo sapiens
  misc_RNA (1)...(19): siRNA sense strand
cagcagaugaaucaccuuu

SEQ ID NO: 773928 - RNA, 19 nt, Homo sapiens
  misc_RNA (1)...(19): siRNA sense strand
gaaacccuuuggacauguc

SEQ ID NO: 773929 - RNA, 19 nt, Homo sapiens
  misc_RNA (1)...(19): siRNA sense strand
ccacugaccaggaccuaau

SEQ ID NO: 773930 - RNA, 19 nt, Homo sapiens
  misc_RNA (1)...(19): siRNA sense strand
gacagcuguuucuauugaa

SEQ ID NO: 773931 - RNA, 19 nt, Homo sapiens
  misc_RNA (1)...(19): siRNA sense strand
acaaacagcagcagcaaca

SEQ ID NO: 773932 - RNA, 19 nt, Homo sapiens
  misc_RNA (1)...(19): siRNA sense strand
gagaggcuggcauggcuuu

SEQ ID NO: 773933 - RNA, 19 nt, Homo sapiens
  misc_RNA (1)...(19): siRNA sense strand
gaauggagucuacugaaaa

SEQ ID NO: 773934 - RNA, 19 nt, Homo sapiens
  misc_RNA (1)...(19): siRNA sense strand
ugucauuuccacaagaaua

SEQ ID NO: 773935 - RNA, 19 nt, Homo sapiens
  misc_RNA (1)...(19): siRNA sense strand
acagaaagcgguagcaucu

SEQ ID NO: 773936 - RNA, 19 nt, Homo sapiens
  misc_RNA (1)...(19): siRNA sense strand
acaacaggaacguauauga

SEQ ID NO: 773937 - RNA, 19 nt, Homo sapiens
  misc_RNA (1)...(19): siRNA sense strand
aagaagcgacagaaucaaa

SEQ ID NO: 773938 - RNA, 19 nt, Homo sapiens
  misc_RNA (1)...(19): siRNA sense strand
gcagagguguuggcuuugc

SEQ ID NO: 773939 - RNA, 19 nt, Homo sapiens
  misc_RNA (1)...(19): siRNA sense strand
ccagaauggagucuacuga

SEQ ID NO: 773940 - RNA, 19 nt, Homo sapiens
  misc_RNA (1)...(19): siRNA sense strand
aaaccaagcaguccuaugc

SEQ ID NO: 773941 - RNA, 19 nt, Homo sapiens
  misc_RNA (1)...(19): siRNA sense strand
cagaauggagucuacugaa

SEQ ID NO: 773942 - RNA, 19 nt, Homo sapiens
  misc_RNA (1)...(19): siRNA sense strand
gagcaagacccaacaaacc

SEQ ID NO: 773943 - RNA, 19 nt, Homo sapiens
  misc_RNA (1)...(19): siRNA sense strand
gaccuacauuccucaguac

SEQ ID NO: 773944 - RNA, 19 nt, Homo sapiens
  misc_RNA (1)...(19): siRNA sense strand
caacaggaacguauaugac

SEQ ID NO: 773945 - RNA, 19 nt, Homo sapiens
  misc_RNA (1)...(19): siRNA sense strand
cauaccagguccagaguac

SEQ ID NO: 773946 - RNA, 19 nt, Homo sapiens
  misc_RNA (1)...(19): siRNA sense strand
gacaugucauuuccacaag

SEQ ID NO: 773947 - RNA, 19 nt, Homo sapiens
  misc_RNA (1)...(19): siRNA sense strand
cugaaacccuuuggacaug

SEQ ID NO: 773948 - RNA, 19 nt, Homo sapiens
  misc_RNA (1)...(19): siRNA sense strand
aggcacagauggcuaagca

SEQ ID NO: 773949 - RNA, 19 nt, Homo sapiens
  misc_RNA (1)...(19): siRNA sense strand
uggaugagcaggagcuuga

SEQ ID NO: 773950 - RNA, 19 nt, Homo sapiens
  misc_RNA (1)...(19): siRNA sense strand
acuaagagacgcuaaugga

SEQ ID NO: 773951 - RNA, 19 nt, Homo sapiens
  misc_RNA (1)...(19): siRNA sense strand
gcaacaacagcagcaacaa

SEQ ID NO: 773952 - RNA, 19 nt, Homo sapiens
  misc_RNA (1)...(19): siRNA sense strand
cuacuauccucauuaucuc

SEQ ID NO: 773953 - RNA, 19 nt, Homo sapiens
  misc_RNA (1)...(19): siRNA sense strand
gaccaucccaugucaaugc

SEQ ID NO: 773954 - RNA, 19 nt, Homo sapiens
  misc_RNA (1)...(19): siRNA sense strand
caaaagaagcgacagaauc

SEQ ID NO: 773955 - RNA, 19 nt, Homo sapiens
  misc_RNA (1)...(19): siRNA sense strand
gcacagaaagcgguagcau

SEQ ID NO: 773956 - RNA, 19 nt, Homo sapiens
  misc_RNA (1)...(19): siRNA sense strand
caagagcaagacccaacaa

SEQ ID NO: 773957 - RNA, 19 nt, Homo sapiens
  misc_RNA (1)...(19): siRNA sense strand
gcaagggaccuacauuccu

SEQ ID NO: 773958 - RNA, 19 nt, Homo sapiens
  misc_RNA (1)...(19): siRNA sense strand
acaaaccuauacaucucaa

SEQ ID NO: 773959 - RNA, 19 nt, Homo sapiens
  misc_RNA (1)...(19): siRNA sense strand
caagacccaacaaaccuau

SEQ ID NO: 773960 - RNA, 19 nt, Homo sapiens
  misc_RNA (1)...(19): siRNA sense strand
gcauauucuuaccaacagu

SEQ ID NO: 773961 - RNA, 19 nt, Homo sapiens
  misc_RNA (1)...(19): siRNA sense strand
agauagcaguggacacauc

SEQ ID NO: 773962 - RNA, 19 nt, Homo sapiens
  misc_RNA (1)...(19): siRNA sense strand
ggucagcagcaacagauag

SEQ ID NO: 773963 - RNA, 19 nt, Homo sapiens
  misc_RNA (1)...(19): siRNA sense strand
ggcacaacaggaacguaua

SEQ ID NO: 773964 - RNA, 19 nt, Homo sapiens
  misc_RNA (1)...(19): siRNA sense strand
ccgcaugauuccacagaca

SEQ ID NO: 773965 - RNA, 19 nt, Homo sapiens
  misc_RNA (1)...(19): siRNA sense strand
caacaacagcagcaacaac

SEQ ID NO: 773966 - RNA, 19 nt, Homo sapiens
  misc_RNA (1)...(19): siRNA sense strand
gugcaaauucgcugaugga

SEQ ID NO: 773967 - RNA, 19 nt, Homo sapiens
  misc_RNA (1)...(19): siRNA sense strand
aaaagaagcgacagaauca

SEQ ID NO: 773968 - RNA, 19 nt, Homo sapiens
  misc_RNA (1)...(19): siRNA sense strand
cguacaguauugcaaccaa

SEQ ID NO: 773969 - RNA, 19 nt, Homo sapiens
  misc_RNA (1)...(19): siRNA sense strand
gcuugagaauaugcugaaa

SEQ ID NO: 773970 - RNA, 19 nt, Homo sapiens
  misc_RNA (1)...(19): siRNA sense strand
ugacugcugcugcuccuau

SEQ ID NO: 773971 - RNA, 19 nt, Homo sapiens
  misc_RNA (1)...(19): siRNA sense strand
agaugaaucaccuuucguu

SEQ ID NO: 773972 - RNA, 19 nt, Homo sapiens
  misc_RNA (1)...(19): siRNA sense strand
ggcauggcuuugaccuaug

SEQ ID NO: 773973 - RNA, 19 nt, Homo sapiens
  misc_RNA (1)...(19): siRNA sense strand
gaauacuaagagacgcuaa

SEQ ID NO: 773974 - RNA, 19 nt, Homo sapiens
  misc_RNA (1)...(19): siRNA sense strand
ugaaacccuuuggacaugu

SEQ ID NO: 773975 - RNA, 19 nt, Homo sapiens
  misc_RNA (1)...(19): siRNA sense strand
acagauagcaguggacaca

SEQ ID NO: 773976 - RNA, 19 nt, Homo sapiens
  misc_RNA (1)...(19): siRNA sense strand
gagcagaaauuauucguua

SEQ ID NO: 773977 - RNA, 19 nt, Homo sapiens
  misc_RNA (1)...(19): siRNA sense strand
gagaauggcuuauugguaa

SEQ ID NO: 773978 - RNA, 19 nt, Homo sapiens
  misc_RNA (1)...(19): siRNA sense strand
gaagaaaguccaagccauu

SEQ ID NO: 773979 - RNA, 19 nt, Homo sapiens
  misc_RNA (1)...(19): siRNA sense strand
ugacuggccugaaaucaaa

SEQ ID NO: 773980 - RNA, 19 nt, Homo sapiens
  misc_RNA (1)...(19): siRNA sense strand
acacagaaauggaacaaug

SEQ ID NO: 773981 - RNA, 19 nt, Homo sapiens
  misc_RNA (1)...(19): siRNA sense strand
gggagagaauggcuuauug

SEQ ID NO: 773982 - RNA, 19 nt, Homo sapiens
  misc_RNA (1)...(19): siRNA sense strand
guaugaagaccacagaaua

SEQ ID NO: 773983 - RNA, 19 nt, Homo sapiens
  misc_RNA (1)...(19): siRNA sense strand
aagagcagauguucaauga

SEQ ID NO: 773984 - RNA, 19 nt, Homo sapiens
  misc_RNA (1)...(19): siRNA sense strand
caagcugacuggccugaaa

SEQ ID NO: 773985 - RNA, 19 nt, Homo sapiens
  misc_RNA (1)...(19): siRNA sense strand
caaacuacaaacucacuua

SEQ ID NO: 773986 - RNA, 19 nt, Homo sapiens
  misc_RNA (1)...(19): siRNA sense strand
uauaaugcgccucaucuua

SEQ ID NO: 773987 - RNA, 19 nt, Homo sapiens
  misc_RNA (1)...(19): siRNA sense strand
acacagauuuggcuggaaa

SEQ ID NO: 773988 - RNA, 19 nt, Homo sapiens
  misc_RNA (1)...(19): siRNA sense strand
gaaauggaacaaugucaug

SEQ ID NO: 773989 - RNA, 19 nt, Homo sapiens
  misc_RNA (1)...(19): siRNA sense strand
agacuuggacacauauuua

SEQ ID NO: 773990 - RNA, 19 nt, Homo sapiens
  misc_RNA (1)...(19): siRNA sense strand
cuuuaagccugaccuguua

SEQ ID NO: 773991 - RNA, 19 nt, Homo sapiens
  misc_RNA (1)...(19): siRNA sense strand
uggacacucuggaugauuu

SEQ ID NO: 773992 - RNA, 19 nt, Homo sapiens
  misc_RNA (1)...(19): siRNA sense strand
aaucaacucucccauuugg

SEQ ID NO: 773993 - RNA, 19 nt, Homo sapiens
  misc_RNA (1)...(19): siRNA sense strand
auccaaggcuggugacuuu

SEQ ID NO: 773994 - RNA, 19 nt, Homo sapiens
  misc_RNA (1)...(19): siRNA sense strand
ucaaaucaacucucccauu

SEQ ID NO: 773995 - RNA, 19 nt, Homo sapiens
  misc_RNA (1)...(19): siRNA sense strand
gcagaaauuauucguuaca

SEQ ID NO: 773996 - RNA, 19 nt, Homo sapiens
  misc_RNA (1)...(19): siRNA sense strand
gagccuagcaauagcaaga

SEQ ID NO: 773997 - RNA, 19 nt, Homo sapiens
  misc_RNA (1)...(19): siRNA sense strand
gccuagcaauagcaagaua

SEQ ID NO: 773998 - RNA, 19 nt, Homo sapiens
  misc_RNA (1)...(19): siRNA sense strand
uaacuugggcagacuucua

SEQ ID NO: 773999 - RNA, 19 nt, Homo sapiens
  misc_RNA (1)...(19): siRNA sense strand
uaaugcgccucaucuuaug

SEQ ID NO: 774000 - RNA, 19 nt, Homo sapiens
  misc_RNA (1)...(19): siRNA sense strand
caccagagccuagcaauag

SEQ ID NO: 774001 - RNA, 19 nt, Homo sapiens
  misc_RNA (1)...(19): siRNA sense strand
agauuuggcuggaaacaca

SEQ ID NO: 774002 - RNA, 19 nt, Homo sapiens
  misc_RNA (1)...(19): siRNA sense strand
gcuuauugguaacucugua

SEQ ID NO: 774003 - RNA, 19 nt, Homo sapiens
  misc_RNA (1)...(19): siRNA sense strand
ggccugaaaucaaaucaac

SEQ ID NO: 774004 - RNA, 19 nt, Homo sapiens
  misc_RNA (1)...(19): siRNA sense strand
ugccgucgcuaacuggaua

SEQ ID NO: 774005 - RNA, 19 nt, Homo sapiens
  misc_RNA (1)...(19): siRNA sense strand
gaagaccacagaauagaac

SEQ ID NO: 774006 - RNA, 19 nt, Homo sapiens
  misc_RNA (1)...(19): siRNA sense strand
agagaauggcuuauuggua

SEQ ID NO: 774007 - RNA, 19 nt, Homo sapiens
  misc_RNA (1)...(19): siRNA sense strand
ucaccagagccuagcaaua

SEQ ID NO: 774008 - RNA, 19 nt, Homo sapiens
  misc_RNA (1)...(19): siRNA sense strand
ucaacucucccauuuggaa

SEQ ID NO: 774009 - RNA, 19 nt, Homo sapiens
  misc_RNA (1)...(19): siRNA sense strand
ggagagaauggcuuauugg

SEQ ID NO: 774010 - RNA, 19 nt, Homo sapiens
  misc_RNA (1)...(19): siRNA sense strand
guugauggacuuacucuuc

SEQ ID NO: 774011 - RNA, 19 nt, Homo sapiens
  misc_RNA (1)...(19): siRNA sense strand
aaagcaagaugugaaagag

SEQ ID NO: 774012 - RNA, 19 nt, Homo sapiens
  misc_RNA (1)...(19): siRNA sense strand
ugaagaccacagaauagaa

SEQ ID NO: 774013 - RNA, 19 nt, Homo sapiens
  misc_RNA (1)...(19): siRNA sense strand
ggggagagcagaaauuauu

SEQ ID NO: 774014 - RNA, 19 nt, Homo sapiens
  misc_RNA (1)...(19): siRNA sense strand
aaugucauguugaugcuau

SEQ ID NO: 774015 - RNA, 19 nt, Homo sapiens
  misc_RNA (1)...(19): siRNA sense strand
uaugaagaccacagaauag

SEQ ID NO: 774016 - RNA, 19 nt, Homo sapiens
  misc_RNA (1)...(19): siRNA sense strand
agccugaccuguuagacaa

SEQ ID NO: 774017 - RNA, 19 nt, Homo sapiens
  misc_RNA (1)...(19): siRNA sense strand
gagagaauggcuuauuggu

SEQ ID NO: 774018 - RNA, 19 nt, Homo sapiens
  misc_RNA (1)...(19): siRNA sense strand
gaaagagcagauguucaau

SEQ ID NO: 774019 - RNA, 19 nt, Homo sapiens
  misc_RNA (1)...(19): siRNA sense strand
uugauggacuuacucuuca

SEQ ID NO: 774020 - RNA, 19 nt, Homo sapiens
  misc_RNA (1)...(19): siRNA sense strand
gauuugcaguaccacacuu

SEQ ID NO: 774021 - RNA, 19 nt, Homo sapiens
  misc_RNA (1)...(19): siRNA sense strand
aaagagcagauguucaaug

SEQ ID NO: 774022 - RNA, 19 nt, Homo sapiens
  misc_RNA (1)...(19): siRNA sense strand
gaaacacagaaauggaaca

SEQ ID NO: 774023 - RNA, 19 nt, Homo sapiens
  misc_RNA (1)...(19): siRNA sense strand
uggaaacacagaaauggaa

SEQ ID NO: 774024 - RNA, 19 nt, Homo sapiens
  misc_RNA (1)...(19): siRNA sense strand
caacucucccauuuggaaa

SEQ ID NO: 774025 - RNA, 19 nt, Homo sapiens
  misc_RNA (1)...(19): siRNA sense strand
ucauguugaugcuauugug

SEQ ID NO: 774026 - RNA, 19 nt, Homo sapiens
  misc_RNA (1)...(19): siRNA sense strand
gaugugaaagagcagaugu

SEQ ID NO: 774027 - RNA, 19 nt, Homo sapiens
  misc_RNA (1)...(19): siRNA sense strand
guauaaugcgccucaucuu

SEQ ID NO: 774028 - RNA, 19 nt, Homo sapiens
  misc_RNA (1)...(19): siRNA sense strand
aaacacagaaauggaacaa

SEQ ID NO: 774029 - RNA, 19 nt, Homo sapiens
  misc_RNA (1)...(19): siRNA sense strand
gggagagcagaaauuauuc

SEQ ID NO: 774030 - RNA, 19 nt, Homo sapiens
  misc_RNA (1)...(19): siRNA sense strand
gacuucuacugggagauuu

SEQ ID NO: 774031 - RNA, 19 nt, Homo sapiens
  misc_RNA (1)...(19): siRNA sense strand
ccacacuuuuggucuuuaa

SEQ ID NO: 774032 - RNA, 19 nt, Homo sapiens
  misc_RNA (1)...(19): siRNA sense strand
uugcuuauuuggacauaca

SEQ ID NO: 774033 - RNA, 19 nt, Homo sapiens
  misc_RNA (1)...(19): siRNA sense strand
ccacagaauagaacaagcu

SEQ ID NO: 774034 - RNA, 19 nt, Homo sapiens
  misc_RNA (1)...(19): siRNA sense strand
cuggugacuuuacggaaga

SEQ ID NO: 774035 - RNA, 19 nt, Homo sapiens
  misc_RNA (1)...(19): siRNA sense strand
auugguaacucuguaacuu

SEQ ID NO: 774036 - RNA, 19 nt, Homo sapiens
  misc_RNA (1)...(19): siRNA sense strand
gcuggaaacacagaaaugg

SEQ ID NO: 774037 - RNA, 19 nt, Homo sapiens
  misc_RNA (1)...(19): siRNA sense strand
ggacacucuggaugauuuc

SEQ ID NO: 774038 - RNA, 19 nt, Homo sapiens
  misc_RNA (1)...(19): siRNA sense strand
ucuuuaagccugaccuguu

SEQ ID NO: 774039 - RNA, 19 nt, Homo sapiens
  misc_RNA (1)...(19): siRNA sense strand
aagacuuggacacauauuu

SEQ ID NO: 774040 - RNA, 19 nt, Homo sapiens
  misc_RNA (1)...(19): siRNA sense strand
gagcugggccuccucauca

SEQ ID NO: 774041 - RNA, 19 nt, Homo sapiens
  misc_RNA (1)...(19): siRNA sense strand
ggccaucuacuuugucaua

SEQ ID NO: 774042 - RNA, 19 nt, Homo sapiens
  misc_RNA (1)...(19): siRNA sense strand
gcgagaaccuggccuucau

SEQ ID NO: 774043 - RNA, 19 nt, Homo sapiens
  misc_RNA (1)...(19): siRNA sense strand
acaaaggcgugccggugua

SEQ ID NO: 774044 - RNA, 19 nt, Homo sapiens
  misc_RNA (1)...(19): siRNA sense strand
uggcaucggucacauugaa

SEQ ID NO: 774045 - RNA, 19 nt, Homo sapiens
  misc_RNA (1)...(19): siRNA sense strand
gcuggaggccaucuacuuu

SEQ ID NO: 774046 - RNA, 19 nt, Homo sapiens
  misc_RNA (1)...(19): siRNA sense strand
ggaacuggcugcgaguagu

SEQ ID NO: 774047 - RNA, 19 nt, Homo sapiens
  misc_RNA (1)...(19): siRNA sense strand
caccggagcuaguaagagu

SEQ ID NO: 774048 - RNA, 19 nt, Homo sapiens
  misc_RNA (1)...(19): siRNA sense strand
caucuacuuugucauagug

SEQ ID NO: 774049 - RNA, 19 nt, Homo sapiens
  misc_RNA (1)...(19): siRNA sense strand
gaggccaucuacuuuguca

SEQ ID NO: 774050 - RNA, 19 nt, Homo sapiens
  misc_RNA (1)...(19): siRNA sense strand
gcgcuggucuugcuuuacu

SEQ ID NO: 774051 - RNA, 19 nt, Homo sapiens
  misc_RNA (1)...(19): siRNA sense strand
gaacuggcugcgaguagug

SEQ ID NO: 774052 - RNA, 19 nt, Homo sapiens
  misc_RNA (1)...(19): siRNA sense strand
caucggcuauggcaaugug

SEQ ID NO: 774053 - RNA, 19 nt, Homo sapiens
  misc_RNA (1)...(19): siRNA sense strand
gaucggcugccugcucuuu

SEQ ID NO: 774054 - RNA, 19 nt, Homo sapiens
  misc_RNA (1)...(19): siRNA sense strand
uggcgcuggucuugcuuua

SEQ ID NO: 774055 - RNA, 19 nt, Homo sapiens
  misc_RNA (1)...(19): siRNA sense strand
ccucagugcucaccaccau

SEQ ID NO: 774056 - RNA, 19 nt, Homo sapiens
  misc_RNA (1)...(19): siRNA sense strand
ggaccaucaucaccaccau

SEQ ID NO: 774057 - RNA, 19 nt, Homo sapiens
  misc_RNA (1)...(19): siRNA sense strand
gcaagcuggaggccaucua

SEQ ID NO: 774058 - RNA, 19 nt, Homo sapiens
  misc_RNA (1)...(19): siRNA sense strand
uggaggccaucuacuuugu

SEQ ID NO: 774059 - RNA, 19 nt, Homo sapiens
  misc_RNA (1)...(19): siRNA sense strand
cauggcaucggucacauug

SEQ ID NO: 774060 - RNA, 19 nt, Homo sapiens
  misc_RNA (1)...(19): siRNA sense strand
gcgccucuucugcaucuuu

SEQ ID NO: 774061 - RNA, 19 nt, Homo sapiens
  misc_RNA (1)...(19): siRNA sense strand
ccaucuacuuugucauagu

SEQ ID NO: 774062 - RNA, 19 nt, Homo sapiens
  misc_RNA (1)...(19): siRNA sense strand
gugcggacccagaaaccaa

SEQ ID NO: 774063 - RNA, 19 nt, Homo sapiens
  misc_RNA (1)...(19): siRNA sense strand
caucaccaccaucggcuau

SEQ ID NO: 774064 - RNA, 19 nt, Homo sapiens
  misc_RNA (1)...(19): siRNA sense strand
gagcugggccuccucauca

SEQ ID NO: 774065 - RNA, 19 nt, Homo sapiens
  misc_RNA (1)...(19): siRNA sense strand
ggccaucuacuuugucaua

SEQ ID NO: 774066 - RNA, 19 nt, Homo sapiens
  misc_RNA (1)...(19): siRNA sense strand
gcgagaaccuggccuucau

SEQ ID NO: 774067 - RNA, 19 nt, Homo sapiens
  misc_RNA (1)...(19): siRNA sense strand
acaaaggcgugccggugua

SEQ ID NO: 774068 - RNA, 19 nt, Homo sapiens
  misc_RNA (1)...(19): siRNA sense strand
uggcaucggucacauugaa

SEQ ID NO: 774069 - RNA, 19 nt, Homo sapiens
  misc_RNA (1)...(19): siRNA sense strand
gcuggaggccaucuacuuu

SEQ ID NO: 774070 - RNA, 19 nt, Homo sapiens
  misc_RNA (1)...(19): siRNA sense strand
ggaacuggcugcgaguagu

SEQ ID NO: 774071 - RNA, 19 nt, Homo sapiens
  misc_RNA (1)...(19): siRNA sense strand
caccggagcuaguaagagu

SEQ ID NO: 774072 - RNA, 19 nt, Homo sapiens
  misc_RNA (1)...(19): siRNA sense strand
caucuacuuugucauagug

SEQ ID NO: 774073 - RNA, 19 nt, Homo sapiens
  misc_RNA (1)...(19): siRNA sense strand
gaggccaucuacuuuguca

SEQ ID NO: 774074 - RNA, 19 nt, Homo sapiens
  misc_RNA (1)...(19): siRNA sense strand
gcgcuggucuugcuuuacu

SEQ ID NO: 774075 - RNA, 19 nt, Homo sapiens
  misc_RNA (1)...(19): siRNA sense strand
gaacuggcugcgaguagug

SEQ ID NO: 774076 - RNA, 19 nt, Homo sapiens
  misc_RNA (1)...(19): siRNA sense strand
caucggcuauggcaaugug

SEQ ID NO: 774077 - RNA, 19 nt, Homo sapiens
  misc_RNA (1)...(19): siRNA sense strand
gaucggcugccugcucuuu

SEQ ID NO: 774078 - RNA, 19 nt, Homo sapiens
  misc_RNA (1)...(19): siRNA sense strand
uggcgcuggucuugcuuua

SEQ ID NO: 774079 - RNA, 19 nt, Homo sapiens
  misc_RNA (1)...(19): siRNA sense strand
ccucagugcucaccaccau

SEQ ID NO: 774080 - RNA, 19 nt, Homo sapiens
  misc_RNA (1)...(19): siRNA sense strand
ggaccaucaucaccaccau

SEQ ID NO: 774081 - RNA, 19 nt, Homo sapiens
  misc_RNA (1)...(19): siRNA sense strand
gcaagcuggaggccaucua

SEQ ID NO: 774082 - RNA, 19 nt, Homo sapiens
  misc_RNA (1)...(19): siRNA sense strand
uggaggccaucuacuuugu

SEQ ID NO: 774083 - RNA, 19 nt, Homo sapiens
  misc_RNA (1)...(19): siRNA sense strand
cauggcaucggucacauug

SEQ ID NO: 774084 - RNA, 19 nt, Homo sapiens
  misc_RNA (1)...(19): siRNA sense strand
gcgccucuucugcaucuuu

SEQ ID NO: 774085 - RNA, 19 nt, Homo sapiens
  misc_RNA (1)...(19): siRNA sense strand
ccaucuacuuugucauagu

SEQ ID NO: 774086 - RNA, 19 nt, Homo sapiens
  misc_RNA (1)...(19): siRNA sense strand
gugcggacccagaaaccaa

SEQ ID NO: 774087 - RNA, 19 nt, Homo sapiens
  misc_RNA (1)...(19): siRNA sense strand
caucaccaccaucggcuau

SEQ ID NO: 774088 - RNA, 19 nt, Homo sapiens
  misc_RNA (1)...(19): siRNA sense strand
gagcugggccuccucauca

SEQ ID NO: 774089 - RNA, 19 nt, Homo sapiens
  misc_RNA (1)...(19): siRNA sense strand
ggccaucuacuuugucaua

SEQ ID NO: 774090 - RNA, 19 nt, Homo sapiens
  misc_RNA (1)...(19): siRNA sense strand
gcgagaaccuggccuucau

SEQ ID NO: 774091 - RNA, 19 nt, Homo sapiens
  misc_RNA (1)...(19): siRNA sense strand
acaaaggcgugccggugua

SEQ ID NO: 774092 - RNA, 19 nt, Homo sapiens
  misc_RNA (1)...(19): siRNA sense strand
uggcaucggucacauugaa

SEQ ID NO: 774093 - RNA, 19 nt, Homo sapiens
  misc_RNA (1)...(19): siRNA sense strand
gcuggaggccaucuacuuu

SEQ ID NO: 774094 - RNA, 19 nt, Homo sapiens
  misc_RNA (1)...(19): siRNA sense strand
ggaacuggcugcgaguagu

SEQ ID NO: 774095 - RNA, 19 nt, Homo sapiens
  misc_RNA (1)...(19): siRNA sense strand
caccggagcuaguaagagu

SEQ ID NO: 774096 - RNA, 19 nt, Homo sapiens
  misc_RNA (1)...(19): siRNA sense strand
caucuacuuugucauagug

SEQ ID NO: 774097 - RNA, 19 nt, Homo sapiens
  misc_RNA (1)...(19): siRNA sense strand
gaggccaucuacuuuguca

SEQ ID NO: 774098 - RNA, 19 nt, Homo sapiens
  misc_RNA (1)...(19): siRNA sense strand
gcgcuggucuugcuuuacu

SEQ ID NO: 774099 - RNA, 19 nt, Homo sapiens
  misc_RNA (1)...(19): siRNA sense strand
gaacuggcugcgaguagug

SEQ ID NO: 774100 - RNA, 19 nt, Homo sapiens
  misc_RNA (1)...(19): siRNA sense strand
caucggcuauggcaaugug

SEQ ID NO: 774101 - RNA, 19 nt, Homo sapiens
  misc_RNA (1)...(19): siRNA sense strand
gaucggcugccugcucuuu

SEQ ID NO: 774102 - RNA, 19 nt, Homo sapiens
  misc_RNA (1)...(19): siRNA sense strand
uggcgcuggucuugcuuua

SEQ ID NO: 774103 - RNA, 19 nt, Homo sapiens
  misc_RNA (1)...(19): siRNA sense strand
ccucagugcucaccaccau

SEQ ID NO: 774104 - RNA, 19 nt, Homo sapiens
  misc_RNA (1)...(19): siRNA sense strand
ggaccaucaucaccaccau

SEQ ID NO: 774105 - RNA, 19 nt, Homo sapiens
  misc_RNA (1)...(19): siRNA sense strand
gcaagcuggaggccaucua

SEQ ID NO: 774106 - RNA, 19 nt, Homo sapiens
  misc_RNA (1)...(19): siRNA sense strand
uggaggccaucuacuuugu

SEQ ID NO: 774107 - RNA, 19 nt, Homo sapiens
  misc_RNA (1)...(19): siRNA sense strand
cauggcaucggucacauug

SEQ ID NO: 774108 - RNA, 19 nt, Homo sapiens
  misc_RNA (1)...(19): siRNA sense strand
gcgccucuucugcaucuuu

SEQ ID NO: 774109 - RNA, 19 nt, Homo sapiens
  misc_RNA (1)...(19): siRNA sense strand
ccaucuacuuugucauagu

SEQ ID NO: 774110 - RNA, 19 nt, Homo sapiens
  misc_RNA (1)...(19): siRNA sense strand
gugcggacccagaaaccaa

SEQ ID NO: 774111 - RNA, 19 nt, Homo sapiens
  misc_RNA (1)...(19): siRNA sense strand
caucaccaccaucggcuau

SEQ ID NO: 774112 - RNA, 19 nt, Homo sapiens
  misc_RNA (1)...(19): siRNA sense strand
gagcugggccuccucauca

SEQ ID NO: 774113 - RNA, 19 nt, Homo sapiens
  misc_RNA (1)...(19): siRNA sense strand
ggccaucuacuuugucaua

SEQ ID NO: 774114 - RNA, 19 nt, Homo sapiens
  misc_RNA (1)...(19): siRNA sense strand
gcgagaaccuggccuucau

SEQ ID NO: 774115 - RNA, 19 nt, Homo sapiens
  misc_RNA (1)...(19): siRNA sense strand
acaaaggcgugccggugua

SEQ ID NO: 774116 - RNA, 19 nt, Homo sapiens
  misc_RNA (1)...(19): siRNA sense strand
uggcaucggucacauugaa

SEQ ID NO: 774117 - RNA, 19 nt, Homo sapiens
  misc_RNA (1)...(19): siRNA sense strand
gcuggaggccaucuacuuu

SEQ ID NO: 774118 - RNA, 19 nt, Homo sapiens
  misc_RNA (1)...(19): siRNA sense strand
ggaacuggcugcgaguagu

SEQ ID NO: 774119 - RNA, 19 nt, Homo sapiens
  misc_RNA (1)...(19): siRNA sense strand
caccggagcuaguaagagu

SEQ ID NO: 774120 - RNA, 19 nt, Homo sapiens
  misc_RNA (1)...(19): siRNA sense strand
caucuacuuugucauagug

SEQ ID NO: 774121 - RNA, 19 nt, Homo sapiens
  misc_RNA (1)...(19): siRNA sense strand
gaggccaucuacuuuguca

SEQ ID NO: 774122 - RNA, 19 nt, Homo sapiens
  misc_RNA (1)...(19): siRNA sense strand
gcgcuggucuugcuuuacu

SEQ ID NO: 774123 - RNA, 19 nt, Homo sapiens
  misc_RNA (1)...(19): siRNA sense strand
gaacuggcugcgaguagug

SEQ ID NO: 774124 - RNA, 19 nt, Homo sapiens
  misc_RNA (1)...(19): siRNA sense strand
caucggcuauggcaaugug

SEQ ID NO: 774125 - RNA, 19 nt, Homo sapiens
  misc_RNA (1)...(19): siRNA sense strand
gaucggcugccugcucuuu

SEQ ID NO: 774126 - RNA, 19 nt, Homo sapiens
  misc_RNA (1)...(19): siRNA sense strand
uggcgcuggucuugcuuua

SEQ ID NO: 774127 - RNA, 19 nt, Homo sapiens
  misc_RNA (1)...(19): siRNA sense strand
ccucagugcucaccaccau

SEQ ID NO: 774128 - RNA, 19 nt, Homo sapiens
  misc_RNA (1)...(19): siRNA sense strand
ggaccaucaucaccaccau

SEQ ID NO: 774129 - RNA, 19 nt, Homo sapiens
  misc_RNA (1)...(19): siRNA sense strand
gcaagcuggaggccaucua

SEQ ID NO: 774130 - RNA, 19 nt, Homo sapiens
  misc_RNA (1)...(19): siRNA sense strand
uggaggccaucuacuuugu

SEQ ID NO: 774131 - RNA, 19 nt, Homo sapiens
  misc_RNA (1)...(19): siRNA sense strand
cauggcaucggucacauug

SEQ ID NO: 774132 - RNA, 19 nt, Homo sapiens
  misc_RNA (1)...(19): siRNA sense strand
gcgccucuucugcaucuuu

SEQ ID NO: 774133 - RNA, 19 nt, Homo sapiens
  misc_RNA (1)...(19): siRNA sense strand
ccaucuacuuugucauagu

SEQ ID NO: 774134 - RNA, 19 nt, Homo sapiens
  misc_RNA (1)...(19): siRNA sense strand
gugcggacccagaaaccaa

SEQ ID NO: 774135 - RNA, 19 nt, Homo sapiens
  misc_RNA (1)...(19): siRNA sense strand
caucaccaccaucggcuau

SEQ ID NO: 774136 - RNA, 19 nt, Homo sapiens
  misc_RNA (1)...(19): siRNA sense strand
gagcugggccuccucauca

SEQ ID NO: 774137 - RNA, 19 nt, Homo sapiens
  misc_RNA (1)...(19): siRNA sense strand
ggccaucuacuuugucaua

SEQ ID NO: 774138 - RNA, 19 nt, Homo sapiens
  misc_RNA (1)...(19): siRNA sense strand
gcgagaaccuggccuucau

SEQ ID NO: 774139 - RNA, 19 nt, Homo sapiens
  misc_RNA (1)...(19): siRNA sense strand
acaaaggcgugccggugua

SEQ ID NO: 774140 - RNA, 19 nt, Homo sapiens
  misc_RNA (1)...(19): siRNA sense strand
uggcaucggucacauugaa

SEQ ID NO: 774141 - RNA, 19 nt, Homo sapiens
  misc_RNA (1)...(19): siRNA sense strand
gcuggaggccaucuacuuu

SEQ ID NO: 774142 - RNA, 19 nt, Homo sapiens
  misc_RNA (1)...(19): siRNA sense strand
ggaacuggcugcgaguagu

SEQ ID NO: 774143 - RNA, 19 nt, Homo sapiens
  misc_RNA (1)...(19): siRNA sense strand
caccggagcuaguaagagu

SEQ ID NO: 774144 - RNA, 19 nt, Homo sapiens
  misc_RNA (1)...(19): siRNA sense strand
caucuacuuugucauagug

SEQ ID NO: 774145 - RNA, 19 nt, Homo sapiens
  misc_RNA (1)...(19): siRNA sense strand
gaggccaucuacuuuguca

SEQ ID NO: 774146 - RNA, 19 nt, Homo sapiens
  misc_RNA (1)...(19): siRNA sense strand
gcgcuggucuugcuuuacu

SEQ ID NO: 774147 - RNA, 19 nt, Homo sapiens
  misc_RNA (1)...(19): siRNA sense strand
gaacuggcugcgaguagug

SEQ ID NO: 774148 - RNA, 19 nt, Homo sapiens
  misc_RNA (1)...(19): siRNA sense strand
caucggcuauggcaaugug

SEQ ID NO: 774149 - RNA, 19 nt, Homo sapiens
  misc_RNA (1)...(19): siRNA sense strand
gaucggcugccugcucuuu

SEQ ID NO: 774150 - RNA, 19 nt, Homo sapiens
  misc_RNA (1)...(19): siRNA sense strand
uggcgcuggucuugcuuua

SEQ ID NO: 774151 - RNA, 19 nt, Homo sapiens
  misc_RNA (1)...(19): siRNA sense strand
ccucagugcucaccaccau

SEQ ID NO: 774152 - RNA, 19 nt, Homo sapiens
  misc_RNA (1)...(19): siRNA sense strand
ggaccaucaucaccaccau

SEQ ID NO: 774153 - RNA, 19 nt, Homo sapiens
  misc_RNA (1)...(19): siRNA sense strand
gcaagcuggaggccaucua

SEQ ID NO: 774154 - RNA, 19 nt, Homo sapiens
  misc_RNA (1)...(19): siRNA sense strand
uggaggccaucuacuuugu

SEQ ID NO: 774155 - RNA, 19 nt, Homo sapiens
  misc_RNA (1)...(19): siRNA sense strand
cauggcaucggucacauug

SEQ ID NO: 774156 - RNA, 19 nt, Homo sapiens
  misc_RNA (1)...(19): siRNA sense strand
gcgccucuucugcaucuuu

SEQ ID NO: 774157 - RNA, 19 nt, Homo sapiens
  misc_RNA (1)...(19): siRNA sense strand
ccaucuacuuugucauagu

SEQ ID NO: 774158 - RNA, 19 nt, Homo sapiens
  misc_RNA (1)...(19): siRNA sense strand
gugcggacccagaaaccaa

SEQ ID NO: 774159 - RNA, 19 nt, Homo sapiens
  misc_RNA (1)...(19): siRNA sense strand
caucaccaccaucggcuau

SEQ ID NO: 774160 - RNA, 19 nt, Homo sapiens
  misc_RNA (1)...(19): siRNA sense strand
gagcugggccuccucauca

SEQ ID NO: 774161 - RNA, 19 nt, Homo sapiens
  misc_RNA (1)...(19): siRNA sense strand
ggccaucuacuuugucaua

SEQ ID NO: 774162 - RNA, 19 nt, Homo sapiens
  misc_RNA (1)...(19): siRNA sense strand
gcgagaaccuggccuucau

SEQ ID NO: 774163 - RNA, 19 nt, Homo sapiens
  misc_RNA (1)...(19): siRNA sense strand
acaaaggcgugccggugua

SEQ ID NO: 774164 - RNA, 19 nt, Homo sapiens
  misc_RNA (1)...(19): siRNA sense strand
uggcaucggucacauugaa

SEQ ID NO: 774165 - RNA, 19 nt, Homo sapiens
  misc_RNA (1)...(19): siRNA sense strand
gcuggaggccaucuacuuu

SEQ ID NO: 774166 - RNA, 19 nt, Homo sapiens
  misc_RNA (1)...(19): siRNA sense strand
ggaacuggcugcgaguagu

SEQ ID NO: 774167 - RNA, 19 nt, Homo sapiens
  misc_RNA (1)...(19): siRNA sense strand
caccggagcuaguaagagu

SEQ ID NO: 774168 - RNA, 19 nt, Homo sapiens
  misc_RNA (1)...(19): siRNA sense strand
caucuacuuugucauagug

SEQ ID NO: 774169 - RNA, 19 nt, Homo sapiens
  misc_RNA (1)...(19): siRNA sense strand
gaggccaucuacuuuguca

SEQ ID NO: 774170 - RNA, 19 nt, Homo sapiens
  misc_RNA (1)...(19): siRNA sense strand
gcgcuggucuugcuuuacu

SEQ ID NO: 774171 - RNA, 19 nt, Homo sapiens
  misc_RNA (1)...(19): siRNA sense strand
gaacuggcugcgaguagug

SEQ ID NO: 774172 - RNA, 19 nt, Homo sapiens
  misc_RNA (1)...(19): siRNA sense strand
caucggcuauggcaaugug

SEQ ID NO: 774173 - RNA, 19 nt, Homo sapiens
  misc_RNA (1)...(19): siRNA sense strand
gaucggcugccugcucuuu

SEQ ID NO: 774174 - RNA, 19 nt, Homo sapiens
  misc_RNA (1)...(19): siRNA sense strand
uggcgcuggucuugcuuua

SEQ ID NO: 774175 - RNA, 19 nt, Homo sapiens
  misc_RNA (1)...(19): siRNA sense strand
ccucagugcucaccaccau

SEQ ID NO: 774176 - RNA, 19 nt, Homo sapiens
  misc_RNA (1)...(19): siRNA sense strand
ggaccaucaucaccaccau

SEQ ID NO: 774177 - RNA, 19 nt, Homo sapiens
  misc_RNA (1)...(19): siRNA sense strand
gcaagcuggaggccaucua

SEQ ID NO: 774178 - RNA, 19 nt, Homo sapiens
  misc_RNA (1)...(19): siRNA sense strand
uggaggccaucuacuuugu

SEQ ID NO: 774179 - RNA, 19 nt, Homo sapiens
  misc_RNA (1)...(19): siRNA sense strand
cauggcaucggucacauug

SEQ ID NO: 774180 - RNA, 19 nt, Homo sapiens
  misc_RNA (1)...(19): siRNA sense strand
gcgccucuucugcaucuuu

SEQ ID NO: 774181 - RNA, 19 nt, Homo sapiens
  misc_RNA (1)...(19): siRNA sense strand
ccaucuacuuugucauagu

SEQ ID NO: 774182 - RNA, 19 nt, Homo sapiens
  misc_RNA (1)...(19): siRNA sense strand
gugcggacccagaaaccaa

SEQ ID NO: 774183 - RNA, 19 nt, Homo sapiens
  misc_RNA (1)...(19): siRNA sense strand
caucaccaccaucggcuau

SEQ ID NO: 774184 - RNA, 19 nt, Homo sapiens
  misc_RNA (1)...(19): siRNA sense strand
gaacagaaauugucacaga

SEQ ID NO: 774185 - RNA, 19 nt, Homo sapiens
  misc_RNA (1)...(19): siRNA sense strand
gaaggaagauuuaccaaug

SEQ ID NO: 774186 - RNA, 19 nt, Homo sapiens
  misc_RNA (1)...(19): siRNA sense strand
gcacaguaccuucaaauuu

SEQ ID NO: 774187 - RNA, 19 nt, Homo sapiens
  misc_RNA (1)...(19): siRNA sense strand
ugaaauagguggaacagaa

SEQ ID NO: 774188 - RNA, 19 nt, Homo sapiens
  misc_RNA (1)...(19): siRNA sense strand
gccauaagcucauaaacaa

SEQ ID NO: 774189 - RNA, 19 nt, Homo sapiens
  misc_RNA (1)...(19): siRNA sense strand
acaagaagaugcuaaagaa

SEQ ID NO: 774190 - RNA, 19 nt, Homo sapiens
  misc_RNA (1)...(19): siRNA sense strand
gguaacaauuugccauaua

SEQ ID NO: 774191 - RNA, 19 nt, Homo sapiens
  misc_RNA (1)...(19): siRNA sense strand
ugaaauagcagaugaaguu

SEQ ID NO: 774192 - RNA, 19 nt, Homo sapiens
  misc_RNA (1)...(19): siRNA sense strand
caucuugacuucugaacua

SEQ ID NO: 774193 - RNA, 19 nt, Homo sapiens
  misc_RNA (1)...(19): siRNA sense strand
caaauacugugacuaugaa

SEQ ID NO: 774194 - RNA, 19 nt, Homo sapiens
  misc_RNA (1)...(19): siRNA sense strand
gcaaauacugugacuauga

SEQ ID NO: 774195 - RNA, 19 nt, Homo sapiens
  misc_RNA (1)...(19): siRNA sense strand
ggacucugauguuaauaaa

SEQ ID NO: 774196 - RNA, 19 nt, Homo sapiens
  misc_RNA (1)...(19): siRNA sense strand
gaucacaucuugacuucug

SEQ ID NO: 774197 - RNA, 19 nt, Homo sapiens
  misc_RNA (1)...(19): siRNA sense strand
cacaguaccuucaaauuug

SEQ ID NO: 774198 - RNA, 19 nt, Homo sapiens
  misc_RNA (1)...(19): siRNA sense strand
gaacaugugguccaagauu

SEQ ID NO: 774199 - RNA, 19 nt, Homo sapiens
  misc_RNA (1)...(19): siRNA sense strand
cacagagacugauguagua

SEQ ID NO: 774200 - RNA, 19 nt, Homo sapiens
  misc_RNA (1)...(19): siRNA sense strand
uuagaaagcagaaguagua

SEQ ID NO: 774201 - RNA, 19 nt, Homo sapiens
  misc_RNA (1)...(19): siRNA sense strand
uauaauagguccugaugga

SEQ ID NO: 774202 - RNA, 19 nt, Homo sapiens
  misc_RNA (1)...(19): siRNA sense strand
ugaagaggauuuagaggaa

SEQ ID NO: 774203 - RNA, 19 nt, Homo sapiens
  misc_RNA (1)...(19): siRNA sense strand
aaagacacaugaagaauca

SEQ ID NO: 774204 - RNA, 19 nt, Homo sapiens
  misc_RNA (1)...(19): siRNA sense strand
gaaauagguggaacagaaa

SEQ ID NO: 774205 - RNA, 19 nt, Homo sapiens
  misc_RNA (1)...(19): siRNA sense strand
gggagaagaugguuuacau

SEQ ID NO: 774206 - RNA, 19 nt, Homo sapiens
  misc_RNA (1)...(19): siRNA sense strand
gaauacagcacuacagaug

SEQ ID NO: 774207 - RNA, 19 nt, Homo sapiens
  misc_RNA (1)...(19): siRNA sense strand
gaacucaagaaacauauga

SEQ ID NO: 774208 - RNA, 19 nt, Homo sapiens
  misc_RNA (1)...(19): siRNA sense strand
gguccaagauuguguuuca

SEQ ID NO: 774209 - RNA, 19 nt, Homo sapiens
  misc_RNA (1)...(19): siRNA sense strand
gaguuuccauaaccacuua

SEQ ID NO: 774210 - RNA, 19 nt, Homo sapiens
  misc_RNA (1)...(19): siRNA sense strand
ugucacagaugaugggaua

SEQ ID NO: 774211 - RNA, 19 nt, Homo sapiens
  misc_RNA (1)...(19): siRNA sense strand
ucauaucuguccauacuaa

SEQ ID NO: 774212 - RNA, 19 nt, Homo sapiens
  misc_RNA (1)...(19): siRNA sense strand
agaagaagaugauaucagu

SEQ ID NO: 774213 - RNA, 19 nt, Homo sapiens
  misc_RNA (1)...(19): siRNA sense strand
caucauaucuguccauacu

SEQ ID NO: 774214 - RNA, 19 nt, Homo sapiens
  misc_RNA (1)...(19): siRNA sense strand
cgacaaaacccaugaauuu

SEQ ID NO: 774215 - RNA, 19 nt, Homo sapiens
  misc_RNA (1)...(19): siRNA sense strand
gcgcugaaauagcagauga

SEQ ID NO: 774216 - RNA, 19 nt, Homo sapiens
  misc_RNA (1)...(19): siRNA sense strand
gaagauggguuugguucug

SEQ ID NO: 774217 - RNA, 19 nt, Homo sapiens
  misc_RNA (1)...(19): siRNA sense strand
guguacagauugugacuuu

SEQ ID NO: 774218 - RNA, 19 nt, Homo sapiens
  misc_RNA (1)...(19): siRNA sense strand
ucaagcagcuggagguguu

SEQ ID NO: 774219 - RNA, 19 nt, Homo sapiens
  misc_RNA (1)...(19): siRNA sense strand
guuccugguucuacaguua

SEQ ID NO: 774220 - RNA, 19 nt, Homo sapiens
  misc_RNA (1)...(19): siRNA sense strand
ccacugaguuccaauaaac

SEQ ID NO: 774221 - RNA, 19 nt, Homo sapiens
  misc_RNA (1)...(19): siRNA sense strand
uaaacgacaugugauauca

SEQ ID NO: 774222 - RNA, 19 nt, Homo sapiens
  misc_RNA (1)...(19): siRNA sense strand
guacaccaguggacauuca

SEQ ID NO: 774223 - RNA, 19 nt, Homo sapiens
  misc_RNA (1)...(19): siRNA sense strand
cagaugaaguuuacaugga

SEQ ID NO: 774224 - RNA, 19 nt, Homo sapiens
  misc_RNA (1)...(19): siRNA sense strand
ucugaagacuacuuaauga

SEQ ID NO: 774225 - RNA, 19 nt, Homo sapiens
  misc_RNA (1)...(19): siRNA sense strand
cauaagagcaccaauucaa

SEQ ID NO: 774226 - RNA, 19 nt, Homo sapiens
  misc_RNA (1)...(19): siRNA sense strand
cacauuaagucuaaacaug

SEQ ID NO: 774227 - RNA, 19 nt, Homo sapiens
  misc_RNA (1)...(19): siRNA sense strand
cccaugaauuuacagaaua

SEQ ID NO: 774228 - RNA, 19 nt, Homo sapiens
  misc_RNA (1)...(19): siRNA sense strand
cuaugaaacugcagaacaa

SEQ ID NO: 774229 - RNA, 19 nt, Homo sapiens
  misc_RNA (1)...(19): siRNA sense strand
uccgauccauuuauucuua

SEQ ID NO: 774230 - RNA, 19 nt, Homo sapiens
  misc_RNA (1)...(19): siRNA sense strand
aagcugauguugccauuga

SEQ ID NO: 774231 - RNA, 19 nt, Homo sapiens
  misc_RNA (1)...(19): siRNA sense strand
ggccauauccuuucaguuc

SEQ ID NO: 774232 - RNA, 19 nt, Homo sapiens
  misc_RNA (1)...(19): siRNA sense strand
ugaggacucugauguuaau

SEQ ID NO: 774233 - RNA, 19 nt, Homo sapiens
  misc_RNA (1)...(19): siRNA sense strand
gaugaugggauaacucuug

SEQ ID NO: 774234 - RNA, 19 nt, Homo sapiens
  misc_RNA (1)...(19): siRNA sense strand
caagagaggauucagacaa

SEQ ID NO: 774235 - RNA, 19 nt, Homo sapiens
  misc_RNA (1)...(19): siRNA sense strand
cuaaagaucagccauugaa

SEQ ID NO: 774236 - RNA, 19 nt, Homo sapiens
  misc_RNA (1)...(19): siRNA sense strand
ccauggaccugauaucauc

SEQ ID NO: 774237 - RNA, 19 nt, Homo sapiens
  misc_RNA (1)...(19): siRNA sense strand
uagaacaugugguccaaga

SEQ ID NO: 774238 - RNA, 19 nt, Homo sapiens
  misc_RNA (1)...(19): siRNA sense strand
ccauaucagugucaguauu

SEQ ID NO: 774239 - RNA, 19 nt, Homo sapiens
  misc_RNA (1)...(19): siRNA sense strand
ucaaauuugugacggcauu

SEQ ID NO: 774240 - RNA, 19 nt, Homo sapiens
  misc_RNA (1)...(19): siRNA sense strand
cuugaggacucugauguua

SEQ ID NO: 774241 - RNA, 19 nt, Homo sapiens
  misc_RNA (1)...(19): siRNA sense strand
uaaagaagauggguuuggu

SEQ ID NO: 774242 - RNA, 19 nt, Homo sapiens
  misc_RNA (1)...(19): siRNA sense strand
agacugauguaguaacaga

SEQ ID NO: 774243 - RNA, 19 nt, Homo sapiens
  misc_RNA (1)...(19): siRNA sense strand
aaugugaggucugugauaa

SEQ ID NO: 774244 - RNA, 19 nt, Homo sapiens
  misc_RNA (1)...(19): siRNA sense strand
gaccauaagagcaccaauu

SEQ ID NO: 774245 - RNA, 19 nt, Homo sapiens
  misc_RNA (1)...(19): siRNA sense strand
gugcaaauacugugacuau

SEQ ID NO: 774246 - RNA, 19 nt, Homo sapiens
  misc_RNA (1)...(19): siRNA sense strand
agaaagccauaagcucaua

SEQ ID NO: 774247 - RNA, 19 nt, Homo sapiens
  misc_RNA (1)...(19): siRNA sense strand
gagaccauauuguuguuuc

SEQ ID NO: 774248 - RNA, 19 nt, Homo sapiens
  misc_RNA (1)...(19): siRNA sense strand
gcagcacaguaccuucaaa

SEQ ID NO: 774249 - RNA, 19 nt, Homo sapiens
  misc_RNA (1)...(19): siRNA sense strand
gaaauagcagaugaaguuu

SEQ ID NO: 774250 - RNA, 19 nt, Homo sapiens
  misc_RNA (1)...(19): siRNA sense strand
uaacagaaggugugauugu

SEQ ID NO: 774251 - RNA, 19 nt, Homo sapiens
  misc_RNA (1)...(19): siRNA sense strand
uaaaacauccgauccauuu

SEQ ID NO: 774252 - RNA, 19 nt, Homo sapiens
  misc_RNA (1)...(19): siRNA sense strand
ggaaggaagauuuaccaau

SEQ ID NO: 774253 - RNA, 19 nt, Homo sapiens
  misc_RNA (1)...(19): siRNA sense strand
cgaagaugaugaugaugau

SEQ ID NO: 774254 - RNA, 19 nt, Homo sapiens
  misc_RNA (1)...(19): siRNA sense strand
gcauuagaaagcagaagua

SEQ ID NO: 774255 - RNA, 19 nt, Homo sapiens
  misc_RNA (1)...(19): siRNA sense strand
guuugguucugaaguuaua

SEQ ID NO: 774256 - RNA, 19 nt, Homo sapiens
  misc_RNA (1)...(19): siRNA sense strand
ggguuugguucugaaguua

SEQ ID NO: 774257 - RNA, 19 nt, Homo sapiens
  misc_RNA (1)...(19): siRNA sense strand
ggcugaagaugauguugaa

SEQ ID NO: 774258 - RNA, 19 nt, Homo sapiens
  misc_RNA (1)...(19): siRNA sense strand
gaauacacacgaagauaca

SEQ ID NO: 774259 - RNA, 19 nt, Homo sapiens
  misc_RNA (1)...(19): siRNA sense strand
gaaaccaggcaguggcaaa

SEQ ID NO: 774260 - RNA, 19 nt, Homo sapiens
  misc_RNA (1)...(19): siRNA sense strand
gaaugcagcgggagaagau

SEQ ID NO: 774261 - RNA, 19 nt, Homo sapiens
  misc_RNA (1)...(19): siRNA sense strand
agaagaugcuaaagaagau

SEQ ID NO: 774262 - RNA, 19 nt, Homo sapiens
  misc_RNA (1)...(19): siRNA sense strand
caagaagggauuccgaaga

SEQ ID NO: 774263 - RNA, 19 nt, Homo sapiens
  misc_RNA (1)...(19): siRNA sense strand
cagugucaguauuguauuu

SEQ ID NO: 774264 - RNA, 19 nt, Homo sapiens
  misc_RNA (1)...(19): siRNA sense strand
gaaagcagaaguaguacag

SEQ ID NO: 774265 - RNA, 19 nt, Homo sapiens
  misc_RNA (1)...(19): siRNA sense strand
ggacucagcauuagaaagc

SEQ ID NO: 774266 - RNA, 19 nt, Homo sapiens
  misc_RNA (1)...(19): siRNA sense strand
gugaucacaucuugacuuc

SEQ ID NO: 774267 - RNA, 19 nt, Homo sapiens
  misc_RNA (1)...(19): siRNA sense strand
gcaagaauuuuccucaugu

SEQ ID NO: 774268 - RNA, 19 nt, Homo sapiens
  misc_RNA (1)...(19): siRNA sense strand
gugacggcauuaauacaaa

SEQ ID NO: 774269 - RNA, 19 nt, Homo sapiens
  misc_RNA (1)...(19): siRNA sense strand
agaugaaguuuacauggaa

SEQ ID NO: 774270 - RNA, 19 nt, Homo sapiens
  misc_RNA (1)...(19): siRNA sense strand
cuaauuacagaaaccguua

SEQ ID NO: 774271 - RNA, 19 nt, Homo sapiens
  misc_RNA (1)...(19): siRNA sense strand
aggagguucuuguaacuaa

SEQ ID NO: 774272 - RNA, 19 nt, Homo sapiens
  misc_RNA (1)...(19): siRNA sense strand
cagaauacacacgaagaua

SEQ ID NO: 774273 - RNA, 19 nt, Homo sapiens
  misc_RNA (1)...(19): siRNA sense strand
ucacagagacugauguagu

SEQ ID NO: 774274 - RNA, 19 nt, Homo sapiens
  misc_RNA (1)...(19): siRNA sense strand
gcauagugauauccauaag

SEQ ID NO: 774275 - RNA, 19 nt, Homo sapiens
  misc_RNA (1)...(19): siRNA sense strand
ccauauuguuguuucaguu

SEQ ID NO: 774276 - RNA, 19 nt, Homo sapiens
  misc_RNA (1)...(19): siRNA sense strand
uuacauggcaguuaaagau

SEQ ID NO: 774277 - RNA, 19 nt, Homo sapiens
  misc_RNA (1)...(19): siRNA sense strand
aagaagaugcuaaagaaga

SEQ ID NO: 774278 - RNA, 19 nt, Homo sapiens
  misc_RNA (1)...(19): siRNA sense strand
aaacauccgauccauuuau

SEQ ID NO: 774279 - RNA, 19 nt, Homo sapiens
  misc_RNA (1)...(19): siRNA sense strand
ccaauucaagugaccuuaa

SEQ ID NO: 774280 - RNA, 19 nt, Homo sapiens
  misc_RNA (1)...(19): siRNA sense strand
cauaaacaaagucgacaaa

SEQ ID NO: 774281 - RNA, 19 nt, Homo sapiens
  misc_RNA (1)...(19): siRNA sense strand
gaaagccauaagcucauaa

SEQ ID NO: 774282 - RNA, 19 nt, Homo sapiens
  misc_RNA (1)...(19): siRNA sense strand
gaagaagaugauaucaguu

SEQ ID NO: 774283 - RNA, 19 nt, Homo sapiens
  misc_RNA (1)...(19): siRNA sense strand
caauucaagugaccuuaag

SEQ ID NO: 774284 - RNA, 19 nt, Homo sapiens
  misc_RNA (1)...(19): siRNA sense strand
ggacauugauagccuguua

SEQ ID NO: 774285 - RNA, 19 nt, Homo sapiens
  misc_RNA (1)...(19): siRNA sense strand
gcaaugguguacagauauu

SEQ ID NO: 774286 - RNA, 19 nt, Homo sapiens
  misc_RNA (1)...(19): siRNA sense strand
caugaaagaucgguuauau

SEQ ID NO: 774287 - RNA, 19 nt, Homo sapiens
  misc_RNA (1)...(19): siRNA sense strand
agaaagggauuacaacaug

SEQ ID NO: 774288 - RNA, 19 nt, Homo sapiens
  misc_RNA (1)...(19): siRNA sense strand
cauuugauguggaugaaua

SEQ ID NO: 774289 - RNA, 19 nt, Homo sapiens
  misc_RNA (1)...(19): siRNA sense strand
guuuacacaugcugaaaua

SEQ ID NO: 774290 - RNA, 19 nt, Homo sapiens
  misc_RNA (1)...(19): siRNA sense strand
gauagccuguuauguaaug

SEQ ID NO: 774291 - RNA, 19 nt, Homo sapiens
  misc_RNA (1)...(19): siRNA sense strand
gagaaugguuauccucuuc

SEQ ID NO: 774292 - RNA, 19 nt, Homo sapiens
  misc_RNA (1)...(19): siRNA sense strand
gaagccuacuuuccuuauu

SEQ ID NO: 774293 - RNA, 19 nt, Homo sapiens
  misc_RNA (1)...(19): siRNA sense strand
ggaagaacagggacauuga

SEQ ID NO: 774294 - RNA, 19 nt, Homo sapiens
  misc_RNA (1)...(19): siRNA sense strand
gcugcaaacuaaacaagaa

SEQ ID NO: 774295 - RNA, 19 nt, Homo sapiens
  misc_RNA (1)...(19): siRNA sense strand
augaggagcuggucuauga

SEQ ID NO: 774296 - RNA, 19 nt, Homo sapiens
  misc_RNA (1)...(19): siRNA sense strand
uggcaaugguguacagaua

SEQ ID NO: 774297 - RNA, 19 nt, Homo sapiens
  misc_RNA (1)...(19): siRNA sense strand
cugcaaagcuggucuugga

SEQ ID NO: 774298 - RNA, 19 nt, Homo sapiens
  misc_RNA (1)...(19): siRNA sense strand
ccuaugcaguaaucuauuu

SEQ ID NO: 774299 - RNA, 19 nt, Homo sapiens
  misc_RNA (1)...(19): siRNA sense strand
ucauacaguuugucaagaa

SEQ ID NO: 774300 - RNA, 19 nt, Homo sapiens
  misc_RNA (1)...(19): siRNA sense strand
uaaagaagacaccagaaga

SEQ ID NO: 774301 - RNA, 19 nt, Homo sapiens
  misc_RNA (1)...(19): siRNA sense strand
uugauagccuguuauguaa

SEQ ID NO: 774302 - RNA, 19 nt, Homo sapiens
  misc_RNA (1)...(19): siRNA sense strand
gggauuacaacauggauuu

SEQ ID NO: 774303 - RNA, 19 nt, Homo sapiens
  misc_RNA (1)...(19): siRNA sense strand
ucaccauucucgacuguuu

SEQ ID NO: 774304 - RNA, 19 nt, Homo sapiens
  misc_RNA (1)...(19): siRNA sense strand
aagccuacuuuccuuauuu

SEQ ID NO: 774305 - RNA, 19 nt, Homo sapiens
  misc_RNA (1)...(19): siRNA sense strand
ugauguggaugaauaugaa

SEQ ID NO: 774306 - RNA, 19 nt, Homo sapiens
  misc_RNA (1)...(19): siRNA sense strand
gcacuaugaccucuucuuc

SEQ ID NO: 774307 - RNA, 19 nt, Homo sapiens
  misc_RNA (1)...(19): siRNA sense strand
aaagaagacaccagaagaa

SEQ ID NO: 774308 - RNA, 19 nt, Homo sapiens
  misc_RNA (1)...(19): siRNA sense strand
gcacaguaaauacccacua

SEQ ID NO: 774309 - RNA, 19 nt, Homo sapiens
  misc_RNA (1)...(19): siRNA sense strand
uaaugugacugcaguugug

SEQ ID NO: 774310 - RNA, 19 nt, Homo sapiens
  misc_RNA (1)...(19): siRNA sense strand
guucaugaaagaucgguua

SEQ ID NO: 774311 - RNA, 19 nt, Homo sapiens
  misc_RNA (1)...(19): siRNA sense strand
cacaguaaauacccacuau

SEQ ID NO: 774312 - RNA, 19 nt, Homo sapiens
  misc_RNA (1)...(19): siRNA sense strand
gaagaacagggacauugau

SEQ ID NO: 774313 - RNA, 19 nt, Homo sapiens
  misc_RNA (1)...(19): siRNA sense strand
auugauagccuguuaugua

SEQ ID NO: 774314 - RNA, 19 nt, Homo sapiens
  misc_RNA (1)...(19): siRNA sense strand
cauacaguuugucaagaaa

SEQ ID NO: 774315 - RNA, 19 nt, Homo sapiens
  misc_RNA (1)...(19): siRNA sense strand
gaacagggacauugauagc

SEQ ID NO: 774316 - RNA, 19 nt, Homo sapiens
  misc_RNA (1)...(19): siRNA sense strand
gaccucuucuucauagaug

SEQ ID NO: 774317 - RNA, 19 nt, Homo sapiens
  misc_RNA (1)...(19): siRNA sense strand
cuugugaguucaugaaaga

SEQ ID NO: 774318 - RNA, 19 nt, Homo sapiens
  misc_RNA (1)...(19): siRNA sense strand
gaggagcuggucuaugaaa

SEQ ID NO: 774319 - RNA, 19 nt, Homo sapiens
  misc_RNA (1)...(19): siRNA sense strand
uaaugaaacacuacagguu

SEQ ID NO: 774320 - RNA, 19 nt, Homo sapiens
  misc_RNA (1)...(19): siRNA sense strand
auucagggaugcuuccuuu

SEQ ID NO: 774321 - RNA, 19 nt, Homo sapiens
  misc_RNA (1)...(19): siRNA sense strand
aaacauggaacgauuugga

SEQ ID NO: 774322 - RNA, 19 nt, Homo sapiens
  misc_RNA (1)...(19): siRNA sense strand
gcacuuacaaucucaccau

SEQ ID NO: 774323 - RNA, 19 nt, Homo sapiens
  misc_RNA (1)...(19): siRNA sense strand
gaacauuaugagcgaguug

SEQ ID NO: 774324 - RNA, 19 nt, Homo sapiens
  misc_RNA (1)...(19): siRNA sense strand
ugagaaugguuauccucuu

SEQ ID NO: 774325 - RNA, 19 nt, Homo sapiens
  misc_RNA (1)...(19): siRNA sense strand
cacuacagguuuacacaug

SEQ ID NO: 774326 - RNA, 19 nt, Homo sapiens
  misc_RNA (1)...(19): siRNA sense strand
gaacuuggcaaugguguac

SEQ ID NO: 774327 - RNA, 19 nt, Homo sapiens
  misc_RNA (1)...(19): siRNA sense strand
cagggaugcuuccuuugga

SEQ ID NO: 774328 - RNA, 19 nt, Homo sapiens
  misc_RNA (1)...(19): siRNA sense strand
gagcuggucuaugaaaauu

SEQ ID NO: 774329 - RNA, 19 nt, Homo sapiens
  misc_RNA (1)...(19): siRNA sense strand
aagaacagggacauugaua

SEQ ID NO: 774330 - RNA, 19 nt, Homo sapiens
  misc_RNA (1)...(19): siRNA sense strand
gcaaaauugagaaugguua

SEQ ID NO: 774331 - RNA, 19 nt, Homo sapiens
  misc_RNA (1)...(19): siRNA sense strand
ccgcugaacuuggcaaugg

SEQ ID NO: 774332 - RNA, 19 nt, Homo sapiens
  misc_RNA (1)...(19): siRNA sense strand
cgagcacuaugaccucuuc

SEQ ID NO: 774333 - RNA, 19 nt, Homo sapiens
  misc_RNA (1)...(19): siRNA sense strand
aggcaaagcgcuucacaga

SEQ ID NO: 774334 - RNA, 19 nt, Homo sapiens
  misc_RNA (1)...(19): siRNA sense strand
caucgccguucacugcaaa

SEQ ID NO: 774335 - RNA, 19 nt, Homo sapiens
  misc_RNA (1)...(19): siRNA sense strand
uacaguuugucaagaaaga

SEQ ID NO: 774336 - RNA, 19 nt, Homo sapiens
  misc_RNA (1)...(19): siRNA sense strand
gcaguugugaggcuaaaca

SEQ ID NO: 774337 - RNA, 19 nt, Homo sapiens
  misc_RNA (1)...(19): siRNA sense strand
guggaugaauaugaacauu

SEQ ID NO: 774338 - RNA, 19 nt, Homo sapiens
  misc_RNA (1)...(19): siRNA sense strand
ccugaagccuacuuuccuu

SEQ ID NO: 774339 - RNA, 19 nt, Homo sapiens
  misc_RNA (1)...(19): siRNA sense strand
cuuacaaucucaccauucu

SEQ ID NO: 774340 - RNA, 19 nt, Homo sapiens
  misc_RNA (1)...(19): siRNA sense strand
uggccuagaugauaugucu

SEQ ID NO: 774341 - RNA, 19 nt, Homo sapiens
  misc_RNA (1)...(19): siRNA sense strand
ggcaaugguguacagauau

SEQ ID NO: 774342 - RNA, 19 nt, Homo sapiens
  misc_RNA (1)...(19): siRNA sense strand
cacaaaacauggaacgauu

SEQ ID NO: 774343 - RNA, 19 nt, Homo sapiens
  misc_RNA (1)...(19): siRNA sense strand
uuucuggccuagaugauau

SEQ ID NO: 774344 - RNA, 19 nt, Homo sapiens
  misc_RNA (1)...(19): siRNA sense strand
uccagugaaggaaguauua

SEQ ID NO: 774345 - RNA, 19 nt, Homo sapiens
  misc_RNA (1)...(19): siRNA sense strand
gacaacaucgugcgaaggu

SEQ ID NO: 774346 - RNA, 19 nt, Homo sapiens
  misc_RNA (1)...(19): siRNA sense strand
cagaaagggauuacaacau

SEQ ID NO: 774347 - RNA, 19 nt, Homo sapiens
  misc_RNA (1)...(19): siRNA sense strand
ucagaaagggauuacaaca

SEQ ID NO: 774348 - RNA, 19 nt, Homo sapiens
  misc_RNA (1)...(19): siRNA sense strand
gcacuccugucuggcucaa

SEQ ID NO: 774349 - RNA, 19 nt, Homo sapiens
  misc_RNA (1)...(19): siRNA sense strand
gcacacccagugacaacau

SEQ ID NO: 774350 - RNA, 19 nt, Homo sapiens
  misc_RNA (1)...(19): siRNA sense strand
gcuugugaguucaugaaag

SEQ ID NO: 774351 - RNA, 19 nt, Homo sapiens
  misc_RNA (1)...(19): siRNA sense strand
cugaacaucugugagaaca

SEQ ID NO: 774352 - RNA, 19 nt, Homo sapiens
  misc_RNA (1)...(19): siRNA sense strand
acacaugcugaaauaauug

SEQ ID NO: 774353 - RNA, 19 nt, Homo sapiens
  misc_RNA (1)...(19): siRNA sense strand
ccagugaaggaaguauuaa

SEQ ID NO: 774354 - RNA, 19 nt, Homo sapiens
  misc_RNA (1)...(19): siRNA sense strand
ucuauugguggaaaucuuu

SEQ ID NO: 774355 - RNA, 19 nt, Homo sapiens
  misc_RNA (1)...(19): siRNA sense strand
gcaaacuaaacaagaaacu

SEQ ID NO: 774356 - RNA, 19 nt, Homo sapiens
  misc_RNA (1)...(19): siRNA sense strand
gggcuugugaguucaugaa

SEQ ID NO: 774357 - RNA, 19 nt, Homo sapiens
  misc_RNA (1)...(19): siRNA sense strand
uggaagaacagggacauug

SEQ ID NO: 774358 - RNA, 19 nt, Homo sapiens
  misc_RNA (1)...(19): siRNA sense strand
uuaaagaagacaccagaag

SEQ ID NO: 774359 - RNA, 19 nt, Homo sapiens
  misc_RNA (1)...(19): siRNA sense strand
aaagauuuaugaggcaaag

SEQ ID NO: 774360 - RNA, 19 nt, Homo sapiens
  misc_RNA (1)...(19): siRNA sense strand
ucaugaaagaucgguuaua

SEQ ID NO: 774361 - RNA, 19 nt, Homo sapiens
  misc_RNA (1)...(19): siRNA sense strand
cacuuacaaucucaccauu

SEQ ID NO: 774362 - RNA, 19 nt, Homo sapiens
  misc_RNA (1)...(19): siRNA sense strand
aaucauacaguuugucaag

SEQ ID NO: 774363 - RNA, 19 nt, Homo sapiens
  misc_RNA (1)...(19): siRNA sense strand
aaucgaccauccagugaag

SEQ ID NO: 774364 - RNA, 19 nt, Homo sapiens
  misc_RNA (1)...(19): siRNA sense strand
ccggccaggcucuauuaua

SEQ ID NO: 774365 - RNA, 19 nt, Homo sapiens
  misc_RNA (1)...(19): siRNA sense strand
uugcuuggauuagaauaug

SEQ ID NO: 774366 - RNA, 19 nt, Homo sapiens
  misc_RNA (1)...(19): siRNA sense strand
ugaagccuacuuuccuuau

SEQ ID NO: 774367 - RNA, 19 nt, Homo sapiens
  misc_RNA (1)...(19): siRNA sense strand
cugaaauaauugcuuggau

SEQ ID NO: 774368 - RNA, 19 nt, Homo sapiens
  misc_RNA (1)...(19): siRNA sense strand
gaucgguuauauuuugcua

SEQ ID NO: 774369 - RNA, 19 nt, Homo sapiens
  misc_RNA (1)...(19): siRNA sense strand
cauaaugugacugcaguug

SEQ ID NO: 774370 - RNA, 19 nt, Homo sapiens
  misc_RNA (1)...(19): siRNA sense strand
gaaugguuauccucuucac

SEQ ID NO: 774371 - RNA, 19 nt, Homo sapiens
  misc_RNA (1)...(19): siRNA sense strand
gcugaaauaauugcuugga

SEQ ID NO: 774372 - RNA, 19 nt, Homo sapiens
  misc_RNA (1)...(19): siRNA sense strand
aaucggggcuugugaguuc

SEQ ID NO: 774373 - RNA, 19 nt, Homo sapiens
  misc_RNA (1)...(19): siRNA sense strand
gguuuacacaugcugaaau

SEQ ID NO: 774374 - RNA, 19 nt, Homo sapiens
  misc_RNA (1)...(19): siRNA sense strand
ggacauugauagccuguua

SEQ ID NO: 774375 - RNA, 19 nt, Homo sapiens
  misc_RNA (1)...(19): siRNA sense strand
gcaaugguguacagauauu

SEQ ID NO: 774376 - RNA, 19 nt, Homo sapiens
  misc_RNA (1)...(19): siRNA sense strand
caugaaagaucgguuauau

SEQ ID NO: 774377 - RNA, 19 nt, Homo sapiens
  misc_RNA (1)...(19): siRNA sense strand
agaaagggauuacaacaug

SEQ ID NO: 774378 - RNA, 19 nt, Homo sapiens
  misc_RNA (1)...(19): siRNA sense strand
cauuugauguggaugaaua

SEQ ID NO: 774379 - RNA, 19 nt, Homo sapiens
  misc_RNA (1)...(19): siRNA sense strand
guuuacacaugcugaaaua

SEQ ID NO: 774380 - RNA, 19 nt, Homo sapiens
  misc_RNA (1)...(19): siRNA sense strand
gauagccuguuauguaaug

SEQ ID NO: 774381 - RNA, 19 nt, Homo sapiens
  misc_RNA (1)...(19): siRNA sense strand
gagaaugguuauccucuuc

SEQ ID NO: 774382 - RNA, 19 nt, Homo sapiens
  misc_RNA (1)...(19): siRNA sense strand
gaagccuacuuuccuuauu

SEQ ID NO: 774383 - RNA, 19 nt, Homo sapiens
  misc_RNA (1)...(19): siRNA sense strand
ggaagaacagggacauuga

SEQ ID NO: 774384 - RNA, 19 nt, Homo sapiens
  misc_RNA (1)...(19): siRNA sense strand
gcugcaaacuaaacaagaa

SEQ ID NO: 774385 - RNA, 19 nt, Homo sapiens
  misc_RNA (1)...(19): siRNA sense strand
augaggagcuggucuauga

SEQ ID NO: 774386 - RNA, 19 nt, Homo sapiens
  misc_RNA (1)...(19): siRNA sense strand
uggcaaugguguacagaua

SEQ ID NO: 774387 - RNA, 19 nt, Homo sapiens
  misc_RNA (1)...(19): siRNA sense strand
cugcaaagcuggucuugga

SEQ ID NO: 774388 - RNA, 19 nt, Homo sapiens
  misc_RNA (1)...(19): siRNA sense strand
ccuaugcaguaaucuauuu

SEQ ID NO: 774389 - RNA, 19 nt, Homo sapiens
  misc_RNA (1)...(19): siRNA sense strand
ucauacaguuugucaagaa

SEQ ID NO: 774390 - RNA, 19 nt, Homo sapiens
  misc_RNA (1)...(19): siRNA sense strand
uaaagaagacaccagaaga

SEQ ID NO: 774391 - RNA, 19 nt, Homo sapiens
  misc_RNA (1)...(19): siRNA sense strand
uugauagccuguuauguaa

SEQ ID NO: 774392 - RNA, 19 nt, Homo sapiens
  misc_RNA (1)...(19): siRNA sense strand
gggauuacaacauggauuu

SEQ ID NO: 774393 - RNA, 19 nt, Homo sapiens
  misc_RNA (1)...(19): siRNA sense strand
ucaccauucucgacuguuu

SEQ ID NO: 774394 - RNA, 19 nt, Homo sapiens
  misc_RNA (1)...(19): siRNA sense strand
aagccuacuuuccuuauuu

SEQ ID NO: 774395 - RNA, 19 nt, Homo sapiens
  misc_RNA (1)...(19): siRNA sense strand
ugauguggaugaauaugaa

SEQ ID NO: 774396 - RNA, 19 nt, Homo sapiens
  misc_RNA (1)...(19): siRNA sense strand
gcacuaugaccucuucuuc

SEQ ID NO: 774397 - RNA, 19 nt, Homo sapiens
  misc_RNA (1)...(19): siRNA sense strand
aaagaagacaccagaagaa

SEQ ID NO: 774398 - RNA, 19 nt, Homo sapiens
  misc_RNA (1)...(19): siRNA sense strand
gcacaguaaauacccacua

SEQ ID NO: 774399 - RNA, 19 nt, Homo sapiens
  misc_RNA (1)...(19): siRNA sense strand
uaaugugacugcaguugug

SEQ ID NO: 774400 - RNA, 19 nt, Homo sapiens
  misc_RNA (1)...(19): siRNA sense strand
guucaugaaagaucgguua

SEQ ID NO: 774401 - RNA, 19 nt, Homo sapiens
  misc_RNA (1)...(19): siRNA sense strand
cacaguaaauacccacuau

SEQ ID NO: 774402 - RNA, 19 nt, Homo sapiens
  misc_RNA (1)...(19): siRNA sense strand
gaagaacagggacauugau

SEQ ID NO: 774403 - RNA, 19 nt, Homo sapiens
  misc_RNA (1)...(19): siRNA sense strand
auugauagccuguuaugua

SEQ ID NO: 774404 - RNA, 19 nt, Homo sapiens
  misc_RNA (1)...(19): siRNA sense strand
cauacaguuugucaagaaa

SEQ ID NO: 774405 - RNA, 19 nt, Homo sapiens
  misc_RNA (1)...(19): siRNA sense strand
gaacagggacauugauagc

SEQ ID NO: 774406 - RNA, 19 nt, Homo sapiens
  misc_RNA (1)...(19): siRNA sense strand
gaccucuucuucauagaug

SEQ ID NO: 774407 - RNA, 19 nt, Homo sapiens
  misc_RNA (1)...(19): siRNA sense strand
cuugugaguucaugaaaga

SEQ ID NO: 774408 - RNA, 19 nt, Homo sapiens
  misc_RNA (1)...(19): siRNA sense strand
gaggagcuggucuaugaaa

SEQ ID NO: 774409 - RNA, 19 nt, Homo sapiens
  misc_RNA (1)...(19): siRNA sense strand
uaaugaaacacuacagguu

SEQ ID NO: 774410 - RNA, 19 nt, Homo sapiens
  misc_RNA (1)...(19): siRNA sense strand
auucagggaugcuuccuuu

SEQ ID NO: 774411 - RNA, 19 nt, Homo sapiens
  misc_RNA (1)...(19): siRNA sense strand
aaacauggaacgauuugga

SEQ ID NO: 774412 - RNA, 19 nt, Homo sapiens
  misc_RNA (1)...(19): siRNA sense strand
gcacuuacaaucucaccau

SEQ ID NO: 774413 - RNA, 19 nt, Homo sapiens
  misc_RNA (1)...(19): siRNA sense strand
gaacauuaugagcgaguug

SEQ ID NO: 774414 - RNA, 19 nt, Homo sapiens
  misc_RNA (1)...(19): siRNA sense strand
ugagaaugguuauccucuu

SEQ ID NO: 774415 - RNA, 19 nt, Homo sapiens
  misc_RNA (1)...(19): siRNA sense strand
cacuacagguuuacacaug

SEQ ID NO: 774416 - RNA, 19 nt, Homo sapiens
  misc_RNA (1)...(19): siRNA sense strand
gaacuuggcaaugguguac

SEQ ID NO: 774417 - RNA, 19 nt, Homo sapiens
  misc_RNA (1)...(19): siRNA sense strand
cagggaugcuuccuuugga

SEQ ID NO: 774418 - RNA, 19 nt, Homo sapiens
  misc_RNA (1)...(19): siRNA sense strand
gagcuggucuaugaaaauu

SEQ ID NO: 774419 - RNA, 19 nt, Homo sapiens
  misc_RNA (1)...(19): siRNA sense strand
aagaacagggacauugaua

SEQ ID NO: 774420 - RNA, 19 nt, Homo sapiens
  misc_RNA (1)...(19): siRNA sense strand
gcaaaauugagaaugguua

SEQ ID NO: 774421 - RNA, 19 nt, Homo sapiens
  misc_RNA (1)...(19): siRNA sense strand
ccgcugaacuuggcaaugg

SEQ ID NO: 774422 - RNA, 19 nt, Homo sapiens
  misc_RNA (1)...(19): siRNA sense strand
cgagcacuaugaccucuuc

SEQ ID NO: 774423 - RNA, 19 nt, Homo sapiens
  misc_RNA (1)...(19): siRNA sense strand
aggcaaagcgcuucacaga

SEQ ID NO: 774424 - RNA, 19 nt, Homo sapiens
  misc_RNA (1)...(19): siRNA sense strand
caucgccguucacugcaaa

SEQ ID NO: 774425 - RNA, 19 nt, Homo sapiens
  misc_RNA (1)...(19): siRNA sense strand
uacaguuugucaagaaaga

SEQ ID NO: 774426 - RNA, 19 nt, Homo sapiens
  misc_RNA (1)...(19): siRNA sense strand
gcaguugugaggcuaaaca

SEQ ID NO: 774427 - RNA, 19 nt, Homo sapiens
  misc_RNA (1)...(19): siRNA sense strand
guggaugaauaugaacauu

SEQ ID NO: 774428 - RNA, 19 nt, Homo sapiens
  misc_RNA (1)...(19): siRNA sense strand
ccugaagccuacuuuccuu

SEQ ID NO: 774429 - RNA, 19 nt, Homo sapiens
  misc_RNA (1)...(19): siRNA sense strand
cuuacaaucucaccauucu

SEQ ID NO: 774430 - RNA, 19 nt, Homo sapiens
  misc_RNA (1)...(19): siRNA sense strand
uggccuagaugauaugucu

SEQ ID NO: 774431 - RNA, 19 nt, Homo sapiens
  misc_RNA (1)...(19): siRNA sense strand
ggcaaugguguacagauau

SEQ ID NO: 774432 - RNA, 19 nt, Homo sapiens
  misc_RNA (1)...(19): siRNA sense strand
cacaaaacauggaacgauu

SEQ ID NO: 774433 - RNA, 19 nt, Homo sapiens
  misc_RNA (1)...(19): siRNA sense strand
uuucuggccuagaugauau

SEQ ID NO: 774434 - RNA, 19 nt, Homo sapiens
  misc_RNA (1)...(19): siRNA sense strand
uccagugaaggaaguauua

SEQ ID NO: 774435 - RNA, 19 nt, Homo sapiens
  misc_RNA (1)...(19): siRNA sense strand
gacaacaucgugcgaaggu

SEQ ID NO: 774436 - RNA, 19 nt, Homo sapiens
  misc_RNA (1)...(19): siRNA sense strand
cagaaagggauuacaacau

SEQ ID NO: 774437 - RNA, 19 nt, Homo sapiens
  misc_RNA (1)...(19): siRNA sense strand
ucagaaagggauuacaaca

SEQ ID NO: 774438 - RNA, 19 nt, Homo sapiens
  misc_RNA (1)...(19): siRNA sense strand
gcacuccugucuggcucaa

SEQ ID NO: 774439 - RNA, 19 nt, Homo sapiens
  misc_RNA (1)...(19): siRNA sense strand
gcacacccagugacaacau

SEQ ID NO: 774440 - RNA, 19 nt, Homo sapiens
  misc_RNA (1)...(19): siRNA sense strand
gcuugugaguucaugaaag

SEQ ID NO: 774441 - RNA, 19 nt, Homo sapiens
  misc_RNA (1)...(19): siRNA sense strand
cugaacaucugugagaaca

SEQ ID NO: 774442 - RNA, 19 nt, Homo sapiens
  misc_RNA (1)...(19): siRNA sense strand
acacaugcugaaauaauug

SEQ ID NO: 774443 - RNA, 19 nt, Homo sapiens
  misc_RNA (1)...(19): siRNA sense strand
ccagugaaggaaguauuaa

SEQ ID NO: 774444 - RNA, 19 nt, Homo sapiens
  misc_RNA (1)...(19): siRNA sense strand
ucuauugguggaaaucuuu

SEQ ID NO: 774445 - RNA, 19 nt, Homo sapiens
  misc_RNA (1)...(19): siRNA sense strand
gcaaacuaaacaagaaacu

SEQ ID NO: 774446 - RNA, 19 nt, Homo sapiens
  misc_RNA (1)...(19): siRNA sense strand
gggcuugugaguucaugaa

SEQ ID NO: 774447 - RNA, 19 nt, Homo sapiens
  misc_RNA (1)...(19): siRNA sense strand
uggaagaacagggacauug

SEQ ID NO: 774448 - RNA, 19 nt, Homo sapiens
  misc_RNA (1)...(19): siRNA sense strand
uuaaagaagacaccagaag

SEQ ID NO: 774449 - RNA, 19 nt, Homo sapiens
  misc_RNA (1)...(19): siRNA sense strand
aaagauuuaugaggcaaag

SEQ ID NO: 774450 - RNA, 19 nt, Homo sapiens
  misc_RNA (1)...(19): siRNA sense strand
ucaugaaagaucgguuaua

SEQ ID NO: 774451 - RNA, 19 nt, Homo sapiens
  misc_RNA (1)...(19): siRNA sense strand
cacuuacaaucucaccauu

SEQ ID NO: 774452 - RNA, 19 nt, Homo sapiens
  misc_RNA (1)...(19): siRNA sense strand
aaucauacaguuugucaag

SEQ ID NO: 774453 - RNA, 19 nt, Homo sapiens
  misc_RNA (1)...(19): siRNA sense strand
aaucgaccauccagugaag

SEQ ID NO: 774454 - RNA, 19 nt, Homo sapiens
  misc_RNA (1)...(19): siRNA sense strand
ccggccaggcucuauuaua

SEQ ID NO: 774455 - RNA, 19 nt, Homo sapiens
  misc_RNA (1)...(19): siRNA sense strand
uugcuuggauuagaauaug

SEQ ID NO: 774456 - RNA, 19 nt, Homo sapiens
  misc_RNA (1)...(19): siRNA sense strand
ugaagccuacuuuccuuau

SEQ ID NO: 774457 - RNA, 19 nt, Homo sapiens
  misc_RNA (1)...(19): siRNA sense strand
cugaaauaauugcuuggau

SEQ ID NO: 774458 - RNA, 19 nt, Homo sapiens
  misc_RNA (1)...(19): siRNA sense strand
gaucgguuauauuuugcua

SEQ ID NO: 774459 - RNA, 19 nt, Homo sapiens
  misc_RNA (1)...(19): siRNA sense strand
cauaaugugacugcaguug

SEQ ID NO: 774460 - RNA, 19 nt, Homo sapiens
  misc_RNA (1)...(19): siRNA sense strand
gaaugguuauccucuucac

SEQ ID NO: 774461 - RNA, 19 nt, Homo sapiens
  misc_RNA (1)...(19): siRNA sense strand
gcugaaauaauugcuugga

SEQ ID NO: 774462 - RNA, 19 nt, Homo sapiens
  misc_RNA (1)...(19): siRNA sense strand
aaucggggcuugugaguuc

SEQ ID NO: 774463 - RNA, 19 nt, Homo sapiens
  misc_RNA (1)...(19): siRNA sense strand
gguuuacacaugcugaaau

SEQ ID NO: 774464 - RNA, 19 nt, Homo sapiens
  misc_RNA (1)...(19): siRNA sense strand
ggacauugauagccuguua

SEQ ID NO: 774465 - RNA, 19 nt, Homo sapiens
  misc_RNA (1)...(19): siRNA sense strand
gcaaugguguacagauauu

SEQ ID NO: 774466 - RNA, 19 nt, Homo sapiens
  misc_RNA (1)...(19): siRNA sense strand
caugaaagaucgguuauau

SEQ ID NO: 774467 - RNA, 19 nt, Homo sapiens
  misc_RNA (1)...(19): siRNA sense strand
agaaagggauuacaacaug

SEQ ID NO: 774468 - RNA, 19 nt, Homo sapiens
  misc_RNA (1)...(19): siRNA sense strand
cauuugauguggaugaaua

SEQ ID NO: 774469 - RNA, 19 nt, Homo sapiens
  misc_RNA (1)...(19): siRNA sense strand
guuuacacaugcugaaaua

SEQ ID NO: 774470 - RNA, 19 nt, Homo sapiens
  misc_RNA (1)...(19): siRNA sense strand
gauagccuguuauguaaug

SEQ ID NO: 774471 - RNA, 19 nt, Homo sapiens
  misc_RNA (1)...(19): siRNA sense strand
gagaaugguuauccucuuc

SEQ ID NO: 774472 - RNA, 19 nt, Homo sapiens
  misc_RNA (1)...(19): siRNA sense strand
gaagccuacuuuccuuauu

SEQ ID NO: 774473 - RNA, 19 nt, Homo sapiens
  misc_RNA (1)...(19): siRNA sense strand
ggaagaacagggacauuga

SEQ ID NO: 774474 - RNA, 19 nt, Homo sapiens
  misc_RNA (1)...(19): siRNA sense strand
gcugcaaacuaaacaagaa

SEQ ID NO: 774475 - RNA, 19 nt, Homo sapiens
  misc_RNA (1)...(19): siRNA sense strand
augaggagcuggucuauga

SEQ ID NO: 774476 - RNA, 19 nt, Homo sapiens
  misc_RNA (1)...(19): siRNA sense strand
uggcaaugguguacagaua

SEQ ID NO: 774477 - RNA, 19 nt, Homo sapiens
  misc_RNA (1)...(19): siRNA sense strand
cugcaaagcuggucuugga

SEQ ID NO: 774478 - RNA, 19 nt, Homo sapiens
  misc_RNA (1)...(19): siRNA sense strand
ccuaugcaguaaucuauuu

SEQ ID NO: 774479 - RNA, 19 nt, Homo sapiens
  misc_RNA (1)...(19): siRNA sense strand
ucauacaguuugucaagaa

SEQ ID NO: 774480 - RNA, 19 nt, Homo sapiens
  misc_RNA (1)...(19): siRNA sense strand
uaaagaagacaccagaaga

SEQ ID NO: 774481 - RNA, 19 nt, Homo sapiens
  misc_RNA (1)...(19): siRNA sense strand
uugauagccuguuauguaa

SEQ ID NO: 774482 - RNA, 19 nt, Homo sapiens
  misc_RNA (1)...(19): siRNA sense strand
gggauuacaacauggauuu

SEQ ID NO: 774483 - RNA, 19 nt, Homo sapiens
  misc_RNA (1)...(19): siRNA sense strand
ucaccauucucgacuguuu

SEQ ID NO: 774484 - RNA, 19 nt, Homo sapiens
  misc_RNA (1)...(19): siRNA sense strand
aagccuacuuuccuuauuu

SEQ ID NO: 774485 - RNA, 19 nt, Homo sapiens
  misc_RNA (1)...(19): siRNA sense strand
ugauguggaugaauaugaa

SEQ ID NO: 774486 - RNA, 19 nt, Homo sapiens
  misc_RNA (1)...(19): siRNA sense strand
gcacuaugaccucuucuuc

SEQ ID NO: 774487 - RNA, 19 nt, Homo sapiens
  misc_RNA (1)...(19): siRNA sense strand
aaagaagacaccagaagaa

SEQ ID NO: 774488 - RNA, 19 nt, Homo sapiens
  misc_RNA (1)...(19): siRNA sense strand
gcacaguaaauacccacua

SEQ ID NO: 774489 - RNA, 19 nt, Homo sapiens
  misc_RNA (1)...(19): siRNA sense strand
uaaugugacugcaguugug

SEQ ID NO: 774490 - RNA, 19 nt, Homo sapiens
  misc_RNA (1)...(19): siRNA sense strand
guucaugaaagaucgguua

SEQ ID NO: 774491 - RNA, 19 nt, Homo sapiens
  misc_RNA (1)...(19): siRNA sense strand
cacaguaaauacccacuau

SEQ ID NO: 774492 - RNA, 19 nt, Homo sapiens
  misc_RNA (1)...(19): siRNA sense strand
gaagaacagggacauugau

SEQ ID NO: 774493 - RNA, 19 nt, Homo sapiens
  misc_RNA (1)...(19): siRNA sense strand
auugauagccuguuaugua

SEQ ID NO: 774494 - RNA, 19 nt, Homo sapiens
  misc_RNA (1)...(19): siRNA sense strand
cauacaguuugucaagaaa

SEQ ID NO: 774495 - RNA, 19 nt, Homo sapiens
  misc_RNA (1)...(19): siRNA sense strand
gaacagggacauugauagc

SEQ ID NO: 774496 - RNA, 19 nt, Homo sapiens
  misc_RNA (1)...(19): siRNA sense strand
gaccucuucuucauagaug

SEQ ID NO: 774497 - RNA, 19 nt, Homo sapiens
  misc_RNA (1)...(19): siRNA sense strand
cuugugaguucaugaaaga

SEQ ID NO: 774498 - RNA, 19 nt, Homo sapiens
  misc_RNA (1)...(19): siRNA sense strand
gaggagcuggucuaugaaa

SEQ ID NO: 774499 - RNA, 19 nt, Homo sapiens
  misc_RNA (1)...(19): siRNA sense strand
uaaugaaacacuacagguu

SEQ ID NO: 774500 - RNA, 19 nt, Homo sapiens
  misc_RNA (1)...(19): siRNA sense strand
auucagggaugcuuccuuu

SEQ ID NO: 774501 - RNA, 19 nt, Homo sapiens
  misc_RNA (1)...(19): siRNA sense strand
aaacauggaacgauuugga

SEQ ID NO: 774502 - RNA, 19 nt, Homo sapiens
  misc_RNA (1)...(19): siRNA sense strand
gcacuuacaaucucaccau

SEQ ID NO: 774503 - RNA, 19 nt, Homo sapiens
  misc_RNA (1)...(19): siRNA sense strand
gaacauuaugagcgaguug

SEQ ID NO: 774504 - RNA, 19 nt, Homo sapiens
  misc_RNA (1)...(19): siRNA sense strand
ugagaaugguuauccucuu

SEQ ID NO: 774505 - RNA, 19 nt, Homo sapiens
  misc_RNA (1)...(19): siRNA sense strand
cacuacagguuuacacaug

SEQ ID NO: 774506 - RNA, 19 nt, Homo sapiens
  misc_RNA (1)...(19): siRNA sense strand
gaacuuggcaaugguguac

SEQ ID NO: 774507 - RNA, 19 nt, Homo sapiens
  misc_RNA (1)...(19): siRNA sense strand
cagggaugcuuccuuugga

SEQ ID NO: 774508 - RNA, 19 nt, Homo sapiens
  misc_RNA (1)...(19): siRNA sense strand
gagcuggucuaugaaaauu

SEQ ID NO: 774509 - RNA, 19 nt, Homo sapiens
  misc_RNA (1)...(19): siRNA sense strand
aagaacagggacauugaua

SEQ ID NO: 774510 - RNA, 19 nt, Homo sapiens
  misc_RNA (1)...(19): siRNA sense strand
gcaaaauugagaaugguua

SEQ ID NO: 774511 - RNA, 19 nt, Homo sapiens
  misc_RNA (1)...(19): siRNA sense strand
ccgcugaacuuggcaaugg

SEQ ID NO: 774512 - RNA, 19 nt, Homo sapiens
  misc_RNA (1)...(19): siRNA sense strand
cgagcacuaugaccucuuc

SEQ ID NO: 774513 - RNA, 19 nt, Homo sapiens
  misc_RNA (1)...(19): siRNA sense strand
aggcaaagcgcuucacaga

SEQ ID NO: 774514 - RNA, 19 nt, Homo sapiens
  misc_RNA (1)...(19): siRNA sense strand
caucgccguucacugcaaa

SEQ ID NO: 774515 - RNA, 19 nt, Homo sapiens
  misc_RNA (1)...(19): siRNA sense strand
uacaguuugucaagaaaga

SEQ ID NO: 774516 - RNA, 19 nt, Homo sapiens
  misc_RNA (1)...(19): siRNA sense strand
gcaguugugaggcuaaaca

SEQ ID NO: 774517 - RNA, 19 nt, Homo sapiens
  misc_RNA (1)...(19): siRNA sense strand
guggaugaauaugaacauu

SEQ ID NO: 774518 - RNA, 19 nt, Homo sapiens
  misc_RNA (1)...(19): siRNA sense strand
ccugaagccuacuuuccuu

SEQ ID NO: 774519 - RNA, 19 nt, Homo sapiens
  misc_RNA (1)...(19): siRNA sense strand
cuuacaaucucaccauucu

SEQ ID NO: 774520 - RNA, 19 nt, Homo sapiens
  misc_RNA (1)...(19): siRNA sense strand
uggccuagaugauaugucu

SEQ ID NO: 774521 - RNA, 19 nt, Homo sapiens
  misc_RNA (1)...(19): siRNA sense strand
ggcaaugguguacagauau

SEQ ID NO: 774522 - RNA, 19 nt, Homo sapiens
  misc_RNA (1)...(19): siRNA sense strand
cacaaaacauggaacgauu

SEQ ID NO: 774523 - RNA, 19 nt, Homo sapiens
  misc_RNA (1)...(19): siRNA sense strand
uuucuggccuagaugauau

SEQ ID NO: 774524 - RNA, 19 nt, Homo sapiens
  misc_RNA (1)...(19): siRNA sense strand
uccagugaaggaaguauua

SEQ ID NO: 774525 - RNA, 19 nt, Homo sapiens
  misc_RNA (1)...(19): siRNA sense strand
gacaacaucgugcgaaggu

SEQ ID NO: 774526 - RNA, 19 nt, Homo sapiens
  misc_RNA (1)...(19): siRNA sense strand
cagaaagggauuacaacau

SEQ ID NO: 774527 - RNA, 19 nt, Homo sapiens
  misc_RNA (1)...(19): siRNA sense strand
ucagaaagggauuacaaca

SEQ ID NO: 774528 - RNA, 19 nt, Homo sapiens
  misc_RNA (1)...(19): siRNA sense strand
gcacuccugucuggcucaa

SEQ ID NO: 774529 - RNA, 19 nt, Homo sapiens
  misc_RNA (1)...(19): siRNA sense strand
gcacacccagugacaacau

SEQ ID NO: 774530 - RNA, 19 nt, Homo sapiens
  misc_RNA (1)...(19): siRNA sense strand
gcuugugaguucaugaaag

SEQ ID NO: 774531 - RNA, 19 nt, Homo sapiens
  misc_RNA (1)...(19): siRNA sense strand
cugaacaucugugagaaca

SEQ ID NO: 774532 - RNA, 19 nt, Homo sapiens
  misc_RNA (1)...(19): siRNA sense strand
acacaugcugaaauaauug

SEQ ID NO: 774533 - RNA, 19 nt, Homo sapiens
  misc_RNA (1)...(19): siRNA sense strand
ccagugaaggaaguauuaa

SEQ ID NO: 774534 - RNA, 19 nt, Homo sapiens
  misc_RNA (1)...(19): siRNA sense strand
ucuauugguggaaaucuuu

SEQ ID NO: 774535 - RNA, 19 nt, Homo sapiens
  misc_RNA (1)...(19): siRNA sense strand
gcaaacuaaacaagaaacu

SEQ ID NO: 774536 - RNA, 19 nt, Homo sapiens
  misc_RNA (1)...(19): siRNA sense strand
gggcuugugaguucaugaa

SEQ ID NO: 774537 - RNA, 19 nt, Homo sapiens
  misc_RNA (1)...(19): siRNA sense strand
uggaagaacagggacauug

SEQ ID NO: 774538 - RNA, 19 nt, Homo sapiens
  misc_RNA (1)...(19): siRNA sense strand
uuaaagaagacaccagaag

SEQ ID NO: 774539 - RNA, 19 nt, Homo sapiens
  misc_RNA (1)...(19): siRNA sense strand
aaagauuuaugaggcaaag

SEQ ID NO: 774540 - RNA, 19 nt, Homo sapiens
  misc_RNA (1)...(19): siRNA sense strand
ucaugaaagaucgguuaua

SEQ ID NO: 774541 - RNA, 19 nt, Homo sapiens
  misc_RNA (1)...(19): siRNA sense strand
cacuuacaaucucaccauu

SEQ ID NO: 774542 - RNA, 19 nt, Homo sapiens
  misc_RNA (1)...(19): siRNA sense strand
aaucauacaguuugucaag

SEQ ID NO: 774543 - RNA, 19 nt, Homo sapiens
  misc_RNA (1)...(19): siRNA sense strand
aaucgaccauccagugaag

SEQ ID NO: 774544 - RNA, 19 nt, Homo sapiens
  misc_RNA (1)...(19): siRNA sense strand
ccggccaggcucuauuaua

SEQ ID NO: 774545 - RNA, 19 nt, Homo sapiens
  misc_RNA (1)...(19): siRNA sense strand
uugcuuggauuagaauaug

SEQ ID NO: 774546 - RNA, 19 nt, Homo sapiens
  misc_RNA (1)...(19): siRNA sense strand
ugaagccuacuuuccuuau

SEQ ID NO: 774547 - RNA, 19 nt, Homo sapiens
  misc_RNA (1)...(19): siRNA sense strand
cugaaauaauugcuuggau

SEQ ID NO: 774548 - RNA, 19 nt, Homo sapiens
  misc_RNA (1)...(19): siRNA sense strand
gaucgguuauauuuugcua

SEQ ID NO: 774549 - RNA, 19 nt, Homo sapiens
  misc_RNA (1)...(19): siRNA sense strand
cauaaugugacugcaguug

SEQ ID NO: 774550 - RNA, 19 nt, Homo sapiens
  misc_RNA (1)...(19): siRNA sense strand
gaaugguuauccucuucac

SEQ ID NO: 774551 - RNA, 19 nt, Homo sapiens
  misc_RNA (1)...(19): siRNA sense strand
gcugaaauaauugcuugga

SEQ ID NO: 774552 - RNA, 19 nt, Homo sapiens
  misc_RNA (1)...(19): siRNA sense strand
aaucggggcuugugaguuc

SEQ ID NO: 774553 - RNA, 19 nt, Homo sapiens
  misc_RNA (1)...(19): siRNA sense strand
gguuuacacaugcugaaau

SEQ ID NO: 774554 - RNA, 19 nt, Homo sapiens
  misc_RNA (1)...(19): siRNA sense strand
ggacauugauagccuguua

SEQ ID NO: 774555 - RNA, 19 nt, Homo sapiens
  misc_RNA (1)...(19): siRNA sense strand
gcaaugguguacagauauu

SEQ ID NO: 774556 - RNA, 19 nt, Homo sapiens
  misc_RNA (1)...(19): siRNA sense strand
caugaaagaucgguuauau

SEQ ID NO: 774557 - RNA, 19 nt, Homo sapiens
  misc_RNA (1)...(19): siRNA sense strand
agaaagggauuacaacaug

SEQ ID NO: 774558 - RNA, 19 nt, Homo sapiens
  misc_RNA (1)...(19): siRNA sense strand
cauuugauguggaugaaua

SEQ ID NO: 774559 - RNA, 19 nt, Homo sapiens
  misc_RNA (1)...(19): siRNA sense strand
guuuacacaugcugaaaua

SEQ ID NO: 774560 - RNA, 19 nt, Homo sapiens
  misc_RNA (1)...(19): siRNA sense strand
gauagccuguuauguaaug

SEQ ID NO: 774561 - RNA, 19 nt, Homo sapiens
  misc_RNA (1)...(19): siRNA sense strand
gagaaugguuauccucuuc

SEQ ID NO: 774562 - RNA, 19 nt, Homo sapiens
  misc_RNA (1)...(19): siRNA sense strand
gaagccuacuuuccuuauu

SEQ ID NO: 774563 - RNA, 19 nt, Homo sapiens
  misc_RNA (1)...(19): siRNA sense strand
ggaagaacagggacauuga

SEQ ID NO: 774564 - RNA, 19 nt, Homo sapiens
  misc_RNA (1)...(19): siRNA sense strand
gcugcaaacuaaacaagaa

SEQ ID NO: 774565 - RNA, 19 nt, Homo sapiens
  misc_RNA (1)...(19): siRNA sense strand
augaggagcuggucuauga

SEQ ID NO: 774566 - RNA, 19 nt, Homo sapiens
  misc_RNA (1)...(19): siRNA sense strand
uggcaaugguguacagaua

SEQ ID NO: 774567 - RNA, 19 nt, Homo sapiens
  misc_RNA (1)...(19): siRNA sense strand
cugcaaagcuggucuugga

SEQ ID NO: 774568 - RNA, 19 nt, Homo sapiens
  misc_RNA (1)...(19): siRNA sense strand
ccuaugcaguaaucuauuu

SEQ ID NO: 774569 - RNA, 19 nt, Homo sapiens
  misc_RNA (1)...(19): siRNA sense strand
ucauacaguuugucaagaa

SEQ ID NO: 774570 - RNA, 19 nt, Homo sapiens
  misc_RNA (1)...(19): siRNA sense strand
uaaagaagacaccagaaga

SEQ ID NO: 774571 - RNA, 19 nt, Homo sapiens
  misc_RNA (1)...(19): siRNA sense strand
uugauagccuguuauguaa

SEQ ID NO: 774572 - RNA, 19 nt, Homo sapiens
  misc_RNA (1)...(19): siRNA sense strand
gggauuacaacauggauuu

SEQ ID NO: 774573 - RNA, 19 nt, Homo sapiens
  misc_RNA (1)...(19): siRNA sense strand
ucaccauucucgacuguuu

SEQ ID NO: 774574 - RNA, 19 nt, Homo sapiens
  misc_RNA (1)...(19): siRNA sense strand
aagccuacuuuccuuauuu

SEQ ID NO: 774575 - RNA, 19 nt, Homo sapiens
  misc_RNA (1)...(19): siRNA sense strand
ugauguggaugaauaugaa

SEQ ID NO: 774576 - RNA, 19 nt, Homo sapiens
  misc_RNA (1)...(19): siRNA sense strand
gcacuaugaccucuucuuc

SEQ ID NO: 774577 - RNA, 19 nt, Homo sapiens
  misc_RNA (1)...(19): siRNA sense strand
aaagaagacaccagaagaa

SEQ ID NO: 774578 - RNA, 19 nt, Homo sapiens
  misc_RNA (1)...(19): siRNA sense strand
gcacaguaaauacccacua

SEQ ID NO: 774579 - RNA, 19 nt, Homo sapiens
  misc_RNA (1)...(19): siRNA sense strand
uaaugugacugcaguugug

SEQ ID NO: 774580 - RNA, 19 nt, Homo sapiens
  misc_RNA (1)...(19): siRNA sense strand
guucaugaaagaucgguua

SEQ ID NO: 774581 - RNA, 19 nt, Homo sapiens
  misc_RNA (1)...(19): siRNA sense strand
cacaguaaauacccacuau

SEQ ID NO: 774582 - RNA, 19 nt, Homo sapiens
  misc_RNA (1)...(19): siRNA sense strand
gaagaacagggacauugau

SEQ ID NO: 774583 - RNA, 19 nt, Homo sapiens
  misc_RNA (1)...(19): siRNA sense strand
auugauagccuguuaugua

SEQ ID NO: 774584 - RNA, 19 nt, Homo sapiens
  misc_RNA (1)...(19): siRNA sense strand
cauacaguuugucaagaaa

SEQ ID NO: 774585 - RNA, 19 nt, Homo sapiens
  misc_RNA (1)...(19): siRNA sense strand
gaacagggacauugauagc

SEQ ID NO: 774586 - RNA, 19 nt, Homo sapiens
  misc_RNA (1)...(19): siRNA sense strand
gaccucuucuucauagaug

SEQ ID NO: 774587 - RNA, 19 nt, Homo sapiens
  misc_RNA (1)...(19): siRNA sense strand
cuugugaguucaugaaaga

SEQ ID NO: 774588 - RNA, 19 nt, Homo sapiens
  misc_RNA (1)...(19): siRNA sense strand
gaggagcuggucuaugaaa

SEQ ID NO: 774589 - RNA, 19 nt, Homo sapiens
  misc_RNA (1)...(19): siRNA sense strand
uaaugaaacacuacagguu

SEQ ID NO: 774590 - RNA, 19 nt, Homo sapiens
  misc_RNA (1)...(19): siRNA sense strand
auucagggaugcuuccuuu

SEQ ID NO: 774591 - RNA, 19 nt, Homo sapiens
  misc_RNA (1)...(19): siRNA sense strand
aaacauggaacgauuugga

SEQ ID NO: 774592 - RNA, 19 nt, Homo sapiens
  misc_RNA (1)...(19): siRNA sense strand
gcacuuacaaucucaccau

SEQ ID NO: 774593 - RNA, 19 nt, Homo sapiens
  misc_RNA (1)...(19): siRNA sense strand
gaacauuaugagcgaguug

SEQ ID NO: 774594 - RNA, 19 nt, Homo sapiens
  misc_RNA (1)...(19): siRNA sense strand
ugagaaugguuauccucuu

SEQ ID NO: 774595 - RNA, 19 nt, Homo sapiens
  misc_RNA (1)...(19): siRNA sense strand
cacuacagguuuacacaug

SEQ ID NO: 774596 - RNA, 19 nt, Homo sapiens
  misc_RNA (1)...(19): siRNA sense strand
gaacuuggcaaugguguac

SEQ ID NO: 774597 - RNA, 19 nt, Homo sapiens
  misc_RNA (1)...(19): siRNA sense strand
cagggaugcuuccuuugga

SEQ ID NO: 774598 - RNA, 19 nt, Homo sapiens
  misc_RNA (1)...(19): siRNA sense strand
gagcuggucuaugaaaauu

SEQ ID NO: 774599 - RNA, 19 nt, Homo sapiens
  misc_RNA (1)...(19): siRNA sense strand
aagaacagggacauugaua

SEQ ID NO: 774600 - RNA, 19 nt, Homo sapiens
  misc_RNA (1)...(19): siRNA sense strand
gcaaaauugagaaugguua

SEQ ID NO: 774601 - RNA, 19 nt, Homo sapiens
  misc_RNA (1)...(19): siRNA sense strand
ccgcugaacuuggcaaugg

SEQ ID NO: 774602 - RNA, 19 nt, Homo sapiens
  misc_RNA (1)...(19): siRNA sense strand
cgagcacuaugaccucuuc

SEQ ID NO: 774603 - RNA, 19 nt, Homo sapiens
  misc_RNA (1)...(19): siRNA sense strand
aggcaaagcgcuucacaga

SEQ ID NO: 774604 - RNA, 19 nt, Homo sapiens
  misc_RNA (1)...(19): siRNA sense strand
caucgccguucacugcaaa

SEQ ID NO: 774605 - RNA, 19 nt, Homo sapiens
  misc_RNA (1)...(19): siRNA sense strand
uacaguuugucaagaaaga

SEQ ID NO: 774606 - RNA, 19 nt, Homo sapiens
  misc_RNA (1)...(19): siRNA sense strand
gcaguugugaggcuaaaca

SEQ ID NO: 774607 - RNA, 19 nt, Homo sapiens
  misc_RNA (1)...(19): siRNA sense strand
guggaugaauaugaacauu

SEQ ID NO: 774608 - RNA, 19 nt, Homo sapiens
  misc_RNA (1)...(19): siRNA sense strand
ccugaagccuacuuuccuu

SEQ ID NO: 774609 - RNA, 19 nt, Homo sapiens
  misc_RNA (1)...(19): siRNA sense strand
cuuacaaucucaccauucu

SEQ ID NO: 774610 - RNA, 19 nt, Homo sapiens
  misc_RNA (1)...(19): siRNA sense strand
uggccuagaugauaugucu

SEQ ID NO: 774611 - RNA, 19 nt, Homo sapiens
  misc_RNA (1)...(19): siRNA sense strand
ggcaaugguguacagauau

SEQ ID NO: 774612 - RNA, 19 nt, Homo sapiens
  misc_RNA (1)...(19): siRNA sense strand
cacaaaacauggaacgauu

SEQ ID NO: 774613 - RNA, 19 nt, Homo sapiens
  misc_RNA (1)...(19): siRNA sense strand
uuucuggccuagaugauau

SEQ ID NO: 774614 - RNA, 19 nt, Homo sapiens
  misc_RNA (1)...(19): siRNA sense strand
uccagugaaggaaguauua

SEQ ID NO: 774615 - RNA, 19 nt, Homo sapiens
  misc_RNA (1)...(19): siRNA sense strand
gacaacaucgugcgaaggu

SEQ ID NO: 774616 - RNA, 19 nt, Homo sapiens
  misc_RNA (1)...(19): siRNA sense strand
cagaaagggauuacaacau

SEQ ID NO: 774617 - RNA, 19 nt, Homo sapiens
  misc_RNA (1)...(19): siRNA sense strand
ucagaaagggauuacaaca

SEQ ID NO: 774618 - RNA, 19 nt, Homo sapiens
  misc_RNA (1)...(19): siRNA sense strand
gcacuccugucuggcucaa

SEQ ID NO: 774619 - RNA, 19 nt, Homo sapiens
  misc_RNA (1)...(19): siRNA sense strand
gcacacccagugacaacau

SEQ ID NO: 774620 - RNA, 19 nt, Homo sapiens
  misc_RNA (1)...(19): siRNA sense strand
gcuugugaguucaugaaag

SEQ ID NO: 774621 - RNA, 19 nt, Homo sapiens
  misc_RNA (1)...(19): siRNA sense strand
cugaacaucugugagaaca

SEQ ID NO: 774622 - RNA, 19 nt, Homo sapiens
  misc_RNA (1)...(19): siRNA sense strand
acacaugcugaaauaauug

SEQ ID NO: 774623 - RNA, 19 nt, Homo sapiens
  misc_RNA (1)...(19): siRNA sense strand
ccagugaaggaaguauuaa

SEQ ID NO: 774624 - RNA, 19 nt, Homo sapiens
  misc_RNA (1)...(19): siRNA sense strand
ucuauugguggaaaucuuu

SEQ ID NO: 774625 - RNA, 19 nt, Homo sapiens
  misc_RNA (1)...(19): siRNA sense strand
gcaaacuaaacaagaaacu

SEQ ID NO: 774626 - RNA, 19 nt, Homo sapiens
  misc_RNA (1)...(19): siRNA sense strand
gggcuugugaguucaugaa

SEQ ID NO: 774627 - RNA, 19 nt, Homo sapiens
  misc_RNA (1)...(19): siRNA sense strand
uggaagaacagggacauug

SEQ ID NO: 774628 - RNA, 19 nt, Homo sapiens
  misc_RNA (1)...(19): siRNA sense strand
uuaaagaagacaccagaag

SEQ ID NO: 774629 - RNA, 19 nt, Homo sapiens
  misc_RNA (1)...(19): siRNA sense strand
aaagauuuaugaggcaaag

SEQ ID NO: 774630 - RNA, 19 nt, Homo sapiens
  misc_RNA (1)...(19): siRNA sense strand
ucaugaaagaucgguuaua

SEQ ID NO: 774631 - RNA, 19 nt, Homo sapiens
  misc_RNA (1)...(19): siRNA sense strand
cacuuacaaucucaccauu

SEQ ID NO: 774632 - RNA, 19 nt, Homo sapiens
  misc_RNA (1)...(19): siRNA sense strand
aaucauacaguuugucaag

SEQ ID NO: 774633 - RNA, 19 nt, Homo sapiens
  misc_RNA (1)...(19): siRNA sense strand
aaucgaccauccagugaag

SEQ ID NO: 774634 - RNA, 19 nt, Homo sapiens
  misc_RNA (1)...(19): siRNA sense strand
ccggccaggcucuauuaua

SEQ ID NO: 774635 - RNA, 19 nt, Homo sapiens
  misc_RNA (1)...(19): siRNA sense strand
uugcuuggauuagaauaug

SEQ ID NO: 774636 - RNA, 19 nt, Homo sapiens
  misc_RNA (1)...(19): siRNA sense strand
ugaagccuacuuuccuuau

SEQ ID NO: 774637 - RNA, 19 nt, Homo sapiens
  misc_RNA (1)...(19): siRNA sense strand
cugaaauaauugcuuggau

SEQ ID NO: 774638 - RNA, 19 nt, Homo sapiens
  misc_RNA (1)...(19): siRNA sense strand
gaucgguuauauuuugcua

SEQ ID NO: 774639 - RNA, 19 nt, Homo sapiens
  misc_RNA (1)...(19): siRNA sense strand
cauaaugugacugcaguug

SEQ ID NO: 774640 - RNA, 19 nt, Homo sapiens
  misc_RNA (1)...(19): siRNA sense strand
gaaugguuauccucuucac

SEQ ID NO: 774641 - RNA, 19 nt, Homo sapiens
  misc_RNA (1)...(19): siRNA sense strand
gcugaaauaauugcuugga

SEQ ID NO: 774642 - RNA, 19 nt, Homo sapiens
  misc_RNA (1)...(19): siRNA sense strand
aaucggggcuugugaguuc

SEQ ID NO: 774643 - RNA, 19 nt, Homo sapiens
  misc_RNA (1)...(19): siRNA sense strand
gguuuacacaugcugaaau

SEQ ID NO: 774644 - RNA, 19 nt, Homo sapiens
  misc_RNA (1)...(19): siRNA sense strand
ggacauugauagccuguua

SEQ ID NO: 774645 - RNA, 19 nt, Homo sapiens
  misc_RNA (1)...(19): siRNA sense strand
gcaaugguguacagauauu

SEQ ID NO: 774646 - RNA, 19 nt, Homo sapiens
  misc_RNA (1)...(19): siRNA sense strand
caugaaagaucgguuauau

SEQ ID NO: 774647 - RNA, 19 nt, Homo sapiens
  misc_RNA (1)...(19): siRNA sense strand
agaaagggauuacaacaug

SEQ ID NO: 774648 - RNA, 19 nt, Homo sapiens
  misc_RNA (1)...(19): siRNA sense strand
cauuugauguggaugaaua

SEQ ID NO: 774649 - RNA, 19 nt, Homo sapiens
  misc_RNA (1)...(19): siRNA sense strand
guuuacacaugcugaaaua

SEQ ID NO: 774650 - RNA, 19 nt, Homo sapiens
  misc_RNA (1)...(19): siRNA sense strand
gauagccuguuauguaaug

SEQ ID NO: 774651 - RNA, 19 nt, Homo sapiens
  misc_RNA (1)...(19): siRNA sense strand
gagaaugguuauccucuuc

SEQ ID NO: 774652 - RNA, 19 nt, Homo sapiens
  misc_RNA (1)...(19): siRNA sense strand
gaagccuacuuuccuuauu

SEQ ID NO: 774653 - RNA, 19 nt, Homo sapiens
  misc_RNA (1)...(19): siRNA sense strand
ggaagaacagggacauuga

SEQ ID NO: 774654 - RNA, 19 nt, Homo sapiens
  misc_RNA (1)...(19): siRNA sense strand
gcugcaaacuaaacaagaa

SEQ ID NO: 774655 - RNA, 19 nt, Homo sapiens
  misc_RNA (1)...(19): siRNA sense strand
augaggagcuggucuauga

SEQ ID NO: 774656 - RNA, 19 nt, Homo sapiens
  misc_RNA (1)...(19): siRNA sense strand
uggcaaugguguacagaua

SEQ ID NO: 774657 - RNA, 19 nt, Homo sapiens
  misc_RNA (1)...(19): siRNA sense strand
cugcaaagcuggucuugga

SEQ ID NO: 774658 - RNA, 19 nt, Homo sapiens
  misc_RNA (1)...(19): siRNA sense strand
ccuaugcaguaaucuauuu

SEQ ID NO: 774659 - RNA, 19 nt, Homo sapiens
  misc_RNA (1)...(19): siRNA sense strand
ucauacaguuugucaagaa

SEQ ID NO: 774660 - RNA, 19 nt, Homo sapiens
  misc_RNA (1)...(19): siRNA sense strand
uaaagaagacaccagaaga

SEQ ID NO: 774661 - RNA, 19 nt, Homo sapiens
  misc_RNA (1)...(19): siRNA sense strand
uugauagccuguuauguaa

SEQ ID NO: 774662 - RNA, 19 nt, Homo sapiens
  misc_RNA (1)...(19): siRNA sense strand
gggauuacaacauggauuu

SEQ ID NO: 774663 - RNA, 19 nt, Homo sapiens
  misc_RNA (1)...(19): siRNA sense strand
ucaccauucucgacuguuu

SEQ ID NO: 774664 - RNA, 19 nt, Homo sapiens
  misc_RNA (1)...(19): siRNA sense strand
aagccuacuuuccuuauuu

SEQ ID NO: 774665 - RNA, 19 nt, Homo sapiens
  misc_RNA (1)...(19): siRNA sense strand
ugauguggaugaauaugaa

SEQ ID NO: 774666 - RNA, 19 nt, Homo sapiens
  misc_RNA (1)...(19): siRNA sense strand
gcacuaugaccucuucuuc

SEQ ID NO: 774667 - RNA, 19 nt, Homo sapiens
  misc_RNA (1)...(19): siRNA sense strand
aaagaagacaccagaagaa

SEQ ID NO: 774668 - RNA, 19 nt, Homo sapiens
  misc_RNA (1)...(19): siRNA sense strand
gcacaguaaauacccacua

SEQ ID NO: 774669 - RNA, 19 nt, Homo sapiens
  misc_RNA (1)...(19): siRNA sense strand
uaaugugacugcaguugug

SEQ ID NO: 774670 - RNA, 19 nt, Homo sapiens
  misc_RNA (1)...(19): siRNA sense strand
guucaugaaagaucgguua

SEQ ID NO: 774671 - RNA, 19 nt, Homo sapiens
  misc_RNA (1)...(19): siRNA sense strand
cacaguaaauacccacuau

SEQ ID NO: 774672 - RNA, 19 nt, Homo sapiens
  misc_RNA (1)...(19): siRNA sense strand
gaagaacagggacauugau

SEQ ID NO: 774673 - RNA, 19 nt, Homo sapiens
  misc_RNA (1)...(19): siRNA sense strand
auugauagccuguuaugua

SEQ ID NO: 774674 - RNA, 19 nt, Homo sapiens
  misc_RNA (1)...(19): siRNA sense strand
cauacaguuugucaagaaa

SEQ ID NO: 774675 - RNA, 19 nt, Homo sapiens
  misc_RNA (1)...(19): siRNA sense strand
gaacagggacauugauagc

SEQ ID NO: 774676 - RNA, 19 nt, Homo sapiens
  misc_RNA (1)...(19): siRNA sense strand
gaccucuucuucauagaug

SEQ ID NO: 774677 - RNA, 19 nt, Homo sapiens
  misc_RNA (1)...(19): siRNA sense strand
cuugugaguucaugaaaga

SEQ ID NO: 774678 - RNA, 19 nt, Homo sapiens
  misc_RNA (1)...(19): siRNA sense strand
gaggagcuggucuaugaaa

SEQ ID NO: 774679 - RNA, 19 nt, Homo sapiens
  misc_RNA (1)...(19): siRNA sense strand
uaaugaaacacuacagguu

SEQ ID NO: 774680 - RNA, 19 nt, Homo sapiens
  misc_RNA (1)...(19): siRNA sense strand
auucagggaugcuuccuuu

SEQ ID NO: 774681 - RNA, 19 nt, Homo sapiens
  misc_RNA (1)...(19): siRNA sense strand
aaacauggaacgauuugga

SEQ ID NO: 774682 - RNA, 19 nt, Homo sapiens
  misc_RNA (1)...(19): siRNA sense strand
gcacuuacaaucucaccau

SEQ ID NO: 774683 - RNA, 19 nt, Homo sapiens
  misc_RNA (1)...(19): siRNA sense strand
gaacauuaugagcgaguug

SEQ ID NO: 774684 - RNA, 19 nt, Homo sapiens
  misc_RNA (1)...(19): siRNA sense strand
ugagaaugguuauccucuu

SEQ ID NO: 774685 - RNA, 19 nt, Homo sapiens
  misc_RNA (1)...(19): siRNA sense strand
cacuacagguuuacacaug

SEQ ID NO: 774686 - RNA, 19 nt, Homo sapiens
  misc_RNA (1)...(19): siRNA sense strand
gaacuuggcaaugguguac

SEQ ID NO: 774687 - RNA, 19 nt, Homo sapiens
  misc_RNA (1)...(19): siRNA sense strand
cagggaugcuuccuuugga

SEQ ID NO: 774688 - RNA, 19 nt, Homo sapiens
  misc_RNA (1)...(19): siRNA sense strand
gagcuggucuaugaaaauu

SEQ ID NO: 774689 - RNA, 19 nt, Homo sapiens
  misc_RNA (1)...(19): siRNA sense strand
aagaacagggacauugaua

SEQ ID NO: 774690 - RNA, 19 nt, Homo sapiens
  misc_RNA (1)...(19): siRNA sense strand
gcaaaauugagaaugguua

SEQ ID NO: 774691 - RNA, 19 nt, Homo sapiens
  misc_RNA (1)...(19): siRNA sense strand
ccgcugaacuuggcaaugg

SEQ ID NO: 774692 - RNA, 19 nt, Homo sapiens
  misc_RNA (1)...(19): siRNA sense strand
cgagcacuaugaccucuuc

SEQ ID NO: 774693 - RNA, 19 nt, Homo sapiens
  misc_RNA (1)...(19): siRNA sense strand
aggcaaagcgcuucacaga

SEQ ID NO: 774694 - RNA, 19 nt, Homo sapiens
  misc_RNA (1)...(19): siRNA sense strand
caucgccguucacugcaaa

SEQ ID NO: 774695 - RNA, 19 nt, Homo sapiens
  misc_RNA (1)...(19): siRNA sense strand
uacaguuugucaagaaaga

SEQ ID NO: 774696 - RNA, 19 nt, Homo sapiens
  misc_RNA (1)...(19): siRNA sense strand
gcaguugugaggcuaaaca

SEQ ID NO: 774697 - RNA, 19 nt, Homo sapiens
  misc_RNA (1)...(19): siRNA sense strand
guggaugaauaugaacauu

SEQ ID NO: 774698 - RNA, 19 nt, Homo sapiens
  misc_RNA (1)...(19): siRNA sense strand
ccugaagccuacuuuccuu

SEQ ID NO: 774699 - RNA, 19 nt, Homo sapiens
  misc_RNA (1)...(19): siRNA sense strand
cuuacaaucucaccauucu

SEQ ID NO: 774700 - RNA, 19 nt, Homo sapiens
  misc_RNA (1)...(19): siRNA sense strand
uggccuagaugauaugucu

SEQ ID NO: 774701 - RNA, 19 nt, Homo sapiens
  misc_RNA (1)...(19): siRNA sense strand
ggcaaugguguacagauau

SEQ ID NO: 774702 - RNA, 19 nt, Homo sapiens
  misc_RNA (1)...(19): siRNA sense strand
cacaaaacauggaacgauu

SEQ ID NO: 774703 - RNA, 19 nt, Homo sapiens
  misc_RNA (1)...(19): siRNA sense strand
uuucuggccuagaugauau

SEQ ID NO: 774704 - RNA, 19 nt, Homo sapiens
  misc_RNA (1)...(19): siRNA sense strand
uccagugaaggaaguauua

SEQ ID NO: 774705 - RNA, 19 nt, Homo sapiens
  misc_RNA (1)...(19): siRNA sense strand
gacaacaucgugcgaaggu

SEQ ID NO: 774706 - RNA, 19 nt, Homo sapiens
  misc_RNA (1)...(19): siRNA sense strand
cagaaagggauuacaacau

SEQ ID NO: 774707 - RNA, 19 nt, Homo sapiens
  misc_RNA (1)...(19): siRNA sense strand
ucagaaagggauuacaaca

SEQ ID NO: 774708 - RNA, 19 nt, Homo sapiens
  misc_RNA (1)...(19): siRNA sense strand
gcacuccugucuggcucaa

SEQ ID NO: 774709 - RNA, 19 nt, Homo sapiens
  misc_RNA (1)...(19): siRNA sense strand
gcacacccagugacaacau

SEQ ID NO: 774710 - RNA, 19 nt, Homo sapiens
  misc_RNA (1)...(19): siRNA sense strand
gcuugugaguucaugaaag

SEQ ID NO: 774711 - RNA, 19 nt, Homo sapiens
  misc_RNA (1)...(19): siRNA sense strand
cugaacaucugugagaaca

SEQ ID NO: 774712 - RNA, 19 nt, Homo sapiens
  misc_RNA (1)...(19): siRNA sense strand
acacaugcugaaauaauug

SEQ ID NO: 774713 - RNA, 19 nt, Homo sapiens
  misc_RNA (1)...(19): siRNA sense strand
ccagugaaggaaguauuaa

SEQ ID NO: 774714 - RNA, 19 nt, Homo sapiens
  misc_RNA (1)...(19): siRNA sense strand
ucuauugguggaaaucuuu

SEQ ID NO: 774715 - RNA, 19 nt, Homo sapiens
  misc_RNA (1)...(19): siRNA sense strand
gcaaacuaaacaagaaacu

SEQ ID NO: 774716 - RNA, 19 nt, Homo sapiens
  misc_RNA (1)...(19): siRNA sense strand
gggcuugugaguucaugaa

SEQ ID NO: 774717 - RNA, 19 nt, Homo sapiens
  misc_RNA (1)...(19): siRNA sense strand
uggaagaacagggacauug

SEQ ID NO: 774718 - RNA, 19 nt, Homo sapiens
  misc_RNA (1)...(19): siRNA sense strand
uuaaagaagacaccagaag

SEQ ID NO: 774719 - RNA, 19 nt, Homo sapiens
  misc_RNA (1)...(19): siRNA sense strand
aaagauuuaugaggcaaag

SEQ ID NO: 774720 - RNA, 19 nt, Homo sapiens
  misc_RNA (1)...(19): siRNA sense strand
ucaugaaagaucgguuaua

SEQ ID NO: 774721 - RNA, 19 nt, Homo sapiens
  misc_RNA (1)...(19): siRNA sense strand
cacuuacaaucucaccauu

SEQ ID NO: 774722 - RNA, 19 nt, Homo sapiens
  misc_RNA (1)...(19): siRNA sense strand
aaucauacaguuugucaag

SEQ ID NO: 774723 - RNA, 19 nt, Homo sapiens
  misc_RNA (1)...(19): siRNA sense strand
aaucgaccauccagugaag

SEQ ID NO: 774724 - RNA, 19 nt, Homo sapiens
  misc_RNA (1)...(19): siRNA sense strand
ccggccaggcucuauuaua

SEQ ID NO: 774725 - RNA, 19 nt, Homo sapiens
  misc_RNA (1)...(19): siRNA sense strand
uugcuuggauuagaauaug

SEQ ID NO: 774726 - RNA, 19 nt, Homo sapiens
  misc_RNA (1)...(19): siRNA sense strand
ugaagccuacuuuccuuau

SEQ ID NO: 774727 - RNA, 19 nt, Homo sapiens
  misc_RNA (1)...(19): siRNA sense strand
cugaaauaauugcuuggau

SEQ ID NO: 774728 - RNA, 19 nt, Homo sapiens
  misc_RNA (1)...(19): siRNA sense strand
gaucgguuauauuuugcua

SEQ ID NO: 774729 - RNA, 19 nt, Homo sapiens
  misc_RNA (1)...(19): siRNA sense strand
cauaaugugacugcaguug

SEQ ID NO: 774730 - RNA, 19 nt, Homo sapiens
  misc_RNA (1)...(19): siRNA sense strand
gaaugguuauccucuucac

SEQ ID NO: 774731 - RNA, 19 nt, Homo sapiens
  misc_RNA (1)...(19): siRNA sense strand
gcugaaauaauugcuugga

SEQ ID NO: 774732 - RNA, 19 nt, Homo sapiens
  misc_RNA (1)...(19): siRNA sense strand
aaucggggcuugugaguuc

SEQ ID NO: 774733 - RNA, 19 nt, Homo sapiens
  misc_RNA (1)...(19): siRNA sense strand
gguuuacacaugcugaaau

SEQ ID NO: 774734 - RNA, 19 nt, Homo sapiens
  misc_RNA (1)...(19): siRNA sense strand
ggacauugauagccuguua

SEQ ID NO: 774735 - RNA, 19 nt, Homo sapiens
  misc_RNA (1)...(19): siRNA sense strand
gcaaugguguacagauauu

SEQ ID NO: 774736 - RNA, 19 nt, Homo sapiens
  misc_RNA (1)...(19): siRNA sense strand
caugaaagaucgguuauau

SEQ ID NO: 774737 - RNA, 19 nt, Homo sapiens
  misc_RNA (1)...(19): siRNA sense strand
agaaagggauuacaacaug

SEQ ID NO: 774738 - RNA, 19 nt, Homo sapiens
  misc_RNA (1)...(19): siRNA sense strand
cauuugauguggaugaaua

SEQ ID NO: 774739 - RNA, 19 nt, Homo sapiens
  misc_RNA (1)...(19): siRNA sense strand
guuuacacaugcugaaaua

SEQ ID NO: 774740 - RNA, 19 nt, Homo sapiens
  misc_RNA (1)...(19): siRNA sense strand
gauagccuguuauguaaug

SEQ ID NO: 774741 - RNA, 19 nt, Homo sapiens
  misc_RNA (1)...(19): siRNA sense strand
gagaaugguuauccucuuc

SEQ ID NO: 774742 - RNA, 19 nt, Homo sapiens
  misc_RNA (1)...(19): siRNA sense strand
gaagccuacuuuccuuauu

SEQ ID NO: 774743 - RNA, 19 nt, Homo sapiens
  misc_RNA (1)...(19): siRNA sense strand
ggaagaacagggacauuga

SEQ ID NO: 774744 - RNA, 19 nt, Homo sapiens
  misc_RNA (1)...(19): siRNA sense strand
gcugcaaacuaaacaagaa

SEQ ID NO: 774745 - RNA, 19 nt, Homo sapiens
  misc_RNA (1)...(19): siRNA sense strand
augaggagcuggucuauga

SEQ ID NO: 774746 - RNA, 19 nt, Homo sapiens
  misc_RNA (1)...(19): siRNA sense strand
uggcaaugguguacagaua

SEQ ID NO: 774747 - RNA, 19 nt, Homo sapiens
  misc_RNA (1)...(19): siRNA sense strand
cugcaaagcuggucuugga

SEQ ID NO: 774748 - RNA, 19 nt, Homo sapiens
  misc_RNA (1)...(19): siRNA sense strand
ccuaugcaguaaucuauuu

SEQ ID NO: 774749 - RNA, 19 nt, Homo sapiens
  misc_RNA (1)...(19): siRNA sense strand
ucauacaguuugucaagaa

SEQ ID NO: 774750 - RNA, 19 nt, Homo sapiens
  misc_RNA (1)...(19): siRNA sense strand
uaaagaagacaccagaaga

SEQ ID NO: 774751 - RNA, 19 nt, Homo sapiens
  misc_RNA (1)...(19): siRNA sense strand
uugauagccuguuauguaa

SEQ ID NO: 774752 - RNA, 19 nt, Homo sapiens
  misc_RNA (1)...(19): siRNA sense strand
gggauuacaacauggauuu

SEQ ID NO: 774753 - RNA, 19 nt, Homo sapiens
  misc_RNA (1)...(19): siRNA sense strand
ucaccauucucgacuguuu

SEQ ID NO: 774754 - RNA, 19 nt, Homo sapiens
  misc_RNA (1)...(19): siRNA sense strand
aagccuacuuuccuuauuu

SEQ ID NO: 774755 - RNA, 19 nt, Homo sapiens
  misc_RNA (1)...(19): siRNA sense strand
ugauguggaugaauaugaa

SEQ ID NO: 774756 - RNA, 19 nt, Homo sapiens
  misc_RNA (1)...(19): siRNA sense strand
gcacuaugaccucuucuuc

SEQ ID NO: 774757 - RNA, 19 nt, Homo sapiens
  misc_RNA (1)...(19): siRNA sense strand
aaagaagacaccagaagaa

SEQ ID NO: 774758 - RNA, 19 nt, Homo sapiens
  misc_RNA (1)...(19): siRNA sense strand
gcacaguaaauacccacua

SEQ ID NO: 774759 - RNA, 19 nt, Homo sapiens
  misc_RNA (1)...(19): siRNA sense strand
uaaugugacugcaguugug

SEQ ID NO: 774760 - RNA, 19 nt, Homo sapiens
  misc_RNA (1)...(19): siRNA sense strand
guucaugaaagaucgguua

SEQ ID NO: 774761 - RNA, 19 nt, Homo sapiens
  misc_RNA (1)...(19): siRNA sense strand
cacaguaaauacccacuau

SEQ ID NO: 774762 - RNA, 19 nt, Homo sapiens
  misc_RNA (1)...(19): siRNA sense strand
gaagaacagggacauugau

SEQ ID NO: 774763 - RNA, 19 nt, Homo sapiens
  misc_RNA (1)...(19): siRNA sense strand
auugauagccuguuaugua

SEQ ID NO: 774764 - RNA, 19 nt, Homo sapiens
  misc_RNA (1)...(19): siRNA sense strand
cauacaguuugucaagaaa

SEQ ID NO: 774765 - RNA, 19 nt, Homo sapiens
  misc_RNA (1)...(19): siRNA sense strand
gaacagggacauugauagc

SEQ ID NO: 774766 - RNA, 19 nt, Homo sapiens
  misc_RNA (1)...(19): siRNA sense strand
gaccucuucuucauagaug

SEQ ID NO: 774767 - RNA, 19 nt, Homo sapiens
  misc_RNA (1)...(19): siRNA sense strand
cuugugaguucaugaaaga

SEQ ID NO: 774768 - RNA, 19 nt, Homo sapiens
  misc_RNA (1)...(19): siRNA sense strand
gaggagcuggucuaugaaa

SEQ ID NO: 774769 - RNA, 19 nt, Homo sapiens
  misc_RNA (1)...(19): siRNA sense strand
uaaugaaacacuacagguu

SEQ ID NO: 774770 - RNA, 19 nt, Homo sapiens
  misc_RNA (1)...(19): siRNA sense strand
auucagggaugcuuccuuu

SEQ ID NO: 774771 - RNA, 19 nt, Homo sapiens
  misc_RNA (1)...(19): siRNA sense strand
aaacauggaacgauuugga

SEQ ID NO: 774772 - RNA, 19 nt, Homo sapiens
  misc_RNA (1)...(19): siRNA sense strand
gcacuuacaaucucaccau

SEQ ID NO: 774773 - RNA, 19 nt, Homo sapiens
  misc_RNA (1)...(19): siRNA sense strand
gaacauuaugagcgaguug

SEQ ID NO: 774774 - RNA, 19 nt, Homo sapiens
  misc_RNA (1)...(19): siRNA sense strand
ugagaaugguuauccucuu

SEQ ID NO: 774775 - RNA, 19 nt, Homo sapiens
  misc_RNA (1)...(19): siRNA sense strand
cacuacagguuuacacaug

SEQ ID NO: 774776 - RNA, 19 nt, Homo sapiens
  misc_RNA (1)...(19): siRNA sense strand
gaacuuggcaaugguguac

SEQ ID NO: 774777 - RNA, 19 nt, Homo sapiens
  misc_RNA (1)...(19): siRNA sense strand
cagggaugcuuccuuugga

SEQ ID NO: 774778 - RNA, 19 nt, Homo sapiens
  misc_RNA (1)...(19): siRNA sense strand
gagcuggucuaugaaaauu

SEQ ID NO: 774779 - RNA, 19 nt, Homo sapiens
  misc_RNA (1)...(19): siRNA sense strand
aagaacagggacauugaua

SEQ ID NO: 774780 - RNA, 19 nt, Homo sapiens
  misc_RNA (1)...(19): siRNA sense strand
gcaaaauugagaaugguua

SEQ ID NO: 774781 - RNA, 19 nt, Homo sapiens
  misc_RNA (1)...(19): siRNA sense strand
ccgcugaacuuggcaaugg

SEQ ID NO: 774782 - RNA, 19 nt, Homo sapiens
  misc_RNA (1)...(19): siRNA sense strand
cgagcacuaugaccucuuc

SEQ ID NO: 774783 - RNA, 19 nt, Homo sapiens
  misc_RNA (1)...(19): siRNA sense strand
aggcaaagcgcuucacaga

SEQ ID NO: 774784 - RNA, 19 nt, Homo sapiens
  misc_RNA (1)...(19): siRNA sense strand
caucgccguucacugcaaa

SEQ ID NO: 774785 - RNA, 19 nt, Homo sapiens
  misc_RNA (1)...(19): siRNA sense strand
uacaguuugucaagaaaga

SEQ ID NO: 774786 - RNA, 19 nt, Homo sapiens
  misc_RNA (1)...(19): siRNA sense strand
gcaguugugaggcuaaaca

SEQ ID NO: 774787 - RNA, 19 nt, Homo sapiens
  misc_RNA (1)...(19): siRNA sense strand
guggaugaauaugaacauu

SEQ ID NO: 774788 - RNA, 19 nt, Homo sapiens
  misc_RNA (1)...(19): siRNA sense strand
ccugaagccuacuuuccuu

SEQ ID NO: 774789 - RNA, 19 nt, Homo sapiens
  misc_RNA (1)...(19): siRNA sense strand
cuuacaaucucaccauucu

SEQ ID NO: 774790 - RNA, 19 nt, Homo sapiens
  misc_RNA (1)...(19): siRNA sense strand
uggccuagaugauaugucu

SEQ ID NO: 774791 - RNA, 19 nt, Homo sapiens
  misc_RNA (1)...(19): siRNA sense strand
ggcaaugguguacagauau

SEQ ID NO: 774792 - RNA, 19 nt, Homo sapiens
  misc_RNA (1)...(19): siRNA sense strand
cacaaaacauggaacgauu

SEQ ID NO: 774793 - RNA, 19 nt, Homo sapiens
  misc_RNA (1)...(19): siRNA sense strand
uuucuggccuagaugauau

SEQ ID NO: 774794 - RNA, 19 nt, Homo sapiens
  misc_RNA (1)...(19): siRNA sense strand
uccagugaaggaaguauua

SEQ ID NO: 774795 - RNA, 19 nt, Homo sapiens
  misc_RNA (1)...(19): siRNA sense strand
gacaacaucgugcgaaggu

SEQ ID NO: 774796 - RNA, 19 nt, Homo sapiens
  misc_RNA (1)...(19): siRNA sense strand
cagaaagggauuacaacau

SEQ ID NO: 774797 - RNA, 19 nt, Homo sapiens
  misc_RNA (1)...(19): siRNA sense strand
ucagaaagggauuacaaca

SEQ ID NO: 774798 - RNA, 19 nt, Homo sapiens
  misc_RNA (1)...(19): siRNA sense strand
gcacuccugucuggcucaa

SEQ ID NO: 774799 - RNA, 19 nt, Homo sapiens
  misc_RNA (1)...(19): siRNA sense strand
gcacacccagugacaacau

SEQ ID NO: 774800 - RNA, 19 nt, Homo sapiens
  misc_RNA (1)...(19): siRNA sense strand
gcuugugaguucaugaaag

SEQ ID NO: 774801 - RNA, 19 nt, Homo sapiens
  misc_RNA (1)...(19): siRNA sense strand
cugaacaucugugagaaca

SEQ ID NO: 774802 - RNA, 19 nt, Homo sapiens
  misc_RNA (1)...(19): siRNA sense strand
acacaugcugaaauaauug

SEQ ID NO: 774803 - RNA, 19 nt, Homo sapiens
  misc_RNA (1)...(19): siRNA sense strand
ccagugaaggaaguauuaa

SEQ ID NO: 774804 - RNA, 19 nt, Homo sapiens
  misc_RNA (1)...(19): siRNA sense strand
ucuauugguggaaaucuuu

SEQ ID NO: 774805 - RNA, 19 nt, Homo sapiens
  misc_RNA (1)...(19): siRNA sense strand
gcaaacuaaacaagaaacu

SEQ ID NO: 774806 - RNA, 19 nt, Homo sapiens
  misc_RNA (1)...(19): siRNA sense strand
gggcuugugaguucaugaa

SEQ ID NO: 774807 - RNA, 19 nt, Homo sapiens
  misc_RNA (1)...(19): siRNA sense strand
uggaagaacagggacauug

SEQ ID NO: 774808 - RNA, 19 nt, Homo sapiens
  misc_RNA (1)...(19): siRNA sense strand
uuaaagaagacaccagaag

SEQ ID NO: 774809 - RNA, 19 nt, Homo sapiens
  misc_RNA (1)...(19): siRNA sense strand
aaagauuuaugaggcaaag

SEQ ID NO: 774810 - RNA, 19 nt, Homo sapiens
  misc_RNA (1)...(19): siRNA sense strand
ucaugaaagaucgguuaua

SEQ ID NO: 774811 - RNA, 19 nt, Homo sapiens
  misc_RNA (1)...(19): siRNA sense strand
cacuuacaaucucaccauu

SEQ ID NO: 774812 - RNA, 19 nt, Homo sapiens
  misc_RNA (1)...(19): siRNA sense strand
aaucauacaguuugucaag

SEQ ID NO: 774813 - RNA, 19 nt, Homo sapiens
  misc_RNA (1)...(19): siRNA sense strand
aaucgaccauccagugaag

SEQ ID NO: 774814 - RNA, 19 nt, Homo sapiens
  misc_RNA (1)...(19): siRNA sense strand
ccggccaggcucuauuaua

SEQ ID NO: 774815 - RNA, 19 nt, Homo sapiens
  misc_RNA (1)...(19): siRNA sense strand
uugcuuggauuagaauaug

SEQ ID NO: 774816 - RNA, 19 nt, Homo sapiens
  misc_RNA (1)...(19): siRNA sense strand
ugaagccuacuuuccuuau

SEQ ID NO: 774817 - RNA, 19 nt, Homo sapiens
  misc_RNA (1)...(19): siRNA sense strand
cugaaauaauugcuuggau

SEQ ID NO: 774818 - RNA, 19 nt, Homo sapiens
  misc_RNA (1)...(19): siRNA sense strand
gaucgguuauauuuugcua

SEQ ID NO: 774819 - RNA, 19 nt, Homo sapiens
  misc_RNA (1)...(19): siRNA sense strand
cauaaugugacugcaguug

SEQ ID NO: 774820 - RNA, 19 nt, Homo sapiens
  misc_RNA (1)...(19): siRNA sense strand
gaaugguuauccucuucac

SEQ ID NO: 774821 - RNA, 19 nt, Homo sapiens
  misc_RNA (1)...(19): siRNA sense strand
gcugaaauaauugcuugga

SEQ ID NO: 774822 - RNA, 19 nt, Homo sapiens
  misc_RNA (1)...(19): siRNA sense strand
aaucggggcuugugaguuc

SEQ ID NO: 774823 - RNA, 19 nt, Homo sapiens
  misc_RNA (1)...(19): siRNA sense strand
gguuuacacaugcugaaau

SEQ ID NO: 774824 - RNA, 19 nt, Homo sapiens
  misc_RNA (1)...(19): siRNA sense strand
gguagaagaugacagauua

SEQ ID NO: 774825 - RNA, 19 nt, Homo sapiens
  misc_RNA (1)...(19): siRNA sense strand
agaaggagaugaagaaaua

SEQ ID NO: 774826 - RNA, 19 nt, Homo sapiens
  misc_RNA (1)...(19): siRNA sense strand
ggacucaucuuugguuaaa

SEQ ID NO: 774827 - RNA, 19 nt, Homo sapiens
  misc_RNA (1)...(19): siRNA sense strand
gaagaugacagauuauuga

SEQ ID NO: 774828 - RNA, 19 nt, Homo sapiens
  misc_RNA (1)...(19): siRNA sense strand
cuacauaucugguggcauu

SEQ ID NO: 774829 - RNA, 19 nt, Homo sapiens
  misc_RNA (1)...(19): siRNA sense strand
gauaacagccauccuauug

SEQ ID NO: 774830 - RNA, 19 nt, Homo sapiens
  misc_RNA (1)...(19): siRNA sense strand
ggauuuaacuaucagaaug

SEQ ID NO: 774831 - RNA, 19 nt, Homo sapiens
  misc_RNA (1)...(19): siRNA sense strand
ggaugagccugcuaucaaa

SEQ ID NO: 774832 - RNA, 19 nt, Homo sapiens
  misc_RNA (1)...(19): siRNA sense strand
uaacagccauccuauugaa

SEQ ID NO: 774833 - RNA, 19 nt, Homo sapiens
  misc_RNA (1)...(19): siRNA sense strand
gaugagauauuugaugcua

SEQ ID NO: 774834 - RNA, 19 nt, Homo sapiens
  misc_RNA (1)...(19): siRNA sense strand
agaaaggaaugaacaugua

SEQ ID NO: 774835 - RNA, 19 nt, Homo sapiens
  misc_RNA (1)...(19): siRNA sense strand
gaauguaauugaccggaaa

SEQ ID NO: 774836 - RNA, 19 nt, Homo sapiens
  misc_RNA (1)...(19): siRNA sense strand
gacaugaacucgcccauca

SEQ ID NO: 774837 - RNA, 19 nt, Homo sapiens
  misc_RNA (1)...(19): siRNA sense strand
ggagcgaccugagcuguaa

SEQ ID NO: 774838 - RNA, 19 nt, Homo sapiens
  misc_RNA (1)...(19): siRNA sense strand
cgacuuggauuacagaaug

SEQ ID NO: 774839 - RNA, 19 nt, Homo sapiens
  misc_RNA (1)...(19): siRNA sense strand
gaauugugcugauauugau

SEQ ID NO: 774840 - RNA, 19 nt, Homo sapiens
  misc_RNA (1)...(19): siRNA sense strand
ggauaaggacuuuaagaaa

SEQ ID NO: 774841 - RNA, 19 nt, Homo sapiens
  misc_RNA (1)...(19): siRNA sense strand
gagacugcauugcuuauug

SEQ ID NO: 774842 - RNA, 19 nt, Homo sapiens
  misc_RNA (1)...(19): siRNA sense strand
cagaguagcuuuaucaaac

SEQ ID NO: 774843 - RNA, 19 nt, Homo sapiens
  misc_RNA (1)...(19): siRNA sense strand
ccagggaggauucuuaaua

SEQ ID NO: 774844 - RNA, 19 nt, Homo sapiens
  misc_RNA (1)...(19): siRNA sense strand
gaaacaaggucaaaagaug

SEQ ID NO: 774845 - RNA, 19 nt, Homo sapiens
  misc_RNA (1)...(19): siRNA sense strand
uguggaagcugaacaggua

SEQ ID NO: 774846 - RNA, 19 nt, Homo sapiens
  misc_RNA (1)...(19): siRNA sense strand
gaggaucucugggaaaguu

SEQ ID NO: 774847 - RNA, 19 nt, Homo sapiens
  misc_RNA (1)...(19): siRNA sense strand
gaugaauugugcugauauu

SEQ ID NO: 774848 - RNA, 19 nt, Homo sapiens
  misc_RNA (1)...(19): siRNA sense strand
gagcuugacgccuuagaua

SEQ ID NO: 774849 - RNA, 19 nt, Homo sapiens
  misc_RNA (1)...(19): siRNA sense strand
cagggaggauucuuaauau

SEQ ID NO: 774850 - RNA, 19 nt, Homo sapiens
  misc_RNA (1)...(19): siRNA sense strand
ugaaugagcccaauuauac

SEQ ID NO: 774851 - RNA, 19 nt, Homo sapiens
  misc_RNA (1)...(19): siRNA sense strand
gggugaauaugacuuugua

SEQ ID NO: 774852 - RNA, 19 nt, Homo sapiens
  misc_RNA (1)...(19): siRNA sense strand
ggucauauguuggugaaga

SEQ ID NO: 774853 - RNA, 19 nt, Homo sapiens
  misc_RNA (1)...(19): siRNA sense strand
gaaaucuuguuacuaugga

SEQ ID NO: 774854 - RNA, 19 nt, Homo sapiens
  misc_RNA (1)...(19): siRNA sense strand
ggaaauucauaaaggacaa

SEQ ID NO: 774855 - RNA, 19 nt, Homo sapiens
  misc_RNA (1)...(19): siRNA sense strand
gcacaccuguuaugucuac

SEQ ID NO: 774856 - RNA, 19 nt, Homo sapiens
  misc_RNA (1)...(19): siRNA sense strand
ggcacuacuuuagauauua

SEQ ID NO: 774857 - RNA, 19 nt, Homo sapiens
  misc_RNA (1)...(19): siRNA sense strand
cuacaggauuuaacuauca

SEQ ID NO: 774858 - RNA, 19 nt, Homo sapiens
  misc_RNA (1)...(19): siRNA sense strand
uaaaauggcuggagagguu

SEQ ID NO: 774859 - RNA, 19 nt, Homo sapiens
  misc_RNA (1)...(19): siRNA sense strand
aagcagauaugcaagaaga

SEQ ID NO: 774860 - RNA, 19 nt, Homo sapiens
  misc_RNA (1)...(19): siRNA sense strand
gcuggugggucauauguug

SEQ ID NO: 774861 - RNA, 19 nt, Homo sapiens
  misc_RNA (1)...(19): siRNA sense strand
uauaaggacuacuucaaug

SEQ ID NO: 774862 - RNA, 19 nt, Homo sapiens
  misc_RNA (1)...(19): siRNA sense strand
gggauaaggacuuuaagaa

SEQ ID NO: 774863 - RNA, 19 nt, Homo sapiens
  misc_RNA (1)...(19): siRNA sense strand
gcgcuaugcugcuguaaca

SEQ ID NO: 774864 - RNA, 19 nt, Homo sapiens
  misc_RNA (1)...(19): siRNA sense strand
gaaaggaaugaacauguau

SEQ ID NO: 774865 - RNA, 19 nt, Homo sapiens
  misc_RNA (1)...(19): siRNA sense strand
gcuaucaguugagggauuu

SEQ ID NO: 774866 - RNA, 19 nt, Homo sapiens
  misc_RNA (1)...(19): siRNA sense strand
cagcaagcaugguaggaaa

SEQ ID NO: 774867 - RNA, 19 nt, Homo sapiens
  misc_RNA (1)...(19): siRNA sense strand
gggaugagccugcuaucaa

SEQ ID NO: 774868 - RNA, 19 nt, Homo sapiens
  misc_RNA (1)...(19): siRNA sense strand
gugaaugagcccaauuaua

SEQ ID NO: 774869 - RNA, 19 nt, Homo sapiens
  misc_RNA (1)...(19): siRNA sense strand
cuggagagguuaaggcuuu

SEQ ID NO: 774870 - RNA, 19 nt, Homo sapiens
  misc_RNA (1)...(19): siRNA sense strand
caacugggaagaacuuuau

SEQ ID NO: 774871 - RNA, 19 nt, Homo sapiens
  misc_RNA (1)...(19): siRNA sense strand
gcaaagcagagcaaggaaa

SEQ ID NO: 774872 - RNA, 19 nt, Homo sapiens
  misc_RNA (1)...(19): siRNA sense strand
cuaauaaagcuaucaguug

SEQ ID NO: 774873 - RNA, 19 nt, Homo sapiens
  misc_RNA (1)...(19): siRNA sense strand
gugaugaauugugcugaua

SEQ ID NO: 774874 - RNA, 19 nt, Homo sapiens
  misc_RNA (1)...(19): siRNA sense strand
uaaacaagcagauaugcaa

SEQ ID NO: 774875 - RNA, 19 nt, Homo sapiens
  misc_RNA (1)...(19): siRNA sense strand
ggacauaaggcaacguuag

SEQ ID NO: 774876 - RNA, 19 nt, Homo sapiens
  misc_RNA (1)...(19): siRNA sense strand
gggauucucucaacucucu

SEQ ID NO: 774877 - RNA, 19 nt, Homo sapiens
  misc_RNA (1)...(19): siRNA sense strand
ugagguugaugagauauuu

SEQ ID NO: 774878 - RNA, 19 nt, Homo sapiens
  misc_RNA (1)...(19): siRNA sense strand
gauugaauaucugugugua

SEQ ID NO: 774879 - RNA, 19 nt, Homo sapiens
  misc_RNA (1)...(19): siRNA sense strand
ccaggagcuugacgccuua

SEQ ID NO: 774880 - RNA, 19 nt, Homo sapiens
  misc_RNA (1)...(19): siRNA sense strand
ggacaacugggaagaacuu

SEQ ID NO: 774881 - RNA, 19 nt, Homo sapiens
  misc_RNA (1)...(19): siRNA sense strand
ucucauugguuguuccuaa

SEQ ID NO: 774882 - RNA, 19 nt, Homo sapiens
  misc_RNA (1)...(19): siRNA sense strand
ggaggcagcaagcauggua

SEQ ID NO: 774883 - RNA, 19 nt, Homo sapiens
  misc_RNA (1)...(19): siRNA sense strand
cauuagcacuguagagguu

SEQ ID NO: 774884 - RNA, 19 nt, Homo sapiens
  misc_RNA (1)...(19): siRNA sense strand
cuacuucaauguuccuuau

SEQ ID NO: 774885 - RNA, 19 nt, Homo sapiens
  misc_RNA (1)...(19): siRNA sense strand
uaauugaccggaaaccaua

SEQ ID NO: 774886 - RNA, 19 nt, Homo sapiens
  misc_RNA (1)...(19): siRNA sense strand
caauguuccuuauccucua

SEQ ID NO: 774887 - RNA, 19 nt, Homo sapiens
  misc_RNA (1)...(19): siRNA sense strand
ggcucgagcuggaaucauu

SEQ ID NO: 774888 - RNA, 19 nt, Homo sapiens
  misc_RNA (1)...(19): siRNA sense strand
uuggagagcugaaugacaa

SEQ ID NO: 774889 - RNA, 19 nt, Homo sapiens
  misc_RNA (1)...(19): siRNA sense strand
gauggucccuaucacaauc

SEQ ID NO: 774890 - RNA, 19 nt, Homo sapiens
  misc_RNA (1)...(19): siRNA sense strand
ggaccaaacaaaugggauu

SEQ ID NO: 774891 - RNA, 19 nt, Homo sapiens
  misc_RNA (1)...(19): siRNA sense strand
uauagcagcugugaugaau

SEQ ID NO: 774892 - RNA, 19 nt, Homo sapiens
  misc_RNA (1)...(19): siRNA sense strand
agacugcauugcuuauuga

SEQ ID NO: 774893 - RNA, 19 nt, Homo sapiens
  misc_RNA (1)...(19): siRNA sense strand
guagcuuuaucaaacauga

SEQ ID NO: 774894 - RNA, 19 nt, Homo sapiens
  misc_RNA (1)...(19): siRNA sense strand
uacgggaaccuuaaagaua

SEQ ID NO: 774895 - RNA, 19 nt, Homo sapiens
  misc_RNA (1)...(19): siRNA sense strand
gaugaagaaauacaugcua

SEQ ID NO: 774896 - RNA, 19 nt, Homo sapiens
  misc_RNA (1)...(19): siRNA sense strand
uaaggcaacguuagaagaa

SEQ ID NO: 774897 - RNA, 19 nt, Homo sapiens
  misc_RNA (1)...(19): siRNA sense strand
gcuggaaaguuuauuacca

SEQ ID NO: 774898 - RNA, 19 nt, Homo sapiens
  misc_RNA (1)...(19): siRNA sense strand
uuauugagguugucccaaa

SEQ ID NO: 774899 - RNA, 19 nt, Homo sapiens
  misc_RNA (1)...(19): siRNA sense strand
uagcagcugugaugaauac

SEQ ID NO: 774900 - RNA, 19 nt, Homo sapiens
  misc_RNA (1)...(19): siRNA sense strand
gaaugguggacucaucuuu

SEQ ID NO: 774901 - RNA, 19 nt, Homo sapiens
  misc_RNA (1)...(19): siRNA sense strand
ggaaaucuuguuacuaugg

SEQ ID NO: 774902 - RNA, 19 nt, Homo sapiens
  misc_RNA (1)...(19): siRNA sense strand
ugaauugugcugauauuga

SEQ ID NO: 774903 - RNA, 19 nt, Homo sapiens
  misc_RNA (1)...(19): siRNA sense strand
cugaacagguagaagauga

SEQ ID NO: 774904 - RNA, 19 nt, Homo sapiens
  misc_RNA (1)...(19): siRNA sense strand
gggauuugcaguugauaaa

SEQ ID NO: 774905 - RNA, 19 nt, Homo sapiens
  misc_RNA (1)...(19): siRNA sense strand
cacaaucucuacuagugaa

SEQ ID NO: 774906 - RNA, 19 nt, Homo sapiens
  misc_RNA (1)...(19): siRNA sense strand
gcuacaggauuuaacuauc

SEQ ID NO: 774907 - RNA, 19 nt, Homo sapiens
  misc_RNA (1)...(19): siRNA sense strand
guugagggauuugcaguug

SEQ ID NO: 774908 - RNA, 19 nt, Homo sapiens
  misc_RNA (1)...(19): siRNA sense strand
gacauaaggcaacguuaga

SEQ ID NO: 774909 - RNA, 19 nt, Homo sapiens
  misc_RNA (1)...(19): siRNA sense strand
accaaugggugaaguuaaa

SEQ ID NO: 774910 - RNA, 19 nt, Homo sapiens
  misc_RNA (1)...(19): siRNA sense strand
ggacaagccagagaugaau

SEQ ID NO: 774911 - RNA, 19 nt, Homo sapiens
  misc_RNA (1)...(19): siRNA sense strand
uuaaccaaguuccaacaaa

SEQ ID NO: 774912 - RNA, 19 nt, Homo sapiens
  misc_RNA (1)...(19): siRNA sense strand
aaccauacccugaugauga

SEQ ID NO: 774913 - RNA, 19 nt, Homo sapiens
  misc_RNA (1)...(19): siRNA sense strand
agacagaguagcuuuauca

SEQ ID NO: 774914 - RNA, 19 nt, Homo sapiens
  misc_RNA (1)...(19): siRNA sense strand
aauacaugcuacaggauuu

SEQ ID NO: 774915 - RNA, 19 nt, Homo sapiens
  misc_RNA (1)...(19): siRNA sense strand
gacacuguaucgguaauug

SEQ ID NO: 774916 - RNA, 19 nt, Homo sapiens
  misc_RNA (1)...(19): siRNA sense strand
uauuacagcuucauaugca

SEQ ID NO: 774917 - RNA, 19 nt, Homo sapiens
  misc_RNA (1)...(19): siRNA sense strand
gaagcccgucgucgguuua

SEQ ID NO: 774918 - RNA, 19 nt, Homo sapiens
  misc_RNA (1)...(19): siRNA sense strand
gaaauccaggaguuuguga

SEQ ID NO: 774919 - RNA, 19 nt, Homo sapiens
  misc_RNA (1)...(19): siRNA sense strand
uaaccaaguuccaacaaaa

SEQ ID NO: 774920 - RNA, 19 nt, Homo sapiens
  misc_RNA (1)...(19): siRNA sense strand
caucaaugguuuggaaauc

SEQ ID NO: 774921 - RNA, 19 nt, Homo sapiens
  misc_RNA (1)...(19): siRNA sense strand
gcagauaugcaagaagaga

SEQ ID NO: 774922 - RNA, 19 nt, Homo sapiens
  misc_RNA (1)...(19): siRNA sense strand
uggcacuacuuuagauauu

SEQ ID NO: 774923 - RNA, 19 nt, Homo sapiens
  misc_RNA (1)...(19): siRNA sense strand
caucuuugguuaaaugaag

SEQ ID NO: 774924 - RNA, 19 nt, Homo sapiens
  misc_RNA (1)...(19): siRNA sense strand
ggaggaagcuuaucuauga

SEQ ID NO: 774925 - RNA, 19 nt, Homo sapiens
  misc_RNA (1)...(19): siRNA sense strand
gaauugcuuugacagauaa

SEQ ID NO: 774926 - RNA, 19 nt, Homo sapiens
  misc_RNA (1)...(19): siRNA sense strand
cgucaaaucuucaauggaa

SEQ ID NO: 774927 - RNA, 19 nt, Homo sapiens
  misc_RNA (1)...(19): siRNA sense strand
cgaauugcuuugacagaua

SEQ ID NO: 774928 - RNA, 19 nt, Homo sapiens
  misc_RNA (1)...(19): siRNA sense strand
caugagaucuauacuguug

SEQ ID NO: 774929 - RNA, 19 nt, Homo sapiens
  misc_RNA (1)...(19): siRNA sense strand
cagaucaacaggcuuauua

SEQ ID NO: 774930 - RNA, 19 nt, Homo sapiens
  misc_RNA (1)...(19): siRNA sense strand
caacaaggcuucgauuaac

SEQ ID NO: 774931 - RNA, 19 nt, Homo sapiens
  misc_RNA (1)...(19): siRNA sense strand
gaccagaucaacaggcuua

SEQ ID NO: 774932 - RNA, 19 nt, Homo sapiens
  misc_RNA (1)...(19): siRNA sense strand
caacaggcuuauuagaaga

SEQ ID NO: 774933 - RNA, 19 nt, Homo sapiens
  misc_RNA (1)...(19): siRNA sense strand
ucaacaaggcuucgauuaa

SEQ ID NO: 774934 - RNA, 19 nt, Homo sapiens
  misc_RNA (1)...(19): siRNA sense strand
ucaacaggcuuauuagaag

SEQ ID NO: 774935 - RNA, 19 nt, Homo sapiens
  misc_RNA (1)...(19): siRNA sense strand
gaagucaguaaaugaacua

SEQ ID NO: 774936 - RNA, 19 nt, Homo sapiens
  misc_RNA (1)...(19): siRNA sense strand
gaauauaggcagauguaca

SEQ ID NO: 774937 - RNA, 19 nt, Homo sapiens
  misc_RNA (1)...(19): siRNA sense strand
acagauaacgcuuugauug

SEQ ID NO: 774938 - RNA, 19 nt, Homo sapiens
  misc_RNA (1)...(19): siRNA sense strand
gucaguaaaugaacuaauc

SEQ ID NO: 774939 - RNA, 19 nt, Homo sapiens
  misc_RNA (1)...(19): siRNA sense strand
aaucuucaauggaaccuuu

SEQ ID NO: 774940 - RNA, 19 nt, Homo sapiens
  misc_RNA (1)...(19): siRNA sense strand
gaggaagcuuaucuaugaa

SEQ ID NO: 774941 - RNA, 19 nt, Homo sapiens
  misc_RNA (1)...(19): siRNA sense strand
gaucaacaggcuuauuaga

SEQ ID NO: 774942 - RNA, 19 nt, Homo sapiens
  misc_RNA (1)...(19): siRNA sense strand
gcgaauugcuuugacagau

SEQ ID NO: 774943 - RNA, 19 nt, Homo sapiens
  misc_RNA (1)...(19): siRNA sense strand
gaaccuuugugaagcucaa

SEQ ID NO: 774944 - RNA, 19 nt, Homo sapiens
  misc_RNA (1)...(19): siRNA sense strand
gcaaggaggaagcuuaucu

SEQ ID NO: 774945 - RNA, 19 nt, Homo sapiens
  misc_RNA (1)...(19): siRNA sense strand
gaucuauacuguuggaaaa

SEQ ID NO: 774946 - RNA, 19 nt, Homo sapiens
  misc_RNA (1)...(19): siRNA sense strand
uggaggauuugauucauga

SEQ ID NO: 774947 - RNA, 19 nt, Homo sapiens
  misc_RNA (1)...(19): siRNA sense strand
gcuggcaacuucuauguac

SEQ ID NO: 774948 - RNA, 19 nt, Homo sapiens
  misc_RNA (1)...(19): siRNA sense strand
gcauggaggauuugauuca

SEQ ID NO: 774949 - RNA, 19 nt, Homo sapiens
  misc_RNA (1)...(19): siRNA sense strand
uagaagagaagaagaagga

SEQ ID NO: 774950 - RNA, 19 nt, Homo sapiens
  misc_RNA (1)...(19): siRNA sense strand
uggcgaggauggcaagaaa

SEQ ID NO: 774951 - RNA, 19 nt, Homo sapiens
  misc_RNA (1)...(19): siRNA sense strand
caagcgugguuauggcaaa

SEQ ID NO: 774952 - RNA, 19 nt, Homo sapiens
  misc_RNA (1)...(19): siRNA sense strand
aagaaaagcuggcaacuuc

SEQ ID NO: 774953 - RNA, 19 nt, Homo sapiens
  misc_RNA (1)...(19): siRNA sense strand
caaggaggaagcuuaucua

SEQ ID NO: 774954 - RNA, 19 nt, Homo sapiens
  misc_RNA (1)...(19): siRNA sense strand
ggauuugauucaugagauc

SEQ ID NO: 774955 - RNA, 19 nt, Homo sapiens
  misc_RNA (1)...(19): siRNA sense strand
cucgaucucuugguaaaua

SEQ ID NO: 774956 - RNA, 19 nt, Homo sapiens
  misc_RNA (1)...(19): siRNA sense strand
gcccaaagguucgaaaggu

SEQ ID NO: 774957 - RNA, 19 nt, Homo sapiens
  misc_RNA (1)...(19): siRNA sense strand
caauggaaccuuugugaag

SEQ ID NO: 774958 - RNA, 19 nt, Homo sapiens
  misc_RNA (1)...(19): siRNA sense strand
caacagggaggaccagauc

SEQ ID NO: 774959 - RNA, 19 nt, Homo sapiens
  misc_RNA (1)...(19): siRNA sense strand
cgauuaacaugcugaggau

SEQ ID NO: 774960 - RNA, 19 nt, Homo sapiens
  misc_RNA (1)...(19): siRNA sense strand
ccagaaacccuuaagaaaa

SEQ ID NO: 774961 - RNA, 19 nt, Homo sapiens
  misc_RNA (1)...(19): siRNA sense strand
guaaauacggcaucaucug

SEQ ID NO: 774962 - RNA, 19 nt, Homo sapiens
  misc_RNA (1)...(19): siRNA sense strand
ugagaucuauacuguugga

SEQ ID NO: 774963 - RNA, 19 nt, Homo sapiens
  misc_RNA (1)...(19): siRNA sense strand
ucaucugcauggaggauuu

SEQ ID NO: 774964 - RNA, 19 nt, Homo sapiens
  misc_RNA (1)...(19): siRNA sense strand
gaaaagcuggcaacuucua

SEQ ID NO: 774965 - RNA, 19 nt, Homo sapiens
  misc_RNA (1)...(19): siRNA sense strand
ucaauggagugagcccaaa

SEQ ID NO: 774966 - RNA, 19 nt, Homo sapiens
  misc_RNA (1)...(19): siRNA sense strand
cuucuucgccuucgucaaa

SEQ ID NO: 774967 - RNA, 19 nt, Homo sapiens
  misc_RNA (1)...(19): siRNA sense strand
ggaagcuuaucuaugaaaa

SEQ ID NO: 774968 - RNA, 19 nt, Homo sapiens
  misc_RNA (1)...(19): siRNA sense strand
uucaugagaucuauacugu

SEQ ID NO: 774969 - RNA, 19 nt, Homo sapiens
  misc_RNA (1)...(19): siRNA sense strand
gcucaacaaggcuucgauu

SEQ ID NO: 774970 - RNA, 19 nt, Homo sapiens
  misc_RNA (1)...(19): siRNA sense strand
ugacagauaacgcuuugau

SEQ ID NO: 774971 - RNA, 19 nt, Homo sapiens
  misc_RNA (1)...(19): siRNA sense strand
gacagauaacgcuuugauu

SEQ ID NO: 774972 - RNA, 19 nt, Homo sapiens
  misc_RNA (1)...(19): siRNA sense strand
ucaauggaaccuuugugaa

SEQ ID NO: 774973 - RNA, 19 nt, Homo sapiens
  misc_RNA (1)...(19): siRNA sense strand
ugaagucaguaaaugaacu

SEQ ID NO: 774974 - RNA, 19 nt, Homo sapiens
  misc_RNA (1)...(19): siRNA sense strand
cccaaaagaugcuucgaaa

SEQ ID NO: 774975 - RNA, 19 nt, Homo sapiens
  misc_RNA (1)...(19): siRNA sense strand
gaauuucgcagagcugaag

SEQ ID NO: 774976 - RNA, 19 nt, Homo sapiens
  misc_RNA (1)...(19): siRNA sense strand
gaggauuugauucaugaga

SEQ ID NO: 774977 - RNA, 19 nt, Homo sapiens
  misc_RNA (1)...(19): siRNA sense strand
guguagaagagaagaagaa

SEQ ID NO: 774978 - RNA, 19 nt, Homo sapiens
  misc_RNA (1)...(19): siRNA sense strand
caaaagaugcuucgaaagg

SEQ ID NO: 774979 - RNA, 19 nt, Homo sapiens
  misc_RNA (1)...(19): siRNA sense strand
gcaacagggaggaccagau

SEQ ID NO: 774980 - RNA, 19 nt, Homo sapiens
  misc_RNA (1)...(19): siRNA sense strand
cugcauggaggauuugauu

SEQ ID NO: 774981 - RNA, 19 nt, Homo sapiens
  misc_RNA (1)...(19): siRNA sense strand
aacaaggcuucgauuaaca

SEQ ID NO: 774982 - RNA, 19 nt, Homo sapiens
  misc_RNA (1)...(19): siRNA sense strand
cucaacaaggcuucgauua

SEQ ID NO: 774983 - RNA, 19 nt, Homo sapiens
  misc_RNA (1)...(19): siRNA sense strand
uuugacagauaacgcuuug

SEQ ID NO: 774984 - RNA, 19 nt, Homo sapiens
  misc_RNA (1)...(19): siRNA sense strand
aaauuggcguuugucauca

SEQ ID NO: 774985 - RNA, 19 nt, Homo sapiens
  misc_RNA (1)...(19): siRNA sense strand
ggaauuucgcagagcugaa

SEQ ID NO: 774986 - RNA, 19 nt, Homo sapiens
  misc_RNA (1)...(19): siRNA sense strand
uguagaagguggagaugcu

SEQ ID NO: 774987 - RNA, 19 nt, Homo sapiens
  misc_RNA (1)...(19): siRNA sense strand
gguaaauacggcaucaucu

SEQ ID NO: 774988 - RNA, 19 nt, Homo sapiens
  misc_RNA (1)...(19): siRNA sense strand
uuaacaugcugaggauugu

SEQ ID NO: 774989 - RNA, 19 nt, Homo sapiens
  misc_RNA (1)...(19): siRNA sense strand
aaggcaaggaggaagcuua

SEQ ID NO: 774990 - RNA, 19 nt, Homo sapiens
  misc_RNA (1)...(19): siRNA sense strand
cagauaacgcuuugauugc

SEQ ID NO: 774991 - RNA, 19 nt, Homo sapiens
  misc_RNA (1)...(19): siRNA sense strand
gggaggaccagaucaacag

SEQ ID NO: 774992 - RNA, 19 nt, Homo sapiens
  misc_RNA (1)...(19): siRNA sense strand
uaacaugcugaggauugua

SEQ ID NO: 774993 - RNA, 19 nt, Homo sapiens
  misc_RNA (1)...(19): siRNA sense strand
aggcuuauuagaagaauga

SEQ ID NO: 774994 - RNA, 19 nt, Homo sapiens
  misc_RNA (1)...(19): siRNA sense strand
ccagaucaacaggcuuauu

SEQ ID NO: 774995 - RNA, 19 nt, Homo sapiens
  misc_RNA (1)...(19): siRNA sense strand
aggauuugauucaugagau

SEQ ID NO: 774996 - RNA, 19 nt, Homo sapiens
  misc_RNA (1)...(19): siRNA sense strand
cauggaggauuugauucau

SEQ ID NO: 774997 - RNA, 19 nt, Homo sapiens
  misc_RNA (1)...(19): siRNA sense strand
gguuauggcaaaaucaaua

SEQ ID NO: 774998 - RNA, 19 nt, Homo sapiens
  misc_RNA (1)...(19): siRNA sense strand
uaaucuacaagcgugguua

SEQ ID NO: 774999 - RNA, 19 nt, Homo sapiens
  misc_RNA (1)...(19): siRNA sense strand
uuugauugcucgaucucuu

SEQ ID NO: 775000 - RNA, 19 nt, Homo sapiens
  misc_RNA (1)...(19): siRNA sense strand
gaacaggaguuuacuuauu

SEQ ID NO: 775001 - RNA, 19 nt, Homo sapiens
  misc_RNA (1)...(19): siRNA sense strand
gcacaacggcucugacuua

SEQ ID NO: 775002 - RNA, 19 nt, Homo sapiens
  misc_RNA (1)...(19): siRNA sense strand
gagggaaacugcauugauu

SEQ ID NO: 775003 - RNA, 19 nt, Homo sapiens
  misc_RNA (1)...(19): siRNA sense strand
cacagcaggugucgaauua

SEQ ID NO: 775004 - RNA, 19 nt, Homo sapiens
  misc_RNA (1)...(19): siRNA sense strand
gaaacugcauugauucuca

SEQ ID NO: 775005 - RNA, 19 nt, Homo sapiens
  misc_RNA (1)...(19): siRNA sense strand
gcauugauucucaguauua

SEQ ID NO: 775006 - RNA, 19 nt, Homo sapiens
  misc_RNA (1)...(19): siRNA sense strand
caacggcucugacuuaaca

SEQ ID NO: 775007 - RNA, 19 nt, Homo sapiens
  misc_RNA (1)...(19): siRNA sense strand
gaaacaauaucgccaagag

SEQ ID NO: 775008 - RNA, 19 nt, Homo sapiens
  misc_RNA (1)...(19): siRNA sense strand
ggaaccauuucuucuauau

SEQ ID NO: 775009 - RNA, 19 nt, Homo sapiens
  misc_RNA (1)...(19): siRNA sense strand
caacuucaggccacuauua

SEQ ID NO: 775010 - RNA, 19 nt, Homo sapiens
  misc_RNA (1)...(19): siRNA sense strand
ggucuccacuugugucuaa

SEQ ID NO: 775011 - RNA, 19 nt, Homo sapiens
  misc_RNA (1)...(19): siRNA sense strand
ucagugaccuucagauaga

SEQ ID NO: 775012 - RNA, 19 nt, Homo sapiens
  misc_RNA (1)...(19): siRNA sense strand
cagcaggugucgaauuaaa

SEQ ID NO: 775013 - RNA, 19 nt, Homo sapiens
  misc_RNA (1)...(19): siRNA sense strand
agucacggcuggucaauaa

SEQ ID NO: 775014 - RNA, 19 nt, Homo sapiens
  misc_RNA (1)...(19): siRNA sense strand
ucacaucacacugcaauua

SEQ ID NO: 775015 - RNA, 19 nt, Homo sapiens
  misc_RNA (1)...(19): siRNA sense strand
ggagcaccuuucauuguaa

SEQ ID NO: 775016 - RNA, 19 nt, Homo sapiens
  misc_RNA (1)...(19): siRNA sense strand
gugaacaggaguuuacuua

SEQ ID NO: 775017 - RNA, 19 nt, Homo sapiens
  misc_RNA (1)...(19): siRNA sense strand
gaaauacuaauccagagaa

SEQ ID NO: 775018 - RNA, 19 nt, Homo sapiens
  misc_RNA (1)...(19): siRNA sense strand
gaucagcuuuggagggauu

SEQ ID NO: 775019 - RNA, 19 nt, Homo sapiens
  misc_RNA (1)...(19): siRNA sense strand
gcagucaugugaagccuau

SEQ ID NO: 775020 - RNA, 19 nt, Homo sapiens
  misc_RNA (1)...(19): siRNA sense strand
aaacuuaagucgaaucucu

SEQ ID NO: 775021 - RNA, 19 nt, Homo sapiens
  misc_RNA (1)...(19): siRNA sense strand
gcagagugaugggauucua

SEQ ID NO: 775022 - RNA, 19 nt, Homo sapiens
  misc_RNA (1)...(19): siRNA sense strand
cuauauagauucagaugga

SEQ ID NO: 775023 - RNA, 19 nt, Homo sapiens
  misc_RNA (1)...(19): siRNA sense strand
uaacaagagucagaaauac

SEQ ID NO: 775024 - RNA, 19 nt, Homo sapiens
  misc_RNA (1)...(19): siRNA sense strand
guaggaagaaccaaugaaa

SEQ ID NO: 775025 - RNA, 19 nt, Homo sapiens
  misc_RNA (1)...(19): siRNA sense strand
ccagcuaccuccugauguu

SEQ ID NO: 775026 - RNA, 19 nt, Homo sapiens
  misc_RNA (1)...(19): siRNA sense strand
gcacagaggaaauacuuca

SEQ ID NO: 775027 - RNA, 19 nt, Homo sapiens
  misc_RNA (1)...(19): siRNA sense strand
uggagcaccuuucauugua

SEQ ID NO: 775028 - RNA, 19 nt, Homo sapiens
  misc_RNA (1)...(19): siRNA sense strand
gaacuucagugaccuucag

SEQ ID NO: 775029 - RNA, 19 nt, Homo sapiens
  misc_RNA (1)...(19): siRNA sense strand
gaucauugcuaugggaaau

SEQ ID NO: 775030 - RNA, 19 nt, Homo sapiens
  misc_RNA (1)...(19): siRNA sense strand
cagaagugguugaucuuga

SEQ ID NO: 775031 - RNA, 19 nt, Homo sapiens
  misc_RNA (1)...(19): siRNA sense strand
ccaaugaaacgcaaaccua

SEQ ID NO: 775032 - RNA, 19 nt, Homo sapiens
  misc_RNA (1)...(19): siRNA sense strand
guucggaugugcauacaga

SEQ ID NO: 775033 - RNA, 19 nt, Homo sapiens
  misc_RNA (1)...(19): siRNA sense strand
caauuucgaacuuggaaua

SEQ ID NO: 775034 - RNA, 19 nt, Homo sapiens
  misc_RNA (1)...(19): siRNA sense strand
gcaaagugguagaucugau

SEQ ID NO: 775035 - RNA, 19 nt, Homo sapiens
  misc_RNA (1)...(19): siRNA sense strand
ggccugagcagauuuauuc

SEQ ID NO: 775036 - RNA, 19 nt, Homo sapiens
  misc_RNA (1)...(19): siRNA sense strand
aaauggagaucacaucaca

SEQ ID NO: 775037 - RNA, 19 nt, Homo sapiens
  misc_RNA (1)...(19): siRNA sense strand
gcaauuaagaagagcaaga

SEQ ID NO: 775038 - RNA, 19 nt, Homo sapiens
  misc_RNA (1)...(19): siRNA sense strand
gcaaaugcagacaguguug

SEQ ID NO: 775039 - RNA, 19 nt, Homo sapiens
  misc_RNA (1)...(19): siRNA sense strand
ucagugucauucccacaua

SEQ ID NO: 775040 - RNA, 19 nt, Homo sapiens
  misc_RNA (1)...(19): siRNA sense strand
cagacaguguuguguacua

SEQ ID NO: 775041 - RNA, 19 nt, Homo sapiens
  misc_RNA (1)...(19): siRNA sense strand
gcaguggcauucugucucu

SEQ ID NO: 775042 - RNA, 19 nt, Homo sapiens
  misc_RNA (1)...(19): siRNA sense strand
ggaaauacuucaggguuuu

SEQ ID NO: 775043 - RNA, 19 nt, Homo sapiens
  misc_RNA (1)...(19): siRNA sense strand
uauaagcacagaggaaaua

SEQ ID NO: 775044 - RNA, 19 nt, Homo sapiens
  misc_RNA (1)...(19): siRNA sense strand
caaagugguagaucugauu

SEQ ID NO: 775045 - RNA, 19 nt, Homo sapiens
  misc_RNA (1)...(19): siRNA sense strand
gaaugcgaaucgaaguguu

SEQ ID NO: 775046 - RNA, 19 nt, Homo sapiens
  misc_RNA (1)...(19): siRNA sense strand
cacaacggcucugacuuaa

SEQ ID NO: 775047 - RNA, 19 nt, Homo sapiens
  misc_RNA (1)...(19): siRNA sense strand
cauuguaacuguaccaaca

SEQ ID NO: 775048 - RNA, 19 nt, Homo sapiens
  misc_RNA (1)...(19): siRNA sense strand
gguguuugcccaacuauug

SEQ ID NO: 775049 - RNA, 19 nt, Homo sapiens
  misc_RNA (1)...(19): siRNA sense strand
gcaggugucgaauuaaaug

SEQ ID NO: 775050 - RNA, 19 nt, Homo sapiens
  misc_RNA (1)...(19): siRNA sense strand
gaucacaucacacugcaau

SEQ ID NO: 775051 - RNA, 19 nt, Homo sapiens
  misc_RNA (1)...(19): siRNA sense strand
acaagagucagaaauacua

SEQ ID NO: 775052 - RNA, 19 nt, Homo sapiens
  misc_RNA (1)...(19): siRNA sense strand
ggauuugcaaggcugaaua

SEQ ID NO: 775053 - RNA, 19 nt, Homo sapiens
  misc_RNA (1)...(19): siRNA sense strand
aggaaauacuucaggguuu

SEQ ID NO: 775054 - RNA, 19 nt, Homo sapiens
  misc_RNA (1)...(19): siRNA sense strand
caucacagcaggugucgaa

SEQ ID NO: 775055 - RNA, 19 nt, Homo sapiens
  misc_RNA (1)...(19): siRNA sense strand
aaccacagaucauugcuau

SEQ ID NO: 775056 - RNA, 19 nt, Homo sapiens
  misc_RNA (1)...(19): siRNA sense strand
ggauuucagggauguauga

SEQ ID NO: 775057 - RNA, 19 nt, Homo sapiens
  misc_RNA (1)...(19): siRNA sense strand
guggcauucugucucuuua

SEQ ID NO: 775058 - RNA, 19 nt, Homo sapiens
  misc_RNA (1)...(19): siRNA sense strand
gguauccuccucuuucuga

SEQ ID NO: 775059 - RNA, 19 nt, Homo sapiens
  misc_RNA (1)...(19): siRNA sense strand
ggcuggaacuggaaacaau

SEQ ID NO: 775060 - RNA, 19 nt, Homo sapiens
  misc_RNA (1)...(19): siRNA sense strand
gaggagcuacuugccauaa

SEQ ID NO: 775061 - RNA, 19 nt, Homo sapiens
  misc_RNA (1)...(19): siRNA sense strand
agacucauguggcaucuca

SEQ ID NO: 775062 - RNA, 19 nt, Homo sapiens
  misc_RNA (1)...(19): siRNA sense strand
ugguugaucuugauggaaa

SEQ ID NO: 775063 - RNA, 19 nt, Homo sapiens
  misc_RNA (1)...(19): siRNA sense strand
cugcauugauucucaguau

SEQ ID NO: 775064 - RNA, 19 nt, Homo sapiens
  misc_RNA (1)...(19): siRNA sense strand
ggagcuacuugccauaacu

SEQ ID NO: 775065 - RNA, 19 nt, Homo sapiens
  misc_RNA (1)...(19): siRNA sense strand
ggugucgaauuaaaugaug

SEQ ID NO: 775066 - RNA, 19 nt, Homo sapiens
  misc_RNA (1)...(19): siRNA sense strand
guucacaaccacaaucuau

SEQ ID NO: 775067 - RNA, 19 nt, Homo sapiens
  misc_RNA (1)...(19): siRNA sense strand
uugcaaggcugaauagaag

SEQ ID NO: 775068 - RNA, 19 nt, Homo sapiens
  misc_RNA (1)...(19): siRNA sense strand
gaacacaggcaucauuucc

SEQ ID NO: 775069 - RNA, 19 nt, Homo sapiens
  misc_RNA (1)...(19): siRNA sense strand
aaaguucccuucucuacag

SEQ ID NO: 775070 - RNA, 19 nt, Homo sapiens
  misc_RNA (1)...(19): siRNA sense strand
ccacagaucauugcuaugg

SEQ ID NO: 775071 - RNA, 19 nt, Homo sapiens
  misc_RNA (1)...(19): siRNA sense strand
gacgaacacaggcaucauu

SEQ ID NO: 775072 - RNA, 19 nt, Homo sapiens
  misc_RNA (1)...(19): siRNA sense strand
auacagaucagaagugguu

SEQ ID NO: 775073 - RNA, 19 nt, Homo sapiens
  misc_RNA (1)...(19): siRNA sense strand
uggaaccauuucuucuaua

SEQ ID NO: 775074 - RNA, 19 nt, Homo sapiens
  misc_RNA (1)...(19): siRNA sense strand
acacugcaauuaagaagag

SEQ ID NO: 775075 - RNA, 19 nt, Homo sapiens
  misc_RNA (1)...(19): siRNA sense strand
gcuggaacuggaaacaaua

SEQ ID NO: 775076 - RNA, 19 nt, Homo sapiens
  misc_RNA (1)...(19): siRNA sense strand
agaagugguugaucuugau

SEQ ID NO: 775077 - RNA, 19 nt, Homo sapiens
  misc_RNA (1)...(19): siRNA sense strand
caagagucagaaauacuaa

SEQ ID NO: 775078 - RNA, 19 nt, Homo sapiens
  misc_RNA (1)...(19): siRNA sense strand
uaucagcggcaaaguggua

SEQ ID NO: 775079 - RNA, 19 nt, Homo sapiens
  misc_RNA (1)...(19): siRNA sense strand
ggcauucugucucuuuauc

SEQ ID NO: 775080 - RNA, 19 nt, Homo sapiens
  misc_RNA (1)...(19): siRNA sense strand
ggagguuucugccacuuuu

SEQ ID NO: 775081 - RNA, 19 nt, Homo sapiens
  misc_RNA (1)...(19): siRNA sense strand
aaucuaugcccgugacuuu

SEQ ID NO: 775082 - RNA, 19 nt, Homo sapiens
  misc_RNA (1)...(19): siRNA sense strand
ccaaauggagaucacauca

SEQ ID NO: 775083 - RNA, 19 nt, Homo sapiens
  misc_RNA (1)...(19): siRNA sense strand
ucaaaaccaugcagaguga

SEQ ID NO: 775084 - RNA, 19 nt, Homo sapiens
  misc_RNA (1)...(19): siRNA sense strand
gaauuggaaugcgaaucga

SEQ ID NO: 775085 - RNA, 19 nt, Homo sapiens
  misc_RNA (1)...(19): siRNA sense strand
cuacuugccauaacucuau

SEQ ID NO: 775086 - RNA, 19 nt, Homo sapiens
  misc_RNA (1)...(19): siRNA sense strand
acacaggcaucauuuccau

SEQ ID NO: 775087 - RNA, 19 nt, Homo sapiens
  misc_RNA (1)...(19): siRNA sense strand
acuccagccuucuaucaaa

SEQ ID NO: 775088 - RNA, 19 nt, Homo sapiens
  misc_RNA (1)...(19): siRNA sense strand
cuggaaccauuucuucuau

SEQ ID NO: 775089 - RNA, 19 nt, Homo sapiens
  misc_RNA (1)...(19): siRNA sense strand
acagguguuugcccaacua

SEQ ID NO: 775090 - RNA, 19 nt, Homo sapiens
  misc_RNA (1)...(19): siRNA sense strand
ucacagcaggugucgaauu

SEQ ID NO: 775091 - RNA, 19 nt, Homo sapiens
  misc_RNA (1)...(19): siRNA sense strand
gaucagcauuggcauucag

SEQ ID NO: 775092 - RNA, 19 nt, Homo sapiens
  misc_RNA (1)...(19): siRNA sense strand
cacaucacacugcaauuaa

SEQ ID NO: 775093 - RNA, 19 nt, Homo sapiens
  misc_RNA (1)...(19): siRNA sense strand
ggaaugcgaaucgaagugu

SEQ ID NO: 775094 - RNA, 19 nt, Homo sapiens
  misc_RNA (1)...(19): siRNA sense strand
guucuucgccugaucuuca

SEQ ID NO: 775095 - RNA, 19 nt, Homo sapiens
  misc_RNA (1)...(19): siRNA sense strand
ugacugugaugauccucuu

SEQ ID NO: 775096 - RNA, 19 nt, Homo sapiens
  misc_RNA (1)...(19): siRNA sense strand
gauugaccuuggagagaga

SEQ ID NO: 775097 - RNA, 19 nt, Homo sapiens
  misc_RNA (1)...(19): siRNA sense strand
gaugaucagcauuggcauu

SEQ ID NO: 775098 - RNA, 19 nt, Homo sapiens
  misc_RNA (1)...(19): siRNA sense strand
gcuaaacugccuuccacuu

SEQ ID NO: 775099 - RNA, 19 nt, Homo sapiens
  misc_RNA (1)...(19): siRNA sense strand
gaccagcuaccuccugaug

SEQ ID NO: 775100 - RNA, 19 nt, Homo sapiens
  misc_RNA (1)...(19): siRNA sense strand
gaacaggaguuuacuuauu

SEQ ID NO: 775101 - RNA, 19 nt, Homo sapiens
  misc_RNA (1)...(19): siRNA sense strand
gcacaacggcucugacuua

SEQ ID NO: 775102 - RNA, 19 nt, Homo sapiens
  misc_RNA (1)...(19): siRNA sense strand
gagggaaacugcauugauu

SEQ ID NO: 775103 - RNA, 19 nt, Homo sapiens
  misc_RNA (1)...(19): siRNA sense strand
cacagcaggugucgaauua

SEQ ID NO: 775104 - RNA, 19 nt, Homo sapiens
  misc_RNA (1)...(19): siRNA sense strand
gaaacugcauugauucuca

SEQ ID NO: 775105 - RNA, 19 nt, Homo sapiens
  misc_RNA (1)...(19): siRNA sense strand
gcauugauucucaguauua

SEQ ID NO: 775106 - RNA, 19 nt, Homo sapiens
  misc_RNA (1)...(19): siRNA sense strand
caacggcucugacuuaaca

SEQ ID NO: 775107 - RNA, 19 nt, Homo sapiens
  misc_RNA (1)...(19): siRNA sense strand
gaaacaauaucgccaagag

SEQ ID NO: 775108 - RNA, 19 nt, Homo sapiens
  misc_RNA (1)...(19): siRNA sense strand
ggaaccauuucuucuauau

SEQ ID NO: 775109 - RNA, 19 nt, Homo sapiens
  misc_RNA (1)...(19): siRNA sense strand
caacuucaggccacuauua

SEQ ID NO: 775110 - RNA, 19 nt, Homo sapiens
  misc_RNA (1)...(19): siRNA sense strand
ggucuccacuugugucuaa

SEQ ID NO: 775111 - RNA, 19 nt, Homo sapiens
  misc_RNA (1)...(19): siRNA sense strand
ucagugaccuucagauaga

SEQ ID NO: 775112 - RNA, 19 nt, Homo sapiens
  misc_RNA (1)...(19): siRNA sense strand
cagcaggugucgaauuaaa

SEQ ID NO: 775113 - RNA, 19 nt, Homo sapiens
  misc_RNA (1)...(19): siRNA sense strand
agucacggcuggucaauaa

SEQ ID NO: 775114 - RNA, 19 nt, Homo sapiens
  misc_RNA (1)...(19): siRNA sense strand
ucacaucacacugcaauua

SEQ ID NO: 775115 - RNA, 19 nt, Homo sapiens
  misc_RNA (1)...(19): siRNA sense strand
ggagcaccuuucauuguaa

SEQ ID NO: 775116 - RNA, 19 nt, Homo sapiens
  misc_RNA (1)...(19): siRNA sense strand
gugaacaggaguuuacuua

SEQ ID NO: 775117 - RNA, 19 nt, Homo sapiens
  misc_RNA (1)...(19): siRNA sense strand
gaaauacuaauccagagaa

SEQ ID NO: 775118 - RNA, 19 nt, Homo sapiens
  misc_RNA (1)...(19): siRNA sense strand
gaucagcuuuggagggauu

SEQ ID NO: 775119 - RNA, 19 nt, Homo sapiens
  misc_RNA (1)...(19): siRNA sense strand
gcagucaugugaagccuau

SEQ ID NO: 775120 - RNA, 19 nt, Homo sapiens
  misc_RNA (1)...(19): siRNA sense strand
aaacuuaagucgaaucucu

SEQ ID NO: 775121 - RNA, 19 nt, Homo sapiens
  misc_RNA (1)...(19): siRNA sense strand
gcagagugaugggauucua

SEQ ID NO: 775122 - RNA, 19 nt, Homo sapiens
  misc_RNA (1)...(19): siRNA sense strand
cuauauagauucagaugga

SEQ ID NO: 775123 - RNA, 19 nt, Homo sapiens
  misc_RNA (1)...(19): siRNA sense strand
uaacaagagucagaaauac

SEQ ID NO: 775124 - RNA, 19 nt, Homo sapiens
  misc_RNA (1)...(19): siRNA sense strand
guaggaagaaccaaugaaa

SEQ ID NO: 775125 - RNA, 19 nt, Homo sapiens
  misc_RNA (1)...(19): siRNA sense strand
ccagcuaccuccugauguu

SEQ ID NO: 775126 - RNA, 19 nt, Homo sapiens
  misc_RNA (1)...(19): siRNA sense strand
gcacagaggaaauacuuca

SEQ ID NO: 775127 - RNA, 19 nt, Homo sapiens
  misc_RNA (1)...(19): siRNA sense strand
uggagcaccuuucauugua

SEQ ID NO: 775128 - RNA, 19 nt, Homo sapiens
  misc_RNA (1)...(19): siRNA sense strand
gaacuucagugaccuucag

SEQ ID NO: 775129 - RNA, 19 nt, Homo sapiens
  misc_RNA (1)...(19): siRNA sense strand
gaucauugcuaugggaaau

SEQ ID NO: 775130 - RNA, 19 nt, Homo sapiens
  misc_RNA (1)...(19): siRNA sense strand
cagaagugguugaucuuga

SEQ ID NO: 775131 - RNA, 19 nt, Homo sapiens
  misc_RNA (1)...(19): siRNA sense strand
ccaaugaaacgcaaaccua

SEQ ID NO: 775132 - RNA, 19 nt, Homo sapiens
  misc_RNA (1)...(19): siRNA sense strand
guucggaugugcauacaga

SEQ ID NO: 775133 - RNA, 19 nt, Homo sapiens
  misc_RNA (1)...(19): siRNA sense strand
caauuucgaacuuggaaua

SEQ ID NO: 775134 - RNA, 19 nt, Homo sapiens
  misc_RNA (1)...(19): siRNA sense strand
gcaaagugguagaucugau

SEQ ID NO: 775135 - RNA, 19 nt, Homo sapiens
  misc_RNA (1)...(19): siRNA sense strand
ggccugagcagauuuauuc

SEQ ID NO: 775136 - RNA, 19 nt, Homo sapiens
  misc_RNA (1)...(19): siRNA sense strand
aaauggagaucacaucaca

SEQ ID NO: 775137 - RNA, 19 nt, Homo sapiens
  misc_RNA (1)...(19): siRNA sense strand
gcaauuaagaagagcaaga

SEQ ID NO: 775138 - RNA, 19 nt, Homo sapiens
  misc_RNA (1)...(19): siRNA sense strand
gcaaaugcagacaguguug

SEQ ID NO: 775139 - RNA, 19 nt, Homo sapiens
  misc_RNA (1)...(19): siRNA sense strand
ucagugucauucccacaua

SEQ ID NO: 775140 - RNA, 19 nt, Homo sapiens
  misc_RNA (1)...(19): siRNA sense strand
cagacaguguuguguacua

SEQ ID NO: 775141 - RNA, 19 nt, Homo sapiens
  misc_RNA (1)...(19): siRNA sense strand
gcaguggcauucugucucu

SEQ ID NO: 775142 - RNA, 19 nt, Homo sapiens
  misc_RNA (1)...(19): siRNA sense strand
ggaaauacuucaggguuuu

SEQ ID NO: 775143 - RNA, 19 nt, Homo sapiens
  misc_RNA (1)...(19): siRNA sense strand
uauaagcacagaggaaaua

SEQ ID NO: 775144 - RNA, 19 nt, Homo sapiens
  misc_RNA (1)...(19): siRNA sense strand
caaagugguagaucugauu

SEQ ID NO: 775145 - RNA, 19 nt, Homo sapiens
  misc_RNA (1)...(19): siRNA sense strand
gaaugcgaaucgaaguguu

SEQ ID NO: 775146 - RNA, 19 nt, Homo sapiens
  misc_RNA (1)...(19): siRNA sense strand
cacaacggcucugacuuaa

SEQ ID NO: 775147 - RNA, 19 nt, Homo sapiens
  misc_RNA (1)...(19): siRNA sense strand
cauuguaacuguaccaaca

SEQ ID NO: 775148 - RNA, 19 nt, Homo sapiens
  misc_RNA (1)...(19): siRNA sense strand
gguguuugcccaacuauug

SEQ ID NO: 775149 - RNA, 19 nt, Homo sapiens
  misc_RNA (1)...(19): siRNA sense strand
gcaggugucgaauuaaaug

SEQ ID NO: 775150 - RNA, 19 nt, Homo sapiens
  misc_RNA (1)...(19): siRNA sense strand
gaucacaucacacugcaau

SEQ ID NO: 775151 - RNA, 19 nt, Homo sapiens
  misc_RNA (1)...(19): siRNA sense strand
acaagagucagaaauacua

SEQ ID NO: 775152 - RNA, 19 nt, Homo sapiens
  misc_RNA (1)...(19): siRNA sense strand
ggauuugcaaggcugaaua

SEQ ID NO: 775153 - RNA, 19 nt, Homo sapiens
  misc_RNA (1)...(19): siRNA sense strand
aggaaauacuucaggguuu

SEQ ID NO: 775154 - RNA, 19 nt, Homo sapiens
  misc_RNA (1)...(19): siRNA sense strand
caucacagcaggugucgaa

SEQ ID NO: 775155 - RNA, 19 nt, Homo sapiens
  misc_RNA (1)...(19): siRNA sense strand
aaccacagaucauugcuau

SEQ ID NO: 775156 - RNA, 19 nt, Homo sapiens
  misc_RNA (1)...(19): siRNA sense strand
ggauuucagggauguauga

SEQ ID NO: 775157 - RNA, 19 nt, Homo sapiens
  misc_RNA (1)...(19): siRNA sense strand
guggcauucugucucuuua

SEQ ID NO: 775158 - RNA, 19 nt, Homo sapiens
  misc_RNA (1)...(19): siRNA sense strand
gguauccuccucuuucuga

SEQ ID NO: 775159 - RNA, 19 nt, Homo sapiens
  misc_RNA (1)...(19): siRNA sense strand
ggcuggaacuggaaacaau

SEQ ID NO: 775160 - RNA, 19 nt, Homo sapiens
  misc_RNA (1)...(19): siRNA sense strand
gaggagcuacuugccauaa

SEQ ID NO: 775161 - RNA, 19 nt, Homo sapiens
  misc_RNA (1)...(19): siRNA sense strand
agacucauguggcaucuca

SEQ ID NO: 775162 - RNA, 19 nt, Homo sapiens
  misc_RNA (1)...(19): siRNA sense strand
ugguugaucuugauggaaa

SEQ ID NO: 775163 - RNA, 19 nt, Homo sapiens
  misc_RNA (1)...(19): siRNA sense strand
cugcauugauucucaguau

SEQ ID NO: 775164 - RNA, 19 nt, Homo sapiens
  misc_RNA (1)...(19): siRNA sense strand
ggagcuacuugccauaacu

SEQ ID NO: 775165 - RNA, 19 nt, Homo sapiens
  misc_RNA (1)...(19): siRNA sense strand
ggugucgaauuaaaugaug

SEQ ID NO: 775166 - RNA, 19 nt, Homo sapiens
  misc_RNA (1)...(19): siRNA sense strand
guucacaaccacaaucuau

SEQ ID NO: 775167 - RNA, 19 nt, Homo sapiens
  misc_RNA (1)...(19): siRNA sense strand
uugcaaggcugaauagaag

SEQ ID NO: 775168 - RNA, 19 nt, Homo sapiens
  misc_RNA (1)...(19): siRNA sense strand
gaacacaggcaucauuucc

SEQ ID NO: 775169 - RNA, 19 nt, Homo sapiens
  misc_RNA (1)...(19): siRNA sense strand
aaaguucccuucucuacag

SEQ ID NO: 775170 - RNA, 19 nt, Homo sapiens
  misc_RNA (1)...(19): siRNA sense strand
ccacagaucauugcuaugg

SEQ ID NO: 775171 - RNA, 19 nt, Homo sapiens
  misc_RNA (1)...(19): siRNA sense strand
gacgaacacaggcaucauu

SEQ ID NO: 775172 - RNA, 19 nt, Homo sapiens
  misc_RNA (1)...(19): siRNA sense strand
auacagaucagaagugguu

SEQ ID NO: 775173 - RNA, 19 nt, Homo sapiens
  misc_RNA (1)...(19): siRNA sense strand
uggaaccauuucuucuaua

SEQ ID NO: 775174 - RNA, 19 nt, Homo sapiens
  misc_RNA (1)...(19): siRNA sense strand
acacugcaauuaagaagag

SEQ ID NO: 775175 - RNA, 19 nt, Homo sapiens
  misc_RNA (1)...(19): siRNA sense strand
gcuggaacuggaaacaaua

SEQ ID NO: 775176 - RNA, 19 nt, Homo sapiens
  misc_RNA (1)...(19): siRNA sense strand
agaagugguugaucuugau

SEQ ID NO: 775177 - RNA, 19 nt, Homo sapiens
  misc_RNA (1)...(19): siRNA sense strand
caagagucagaaauacuaa

SEQ ID NO: 775178 - RNA, 19 nt, Homo sapiens
  misc_RNA (1)...(19): siRNA sense strand
uaucagcggcaaaguggua

SEQ ID NO: 775179 - RNA, 19 nt, Homo sapiens
  misc_RNA (1)...(19): siRNA sense strand
ggcauucugucucuuuauc

SEQ ID NO: 775180 - RNA, 19 nt, Homo sapiens
  misc_RNA (1)...(19): siRNA sense strand
ggagguuucugccacuuuu

SEQ ID NO: 775181 - RNA, 19 nt, Homo sapiens
  misc_RNA (1)...(19): siRNA sense strand
aaucuaugcccgugacuuu

SEQ ID NO: 775182 - RNA, 19 nt, Homo sapiens
  misc_RNA (1)...(19): siRNA sense strand
ccaaauggagaucacauca

SEQ ID NO: 775183 - RNA, 19 nt, Homo sapiens
  misc_RNA (1)...(19): siRNA sense strand
ucaaaaccaugcagaguga

SEQ ID NO: 775184 - RNA, 19 nt, Homo sapiens
  misc_RNA (1)...(19): siRNA sense strand
gaauuggaaugcgaaucga

SEQ ID NO: 775185 - RNA, 19 nt, Homo sapiens
  misc_RNA (1)...(19): siRNA sense strand
cuacuugccauaacucuau

SEQ ID NO: 775186 - RNA, 19 nt, Homo sapiens
  misc_RNA (1)...(19): siRNA sense strand
acacaggcaucauuuccau

SEQ ID NO: 775187 - RNA, 19 nt, Homo sapiens
  misc_RNA (1)...(19): siRNA sense strand
acuccagccuucuaucaaa

SEQ ID NO: 775188 - RNA, 19 nt, Homo sapiens
  misc_RNA (1)...(19): siRNA sense strand
cuggaaccauuucuucuau

SEQ ID NO: 775189 - RNA, 19 nt, Homo sapiens
  misc_RNA (1)...(19): siRNA sense strand
acagguguuugcccaacua

SEQ ID NO: 775190 - RNA, 19 nt, Homo sapiens
  misc_RNA (1)...(19): siRNA sense strand
ucacagcaggugucgaauu

SEQ ID NO: 775191 - RNA, 19 nt, Homo sapiens
  misc_RNA (1)...(19): siRNA sense strand
gaucagcauuggcauucag

SEQ ID NO: 775192 - RNA, 19 nt, Homo sapiens
  misc_RNA (1)...(19): siRNA sense strand
cacaucacacugcaauuaa

SEQ ID NO: 775193 - RNA, 19 nt, Homo sapiens
  misc_RNA (1)...(19): siRNA sense strand
ggaaugcgaaucgaagugu

SEQ ID NO: 775194 - RNA, 19 nt, Homo sapiens
  misc_RNA (1)...(19): siRNA sense strand
guucuucgccugaucuuca

SEQ ID NO: 775195 - RNA, 19 nt, Homo sapiens
  misc_RNA (1)...(19): siRNA sense strand
ugacugugaugauccucuu

SEQ ID NO: 775196 - RNA, 19 nt, Homo sapiens
  misc_RNA (1)...(19): siRNA sense strand
gauugaccuuggagagaga

SEQ ID NO: 775197 - RNA, 19 nt, Homo sapiens
  misc_RNA (1)...(19): siRNA sense strand
gaugaucagcauuggcauu

SEQ ID NO: 775198 - RNA, 19 nt, Homo sapiens
  misc_RNA (1)...(19): siRNA sense strand
gcuaaacugccuuccacuu

SEQ ID NO: 775199 - RNA, 19 nt, Homo sapiens
  misc_RNA (1)...(19): siRNA sense strand
gaccagcuaccuccugaug

SEQ ID NO: 775200 - RNA, 19 nt, Homo sapiens
  misc_RNA (1)...(19): siRNA sense strand
gaugagaccugccuaagca

SEQ ID NO: 775201 - RNA, 19 nt, Homo sapiens
  misc_RNA (1)...(19): siRNA sense strand
gaccagauccgcucccaua

SEQ ID NO: 775202 - RNA, 19 nt, Homo sapiens
  misc_RNA (1)...(19): siRNA sense strand
gagaagagcuaugcaaagc

SEQ ID NO: 775203 - RNA, 19 nt, Homo sapiens
  misc_RNA (1)...(19): siRNA sense strand
gaagaacugugggcagauc

SEQ ID NO: 775204 - RNA, 19 nt, Homo sapiens
  misc_RNA (1)...(19): siRNA sense strand
ccacagugcugcucuaucg

SEQ ID NO: 775205 - RNA, 19 nt, Homo sapiens
  misc_RNA (1)...(19): siRNA sense strand
agacccagcucuucuacaa

SEQ ID NO: 775206 - RNA, 19 nt, Homo sapiens
  misc_RNA (1)...(19): siRNA sense strand
gacaguguaugacccauca

SEQ ID NO: 775207 - RNA, 19 nt, Homo sapiens
  misc_RNA (1)...(19): siRNA sense strand
gcaaagcugguguucaugu

SEQ ID NO: 775208 - RNA, 19 nt, Homo sapiens
  misc_RNA (1)...(19): siRNA sense strand
gaaccugcaugccauccau

SEQ ID NO: 775209 - RNA, 19 nt, Homo sapiens
  misc_RNA (1)...(19): siRNA sense strand
agacuucacugucaacuac

SEQ ID NO: 775210 - RNA, 19 nt, Homo sapiens
  misc_RNA (1)...(19): siRNA sense strand
ggaccugugcccucuacua

SEQ ID NO: 775211 - RNA, 19 nt, Homo sapiens
  misc_RNA (1)...(19): siRNA sense strand
ugagggagacaguguauga

SEQ ID NO: 775212 - RNA, 19 nt, Homo sapiens
  misc_RNA (1)...(19): siRNA sense strand
cacccuggcuggacuguug

SEQ ID NO: 775213 - RNA, 19 nt, Homo sapiens
  misc_RNA (1)...(19): siRNA sense strand
gcuggucccugggcaacua

SEQ ID NO: 775214 - RNA, 19 nt, Homo sapiens
  misc_RNA (1)...(19): siRNA sense strand
ggacagaaggcaagagaac

SEQ ID NO: 775215 - RNA, 19 nt, Homo sapiens
  misc_RNA (1)...(19): siRNA sense strand
uccaaucucucugcuguuu

SEQ ID NO: 775216 - RNA, 19 nt, Homo sapiens
  misc_RNA (1)...(19): siRNA sense strand
ggucaaaugcgucaguugu

SEQ ID NO: 775217 - RNA, 19 nt, Homo sapiens
  misc_RNA (1)...(19): siRNA sense strand
acacagacauugggagcaa

SEQ ID NO: 775218 - RNA, 19 nt, Homo sapiens
  misc_RNA (1)...(19): siRNA sense strand
gaggacagaaggcaagaga

SEQ ID NO: 775219 - RNA, 19 nt, Homo sapiens
  misc_RNA (1)...(19): siRNA sense strand
ggaccugggacuccgcuuu

SEQ ID NO: 775220 - RNA, 19 nt, Homo sapiens
  misc_RNA (1)...(19): siRNA sense strand
ggaaucagagcuucuucga

SEQ ID NO: 775221 - RNA, 19 nt, Homo sapiens
  misc_RNA (1)...(19): siRNA sense strand
ccaggugccuucccucaag

SEQ ID NO: 775222 - RNA, 19 nt, Homo sapiens
  misc_RNA (1)...(19): siRNA sense strand
accaagugcucccagagua

SEQ ID NO: 775223 - RNA, 19 nt, Homo sapiens
  misc_RNA (1)...(19): siRNA sense strand
gaucugcagcuccaugaug

SEQ ID NO: 775224 - RNA, 19 nt, Homo sapiens
  misc_RNA (1)...(19): siRNA sense strand
agacauugggagcaaguua

SEQ ID NO: 775225 - RNA, 19 nt, Homo sapiens
  misc_RNA (1)...(19): siRNA sense strand
gcauggaccugggccucaa

SEQ ID NO: 775226 - RNA, 19 nt, Homo sapiens
  misc_RNA (1)...(19): siRNA sense strand
augcaaagcugguguucau

SEQ ID NO: 775227 - RNA, 19 nt, Homo sapiens
  misc_RNA (1)...(19): siRNA sense strand
caaucucucugcuguuucu

SEQ ID NO: 775228 - RNA, 19 nt, Homo sapiens
  misc_RNA (1)...(19): siRNA sense strand
caacuacaccucugucacu

SEQ ID NO: 775229 - RNA, 19 nt, Homo sapiens
  misc_RNA (1)...(19): siRNA sense strand
ugacagggacuuucugagu

SEQ ID NO: 775230 - RNA, 19 nt, Homo sapiens
  misc_RNA (1)...(19): siRNA sense strand
caaagcugguguucauguc

SEQ ID NO: 775231 - RNA, 19 nt, Homo sapiens
  misc_RNA (1)...(19): siRNA sense strand
cagaccaacuuccggaaca

SEQ ID NO: 775232 - RNA, 19 nt, Homo sapiens
  misc_RNA (1)...(19): siRNA sense strand
cagauccgcucccauacca

SEQ ID NO: 775233 - RNA, 19 nt, Homo sapiens
  misc_RNA (1)...(19): siRNA sense strand
agccagaccugccagaugu

SEQ ID NO: 775234 - RNA, 19 nt, Homo sapiens
  misc_RNA (1)...(19): siRNA sense strand
gaggcaagcccagagagaa

SEQ ID NO: 775235 - RNA, 19 nt, Homo sapiens
  misc_RNA (1)...(19): siRNA sense strand
caacuacugcaucuccuau

SEQ ID NO: 775236 - RNA, 19 nt, Homo sapiens
  misc_RNA (1)...(19): siRNA sense strand
caaccacacgcucaucuuc

SEQ ID NO: 775237 - RNA, 19 nt, Homo sapiens
  misc_RNA (1)...(19): siRNA sense strand
cugguggccuucuuccuuu

SEQ ID NO: 775238 - RNA, 19 nt, Homo sapiens
  misc_RNA (1)...(19): siRNA sense strand
acccagcucuucuacaaug

SEQ ID NO: 775239 - RNA, 19 nt, Homo sapiens
  misc_RNA (1)...(19): siRNA sense strand
gcauggaacaggaccagau

SEQ ID NO: 775240 - RNA, 19 nt, Homo sapiens
  misc_RNA (1)...(19): siRNA sense strand
ucagugggccucucaguag

SEQ ID NO: 775241 - RNA, 19 nt, Homo sapiens
  misc_RNA (1)...(19): siRNA sense strand
gcugguggccuucuuccuu

SEQ ID NO: 775242 - RNA, 19 nt, Homo sapiens
  misc_RNA (1)...(19): siRNA sense strand
gugcuucccucauggacau

SEQ ID NO: 775243 - RNA, 19 nt, Homo sapiens
  misc_RNA (1)...(19): siRNA sense strand
gaccugggacuccgcuuug

SEQ ID NO: 775244 - RNA, 19 nt, Homo sapiens
  misc_RNA (1)...(19): siRNA sense strand
gugucuggcugucaucuuc

SEQ ID NO: 775245 - RNA, 19 nt, Homo sapiens
  misc_RNA (1)...(19): siRNA sense strand
gcaccucgcgucugcucuu

SEQ ID NO: 775246 - RNA, 19 nt, Homo sapiens
  misc_RNA (1)...(19): siRNA sense strand
gaccugggcagaacaaguc

SEQ ID NO: 775247 - RNA, 19 nt, Homo sapiens
  misc_RNA (1)...(19): siRNA sense strand
ggccaaggcugcagauccu

SEQ ID NO: 775248 - RNA, 19 nt, Homo sapiens
  misc_RNA (1)...(19): siRNA sense strand
acagaaggcaagagaacuu

SEQ ID NO: 775249 - RNA, 19 nt, Homo sapiens
  misc_RNA (1)...(19): siRNA sense strand
cagugggccucucaguaga

SEQ ID NO: 775250 - RNA, 19 nt, Homo sapiens
  misc_RNA (1)...(19): siRNA sense strand
ccacgggacacagacauug

SEQ ID NO: 775251 - RNA, 19 nt, Homo sapiens
  misc_RNA (1)...(19): siRNA sense strand
cgccgugguugguucacua

SEQ ID NO: 775252 - RNA, 19 nt, Homo sapiens
  misc_RNA (1)...(19): siRNA sense strand
caaccagacccagcucuuc

SEQ ID NO: 775253 - RNA, 19 nt, Homo sapiens
  misc_RNA (1)...(19): siRNA sense strand
gugcccagguucccaccaa

SEQ ID NO: 775254 - RNA, 19 nt, Homo sapiens
  misc_RNA (1)...(19): siRNA sense strand
ugccauccauuccaugugu

SEQ ID NO: 775255 - RNA, 19 nt, Homo sapiens
  misc_RNA (1)...(19): siRNA sense strand
ggaccugggcagaacaagu

SEQ ID NO: 775256 - RNA, 19 nt, Homo sapiens
  misc_RNA (1)...(19): siRNA sense strand
gcugagggagacaguguau

SEQ ID NO: 775257 - RNA, 19 nt, Homo sapiens
  misc_RNA (1)...(19): siRNA sense strand
ggaccaccaggcagucuuc

SEQ ID NO: 775258 - RNA, 19 nt, Homo sapiens
  misc_RNA (1)...(19): siRNA sense strand
guaccugcgcucacucuuc

SEQ ID NO: 775259 - RNA, 19 nt, Homo sapiens
  misc_RNA (1)...(19): siRNA sense strand
ucuaccaacuccugcacuu

SEQ ID NO: 775260 - RNA, 19 nt, Homo sapiens
  misc_RNA (1)...(19): siRNA sense strand
gaccugugcccucuacuac

SEQ ID NO: 775261 - RNA, 19 nt, Homo sapiens
  misc_RNA (1)...(19): siRNA sense strand
cugggcaccuggaauguuc

SEQ ID NO: 775262 - RNA, 19 nt, Homo sapiens
  misc_RNA (1)...(19): siRNA sense strand
cugagaagagcuaugcaaa

SEQ ID NO: 775263 - RNA, 19 nt, Homo sapiens
  misc_RNA (1)...(19): siRNA sense strand
ccagaccugccagauguuu

SEQ ID NO: 775264 - RNA, 19 nt, Homo sapiens
  misc_RNA (1)...(19): siRNA sense strand
gcgcugagggagacagugu

SEQ ID NO: 775265 - RNA, 19 nt, Homo sapiens
  misc_RNA (1)...(19): siRNA sense strand
acuacugcaucuccuauca

SEQ ID NO: 775266 - RNA, 19 nt, Homo sapiens
  misc_RNA (1)...(19): siRNA sense strand
gcgcuucgacgcggaguau

SEQ ID NO: 775267 - RNA, 19 nt, Homo sapiens
  misc_RNA (1)...(19): siRNA sense strand
ugagaagagcuaugcaaag

SEQ ID NO: 775268 - RNA, 19 nt, Homo sapiens
  misc_RNA (1)...(19): siRNA sense strand
gacauugggagcaaguuag

SEQ ID NO: 775269 - RNA, 19 nt, Homo sapiens
  misc_RNA (1)...(19): siRNA sense strand
ccuguggugcugcccaaua

SEQ ID NO: 775270 - RNA, 19 nt, Homo sapiens
  misc_RNA (1)...(19): siRNA sense strand
gaggacccuuccagcucuu

SEQ ID NO: 775271 - RNA, 19 nt, Homo sapiens
  misc_RNA (1)...(19): siRNA sense strand
ccugauggcuucuguuccu

SEQ ID NO: 775272 - RNA, 19 nt, Homo sapiens
  misc_RNA (1)...(19): siRNA sense strand
gccagcuucuucuuccaau

SEQ ID NO: 775273 - RNA, 19 nt, Homo sapiens
  misc_RNA (1)...(19): siRNA sense strand
ggucuggagagcacuacaa

SEQ ID NO: 775274 - RNA, 19 nt, Homo sapiens
  misc_RNA (1)...(19): siRNA sense strand
uaccaacuccugcacuuuc

SEQ ID NO: 775275 - RNA, 19 nt, Homo sapiens
  misc_RNA (1)...(19): siRNA sense strand
ugguggccuucuuccuuua

SEQ ID NO: 775276 - RNA, 19 nt, Homo sapiens
  misc_RNA (1)...(19): siRNA sense strand
augcgucaguuguggcuuu

SEQ ID NO: 775277 - RNA, 19 nt, Homo sapiens
  misc_RNA (1)...(19): siRNA sense strand
cgacuucuccaagccuuug

SEQ ID NO: 775278 - RNA, 19 nt, Homo sapiens
  misc_RNA (1)...(19): siRNA sense strand
ccuccugccuggacacuac

SEQ ID NO: 775279 - RNA, 19 nt, Homo sapiens
  misc_RNA (1)...(19): siRNA sense strand
ccagcccacucuccuaagg

SEQ ID NO: 775280 - RNA, 19 nt, Homo sapiens
  misc_RNA (1)...(19): siRNA sense strand
gccaugggaugcugguacu

SEQ ID NO: 775281 - RNA, 19 nt, Homo sapiens
  misc_RNA (1)...(19): siRNA sense strand
ucaacuacugcaucuccua

SEQ ID NO: 775282 - RNA, 19 nt, Homo sapiens
  misc_RNA (1)...(19): siRNA sense strand
gggccucucaguagacuuc

SEQ ID NO: 775283 - RNA, 19 nt, Homo sapiens
  misc_RNA (1)...(19): siRNA sense strand
gcuggcccacgcuguguuu

SEQ ID NO: 775284 - RNA, 19 nt, Homo sapiens
  misc_RNA (1)...(19): siRNA sense strand
gagccuuccagaugccaaa

SEQ ID NO: 775285 - RNA, 19 nt, Homo sapiens
  misc_RNA (1)...(19): siRNA sense strand
ccugcggcgucaucaaguu

SEQ ID NO: 775286 - RNA, 19 nt, Homo sapiens
  misc_RNA (1)...(19): siRNA sense strand
caaguacagccugcucuuc

SEQ ID NO: 775287 - RNA, 19 nt, Homo sapiens
  misc_RNA (1)...(19): siRNA sense strand
ccugugcccucuacuacca

SEQ ID NO: 775288 - RNA, 19 nt, Homo sapiens
  misc_RNA (1)...(19): siRNA sense strand
gcagagccaucuacaguau

SEQ ID NO: 775289 - RNA, 19 nt, Homo sapiens
  misc_RNA (1)...(19): siRNA sense strand
ggccggagcuuaucucuug

SEQ ID NO: 775290 - RNA, 19 nt, Homo sapiens
  misc_RNA (1)...(19): siRNA sense strand
ucaaguggcuucucuguuc

SEQ ID NO: 775291 - RNA, 19 nt, Homo sapiens
  misc_RNA (1)...(19): siRNA sense strand
agaggcagcuguuguguuu

SEQ ID NO: 775292 - RNA, 19 nt, Homo sapiens
  misc_RNA (1)...(19): siRNA sense strand
ggguuaagcuugugacaga

SEQ ID NO: 775293 - RNA, 19 nt, Homo sapiens
  misc_RNA (1)...(19): siRNA sense strand
guugucaucuccaucguua

SEQ ID NO: 775294 - RNA, 19 nt, Homo sapiens
  misc_RNA (1)...(19): siRNA sense strand
gaacggcugcuuaacuuug

SEQ ID NO: 775295 - RNA, 19 nt, Homo sapiens
  misc_RNA (1)...(19): siRNA sense strand
gguaugagguauauaaggu

SEQ ID NO: 775296 - RNA, 19 nt, Homo sapiens
  misc_RNA (1)...(19): siRNA sense strand
cggcaagucuucccuguug

SEQ ID NO: 775297 - RNA, 19 nt, Homo sapiens
  misc_RNA (1)...(19): siRNA sense strand
gcauucgggucaucaaguu

SEQ ID NO: 775298 - RNA, 19 nt, Homo sapiens
  misc_RNA (1)...(19): siRNA sense strand
ugagugaggugauuacauc

SEQ ID NO: 775299 - RNA, 19 nt, Homo sapiens
  misc_RNA (1)...(19): siRNA sense strand
caaaucaaguggcuucucu

SEQ ID NO: 775300 - RNA, 19 nt, Homo sapiens
  misc_RNA (1)...(19): siRNA sense strand
gugcugugcugcagaauca

SEQ ID NO: 775301 - RNA, 19 nt, Homo sapiens
  misc_RNA (1)...(19): siRNA sense strand
cagcaaguguggaccagaa

SEQ ID NO: 775302 - RNA, 19 nt, Homo sapiens
  misc_RNA (1)...(19): siRNA sense strand
ccagugacuuucuucaaug

SEQ ID NO: 775303 - RNA, 19 nt, Homo sapiens
  misc_RNA (1)...(19): siRNA sense strand
ggaccucccucugagauuc

SEQ ID NO: 775304 - RNA, 19 nt, Homo sapiens
  misc_RNA (1)...(19): siRNA sense strand
gcugguacccgucaacaaa

SEQ ID NO: 775305 - RNA, 19 nt, Homo sapiens
  misc_RNA (1)...(19): siRNA sense strand
ccagggcucuccucacaga

SEQ ID NO: 775306 - RNA, 19 nt, Homo sapiens
  misc_RNA (1)...(19): siRNA sense strand
gagacaacauccucuuugg

SEQ ID NO: 775307 - RNA, 19 nt, Homo sapiens
  misc_RNA (1)...(19): siRNA sense strand
caacuucccuugggugauc

SEQ ID NO: 775308 - RNA, 19 nt, Homo sapiens
  misc_RNA (1)...(19): siRNA sense strand
cuaccuggcucgugucuuc

SEQ ID NO: 775309 - RNA, 19 nt, Homo sapiens
  misc_RNA (1)...(19): siRNA sense strand
ucagucaucucgaagugaa

SEQ ID NO: 775310 - RNA, 19 nt, Homo sapiens
  misc_RNA (1)...(19): siRNA sense strand
gaguccagauuacauccua

SEQ ID NO: 775311 - RNA, 19 nt, Homo sapiens
  misc_RNA (1)...(19): siRNA sense strand
gaugacagccugcccuuca

SEQ ID NO: 775312 - RNA, 19 nt, Homo sapiens
  misc_RNA (1)...(19): siRNA sense strand
gcacccaccgcacugagua

SEQ ID NO: 775313 - RNA, 19 nt, Homo sapiens
  misc_RNA (1)...(19): siRNA sense strand
aaccagaggugccaguuug

SEQ ID NO: 775314 - RNA, 19 nt, Homo sapiens
  misc_RNA (1)...(19): siRNA sense strand
ccauagggcuagagguguu

SEQ ID NO: 775315 - RNA, 19 nt, Homo sapiens
  misc_RNA (1)...(19): siRNA sense strand
ucgagcggcuggaagagua

SEQ ID NO: 775316 - RNA, 19 nt, Homo sapiens
  misc_RNA (1)...(19): siRNA sense strand
gacuccgggucaucaaaua

SEQ ID NO: 775317 - RNA, 19 nt, Homo sapiens
  misc_RNA (1)...(19): siRNA sense strand
ccucacagaugccaagauc

SEQ ID NO: 775318 - RNA, 19 nt, Homo sapiens
  misc_RNA (1)...(19): siRNA sense strand
ccucagacauccguuucua

SEQ ID NO: 775319 - RNA, 19 nt, Homo sapiens
  misc_RNA (1)...(19): siRNA sense strand
gcuagaccuucuuccaguu

SEQ ID NO: 775320 - RNA, 19 nt, Homo sapiens
  misc_RNA (1)...(19): siRNA sense strand
caucaccuauguccucaug

SEQ ID NO: 775321 - RNA, 19 nt, Homo sapiens
  misc_RNA (1)...(19): siRNA sense strand
cugaacggcugcuuaacuu

SEQ ID NO: 775322 - RNA, 19 nt, Homo sapiens
  misc_RNA (1)...(19): siRNA sense strand
guauggguaugagguauau

SEQ ID NO: 775323 - RNA, 19 nt, Homo sapiens
  misc_RNA (1)...(19): siRNA sense strand
augcacagcuguacaagga

SEQ ID NO: 775324 - RNA, 19 nt, Homo sapiens
  misc_RNA (1)...(19): siRNA sense strand
cccagauugugguagauua

SEQ ID NO: 775325 - RNA, 19 nt, Homo sapiens
  misc_RNA (1)...(19): siRNA sense strand
guauauaagguaacacuuc

SEQ ID NO: 775326 - RNA, 19 nt, Homo sapiens
  misc_RNA (1)...(19): siRNA sense strand
gcaagucuucccuguuguu

SEQ ID NO: 775327 - RNA, 19 nt, Homo sapiens
  misc_RNA (1)...(19): siRNA sense strand
gcuugucgcugucuuaugc

SEQ ID NO: 775328 - RNA, 19 nt, Homo sapiens
  misc_RNA (1)...(19): siRNA sense strand
cccaauggcuccucagaca

SEQ ID NO: 775329 - RNA, 19 nt, Homo sapiens
  misc_RNA (1)...(19): siRNA sense strand
caucagucaucucgaagug

SEQ ID NO: 775330 - RNA, 19 nt, Homo sapiens
  misc_RNA (1)...(19): siRNA sense strand
agagccaucuacaguauug

SEQ ID NO: 775331 - RNA, 19 nt, Homo sapiens
  misc_RNA (1)...(19): siRNA sense strand
gguacaagcuguccccaaa

SEQ ID NO: 775332 - RNA, 19 nt, Homo sapiens
  misc_RNA (1)...(19): siRNA sense strand
ucaaugaugaccucaguau

SEQ ID NO: 775333 - RNA, 19 nt, Homo sapiens
  misc_RNA (1)...(19): siRNA sense strand
caaguggcuucucuguuca

SEQ ID NO: 775334 - RNA, 19 nt, Homo sapiens
  misc_RNA (1)...(19): siRNA sense strand
agacagugcugaccauugc

SEQ ID NO: 775335 - RNA, 19 nt, Homo sapiens
  misc_RNA (1)...(19): siRNA sense strand
guuucuaccucaccgugua

SEQ ID NO: 775336 - RNA, 19 nt, Homo sapiens
  misc_RNA (1)...(19): siRNA sense strand
cgagacaacauccucuuug

SEQ ID NO: 775337 - RNA, 19 nt, Homo sapiens
  misc_RNA (1)...(19): siRNA sense strand
cuucaucagucaucucgaa

SEQ ID NO: 775338 - RNA, 19 nt, Homo sapiens
  misc_RNA (1)...(19): siRNA sense strand
ggccuuagccauccucuuc

SEQ ID NO: 775339 - RNA, 19 nt, Homo sapiens
  misc_RNA (1)...(19): siRNA sense strand
gccaagauccuguguaucg

SEQ ID NO: 775340 - RNA, 19 nt, Homo sapiens
  misc_RNA (1)...(19): siRNA sense strand
cacccugucuccacuguau

SEQ ID NO: 775341 - RNA, 19 nt, Homo sapiens
  misc_RNA (1)...(19): siRNA sense strand
gaccaucugcaaacgcuuu

SEQ ID NO: 775342 - RNA, 19 nt, Homo sapiens
  misc_RNA (1)...(19): siRNA sense strand
cagcccagauugugguaga

SEQ ID NO: 775343 - RNA, 19 nt, Homo sapiens
  misc_RNA (1)...(19): siRNA sense strand
uaaaccgcuucuccucuga

SEQ ID NO: 775344 - RNA, 19 nt, Homo sapiens
  misc_RNA (1)...(19): siRNA sense strand
guacagaacccagagaaaa

SEQ ID NO: 775345 - RNA, 19 nt, Homo sapiens
  misc_RNA (1)...(19): siRNA sense strand
ugaacauccuguacugcaa

SEQ ID NO: 775346 - RNA, 19 nt, Homo sapiens
  misc_RNA (1)...(19): siRNA sense strand
cccauaggcucaacacgau

SEQ ID NO: 775347 - RNA, 19 nt, Homo sapiens
  misc_RNA (1)...(19): siRNA sense strand
guaugagguauauaaggua

SEQ ID NO: 775348 - RNA, 19 nt, Homo sapiens
  misc_RNA (1)...(19): siRNA sense strand
ucaacacgauccugaacuc

SEQ ID NO: 775349 - RNA, 19 nt, Homo sapiens
  misc_RNA (1)...(19): siRNA sense strand
gcaggaagaaagcaagaag

SEQ ID NO: 775350 - RNA, 19 nt, Homo sapiens
  misc_RNA (1)...(19): siRNA sense strand
ggaugcggccuguguauac

SEQ ID NO: 775351 - RNA, 19 nt, Homo sapiens
  misc_RNA (1)...(19): siRNA sense strand
ugagguauauaagguaaca

SEQ ID NO: 775352 - RNA, 19 nt, Homo sapiens
  misc_RNA (1)...(19): siRNA sense strand
ccugcgcccucaaugauga

SEQ ID NO: 775353 - RNA, 19 nt, Homo sapiens
  misc_RNA (1)...(19): siRNA sense strand
gaucccaguuggcuaucau

SEQ ID NO: 775354 - RNA, 19 nt, Homo sapiens
  misc_RNA (1)...(19): siRNA sense strand
ccucaaugaugaccucagu

SEQ ID NO: 775355 - RNA, 19 nt, Homo sapiens
  misc_RNA (1)...(19): siRNA sense strand
gcagaaucaguauggguau

SEQ ID NO: 775356 - RNA, 19 nt, Homo sapiens
  misc_RNA (1)...(19): siRNA sense strand
gcaaguguggaccagaaga

SEQ ID NO: 775357 - RNA, 19 nt, Homo sapiens
  misc_RNA (1)...(19): siRNA sense strand
gggcagaggcagcuguugu

SEQ ID NO: 775358 - RNA, 19 nt, Homo sapiens
  misc_RNA (1)...(19): siRNA sense strand
gcugaaggcugagaauagc

SEQ ID NO: 775359 - RNA, 19 nt, Homo sapiens
  misc_RNA (1)...(19): siRNA sense strand
gcacguguaccaagcuuac

SEQ ID NO: 775360 - RNA, 19 nt, Homo sapiens
  misc_RNA (1)...(19): siRNA sense strand
uaccuuggcuggccucucu

SEQ ID NO: 775361 - RNA, 19 nt, Homo sapiens
  misc_RNA (1)...(19): siRNA sense strand
acuaggcacugacucugaa

SEQ ID NO: 775362 - RNA, 19 nt, Homo sapiens
  misc_RNA (1)...(19): siRNA sense strand
gagagaaguugggcaucgu

SEQ ID NO: 775363 - RNA, 19 nt, Homo sapiens
  misc_RNA (1)...(19): siRNA sense strand
ugagcaucauguacuauca

SEQ ID NO: 775364 - RNA, 19 nt, Homo sapiens
  misc_RNA (1)...(19): siRNA sense strand
gggaggcccugaaccuacu

SEQ ID NO: 775365 - RNA, 19 nt, Homo sapiens
  misc_RNA (1)...(19): siRNA sense strand
gugcugaccauugcccaua

SEQ ID NO: 775366 - RNA, 19 nt, Homo sapiens
  misc_RNA (1)...(19): siRNA sense strand
augccaagauccuguguau

SEQ ID NO: 775367 - RNA, 19 nt, Homo sapiens
  misc_RNA (1)...(19): siRNA sense strand
ucagaucccaguuggcuau

SEQ ID NO: 775368 - RNA, 19 nt, Homo sapiens
  misc_RNA (1)...(19): siRNA sense strand
uggaagaguacaccuguga

SEQ ID NO: 775369 - RNA, 19 nt, Homo sapiens
  misc_RNA (1)...(19): siRNA sense strand
cguggguggucucaucuug

SEQ ID NO: 775370 - RNA, 19 nt, Homo sapiens
  misc_RNA (1)...(19): siRNA sense strand
ccaagauccuguguaucga

SEQ ID NO: 775371 - RNA, 19 nt, Homo sapiens
  misc_RNA (1)...(19): siRNA sense strand
accagugacuuucuucaau

SEQ ID NO: 775372 - RNA, 19 nt, Homo sapiens
  misc_RNA (1)...(19): siRNA sense strand
caauggcuccucagacauc

SEQ ID NO: 775373 - RNA, 19 nt, Homo sapiens
  misc_RNA (1)...(19): siRNA sense strand
gggcugagaauggacaaga

SEQ ID NO: 775374 - RNA, 19 nt, Homo sapiens
  misc_RNA (1)...(19): siRNA sense strand
agaauggacaagagucuga

SEQ ID NO: 775375 - RNA, 19 nt, Homo sapiens
  misc_RNA (1)...(19): siRNA sense strand
cagcuuccuuccugcuuuc

SEQ ID NO: 775376 - RNA, 19 nt, Homo sapiens
  misc_RNA (1)...(19): siRNA sense strand
cagaaucaguauggguaug

SEQ ID NO: 775377 - RNA, 19 nt, Homo sapiens
  misc_RNA (1)...(19): siRNA sense strand
acaagacagugcugaccau

SEQ ID NO: 775378 - RNA, 19 nt, Homo sapiens
  misc_RNA (1)...(19): siRNA sense strand
gaagcagugccaccugagu

SEQ ID NO: 775379 - RNA, 19 nt, Homo sapiens
  misc_RNA (1)...(19): siRNA sense strand
gcagcaggcacccuucaag

SEQ ID NO: 775380 - RNA, 19 nt, Homo sapiens
  misc_RNA (1)...(19): siRNA sense strand
ccacagcccagucaguaca

SEQ ID NO: 775381 - RNA, 19 nt, Homo sapiens
  misc_RNA (1)...(19): siRNA sense strand
ggucaucaaauaccuggau

SEQ ID NO: 775382 - RNA, 19 nt, Homo sapiens
  misc_RNA (1)...(19): siRNA sense strand
acucugaacggcugcuuaa

SEQ ID NO: 775383 - RNA, 19 nt, Homo sapiens
  misc_RNA (1)...(19): siRNA sense strand
ucaguauggguaugaggua

SEQ ID NO: 775384 - RNA, 19 nt, Homo sapiens
  misc_RNA (1)...(19): siRNA sense strand
gugaggugauuacauccau

SEQ ID NO: 775385 - RNA, 19 nt, Homo sapiens
  misc_RNA (1)...(19): siRNA sense strand
cuuugagcaucauguacua

SEQ ID NO: 775386 - RNA, 19 nt, Homo sapiens
  misc_RNA (1)...(19): siRNA sense strand
gcaccagugacuuucuuca

SEQ ID NO: 775387 - RNA, 19 nt, Homo sapiens
  misc_RNA (1)...(19): siRNA sense strand
ccaccagcccagcuucuau

SEQ ID NO: 775388 - RNA, 19 nt, Homo sapiens
  misc_RNA (1)...(19): siRNA sense strand
ccaaggagcucccugaaau

SEQ ID NO: 775389 - RNA, 19 nt, Homo sapiens
  misc_RNA (1)...(19): siRNA sense strand
gagcaacuaucaccuaaug

SEQ ID NO: 775390 - RNA, 19 nt, Homo sapiens
  misc_RNA (1)...(19): siRNA sense strand
gaacuaugccgaucagauu

SEQ ID NO: 775391 - RNA, 19 nt, Homo sapiens
  misc_RNA (1)...(19): siRNA sense strand
guaagcagcuaucucugua

SEQ ID NO: 775392 - RNA, 19 nt, Homo sapiens
  misc_RNA (1)...(19): siRNA sense strand
gaacauccacuacaaguca

SEQ ID NO: 775393 - RNA, 19 nt, Homo sapiens
  misc_RNA (1)...(19): siRNA sense strand
gaggagaaauucauugagu

SEQ ID NO: 775394 - RNA, 19 nt, Homo sapiens
  misc_RNA (1)...(19): siRNA sense strand
ugaauguggugaagaauga

SEQ ID NO: 775395 - RNA, 19 nt, Homo sapiens
  misc_RNA (1)...(19): siRNA sense strand
ggagaaauucauugaguuu

SEQ ID NO: 775396 - RNA, 19 nt, Homo sapiens
  misc_RNA (1)...(19): siRNA sense strand
agaaagagcugcaaaucca

SEQ ID NO: 775397 - RNA, 19 nt, Homo sapiens
  misc_RNA (1)...(19): siRNA sense strand
ggacgacgcugggaaugga

SEQ ID NO: 775398 - RNA, 19 nt, Homo sapiens
  misc_RNA (1)...(19): siRNA sense strand
ggugaagaaugaccugauu

SEQ ID NO: 775399 - RNA, 19 nt, Homo sapiens
  misc_RNA (1)...(19): siRNA sense strand
gaagaaagagcugcaaauc

SEQ ID NO: 775400 - RNA, 19 nt, Homo sapiens
  misc_RNA (1)...(19): siRNA sense strand
ccaucaagcugaaggauuc

SEQ ID NO: 775401 - RNA, 19 nt, Homo sapiens
  misc_RNA (1)...(19): siRNA sense strand
ccaagaccaugcagauaga

SEQ ID NO: 775402 - RNA, 19 nt, Homo sapiens
  misc_RNA (1)...(19): siRNA sense strand
gcagagcgcagucacauca

SEQ ID NO: 775403 - RNA, 19 nt, Homo sapiens
  misc_RNA (1)...(19): siRNA sense strand
cgaguggucugauguucaa

SEQ ID NO: 775404 - RNA, 19 nt, Homo sapiens
  misc_RNA (1)...(19): siRNA sense strand
gcaagguggugaucaucga

SEQ ID NO: 775405 - RNA, 19 nt, Homo sapiens
  misc_RNA (1)...(19): siRNA sense strand
cagagcacgucuucacuga

SEQ ID NO: 775406 - RNA, 19 nt, Homo sapiens
  misc_RNA (1)...(19): siRNA sense strand
gcaacuaucaccuaaugga

SEQ ID NO: 775407 - RNA, 19 nt, Homo sapiens
  misc_RNA (1)...(19): siRNA sense strand
cagaacggcuggcucuaug

SEQ ID NO: 775408 - RNA, 19 nt, Homo sapiens
  misc_RNA (1)...(19): siRNA sense strand
gaacaaggugcacgucauc

SEQ ID NO: 775409 - RNA, 19 nt, Homo sapiens
  misc_RNA (1)...(19): siRNA sense strand
aagaugcucuggaacaaga

SEQ ID NO: 775410 - RNA, 19 nt, Homo sapiens
  misc_RNA (1)...(19): siRNA sense strand
guuugaagaugcucuggaa

SEQ ID NO: 775411 - RNA, 19 nt, Homo sapiens
  misc_RNA (1)...(19): siRNA sense strand
ccacagaggaggccacaga

SEQ ID NO: 775412 - RNA, 19 nt, Homo sapiens
  misc_RNA (1)...(19): siRNA sense strand
ugaagaugcucuggaacaa

SEQ ID NO: 775413 - RNA, 19 nt, Homo sapiens
  misc_RNA (1)...(19): siRNA sense strand
uacaggacguggacauuga

SEQ ID NO: 775414 - RNA, 19 nt, Homo sapiens
  misc_RNA (1)...(19): siRNA sense strand
gcugugcgguggacugaga

SEQ ID NO: 775415 - RNA, 19 nt, Homo sapiens
  misc_RNA (1)...(19): siRNA sense strand
gauguaagcagcuaucucu

SEQ ID NO: 775416 - RNA, 19 nt, Homo sapiens
  misc_RNA (1)...(19): siRNA sense strand
gagcgggagucggagauga

SEQ ID NO: 775417 - RNA, 19 nt, Homo sapiens
  misc_RNA (1)...(19): siRNA sense strand
gagaagaaagagcugcaaa

SEQ ID NO: 775418 - RNA, 19 nt, Homo sapiens
  misc_RNA (1)...(19): siRNA sense strand
agucggagaugaagaagga

SEQ ID NO: 775419 - RNA, 19 nt, Homo sapiens
  misc_RNA (1)...(19): siRNA sense strand
ccaccucccugaacguguu

SEQ ID NO: 775420 - RNA, 19 nt, Homo sapiens
  misc_RNA (1)...(19): siRNA sense strand
gcacuggcaagcuggguuu

SEQ ID NO: 775421 - RNA, 19 nt, Homo sapiens
  misc_RNA (1)...(19): siRNA sense strand
gcauggcuguuguguacga

SEQ ID NO: 775422 - RNA, 19 nt, Homo sapiens
  misc_RNA (1)...(19): siRNA sense strand
gcuggaagaggaacugaaa

SEQ ID NO: 775423 - RNA, 19 nt, Homo sapiens
  misc_RNA (1)...(19): siRNA sense strand
gggaaucugcuacuggaaa

SEQ ID NO: 775424 - RNA, 19 nt, Homo sapiens
  misc_RNA (1)...(19): siRNA sense strand
cuacaucgacuuccgcauu

SEQ ID NO: 775425 - RNA, 19 nt, Homo sapiens
  misc_RNA (1)...(19): siRNA sense strand
ucauggagcggaaccagua

SEQ ID NO: 775426 - RNA, 19 nt, Homo sapiens
  misc_RNA (1)...(19): siRNA sense strand
gcgaugccgugaaguucuu

SEQ ID NO: 775427 - RNA, 19 nt, Homo sapiens
  misc_RNA (1)...(19): siRNA sense strand
cugcauggcuguuguguac

SEQ ID NO: 775428 - RNA, 19 nt, Homo sapiens
  misc_RNA (1)...(19): siRNA sense strand
aagaagaagucgaccaucu

SEQ ID NO: 775429 - RNA, 19 nt, Homo sapiens
  misc_RNA (1)...(19): siRNA sense strand
ccgacucccuguaccauga

SEQ ID NO: 775430 - RNA, 19 nt, Homo sapiens
  misc_RNA (1)...(19): siRNA sense strand
caagaacuaugccgaucag

SEQ ID NO: 775431 - RNA, 19 nt, Homo sapiens
  misc_RNA (1)...(19): siRNA sense strand
ccuugaauguggugaagaa

SEQ ID NO: 775432 - RNA, 19 nt, Homo sapiens
  misc_RNA (1)...(19): siRNA sense strand
cagagaugauacagaccua

SEQ ID NO: 775433 - RNA, 19 nt, Homo sapiens
  misc_RNA (1)...(19): siRNA sense strand
gcaaagaaguggggaaucu

SEQ ID NO: 775434 - RNA, 19 nt, Homo sapiens
  misc_RNA (1)...(19): siRNA sense strand
cugagcaacuaucaccuaa

SEQ ID NO: 775435 - RNA, 19 nt, Homo sapiens
  misc_RNA (1)...(19): siRNA sense strand
gaacggcuggcucuaugug

SEQ ID NO: 775436 - RNA, 19 nt, Homo sapiens
  misc_RNA (1)...(19): siRNA sense strand
acgaggagguggucaagga

SEQ ID NO: 775437 - RNA, 19 nt, Homo sapiens
  misc_RNA (1)...(19): siRNA sense strand
gaagaggcggaggauguaa

SEQ ID NO: 775438 - RNA, 19 nt, Homo sapiens
  misc_RNA (1)...(19): siRNA sense strand
ggaaucugcuacuggaaaa

SEQ ID NO: 775439 - RNA, 19 nt, Homo sapiens
  misc_RNA (1)...(19): siRNA sense strand
gggagucggagaugaagaa

SEQ ID NO: 775440 - RNA, 19 nt, Homo sapiens
  misc_RNA (1)...(19): siRNA sense strand
ggcgugggcuccaagaaca

SEQ ID NO: 775441 - RNA, 19 nt, Homo sapiens
  misc_RNA (1)...(19): siRNA sense strand
gagaugcgcaacgucagua

SEQ ID NO: 775442 - RNA, 19 nt, Homo sapiens
  misc_RNA (1)...(19): siRNA sense strand
uacaucgacuuccgcauug

SEQ ID NO: 775443 - RNA, 19 nt, Homo sapiens
  misc_RNA (1)...(19): siRNA sense strand
gaggacacgcggaugaaga

SEQ ID NO: 775444 - RNA, 19 nt, Homo sapiens
  misc_RNA (1)...(19): siRNA sense strand
caacaccgacucccuguac

SEQ ID NO: 775445 - RNA, 19 nt, Homo sapiens
  misc_RNA (1)...(19): siRNA sense strand
ccagcaagguggugaucau

SEQ ID NO: 775446 - RNA, 19 nt, Homo sapiens
  misc_RNA (1)...(19): siRNA sense strand
acucacagcuucuggaaac

SEQ ID NO: 775447 - RNA, 19 nt, Homo sapiens
  misc_RNA (1)...(19): siRNA sense strand
gagaaauucauugaguuug

SEQ ID NO: 775448 - RNA, 19 nt, Homo sapiens
  misc_RNA (1)...(19): siRNA sense strand
aggagaaauucauugaguu

SEQ ID NO: 775449 - RNA, 19 nt, Homo sapiens
  misc_RNA (1)...(19): siRNA sense strand
agaagaagaaggccaagga

SEQ ID NO: 775450 - RNA, 19 nt, Homo sapiens
  misc_RNA (1)...(19): siRNA sense strand
aagaagaggcggaggaugu

SEQ ID NO: 775451 - RNA, 19 nt, Homo sapiens
  misc_RNA (1)...(19): siRNA sense strand
gccgugaacccaaagaaga

SEQ ID NO: 775452 - RNA, 19 nt, Homo sapiens
  misc_RNA (1)...(19): siRNA sense strand
gaugcgcaacgucaguaua

SEQ ID NO: 775453 - RNA, 19 nt, Homo sapiens
  misc_RNA (1)...(19): siRNA sense strand
gcaacggaguggucaucuc

SEQ ID NO: 775454 - RNA, 19 nt, Homo sapiens
  misc_RNA (1)...(19): siRNA sense strand
agugggaucugagcaacua

SEQ ID NO: 775455 - RNA, 19 nt, Homo sapiens
  misc_RNA (1)...(19): siRNA sense strand
acaaggagcggcugaugga

SEQ ID NO: 775456 - RNA, 19 nt, Homo sapiens
  misc_RNA (1)...(19): siRNA sense strand
ugaagaaggaguacaaugc

SEQ ID NO: 775457 - RNA, 19 nt, Homo sapiens
  misc_RNA (1)...(19): siRNA sense strand
gccagaagcugcggaacgu

SEQ ID NO: 775458 - RNA, 19 nt, Homo sapiens
  misc_RNA (1)...(19): siRNA sense strand
gccgugaaguucuuugucu

SEQ ID NO: 775459 - RNA, 19 nt, Homo sapiens
  misc_RNA (1)...(19): siRNA sense strand
gggcaucauccacguguau

SEQ ID NO: 775460 - RNA, 19 nt, Homo sapiens
  misc_RNA (1)...(19): siRNA sense strand
gcccaagaccaugcagaua

SEQ ID NO: 775461 - RNA, 19 nt, Homo sapiens
  misc_RNA (1)...(19): siRNA sense strand
gccaaggagcucccugaaa

SEQ ID NO: 775462 - RNA, 19 nt, Homo sapiens
  misc_RNA (1)...(19): siRNA sense strand
gagaaggaccccaccauga

SEQ ID NO: 775463 - RNA, 19 nt, Homo sapiens
  misc_RNA (1)...(19): siRNA sense strand
gcugaaggccaagaacuau

SEQ ID NO: 775464 - RNA, 19 nt, Homo sapiens
  misc_RNA (1)...(19): siRNA sense strand
gcagugacgaguggucuga

SEQ ID NO: 775465 - RNA, 19 nt, Homo sapiens
  misc_RNA (1)...(19): siRNA sense strand
ccacaggcaccaaguccaa

SEQ ID NO: 775466 - RNA, 19 nt, Homo sapiens
  misc_RNA (1)...(19): siRNA sense strand
gacgaguggucugauguuc

SEQ ID NO: 775467 - RNA, 19 nt, Homo sapiens
  misc_RNA (1)...(19): siRNA sense strand
gauggccagugggaucuga

SEQ ID NO: 775468 - RNA, 19 nt, Homo sapiens
  misc_RNA (1)...(19): siRNA sense strand
caaggagcucccugaaaug

SEQ ID NO: 775469 - RNA, 19 nt, Homo sapiens
  misc_RNA (1)...(19): siRNA sense strand
cgacagccgcaacauggaa

SEQ ID NO: 775470 - RNA, 19 nt, Homo sapiens
  misc_RNA (1)...(19): siRNA sense strand
ggacaugagccaggugaag

SEQ ID NO: 775471 - RNA, 19 nt, Homo sapiens
  misc_RNA (1)...(19): siRNA sense strand
gaacgugcuggagaaccua

SEQ ID NO: 775472 - RNA, 19 nt, Homo sapiens
  misc_RNA (1)...(19): siRNA sense strand
ggcaggcggaggagaaauu

SEQ ID NO: 775473 - RNA, 19 nt, Homo sapiens
  misc_RNA (1)...(19): siRNA sense strand
cggugaacauccacuacaa

SEQ ID NO: 775474 - RNA, 19 nt, Homo sapiens
  misc_RNA (1)...(19): siRNA sense strand
guacaaggagcggcugaug

SEQ ID NO: 775475 - RNA, 19 nt, Homo sapiens
  misc_RNA (1)...(19): siRNA sense strand
gaaguccgaggccaucauc

SEQ ID NO: 775476 - RNA, 19 nt, Homo sapiens
  misc_RNA (1)...(19): siRNA sense strand
gcuaagcaggccaaaguca

SEQ ID NO: 775477 - RNA, 19 nt, Homo sapiens
  misc_RNA (1)...(19): siRNA sense strand
cggaggagaaauucauuga

SEQ ID NO: 775478 - RNA, 19 nt, Homo sapiens
  misc_RNA (1)...(19): siRNA sense strand
ucaugccgcugguggugaa

SEQ ID NO: 775479 - RNA, 19 nt, Homo sapiens
  misc_RNA (1)...(19): siRNA sense strand
gcgguggacugagaugauc

SEQ ID NO: 775480 - RNA, 19 nt, Homo sapiens
  misc_RNA (1)...(19): siRNA sense strand
aagcagcuaucucuguaca

SEQ ID NO: 775481 - RNA, 19 nt, Homo sapiens
  misc_RNA (1)...(19): siRNA sense strand
agaagaggcggaggaugua

SEQ ID NO: 775482 - RNA, 19 nt, Homo sapiens
  misc_RNA (1)...(19): siRNA sense strand
caaagaagaggcggaggau

SEQ ID NO: 775483 - RNA, 19 nt, Homo sapiens
  misc_RNA (1)...(19): siRNA sense strand
guacagaaucggacaaaau

SEQ ID NO: 775484 - RNA, 19 nt, Homo sapiens
  misc_RNA (1)...(19): siRNA sense strand
ggagggcuacaucgacuuc

SEQ ID NO: 775485 - RNA, 19 nt, Homo sapiens
  misc_RNA (1)...(19): siRNA sense strand
agaacaaggugcacgucau

SEQ ID NO: 775486 - RNA, 19 nt, Homo sapiens
  misc_RNA (1)...(19): siRNA sense strand
gagccuggugcaugucaaa

SEQ ID NO: 775487 - RNA, 19 nt, Homo sapiens
  misc_RNA (1)...(19): siRNA sense strand
caggaggacacgcggauga

SEQ ID NO: 775488 - RNA, 19 nt, Homo sapiens
  misc_RNA (1)...(19): siRNA sense strand
ccaaggagcucccugaaau

SEQ ID NO: 775489 - RNA, 19 nt, Homo sapiens
  misc_RNA (1)...(19): siRNA sense strand
gagcaacuaucaccuaaug

SEQ ID NO: 775490 - RNA, 19 nt, Homo sapiens
  misc_RNA (1)...(19): siRNA sense strand
gaacuaugccgaucagauu

SEQ ID NO: 775491 - RNA, 19 nt, Homo sapiens
  misc_RNA (1)...(19): siRNA sense strand
guaagcagcuaucucugua

SEQ ID NO: 775492 - RNA, 19 nt, Homo sapiens
  misc_RNA (1)...(19): siRNA sense strand
gaacauccacuacaaguca

SEQ ID NO: 775493 - RNA, 19 nt, Homo sapiens
  misc_RNA (1)...(19): siRNA sense strand
gaggagaaauucauugagu

SEQ ID NO: 775494 - RNA, 19 nt, Homo sapiens
  misc_RNA (1)...(19): siRNA sense strand
ugaauguggugaagaauga

SEQ ID NO: 775495 - RNA, 19 nt, Homo sapiens
  misc_RNA (1)...(19): siRNA sense strand
ggagaaauucauugaguuu

SEQ ID NO: 775496 - RNA, 19 nt, Homo sapiens
  misc_RNA (1)...(19): siRNA sense strand
agaaagagcugcaaaucca

SEQ ID NO: 775497 - RNA, 19 nt, Homo sapiens
  misc_RNA (1)...(19): siRNA sense strand
ggacgacgcugggaaugga

SEQ ID NO: 775498 - RNA, 19 nt, Homo sapiens
  misc_RNA (1)...(19): siRNA sense strand
ggugaagaaugaccugauu

SEQ ID NO: 775499 - RNA, 19 nt, Homo sapiens
  misc_RNA (1)...(19): siRNA sense strand
gaagaaagagcugcaaauc

SEQ ID NO: 775500 - RNA, 19 nt, Homo sapiens
  misc_RNA (1)...(19): siRNA sense strand
ccaucaagcugaaggauuc

SEQ ID NO: 775501 - RNA, 19 nt, Homo sapiens
  misc_RNA (1)...(19): siRNA sense strand
ccaagaccaugcagauaga

SEQ ID NO: 775502 - RNA, 19 nt, Homo sapiens
  misc_RNA (1)...(19): siRNA sense strand
gcagagcgcagucacauca

SEQ ID NO: 775503 - RNA, 19 nt, Homo sapiens
  misc_RNA (1)...(19): siRNA sense strand
cgaguggucugauguucaa

SEQ ID NO: 775504 - RNA, 19 nt, Homo sapiens
  misc_RNA (1)...(19): siRNA sense strand
gcaagguggugaucaucga

SEQ ID NO: 775505 - RNA, 19 nt, Homo sapiens
  misc_RNA (1)...(19): siRNA sense strand
cagagcacgucuucacuga

SEQ ID NO: 775506 - RNA, 19 nt, Homo sapiens
  misc_RNA (1)...(19): siRNA sense strand
gcaacuaucaccuaaugga

SEQ ID NO: 775507 - RNA, 19 nt, Homo sapiens
  misc_RNA (1)...(19): siRNA sense strand
cagaacggcuggcucuaug

SEQ ID NO: 775508 - RNA, 19 nt, Homo sapiens
  misc_RNA (1)...(19): siRNA sense strand
gaacaaggugcacgucauc

SEQ ID NO: 775509 - RNA, 19 nt, Homo sapiens
  misc_RNA (1)...(19): siRNA sense strand
aagaugcucuggaacaaga

SEQ ID NO: 775510 - RNA, 19 nt, Homo sapiens
  misc_RNA (1)...(19): siRNA sense strand
guuugaagaugcucuggaa

SEQ ID NO: 775511 - RNA, 19 nt, Homo sapiens
  misc_RNA (1)...(19): siRNA sense strand
ccacagaggaggccacaga

SEQ ID NO: 775512 - RNA, 19 nt, Homo sapiens
  misc_RNA (1)...(19): siRNA sense strand
ugaagaugcucuggaacaa

SEQ ID NO: 775513 - RNA, 19 nt, Homo sapiens
  misc_RNA (1)...(19): siRNA sense strand
uacaggacguggacauuga

SEQ ID NO: 775514 - RNA, 19 nt, Homo sapiens
  misc_RNA (1)...(19): siRNA sense strand
gcugugcgguggacugaga

SEQ ID NO: 775515 - RNA, 19 nt, Homo sapiens
  misc_RNA (1)...(19): siRNA sense strand
gauguaagcagcuaucucu

SEQ ID NO: 775516 - RNA, 19 nt, Homo sapiens
  misc_RNA (1)...(19): siRNA sense strand
gagcgggagucggagauga

SEQ ID NO: 775517 - RNA, 19 nt, Homo sapiens
  misc_RNA (1)...(19): siRNA sense strand
gagaagaaagagcugcaaa

SEQ ID NO: 775518 - RNA, 19 nt, Homo sapiens
  misc_RNA (1)...(19): siRNA sense strand
agucggagaugaagaagga

SEQ ID NO: 775519 - RNA, 19 nt, Homo sapiens
  misc_RNA (1)...(19): siRNA sense strand
ccaccucccugaacguguu

SEQ ID NO: 775520 - RNA, 19 nt, Homo sapiens
  misc_RNA (1)...(19): siRNA sense strand
gcacuggcaagcuggguuu

SEQ ID NO: 775521 - RNA, 19 nt, Homo sapiens
  misc_RNA (1)...(19): siRNA sense strand
gcauggcuguuguguacga

SEQ ID NO: 775522 - RNA, 19 nt, Homo sapiens
  misc_RNA (1)...(19): siRNA sense strand
gcuggaagaggaacugaaa

SEQ ID NO: 775523 - RNA, 19 nt, Homo sapiens
  misc_RNA (1)...(19): siRNA sense strand
gggaaucugcuacuggaaa

SEQ ID NO: 775524 - RNA, 19 nt, Homo sapiens
  misc_RNA (1)...(19): siRNA sense strand
cuacaucgacuuccgcauu

SEQ ID NO: 775525 - RNA, 19 nt, Homo sapiens
  misc_RNA (1)...(19): siRNA sense strand
ucauggagcggaaccagua

SEQ ID NO: 775526 - RNA, 19 nt, Homo sapiens
  misc_RNA (1)...(19): siRNA sense strand
gcgaugccgugaaguucuu

SEQ ID NO: 775527 - RNA, 19 nt, Homo sapiens
  misc_RNA (1)...(19): siRNA sense strand
cugcauggcuguuguguac

SEQ ID NO: 775528 - RNA, 19 nt, Homo sapiens
  misc_RNA (1)...(19): siRNA sense strand
aagaagaagucgaccaucu

SEQ ID NO: 775529 - RNA, 19 nt, Homo sapiens
  misc_RNA (1)...(19): siRNA sense strand
ccgacucccuguaccauga

SEQ ID NO: 775530 - RNA, 19 nt, Homo sapiens
  misc_RNA (1)...(19): siRNA sense strand
caagaacuaugccgaucag

SEQ ID NO: 775531 - RNA, 19 nt, Homo sapiens
  misc_RNA (1)...(19): siRNA sense strand
ccuugaauguggugaagaa

SEQ ID NO: 775532 - RNA, 19 nt, Homo sapiens
  misc_RNA (1)...(19): siRNA sense strand
cagagaugauacagaccua

SEQ ID NO: 775533 - RNA, 19 nt, Homo sapiens
  misc_RNA (1)...(19): siRNA sense strand
gcaaagaaguggggaaucu

SEQ ID NO: 775534 - RNA, 19 nt, Homo sapiens
  misc_RNA (1)...(19): siRNA sense strand
cugagcaacuaucaccuaa

SEQ ID NO: 775535 - RNA, 19 nt, Homo sapiens
  misc_RNA (1)...(19): siRNA sense strand
gaacggcuggcucuaugug

SEQ ID NO: 775536 - RNA, 19 nt, Homo sapiens
  misc_RNA (1)...(19): siRNA sense strand
acgaggagguggucaagga

SEQ ID NO: 775537 - RNA, 19 nt, Homo sapiens
  misc_RNA (1)...(19): siRNA sense strand
gaagaggcggaggauguaa

SEQ ID NO: 775538 - RNA, 19 nt, Homo sapiens
  misc_RNA (1)...(19): siRNA sense strand
ggaaucugcuacuggaaaa

SEQ ID NO: 775539 - RNA, 19 nt, Homo sapiens
  misc_RNA (1)...(19): siRNA sense strand
gggagucggagaugaagaa

SEQ ID NO: 775540 - RNA, 19 nt, Homo sapiens
  misc_RNA (1)...(19): siRNA sense strand
ggcgugggcuccaagaaca

SEQ ID NO: 775541 - RNA, 19 nt, Homo sapiens
  misc_RNA (1)...(19): siRNA sense strand
gagaugcgcaacgucagua

SEQ ID NO: 775542 - RNA, 19 nt, Homo sapiens
  misc_RNA (1)...(19): siRNA sense strand
uacaucgacuuccgcauug

SEQ ID NO: 775543 - RNA, 19 nt, Homo sapiens
  misc_RNA (1)...(19): siRNA sense strand
gaggacacgcggaugaaga

SEQ ID NO: 775544 - RNA, 19 nt, Homo sapiens
  misc_RNA (1)...(19): siRNA sense strand
caacaccgacucccuguac

SEQ ID NO: 775545 - RNA, 19 nt, Homo sapiens
  misc_RNA (1)...(19): siRNA sense strand
ccagcaagguggugaucau

SEQ ID NO: 775546 - RNA, 19 nt, Homo sapiens
  misc_RNA (1)...(19): siRNA sense strand
acucacagcuucuggaaac

SEQ ID NO: 775547 - RNA, 19 nt, Homo sapiens
  misc_RNA (1)...(19): siRNA sense strand
gagaaauucauugaguuug

SEQ ID NO: 775548 - RNA, 19 nt, Homo sapiens
  misc_RNA (1)...(19): siRNA sense strand
aggagaaauucauugaguu

SEQ ID NO: 775549 - RNA, 19 nt, Homo sapiens
  misc_RNA (1)...(19): siRNA sense strand
agaagaagaaggccaagga

SEQ ID NO: 775550 - RNA, 19 nt, Homo sapiens
  misc_RNA (1)...(19): siRNA sense strand
aagaagaggcggaggaugu

SEQ ID NO: 775551 - RNA, 19 nt, Homo sapiens
  misc_RNA (1)...(19): siRNA sense strand
gccgugaacccaaagaaga

SEQ ID NO: 775552 - RNA, 19 nt, Homo sapiens
  misc_RNA (1)...(19): siRNA sense strand
gaugcgcaacgucaguaua

SEQ ID NO: 775553 - RNA, 19 nt, Homo sapiens
  misc_RNA (1)...(19): siRNA sense strand
gcaacggaguggucaucuc

SEQ ID NO: 775554 - RNA, 19 nt, Homo sapiens
  misc_RNA (1)...(19): siRNA sense strand
agugggaucugagcaacua

SEQ ID NO: 775555 - RNA, 19 nt, Homo sapiens
  misc_RNA (1)...(19): siRNA sense strand
acaaggagcggcugaugga

SEQ ID NO: 775556 - RNA, 19 nt, Homo sapiens
  misc_RNA (1)...(19): siRNA sense strand
ugaagaaggaguacaaugc

SEQ ID NO: 775557 - RNA, 19 nt, Homo sapiens
  misc_RNA (1)...(19): siRNA sense strand
gccagaagcugcggaacgu

SEQ ID NO: 775558 - RNA, 19 nt, Homo sapiens
  misc_RNA (1)...(19): siRNA sense strand
gccgugaaguucuuugucu

SEQ ID NO: 775559 - RNA, 19 nt, Homo sapiens
  misc_RNA (1)...(19): siRNA sense strand
gggcaucauccacguguau

SEQ ID NO: 775560 - RNA, 19 nt, Homo sapiens
  misc_RNA (1)...(19): siRNA sense strand
gcccaagaccaugcagaua

SEQ ID NO: 775561 - RNA, 19 nt, Homo sapiens
  misc_RNA (1)...(19): siRNA sense strand
gccaaggagcucccugaaa

SEQ ID NO: 775562 - RNA, 19 nt, Homo sapiens
  misc_RNA (1)...(19): siRNA sense strand
gagaaggaccccaccauga

SEQ ID NO: 775563 - RNA, 19 nt, Homo sapiens
  misc_RNA (1)...(19): siRNA sense strand
gcugaaggccaagaacuau

SEQ ID NO: 775564 - RNA, 19 nt, Homo sapiens
  misc_RNA (1)...(19): siRNA sense strand
gcagugacgaguggucuga

SEQ ID NO: 775565 - RNA, 19 nt, Homo sapiens
  misc_RNA (1)...(19): siRNA sense strand
ccacaggcaccaaguccaa

SEQ ID NO: 775566 - RNA, 19 nt, Homo sapiens
  misc_RNA (1)...(19): siRNA sense strand
gacgaguggucugauguuc

SEQ ID NO: 775567 - RNA, 19 nt, Homo sapiens
  misc_RNA (1)...(19): siRNA sense strand
gauggccagugggaucuga

SEQ ID NO: 775568 - RNA, 19 nt, Homo sapiens
  misc_RNA (1)...(19): siRNA sense strand
caaggagcucccugaaaug

SEQ ID NO: 775569 - RNA, 19 nt, Homo sapiens
  misc_RNA (1)...(19): siRNA sense strand
cgacagccgcaacauggaa

SEQ ID NO: 775570 - RNA, 19 nt, Homo sapiens
  misc_RNA (1)...(19): siRNA sense strand
ggacaugagccaggugaag

SEQ ID NO: 775571 - RNA, 19 nt, Homo sapiens
  misc_RNA (1)...(19): siRNA sense strand
gaacgugcuggagaaccua

SEQ ID NO: 775572 - RNA, 19 nt, Homo sapiens
  misc_RNA (1)...(19): siRNA sense strand
ggcaggcggaggagaaauu

SEQ ID NO: 775573 - RNA, 19 nt, Homo sapiens
  misc_RNA (1)...(19): siRNA sense strand
cggugaacauccacuacaa

SEQ ID NO: 775574 - RNA, 19 nt, Homo sapiens
  misc_RNA (1)...(19): siRNA sense strand
guacaaggagcggcugaug

SEQ ID NO: 775575 - RNA, 19 nt, Homo sapiens
  misc_RNA (1)...(19): siRNA sense strand
gaaguccgaggccaucauc

SEQ ID NO: 775576 - RNA, 19 nt, Homo sapiens
  misc_RNA (1)...(19): siRNA sense strand
gcuaagcaggccaaaguca

SEQ ID NO: 775577 - RNA, 19 nt, Homo sapiens
  misc_RNA (1)...(19): siRNA sense strand
cggaggagaaauucauuga

SEQ ID NO: 775578 - RNA, 19 nt, Homo sapiens
  misc_RNA (1)...(19): siRNA sense strand
ucaugccgcugguggugaa

SEQ ID NO: 775579 - RNA, 19 nt, Homo sapiens
  misc_RNA (1)...(19): siRNA sense strand
gcgguggacugagaugauc

SEQ ID NO: 775580 - RNA, 19 nt, Homo sapiens
  misc_RNA (1)...(19): siRNA sense strand
aagcagcuaucucuguaca

SEQ ID NO: 775581 - RNA, 19 nt, Homo sapiens
  misc_RNA (1)...(19): siRNA sense strand
agaagaggcggaggaugua

SEQ ID NO: 775582 - RNA, 19 nt, Homo sapiens
  misc_RNA (1)...(19): siRNA sense strand
caaagaagaggcggaggau

SEQ ID NO: 775583 - RNA, 19 nt, Homo sapiens
  misc_RNA (1)...(19): siRNA sense strand
guacagaaucggacaaaau

SEQ ID NO: 775584 - RNA, 19 nt, Homo sapiens
  misc_RNA (1)...(19): siRNA sense strand
ggagggcuacaucgacuuc

SEQ ID NO: 775585 - RNA, 19 nt, Homo sapiens
  misc_RNA (1)...(19): siRNA sense strand
agaacaaggugcacgucau

SEQ ID NO: 775586 - RNA, 19 nt, Homo sapiens
  misc_RNA (1)...(19): siRNA sense strand
gagccuggugcaugucaaa

SEQ ID NO: 775587 - RNA, 19 nt, Homo sapiens
  misc_RNA (1)...(19): siRNA sense strand
caggaggacacgcggauga

SEQ ID NO: 775588 - RNA, 19 nt, Homo sapiens
  misc_RNA (1)...(19): siRNA sense strand
ggaaauggaacuacauaua

SEQ ID NO: 775589 - RNA, 19 nt, Homo sapiens
  misc_RNA (1)...(19): siRNA sense strand
ccucagaacuugaccauga

SEQ ID NO: 775590 - RNA, 19 nt, Homo sapiens
  misc_RNA (1)...(19): siRNA sense strand
ggaacuacauauaugacaa

SEQ ID NO: 775591 - RNA, 19 nt, Homo sapiens
  misc_RNA (1)...(19): siRNA sense strand
gaccaugacugucuuccaa

SEQ ID NO: 775592 - RNA, 19 nt, Homo sapiens
  misc_RNA (1)...(19): siRNA sense strand
gcaccagccucaccuguca

SEQ ID NO: 775593 - RNA, 19 nt, Homo sapiens
  misc_RNA (1)...(19): siRNA sense strand
ggaaggagagauccaguau

SEQ ID NO: 775594 - RNA, 19 nt, Homo sapiens
  misc_RNA (1)...(19): siRNA sense strand
gagugcaugugaaggauga

SEQ ID NO: 775595 - RNA, 19 nt, Homo sapiens
  misc_RNA (1)...(19): siRNA sense strand
ggagagaggaagcaggaaa

SEQ ID NO: 775596 - RNA, 19 nt, Homo sapiens
  misc_RNA (1)...(19): siRNA sense strand
ugacagcccugacucacau

SEQ ID NO: 775597 - RNA, 19 nt, Homo sapiens
  misc_RNA (1)...(19): siRNA sense strand
ggagagauccaguaugcau

SEQ ID NO: 775598 - RNA, 19 nt, Homo sapiens
  misc_RNA (1)...(19): siRNA sense strand
gccgauauaccaugggaua

SEQ ID NO: 775599 - RNA, 19 nt, Homo sapiens
  misc_RNA (1)...(19): siRNA sense strand
gaccuacugucaagauaca

SEQ ID NO: 775600 - RNA, 19 nt, Homo sapiens
  misc_RNA (1)...(19): siRNA sense strand
caggaaauggaacuacaua

SEQ ID NO: 775601 - RNA, 19 nt, Homo sapiens
  misc_RNA (1)...(19): siRNA sense strand
aaggagagauccaguaugc

SEQ ID NO: 775602 - RNA, 19 nt, Homo sapiens
  misc_RNA (1)...(19): siRNA sense strand
gaacuacauauaugacaag

SEQ ID NO: 775603 - RNA, 19 nt, Homo sapiens
  misc_RNA (1)...(19): siRNA sense strand
acaaagcgaggccucagua

SEQ ID NO: 775604 - RNA, 19 nt, Homo sapiens
  misc_RNA (1)...(19): siRNA sense strand
gcacagcauccacaaccuu

SEQ ID NO: 775605 - RNA, 19 nt, Homo sapiens
  misc_RNA (1)...(19): siRNA sense strand
aggaauggcucggcccuuu

SEQ ID NO: 775606 - RNA, 19 nt, Homo sapiens
  misc_RNA (1)...(19): siRNA sense strand
ugacucacaugcccaccuu

SEQ ID NO: 775607 - RNA, 19 nt, Homo sapiens
  misc_RNA (1)...(19): siRNA sense strand
gagagaggaagcaggaaau

SEQ ID NO: 775608 - RNA, 19 nt, Homo sapiens
  misc_RNA (1)...(19): siRNA sense strand
ggagcugccucgagugcau

SEQ ID NO: 775609 - RNA, 19 nt, Homo sapiens
  misc_RNA (1)...(19): siRNA sense strand
gaauggcucggcccuuuca

SEQ ID NO: 775610 - RNA, 19 nt, Homo sapiens
  misc_RNA (1)...(19): siRNA sense strand
guuuauggauccugguuca

SEQ ID NO: 775611 - RNA, 19 nt, Homo sapiens
  misc_RNA (1)...(19): siRNA sense strand
gaaggagagauccaguaug

SEQ ID NO: 775612 - RNA, 19 nt, Homo sapiens
  misc_RNA (1)...(19): siRNA sense strand
gggauucagggaaguacua

SEQ ID NO: 775613 - RNA, 19 nt, Homo sapiens
  misc_RNA (1)...(19): siRNA sense strand
gaggaagcaggaaauggaa

SEQ ID NO: 775614 - RNA, 19 nt, Homo sapiens
  misc_RNA (1)...(19): siRNA sense strand
gccagucccugcaccuugu

SEQ ID NO: 775615 - RNA, 19 nt, Homo sapiens
  misc_RNA (1)...(19): siRNA sense strand
ccacaaccuugaggaaugg

SEQ ID NO: 775616 - RNA, 19 nt, Homo sapiens
  misc_RNA (1)...(19): siRNA sense strand
uauccuauccuccucagaa

SEQ ID NO: 775617 - RNA, 19 nt, Homo sapiens
  misc_RNA (1)...(19): siRNA sense strand
guacuucugcaucaucuuc

SEQ ID NO: 775618 - RNA, 19 nt, Homo sapiens
  misc_RNA (1)...(19): siRNA sense strand
caagcucucugugcaugug

SEQ ID NO: 775619 - RNA, 19 nt, Homo sapiens
  misc_RNA (1)...(19): siRNA sense strand
ccacagcccuggucuuccu

SEQ ID NO: 775620 - RNA, 19 nt, Homo sapiens
  misc_RNA (1)...(19): siRNA sense strand
uccacaaccuugaggaaug

SEQ ID NO: 775621 - RNA, 19 nt, Homo sapiens
  misc_RNA (1)...(19): siRNA sense strand
agaggaagcaggaaaugga

SEQ ID NO: 775622 - RNA, 19 nt, Homo sapiens
  misc_RNA (1)...(19): siRNA sense strand
gaagcaggaaauggaacua

SEQ ID NO: 775623 - RNA, 19 nt, Homo sapiens
  misc_RNA (1)...(19): siRNA sense strand
gcaggaaauggaacuacau

SEQ ID NO: 775624 - RNA, 19 nt, Homo sapiens
  misc_RNA (1)...(19): siRNA sense strand
caucaucuucguuguagug

SEQ ID NO: 775625 - RNA, 19 nt, Homo sapiens
  misc_RNA (1)...(19): siRNA sense strand
gcuguccgacucaacauau

SEQ ID NO: 775626 - RNA, 19 nt, Homo sapiens
  misc_RNA (1)...(19): siRNA sense strand
ucccucagcuuccacaaag

SEQ ID NO: 775627 - RNA, 19 nt, Homo sapiens
  misc_RNA (1)...(19): siRNA sense strand
cgacucaacauauccuauc

SEQ ID NO: 775628 - RNA, 19 nt, Homo sapiens
  misc_RNA (1)...(19): siRNA sense strand
ggaauggcucggcccuuuc

SEQ ID NO: 775629 - RNA, 19 nt, Homo sapiens
  misc_RNA (1)...(19): siRNA sense strand
ggauacccacggucgauuc

SEQ ID NO: 775630 - RNA, 19 nt, Homo sapiens
  misc_RNA (1)...(19): siRNA sense strand
uaugaguacuccgagauca

SEQ ID NO: 775631 - RNA, 19 nt, Homo sapiens
  misc_RNA (1)...(19): siRNA sense strand
caaaaugaggccuauauca

SEQ ID NO: 775632 - RNA, 19 nt, Homo sapiens
  misc_RNA (1)...(19): siRNA sense strand
aaacgaguacacaggcaaa

SEQ ID NO: 775633 - RNA, 19 nt, Homo sapiens
  misc_RNA (1)...(19): siRNA sense strand
gcccugcaguguccuuuac

SEQ ID NO: 775634 - RNA, 19 nt, Homo sapiens
  misc_RNA (1)...(19): siRNA sense strand
ggaccuacugucaagauac

SEQ ID NO: 775635 - RNA, 19 nt, Homo sapiens
  misc_RNA (1)...(19): siRNA sense strand
gcuaugaguacuccgagau

SEQ ID NO: 775636 - RNA, 19 nt, Homo sapiens
  misc_RNA (1)...(19): siRNA sense strand
ggccaucggcuaugaguac

SEQ ID NO: 775637 - RNA, 19 nt, Homo sapiens
  misc_RNA (1)...(19): siRNA sense strand
uauaugacaagcucucugu

SEQ ID NO: 775638 - RNA, 19 nt, Homo sapiens
  misc_RNA (1)...(19): siRNA sense strand
ccucuagcccuguuuaugg

SEQ ID NO: 775639 - RNA, 19 nt, Homo sapiens
  misc_RNA (1)...(19): siRNA sense strand
aggaccuacugucaagaua

SEQ ID NO: 775640 - RNA, 19 nt, Homo sapiens
  misc_RNA (1)...(19): siRNA sense strand
gaggauacccacggucgau

SEQ ID NO: 775641 - RNA, 19 nt, Homo sapiens
  misc_RNA (1)...(19): siRNA sense strand
cugagccucucccugcaaa

SEQ ID NO: 775642 - RNA, 19 nt, Homo sapiens
  misc_RNA (1)...(19): siRNA sense strand
cccaggaccuacugucaag

SEQ ID NO: 775643 - RNA, 19 nt, Homo sapiens
  misc_RNA (1)...(19): siRNA sense strand
ggaagcaggaaauggaacu

SEQ ID NO: 775644 - RNA, 19 nt, Homo sapiens
  misc_RNA (1)...(19): siRNA sense strand
gagaggaagcaggaaaugg

SEQ ID NO: 775645 - RNA, 19 nt, Homo sapiens
  misc_RNA (1)...(19): siRNA sense strand
gcccuggucuuccuguacu

SEQ ID NO: 775646 - RNA, 19 nt, Homo sapiens
  misc_RNA (1)...(19): siRNA sense strand
cagcccuggucuuccugua

SEQ ID NO: 775647 - RNA, 19 nt, Homo sapiens
  misc_RNA (1)...(19): siRNA sense strand
gaaaagugcaagaggauac

SEQ ID NO: 775648 - RNA, 19 nt, Homo sapiens
  misc_RNA (1)...(19): siRNA sense strand
cugcaucaucuucguugua

SEQ ID NO: 775649 - RNA, 19 nt, Homo sapiens
  misc_RNA (1)...(19): siRNA sense strand
ggaaaagugcaagaggaua

SEQ ID NO: 775650 - RNA, 19 nt, Homo sapiens
  misc_RNA (1)...(19): siRNA sense strand
ggaaauggaacuacauaua

SEQ ID NO: 775651 - RNA, 19 nt, Homo sapiens
  misc_RNA (1)...(19): siRNA sense strand
ccucagaacuugaccauga

SEQ ID NO: 775652 - RNA, 19 nt, Homo sapiens
  misc_RNA (1)...(19): siRNA sense strand
ggaacuacauauaugacaa

SEQ ID NO: 775653 - RNA, 19 nt, Homo sapiens
  misc_RNA (1)...(19): siRNA sense strand
gaccaugacugucuuccaa

SEQ ID NO: 775654 - RNA, 19 nt, Homo sapiens
  misc_RNA (1)...(19): siRNA sense strand
gcaccagccucaccuguca

SEQ ID NO: 775655 - RNA, 19 nt, Homo sapiens
  misc_RNA (1)...(19): siRNA sense strand
ggaaggagagauccaguau

SEQ ID NO: 775656 - RNA, 19 nt, Homo sapiens
  misc_RNA (1)...(19): siRNA sense strand
gagugcaugugaaggauga

SEQ ID NO: 775657 - RNA, 19 nt, Homo sapiens
  misc_RNA (1)...(19): siRNA sense strand
ggagagaggaagcaggaaa

SEQ ID NO: 775658 - RNA, 19 nt, Homo sapiens
  misc_RNA (1)...(19): siRNA sense strand
ugacagcccugacucacau

SEQ ID NO: 775659 - RNA, 19 nt, Homo sapiens
  misc_RNA (1)...(19): siRNA sense strand
ggagagauccaguaugcau

SEQ ID NO: 775660 - RNA, 19 nt, Homo sapiens
  misc_RNA (1)...(19): siRNA sense strand
gccgauauaccaugggaua

SEQ ID NO: 775661 - RNA, 19 nt, Homo sapiens
  misc_RNA (1)...(19): siRNA sense strand
gaccuacugucaagauaca

SEQ ID NO: 775662 - RNA, 19 nt, Homo sapiens
  misc_RNA (1)...(19): siRNA sense strand
caggaaauggaacuacaua

SEQ ID NO: 775663 - RNA, 19 nt, Homo sapiens
  misc_RNA (1)...(19): siRNA sense strand
aaggagagauccaguaugc

SEQ ID NO: 775664 - RNA, 19 nt, Homo sapiens
  misc_RNA (1)...(19): siRNA sense strand
gaacuacauauaugacaag

SEQ ID NO: 775665 - RNA, 19 nt, Homo sapiens
  misc_RNA (1)...(19): siRNA sense strand
acaaagcgaggccucagua

SEQ ID NO: 775666 - RNA, 19 nt, Homo sapiens
  misc_RNA (1)...(19): siRNA sense strand
gcacagcauccacaaccuu

SEQ ID NO: 775667 - RNA, 19 nt, Homo sapiens
  misc_RNA (1)...(19): siRNA sense strand
aggaauggcucggcccuuu

SEQ ID NO: 775668 - RNA, 19 nt, Homo sapiens
  misc_RNA (1)...(19): siRNA sense strand
ugacucacaugcccaccuu

SEQ ID NO: 775669 - RNA, 19 nt, Homo sapiens
  misc_RNA (1)...(19): siRNA sense strand
gagagaggaagcaggaaau

SEQ ID NO: 775670 - RNA, 19 nt, Homo sapiens
  misc_RNA (1)...(19): siRNA sense strand
ggagcugccucgagugcau

SEQ ID NO: 775671 - RNA, 19 nt, Homo sapiens
  misc_RNA (1)...(19): siRNA sense strand
gaauggcucggcccuuuca

SEQ ID NO: 775672 - RNA, 19 nt, Homo sapiens
  misc_RNA (1)...(19): siRNA sense strand
guuuauggauccugguuca

SEQ ID NO: 775673 - RNA, 19 nt, Homo sapiens
  misc_RNA (1)...(19): siRNA sense strand
gaaggagagauccaguaug

SEQ ID NO: 775674 - RNA, 19 nt, Homo sapiens
  misc_RNA (1)...(19): siRNA sense strand
gggauucagggaaguacua

SEQ ID NO: 775675 - RNA, 19 nt, Homo sapiens
  misc_RNA (1)...(19): siRNA sense strand
gaggaagcaggaaauggaa

SEQ ID NO: 775676 - RNA, 19 nt, Homo sapiens
  misc_RNA (1)...(19): siRNA sense strand
gccagucccugcaccuugu

SEQ ID NO: 775677 - RNA, 19 nt, Homo sapiens
  misc_RNA (1)...(19): siRNA sense strand
ccacaaccuugaggaaugg

SEQ ID NO: 775678 - RNA, 19 nt, Homo sapiens
  misc_RNA (1)...(19): siRNA sense strand
uauccuauccuccucagaa

SEQ ID NO: 775679 - RNA, 19 nt, Homo sapiens
  misc_RNA (1)...(19): siRNA sense strand
guacuucugcaucaucuuc

SEQ ID NO: 775680 - RNA, 19 nt, Homo sapiens
  misc_RNA (1)...(19): siRNA sense strand
caagcucucugugcaugug

SEQ ID NO: 775681 - RNA, 19 nt, Homo sapiens
  misc_RNA (1)...(19): siRNA sense strand
ccacagcccuggucuuccu

SEQ ID NO: 775682 - RNA, 19 nt, Homo sapiens
  misc_RNA (1)...(19): siRNA sense strand
uccacaaccuugaggaaug

SEQ ID NO: 775683 - RNA, 19 nt, Homo sapiens
  misc_RNA (1)...(19): siRNA sense strand
agaggaagcaggaaaugga

SEQ ID NO: 775684 - RNA, 19 nt, Homo sapiens
  misc_RNA (1)...(19): siRNA sense strand
gaagcaggaaauggaacua

SEQ ID NO: 775685 - RNA, 19 nt, Homo sapiens
  misc_RNA (1)...(19): siRNA sense strand
gcaggaaauggaacuacau

SEQ ID NO: 775686 - RNA, 19 nt, Homo sapiens
  misc_RNA (1)...(19): siRNA sense strand
caucaucuucguuguagug

SEQ ID NO: 775687 - RNA, 19 nt, Homo sapiens
  misc_RNA (1)...(19): siRNA sense strand
gcuguccgacucaacauau

SEQ ID NO: 775688 - RNA, 19 nt, Homo sapiens
  misc_RNA (1)...(19): siRNA sense strand
ucccucagcuuccacaaag

SEQ ID NO: 775689 - RNA, 19 nt, Homo sapiens
  misc_RNA (1)...(19): siRNA sense strand
cgacucaacauauccuauc

SEQ ID NO: 775690 - RNA, 19 nt, Homo sapiens
  misc_RNA (1)...(19): siRNA sense strand
ggaauggcucggcccuuuc

SEQ ID NO: 775691 - RNA, 19 nt, Homo sapiens
  misc_RNA (1)...(19): siRNA sense strand
ggauacccacggucgauuc

SEQ ID NO: 775692 - RNA, 19 nt, Homo sapiens
  misc_RNA (1)...(19): siRNA sense strand
uaugaguacuccgagauca

SEQ ID NO: 775693 - RNA, 19 nt, Homo sapiens
  misc_RNA (1)...(19): siRNA sense strand
caaaaugaggccuauauca

SEQ ID NO: 775694 - RNA, 19 nt, Homo sapiens
  misc_RNA (1)...(19): siRNA sense strand
aaacgaguacacaggcaaa

SEQ ID NO: 775695 - RNA, 19 nt, Homo sapiens
  misc_RNA (1)...(19): siRNA sense strand
gcccugcaguguccuuuac

SEQ ID NO: 775696 - RNA, 19 nt, Homo sapiens
  misc_RNA (1)...(19): siRNA sense strand
ggaccuacugucaagauac

SEQ ID NO: 775697 - RNA, 19 nt, Homo sapiens
  misc_RNA (1)...(19): siRNA sense strand
gcuaugaguacuccgagau

SEQ ID NO: 775698 - RNA, 19 nt, Homo sapiens
  misc_RNA (1)...(19): siRNA sense strand
ggccaucggcuaugaguac

SEQ ID NO: 775699 - RNA, 19 nt, Homo sapiens
  misc_RNA (1)...(19): siRNA sense strand
uauaugacaagcucucugu

SEQ ID NO: 775700 - RNA, 19 nt, Homo sapiens
  misc_RNA (1)...(19): siRNA sense strand
aggaccuacugucaagaua

SEQ ID NO: 775701 - RNA, 19 nt, Homo sapiens
  misc_RNA (1)...(19): siRNA sense strand
ccucuagcccuguuuaugg

SEQ ID NO: 775702 - RNA, 19 nt, Homo sapiens
  misc_RNA (1)...(19): siRNA sense strand
gaggauacccacggucgau

SEQ ID NO: 775703 - RNA, 19 nt, Homo sapiens
  misc_RNA (1)...(19): siRNA sense strand
cugagccucucccugcaaa

SEQ ID NO: 775704 - RNA, 19 nt, Homo sapiens
  misc_RNA (1)...(19): siRNA sense strand
cccaggaccuacugucaag

SEQ ID NO: 775705 - RNA, 19 nt, Homo sapiens
  misc_RNA (1)...(19): siRNA sense strand
ggaagcaggaaauggaacu

SEQ ID NO: 775706 - RNA, 19 nt, Homo sapiens
  misc_RNA (1)...(19): siRNA sense strand
gagaggaagcaggaaaugg

SEQ ID NO: 775707 - RNA, 19 nt, Homo sapiens
  misc_RNA (1)...(19): siRNA sense strand
gcccuggucuuccuguacu

SEQ ID NO: 775708 - RNA, 19 nt, Homo sapiens
  misc_RNA (1)...(19): siRNA sense strand
cagcccuggucuuccugua

SEQ ID NO: 775709 - RNA, 19 nt, Homo sapiens
  misc_RNA (1)...(19): siRNA sense strand
gaaaagugcaagaggauac

SEQ ID NO: 775710 - RNA, 19 nt, Homo sapiens
  misc_RNA (1)...(19): siRNA sense strand
cugcaucaucuucguugua

SEQ ID NO: 775711 - RNA, 19 nt, Homo sapiens
  misc_RNA (1)...(19): siRNA sense strand
ggaaaagugcaagaggaua

SEQ ID NO: 775712 - RNA, 19 nt, Homo sapiens
  misc_RNA (1)...(19): siRNA sense strand
cgaauaugauccaacaaua

SEQ ID NO: 775713 - RNA, 19 nt, Homo sapiens
  misc_RNA (1)...(19): siRNA sense strand
ggacgaauaugauccaaca

SEQ ID NO: 775714 - RNA, 19 nt, Homo sapiens
  misc_RNA (1)...(19): siRNA sense strand
uaaggacucugaagaugua

SEQ ID NO: 775715 - RNA, 19 nt, Homo sapiens
  misc_RNA (1)...(19): siRNA sense strand
ggaagcaaguaguaauuga

SEQ ID NO: 775716 - RNA, 19 nt, Homo sapiens
  misc_RNA (1)...(19): siRNA sense strand
gcaagaaguuauggaauuc

SEQ ID NO: 775717 - RNA, 19 nt, Homo sapiens
  misc_RNA (1)...(19): siRNA sense strand
gaugaugccuucuauacau

SEQ ID NO: 775718 - RNA, 19 nt, Homo sapiens
  misc_RNA (1)...(19): siRNA sense strand
gacaaaguguguaauuaug

SEQ ID NO: 775719 - RNA, 19 nt, Homo sapiens
  misc_RNA (1)...(19): siRNA sense strand
gcucaggacuuagcaagaa

SEQ ID NO: 775720 - RNA, 19 nt, Homo sapiens
  misc_RNA (1)...(19): siRNA sense strand
cgauacagcuaauucagaa

SEQ ID NO: 775721 - RNA, 19 nt, Homo sapiens
  misc_RNA (1)...(19): siRNA sense strand
aaaccugucucuuggauau

SEQ ID NO: 775722 - RNA, 19 nt, Homo sapiens
  misc_RNA (1)...(19): siRNA sense strand
gaaguuauggaauuccuuu

SEQ ID NO: 775723 - RNA, 19 nt, Homo sapiens
  misc_RNA (1)...(19): siRNA sense strand
ggagggcuuucuuugugua

SEQ ID NO: 775724 - RNA, 19 nt, Homo sapiens
  misc_RNA (1)...(19): siRNA sense strand
gggcuuucuuuguguauuu

SEQ ID NO: 775725 - RNA, 19 nt, Homo sapiens
  misc_RNA (1)...(19): siRNA sense strand
gaauaugauccaacaauag

SEQ ID NO: 775726 - RNA, 19 nt, Homo sapiens
  misc_RNA (1)...(19): siRNA sense strand
ucaaagacaaaguguguaa

SEQ ID NO: 775727 - RNA, 19 nt, Homo sapiens
  misc_RNA (1)...(19): siRNA sense strand
guuaaggacucugaagaug

SEQ ID NO: 775728 - RNA, 19 nt, Homo sapiens
  misc_RNA (1)...(19): siRNA sense strand
caagaggaguacagugcaa

SEQ ID NO: 775729 - RNA, 19 nt, Homo sapiens
  misc_RNA (1)...(19): siRNA sense strand
agcaagaaguuauggaauu

SEQ ID NO: 775730 - RNA, 19 nt, Homo sapiens
  misc_RNA (1)...(19): siRNA sense strand
cuagaacaguagacacaaa

SEQ ID NO: 775731 - RNA, 19 nt, Homo sapiens
  misc_RNA (1)...(19): siRNA sense strand
aaaacaggcucaggacuua

SEQ ID NO: 775732 - RNA, 19 nt, Homo sapiens
  misc_RNA (1)...(19): siRNA sense strand
gcaaguaguaauugaugga

SEQ ID NO: 775733 - RNA, 19 nt, Homo sapiens
  misc_RNA (1)...(19): siRNA sense strand
gaaaccugucucuuggaua

SEQ ID NO: 775734 - RNA, 19 nt, Homo sapiens
  misc_RNA (1)...(19): siRNA sense strand
gauauucaccauuauagag

SEQ ID NO: 775735 - RNA, 19 nt, Homo sapiens
  misc_RNA (1)...(19): siRNA sense strand
gaagcaaguaguaauugau

SEQ ID NO: 775736 - RNA, 19 nt, Homo sapiens
  misc_RNA (1)...(19): siRNA sense strand
cgacacagcaggucaagag

SEQ ID NO: 775737 - RNA, 19 nt, Homo sapiens
  misc_RNA (1)...(19): siRNA sense strand
ugauuugccuucuagaaca

SEQ ID NO: 775738 - RNA, 19 nt, Homo sapiens
  misc_RNA (1)...(19): siRNA sense strand
gggagggcuuucuuugugu

SEQ ID NO: 775739 - RNA, 19 nt, Homo sapiens
  misc_RNA (1)...(19): siRNA sense strand
ugaaacaucagcaaagaca

SEQ ID NO: 775740 - RNA, 19 nt, Homo sapiens
  misc_RNA (1)...(19): siRNA sense strand
gaagucaaagacaaagugu

SEQ ID NO: 775741 - RNA, 19 nt, Homo sapiens
  misc_RNA (1)...(19): siRNA sense strand
caggaagcaaguaguaauu

SEQ ID NO: 775742 - RNA, 19 nt, Homo sapiens
  misc_RNA (1)...(19): siRNA sense strand
aguaguaauugauggagaa

SEQ ID NO: 775743 - RNA, 19 nt, Homo sapiens
  misc_RNA (1)...(19): siRNA sense strand
cagcaggucaagaggagua

SEQ ID NO: 775744 - RNA, 19 nt, Homo sapiens
  misc_RNA (1)...(19): siRNA sense strand
gacugaauauaaacuugug

SEQ ID NO: 775745 - RNA, 19 nt, Homo sapiens
  misc_RNA (1)...(19): siRNA sense strand
gcaaugagggaccaguaca

SEQ ID NO: 775746 - RNA, 19 nt, Homo sapiens
  misc_RNA (1)...(19): siRNA sense strand
agaaaccugucucuuggau

SEQ ID NO: 775747 - RNA, 19 nt, Homo sapiens
  misc_RNA (1)...(19): siRNA sense strand
cgagaaauucgaaaacaua

SEQ ID NO: 775748 - RNA, 19 nt, Homo sapiens
  misc_RNA (1)...(19): siRNA sense strand
aagagugccuugacgauac

SEQ ID NO: 775749 - RNA, 19 nt, Homo sapiens
  misc_RNA (1)...(19): siRNA sense strand
gaggaguacagugcaauga

SEQ ID NO: 775750 - RNA, 19 nt, Homo sapiens
  misc_RNA (1)...(19): siRNA sense strand
aagaaaagaugagcaaaga

SEQ ID NO: 775751 - RNA, 19 nt, Homo sapiens
  misc_RNA (1)...(19): siRNA sense strand
ggggagggcuuucuuugug

SEQ ID NO: 775752 - RNA, 19 nt, Homo sapiens
  misc_RNA (1)...(19): siRNA sense strand
gaaacaucagcaaagacaa

SEQ ID NO: 775753 - RNA, 19 nt, Homo sapiens
  misc_RNA (1)...(19): siRNA sense strand
guaccuaugguccuaguag

SEQ ID NO: 775754 - RNA, 19 nt, Homo sapiens
  misc_RNA (1)...(19): siRNA sense strand
agauguaccuaugguccua

SEQ ID NO: 775755 - RNA, 19 nt, Homo sapiens
  misc_RNA (1)...(19): siRNA sense strand
aaugugauuugccuucuag

SEQ ID NO: 775756 - RNA, 19 nt, Homo sapiens
  misc_RNA (1)...(19): siRNA sense strand
gugcaaugagggaccagua

SEQ ID NO: 775757 - RNA, 19 nt, Homo sapiens
  misc_RNA (1)...(19): siRNA sense strand
ucaccauuauagagaacaa

SEQ ID NO: 775758 - RNA, 19 nt, Homo sapiens
  misc_RNA (1)...(19): siRNA sense strand
agucaaagacaaagugugu

SEQ ID NO: 775759 - RNA, 19 nt, Homo sapiens
  misc_RNA (1)...(19): siRNA sense strand
ugccuucuauacauuaguu

SEQ ID NO: 775760 - RNA, 19 nt, Homo sapiens
  misc_RNA (1)...(19): siRNA sense strand
ugaugccuucuauacauua

SEQ ID NO: 775761 - RNA, 19 nt, Homo sapiens
  misc_RNA (1)...(19): siRNA sense strand
aaacaucagcaaagacaag

SEQ ID NO: 775762 - RNA, 19 nt, Homo sapiens
  misc_RNA (1)...(19): siRNA sense strand
auugaaacaucagcaaaga

SEQ ID NO: 775763 - RNA, 19 nt, Homo sapiens
  misc_RNA (1)...(19): siRNA sense strand
caaaacaggcucaggacuu

SEQ ID NO: 775764 - RNA, 19 nt, Homo sapiens
  misc_RNA (1)...(19): siRNA sense strand
ugacgauacagcuaauuca

SEQ ID NO: 775765 - RNA, 19 nt, Homo sapiens
  misc_RNA (1)...(19): siRNA sense strand
gaugccuucuauacauuag

SEQ ID NO: 775766 - RNA, 19 nt, Homo sapiens
  misc_RNA (1)...(19): siRNA sense strand
uuaaggacucugaagaugu

SEQ ID NO: 775767 - RNA, 19 nt, Homo sapiens
  misc_RNA (1)...(19): siRNA sense strand
aagcaaguaguaauugaug

SEQ ID NO: 775768 - RNA, 19 nt, Homo sapiens
  misc_RNA (1)...(19): siRNA sense strand
acaggaagcaaguaguaau

SEQ ID NO: 775769 - RNA, 19 nt, Homo sapiens
  misc_RNA (1)...(19): siRNA sense strand
guugaugaugccuucuaua

SEQ ID NO: 775770 - RNA, 19 nt, Homo sapiens
  misc_RNA (1)...(19): siRNA sense strand
cugaagauguaccuauggu

SEQ ID NO: 775771 - RNA, 19 nt, Homo sapiens
  misc_RNA (1)...(19): siRNA sense strand
agaagucaaagacaaagug

SEQ ID NO: 775772 - RNA, 19 nt, Homo sapiens
  misc_RNA (1)...(19): siRNA sense strand
caucagcaaagacaagaca

SEQ ID NO: 775773 - RNA, 19 nt, Homo sapiens
  misc_RNA (1)...(19): siRNA sense strand
uuagcaagaaguuauggaa

SEQ ID NO: 775774 - RNA, 19 nt, Homo sapiens
  misc_RNA (1)...(19): siRNA sense strand
gaacaguagacacaaaaca

SEQ ID NO: 775775 - RNA, 19 nt, Homo sapiens
  misc_RNA (1)...(19): siRNA sense strand
gauuugccuucuagaacag

SEQ ID NO: 775776 - RNA, 19 nt, Homo sapiens
  misc_RNA (1)...(19): siRNA sense strand
caaagacaaaguguguaau

SEQ ID NO: 775777 - RNA, 19 nt, Homo sapiens
  misc_RNA (1)...(19): siRNA sense strand
augaugccuucuauacauu

SEQ ID NO: 775778 - RNA, 19 nt, Homo sapiens
  misc_RNA (1)...(19): siRNA sense strand
acgaauaugauccaacaau

SEQ ID NO: 775779 - RNA, 19 nt, Homo sapiens
  misc_RNA (1)...(19): siRNA sense strand
cgaauaugauccaacaaua

SEQ ID NO: 775780 - RNA, 19 nt, Homo sapiens
  misc_RNA (1)...(19): siRNA sense strand
ggacgaauaugauccaaca

SEQ ID NO: 775781 - RNA, 19 nt, Homo sapiens
  misc_RNA (1)...(19): siRNA sense strand
uaaggacucugaagaugua

SEQ ID NO: 775782 - RNA, 19 nt, Homo sapiens
  misc_RNA (1)...(19): siRNA sense strand
ggaagcaaguaguaauuga

SEQ ID NO: 775783 - RNA, 19 nt, Homo sapiens
  misc_RNA (1)...(19): siRNA sense strand
gcaagaaguuauggaauuc

SEQ ID NO: 775784 - RNA, 19 nt, Homo sapiens
  misc_RNA (1)...(19): siRNA sense strand
gcucaggacuuagcaagaa

SEQ ID NO: 775785 - RNA, 19 nt, Homo sapiens
  misc_RNA (1)...(19): siRNA sense strand
cgauacagcuaauucagaa

SEQ ID NO: 775786 - RNA, 19 nt, Homo sapiens
  misc_RNA (1)...(19): siRNA sense strand
aaaccugucucuuggauau

SEQ ID NO: 775787 - RNA, 19 nt, Homo sapiens
  misc_RNA (1)...(19): siRNA sense strand
gaaguuauggaauuccuuu

SEQ ID NO: 775788 - RNA, 19 nt, Homo sapiens
  misc_RNA (1)...(19): siRNA sense strand
ggagggcuuucuuugugua

SEQ ID NO: 775789 - RNA, 19 nt, Homo sapiens
  misc_RNA (1)...(19): siRNA sense strand
gggcuuucuuuguguauuu

SEQ ID NO: 775790 - RNA, 19 nt, Homo sapiens
  misc_RNA (1)...(19): siRNA sense strand
gaauaugauccaacaauag

SEQ ID NO: 775791 - RNA, 19 nt, Homo sapiens
  misc_RNA (1)...(19): siRNA sense strand
guuaaggacucugaagaug

SEQ ID NO: 775792 - RNA, 19 nt, Homo sapiens
  misc_RNA (1)...(19): siRNA sense strand
caagaggaguacagugcaa

SEQ ID NO: 775793 - RNA, 19 nt, Homo sapiens
  misc_RNA (1)...(19): siRNA sense strand
agcaagaaguuauggaauu

SEQ ID NO: 775794 - RNA, 19 nt, Homo sapiens
  misc_RNA (1)...(19): siRNA sense strand
cuagaacaguagacacaaa

SEQ ID NO: 775795 - RNA, 19 nt, Homo sapiens
  misc_RNA (1)...(19): siRNA sense strand
aaaacaggcucaggacuua

SEQ ID NO: 775796 - RNA, 19 nt, Homo sapiens
  misc_RNA (1)...(19): siRNA sense strand
gcaaguaguaauugaugga

SEQ ID NO: 775797 - RNA, 19 nt, Homo sapiens
  misc_RNA (1)...(19): siRNA sense strand
gaaaccugucucuuggaua

SEQ ID NO: 775798 - RNA, 19 nt, Homo sapiens
  misc_RNA (1)...(19): siRNA sense strand
gauauucaccauuauagag

SEQ ID NO: 775799 - RNA, 19 nt, Homo sapiens
  misc_RNA (1)...(19): siRNA sense strand
gaagcaaguaguaauugau

SEQ ID NO: 775800 - RNA, 19 nt, Homo sapiens
  misc_RNA (1)...(19): siRNA sense strand
cgacacagcaggucaagag

SEQ ID NO: 775801 - RNA, 19 nt, Homo sapiens
  misc_RNA (1)...(19): siRNA sense strand
ugauuugccuucuagaaca

SEQ ID NO: 775802 - RNA, 19 nt, Homo sapiens
  misc_RNA (1)...(19): siRNA sense strand
gggagggcuuucuuugugu

SEQ ID NO: 775803 - RNA, 19 nt, Homo sapiens
  misc_RNA (1)...(19): siRNA sense strand
ugaaacaucagcaaagaca

SEQ ID NO: 775804 - RNA, 19 nt, Homo sapiens
  misc_RNA (1)...(19): siRNA sense strand
caggaagcaaguaguaauu

SEQ ID NO: 775805 - RNA, 19 nt, Homo sapiens
  misc_RNA (1)...(19): siRNA sense strand
aguaguaauugauggagaa

SEQ ID NO: 775806 - RNA, 19 nt, Homo sapiens
  misc_RNA (1)...(19): siRNA sense strand
cagcaggucaagaggagua

SEQ ID NO: 775807 - RNA, 19 nt, Homo sapiens
  misc_RNA (1)...(19): siRNA sense strand
gcaaugagggaccaguaca

SEQ ID NO: 775808 - RNA, 19 nt, Homo sapiens
  misc_RNA (1)...(19): siRNA sense strand
gacugaauauaaacuugug

SEQ ID NO: 775809 - RNA, 19 nt, Homo sapiens
  misc_RNA (1)...(19): siRNA sense strand
agaaaccugucucuuggau

SEQ ID NO: 775810 - RNA, 19 nt, Homo sapiens
  misc_RNA (1)...(19): siRNA sense strand
aagagugccuugacgauac

SEQ ID NO: 775811 - RNA, 19 nt, Homo sapiens
  misc_RNA (1)...(19): siRNA sense strand
gaggaguacagugcaauga

SEQ ID NO: 775812 - RNA, 19 nt, Homo sapiens
  misc_RNA (1)...(19): siRNA sense strand
ggggagggcuuucuuugug

SEQ ID NO: 775813 - RNA, 19 nt, Homo sapiens
  misc_RNA (1)...(19): siRNA sense strand
gaaacaucagcaaagacaa

SEQ ID NO: 775814 - RNA, 19 nt, Homo sapiens
  misc_RNA (1)...(19): siRNA sense strand
guaccuaugguccuaguag

SEQ ID NO: 775815 - RNA, 19 nt, Homo sapiens
  misc_RNA (1)...(19): siRNA sense strand
agauguaccuaugguccua

SEQ ID NO: 775816 - RNA, 19 nt, Homo sapiens
  misc_RNA (1)...(19): siRNA sense strand
aaugugauuugccuucuag

SEQ ID NO: 775817 - RNA, 19 nt, Homo sapiens
  misc_RNA (1)...(19): siRNA sense strand
gugcaaugagggaccagua

SEQ ID NO: 775818 - RNA, 19 nt, Homo sapiens
  misc_RNA (1)...(19): siRNA sense strand
ucaccauuauagagaacaa

SEQ ID NO: 775819 - RNA, 19 nt, Homo sapiens
  misc_RNA (1)...(19): siRNA sense strand
aaacaucagcaaagacaag

SEQ ID NO: 775820 - RNA, 19 nt, Homo sapiens
  misc_RNA (1)...(19): siRNA sense strand
auugaaacaucagcaaaga

SEQ ID NO: 775821 - RNA, 19 nt, Homo sapiens
  misc_RNA (1)...(19): siRNA sense strand
caaaacaggcucaggacuu

SEQ ID NO: 775822 - RNA, 19 nt, Homo sapiens
  misc_RNA (1)...(19): siRNA sense strand
ugacgauacagcuaauuca

SEQ ID NO: 775823 - RNA, 19 nt, Homo sapiens
  misc_RNA (1)...(19): siRNA sense strand
uuaaggacucugaagaugu

SEQ ID NO: 775824 - RNA, 19 nt, Homo sapiens
  misc_RNA (1)...(19): siRNA sense strand
aagcaaguaguaauugaug

SEQ ID NO: 775825 - RNA, 19 nt, Homo sapiens
  misc_RNA (1)...(19): siRNA sense strand
acaggaagcaaguaguaau

SEQ ID NO: 775826 - RNA, 19 nt, Homo sapiens
  misc_RNA (1)...(19): siRNA sense strand
cugaagauguaccuauggu

SEQ ID NO: 775827 - RNA, 19 nt, Homo sapiens
  misc_RNA (1)...(19): siRNA sense strand
caucagcaaagacaagaca

SEQ ID NO: 775828 - RNA, 19 nt, Homo sapiens
  misc_RNA (1)...(19): siRNA sense strand
uuagcaagaaguuauggaa

SEQ ID NO: 775829 - RNA, 19 nt, Homo sapiens
  misc_RNA (1)...(19): siRNA sense strand
gaacaguagacacaaaaca

SEQ ID NO: 775830 - RNA, 19 nt, Homo sapiens
  misc_RNA (1)...(19): siRNA sense strand
gauuugccuucuagaacag

SEQ ID NO: 775831 - RNA, 19 nt, Homo sapiens
  misc_RNA (1)...(19): siRNA sense strand
acgaauaugauccaacaau

SEQ ID NO: 775832 - RNA, 19 nt, Homo sapiens
  misc_RNA (1)...(19): siRNA sense strand
gagaagaccuugacccuaa

SEQ ID NO: 775833 - RNA, 19 nt, Homo sapiens
  misc_RNA (1)...(19): siRNA sense strand
gguuauaacuccuauuuca

SEQ ID NO: 775834 - RNA, 19 nt, Homo sapiens
  misc_RNA (1)...(19): siRNA sense strand
ccaagccucuccugacaua

SEQ ID NO: 775835 - RNA, 19 nt, Homo sapiens
  misc_RNA (1)...(19): siRNA sense strand
guagggcccuucaucgaua

SEQ ID NO: 775836 - RNA, 19 nt, Homo sapiens
  misc_RNA (1)...(19): siRNA sense strand
gcaaguggauggacagcuu

SEQ ID NO: 775837 - RNA, 19 nt, Homo sapiens
  misc_RNA (1)...(19): siRNA sense strand
guggugagcuggaacauca

SEQ ID NO: 775838 - RNA, 19 nt, Homo sapiens
  misc_RNA (1)...(19): siRNA sense strand
caagauccuucgcuuccua

SEQ ID NO: 775839 - RNA, 19 nt, Homo sapiens
  misc_RNA (1)...(19): siRNA sense strand
gauguugguugcuauggaa

SEQ ID NO: 775840 - RNA, 19 nt, Homo sapiens
  misc_RNA (1)...(19): siRNA sense strand
gaacuccgggcucuggaua

SEQ ID NO: 775841 - RNA, 19 nt, Homo sapiens
  misc_RNA (1)...(19): siRNA sense strand
aagaugcgcuucuaucguu

SEQ ID NO: 775842 - RNA, 19 nt, Homo sapiens
  misc_RNA (1)...(19): siRNA sense strand
gaccagggaugcacugaca

SEQ ID NO: 775843 - RNA, 19 nt, Homo sapiens
  misc_RNA (1)...(19): siRNA sense strand
gcucccggcuugacuaugu

SEQ ID NO: 775844 - RNA, 19 nt, Homo sapiens
  misc_RNA (1)...(19): siRNA sense strand
cccaguggcugcugaagaa

SEQ ID NO: 775845 - RNA, 19 nt, Homo sapiens
  misc_RNA (1)...(19): siRNA sense strand
ccaaagaugagaaggaguu

SEQ ID NO: 775846 - RNA, 19 nt, Homo sapiens
  misc_RNA (1)...(19): siRNA sense strand
guacagacaugccaaaaca

SEQ ID NO: 775847 - RNA, 19 nt, Homo sapiens
  misc_RNA (1)...(19): siRNA sense strand
uggaugaguuuacccaaga

SEQ ID NO: 775848 - RNA, 19 nt, Homo sapiens
  misc_RNA (1)...(19): siRNA sense strand
auggacagcuugcucagua

SEQ ID NO: 775849 - RNA, 19 nt, Homo sapiens
  misc_RNA (1)...(19): siRNA sense strand
ggauguugguugcuaugga

SEQ ID NO: 775850 - RNA, 19 nt, Homo sapiens
  misc_RNA (1)...(19): siRNA sense strand
gaagccaggacccaacuug

SEQ ID NO: 775851 - RNA, 19 nt, Homo sapiens
  misc_RNA (1)...(19): siRNA sense strand
gcacccagcucaagauccu

SEQ ID NO: 775852 - RNA, 19 nt, Homo sapiens
  misc_RNA (1)...(19): siRNA sense strand
uaucgucugucuccaggaa

SEQ ID NO: 775853 - RNA, 19 nt, Homo sapiens
  misc_RNA (1)...(19): siRNA sense strand
caaagaugagaaggaguua

SEQ ID NO: 775854 - RNA, 19 nt, Homo sapiens
  misc_RNA (1)...(19): siRNA sense strand
gcagccaugugaucauucu

SEQ ID NO: 775855 - RNA, 19 nt, Homo sapiens
  misc_RNA (1)...(19): siRNA sense strand
cugagcggcuagucuuuaa

SEQ ID NO: 775856 - RNA, 19 nt, Homo sapiens
  misc_RNA (1)...(19): siRNA sense strand
cgaagacuccagaagagaa

SEQ ID NO: 775857 - RNA, 19 nt, Homo sapiens
  misc_RNA (1)...(19): siRNA sense strand
caaccuggaaugcuuugaa

SEQ ID NO: 775858 - RNA, 19 nt, Homo sapiens
  misc_RNA (1)...(19): siRNA sense strand
gaaggcaguggccaaagug

SEQ ID NO: 775859 - RNA, 19 nt, Homo sapiens
  misc_RNA (1)...(19): siRNA sense strand
uggcuaucguugaggguua

SEQ ID NO: 775860 - RNA, 19 nt, Homo sapiens
  misc_RNA (1)...(19): siRNA sense strand
gcaggcacccagcucaaga

SEQ ID NO: 775861 - RNA, 19 nt, Homo sapiens
  misc_RNA (1)...(19): siRNA sense strand
ggaugcggauaucgucugu

SEQ ID NO: 775862 - RNA, 19 nt, Homo sapiens
  misc_RNA (1)...(19): siRNA sense strand
agaaggcaguggccaaagu

SEQ ID NO: 775863 - RNA, 19 nt, Homo sapiens
  misc_RNA (1)...(19): siRNA sense strand
gcuauggaaacauggauga

SEQ ID NO: 775864 - RNA, 19 nt, Homo sapiens
  misc_RNA (1)...(19): siRNA sense strand
gcacaugggaagguaagga

SEQ ID NO: 775865 - RNA, 19 nt, Homo sapiens
  misc_RNA (1)...(19): siRNA sense strand
ccagucagguuggcucuag

SEQ ID NO: 775866 - RNA, 19 nt, Homo sapiens
  misc_RNA (1)...(19): siRNA sense strand
ccagucugccucucaugua

SEQ ID NO: 775867 - RNA, 19 nt, Homo sapiens
  misc_RNA (1)...(19): siRNA sense strand
gcaggcagccaugugauca

SEQ ID NO: 775868 - RNA, 19 nt, Homo sapiens
  misc_RNA (1)...(19): siRNA sense strand
ggaguuacggaccucauuc

SEQ ID NO: 775869 - RNA, 19 nt, Homo sapiens
  misc_RNA (1)...(19): siRNA sense strand
agucgacgcugcagcacaa

SEQ ID NO: 775870 - RNA, 19 nt, Homo sapiens
  misc_RNA (1)...(19): siRNA sense strand
cagucaaccuggaaugcuu

SEQ ID NO: 775871 - RNA, 19 nt, Homo sapiens
  misc_RNA (1)...(19): siRNA sense strand
auggaaacauggaugaguu

SEQ ID NO: 775872 - RNA, 19 nt, Homo sapiens
  misc_RNA (1)...(19): siRNA sense strand
gaagacuccagaagagaag

SEQ ID NO: 775873 - RNA, 19 nt, Homo sapiens
  misc_RNA (1)...(19): siRNA sense strand
cugccuagccuaccacuga

SEQ ID NO: 775874 - RNA, 19 nt, Homo sapiens
  misc_RNA (1)...(19): siRNA sense strand
aaucaaacccggguacaga

SEQ ID NO: 775875 - RNA, 19 nt, Homo sapiens
  misc_RNA (1)...(19): siRNA sense strand
caaaucaggaacccagcaa

SEQ ID NO: 775876 - RNA, 19 nt, Homo sapiens
  misc_RNA (1)...(19): siRNA sense strand
ccugagcggcuagucuuua

SEQ ID NO: 775877 - RNA, 19 nt, Homo sapiens
  misc_RNA (1)...(19): siRNA sense strand
ggaccucauucuggaaguc

SEQ ID NO: 775878 - RNA, 19 nt, Homo sapiens
  misc_RNA (1)...(19): siRNA sense strand
cuuccuaguuccucucgaa

SEQ ID NO: 775879 - RNA, 19 nt, Homo sapiens
  misc_RNA (1)...(19): siRNA sense strand
aggguuauaacuccuauuu

SEQ ID NO: 775880 - RNA, 19 nt, Homo sapiens
  misc_RNA (1)...(19): siRNA sense strand
aaacccggguacagacaug

SEQ ID NO: 775881 - RNA, 19 nt, Homo sapiens
  misc_RNA (1)...(19): siRNA sense strand
ggucauagacaccuuucag

SEQ ID NO: 775882 - RNA, 19 nt, Homo sapiens
  misc_RNA (1)...(19): siRNA sense strand
ucaggaacccagcaacugu

SEQ ID NO: 775883 - RNA, 19 nt, Homo sapiens
  misc_RNA (1)...(19): siRNA sense strand
guguagccaccuucuguaa

SEQ ID NO: 775884 - RNA, 19 nt, Homo sapiens
  misc_RNA (1)...(19): siRNA sense strand
uccgggcucuggauaguga

SEQ ID NO: 775885 - RNA, 19 nt, Homo sapiens
  misc_RNA (1)...(19): siRNA sense strand
gauccuucgcuuccuaguu

SEQ ID NO: 775886 - RNA, 19 nt, Homo sapiens
  misc_RNA (1)...(19): siRNA sense strand
uggacagcuugcucaguaa

SEQ ID NO: 775887 - RNA, 19 nt, Homo sapiens
  misc_RNA (1)...(19): siRNA sense strand
agaagaccuugacccuaau

SEQ ID NO: 775888 - RNA, 19 nt, Homo sapiens
  misc_RNA (1)...(19): siRNA sense strand
ugaguuuacccaagaggaa

SEQ ID NO: 775889 - RNA, 19 nt, Homo sapiens
  misc_RNA (1)...(19): siRNA sense strand
aggcagccaugugaucauu

SEQ ID NO: 775890 - RNA, 19 nt, Homo sapiens
  misc_RNA (1)...(19): siRNA sense strand
ggaugaguuuacccaagag

SEQ ID NO: 775891 - RNA, 19 nt, Homo sapiens
  misc_RNA (1)...(19): siRNA sense strand
ccagggaugcacugacaga

SEQ ID NO: 775892 - RNA, 19 nt, Homo sapiens
  misc_RNA (1)...(19): siRNA sense strand
auccuucgcuuccuaguuc

SEQ ID NO: 775893 - RNA, 19 nt, Homo sapiens
  misc_RNA (1)...(19): siRNA sense strand
ugacccuaaucaacgugua

SEQ ID NO: 775894 - RNA, 19 nt, Homo sapiens
  misc_RNA (1)...(19): siRNA sense strand
ggccugagcggcuagucuu

SEQ ID NO: 775895 - RNA, 19 nt, Homo sapiens
  misc_RNA (1)...(19): siRNA sense strand
cccgaagacuccagaagag

SEQ ID NO: 775896 - RNA, 19 nt, Homo sapiens
  misc_RNA (1)...(19): siRNA sense strand
aaaccugaagagcuacuuu

SEQ ID NO: 775897 - RNA, 19 nt, Homo sapiens
  misc_RNA (1)...(19): siRNA sense strand
cagucugccucucauguag

SEQ ID NO: 775898 - RNA, 19 nt, Homo sapiens
  misc_RNA (1)...(19): siRNA sense strand
caugggaagguaaggagaa

SEQ ID NO: 775899 - RNA, 19 nt, Homo sapiens
  misc_RNA (1)...(19): siRNA sense strand
ugugugaugcguacuguga

SEQ ID NO: 775900 - RNA, 19 nt, Homo sapiens
  misc_RNA (1)...(19): siRNA sense strand
ggcccuucaucgauagcua

SEQ ID NO: 775901 - RNA, 19 nt, Homo sapiens
  misc_RNA (1)...(19): siRNA sense strand
ggaugcagucaaccuggaa

SEQ ID NO: 775902 - RNA, 19 nt, Homo sapiens
  misc_RNA (1)...(19): siRNA sense strand
gaagaccuugacccuaauc

SEQ ID NO: 775903 - RNA, 19 nt, Homo sapiens
  misc_RNA (1)...(19): siRNA sense strand
ugaggguuauaacuccuau

SEQ ID NO: 775904 - RNA, 19 nt, Homo sapiens
  misc_RNA (1)...(19): siRNA sense strand
gcccuccucacacagcaua

SEQ ID NO: 775905 - RNA, 19 nt, Homo sapiens
  misc_RNA (1)...(19): siRNA sense strand
acagcuugcucaguaacuu

SEQ ID NO: 775906 - RNA, 19 nt, Homo sapiens
  misc_RNA (1)...(19): siRNA sense strand
agcauaagauccgcacaug

SEQ ID NO: 775907 - RNA, 19 nt, Homo sapiens
  misc_RNA (1)...(19): siRNA sense strand
cagaagccaaagaugagaa

SEQ ID NO: 775908 - RNA, 19 nt, Homo sapiens
  misc_RNA (1)...(19): siRNA sense strand
cgacgcugcagcacaacaa

SEQ ID NO: 775909 - RNA, 19 nt, Homo sapiens
  misc_RNA (1)...(19): siRNA sense strand
gcaaagggaucguaugaua

SEQ ID NO: 775910 - RNA, 19 nt, Homo sapiens
  misc_RNA (1)...(19): siRNA sense strand
ggaacugaaugaaaugauu

SEQ ID NO: 775911 - RNA, 19 nt, Homo sapiens
  misc_RNA (1)...(19): siRNA sense strand
ccacaaagcaugcaauuau

SEQ ID NO: 775912 - RNA, 19 nt, Homo sapiens
  misc_RNA (1)...(19): siRNA sense strand
caacaaauuugcaacagau

SEQ ID NO: 775913 - RNA, 19 nt, Homo sapiens
  misc_RNA (1)...(19): siRNA sense strand
aaaggaaacuacuguaaga

SEQ ID NO: 775914 - RNA, 19 nt, Homo sapiens
  misc_RNA (1)...(19): siRNA sense strand
ggaaggaggaacugaauga

SEQ ID NO: 775915 - RNA, 19 nt, Homo sapiens
  misc_RNA (1)...(19): siRNA sense strand
aaagggaucguaugauaua

SEQ ID NO: 775916 - RNA, 19 nt, Homo sapiens
  misc_RNA (1)...(19): siRNA sense strand
ggaacucuacaacaaauuu

SEQ ID NO: 775917 - RNA, 19 nt, Homo sapiens
  misc_RNA (1)...(19): siRNA sense strand
gaaacaugcuggucuuggu

SEQ ID NO: 775918 - RNA, 19 nt, Homo sapiens
  misc_RNA (1)...(19): siRNA sense strand
gagcaugaaggaugaguuu

SEQ ID NO: 775919 - RNA, 19 nt, Homo sapiens
  misc_RNA (1)...(19): siRNA sense strand
ggaguagaccggaaaauua

SEQ ID NO: 775920 - RNA, 19 nt, Homo sapiens
  misc_RNA (1)...(19): siRNA sense strand
caucauggcugaacuuagg

SEQ ID NO: 775921 - RNA, 19 nt, Homo sapiens
  misc_RNA (1)...(19): siRNA sense strand
gauauacgauggaguagac

SEQ ID NO: 775922 - RNA, 19 nt, Homo sapiens
  misc_RNA (1)...(19): siRNA sense strand
ccucaagaauucccagaaa

SEQ ID NO: 775923 - RNA, 19 nt, Homo sapiens
  misc_RNA (1)...(19): siRNA sense strand
ccaaaggaaacuacuguaa

SEQ ID NO: 775924 - RNA, 19 nt, Homo sapiens
  misc_RNA (1)...(19): siRNA sense strand
caagaaugaagaucuguuu

SEQ ID NO: 775925 - RNA, 19 nt, Homo sapiens
  misc_RNA (1)...(19): siRNA sense strand
acaaaggcgucgucaccua

SEQ ID NO: 775926 - RNA, 19 nt, Homo sapiens
  misc_RNA (1)...(19): siRNA sense strand
uggcugaacuuaggcuaua

SEQ ID NO: 775927 - RNA, 19 nt, Homo sapiens
  misc_RNA (1)...(19): siRNA sense strand
uaugauauacgauggagua

SEQ ID NO: 775928 - RNA, 19 nt, Homo sapiens
  misc_RNA (1)...(19): siRNA sense strand
ccaucuccauccucuauuu

SEQ ID NO: 775929 - RNA, 19 nt, Homo sapiens
  misc_RNA (1)...(19): siRNA sense strand
aaggaugaguuucuuaaga

SEQ ID NO: 775930 - RNA, 19 nt, Homo sapiens
  misc_RNA (1)...(19): siRNA sense strand
aggaggaacugaaugaaau

SEQ ID NO: 775931 - RNA, 19 nt, Homo sapiens
  misc_RNA (1)...(19): siRNA sense strand
ccuggcagcuuacuugguu

SEQ ID NO: 775932 - RNA, 19 nt, Homo sapiens
  misc_RNA (1)...(19): siRNA sense strand
ugaaggaugaguuucuuaa

SEQ ID NO: 775933 - RNA, 19 nt, Homo sapiens
  misc_RNA (1)...(19): siRNA sense strand
caacagaucggaccuccau

SEQ ID NO: 775934 - RNA, 19 nt, Homo sapiens
  misc_RNA (1)...(19): siRNA sense strand
gugcaaagggaucguauga

SEQ ID NO: 775935 - RNA, 19 nt, Homo sapiens
  misc_RNA (1)...(19): siRNA sense strand
gaacucuacaacaaauuug

SEQ ID NO: 775936 - RNA, 19 nt, Homo sapiens
  misc_RNA (1)...(19): siRNA sense strand
gucgucaccuacaaguuua

SEQ ID NO: 775937 - RNA, 19 nt, Homo sapiens
  misc_RNA (1)...(19): siRNA sense strand
ugaaugccgugguguuugu

SEQ ID NO: 775938 - RNA, 19 nt, Homo sapiens
  misc_RNA (1)...(19): siRNA sense strand
gauacgaagccuaugaaug

SEQ ID NO: 775939 - RNA, 19 nt, Homo sapiens
  misc_RNA (1)...(19): siRNA sense strand
caaagggaucguaugauau

SEQ ID NO: 775940 - RNA, 19 nt, Homo sapiens
  misc_RNA (1)...(19): siRNA sense strand
acaacaaauuugcaacaga

SEQ ID NO: 775941 - RNA, 19 nt, Homo sapiens
  misc_RNA (1)...(19): siRNA sense strand
caaaggaaacuacuguaag

SEQ ID NO: 775942 - RNA, 19 nt, Homo sapiens
  misc_RNA (1)...(19): siRNA sense strand
uuaggaguuucaagaauga

SEQ ID NO: 775943 - RNA, 19 nt, Homo sapiens
  misc_RNA (1)...(19): siRNA sense strand
uuaaugggcuccgaaaaua

SEQ ID NO: 775944 - RNA, 19 nt, Homo sapiens
  misc_RNA (1)...(19): siRNA sense strand
cgucgucaccuacaaguuu

SEQ ID NO: 775945 - RNA, 19 nt, Homo sapiens
  misc_RNA (1)...(19): siRNA sense strand
gagcaucucacacccacaa

SEQ ID NO: 775946 - RNA, 19 nt, Homo sapiens
  misc_RNA (1)...(19): siRNA sense strand
gggaagaggcuuuguugca

SEQ ID NO: 775947 - RNA, 19 nt, Homo sapiens
  misc_RNA (1)...(19): siRNA sense strand
ggaugaguuucuuaagaca

SEQ ID NO: 775948 - RNA, 19 nt, Homo sapiens
  misc_RNA (1)...(19): siRNA sense strand
cacaaagcaugcaauuauc

SEQ ID NO: 775949 - RNA, 19 nt, Homo sapiens
  misc_RNA (1)...(19): siRNA sense strand
gcagucuccucuggaagaa

SEQ ID NO: 775950 - RNA, 19 nt, Homo sapiens
  misc_RNA (1)...(19): siRNA sense strand
guggacggcuagaaauaga

SEQ ID NO: 775951 - RNA, 19 nt, Homo sapiens
  misc_RNA (1)...(19): siRNA sense strand
cauuaggaguuucaagaau

SEQ ID NO: 775952 - RNA, 19 nt, Homo sapiens
  misc_RNA (1)...(19): siRNA sense strand
ccuacaaguuuaaauacga

SEQ ID NO: 775953 - RNA, 19 nt, Homo sapiens
  misc_RNA (1)...(19): siRNA sense strand
gaaggaggaacugaaugaa

SEQ ID NO: 775954 - RNA, 19 nt, Homo sapiens
  misc_RNA (1)...(19): siRNA sense strand
gauaaugagggagaaagaa

SEQ ID NO: 775955 - RNA, 19 nt, Homo sapiens
  misc_RNA (1)...(19): siRNA sense strand
ggauaaugagggagaaaga

SEQ ID NO: 775956 - RNA, 19 nt, Homo sapiens
  misc_RNA (1)...(19): siRNA sense strand
acacuaaaccucucugaca

SEQ ID NO: 775957 - RNA, 19 nt, Homo sapiens
  misc_RNA (1)...(19): siRNA sense strand
gcaguggacggcuagaaau

SEQ ID NO: 775958 - RNA, 19 nt, Homo sapiens
  misc_RNA (1)...(19): siRNA sense strand
cagaguacauguuggaacu

SEQ ID NO: 775959 - RNA, 19 nt, Homo sapiens
  misc_RNA (1)...(19): siRNA sense strand
caugaaggaugaguuucuu

SEQ ID NO: 775960 - RNA, 19 nt, Homo sapiens
  misc_RNA (1)...(19): siRNA sense strand
gaggcuuuguugcagauga

SEQ ID NO: 775961 - RNA, 19 nt, Homo sapiens
  misc_RNA (1)...(19): siRNA sense strand
gaggaaggaggaacugaau

SEQ ID NO: 775962 - RNA, 19 nt, Homo sapiens
  misc_RNA (1)...(19): siRNA sense strand
guccauuccucaccaugaa

SEQ ID NO: 775963 - RNA, 19 nt, Homo sapiens
  misc_RNA (1)...(19): siRNA sense strand
ccaacaucauuaggaguuu

SEQ ID NO: 775964 - RNA, 19 nt, Homo sapiens
  misc_RNA (1)...(19): siRNA sense strand
caacaucauuaggaguuuc

SEQ ID NO: 775965 - RNA, 19 nt, Homo sapiens
  misc_RNA (1)...(19): siRNA sense strand
gccaacaucauuaggaguu

SEQ ID NO: 775966 - RNA, 19 nt, Homo sapiens
  misc_RNA (1)...(19): siRNA sense strand
caucuccauccucuauuua

SEQ ID NO: 775967 - RNA, 19 nt, Homo sapiens
  misc_RNA (1)...(19): siRNA sense strand
ugacuccacugcccgaauc

SEQ ID NO: 775968 - RNA, 19 nt, Homo sapiens
  misc_RNA (1)...(19): siRNA sense strand
ggaggaacugaaugaaaug

SEQ ID NO: 775969 - RNA, 19 nt, Homo sapiens
  misc_RNA (1)...(19): siRNA sense strand
auacgaagccuaugaaugc

SEQ ID NO: 775970 - RNA, 19 nt, Homo sapiens
  misc_RNA (1)...(19): siRNA sense strand
gggugggacuccuggauca

SEQ ID NO: 775971 - RNA, 19 nt, Homo sapiens
  misc_RNA (1)...(19): siRNA sense strand
gaaggaugaguuucuuaag

SEQ ID NO: 775972 - RNA, 19 nt, Homo sapiens
  misc_RNA (1)...(19): siRNA sense strand
uauauggaaccaacaguga

SEQ ID NO: 775973 - RNA, 19 nt, Homo sapiens
  misc_RNA (1)...(19): siRNA sense strand
gcaugaaggaugaguuucu

SEQ ID NO: 775974 - RNA, 19 nt, Homo sapiens
  misc_RNA (1)...(19): siRNA sense strand
caguggacggcuagaaaua

SEQ ID NO: 775975 - RNA, 19 nt, Homo sapiens
  misc_RNA (1)...(19): siRNA sense strand
cacuaaaccucucugacau

SEQ ID NO: 775976 - RNA, 19 nt, Homo sapiens
  misc_RNA (1)...(19): siRNA sense strand
gcccaucuccauccucuau

SEQ ID NO: 775977 - RNA, 19 nt, Homo sapiens
  misc_RNA (1)...(19): siRNA sense strand
uauacacacuggugcaaag

SEQ ID NO: 775978 - RNA, 19 nt, Homo sapiens
  misc_RNA (1)...(19): siRNA sense strand
auuaggaguuucaagaaug

SEQ ID NO: 775979 - RNA, 19 nt, Homo sapiens
  misc_RNA (1)...(19): siRNA sense strand
gccgugguguuuguaacua

SEQ ID NO: 775980 - RNA, 19 nt, Homo sapiens
  misc_RNA (1)...(19): siRNA sense strand
auaaugagggagaaagaaa

SEQ ID NO: 775981 - RNA, 19 nt, Homo sapiens
  misc_RNA (1)...(19): siRNA sense strand
uaugaaugccgugguguuu

SEQ ID NO: 775982 - RNA, 19 nt, Homo sapiens
  misc_RNA (1)...(19): siRNA sense strand
gugcccagaauaagcauaa

SEQ ID NO: 775983 - RNA, 19 nt, Homo sapiens
  misc_RNA (1)...(19): siRNA sense strand
ucauuaggaguuucaagaa

SEQ ID NO: 775984 - RNA, 19 nt, Homo sapiens
  misc_RNA (1)...(19): siRNA sense strand
uccagagcaugaaggauga

SEQ ID NO: 775985 - RNA, 19 nt, Homo sapiens
  misc_RNA (1)...(19): siRNA sense strand
gaggaacugaaugaaauga

SEQ ID NO: 775986 - RNA, 19 nt, Homo sapiens
  misc_RNA (1)...(19): siRNA sense strand
agucuccucuggaagaaga

SEQ ID NO: 775987 - RNA, 19 nt, Homo sapiens
  misc_RNA (1)...(19): siRNA sense strand
ggacaacuugggccuggau

SEQ ID NO: 775988 - RNA, 19 nt, Homo sapiens
  misc_RNA (1)...(19): siRNA sense strand
aaggaggaacugaaugaaa

SEQ ID NO: 775989 - RNA, 19 nt, Homo sapiens
  misc_RNA (1)...(19): siRNA sense strand
uuggaacucuacaacaaau

SEQ ID NO: 775990 - RNA, 19 nt, Homo sapiens
  misc_RNA (1)...(19): siRNA sense strand
cuacaacaaauuugcaaca

SEQ ID NO: 775991 - RNA, 19 nt, Homo sapiens
  misc_RNA (1)...(19): siRNA sense strand
guacauguuggaacucuac

SEQ ID NO: 775992 - RNA, 19 nt, Homo sapiens
  misc_RNA (1)...(19): siRNA sense strand
gagaggaaggaggaacuga

SEQ ID NO: 775993 - RNA, 19 nt, Homo sapiens
  misc_RNA (1)...(19): siRNA sense strand
ugagggagaaagaaacaug

SEQ ID NO: 775994 - RNA, 19 nt, Homo sapiens
  misc_RNA (1)...(19): siRNA sense strand
ggacccaccagaguacaug

SEQ ID NO: 775995 - RNA, 19 nt, Homo sapiens
  misc_RNA (1)...(19): siRNA sense strand
aggaugaguuucuuaagac

SEQ ID NO: 775996 - RNA, 19 nt, Homo sapiens
  misc_RNA (1)...(19): siRNA sense strand
gcagcuuacuugguuucug

SEQ ID NO: 775997 - RNA, 19 nt, Homo sapiens
  misc_RNA (1)...(19): siRNA sense strand
ggucaucauggcugaacuu

SEQ ID NO: 775998 - RNA, 19 nt, Homo sapiens
  misc_RNA (1)...(19): siRNA sense strand
ucaagaaugaagaucuguu

SEQ ID NO: 775999 - RNA, 19 nt, Homo sapiens
  misc_RNA (1)...(19): siRNA sense strand
ggauacgaagccuaugaau

SEQ ID NO: 776000 - RNA, 19 nt, Homo sapiens
  misc_RNA (1)...(19): siRNA sense strand
uuucccagccggucaguuu

SEQ ID NO: 776001 - RNA, 19 nt, Homo sapiens
  misc_RNA (1)...(19): siRNA sense strand
uguugcagaugagaucaaa

SEQ ID NO: 776002 - RNA, 19 nt, Homo sapiens
  misc_RNA (1)...(19): siRNA sense strand
gauuucccaugagcaacuu

SEQ ID NO: 776003 - RNA, 19 nt, Homo sapiens
  misc_RNA (1)...(19): siRNA sense strand
gguccacauugagagcaaa

SEQ ID NO: 776004 - RNA, 19 nt, Homo sapiens
  misc_RNA (1)...(19): siRNA sense strand
caccagaguacauguugga

SEQ ID NO: 776005 - RNA, 19 nt, Homo sapiens
  misc_RNA (1)...(19): siRNA sense strand
ugguccaccucaagaauuc

SEQ ID NO: 776006 - RNA, 19 nt, Homo sapiens
  misc_RNA (1)...(19): siRNA sense strand
gaaugccgugguguuugua

SEQ ID NO: 776007 - RNA, 19 nt, Homo sapiens
  misc_RNA (1)...(19): siRNA sense strand
agaggaaggaggaacugaa

SEQ ID NO: 776008 - RNA, 19 nt, Homo sapiens
  misc_RNA (1)...(19): siRNA sense strand
ccagugcccagaauaagca

SEQ ID NO: 776009 - RNA, 19 nt, Homo sapiens
  misc_RNA (1)...(19): siRNA sense strand
gaugaucucugucugcuua

SEQ ID NO: 776010 - RNA, 19 nt, Homo sapiens
  misc_RNA (1)...(19): siRNA sense strand
ggugauguauccuaaauua

SEQ ID NO: 776011 - RNA, 19 nt, Homo sapiens
  misc_RNA (1)...(19): siRNA sense strand
gaaagaaagcuuggaaaua

SEQ ID NO: 776012 - RNA, 19 nt, Homo sapiens
  misc_RNA (1)...(19): siRNA sense strand
caaguuaacccauuucuaa

SEQ ID NO: 776013 - RNA, 19 nt, Homo sapiens
  misc_RNA (1)...(19): siRNA sense strand
aaagaaagcuuggaaauag

SEQ ID NO: 776014 - RNA, 19 nt, Homo sapiens
  misc_RNA (1)...(19): siRNA sense strand
ugaaagacauccaaaguca

SEQ ID NO: 776015 - RNA, 19 nt, Homo sapiens
  misc_RNA (1)...(19): siRNA sense strand
ccaaguaacgggaagaaua

SEQ ID NO: 776016 - RNA, 19 nt, Homo sapiens
  misc_RNA (1)...(19): siRNA sense strand
ggacaaggaaagaguaauu

SEQ ID NO: 776017 - RNA, 19 nt, Homo sapiens
  misc_RNA (1)...(19): siRNA sense strand
gaagaucacaacuaugaaa

SEQ ID NO: 776018 - RNA, 19 nt, Homo sapiens
  misc_RNA (1)...(19): siRNA sense strand
ccaaggaccugaaagaaag

SEQ ID NO: 776019 - RNA, 19 nt, Homo sapiens
  misc_RNA (1)...(19): siRNA sense strand
ggaaauaguuaaccaagcu

SEQ ID NO: 776020 - RNA, 19 nt, Homo sapiens
  misc_RNA (1)...(19): siRNA sense strand
guaaaugccuuugaugauc

SEQ ID NO: 776021 - RNA, 19 nt, Homo sapiens
  misc_RNA (1)...(19): siRNA sense strand
gauacucucugacuugaau

SEQ ID NO: 776022 - RNA, 19 nt, Homo sapiens
  misc_RNA (1)...(19): siRNA sense strand
ccaaagucaugguaucauu

SEQ ID NO: 776023 - RNA, 19 nt, Homo sapiens
  misc_RNA (1)...(19): siRNA sense strand
cuugauagcuugcauugaa

SEQ ID NO: 776024 - RNA, 19 nt, Homo sapiens
  misc_RNA (1)...(19): siRNA sense strand
gaacggacuuuggaaaucu

SEQ ID NO: 776025 - RNA, 19 nt, Homo sapiens
  misc_RNA (1)...(19): siRNA sense strand
caagaaguguguugugcaa

SEQ ID NO: 776026 - RNA, 19 nt, Homo sapiens
  misc_RNA (1)...(19): siRNA sense strand
ggaagaauuacaggaguua

SEQ ID NO: 776027 - RNA, 19 nt, Homo sapiens
  misc_RNA (1)...(19): siRNA sense strand
cauugaagaucacaacuau

SEQ ID NO: 776028 - RNA, 19 nt, Homo sapiens
  misc_RNA (1)...(19): siRNA sense strand
gcagaauaccugagaguug

SEQ ID NO: 776029 - RNA, 19 nt, Homo sapiens
  misc_RNA (1)...(19): siRNA sense strand
gaaggacaaggaaagagua

SEQ ID NO: 776030 - RNA, 19 nt, Homo sapiens
  misc_RNA (1)...(19): siRNA sense strand
ggaacggacuuuggaaauc

SEQ ID NO: 776031 - RNA, 19 nt, Homo sapiens
  misc_RNA (1)...(19): siRNA sense strand
cagaauaccugagaguugu

SEQ ID NO: 776032 - RNA, 19 nt, Homo sapiens
  misc_RNA (1)...(19): siRNA sense strand
ccaaugaagcccugagaaa

SEQ ID NO: 776033 - RNA, 19 nt, Homo sapiens
  misc_RNA (1)...(19): siRNA sense strand
caaguaacgggaagaauau

SEQ ID NO: 776034 - RNA, 19 nt, Homo sapiens
  misc_RNA (1)...(19): siRNA sense strand
guaauucgcagacuguuau

SEQ ID NO: 776035 - RNA, 19 nt, Homo sapiens
  misc_RNA (1)...(19): siRNA sense strand
gaaagcuuggaaauaguua

SEQ ID NO: 776036 - RNA, 19 nt, Homo sapiens
  misc_RNA (1)...(19): siRNA sense strand
uuacaggaguuauccaaug

SEQ ID NO: 776037 - RNA, 19 nt, Homo sapiens
  misc_RNA (1)...(19): siRNA sense strand
guaugugaaugaccacuau

SEQ ID NO: 776038 - RNA, 19 nt, Homo sapiens
  misc_RNA (1)...(19): siRNA sense strand
gcauugaagaucacaacua

SEQ ID NO: 776039 - RNA, 19 nt, Homo sapiens
  misc_RNA (1)...(19): siRNA sense strand
aaauaugaccugcuucaaa

SEQ ID NO: 776040 - RNA, 19 nt, Homo sapiens
  misc_RNA (1)...(19): siRNA sense strand
uacaggaguuauccaauga

SEQ ID NO: 776041 - RNA, 19 nt, Homo sapiens
  misc_RNA (1)...(19): siRNA sense strand
ugaaugaccacuauccaaa

SEQ ID NO: 776042 - RNA, 19 nt, Homo sapiens
  misc_RNA (1)...(19): siRNA sense strand
gaaauccaguacucuuguc

SEQ ID NO: 776043 - RNA, 19 nt, Homo sapiens
  misc_RNA (1)...(19): siRNA sense strand
caagagaacaaauuucaag

SEQ ID NO: 776044 - RNA, 19 nt, Homo sapiens
  misc_RNA (1)...(19): siRNA sense strand
ggaaauccaguacucuugu

SEQ ID NO: 776045 - RNA, 19 nt, Homo sapiens
  misc_RNA (1)...(19): siRNA sense strand
ugaaagaaagcuuggaaau

SEQ ID NO: 776046 - RNA, 19 nt, Homo sapiens
  misc_RNA (1)...(19): siRNA sense strand
gaucacaacuaugaaacag

SEQ ID NO: 776047 - RNA, 19 nt, Homo sapiens
  misc_RNA (1)...(19): siRNA sense strand
uaaaugccuuugaugaucu

SEQ ID NO: 776048 - RNA, 19 nt, Homo sapiens
  misc_RNA (1)...(19): siRNA sense strand
uagcuugcauugaagauca

SEQ ID NO: 776049 - RNA, 19 nt, Homo sapiens
  misc_RNA (1)...(19): siRNA sense strand
acuugaaucuggugaugua

SEQ ID NO: 776050 - RNA, 19 nt, Homo sapiens
  misc_RNA (1)...(19): siRNA sense strand
gcaagagaacaaauuucaa

SEQ ID NO: 776051 - RNA, 19 nt, Homo sapiens
  misc_RNA (1)...(19): siRNA sense strand
gaagagcaagagaacaaau

SEQ ID NO: 776052 - RNA, 19 nt, Homo sapiens
  misc_RNA (1)...(19): siRNA sense strand
uugaagaucacaacuauga

SEQ ID NO: 776053 - RNA, 19 nt, Homo sapiens
  misc_RNA (1)...(19): siRNA sense strand
ggaaggacaaggaaagagu

SEQ ID NO: 776054 - RNA, 19 nt, Homo sapiens
  misc_RNA (1)...(19): siRNA sense strand
ugugcaagcucacuucuuc

SEQ ID NO: 776055 - RNA, 19 nt, Homo sapiens
  misc_RNA (1)...(19): siRNA sense strand
guaacgggaagaauauuug

SEQ ID NO: 776056 - RNA, 19 nt, Homo sapiens
  misc_RNA (1)...(19): siRNA sense strand
gcugaaagacauccaaagu

SEQ ID NO: 776057 - RNA, 19 nt, Homo sapiens
  misc_RNA (1)...(19): siRNA sense strand
gugcaacuggauaauauaa

SEQ ID NO: 776058 - RNA, 19 nt, Homo sapiens
  misc_RNA (1)...(19): siRNA sense strand
ggacuuuggaaaucuaaau

SEQ ID NO: 776059 - RNA, 19 nt, Homo sapiens
  misc_RNA (1)...(19): siRNA sense strand
gcaggaaggacaaggaaag

SEQ ID NO: 776060 - RNA, 19 nt, Homo sapiens
  misc_RNA (1)...(19): siRNA sense strand
uuucaaauaugaccugcuu

SEQ ID NO: 776061 - RNA, 19 nt, Homo sapiens
  misc_RNA (1)...(19): siRNA sense strand
gagcaggaaggacaaggaa

SEQ ID NO: 776062 - RNA, 19 nt, Homo sapiens
  misc_RNA (1)...(19): siRNA sense strand
aaaaggaaauugcaacaug

SEQ ID NO: 776063 - RNA, 19 nt, Homo sapiens
  misc_RNA (1)...(19): siRNA sense strand
aauaugaccugcuucaaaa

SEQ ID NO: 776064 - RNA, 19 nt, Homo sapiens
  misc_RNA (1)...(19): siRNA sense strand
aaagacauccaaagucaug

SEQ ID NO: 776065 - RNA, 19 nt, Homo sapiens
  misc_RNA (1)...(19): siRNA sense strand
ggaagagcaagagaacaaa

SEQ ID NO: 776066 - RNA, 19 nt, Homo sapiens
  misc_RNA (1)...(19): siRNA sense strand
gucaugguaucauucagaa

SEQ ID NO: 776067 - RNA, 19 nt, Homo sapiens
  misc_RNA (1)...(19): siRNA sense strand
ugacuugaaucuggugaug

SEQ ID NO: 776068 - RNA, 19 nt, Homo sapiens
  misc_RNA (1)...(19): siRNA sense strand
ucaaauaugaccugcuuca

SEQ ID NO: 776069 - RNA, 19 nt, Homo sapiens
  misc_RNA (1)...(19): siRNA sense strand
ggcacaggauacucucuga

SEQ ID NO: 776070 - RNA, 19 nt, Homo sapiens
  misc_RNA (1)...(19): siRNA sense strand
gagcaagagaacaaauuuc

SEQ ID NO: 776071 - RNA, 19 nt, Homo sapiens
  misc_RNA (1)...(19): siRNA sense strand
uggaagaauuacaggaguu

SEQ ID NO: 776072 - RNA, 19 nt, Homo sapiens
  misc_RNA (1)...(19): siRNA sense strand
cauccaaagucaugguauc

SEQ ID NO: 776073 - RNA, 19 nt, Homo sapiens
  misc_RNA (1)...(19): siRNA sense strand
caggauacucucugacuug

SEQ ID NO: 776074 - RNA, 19 nt, Homo sapiens
  misc_RNA (1)...(19): siRNA sense strand
agagcaagagaacaaauuu

SEQ ID NO: 776075 - RNA, 19 nt, Homo sapiens
  misc_RNA (1)...(19): siRNA sense strand
guucuucugugcgccuuaa

SEQ ID NO: 776076 - RNA, 19 nt, Homo sapiens
  misc_RNA (1)...(19): siRNA sense strand
caaagucaugguaucauuc

SEQ ID NO: 776077 - RNA, 19 nt, Homo sapiens
  misc_RNA (1)...(19): siRNA sense strand
uggaagagcaagagaacaa

SEQ ID NO: 776078 - RNA, 19 nt, Homo sapiens
  misc_RNA (1)...(19): siRNA sense strand
ugugucaaccuucauauug

SEQ ID NO: 776079 - RNA, 19 nt, Homo sapiens
  misc_RNA (1)...(19): siRNA sense strand
gggaagaauauuugugcaa

SEQ ID NO: 776080 - RNA, 19 nt, Homo sapiens
  misc_RNA (1)...(19): siRNA sense strand
ccaaguuaacccauuucua

SEQ ID NO: 776081 - RNA, 19 nt, Homo sapiens
  misc_RNA (1)...(19): siRNA sense strand
ccugagaguuguucuucug

SEQ ID NO: 776082 - RNA, 19 nt, Homo sapiens
  misc_RNA (1)...(19): siRNA sense strand
aaaaucagcugaaagacau

SEQ ID NO: 776083 - RNA, 19 nt, Homo sapiens
  misc_RNA (1)...(19): siRNA sense strand
gaaagacauccaaagucau

SEQ ID NO: 776084 - RNA, 19 nt, Homo sapiens
  misc_RNA (1)...(19): siRNA sense strand
uuuccaaguuaacccauuu

SEQ ID NO: 776085 - RNA, 19 nt, Homo sapiens
  misc_RNA (1)...(19): siRNA sense strand
aaggaguacuugauagcuu

SEQ ID NO: 776086 - RNA, 19 nt, Homo sapiens
  misc_RNA (1)...(19): siRNA sense strand
uugugcaacuggauaauau

SEQ ID NO: 776087 - RNA, 19 nt, Homo sapiens
  misc_RNA (1)...(19): siRNA sense strand
uccaaggaccugaaagaaa

SEQ ID NO: 776088 - RNA, 19 nt, Homo sapiens
  misc_RNA (1)...(19): siRNA sense strand
ccauuucuaacccaaguaa

SEQ ID NO: 776089 - RNA, 19 nt, Homo sapiens
  misc_RNA (1)...(19): siRNA sense strand
acaggauacucucugacuu

SEQ ID NO: 776090 - RNA, 19 nt, Homo sapiens
  misc_RNA (1)...(19): siRNA sense strand
agaaagcuuggaaauaguu

SEQ ID NO: 776091 - RNA, 19 nt, Homo sapiens
  misc_RNA (1)...(19): siRNA sense strand
aagaaagcuuggaaauagu

SEQ ID NO: 776092 - RNA, 19 nt, Homo sapiens
  misc_RNA (1)...(19): siRNA sense strand
uauccaaggaccugaaaga

SEQ ID NO: 776093 - RNA, 19 nt, Homo sapiens
  misc_RNA (1)...(19): siRNA sense strand
gacaaggaaagaguaauuc

SEQ ID NO: 776094 - RNA, 19 nt, Homo sapiens
  misc_RNA (1)...(19): siRNA sense strand
gaagaauuacaggaguuau

SEQ ID NO: 776095 - RNA, 19 nt, Homo sapiens
  misc_RNA (1)...(19): siRNA sense strand
guacuugauagcuugcauu

SEQ ID NO: 776096 - RNA, 19 nt, Homo sapiens
  misc_RNA (1)...(19): siRNA sense strand
gugaaugaccacuauccaa

SEQ ID NO: 776097 - RNA, 19 nt, Homo sapiens
  misc_RNA (1)...(19): siRNA sense strand
aaugggcgacuaccgauuu

SEQ ID NO: 776098 - RNA, 19 nt, Homo sapiens
  misc_RNA (1)...(19): siRNA sense strand
gacauccaaagucauggua

SEQ ID NO: 776099 - RNA, 19 nt, Homo sapiens
  misc_RNA (1)...(19): siRNA sense strand
cuggugauguauccuaaau

SEQ ID NO: 776100 - RNA, 19 nt, Homo sapiens
  misc_RNA (1)...(19): siRNA sense strand
caggaguuauccaaugaag

SEQ ID NO: 776101 - RNA, 19 nt, Homo sapiens
  misc_RNA (1)...(19): siRNA sense strand
aagcucaacuggcucuaag

SEQ ID NO: 776102 - RNA, 19 nt, Homo sapiens
  misc_RNA (1)...(19): siRNA sense strand
caagcucaacuggcucuaa

SEQ ID NO: 776103 - RNA, 19 nt, Homo sapiens
  misc_RNA (1)...(19): siRNA sense strand
caaauaugaccugcuucaa

SEQ ID NO: 776104 - RNA, 19 nt, Homo sapiens
  misc_RNA (1)...(19): siRNA sense strand
gcuuggaaauaguuaacca

SEQ ID NO: 776105 - RNA, 19 nt, Homo sapiens
  misc_RNA (1)...(19): siRNA sense strand
aggauacucucugacuuga

SEQ ID NO: 776106 - RNA, 19 nt, Homo sapiens
  misc_RNA (1)...(19): siRNA sense strand
uguaaaugccuuugaugau

SEQ ID NO: 776107 - RNA, 19 nt, Homo sapiens
  misc_RNA (1)...(19): siRNA sense strand
aagagcaagagaacaaauu

SEQ ID NO: 776108 - RNA, 19 nt, Homo sapiens
  misc_RNA (1)...(19): siRNA sense strand
gacccgcacucuuauugac

SEQ ID NO: 776109 - RNA, 19 nt, Homo sapiens
  misc_RNA (1)...(19): siRNA sense strand
gaaagacccuugaaagaga

SEQ ID NO: 776110 - RNA, 19 nt, Homo sapiens
  misc_RNA (1)...(19): siRNA sense strand
ggacaaagcccaaaggaaa

SEQ ID NO: 776111 - RNA, 19 nt, Homo sapiens
  misc_RNA (1)...(19): siRNA sense strand
gcaagaagauccuaaugau

SEQ ID NO: 776112 - RNA, 19 nt, Homo sapiens
  misc_RNA (1)...(19): siRNA sense strand
aaagagaacccaccuaaua

SEQ ID NO: 776113 - RNA, 19 nt, Homo sapiens
  misc_RNA (1)...(19): siRNA sense strand
gaagauugcugaccuugga

SEQ ID NO: 776114 - RNA, 19 nt, Homo sapiens
  misc_RNA (1)...(19): siRNA sense strand
uaaaggagguuaucaucuu

SEQ ID NO: 776115 - RNA, 19 nt, Homo sapiens
  misc_RNA (1)...(19): siRNA sense strand
gcagcuggcuucacagauu

SEQ ID NO: 776116 - RNA, 19 nt, Homo sapiens
  misc_RNA (1)...(19): siRNA sense strand
acacauaucugcaugguau

SEQ ID NO: 776117 - RNA, 19 nt, Homo sapiens
  misc_RNA (1)...(19): siRNA sense strand
gaagaaauuuguggcaaug

SEQ ID NO: 776118 - RNA, 19 nt, Homo sapiens
  misc_RNA (1)...(19): siRNA sense strand
gggcagagauacccuguga

SEQ ID NO: 776119 - RNA, 19 nt, Homo sapiens
  misc_RNA (1)...(19): siRNA sense strand
gaagucaguucgcaauuca

SEQ ID NO: 776120 - RNA, 19 nt, Homo sapiens
  misc_RNA (1)...(19): siRNA sense strand
ggaagaaauuuguggcaau

SEQ ID NO: 776121 - RNA, 19 nt, Homo sapiens
  misc_RNA (1)...(19): siRNA sense strand
uacagggucuugauuauuu

SEQ ID NO: 776122 - RNA, 19 nt, Homo sapiens
  misc_RNA (1)...(19): siRNA sense strand
gaaauccgguugcugaagu

SEQ ID NO: 776123 - RNA, 19 nt, Homo sapiens
  misc_RNA (1)...(19): siRNA sense strand
cagcagaaauuaauugcaa

SEQ ID NO: 776124 - RNA, 19 nt, Homo sapiens
  misc_RNA (1)...(19): siRNA sense strand
gaacaagagcaagaacaua

SEQ ID NO: 776125 - RNA, 19 nt, Homo sapiens
  misc_RNA (1)...(19): siRNA sense strand
cagcacaucucaagaaaca

SEQ ID NO: 776126 - RNA, 19 nt, Homo sapiens
  misc_RNA (1)...(19): siRNA sense strand
aaacagcacuagaugaaau

SEQ ID NO: 776127 - RNA, 19 nt, Homo sapiens
  misc_RNA (1)...(19): siRNA sense strand
ucaaguggaucaucaaauc

SEQ ID NO: 776128 - RNA, 19 nt, Homo sapiens
  misc_RNA (1)...(19): siRNA sense strand
ggccacaggugacuauuug

SEQ ID NO: 776129 - RNA, 19 nt, Homo sapiens
  misc_RNA (1)...(19): siRNA sense strand
guacaccuauaacaucuga

SEQ ID NO: 776130 - RNA, 19 nt, Homo sapiens
  misc_RNA (1)...(19): siRNA sense strand
gaagcgccaggcagaauua

SEQ ID NO: 776131 - RNA, 19 nt, Homo sapiens
  misc_RNA (1)...(19): siRNA sense strand
gaagaucacauugcauuga

SEQ ID NO: 776132 - RNA, 19 nt, Homo sapiens
  misc_RNA (1)...(19): siRNA sense strand
gcaauucagacccuaauga

SEQ ID NO: 776133 - RNA, 19 nt, Homo sapiens
  misc_RNA (1)...(19): siRNA sense strand
ggaguuaauggaacacaua

SEQ ID NO: 776134 - RNA, 19 nt, Homo sapiens
  misc_RNA (1)...(19): siRNA sense strand
gaacacauaucugcauggu

SEQ ID NO: 776135 - RNA, 19 nt, Homo sapiens
  misc_RNA (1)...(19): siRNA sense strand
gaaacagacucuuguacac

SEQ ID NO: 776136 - RNA, 19 nt, Homo sapiens
  misc_RNA (1)...(19): siRNA sense strand
ugaaagagaacccaccuaa

SEQ ID NO: 776137 - RNA, 19 nt, Homo sapiens
  misc_RNA (1)...(19): siRNA sense strand
gcaggaaauugaggaaaug

SEQ ID NO: 776138 - RNA, 19 nt, Homo sapiens
  misc_RNA (1)...(19): siRNA sense strand
cauccacacugacauuaaa

SEQ ID NO: 776139 - RNA, 19 nt, Homo sapiens
  misc_RNA (1)...(19): siRNA sense strand
gagauacccugugaagaug

SEQ ID NO: 776140 - RNA, 19 nt, Homo sapiens
  misc_RNA (1)...(19): siRNA sense strand
gaaauuuguggcaaugaaa

SEQ ID NO: 776141 - RNA, 19 nt, Homo sapiens
  misc_RNA (1)...(19): siRNA sense strand
gcacaucucaagaaacaga

SEQ ID NO: 776142 - RNA, 19 nt, Homo sapiens
  misc_RNA (1)...(19): siRNA sense strand
ggaccaaggccaagaagga

SEQ ID NO: 776143 - RNA, 19 nt, Homo sapiens
  misc_RNA (1)...(19): siRNA sense strand
gauaccaugugauccgaaa

SEQ ID NO: 776144 - RNA, 19 nt, Homo sapiens
  misc_RNA (1)...(19): siRNA sense strand
aaucggaucuggcuauaau

SEQ ID NO: 776145 - RNA, 19 nt, Homo sapiens
  misc_RNA (1)...(19): siRNA sense strand
gcaagaagaaucagagagu

SEQ ID NO: 776146 - RNA, 19 nt, Homo sapiens
  misc_RNA (1)...(19): siRNA sense strand
ugaaacagcacuagaugaa

SEQ ID NO: 776147 - RNA, 19 nt, Homo sapiens
  misc_RNA (1)...(19): siRNA sense strand
uaauugcaauggagugauu

SEQ ID NO: 776148 - RNA, 19 nt, Homo sapiens
  misc_RNA (1)...(19): siRNA sense strand
uaaaccagagaacaucuua

SEQ ID NO: 776149 - RNA, 19 nt, Homo sapiens
  misc_RNA (1)...(19): siRNA sense strand
caaaggaaaucugaaacuc

SEQ ID NO: 776150 - RNA, 19 nt, Homo sapiens
  misc_RNA (1)...(19): siRNA sense strand
gaacccaccuaauaaaaug

SEQ ID NO: 776151 - RNA, 19 nt, Homo sapiens
  misc_RNA (1)...(19): siRNA sense strand
gaaagagaacccaccuaau

SEQ ID NO: 776152 - RNA, 19 nt, Homo sapiens
  misc_RNA (1)...(19): siRNA sense strand
agagaguccuguugaaaga

SEQ ID NO: 776153 - RNA, 19 nt, Homo sapiens
  misc_RNA (1)...(19): siRNA sense strand
caagaagauccuaaugauu

SEQ ID NO: 776154 - RNA, 19 nt, Homo sapiens
  misc_RNA (1)...(19): siRNA sense strand
cagaaaagcucaaggugaa

SEQ ID NO: 776155 - RNA, 19 nt, Homo sapiens
  misc_RNA (1)...(19): siRNA sense strand
aagagaacccaccuaauaa

SEQ ID NO: 776156 - RNA, 19 nt, Homo sapiens
  misc_RNA (1)...(19): siRNA sense strand
gagaagcgaaugcaggaaa

SEQ ID NO: 776157 - RNA, 19 nt, Homo sapiens
  misc_RNA (1)...(19): siRNA sense strand
ccagagaacaucuuauugu

SEQ ID NO: 776158 - RNA, 19 nt, Homo sapiens
  misc_RNA (1)...(19): siRNA sense strand
ggcaucaucugcucaagug

SEQ ID NO: 776159 - RNA, 19 nt, Homo sapiens
  misc_RNA (1)...(19): siRNA sense strand
caaacaaggcaauaucguu

SEQ ID NO: 776160 - RNA, 19 nt, Homo sapiens
  misc_RNA (1)...(19): siRNA sense strand
cagcuggcuucacagauuu

SEQ ID NO: 776161 - RNA, 19 nt, Homo sapiens
  misc_RNA (1)...(19): siRNA sense strand
gaaacagcacuagaugaaa

SEQ ID NO: 776162 - RNA, 19 nt, Homo sapiens
  misc_RNA (1)...(19): siRNA sense strand
ucacauugcauugaucaua

SEQ ID NO: 776163 - RNA, 19 nt, Homo sapiens
  misc_RNA (1)...(19): siRNA sense strand
gcagagauacccugugaag

SEQ ID NO: 776164 - RNA, 19 nt, Homo sapiens
  misc_RNA (1)...(19): siRNA sense strand
uauaacaucugagguguca

SEQ ID NO: 776165 - RNA, 19 nt, Homo sapiens
  misc_RNA (1)...(19): siRNA sense strand
gaagagucaaguaccauug

SEQ ID NO: 776166 - RNA, 19 nt, Homo sapiens
  misc_RNA (1)...(19): siRNA sense strand
uaaaccagcugacaaaaug

SEQ ID NO: 776167 - RNA, 19 nt, Homo sapiens
  misc_RNA (1)...(19): siRNA sense strand
guuacagggucuugauuau

SEQ ID NO: 776168 - RNA, 19 nt, Homo sapiens
  misc_RNA (1)...(19): siRNA sense strand
agaaauuuguggcaaugaa

SEQ ID NO: 776169 - RNA, 19 nt, Homo sapiens
  misc_RNA (1)...(19): siRNA sense strand
gcugaucccugagaagaga

SEQ ID NO: 776170 - RNA, 19 nt, Homo sapiens
  misc_RNA (1)...(19): siRNA sense strand
gaaucuaguuuccuaagcu

SEQ ID NO: 776171 - RNA, 19 nt, Homo sapiens
  misc_RNA (1)...(19): siRNA sense strand
cagagaacaucuuauuguc

SEQ ID NO: 776172 - RNA, 19 nt, Homo sapiens
  misc_RNA (1)...(19): siRNA sense strand
gcugaacauuacacugaaa

SEQ ID NO: 776173 - RNA, 19 nt, Homo sapiens
  misc_RNA (1)...(19): siRNA sense strand
gagcugaucccugagaaga

SEQ ID NO: 776174 - RNA, 19 nt, Homo sapiens
  misc_RNA (1)...(19): siRNA sense strand
cggcaugcauggccuuuga

SEQ ID NO: 776175 - RNA, 19 nt, Homo sapiens
  misc_RNA (1)...(19): siRNA sense strand
cuaaugauccaaauagaga

SEQ ID NO: 776176 - RNA, 19 nt, Homo sapiens
  misc_RNA (1)...(19): siRNA sense strand
aaaggagguuaucaucuug

SEQ ID NO: 776177 - RNA, 19 nt, Homo sapiens
  misc_RNA (1)...(19): siRNA sense strand
aacaagagcaagaacauaa

SEQ ID NO: 776178 - RNA, 19 nt, Homo sapiens
  misc_RNA (1)...(19): siRNA sense strand
gaggcuggcugcagaagca

SEQ ID NO: 776179 - RNA, 19 nt, Homo sapiens
  misc_RNA (1)...(19): siRNA sense strand
acagggucuugauuauuua

SEQ ID NO: 776180 - RNA, 19 nt, Homo sapiens
  misc_RNA (1)...(19): siRNA sense strand
gugcugaacauuacacuga

SEQ ID NO: 776181 - RNA, 19 nt, Homo sapiens
  misc_RNA (1)...(19): siRNA sense strand
gagguuaucaucuugugaa

SEQ ID NO: 776182 - RNA, 19 nt, Homo sapiens
  misc_RNA (1)...(19): siRNA sense strand
gaccaaacaagcaagaaga

SEQ ID NO: 776183 - RNA, 19 nt, Homo sapiens
  misc_RNA (1)...(19): siRNA sense strand
gcuccaggcccgaaagaaa

SEQ ID NO: 776184 - RNA, 19 nt, Homo sapiens
  misc_RNA (1)...(19): siRNA sense strand
aaacaagcaagaagaauca

SEQ ID NO: 776185 - RNA, 19 nt, Homo sapiens
  misc_RNA (1)...(19): siRNA sense strand
caaacaagcaagaagaauc

SEQ ID NO: 776186 - RNA, 19 nt, Homo sapiens
  misc_RNA (1)...(19): siRNA sense strand
ugaagucaguucgcaauuc

SEQ ID NO: 776187 - RNA, 19 nt, Homo sapiens
  misc_RNA (1)...(19): siRNA sense strand
uggcuucacagauuucuua

SEQ ID NO: 776188 - RNA, 19 nt, Homo sapiens
  misc_RNA (1)...(19): siRNA sense strand
ugaaacauaucacgaagcu

SEQ ID NO: 776189 - RNA, 19 nt, Homo sapiens
  misc_RNA (1)...(19): siRNA sense strand
gauacccugugaagaugaa

SEQ ID NO: 776190 - RNA, 19 nt, Homo sapiens
  misc_RNA (1)...(19): siRNA sense strand
agagauacccugugaagau

SEQ ID NO: 776191 - RNA, 19 nt, Homo sapiens
  misc_RNA (1)...(19): siRNA sense strand
cagcagcacaucucaagaa

SEQ ID NO: 776192 - RNA, 19 nt, Homo sapiens
  misc_RNA (1)...(19): siRNA sense strand
auagagaaaugguuguuca

SEQ ID NO: 776193 - RNA, 19 nt, Homo sapiens
  misc_RNA (1)...(19): siRNA sense strand
cuucacagauuucuuacug

SEQ ID NO: 776194 - RNA, 19 nt, Homo sapiens
  misc_RNA (1)...(19): siRNA sense strand
cuaaucggaucuggcuaua

SEQ ID NO: 776195 - RNA, 19 nt, Homo sapiens
  misc_RNA (1)...(19): siRNA sense strand
cauaaagaggaucuacaua

SEQ ID NO: 776196 - RNA, 19 nt, Homo sapiens
  misc_RNA (1)...(19): siRNA sense strand
ggagugauugaagucauua

SEQ ID NO: 776197 - RNA, 19 nt, Homo sapiens
  misc_RNA (1)...(19): siRNA sense strand
gcagaaauuaauugcaaug

SEQ ID NO: 776198 - RNA, 19 nt, Homo sapiens
  misc_RNA (1)...(19): siRNA sense strand
uugaggaaauggagaaaga

SEQ ID NO: 776199 - RNA, 19 nt, Homo sapiens
  misc_RNA (1)...(19): siRNA sense strand
gcccaaaggaaaucugaaa

SEQ ID NO: 776200 - RNA, 19 nt, Homo sapiens
  misc_RNA (1)...(19): siRNA sense strand
acaggugacuauuuguuug

SEQ ID NO: 776201 - RNA, 19 nt, Homo sapiens
  misc_RNA (1)...(19): siRNA sense strand
ugaaucaggaaucuaguuu

SEQ ID NO: 776202 - RNA, 19 nt, Homo sapiens
  misc_RNA (1)...(19): siRNA sense strand
gaggaucuacauaaugcua

SEQ ID NO: 776203 - RNA, 19 nt, Homo sapiens
  misc_RNA (1)...(19): siRNA sense strand
gcgccaggcagaauuacua

SEQ ID NO: 776204 - RNA, 19 nt, Homo sapiens
  misc_RNA (1)...(19): siRNA sense strand
ggaucaaacgcuuauggaa

SEQ ID NO: 776205 - RNA, 19 nt, Homo sapiens
  misc_RNA (1)...(19): siRNA sense strand
agaggcagcuggcuucaca

SEQ ID NO: 776206 - RNA, 19 nt, Homo sapiens
  misc_RNA (1)...(19): siRNA sense strand
ggaucuacauaaugcuaau

SEQ ID NO: 776207 - RNA, 19 nt, Homo sapiens
  misc_RNA (1)...(19): siRNA sense strand
acucagaacaguaauaaug

SEQ ID NO: 776208 - RNA, 19 nt, Homo sapiens
  misc_RNA (1)...(19): siRNA sense strand
gaaaauuggagaucuauuc

SEQ ID NO: 776209 - RNA, 19 nt, Homo sapiens
  misc_RNA (1)...(19): siRNA sense strand
ggagagacauccuauauuc

SEQ ID NO: 776210 - RNA, 19 nt, Homo sapiens
  misc_RNA (1)...(19): siRNA sense strand
gauaauaccagaccgauuu

SEQ ID NO: 776211 - RNA, 19 nt, Homo sapiens
  misc_RNA (1)...(19): siRNA sense strand
gaugcuacaugguuauaua

SEQ ID NO: 776212 - RNA, 19 nt, Homo sapiens
  misc_RNA (1)...(19): siRNA sense strand
caguauggcuuccuuaauu

SEQ ID NO: 776213 - RNA, 19 nt, Homo sapiens
  misc_RNA (1)...(19): siRNA sense strand
cagcauagauaaugaacuu

SEQ ID NO: 776214 - RNA, 19 nt, Homo sapiens
  misc_RNA (1)...(19): siRNA sense strand
gaaucaagaucagcaagaa

SEQ ID NO: 776215 - RNA, 19 nt, Homo sapiens
  misc_RNA (1)...(19): siRNA sense strand
guacagugaugaugacgaa

SEQ ID NO: 776216 - RNA, 19 nt, Homo sapiens
  misc_RNA (1)...(19): siRNA sense strand
gcaaugguuuacagauauu

SEQ ID NO: 776217 - RNA, 19 nt, Homo sapiens
  misc_RNA (1)...(19): siRNA sense strand
gucaaagaauuccuagaua

SEQ ID NO: 776218 - RNA, 19 nt, Homo sapiens
  misc_RNA (1)...(19): siRNA sense strand
uaaagaaggcaaugcagua

SEQ ID NO: 776219 - RNA, 19 nt, Homo sapiens
  misc_RNA (1)...(19): siRNA sense strand
gaccaaagagugcaucaaa

SEQ ID NO: 776220 - RNA, 19 nt, Homo sapiens
  misc_RNA (1)...(19): siRNA sense strand
gcuacaucaugaagcauua

SEQ ID NO: 776221 - RNA, 19 nt, Homo sapiens
  misc_RNA (1)...(19): siRNA sense strand
ggcaaugguuuacagauau

SEQ ID NO: 776222 - RNA, 19 nt, Homo sapiens
  misc_RNA (1)...(19): siRNA sense strand
uggcaaugguuuacagaua

SEQ ID NO: 776223 - RNA, 19 nt, Homo sapiens
  misc_RNA (1)...(19): siRNA sense strand
cgaaaucaauggagugaca

SEQ ID NO: 776224 - RNA, 19 nt, Homo sapiens
  misc_RNA (1)...(19): siRNA sense strand
guugcaagaucaauaagaa

SEQ ID NO: 776225 - RNA, 19 nt, Homo sapiens
  misc_RNA (1)...(19): siRNA sense strand
uuacacuucuugacuguuu

SEQ ID NO: 776226 - RNA, 19 nt, Homo sapiens
  misc_RNA (1)...(19): siRNA sense strand
ccaaagagugcaucaaaug

SEQ ID NO: 776227 - RNA, 19 nt, Homo sapiens
  misc_RNA (1)...(19): siRNA sense strand
gacacaaggugauagacuu

SEQ ID NO: 776228 - RNA, 19 nt, Homo sapiens
  misc_RNA (1)...(19): siRNA sense strand
guacauuauuucagcauag

SEQ ID NO: 776229 - RNA, 19 nt, Homo sapiens
  misc_RNA (1)...(19): siRNA sense strand
guuggaugcuacaugguua

SEQ ID NO: 776230 - RNA, 19 nt, Homo sapiens
  misc_RNA (1)...(19): siRNA sense strand
gcauagauaaugaacuuga

SEQ ID NO: 776231 - RNA, 19 nt, Homo sapiens
  misc_RNA (1)...(19): siRNA sense strand
aaagagugcaucaaaugua

SEQ ID NO: 776232 - RNA, 19 nt, Homo sapiens
  misc_RNA (1)...(19): siRNA sense strand
gaacuucuacgcagauuuu

SEQ ID NO: 776233 - RNA, 19 nt, Homo sapiens
  misc_RNA (1)...(19): siRNA sense strand
guugaugacauuuccauaa

SEQ ID NO: 776234 - RNA, 19 nt, Homo sapiens
  misc_RNA (1)...(19): siRNA sense strand
uuucagagaugcugccuau

SEQ ID NO: 776235 - RNA, 19 nt, Homo sapiens
  misc_RNA (1)...(19): siRNA sense strand
ggagugacacaaggugaua

SEQ ID NO: 776236 - RNA, 19 nt, Homo sapiens
  misc_RNA (1)...(19): siRNA sense strand
caaagaauuccuagauauc

SEQ ID NO: 776237 - RNA, 19 nt, Homo sapiens
  misc_RNA (1)...(19): siRNA sense strand
ucaccgaucgccuuuguuu

SEQ ID NO: 776238 - RNA, 19 nt, Homo sapiens
  misc_RNA (1)...(19): siRNA sense strand
caucaccgaucgccuuugu

SEQ ID NO: 776239 - RNA, 19 nt, Homo sapiens
  misc_RNA (1)...(19): siRNA sense strand
gaacuugaauaugagaacu

SEQ ID NO: 776240 - RNA, 19 nt, Homo sapiens
  misc_RNA (1)...(19): siRNA sense strand
cagagcagccuucuccaaa

SEQ ID NO: 776241 - RNA, 19 nt, Homo sapiens
  misc_RNA (1)...(19): siRNA sense strand
cagagaugcugccuaugga

SEQ ID NO: 776242 - RNA, 19 nt, Homo sapiens
  misc_RNA (1)...(19): siRNA sense strand
caaagagugcaucaaaugu

SEQ ID NO: 776243 - RNA, 19 nt, Homo sapiens
  misc_RNA (1)...(19): siRNA sense strand
uaaauggggucgagaauca

SEQ ID NO: 776244 - RNA, 19 nt, Homo sapiens
  misc_RNA (1)...(19): siRNA sense strand
gagcagccuucuccaaacu

SEQ ID NO: 776245 - RNA, 19 nt, Homo sapiens
  misc_RNA (1)...(19): siRNA sense strand
aguauggcuuccuuaauuu

SEQ ID NO: 776246 - RNA, 19 nt, Homo sapiens
  misc_RNA (1)...(19): siRNA sense strand
caacucauuuaaccuugau

SEQ ID NO: 776247 - RNA, 19 nt, Homo sapiens
  misc_RNA (1)...(19): siRNA sense strand
ccagaagaagcauauagaa

SEQ ID NO: 776248 - RNA, 19 nt, Homo sapiens
  misc_RNA (1)...(19): siRNA sense strand
cuauggaaguugcaauuuc

SEQ ID NO: 776249 - RNA, 19 nt, Homo sapiens
  misc_RNA (1)...(19): siRNA sense strand
gaaguugcaauuucuacau

SEQ ID NO: 776250 - RNA, 19 nt, Homo sapiens
  misc_RNA (1)...(19): siRNA sense strand
ggagaauggacaacacaga

SEQ ID NO: 776251 - RNA, 19 nt, Homo sapiens
  misc_RNA (1)...(19): siRNA sense strand
cagaagaagcauauagaau

SEQ ID NO: 776252 - RNA, 19 nt, Homo sapiens
  misc_RNA (1)...(19): siRNA sense strand
agaccuggcucggugauug

SEQ ID NO: 776253 - RNA, 19 nt, Homo sapiens
  misc_RNA (1)...(19): siRNA sense strand
agaaggcaaugcaguaugg

SEQ ID NO: 776254 - RNA, 19 nt, Homo sapiens
  misc_RNA (1)...(19): siRNA sense strand
gagacauccuauauuccuu

SEQ ID NO: 776255 - RNA, 19 nt, Homo sapiens
  misc_RNA (1)...(19): siRNA sense strand
gcagccuucuccaaacuuc

SEQ ID NO: 776256 - RNA, 19 nt, Homo sapiens
  misc_RNA (1)...(19): siRNA sense strand
gcaguauggcuuccuuaau

SEQ ID NO: 776257 - RNA, 19 nt, Homo sapiens
  misc_RNA (1)...(19): siRNA sense strand
uauauuccuuucagagaug

SEQ ID NO: 776258 - RNA, 19 nt, Homo sapiens
  misc_RNA (1)...(19): siRNA sense strand
uugcaaagcuggccuuggu

SEQ ID NO: 776259 - RNA, 19 nt, Homo sapiens
  misc_RNA (1)...(19): siRNA sense strand
uauggaaguugcaauuucu

SEQ ID NO: 776260 - RNA, 19 nt, Homo sapiens
  misc_RNA (1)...(19): siRNA sense strand
gaagacaauccaaaacaaa

SEQ ID NO: 776261 - RNA, 19 nt, Homo sapiens
  misc_RNA (1)...(19): siRNA sense strand
cuagauaucugugaaaaug

SEQ ID NO: 776262 - RNA, 19 nt, Homo sapiens
  misc_RNA (1)...(19): siRNA sense strand
cugaugccauugucaaaga

SEQ ID NO: 776263 - RNA, 19 nt, Homo sapiens
  misc_RNA (1)...(19): siRNA sense strand
gaugcugccuauggaaguu

SEQ ID NO: 776264 - RNA, 19 nt, Homo sapiens
  misc_RNA (1)...(19): siRNA sense strand
gcaggagaauggacaacac

SEQ ID NO: 776265 - RNA, 19 nt, Homo sapiens
  misc_RNA (1)...(19): siRNA sense strand
caaaugcugccuuccuugu

SEQ ID NO: 776266 - RNA, 19 nt, Homo sapiens
  misc_RNA (1)...(19): siRNA sense strand
ugucaaagaauuccuagau

SEQ ID NO: 776267 - RNA, 19 nt, Homo sapiens
  misc_RNA (1)...(19): siRNA sense strand
uaugaugccaaacgcuuua

SEQ ID NO: 776268 - RNA, 19 nt, Homo sapiens
  misc_RNA (1)...(19): siRNA sense strand
ucagagaugcugccuaugg

SEQ ID NO: 776269 - RNA, 19 nt, Homo sapiens
  misc_RNA (1)...(19): siRNA sense strand
ccugagacuuauauucaau

SEQ ID NO: 776270 - RNA, 19 nt, Homo sapiens
  misc_RNA (1)...(19): siRNA sense strand
ggauaauaccagaccgauu

SEQ ID NO: 776271 - RNA, 19 nt, Homo sapiens
  misc_RNA (1)...(19): siRNA sense strand
cagauauuguugcaagauc

SEQ ID NO: 776272 - RNA, 19 nt, Homo sapiens
  misc_RNA (1)...(19): siRNA sense strand
auaccagaccgauuuauug

SEQ ID NO: 776273 - RNA, 19 nt, Homo sapiens
  misc_RNA (1)...(19): siRNA sense strand
cuauauuccuuucagagau

SEQ ID NO: 776274 - RNA, 19 nt, Homo sapiens
  misc_RNA (1)...(19): siRNA sense strand
aaugcugccuuccuuguug

SEQ ID NO: 776275 - RNA, 19 nt, Homo sapiens
  misc_RNA (1)...(19): siRNA sense strand
ggaaguugcaauuucuaca

SEQ ID NO: 776276 - RNA, 19 nt, Homo sapiens
  misc_RNA (1)...(19): siRNA sense strand
gacagcagccgagaccauu

SEQ ID NO: 776277 - RNA, 19 nt, Homo sapiens
  misc_RNA (1)...(19): siRNA sense strand
cuguggaccucauucaaga

SEQ ID NO: 776278 - RNA, 19 nt, Homo sapiens
  misc_RNA (1)...(19): siRNA sense strand
gacgaaaucaauggaguga

SEQ ID NO: 776279 - RNA, 19 nt, Homo sapiens
  misc_RNA (1)...(19): siRNA sense strand
ucaaucuggcaaugguuua

SEQ ID NO: 776280 - RNA, 19 nt, Homo sapiens
  misc_RNA (1)...(19): siRNA sense strand
aagcagaagacaauccaaa

SEQ ID NO: 776281 - RNA, 19 nt, Homo sapiens
  misc_RNA (1)...(19): siRNA sense strand
cauuacacuucuugacugu

SEQ ID NO: 776282 - RNA, 19 nt, Homo sapiens
  misc_RNA (1)...(19): siRNA sense strand
gacauccuauauuccuuuc

SEQ ID NO: 776283 - RNA, 19 nt, Homo sapiens
  misc_RNA (1)...(19): siRNA sense strand
agacauccuauauuccuuu

SEQ ID NO: 776284 - RNA, 19 nt, Homo sapiens
  misc_RNA (1)...(19): siRNA sense strand
agauauuguugcaagauca

SEQ ID NO: 776285 - RNA, 19 nt, Homo sapiens
  misc_RNA (1)...(19): siRNA sense strand
ggucgagaaucaagaucag

SEQ ID NO: 776286 - RNA, 19 nt, Homo sapiens
  misc_RNA (1)...(19): siRNA sense strand
ucaugaagcauuacaggau

SEQ ID NO: 776287 - RNA, 19 nt, Homo sapiens
  misc_RNA (1)...(19): siRNA sense strand
gacaucaccgaucgccuuu

SEQ ID NO: 776288 - RNA, 19 nt, Homo sapiens
  misc_RNA (1)...(19): siRNA sense strand
aagagugcaucaaauguac

SEQ ID NO: 776289 - RNA, 19 nt, Homo sapiens
  misc_RNA (1)...(19): siRNA sense strand
cauccuauauuccuuucag

SEQ ID NO: 776290 - RNA, 19 nt, Homo sapiens
  misc_RNA (1)...(19): siRNA sense strand
ugagggugccauugcagua

SEQ ID NO: 776291 - RNA, 19 nt, Homo sapiens
  misc_RNA (1)...(19): siRNA sense strand
ucaccaugaucuuuucuuu

SEQ ID NO: 776292 - RNA, 19 nt, Homo sapiens
  misc_RNA (1)...(19): siRNA sense strand
aaagaaggcaaugcaguau

SEQ ID NO: 776293 - RNA, 19 nt, Homo sapiens
  misc_RNA (1)...(19): siRNA sense strand
gauauuguugcaagaucaa

SEQ ID NO: 776294 - RNA, 19 nt, Homo sapiens
  misc_RNA (1)...(19): siRNA sense strand
cagugaugaugacgaaauc

SEQ ID NO: 776295 - RNA, 19 nt, Homo sapiens
  misc_RNA (1)...(19): siRNA sense strand
auaauaccagaccgauuua

SEQ ID NO: 776296 - RNA, 19 nt, Homo sapiens
  misc_RNA (1)...(19): siRNA sense strand
gcagcuccacgcagcaaga

SEQ ID NO: 776297 - RNA, 19 nt, Homo sapiens
  misc_RNA (1)...(19): siRNA sense strand
gaaccguacagugaugaug

SEQ ID NO: 776298 - RNA, 19 nt, Homo sapiens
  misc_RNA (1)...(19): siRNA sense strand
cuacugaugccauugucaa

SEQ ID NO: 776299 - RNA, 19 nt, Homo sapiens
  misc_RNA (1)...(19): siRNA sense strand
uuggagagacauccuauau

SEQ ID NO: 776300 - RNA, 19 nt, Homo sapiens
  misc_RNA (1)...(19): siRNA sense strand
aagaauuccuagauaucug

SEQ ID NO: 776301 - RNA, 19 nt, Homo sapiens
  misc_RNA (1)...(19): siRNA sense strand
ugaugccauugucaaagaa

SEQ ID NO: 776302 - RNA, 19 nt, Homo sapiens
  misc_RNA (1)...(19): siRNA sense strand
accaaagagugcaucaaau

SEQ ID NO: 776303 - RNA, 19 nt, Homo sapiens
  misc_RNA (1)...(19): siRNA sense strand
ccuauauuccuuucagaga

SEQ ID NO: 776304 - RNA, 19 nt, Homo sapiens
  misc_RNA (1)...(19): siRNA sense strand
guuuacagauauuguugca

SEQ ID NO: 776305 - RNA, 19 nt, Homo sapiens
  misc_RNA (1)...(19): siRNA sense strand
uggagagacauccuauauu

SEQ ID NO: 776306 - RNA, 19 nt, Homo sapiens
  misc_RNA (1)...(19): siRNA sense strand
gccuauggaaguugcaauu

SEQ ID NO: 776307 - RNA, 19 nt, Homo sapiens
  misc_RNA (1)...(19): siRNA sense strand
guugcaauuucuacauuac

SEQ ID NO: 776308 - RNA, 19 nt, Homo sapiens
  misc_RNA (1)...(19): siRNA sense strand
agaagacaauccaaaacaa

SEQ ID NO: 776309 - RNA, 19 nt, Homo sapiens
  misc_RNA (1)...(19): siRNA sense strand
ggagagacauccuauauuc

SEQ ID NO: 776310 - RNA, 19 nt, Homo sapiens
  misc_RNA (1)...(19): siRNA sense strand
gauaauaccagaccgauuu

SEQ ID NO: 776311 - RNA, 19 nt, Homo sapiens
  misc_RNA (1)...(19): siRNA sense strand
gaugcuacaugguuauaua

SEQ ID NO: 776312 - RNA, 19 nt, Homo sapiens
  misc_RNA (1)...(19): siRNA sense strand
caguauggcuuccuuaauu

SEQ ID NO: 776313 - RNA, 19 nt, Homo sapiens
  misc_RNA (1)...(19): siRNA sense strand
cagcauagauaaugaacuu

SEQ ID NO: 776314 - RNA, 19 nt, Homo sapiens
  misc_RNA (1)...(19): siRNA sense strand
gaaucaagaucagcaagaa

SEQ ID NO: 776315 - RNA, 19 nt, Homo sapiens
  misc_RNA (1)...(19): siRNA sense strand
guacagugaugaugacgaa

SEQ ID NO: 776316 - RNA, 19 nt, Homo sapiens
  misc_RNA (1)...(19): siRNA sense strand
gcaaugguuuacagauauu

SEQ ID NO: 776317 - RNA, 19 nt, Homo sapiens
  misc_RNA (1)...(19): siRNA sense strand
gucaaagaauuccuagaua

SEQ ID NO: 776318 - RNA, 19 nt, Homo sapiens
  misc_RNA (1)...(19): siRNA sense strand
uaaagaaggcaaugcagua

SEQ ID NO: 776319 - RNA, 19 nt, Homo sapiens
  misc_RNA (1)...(19): siRNA sense strand
gaccaaagagugcaucaaa

SEQ ID NO: 776320 - RNA, 19 nt, Homo sapiens
  misc_RNA (1)...(19): siRNA sense strand
gcuacaucaugaagcauua

SEQ ID NO: 776321 - RNA, 19 nt, Homo sapiens
  misc_RNA (1)...(19): siRNA sense strand
ggcaaugguuuacagauau

SEQ ID NO: 776322 - RNA, 19 nt, Homo sapiens
  misc_RNA (1)...(19): siRNA sense strand
uggcaaugguuuacagaua

SEQ ID NO: 776323 - RNA, 19 nt, Homo sapiens
  misc_RNA (1)...(19): siRNA sense strand
cgaaaucaauggagugaca

SEQ ID NO: 776324 - RNA, 19 nt, Homo sapiens
  misc_RNA (1)...(19): siRNA sense strand
guugcaagaucaauaagaa

SEQ ID NO: 776325 - RNA, 19 nt, Homo sapiens
  misc_RNA (1)...(19): siRNA sense strand
uuacacuucuugacuguuu

SEQ ID NO: 776326 - RNA, 19 nt, Homo sapiens
  misc_RNA (1)...(19): siRNA sense strand
ccaaagagugcaucaaaug

SEQ ID NO: 776327 - RNA, 19 nt, Homo sapiens
  misc_RNA (1)...(19): siRNA sense strand
gacacaaggugauagacuu

SEQ ID NO: 776328 - RNA, 19 nt, Homo sapiens
  misc_RNA (1)...(19): siRNA sense strand
guacauuauuucagcauag

SEQ ID NO: 776329 - RNA, 19 nt, Homo sapiens
  misc_RNA (1)...(19): siRNA sense strand
guuggaugcuacaugguua

SEQ ID NO: 776330 - RNA, 19 nt, Homo sapiens
  misc_RNA (1)...(19): siRNA sense strand
gcauagauaaugaacuuga

SEQ ID NO: 776331 - RNA, 19 nt, Homo sapiens
  misc_RNA (1)...(19): siRNA sense strand
aaagagugcaucaaaugua

SEQ ID NO: 776332 - RNA, 19 nt, Homo sapiens
  misc_RNA (1)...(19): siRNA sense strand
gaacuucuacgcagauuuu

SEQ ID NO: 776333 - RNA, 19 nt, Homo sapiens
  misc_RNA (1)...(19): siRNA sense strand
guugaugacauuuccauaa

SEQ ID NO: 776334 - RNA, 19 nt, Homo sapiens
  misc_RNA (1)...(19): siRNA sense strand
uuucagagaugcugccuau

SEQ ID NO: 776335 - RNA, 19 nt, Homo sapiens
  misc_RNA (1)...(19): siRNA sense strand
ggagugacacaaggugaua

SEQ ID NO: 776336 - RNA, 19 nt, Homo sapiens
  misc_RNA (1)...(19): siRNA sense strand
caaagaauuccuagauauc

SEQ ID NO: 776337 - RNA, 19 nt, Homo sapiens
  misc_RNA (1)...(19): siRNA sense strand
ucaccgaucgccuuuguuu

SEQ ID NO: 776338 - RNA, 19 nt, Homo sapiens
  misc_RNA (1)...(19): siRNA sense strand
caucaccgaucgccuuugu

SEQ ID NO: 776339 - RNA, 19 nt, Homo sapiens
  misc_RNA (1)...(19): siRNA sense strand
gaacuugaauaugagaacu

SEQ ID NO: 776340 - RNA, 19 nt, Homo sapiens
  misc_RNA (1)...(19): siRNA sense strand
cagagcagccuucuccaaa

SEQ ID NO: 776341 - RNA, 19 nt, Homo sapiens
  misc_RNA (1)...(19): siRNA sense strand
cagagaugcugccuaugga

SEQ ID NO: 776342 - RNA, 19 nt, Homo sapiens
  misc_RNA (1)...(19): siRNA sense strand
caaagagugcaucaaaugu

SEQ ID NO: 776343 - RNA, 19 nt, Homo sapiens
  misc_RNA (1)...(19): siRNA sense strand
uaaauggggucgagaauca

SEQ ID NO: 776344 - RNA, 19 nt, Homo sapiens
  misc_RNA (1)...(19): siRNA sense strand
gagcagccuucuccaaacu

SEQ ID NO: 776345 - RNA, 19 nt, Homo sapiens
  misc_RNA (1)...(19): siRNA sense strand
aguauggcuuccuuaauuu

SEQ ID NO: 776346 - RNA, 19 nt, Homo sapiens
  misc_RNA (1)...(19): siRNA sense strand
caacucauuuaaccuugau

SEQ ID NO: 776347 - RNA, 19 nt, Homo sapiens
  misc_RNA (1)...(19): siRNA sense strand
ccagaagaagcauauagaa

SEQ ID NO: 776348 - RNA, 19 nt, Homo sapiens
  misc_RNA (1)...(19): siRNA sense strand
cuauggaaguugcaauuuc

SEQ ID NO: 776349 - RNA, 19 nt, Homo sapiens
  misc_RNA (1)...(19): siRNA sense strand
gaaguugcaauuucuacau

SEQ ID NO: 776350 - RNA, 19 nt, Homo sapiens
  misc_RNA (1)...(19): siRNA sense strand
ggagaauggacaacacaga

SEQ ID NO: 776351 - RNA, 19 nt, Homo sapiens
  misc_RNA (1)...(19): siRNA sense strand
cagaagaagcauauagaau

SEQ ID NO: 776352 - RNA, 19 nt, Homo sapiens
  misc_RNA (1)...(19): siRNA sense strand
agaccuggcucggugauug

SEQ ID NO: 776353 - RNA, 19 nt, Homo sapiens
  misc_RNA (1)...(19): siRNA sense strand
agaaggcaaugcaguaugg

SEQ ID NO: 776354 - RNA, 19 nt, Homo sapiens
  misc_RNA (1)...(19): siRNA sense strand
gagacauccuauauuccuu

SEQ ID NO: 776355 - RNA, 19 nt, Homo sapiens
  misc_RNA (1)...(19): siRNA sense strand
gcagccuucuccaaacuuc

SEQ ID NO: 776356 - RNA, 19 nt, Homo sapiens
  misc_RNA (1)...(19): siRNA sense strand
gcaguauggcuuccuuaau

SEQ ID NO: 776357 - RNA, 19 nt, Homo sapiens
  misc_RNA (1)...(19): siRNA sense strand
uauauuccuuucagagaug

SEQ ID NO: 776358 - RNA, 19 nt, Homo sapiens
  misc_RNA (1)...(19): siRNA sense strand
uugcaaagcuggccuuggu

SEQ ID NO: 776359 - RNA, 19 nt, Homo sapiens
  misc_RNA (1)...(19): siRNA sense strand
uauggaaguugcaauuucu

SEQ ID NO: 776360 - RNA, 19 nt, Homo sapiens
  misc_RNA (1)...(19): siRNA sense strand
gaagacaauccaaaacaaa

SEQ ID NO: 776361 - RNA, 19 nt, Homo sapiens
  misc_RNA (1)...(19): siRNA sense strand
cuagauaucugugaaaaug

SEQ ID NO: 776362 - RNA, 19 nt, Homo sapiens
  misc_RNA (1)...(19): siRNA sense strand
cugaugccauugucaaaga

SEQ ID NO: 776363 - RNA, 19 nt, Homo sapiens
  misc_RNA (1)...(19): siRNA sense strand
gaugcugccuauggaaguu

SEQ ID NO: 776364 - RNA, 19 nt, Homo sapiens
  misc_RNA (1)...(19): siRNA sense strand
gcaggagaauggacaacac

SEQ ID NO: 776365 - RNA, 19 nt, Homo sapiens
  misc_RNA (1)...(19): siRNA sense strand
caaaugcugccuuccuugu

SEQ ID NO: 776366 - RNA, 19 nt, Homo sapiens
  misc_RNA (1)...(19): siRNA sense strand
ugucaaagaauuccuagau

SEQ ID NO: 776367 - RNA, 19 nt, Homo sapiens
  misc_RNA (1)...(19): siRNA sense strand
uaugaugccaaacgcuuua

SEQ ID NO: 776368 - RNA, 19 nt, Homo sapiens
  misc_RNA (1)...(19): siRNA sense strand
ucagagaugcugccuaugg

SEQ ID NO: 776369 - RNA, 19 nt, Homo sapiens
  misc_RNA (1)...(19): siRNA sense strand
ccugagacuuauauucaau

SEQ ID NO: 776370 - RNA, 19 nt, Homo sapiens
  misc_RNA (1)...(19): siRNA sense strand
ggauaauaccagaccgauu

SEQ ID NO: 776371 - RNA, 19 nt, Homo sapiens
  misc_RNA (1)...(19): siRNA sense strand
cagauauuguugcaagauc

SEQ ID NO: 776372 - RNA, 19 nt, Homo sapiens
  misc_RNA (1)...(19): siRNA sense strand
auaccagaccgauuuauug

SEQ ID NO: 776373 - RNA, 19 nt, Homo sapiens
  misc_RNA (1)...(19): siRNA sense strand
cuauauuccuuucagagau

SEQ ID NO: 776374 - RNA, 19 nt, Homo sapiens
  misc_RNA (1)...(19): siRNA sense strand
aaugcugccuuccuuguug

SEQ ID NO: 776375 - RNA, 19 nt, Homo sapiens
  misc_RNA (1)...(19): siRNA sense strand
ggaaguugcaauuucuaca

SEQ ID NO: 776376 - RNA, 19 nt, Homo sapiens
  misc_RNA (1)...(19): siRNA sense strand
gacagcagccgagaccauu

SEQ ID NO: 776377 - RNA, 19 nt, Homo sapiens
  misc_RNA (1)...(19): siRNA sense strand
cuguggaccucauucaaga

SEQ ID NO: 776378 - RNA, 19 nt, Homo sapiens
  misc_RNA (1)...(19): siRNA sense strand
gacgaaaucaauggaguga

SEQ ID NO: 776379 - RNA, 19 nt, Homo sapiens
  misc_RNA (1)...(19): siRNA sense strand
ucaaucuggcaaugguuua

SEQ ID NO: 776380 - RNA, 19 nt, Homo sapiens
  misc_RNA (1)...(19): siRNA sense strand
aagcagaagacaauccaaa

SEQ ID NO: 776381 - RNA, 19 nt, Homo sapiens
  misc_RNA (1)...(19): siRNA sense strand
cauuacacuucuugacugu

SEQ ID NO: 776382 - RNA, 19 nt, Homo sapiens
  misc_RNA (1)...(19): siRNA sense strand
gacauccuauauuccuuuc

SEQ ID NO: 776383 - RNA, 19 nt, Homo sapiens
  misc_RNA (1)...(19): siRNA sense strand
agacauccuauauuccuuu

SEQ ID NO: 776384 - RNA, 19 nt, Homo sapiens
  misc_RNA (1)...(19): siRNA sense strand
agauauuguugcaagauca

SEQ ID NO: 776385 - RNA, 19 nt, Homo sapiens
  misc_RNA (1)...(19): siRNA sense strand
ggucgagaaucaagaucag

SEQ ID NO: 776386 - RNA, 19 nt, Homo sapiens
  misc_RNA (1)...(19): siRNA sense strand
ucaugaagcauuacaggau

SEQ ID NO: 776387 - RNA, 19 nt, Homo sapiens
  misc_RNA (1)...(19): siRNA sense strand
gacaucaccgaucgccuuu

SEQ ID NO: 776388 - RNA, 19 nt, Homo sapiens
  misc_RNA (1)...(19): siRNA sense strand
aagagugcaucaaauguac

SEQ ID NO: 776389 - RNA, 19 nt, Homo sapiens
  misc_RNA (1)...(19): siRNA sense strand
cauccuauauuccuuucag

SEQ ID NO: 776390 - RNA, 19 nt, Homo sapiens
  misc_RNA (1)...(19): siRNA sense strand
ugagggugccauugcagua

SEQ ID NO: 776391 - RNA, 19 nt, Homo sapiens
  misc_RNA (1)...(19): siRNA sense strand
ucaccaugaucuuuucuuu

SEQ ID NO: 776392 - RNA, 19 nt, Homo sapiens
  misc_RNA (1)...(19): siRNA sense strand
aaagaaggcaaugcaguau

SEQ ID NO: 776393 - RNA, 19 nt, Homo sapiens
  misc_RNA (1)...(19): siRNA sense strand
gauauuguugcaagaucaa

SEQ ID NO: 776394 - RNA, 19 nt, Homo sapiens
  misc_RNA (1)...(19): siRNA sense strand
cagugaugaugacgaaauc

SEQ ID NO: 776395 - RNA, 19 nt, Homo sapiens
  misc_RNA (1)...(19): siRNA sense strand
auaauaccagaccgauuua

SEQ ID NO: 776396 - RNA, 19 nt, Homo sapiens
  misc_RNA (1)...(19): siRNA sense strand
gcagcuccacgcagcaaga

SEQ ID NO: 776397 - RNA, 19 nt, Homo sapiens
  misc_RNA (1)...(19): siRNA sense strand
gaaccguacagugaugaug

SEQ ID NO: 776398 - RNA, 19 nt, Homo sapiens
  misc_RNA (1)...(19): siRNA sense strand
cuacugaugccauugucaa

SEQ ID NO: 776399 - RNA, 19 nt, Homo sapiens
  misc_RNA (1)...(19): siRNA sense strand
uuggagagacauccuauau

SEQ ID NO: 776400 - RNA, 19 nt, Homo sapiens
  misc_RNA (1)...(19): siRNA sense strand
aagaauuccuagauaucug

SEQ ID NO: 776401 - RNA, 19 nt, Homo sapiens
  misc_RNA (1)...(19): siRNA sense strand
ugaugccauugucaaagaa

SEQ ID NO: 776402 - RNA, 19 nt, Homo sapiens
  misc_RNA (1)...(19): siRNA sense strand
accaaagagugcaucaaau

SEQ ID NO: 776403 - RNA, 19 nt, Homo sapiens
  misc_RNA (1)...(19): siRNA sense strand
ccuauauuccuuucagaga

SEQ ID NO: 776404 - RNA, 19 nt, Homo sapiens
  misc_RNA (1)...(19): siRNA sense strand
guuuacagauauuguugca

SEQ ID NO: 776405 - RNA, 19 nt, Homo sapiens
  misc_RNA (1)...(19): siRNA sense strand
uggagagacauccuauauu

SEQ ID NO: 776406 - RNA, 19 nt, Homo sapiens
  misc_RNA (1)...(19): siRNA sense strand
gccuauggaaguugcaauu

SEQ ID NO: 776407 - RNA, 19 nt, Homo sapiens
  misc_RNA (1)...(19): siRNA sense strand
guugcaauuucuacauuac

SEQ ID NO: 776408 - RNA, 19 nt, Homo sapiens
  misc_RNA (1)...(19): siRNA sense strand
agaagacaauccaaaacaa

SEQ ID NO: 776409 - RNA, 19 nt, Homo sapiens
  misc_RNA (1)...(19): siRNA sense strand
ggagagacauccuauauuc

SEQ ID NO: 776410 - RNA, 19 nt, Homo sapiens
  misc_RNA (1)...(19): siRNA sense strand
gauaauaccagaccgauuu

SEQ ID NO: 776411 - RNA, 19 nt, Homo sapiens
  misc_RNA (1)...(19): siRNA sense strand
gaugcuacaugguuauaua

SEQ ID NO: 776412 - RNA, 19 nt, Homo sapiens
  misc_RNA (1)...(19): siRNA sense strand
caguauggcuuccuuaauu

SEQ ID NO: 776413 - RNA, 19 nt, Homo sapiens
  misc_RNA (1)...(19): siRNA sense strand
cagcauagauaaugaacuu

SEQ ID NO: 776414 - RNA, 19 nt, Homo sapiens
  misc_RNA (1)...(19): siRNA sense strand
gaaucaagaucagcaagaa

SEQ ID NO: 776415 - RNA, 19 nt, Homo sapiens
  misc_RNA (1)...(19): siRNA sense strand
guacagugaugaugacgaa

SEQ ID NO: 776416 - RNA, 19 nt, Homo sapiens
  misc_RNA (1)...(19): siRNA sense strand
gcaaugguuuacagauauu

SEQ ID NO: 776417 - RNA, 19 nt, Homo sapiens
  misc_RNA (1)...(19): siRNA sense strand
gucaaagaauuccuagaua

SEQ ID NO: 776418 - RNA, 19 nt, Homo sapiens
  misc_RNA (1)...(19): siRNA sense strand
uaaagaaggcaaugcagua

SEQ ID NO: 776419 - RNA, 19 nt, Homo sapiens
  misc_RNA (1)...(19): siRNA sense strand
gaccaaagagugcaucaaa

SEQ ID NO: 776420 - RNA, 19 nt, Homo sapiens
  misc_RNA (1)...(19): siRNA sense strand
gcuacaucaugaagcauua

SEQ ID NO: 776421 - RNA, 19 nt, Homo sapiens
  misc_RNA (1)...(19): siRNA sense strand
ggcaaugguuuacagauau

SEQ ID NO: 776422 - RNA, 19 nt, Homo sapiens
  misc_RNA (1)...(19): siRNA sense strand
uggcaaugguuuacagaua

SEQ ID NO: 776423 - RNA, 19 nt, Homo sapiens
  misc_RNA (1)...(19): siRNA sense strand
cgaaaucaauggagugaca

SEQ ID NO: 776424 - RNA, 19 nt, Homo sapiens
  misc_RNA (1)...(19): siRNA sense strand
guugcaagaucaauaagaa

SEQ ID NO: 776425 - RNA, 19 nt, Homo sapiens
  misc_RNA (1)...(19): siRNA sense strand
uuacacuucuugacuguuu

SEQ ID NO: 776426 - RNA, 19 nt, Homo sapiens
  misc_RNA (1)...(19): siRNA sense strand
ccaaagagugcaucaaaug

SEQ ID NO: 776427 - RNA, 19 nt, Homo sapiens
  misc_RNA (1)...(19): siRNA sense strand
gacacaaggugauagacuu

SEQ ID NO: 776428 - RNA, 19 nt, Homo sapiens
  misc_RNA (1)...(19): siRNA sense strand
guacauuauuucagcauag

SEQ ID NO: 776429 - RNA, 19 nt, Homo sapiens
  misc_RNA (1)...(19): siRNA sense strand
guuggaugcuacaugguua

SEQ ID NO: 776430 - RNA, 19 nt, Homo sapiens
  misc_RNA (1)...(19): siRNA sense strand
gcauagauaaugaacuuga

SEQ ID NO: 776431 - RNA, 19 nt, Homo sapiens
  misc_RNA (1)...(19): siRNA sense strand
aaagagugcaucaaaugua

SEQ ID NO: 776432 - RNA, 19 nt, Homo sapiens
  misc_RNA (1)...(19): siRNA sense strand
gaacuucuacgcagauuuu

SEQ ID NO: 776433 - RNA, 19 nt, Homo sapiens
  misc_RNA (1)...(19): siRNA sense strand
guugaugacauuuccauaa

SEQ ID NO: 776434 - RNA, 19 nt, Homo sapiens
  misc_RNA (1)...(19): siRNA sense strand
uuucagagaugcugccuau

SEQ ID NO: 776435 - RNA, 19 nt, Homo sapiens
  misc_RNA (1)...(19): siRNA sense strand
ggagugacacaaggugaua

SEQ ID NO: 776436 - RNA, 19 nt, Homo sapiens
  misc_RNA (1)...(19): siRNA sense strand
caaagaauuccuagauauc

SEQ ID NO: 776437 - RNA, 19 nt, Homo sapiens
  misc_RNA (1)...(19): siRNA sense strand
ucaccgaucgccuuuguuu

SEQ ID NO: 776438 - RNA, 19 nt, Homo sapiens
  misc_RNA (1)...(19): siRNA sense strand
caucaccgaucgccuuugu

SEQ ID NO: 776439 - RNA, 19 nt, Homo sapiens
  misc_RNA (1)...(19): siRNA sense strand
gaacuugaauaugagaacu

SEQ ID NO: 776440 - RNA, 19 nt, Homo sapiens
  misc_RNA (1)...(19): siRNA sense strand
cagagcagccuucuccaaa

SEQ ID NO: 776441 - RNA, 19 nt, Homo sapiens
  misc_RNA (1)...(19): siRNA sense strand
cagagaugcugccuaugga

SEQ ID NO: 776442 - RNA, 19 nt, Homo sapiens
  misc_RNA (1)...(19): siRNA sense strand
caaagagugcaucaaaugu

SEQ ID NO: 776443 - RNA, 19 nt, Homo sapiens
  misc_RNA (1)...(19): siRNA sense strand
uaaauggggucgagaauca

SEQ ID NO: 776444 - RNA, 19 nt, Homo sapiens
  misc_RNA (1)...(19): siRNA sense strand
gagcagccuucuccaaacu

SEQ ID NO: 776445 - RNA, 19 nt, Homo sapiens
  misc_RNA (1)...(19): siRNA sense strand
aguauggcuuccuuaauuu

SEQ ID NO: 776446 - RNA, 19 nt, Homo sapiens
  misc_RNA (1)...(19): siRNA sense strand
caacucauuuaaccuugau

SEQ ID NO: 776447 - RNA, 19 nt, Homo sapiens
  misc_RNA (1)...(19): siRNA sense strand
ccagaagaagcauauagaa

SEQ ID NO: 776448 - RNA, 19 nt, Homo sapiens
  misc_RNA (1)...(19): siRNA sense strand
cuauggaaguugcaauuuc

SEQ ID NO: 776449 - RNA, 19 nt, Homo sapiens
  misc_RNA (1)...(19): siRNA sense strand
gaaguugcaauuucuacau

SEQ ID NO: 776450 - RNA, 19 nt, Homo sapiens
  misc_RNA (1)...(19): siRNA sense strand
ggagaauggacaacacaga

SEQ ID NO: 776451 - RNA, 19 nt, Homo sapiens
  misc_RNA (1)...(19): siRNA sense strand
cagaagaagcauauagaau

SEQ ID NO: 776452 - RNA, 19 nt, Homo sapiens
  misc_RNA (1)...(19): siRNA sense strand
agaccuggcucggugauug

SEQ ID NO: 776453 - RNA, 19 nt, Homo sapiens
  misc_RNA (1)...(19): siRNA sense strand
agaaggcaaugcaguaugg

SEQ ID NO: 776454 - RNA, 19 nt, Homo sapiens
  misc_RNA (1)...(19): siRNA sense strand
gagacauccuauauuccuu

SEQ ID NO: 776455 - RNA, 19 nt, Homo sapiens
  misc_RNA (1)...(19): siRNA sense strand
gcagccuucuccaaacuuc

SEQ ID NO: 776456 - RNA, 19 nt, Homo sapiens
  misc_RNA (1)...(19): siRNA sense strand
gcaguauggcuuccuuaau

SEQ ID NO: 776457 - RNA, 19 nt, Homo sapiens
  misc_RNA (1)...(19): siRNA sense strand
uauauuccuuucagagaug

SEQ ID NO: 776458 - RNA, 19 nt, Homo sapiens
  misc_RNA (1)...(19): siRNA sense strand
uugcaaagcuggccuuggu

SEQ ID NO: 776459 - RNA, 19 nt, Homo sapiens
  misc_RNA (1)...(19): siRNA sense strand
uauggaaguugcaauuucu

SEQ ID NO: 776460 - RNA, 19 nt, Homo sapiens
  misc_RNA (1)...(19): siRNA sense strand
gaagacaauccaaaacaaa

SEQ ID NO: 776461 - RNA, 19 nt, Homo sapiens
  misc_RNA (1)...(19): siRNA sense strand
cuagauaucugugaaaaug

SEQ ID NO: 776462 - RNA, 19 nt, Homo sapiens
  misc_RNA (1)...(19): siRNA sense strand
cugaugccauugucaaaga

SEQ ID NO: 776463 - RNA, 19 nt, Homo sapiens
  misc_RNA (1)...(19): siRNA sense strand
gaugcugccuauggaaguu

SEQ ID NO: 776464 - RNA, 19 nt, Homo sapiens
  misc_RNA (1)...(19): siRNA sense strand
gcaggagaauggacaacac

SEQ ID NO: 776465 - RNA, 19 nt, Homo sapiens
  misc_RNA (1)...(19): siRNA sense strand
caaaugcugccuuccuugu

SEQ ID NO: 776466 - RNA, 19 nt, Homo sapiens
  misc_RNA (1)...(19): siRNA sense strand
ugucaaagaauuccuagau

SEQ ID NO: 776467 - RNA, 19 nt, Homo sapiens
  misc_RNA (1)...(19): siRNA sense strand
uaugaugccaaacgcuuua

SEQ ID NO: 776468 - RNA, 19 nt, Homo sapiens
  misc_RNA (1)...(19): siRNA sense strand
ucagagaugcugccuaugg

SEQ ID NO: 776469 - RNA, 19 nt, Homo sapiens
  misc_RNA (1)...(19): siRNA sense strand
ccugagacuuauauucaau

SEQ ID NO: 776470 - RNA, 19 nt, Homo sapiens
  misc_RNA (1)...(19): siRNA sense strand
ggauaauaccagaccgauu

SEQ ID NO: 776471 - RNA, 19 nt, Homo sapiens
  misc_RNA (1)...(19): siRNA sense strand
cagauauuguugcaagauc

SEQ ID NO: 776472 - RNA, 19 nt, Homo sapiens
  misc_RNA (1)...(19): siRNA sense strand
auaccagaccgauuuauug

SEQ ID NO: 776473 - RNA, 19 nt, Homo sapiens
  misc_RNA (1)...(19): siRNA sense strand
cuauauuccuuucagagau

SEQ ID NO: 776474 - RNA, 19 nt, Homo sapiens
  misc_RNA (1)...(19): siRNA sense strand
aaugcugccuuccuuguug

SEQ ID NO: 776475 - RNA, 19 nt, Homo sapiens
  misc_RNA (1)...(19): siRNA sense strand
ggaaguugcaauuucuaca

SEQ ID NO: 776476 - RNA, 19 nt, Homo sapiens
  misc_RNA (1)...(19): siRNA sense strand
gacagcagccgagaccauu

SEQ ID NO: 776477 - RNA, 19 nt, Homo sapiens
  misc_RNA (1)...(19): siRNA sense strand
cuguggaccucauucaaga

SEQ ID NO: 776478 - RNA, 19 nt, Homo sapiens
  misc_RNA (1)...(19): siRNA sense strand
gacgaaaucaauggaguga

SEQ ID NO: 776479 - RNA, 19 nt, Homo sapiens
  misc_RNA (1)...(19): siRNA sense strand
ucaaucuggcaaugguuua

SEQ ID NO: 776480 - RNA, 19 nt, Homo sapiens
  misc_RNA (1)...(19): siRNA sense strand
aagcagaagacaauccaaa

SEQ ID NO: 776481 - RNA, 19 nt, Homo sapiens
  misc_RNA (1)...(19): siRNA sense strand
cauuacacuucuugacugu

SEQ ID NO: 776482 - RNA, 19 nt, Homo sapiens
  misc_RNA (1)...(19): siRNA sense strand
gacauccuauauuccuuuc

SEQ ID NO: 776483 - RNA, 19 nt, Homo sapiens
  misc_RNA (1)...(19): siRNA sense strand
agacauccuauauuccuuu

SEQ ID NO: 776484 - RNA, 19 nt, Homo sapiens
  misc_RNA (1)...(19): siRNA sense strand
agauauuguugcaagauca

SEQ ID NO: 776485 - RNA, 19 nt, Homo sapiens
  misc_RNA (1)...(19): siRNA sense strand
ggucgagaaucaagaucag

SEQ ID NO: 776486 - RNA, 19 nt, Homo sapiens
  misc_RNA (1)...(19): siRNA sense strand
ucaugaagcauuacaggau

SEQ ID NO: 776487 - RNA, 19 nt, Homo sapiens
  misc_RNA (1)...(19): siRNA sense strand
gacaucaccgaucgccuuu

SEQ ID NO: 776488 - RNA, 19 nt, Homo sapiens
  misc_RNA (1)...(19): siRNA sense strand
aagagugcaucaaauguac

SEQ ID NO: 776489 - RNA, 19 nt, Homo sapiens
  misc_RNA (1)...(19): siRNA sense strand
cauccuauauuccuuucag

SEQ ID NO: 776490 - RNA, 19 nt, Homo sapiens
  misc_RNA (1)...(19): siRNA sense strand
ugagggugccauugcagua

SEQ ID NO: 776491 - RNA, 19 nt, Homo sapiens
  misc_RNA (1)...(19): siRNA sense strand
ucaccaugaucuuuucuuu

SEQ ID NO: 776492 - RNA, 19 nt, Homo sapiens
  misc_RNA (1)...(19): siRNA sense strand
aaagaaggcaaugcaguau

SEQ ID NO: 776493 - RNA, 19 nt, Homo sapiens
  misc_RNA (1)...(19): siRNA sense strand
gauauuguugcaagaucaa

SEQ ID NO: 776494 - RNA, 19 nt, Homo sapiens
  misc_RNA (1)...(19): siRNA sense strand
cagugaugaugacgaaauc

SEQ ID NO: 776495 - RNA, 19 nt, Homo sapiens
  misc_RNA (1)...(19): siRNA sense strand
auaauaccagaccgauuua

SEQ ID NO: 776496 - RNA, 19 nt, Homo sapiens
  misc_RNA (1)...(19): siRNA sense strand
gcagcuccacgcagcaaga

SEQ ID NO: 776497 - RNA, 19 nt, Homo sapiens
  misc_RNA (1)...(19): siRNA sense strand
gaaccguacagugaugaug

SEQ ID NO: 776498 - RNA, 19 nt, Homo sapiens
  misc_RNA (1)...(19): siRNA sense strand
cuacugaugccauugucaa

SEQ ID NO: 776499 - RNA, 19 nt, Homo sapiens
  misc_RNA (1)...(19): siRNA sense strand
uuggagagacauccuauau

SEQ ID NO: 776500 - RNA, 19 nt, Homo sapiens
  misc_RNA (1)...(19): siRNA sense strand
aagaauuccuagauaucug

SEQ ID NO: 776501 - RNA, 19 nt, Homo sapiens
  misc_RNA (1)...(19): siRNA sense strand
ugaugccauugucaaagaa

SEQ ID NO: 776502 - RNA, 19 nt, Homo sapiens
  misc_RNA (1)...(19): siRNA sense strand
accaaagagugcaucaaau

SEQ ID NO: 776503 - RNA, 19 nt, Homo sapiens
  misc_RNA (1)...(19): siRNA sense strand
ccuauauuccuuucagaga

SEQ ID NO: 776504 - RNA, 19 nt, Homo sapiens
  misc_RNA (1)...(19): siRNA sense strand
guuuacagauauuguugca

SEQ ID NO: 776505 - RNA, 19 nt, Homo sapiens
  misc_RNA (1)...(19): siRNA sense strand
uggagagacauccuauauu

SEQ ID NO: 776506 - RNA, 19 nt, Homo sapiens
  misc_RNA (1)...(19): siRNA sense strand
gccuauggaaguugcaauu

SEQ ID NO: 776507 - RNA, 19 nt, Homo sapiens
  misc_RNA (1)...(19): siRNA sense strand
guugcaauuucuacauuac

SEQ ID NO: 776508 - RNA, 19 nt, Homo sapiens
  misc_RNA (1)...(19): siRNA sense strand
agaagacaauccaaaacaa

SEQ ID NO: 776509 - RNA, 19 nt, Homo sapiens
  misc_RNA (1)...(19): siRNA sense strand
ggagagacauccuauauuc

SEQ ID NO: 776510 - RNA, 19 nt, Homo sapiens
  misc_RNA (1)...(19): siRNA sense strand
gauaauaccagaccgauuu

SEQ ID NO: 776511 - RNA, 19 nt, Homo sapiens
  misc_RNA (1)...(19): siRNA sense strand
gaugcuacaugguuauaua

SEQ ID NO: 776512 - RNA, 19 nt, Homo sapiens
  misc_RNA (1)...(19): siRNA sense strand
caguauggcuuccuuaauu

SEQ ID NO: 776513 - RNA, 19 nt, Homo sapiens
  misc_RNA (1)...(19): siRNA sense strand
cagcauagauaaugaacuu

SEQ ID NO: 776514 - RNA, 19 nt, Homo sapiens
  misc_RNA (1)...(19): siRNA sense strand
gaaucaagaucagcaagaa

SEQ ID NO: 776515 - RNA, 19 nt, Homo sapiens
  misc_RNA (1)...(19): siRNA sense strand
guacagugaugaugacgaa

SEQ ID NO: 776516 - RNA, 19 nt, Homo sapiens
  misc_RNA (1)...(19): siRNA sense strand
gcaaugguuuacagauauu

SEQ ID NO: 776517 - RNA, 19 nt, Homo sapiens
  misc_RNA (1)...(19): siRNA sense strand
gucaaagaauuccuagaua

SEQ ID NO: 776518 - RNA, 19 nt, Homo sapiens
  misc_RNA (1)...(19): siRNA sense strand
uaaagaaggcaaugcagua

SEQ ID NO: 776519 - RNA, 19 nt, Homo sapiens
  misc_RNA (1)...(19): siRNA sense strand
gaccaaagagugcaucaaa

SEQ ID NO: 776520 - RNA, 19 nt, Homo sapiens
  misc_RNA (1)...(19): siRNA sense strand
gcuacaucaugaagcauua

SEQ ID NO: 776521 - RNA, 19 nt, Homo sapiens
  misc_RNA (1)...(19): siRNA sense strand
ggcaaugguuuacagauau

SEQ ID NO: 776522 - RNA, 19 nt, Homo sapiens
  misc_RNA (1)...(19): siRNA sense strand
uggcaaugguuuacagaua

SEQ ID NO: 776523 - RNA, 19 nt, Homo sapiens
  misc_RNA (1)...(19): siRNA sense strand
cgaaaucaauggagugaca

SEQ ID NO: 776524 - RNA, 19 nt, Homo sapiens
  misc_RNA (1)...(19): siRNA sense strand
guugcaagaucaauaagaa

SEQ ID NO: 776525 - RNA, 19 nt, Homo sapiens
  misc_RNA (1)...(19): siRNA sense strand
uuacacuucuugacuguuu

SEQ ID NO: 776526 - RNA, 19 nt, Homo sapiens
  misc_RNA (1)...(19): siRNA sense strand
ccaaagagugcaucaaaug

SEQ ID NO: 776527 - RNA, 19 nt, Homo sapiens
  misc_RNA (1)...(19): siRNA sense strand
gacacaaggugauagacuu

SEQ ID NO: 776528 - RNA, 19 nt, Homo sapiens
  misc_RNA (1)...(19): siRNA sense strand
guacauuauuucagcauag

SEQ ID NO: 776529 - RNA, 19 nt, Homo sapiens
  misc_RNA (1)...(19): siRNA sense strand
guuggaugcuacaugguua

SEQ ID NO: 776530 - RNA, 19 nt, Homo sapiens
  misc_RNA (1)...(19): siRNA sense strand
gcauagauaaugaacuuga

SEQ ID NO: 776531 - RNA, 19 nt, Homo sapiens
  misc_RNA (1)...(19): siRNA sense strand
aaagagugcaucaaaugua

SEQ ID NO: 776532 - RNA, 19 nt, Homo sapiens
  misc_RNA (1)...(19): siRNA sense strand
gaacuucuacgcagauuuu

SEQ ID NO: 776533 - RNA, 19 nt, Homo sapiens
  misc_RNA (1)...(19): siRNA sense strand
guugaugacauuuccauaa

SEQ ID NO: 776534 - RNA, 19 nt, Homo sapiens
  misc_RNA (1)...(19): siRNA sense strand
uuucagagaugcugccuau

SEQ ID NO: 776535 - RNA, 19 nt, Homo sapiens
  misc_RNA (1)...(19): siRNA sense strand
ggagugacacaaggugaua

SEQ ID NO: 776536 - RNA, 19 nt, Homo sapiens
  misc_RNA (1)...(19): siRNA sense strand
caaagaauuccuagauauc

SEQ ID NO: 776537 - RNA, 19 nt, Homo sapiens
  misc_RNA (1)...(19): siRNA sense strand
ucaccgaucgccuuuguuu

SEQ ID NO: 776538 - RNA, 19 nt, Homo sapiens
  misc_RNA (1)...(19): siRNA sense strand
caucaccgaucgccuuugu

SEQ ID NO: 776539 - RNA, 19 nt, Homo sapiens
  misc_RNA (1)...(19): siRNA sense strand
gaacuugaauaugagaacu

SEQ ID NO: 776540 - RNA, 19 nt, Homo sapiens
  misc_RNA (1)...(19): siRNA sense strand
cagagcagccuucuccaaa

SEQ ID NO: 776541 - RNA, 19 nt, Homo sapiens
  misc_RNA (1)...(19): siRNA sense strand
cagagaugcugccuaugga

SEQ ID NO: 776542 - RNA, 19 nt, Homo sapiens
  misc_RNA (1)...(19): siRNA sense strand
caaagagugcaucaaaugu

SEQ ID NO: 776543 - RNA, 19 nt, Homo sapiens
  misc_RNA (1)...(19): siRNA sense strand
uaaauggggucgagaauca

SEQ ID NO: 776544 - RNA, 19 nt, Homo sapiens
  misc_RNA (1)...(19): siRNA sense strand
gagcagccuucuccaaacu

SEQ ID NO: 776545 - RNA, 19 nt, Homo sapiens
  misc_RNA (1)...(19): siRNA sense strand
aguauggcuuccuuaauuu

SEQ ID NO: 776546 - RNA, 19 nt, Homo sapiens
  misc_RNA (1)...(19): siRNA sense strand
caacucauuuaaccuugau

SEQ ID NO: 776547 - RNA, 19 nt, Homo sapiens
  misc_RNA (1)...(19): siRNA sense strand
ccagaagaagcauauagaa

SEQ ID NO: 776548 - RNA, 19 nt, Homo sapiens
  misc_RNA (1)...(19): siRNA sense strand
cuauggaaguugcaauuuc

SEQ ID NO: 776549 - RNA, 19 nt, Homo sapiens
  misc_RNA (1)...(19): siRNA sense strand
gaaguugcaauuucuacau

SEQ ID NO: 776550 - RNA, 19 nt, Homo sapiens
  misc_RNA (1)...(19): siRNA sense strand
ggagaauggacaacacaga

SEQ ID NO: 776551 - RNA, 19 nt, Homo sapiens
  misc_RNA (1)...(19): siRNA sense strand
cagaagaagcauauagaau

SEQ ID NO: 776552 - RNA, 19 nt, Homo sapiens
  misc_RNA (1)...(19): siRNA sense strand
agaccuggcucggugauug

SEQ ID NO: 776553 - RNA, 19 nt, Homo sapiens
  misc_RNA (1)...(19): siRNA sense strand
agaaggcaaugcaguaugg

SEQ ID NO: 776554 - RNA, 19 nt, Homo sapiens
  misc_RNA (1)...(19): siRNA sense strand
gagacauccuauauuccuu

SEQ ID NO: 776555 - RNA, 19 nt, Homo sapiens
  misc_RNA (1)...(19): siRNA sense strand
gcagccuucuccaaacuuc

SEQ ID NO: 776556 - RNA, 19 nt, Homo sapiens
  misc_RNA (1)...(19): siRNA sense strand
gcaguauggcuuccuuaau

SEQ ID NO: 776557 - RNA, 19 nt, Homo sapiens
  misc_RNA (1)...(19): siRNA sense strand
uauauuccuuucagagaug

SEQ ID NO: 776558 - RNA, 19 nt, Homo sapiens
  misc_RNA (1)...(19): siRNA sense strand
uugcaaagcuggccuuggu

SEQ ID NO: 776559 - RNA, 19 nt, Homo sapiens
  misc_RNA (1)...(19): siRNA sense strand
uauggaaguugcaauuucu

SEQ ID NO: 776560 - RNA, 19 nt, Homo sapiens
  misc_RNA (1)...(19): siRNA sense strand
gaagacaauccaaaacaaa

SEQ ID NO: 776561 - RNA, 19 nt, Homo sapiens
  misc_RNA (1)...(19): siRNA sense strand
cuagauaucugugaaaaug

SEQ ID NO: 776562 - RNA, 19 nt, Homo sapiens
  misc_RNA (1)...(19): siRNA sense strand
cugaugccauugucaaaga

SEQ ID NO: 776563 - RNA, 19 nt, Homo sapiens
  misc_RNA (1)...(19): siRNA sense strand
gaugcugccuauggaaguu

SEQ ID NO: 776564 - RNA, 19 nt, Homo sapiens
  misc_RNA (1)...(19): siRNA sense strand
gcaggagaauggacaacac

SEQ ID NO: 776565 - RNA, 19 nt, Homo sapiens
  misc_RNA (1)...(19): siRNA sense strand
caaaugcugccuuccuugu

SEQ ID NO: 776566 - RNA, 19 nt, Homo sapiens
  misc_RNA (1)...(19): siRNA sense strand
ugucaaagaauuccuagau

SEQ ID NO: 776567 - RNA, 19 nt, Homo sapiens
  misc_RNA (1)...(19): siRNA sense strand
uaugaugccaaacgcuuua

SEQ ID NO: 776568 - RNA, 19 nt, Homo sapiens
  misc_RNA (1)...(19): siRNA sense strand
ucagagaugcugccuaugg

SEQ ID NO: 776569 - RNA, 19 nt, Homo sapiens
  misc_RNA (1)...(19): siRNA sense strand
ccugagacuuauauucaau

SEQ ID NO: 776570 - RNA, 19 nt, Homo sapiens
  misc_RNA (1)...(19): siRNA sense strand
ggauaauaccagaccgauu

SEQ ID NO: 776571 - RNA, 19 nt, Homo sapiens
  misc_RNA (1)...(19): siRNA sense strand
cagauauuguugcaagauc

SEQ ID NO: 776572 - RNA, 19 nt, Homo sapiens
  misc_RNA (1)...(19): siRNA sense strand
auaccagaccgauuuauug

SEQ ID NO: 776573 - RNA, 19 nt, Homo sapiens
  misc_RNA (1)...(19): siRNA sense strand
cuauauuccuuucagagau

SEQ ID NO: 776574 - RNA, 19 nt, Homo sapiens
  misc_RNA (1)...(19): siRNA sense strand
aaugcugccuuccuuguug

SEQ ID NO: 776575 - RNA, 19 nt, Homo sapiens
  misc_RNA (1)...(19): siRNA sense strand
ggaaguugcaauuucuaca

SEQ ID NO: 776576 - RNA, 19 nt, Homo sapiens
  misc_RNA (1)...(19): siRNA sense strand
gacagcagccgagaccauu

SEQ ID NO: 776577 - RNA, 19 nt, Homo sapiens
  misc_RNA (1)...(19): siRNA sense strand
cuguggaccucauucaaga

SEQ ID NO: 776578 - RNA, 19 nt, Homo sapiens
  misc_RNA (1)...(19): siRNA sense strand
gacgaaaucaauggaguga

SEQ ID NO: 776579 - RNA, 19 nt, Homo sapiens
  misc_RNA (1)...(19): siRNA sense strand
ucaaucuggcaaugguuua

SEQ ID NO: 776580 - RNA, 19 nt, Homo sapiens
  misc_RNA (1)...(19): siRNA sense strand
aagcagaagacaauccaaa

SEQ ID NO: 776581 - RNA, 19 nt, Homo sapiens
  misc_RNA (1)...(19): siRNA sense strand
cauuacacuucuugacugu

SEQ ID NO: 776582 - RNA, 19 nt, Homo sapiens
  misc_RNA (1)...(19): siRNA sense strand
gacauccuauauuccuuuc

SEQ ID NO: 776583 - RNA, 19 nt, Homo sapiens
  misc_RNA (1)...(19): siRNA sense strand
agacauccuauauuccuuu

SEQ ID NO: 776584 - RNA, 19 nt, Homo sapiens
  misc_RNA (1)...(19): siRNA sense strand
agauauuguugcaagauca

SEQ ID NO: 776585 - RNA, 19 nt, Homo sapiens
  misc_RNA (1)...(19): siRNA sense strand
ggucgagaaucaagaucag

SEQ ID NO: 776586 - RNA, 19 nt, Homo sapiens
  misc_RNA (1)...(19): siRNA sense strand
ucaugaagcauuacaggau

SEQ ID NO: 776587 - RNA, 19 nt, Homo sapiens
  misc_RNA (1)...(19): siRNA sense strand
gacaucaccgaucgccuuu

SEQ ID NO: 776588 - RNA, 19 nt, Homo sapiens
  misc_RNA (1)...(19): siRNA sense strand
aagagugcaucaaauguac

SEQ ID NO: 776589 - RNA, 19 nt, Homo sapiens
  misc_RNA (1)...(19): siRNA sense strand
cauccuauauuccuuucag

SEQ ID NO: 776590 - RNA, 19 nt, Homo sapiens
  misc_RNA (1)...(19): siRNA sense strand
ugagggugccauugcagua

SEQ ID NO: 776591 - RNA, 19 nt, Homo sapiens
  misc_RNA (1)...(19): siRNA sense strand
ucaccaugaucuuuucuuu

SEQ ID NO: 776592 - RNA, 19 nt, Homo sapiens
  misc_RNA (1)...(19): siRNA sense strand
aaagaaggcaaugcaguau

SEQ ID NO: 776593 - RNA, 19 nt, Homo sapiens
  misc_RNA (1)...(19): siRNA sense strand
gauauuguugcaagaucaa

SEQ ID NO: 776594 - RNA, 19 nt, Homo sapiens
  misc_RNA (1)...(19): siRNA sense strand
cagugaugaugacgaaauc

SEQ ID NO: 776595 - RNA, 19 nt, Homo sapiens
  misc_RNA (1)...(19): siRNA sense strand
auaauaccagaccgauuua

SEQ ID NO: 776596 - RNA, 19 nt, Homo sapiens
  misc_RNA (1)...(19): siRNA sense strand
gcagcuccacgcagcaaga

SEQ ID NO: 776597 - RNA, 19 nt, Homo sapiens
  misc_RNA (1)...(19): siRNA sense strand
gaaccguacagugaugaug

SEQ ID NO: 776598 - RNA, 19 nt, Homo sapiens
  misc_RNA (1)...(19): siRNA sense strand
cuacugaugccauugucaa

SEQ ID NO: 776599 - RNA, 19 nt, Homo sapiens
  misc_RNA (1)...(19): siRNA sense strand
uuggagagacauccuauau

SEQ ID NO: 776600 - RNA, 19 nt, Homo sapiens
  misc_RNA (1)...(19): siRNA sense strand
aagaauuccuagauaucug

SEQ ID NO: 776601 - RNA, 19 nt, Homo sapiens
  misc_RNA (1)...(19): siRNA sense strand
ugaugccauugucaaagaa

SEQ ID NO: 776602 - RNA, 19 nt, Homo sapiens
  misc_RNA (1)...(19): siRNA sense strand
accaaagagugcaucaaau

SEQ ID NO: 776603 - RNA, 19 nt, Homo sapiens
  misc_RNA (1)...(19): siRNA sense strand
ccuauauuccuuucagaga

SEQ ID NO: 776604 - RNA, 19 nt, Homo sapiens
  misc_RNA (1)...(19): siRNA sense strand
guuuacagauauuguugca

SEQ ID NO: 776605 - RNA, 19 nt, Homo sapiens
  misc_RNA (1)...(19): siRNA sense strand
uggagagacauccuauauu

SEQ ID NO: 776606 - RNA, 19 nt, Homo sapiens
  misc_RNA (1)...(19): siRNA sense strand
gccuauggaaguugcaauu

SEQ ID NO: 776607 - RNA, 19 nt, Homo sapiens
  misc_RNA (1)...(19): siRNA sense strand
guugcaauuucuacauuac

SEQ ID NO: 776608 - RNA, 19 nt, Homo sapiens
  misc_RNA (1)...(19): siRNA sense strand
agaagacaauccaaaacaa

SEQ ID NO: 776609 - RNA, 19 nt, Homo sapiens
  misc_RNA (1)...(19): siRNA sense strand
ggagagacauccuauauuc

SEQ ID NO: 776610 - RNA, 19 nt, Homo sapiens
  misc_RNA (1)...(19): siRNA sense strand
gauaauaccagaccgauuu

SEQ ID NO: 776611 - RNA, 19 nt, Homo sapiens
  misc_RNA (1)...(19): siRNA sense strand
gaugcuacaugguuauaua

SEQ ID NO: 776612 - RNA, 19 nt, Homo sapiens
  misc_RNA (1)...(19): siRNA sense strand
caguauggcuuccuuaauu

SEQ ID NO: 776613 - RNA, 19 nt, Homo sapiens
  misc_RNA (1)...(19): siRNA sense strand
cagcauagauaaugaacuu

SEQ ID NO: 776614 - RNA, 19 nt, Homo sapiens
  misc_RNA (1)...(19): siRNA sense strand
gaaucaagaucagcaagaa

SEQ ID NO: 776615 - RNA, 19 nt, Homo sapiens
  misc_RNA (1)...(19): siRNA sense strand
guacagugaugaugacgaa

SEQ ID NO: 776616 - RNA, 19 nt, Homo sapiens
  misc_RNA (1)...(19): siRNA sense strand
gcaaugguuuacagauauu

SEQ ID NO: 776617 - RNA, 19 nt, Homo sapiens
  misc_RNA (1)...(19): siRNA sense strand
gucaaagaauuccuagaua

SEQ ID NO: 776618 - RNA, 19 nt, Homo sapiens
  misc_RNA (1)...(19): siRNA sense strand
uaaagaaggcaaugcagua

SEQ ID NO: 776619 - RNA, 19 nt, Homo sapiens
  misc_RNA (1)...(19): siRNA sense strand
gaccaaagagugcaucaaa

SEQ ID NO: 776620 - RNA, 19 nt, Homo sapiens
  misc_RNA (1)...(19): siRNA sense strand
gcuacaucaugaagcauua

SEQ ID NO: 776621 - RNA, 19 nt, Homo sapiens
  misc_RNA (1)...(19): siRNA sense strand
ggcaaugguuuacagauau

SEQ ID NO: 776622 - RNA, 19 nt, Homo sapiens
  misc_RNA (1)...(19): siRNA sense strand
uggcaaugguuuacagaua

SEQ ID NO: 776623 - RNA, 19 nt, Homo sapiens
  misc_RNA (1)...(19): siRNA sense strand
cgaaaucaauggagugaca

SEQ ID NO: 776624 - RNA, 19 nt, Homo sapiens
  misc_RNA (1)...(19): siRNA sense strand
guugcaagaucaauaagaa

SEQ ID NO: 776625 - RNA, 19 nt, Homo sapiens
  misc_RNA (1)...(19): siRNA sense strand
uuacacuucuugacuguuu

SEQ ID NO: 776626 - RNA, 19 nt, Homo sapiens
  misc_RNA (1)...(19): siRNA sense strand
ccaaagagugcaucaaaug

SEQ ID NO: 776627 - RNA, 19 nt, Homo sapiens
  misc_RNA (1)...(19): siRNA sense strand
gacacaaggugauagacuu

SEQ ID NO: 776628 - RNA, 19 nt, Homo sapiens
  misc_RNA (1)...(19): siRNA sense strand
guacauuauuucagcauag

SEQ ID NO: 776629 - RNA, 19 nt, Homo sapiens
  misc_RNA (1)...(19): siRNA sense strand
guuggaugcuacaugguua

SEQ ID NO: 776630 - RNA, 19 nt, Homo sapiens
  misc_RNA (1)...(19): siRNA sense strand
gcauagauaaugaacuuga

SEQ ID NO: 776631 - RNA, 19 nt, Homo sapiens
  misc_RNA (1)...(19): siRNA sense strand
aaagagugcaucaaaugua

SEQ ID NO: 776632 - RNA, 19 nt, Homo sapiens
  misc_RNA (1)...(19): siRNA sense strand
gaacuucuacgcagauuuu

SEQ ID NO: 776633 - RNA, 19 nt, Homo sapiens
  misc_RNA (1)...(19): siRNA sense strand
guugaugacauuuccauaa

SEQ ID NO: 776634 - RNA, 19 nt, Homo sapiens
  misc_RNA (1)...(19): siRNA sense strand
uuucagagaugcugccuau

SEQ ID NO: 776635 - RNA, 19 nt, Homo sapiens
  misc_RNA (1)...(19): siRNA sense strand
ggagugacacaaggugaua

SEQ ID NO: 776636 - RNA, 19 nt, Homo sapiens
  misc_RNA (1)...(19): siRNA sense strand
caaagaauuccuagauauc

SEQ ID NO: 776637 - RNA, 19 nt, Homo sapiens
  misc_RNA (1)...(19): siRNA sense strand
ucaccgaucgccuuuguuu

SEQ ID NO: 776638 - RNA, 19 nt, Homo sapiens
  misc_RNA (1)...(19): siRNA sense strand
caucaccgaucgccuuugu

SEQ ID NO: 776639 - RNA, 19 nt, Homo sapiens
  misc_RNA (1)...(19): siRNA sense strand
gaacuugaauaugagaacu

SEQ ID NO: 776640 - RNA, 19 nt, Homo sapiens
  misc_RNA (1)...(19): siRNA sense strand
cagagcagccuucuccaaa

SEQ ID NO: 776641 - RNA, 19 nt, Homo sapiens
  misc_RNA (1)...(19): siRNA sense strand
cagagaugcugccuaugga

SEQ ID NO: 776642 - RNA, 19 nt, Homo sapiens
  misc_RNA (1)...(19): siRNA sense strand
caaagagugcaucaaaugu

SEQ ID NO: 776643 - RNA, 19 nt, Homo sapiens
  misc_RNA (1)...(19): siRNA sense strand
uaaauggggucgagaauca

SEQ ID NO: 776644 - RNA, 19 nt, Homo sapiens
  misc_RNA (1)...(19): siRNA sense strand
gagcagccuucuccaaacu

SEQ ID NO: 776645 - RNA, 19 nt, Homo sapiens
  misc_RNA (1)...(19): siRNA sense strand
aguauggcuuccuuaauuu

SEQ ID NO: 776646 - RNA, 19 nt, Homo sapiens
  misc_RNA (1)...(19): siRNA sense strand
caacucauuuaaccuugau

SEQ ID NO: 776647 - RNA, 19 nt, Homo sapiens
  misc_RNA (1)...(19): siRNA sense strand
ccagaagaagcauauagaa

SEQ ID NO: 776648 - RNA, 19 nt, Homo sapiens
  misc_RNA (1)...(19): siRNA sense strand
cuauggaaguugcaauuuc

SEQ ID NO: 776649 - RNA, 19 nt, Homo sapiens
  misc_RNA (1)...(19): siRNA sense strand
gaaguugcaauuucuacau

SEQ ID NO: 776650 - RNA, 19 nt, Homo sapiens
  misc_RNA (1)...(19): siRNA sense strand
ggagaauggacaacacaga

SEQ ID NO: 776651 - RNA, 19 nt, Homo sapiens
  misc_RNA (1)...(19): siRNA sense strand
cagaagaagcauauagaau

SEQ ID NO: 776652 - RNA, 19 nt, Homo sapiens
  misc_RNA (1)...(19): siRNA sense strand
agaccuggcucggugauug

SEQ ID NO: 776653 - RNA, 19 nt, Homo sapiens
  misc_RNA (1)...(19): siRNA sense strand
agaaggcaaugcaguaugg

SEQ ID NO: 776654 - RNA, 19 nt, Homo sapiens
  misc_RNA (1)...(19): siRNA sense strand
gagacauccuauauuccuu

SEQ ID NO: 776655 - RNA, 19 nt, Homo sapiens
  misc_RNA (1)...(19): siRNA sense strand
gcagccuucuccaaacuuc

SEQ ID NO: 776656 - RNA, 19 nt, Homo sapiens
  misc_RNA (1)...(19): siRNA sense strand
gcaguauggcuuccuuaau

SEQ ID NO: 776657 - RNA, 19 nt, Homo sapiens
  misc_RNA (1)...(19): siRNA sense strand
uauauuccuuucagagaug

SEQ ID NO: 776658 - RNA, 19 nt, Homo sapiens
  misc_RNA (1)...(19): siRNA sense strand
uugcaaagcuggccuuggu

SEQ ID NO: 776659 - RNA, 19 nt, Homo sapiens
  misc_RNA (1)...(19): siRNA sense strand
uauggaaguugcaauuucu

SEQ ID NO: 776660 - RNA, 19 nt, Homo sapiens
  misc_RNA (1)...(19): siRNA sense strand
gaagacaauccaaaacaaa

SEQ ID NO: 776661 - RNA, 19 nt, Homo sapiens
  misc_RNA (1)...(19): siRNA sense strand
cuagauaucugugaaaaug

SEQ ID NO: 776662 - RNA, 19 nt, Homo sapiens
  misc_RNA (1)...(19): siRNA sense strand
cugaugccauugucaaaga

SEQ ID NO: 776663 - RNA, 19 nt, Homo sapiens
  misc_RNA (1)...(19): siRNA sense strand
gaugcugccuauggaaguu

SEQ ID NO: 776664 - RNA, 19 nt, Homo sapiens
  misc_RNA (1)...(19): siRNA sense strand
gcaggagaauggacaacac

SEQ ID NO: 776665 - RNA, 19 nt, Homo sapiens
  misc_RNA (1)...(19): siRNA sense strand
caaaugcugccuuccuugu

SEQ ID NO: 776666 - RNA, 19 nt, Homo sapiens
  misc_RNA (1)...(19): siRNA sense strand
ugucaaagaauuccuagau

SEQ ID NO: 776667 - RNA, 19 nt, Homo sapiens
  misc_RNA (1)...(19): siRNA sense strand
uaugaugccaaacgcuuua

SEQ ID NO: 776668 - RNA, 19 nt, Homo sapiens
  misc_RNA (1)...(19): siRNA sense strand
ucagagaugcugccuaugg

SEQ ID NO: 776669 - RNA, 19 nt, Homo sapiens
  misc_RNA (1)...(19): siRNA sense strand
ccugagacuuauauucaau

SEQ ID NO: 776670 - RNA, 19 nt, Homo sapiens
  misc_RNA (1)...(19): siRNA sense strand
ggauaauaccagaccgauu

SEQ ID NO: 776671 - RNA, 19 nt, Homo sapiens
  misc_RNA (1)...(19): siRNA sense strand
cagauauuguugcaagauc

SEQ ID NO: 776672 - RNA, 19 nt, Homo sapiens
  misc_RNA (1)...(19): siRNA sense strand
auaccagaccgauuuauug

SEQ ID NO: 776673 - RNA, 19 nt, Homo sapiens
  misc_RNA (1)...(19): siRNA sense strand
cuauauuccuuucagagau

SEQ ID NO: 776674 - RNA, 19 nt, Homo sapiens
  misc_RNA (1)...(19): siRNA sense strand
aaugcugccuuccuuguug

SEQ ID NO: 776675 - RNA, 19 nt, Homo sapiens
  misc_RNA (1)...(19): siRNA sense strand
ggaaguugcaauuucuaca

SEQ ID NO: 776676 - RNA, 19 nt, Homo sapiens
  misc_RNA (1)...(19): siRNA sense strand
gacagcagccgagaccauu

SEQ ID NO: 776677 - RNA, 19 nt, Homo sapiens
  misc_RNA (1)...(19): siRNA sense strand
cuguggaccucauucaaga

SEQ ID NO: 776678 - RNA, 19 nt, Homo sapiens
  misc_RNA (1)...(19): siRNA sense strand
gacgaaaucaauggaguga

SEQ ID NO: 776679 - RNA, 19 nt, Homo sapiens
  misc_RNA (1)...(19): siRNA sense strand
ucaaucuggcaaugguuua

SEQ ID NO: 776680 - RNA, 19 nt, Homo sapiens
  misc_RNA (1)...(19): siRNA sense strand
aagcagaagacaauccaaa

SEQ ID NO: 776681 - RNA, 19 nt, Homo sapiens
  misc_RNA (1)...(19): siRNA sense strand
cauuacacuucuugacugu

SEQ ID NO: 776682 - RNA, 19 nt, Homo sapiens
  misc_RNA (1)...(19): siRNA sense strand
gacauccuauauuccuuuc

SEQ ID NO: 776683 - RNA, 19 nt, Homo sapiens
  misc_RNA (1)...(19): siRNA sense strand
agacauccuauauuccuuu

SEQ ID NO: 776684 - RNA, 19 nt, Homo sapiens
  misc_RNA (1)...(19): siRNA sense strand
agauauuguugcaagauca

SEQ ID NO: 776685 - RNA, 19 nt, Homo sapiens
  misc_RNA (1)...(19): siRNA sense strand
ggucgagaaucaagaucag

SEQ ID NO: 776686 - RNA, 19 nt, Homo sapiens
  misc_RNA (1)...(19): siRNA sense strand
ucaugaagcauuacaggau

SEQ ID NO: 776687 - RNA, 19 nt, Homo sapiens
  misc_RNA (1)...(19): siRNA sense strand
gacaucaccgaucgccuuu

SEQ ID NO: 776688 - RNA, 19 nt, Homo sapiens
  misc_RNA (1)...(19): siRNA sense strand
aagagugcaucaaauguac

SEQ ID NO: 776689 - RNA, 19 nt, Homo sapiens
  misc_RNA (1)...(19): siRNA sense strand
cauccuauauuccuuucag

SEQ ID NO: 776690 - RNA, 19 nt, Homo sapiens
  misc_RNA (1)...(19): siRNA sense strand
ugagggugccauugcagua

SEQ ID NO: 776691 - RNA, 19 nt, Homo sapiens
  misc_RNA (1)...(19): siRNA sense strand
ucaccaugaucuuuucuuu

SEQ ID NO: 776692 - RNA, 19 nt, Homo sapiens
  misc_RNA (1)...(19): siRNA sense strand
aaagaaggcaaugcaguau

SEQ ID NO: 776693 - RNA, 19 nt, Homo sapiens
  misc_RNA (1)...(19): siRNA sense strand
gauauuguugcaagaucaa

SEQ ID NO: 776694 - RNA, 19 nt, Homo sapiens
  misc_RNA (1)...(19): siRNA sense strand
cagugaugaugacgaaauc

SEQ ID NO: 776695 - RNA, 19 nt, Homo sapiens
  misc_RNA (1)...(19): siRNA sense strand
auaauaccagaccgauuua

SEQ ID NO: 776696 - RNA, 19 nt, Homo sapiens
  misc_RNA (1)...(19): siRNA sense strand
gcagcuccacgcagcaaga

SEQ ID NO: 776697 - RNA, 19 nt, Homo sapiens
  misc_RNA (1)...(19): siRNA sense strand
gaaccguacagugaugaug

SEQ ID NO: 776698 - RNA, 19 nt, Homo sapiens
  misc_RNA (1)...(19): siRNA sense strand
cuacugaugccauugucaa

SEQ ID NO: 776699 - RNA, 19 nt, Homo sapiens
  misc_RNA (1)...(19): siRNA sense strand
uuggagagacauccuauau

SEQ ID NO: 776700 - RNA, 19 nt, Homo sapiens
  misc_RNA (1)...(19): siRNA sense strand
aagaauuccuagauaucug

SEQ ID NO: 776701 - RNA, 19 nt, Homo sapiens
  misc_RNA (1)...(19): siRNA sense strand
ugaugccauugucaaagaa

SEQ ID NO: 776702 - RNA, 19 nt, Homo sapiens
  misc_RNA (1)...(19): siRNA sense strand
accaaagagugcaucaaau

SEQ ID NO: 776703 - RNA, 19 nt, Homo sapiens
  misc_RNA (1)...(19): siRNA sense strand
ccuauauuccuuucagaga

SEQ ID NO: 776704 - RNA, 19 nt, Homo sapiens
  misc_RNA (1)...(19): siRNA sense strand
guuuacagauauuguugca

SEQ ID NO: 776705 - RNA, 19 nt, Homo sapiens
  misc_RNA (1)...(19): siRNA sense strand
uggagagacauccuauauu

SEQ ID NO: 776706 - RNA, 19 nt, Homo sapiens
  misc_RNA (1)...(19): siRNA sense strand
gccuauggaaguugcaauu

SEQ ID NO: 776707 - RNA, 19 nt, Homo sapiens
  misc_RNA (1)...(19): siRNA sense strand
guugcaauuucuacauuac

SEQ ID NO: 776708 - RNA, 19 nt, Homo sapiens
  misc_RNA (1)...(19): siRNA sense strand
agaagacaauccaaaacaa

SEQ ID NO: 776709 - RNA, 19 nt, Homo sapiens
  misc_RNA (1)...(19): siRNA sense strand
ggagagacauccuauauuc

SEQ ID NO: 776710 - RNA, 19 nt, Homo sapiens
  misc_RNA (1)...(19): siRNA sense strand
gauaauaccagaccgauuu

SEQ ID NO: 776711 - RNA, 19 nt, Homo sapiens
  misc_RNA (1)...(19): siRNA sense strand
gaugcuacaugguuauaua

SEQ ID NO: 776712 - RNA, 19 nt, Homo sapiens
  misc_RNA (1)...(19): siRNA sense strand
caguauggcuuccuuaauu

SEQ ID NO: 776713 - RNA, 19 nt, Homo sapiens
  misc_RNA (1)...(19): siRNA sense strand
cagcauagauaaugaacuu

SEQ ID NO: 776714 - RNA, 19 nt, Homo sapiens
  misc_RNA (1)...(19): siRNA sense strand
gaaucaagaucagcaagaa

SEQ ID NO: 776715 - RNA, 19 nt, Homo sapiens
  misc_RNA (1)...(19): siRNA sense strand
guacagugaugaugacgaa

SEQ ID NO: 776716 - RNA, 19 nt, Homo sapiens
  misc_RNA (1)...(19): siRNA sense strand
gcaaugguuuacagauauu

SEQ ID NO: 776717 - RNA, 19 nt, Homo sapiens
  misc_RNA (1)...(19): siRNA sense strand
gucaaagaauuccuagaua

SEQ ID NO: 776718 - RNA, 19 nt, Homo sapiens
  misc_RNA (1)...(19): siRNA sense strand
uaaagaaggcaaugcagua

SEQ ID NO: 776719 - RNA, 19 nt, Homo sapiens
  misc_RNA (1)...(19): siRNA sense strand
gaccaaagagugcaucaaa

SEQ ID NO: 776720 - RNA, 19 nt, Homo sapiens
  misc_RNA (1)...(19): siRNA sense strand
gcuacaucaugaagcauua

SEQ ID NO: 776721 - RNA, 19 nt, Homo sapiens
  misc_RNA (1)...(19): siRNA sense strand
ggcaaugguuuacagauau

SEQ ID NO: 776722 - RNA, 19 nt, Homo sapiens
  misc_RNA (1)...(19): siRNA sense strand
uggcaaugguuuacagaua

SEQ ID NO: 776723 - RNA, 19 nt, Homo sapiens
  misc_RNA (1)...(19): siRNA sense strand
cgaaaucaauggagugaca

SEQ ID NO: 776724 - RNA, 19 nt, Homo sapiens
  misc_RNA (1)...(19): siRNA sense strand
guugcaagaucaauaagaa

SEQ ID NO: 776725 - RNA, 19 nt, Homo sapiens
  misc_RNA (1)...(19): siRNA sense strand
uuacacuucuugacuguuu

SEQ ID NO: 776726 - RNA, 19 nt, Homo sapiens
  misc_RNA (1)...(19): siRNA sense strand
ccaaagagugcaucaaaug

SEQ ID NO: 776727 - RNA, 19 nt, Homo sapiens
  misc_RNA (1)...(19): siRNA sense strand
gacacaaggugauagacuu

SEQ ID NO: 776728 - RNA, 19 nt, Homo sapiens
  misc_RNA (1)...(19): siRNA sense strand
guacauuauuucagcauag

SEQ ID NO: 776729 - RNA, 19 nt, Homo sapiens
  misc_RNA (1)...(19): siRNA sense strand
guuggaugcuacaugguua

SEQ ID NO: 776730 - RNA, 19 nt, Homo sapiens
  misc_RNA (1)...(19): siRNA sense strand
gcauagauaaugaacuuga

SEQ ID NO: 776731 - RNA, 19 nt, Homo sapiens
  misc_RNA (1)...(19): siRNA sense strand
aaagagugcaucaaaugua

SEQ ID NO: 776732 - RNA, 19 nt, Homo sapiens
  misc_RNA (1)...(19): siRNA sense strand
gaacuucuacgcagauuuu

SEQ ID NO: 776733 - RNA, 19 nt, Homo sapiens
  misc_RNA (1)...(19): siRNA sense strand
guugaugacauuuccauaa

SEQ ID NO: 776734 - RNA, 19 nt, Homo sapiens
  misc_RNA (1)...(19): siRNA sense strand
uuucagagaugcugccuau

SEQ ID NO: 776735 - RNA, 19 nt, Homo sapiens
  misc_RNA (1)...(19): siRNA sense strand
ggagugacacaaggugaua

SEQ ID NO: 776736 - RNA, 19 nt, Homo sapiens
  misc_RNA (1)...(19): siRNA sense strand
caaagaauuccuagauauc

SEQ ID NO: 776737 - RNA, 19 nt, Homo sapiens
  misc_RNA (1)...(19): siRNA sense strand
ucaccgaucgccuuuguuu

SEQ ID NO: 776738 - RNA, 19 nt, Homo sapiens
  misc_RNA (1)...(19): siRNA sense strand
caucaccgaucgccuuugu

SEQ ID NO: 776739 - RNA, 19 nt, Homo sapiens
  misc_RNA (1)...(19): siRNA sense strand
gaacuugaauaugagaacu

SEQ ID NO: 776740 - RNA, 19 nt, Homo sapiens
  misc_RNA (1)...(19): siRNA sense strand
cagagcagccuucuccaaa

SEQ ID NO: 776741 - RNA, 19 nt, Homo sapiens
  misc_RNA (1)...(19): siRNA sense strand
cagagaugcugccuaugga

SEQ ID NO: 776742 - RNA, 19 nt, Homo sapiens
  misc_RNA (1)...(19): siRNA sense strand
caaagagugcaucaaaugu

SEQ ID NO: 776743 - RNA, 19 nt, Homo sapiens
  misc_RNA (1)...(19): siRNA sense strand
uaaauggggucgagaauca

SEQ ID NO: 776744 - RNA, 19 nt, Homo sapiens
  misc_RNA (1)...(19): siRNA sense strand
gagcagccuucuccaaacu

SEQ ID NO: 776745 - RNA, 19 nt, Homo sapiens
  misc_RNA (1)...(19): siRNA sense strand
aguauggcuuccuuaauuu

SEQ ID NO: 776746 - RNA, 19 nt, Homo sapiens
  misc_RNA (1)...(19): siRNA sense strand
caacucauuuaaccuugau

SEQ ID NO: 776747 - RNA, 19 nt, Homo sapiens
  misc_RNA (1)...(19): siRNA sense strand
ccagaagaagcauauagaa

SEQ ID NO: 776748 - RNA, 19 nt, Homo sapiens
  misc_RNA (1)...(19): siRNA sense strand
cuauggaaguugcaauuuc

SEQ ID NO: 776749 - RNA, 19 nt, Homo sapiens
  misc_RNA (1)...(19): siRNA sense strand
gaaguugcaauuucuacau

SEQ ID NO: 776750 - RNA, 19 nt, Homo sapiens
  misc_RNA (1)...(19): siRNA sense strand
ggagaauggacaacacaga

SEQ ID NO: 776751 - RNA, 19 nt, Homo sapiens
  misc_RNA (1)...(19): siRNA sense strand
cagaagaagcauauagaau

SEQ ID NO: 776752 - RNA, 19 nt, Homo sapiens
  misc_RNA (1)...(19): siRNA sense strand
agaccuggcucggugauug

SEQ ID NO: 776753 - RNA, 19 nt, Homo sapiens
  misc_RNA (1)...(19): siRNA sense strand
agaaggcaaugcaguaugg

SEQ ID NO: 776754 - RNA, 19 nt, Homo sapiens
  misc_RNA (1)...(19): siRNA sense strand
gagacauccuauauuccuu

SEQ ID NO: 776755 - RNA, 19 nt, Homo sapiens
  misc_RNA (1)...(19): siRNA sense strand
gcagccuucuccaaacuuc

SEQ ID NO: 776756 - RNA, 19 nt, Homo sapiens
  misc_RNA (1)...(19): siRNA sense strand
gcaguauggcuuccuuaau

SEQ ID NO: 776757 - RNA, 19 nt, Homo sapiens
  misc_RNA (1)...(19): siRNA sense strand
uauauuccuuucagagaug

SEQ ID NO: 776758 - RNA, 19 nt, Homo sapiens
  misc_RNA (1)...(19): siRNA sense strand
uugcaaagcuggccuuggu

SEQ ID NO: 776759 - RNA, 19 nt, Homo sapiens
  misc_RNA (1)...(19): siRNA sense strand
uauggaaguugcaauuucu

SEQ ID NO: 776760 - RNA, 19 nt, Homo sapiens
  misc_RNA (1)...(19): siRNA sense strand
gaagacaauccaaaacaaa

SEQ ID NO: 776761 - RNA, 19 nt, Homo sapiens
  misc_RNA (1)...(19): siRNA sense strand
cuagauaucugugaaaaug

SEQ ID NO: 776762 - RNA, 19 nt, Homo sapiens
  misc_RNA (1)...(19): siRNA sense strand
cugaugccauugucaaaga

SEQ ID NO: 776763 - RNA, 19 nt, Homo sapiens
  misc_RNA (1)...(19): siRNA sense strand
gaugcugccuauggaaguu

SEQ ID NO: 776764 - RNA, 19 nt, Homo sapiens
  misc_RNA (1)...(19): siRNA sense strand
gcaggagaauggacaacac

SEQ ID NO: 776765 - RNA, 19 nt, Homo sapiens
  misc_RNA (1)...(19): siRNA sense strand
caaaugcugccuuccuugu

SEQ ID NO: 776766 - RNA, 19 nt, Homo sapiens
  misc_RNA (1)...(19): siRNA sense strand
ugucaaagaauuccuagau

SEQ ID NO: 776767 - RNA, 19 nt, Homo sapiens
  misc_RNA (1)...(19): siRNA sense strand
uaugaugccaaacgcuuua

SEQ ID NO: 776768 - RNA, 19 nt, Homo sapiens
  misc_RNA (1)...(19): siRNA sense strand
ucagagaugcugccuaugg

SEQ ID NO: 776769 - RNA, 19 nt, Homo sapiens
  misc_RNA (1)...(19): siRNA sense strand
ccugagacuuauauucaau

SEQ ID NO: 776770 - RNA, 19 nt, Homo sapiens
  misc_RNA (1)...(19): siRNA sense strand
ggauaauaccagaccgauu

SEQ ID NO: 776771 - RNA, 19 nt, Homo sapiens
  misc_RNA (1)...(19): siRNA sense strand
cagauauuguugcaagauc

SEQ ID NO: 776772 - RNA, 19 nt, Homo sapiens
  misc_RNA (1)...(19): siRNA sense strand
auaccagaccgauuuauug

SEQ ID NO: 776773 - RNA, 19 nt, Homo sapiens
  misc_RNA (1)...(19): siRNA sense strand
cuauauuccuuucagagau

SEQ ID NO: 776774 - RNA, 19 nt, Homo sapiens
  misc_RNA (1)...(19): siRNA sense strand
aaugcugccuuccuuguug

SEQ ID NO: 776775 - RNA, 19 nt, Homo sapiens
  misc_RNA (1)...(19): siRNA sense strand
ggaaguugcaauuucuaca

SEQ ID NO: 776776 - RNA, 19 nt, Homo sapiens
  misc_RNA (1)...(19): siRNA sense strand
gacagcagccgagaccauu

SEQ ID NO: 776777 - RNA, 19 nt, Homo sapiens
  misc_RNA (1)...(19): siRNA sense strand
cuguggaccucauucaaga

SEQ ID NO: 776778 - RNA, 19 nt, Homo sapiens
  misc_RNA (1)...(19): siRNA sense strand
gacgaaaucaauggaguga

SEQ ID NO: 776779 - RNA, 19 nt, Homo sapiens
  misc_RNA (1)...(19): siRNA sense strand
ucaaucuggcaaugguuua

SEQ ID NO: 776780 - RNA, 19 nt, Homo sapiens
  misc_RNA (1)...(19): siRNA sense strand
aagcagaagacaauccaaa

SEQ ID NO: 776781 - RNA, 19 nt, Homo sapiens
  misc_RNA (1)...(19): siRNA sense strand
cauuacacuucuugacugu

SEQ ID NO: 776782 - RNA, 19 nt, Homo sapiens
  misc_RNA (1)...(19): siRNA sense strand
gacauccuauauuccuuuc

SEQ ID NO: 776783 - RNA, 19 nt, Homo sapiens
  misc_RNA (1)...(19): siRNA sense strand
agacauccuauauuccuuu

SEQ ID NO: 776784 - RNA, 19 nt, Homo sapiens
  misc_RNA (1)...(19): siRNA sense strand
agauauuguugcaagauca

SEQ ID NO: 776785 - RNA, 19 nt, Homo sapiens
  misc_RNA (1)...(19): siRNA sense strand
ggucgagaaucaagaucag

SEQ ID NO: 776786 - RNA, 19 nt, Homo sapiens
  misc_RNA (1)...(19): siRNA sense strand
ucaugaagcauuacaggau

SEQ ID NO: 776787 - RNA, 19 nt, Homo sapiens
  misc_RNA (1)...(19): siRNA sense strand
gacaucaccgaucgccuuu

SEQ ID NO: 776788 - RNA, 19 nt, Homo sapiens
  misc_RNA (1)...(19): siRNA sense strand
aagagugcaucaaauguac

SEQ ID NO: 776789 - RNA, 19 nt, Homo sapiens
  misc_RNA (1)...(19): siRNA sense strand
cauccuauauuccuuucag

SEQ ID NO: 776790 - RNA, 19 nt, Homo sapiens
  misc_RNA (1)...(19): siRNA sense strand
ugagggugccauugcagua

SEQ ID NO: 776791 - RNA, 19 nt, Homo sapiens
  misc_RNA (1)...(19): siRNA sense strand
ucaccaugaucuuuucuuu

SEQ ID NO: 776792 - RNA, 19 nt, Homo sapiens
  misc_RNA (1)...(19): siRNA sense strand
aaagaaggcaaugcaguau

SEQ ID NO: 776793 - RNA, 19 nt, Homo sapiens
  misc_RNA (1)...(19): siRNA sense strand
gauauuguugcaagaucaa

SEQ ID NO: 776794 - RNA, 19 nt, Homo sapiens
  misc_RNA (1)...(19): siRNA sense strand
cagugaugaugacgaaauc

SEQ ID NO: 776795 - RNA, 19 nt, Homo sapiens
  misc_RNA (1)...(19): siRNA sense strand
auaauaccagaccgauuua

SEQ ID NO: 776796 - RNA, 19 nt, Homo sapiens
  misc_RNA (1)...(19): siRNA sense strand
gcagcuccacgcagcaaga

SEQ ID NO: 776797 - RNA, 19 nt, Homo sapiens
  misc_RNA (1)...(19): siRNA sense strand
gaaccguacagugaugaug

SEQ ID NO: 776798 - RNA, 19 nt, Homo sapiens
  misc_RNA (1)...(19): siRNA sense strand
cuacugaugccauugucaa

SEQ ID NO: 776799 - RNA, 19 nt, Homo sapiens
  misc_RNA (1)...(19): siRNA sense strand
uuggagagacauccuauau

SEQ ID NO: 776800 - RNA, 19 nt, Homo sapiens
  misc_RNA (1)...(19): siRNA sense strand
aagaauuccuagauaucug

SEQ ID NO: 776801 - RNA, 19 nt, Homo sapiens
  misc_RNA (1)...(19): siRNA sense strand
ugaugccauugucaaagaa

SEQ ID NO: 776802 - RNA, 19 nt, Homo sapiens
  misc_RNA (1)...(19): siRNA sense strand
accaaagagugcaucaaau

SEQ ID NO: 776803 - RNA, 19 nt, Homo sapiens
  misc_RNA (1)...(19): siRNA sense strand
ccuauauuccuuucagaga

SEQ ID NO: 776804 - RNA, 19 nt, Homo sapiens
  misc_RNA (1)...(19): siRNA sense strand
guuuacagauauuguugca

SEQ ID NO: 776805 - RNA, 19 nt, Homo sapiens
  misc_RNA (1)...(19): siRNA sense strand
uggagagacauccuauauu

SEQ ID NO: 776806 - RNA, 19 nt, Homo sapiens
  misc_RNA (1)...(19): siRNA sense strand
gccuauggaaguugcaauu

SEQ ID NO: 776807 - RNA, 19 nt, Homo sapiens
  misc_RNA (1)...(19): siRNA sense strand
guugcaauuucuacauuac

SEQ ID NO: 776808 - RNA, 19 nt, Homo sapiens
  misc_RNA (1)...(19): siRNA sense strand
agaagacaauccaaaacaa

SEQ ID NO: 776809 - RNA, 19 nt, Homo sapiens
  misc_RNA (1)...(19): siRNA sense strand
caacgaaccugucucauuu

SEQ ID NO: 776810 - RNA, 19 nt, Homo sapiens
  misc_RNA (1)...(19): siRNA sense strand
gcaauuaacuuccuaaauc

SEQ ID NO: 776811 - RNA, 19 nt, Homo sapiens
  misc_RNA (1)...(19): siRNA sense strand
gaagaacuacacagauuua

SEQ ID NO: 776812 - RNA, 19 nt, Homo sapiens
  misc_RNA (1)...(19): siRNA sense strand
gaaagcaauuaacuuccua

SEQ ID NO: 776813 - RNA, 19 nt, Homo sapiens
  misc_RNA (1)...(19): siRNA sense strand
gaagauggauacgcuguga

SEQ ID NO: 776814 - RNA, 19 nt, Homo sapiens
  misc_RNA (1)...(19): siRNA sense strand
aaacgauacugguacauuu

SEQ ID NO: 776815 - RNA, 19 nt, Homo sapiens
  misc_RNA (1)...(19): siRNA sense strand
ccucacagcuggaacaauu

SEQ ID NO: 776816 - RNA, 19 nt, Homo sapiens
  misc_RNA (1)...(19): siRNA sense strand
caggaaagauggugaaugu

SEQ ID NO: 776817 - RNA, 19 nt, Homo sapiens
  misc_RNA (1)...(19): siRNA sense strand
gaagaaaucgaaaggauca

SEQ ID NO: 776818 - RNA, 19 nt, Homo sapiens
  misc_RNA (1)...(19): siRNA sense strand
cuacacagauuuagugaug

SEQ ID NO: 776819 - RNA, 19 nt, Homo sapiens
  misc_RNA (1)...(19): siRNA sense strand
gaacaacgaaccugucuca

SEQ ID NO: 776820 - RNA, 19 nt, Homo sapiens
  misc_RNA (1)...(19): siRNA sense strand
gcacgcccauguugauuga

SEQ ID NO: 776821 - RNA, 19 nt, Homo sapiens
  misc_RNA (1)...(19): siRNA sense strand
ccagauaucggaagaagaa

SEQ ID NO: 776822 - RNA, 19 nt, Homo sapiens
  misc_RNA (1)...(19): siRNA sense strand
ugucuucccucaccguuua

SEQ ID NO: 776823 - RNA, 19 nt, Homo sapiens
  misc_RNA (1)...(19): siRNA sense strand
ggaacuggcugaugucacu

SEQ ID NO: 776824 - RNA, 19 nt, Homo sapiens
  misc_RNA (1)...(19): siRNA sense strand
gagcaaccauggugauagu

SEQ ID NO: 776825 - RNA, 19 nt, Homo sapiens
  misc_RNA (1)...(19): siRNA sense strand
cagauugccuggaucaaga

SEQ ID NO: 776826 - RNA, 19 nt, Homo sapiens
  misc_RNA (1)...(19): siRNA sense strand
caauauauaccgcaccuuu

SEQ ID NO: 776827 - RNA, 19 nt, Homo sapiens
  misc_RNA (1)...(19): siRNA sense strand
caagaacugugucaugucu

SEQ ID NO: 776828 - RNA, 19 nt, Homo sapiens
  misc_RNA (1)...(19): siRNA sense strand
gacacaggcagaacuauuu

SEQ ID NO: 776829 - RNA, 19 nt, Homo sapiens
  misc_RNA (1)...(19): siRNA sense strand
gcuacaggcuugcacuaug

SEQ ID NO: 776830 - RNA, 19 nt, Homo sapiens
  misc_RNA (1)...(19): siRNA sense strand
ugaauaaacgauacuggua

SEQ ID NO: 776831 - RNA, 19 nt, Homo sapiens
  misc_RNA (1)...(19): siRNA sense strand
ccgaggaccuggaaccauu

SEQ ID NO: 776832 - RNA, 19 nt, Homo sapiens
  misc_RNA (1)...(19): siRNA sense strand
gauuacacgugccucuuga

SEQ ID NO: 776833 - RNA, 19 nt, Homo sapiens
  misc_RNA (1)...(19): siRNA sense strand
uaccugagauucgauauau

SEQ ID NO: 776834 - RNA, 19 nt, Homo sapiens
  misc_RNA (1)...(19): siRNA sense strand
ggcaggaguuugaggaaga

SEQ ID NO: 776835 - RNA, 19 nt, Homo sapiens
  misc_RNA (1)...(19): siRNA sense strand
acacagauuuagugaugaa

SEQ ID NO: 776836 - RNA, 19 nt, Homo sapiens
  misc_RNA (1)...(19): siRNA sense strand
aagaagaaaucgaaaggau

SEQ ID NO: 776837 - RNA, 19 nt, Homo sapiens
  misc_RNA (1)...(19): siRNA sense strand
ucaccaggcuccacacugu

SEQ ID NO: 776838 - RNA, 19 nt, Homo sapiens
  misc_RNA (1)...(19): siRNA sense strand
gcucaaaugccuccagaug

SEQ ID NO: 776839 - RNA, 19 nt, Homo sapiens
  misc_RNA (1)...(19): siRNA sense strand
gcccuccgaugaagaacua

SEQ ID NO: 776840 - RNA, 19 nt, Homo sapiens
  misc_RNA (1)...(19): siRNA sense strand
gagcuaauccugcugucuu

SEQ ID NO: 776841 - RNA, 19 nt, Homo sapiens
  misc_RNA (1)...(19): siRNA sense strand
augaagaacuacacagauu

SEQ ID NO: 776842 - RNA, 19 nt, Homo sapiens
  misc_RNA (1)...(19): siRNA sense strand
caugaaagcaauuaacuuc

SEQ ID NO: 776843 - RNA, 19 nt, Homo sapiens
  misc_RNA (1)...(19): siRNA sense strand
guaggucuguggaacugaa

SEQ ID NO: 776844 - RNA, 19 nt, Homo sapiens
  misc_RNA (1)...(19): siRNA sense strand
caacaaacggguauaucga

SEQ ID NO: 776845 - RNA, 19 nt, Homo sapiens
  misc_RNA (1)...(19): siRNA sense strand
ggaagaagaaaucgaaagg

SEQ ID NO: 776846 - RNA, 19 nt, Homo sapiens
  misc_RNA (1)...(19): siRNA sense strand
gaagaagaaaucgaaagga

SEQ ID NO: 776847 - RNA, 19 nt, Homo sapiens
  misc_RNA (1)...(19): siRNA sense strand
ugaagaacuacacagauuu

SEQ ID NO: 776848 - RNA, 19 nt, Homo sapiens
  misc_RNA (1)...(19): siRNA sense strand
acaacgaaccugucucauu

SEQ ID NO: 776849 - RNA, 19 nt, Homo sapiens
  misc_RNA (1)...(19): siRNA sense strand
gaaaucgaaaggaucaugu

SEQ ID NO: 776850 - RNA, 19 nt, Homo sapiens
  misc_RNA (1)...(19): siRNA sense strand
gcaacaaacggguauaucg

SEQ ID NO: 776851 - RNA, 19 nt, Homo sapiens
  misc_RNA (1)...(19): siRNA sense strand
ccgaaccgcuuuccugauc

SEQ ID NO: 776852 - RNA, 19 nt, Homo sapiens
  misc_RNA (1)...(19): siRNA sense strand
gcaaccauggugauaguga

SEQ ID NO: 776853 - RNA, 19 nt, Homo sapiens
  misc_RNA (1)...(19): siRNA sense strand
gcaugaaagcaauuaacuu

SEQ ID NO: 776854 - RNA, 19 nt, Homo sapiens
  misc_RNA (1)...(19): siRNA sense strand
ucaucuaccucuaucacaa

SEQ ID NO: 776855 - RNA, 19 nt, Homo sapiens
  misc_RNA (1)...(19): siRNA sense strand
gaacuauuugcccugcuuu

SEQ ID NO: 776856 - RNA, 19 nt, Homo sapiens
  misc_RNA (1)...(19): siRNA sense strand
caaguuccaucagcuaaag

SEQ ID NO: 776857 - RNA, 19 nt, Homo sapiens
  misc_RNA (1)...(19): siRNA sense strand
ggauuacacgugccucuug

SEQ ID NO: 776858 - RNA, 19 nt, Homo sapiens
  misc_RNA (1)...(19): siRNA sense strand
cagcuggaacaauugaaua

SEQ ID NO: 776859 - RNA, 19 nt, Homo sapiens
  misc_RNA (1)...(19): siRNA sense strand
ccacauuaccaauauauac

SEQ ID NO: 776860 - RNA, 19 nt, Homo sapiens
  misc_RNA (1)...(19): siRNA sense strand
ccugagauucgauauauug

SEQ ID NO: 776861 - RNA, 19 nt, Homo sapiens
  misc_RNA (1)...(19): siRNA sense strand
uaaacgauacugguacauu

SEQ ID NO: 776862 - RNA, 19 nt, Homo sapiens
  misc_RNA (1)...(19): siRNA sense strand
ugacacaggcagaacuauu

SEQ ID NO: 776863 - RNA, 19 nt, Homo sapiens
  misc_RNA (1)...(19): siRNA sense strand
cuacaggcuugcacuaugg

SEQ ID NO: 776864 - RNA, 19 nt, Homo sapiens
  misc_RNA (1)...(19): siRNA sense strand
cuaccucuaucacaaguuc

SEQ ID NO: 776865 - RNA, 19 nt, Homo sapiens
  misc_RNA (1)...(19): siRNA sense strand
gaugaagaacuacacagau

SEQ ID NO: 776866 - RNA, 19 nt, Homo sapiens
  misc_RNA (1)...(19): siRNA sense strand
gauaucggaagaagaaauc

SEQ ID NO: 776867 - RNA, 19 nt, Homo sapiens
  misc_RNA (1)...(19): siRNA sense strand
gccaggauuuuacugaaua

SEQ ID NO: 776868 - RNA, 19 nt, Homo sapiens
  misc_RNA (1)...(19): siRNA sense strand
gagcuugacccaggcacua

SEQ ID NO: 776869 - RNA, 19 nt, Homo sapiens
  misc_RNA (1)...(19): siRNA sense strand
uagcuauucuggccacuca

SEQ ID NO: 776870 - RNA, 19 nt, Homo sapiens
  misc_RNA (1)...(19): siRNA sense strand
ucugcgagcucucaaucaa

SEQ ID NO: 776871 - RNA, 19 nt, Homo sapiens
  misc_RNA (1)...(19): siRNA sense strand
gugcuuaccugagauucga

SEQ ID NO: 776872 - RNA, 19 nt, Homo sapiens
  misc_RNA (1)...(19): siRNA sense strand
gaaccgcuuuccugaucuc

SEQ ID NO: 776873 - RNA, 19 nt, Homo sapiens
  misc_RNA (1)...(19): siRNA sense strand
ucacaaguuccaucagcua

SEQ ID NO: 776874 - RNA, 19 nt, Homo sapiens
  misc_RNA (1)...(19): siRNA sense strand
guacucgcccuccgaugaa

SEQ ID NO: 776875 - RNA, 19 nt, Homo sapiens
  misc_RNA (1)...(19): siRNA sense strand
uuaagguggugcugcauuc

SEQ ID NO: 776876 - RNA, 19 nt, Homo sapiens
  misc_RNA (1)...(19): siRNA sense strand
ggaucaagaaacugccuuu

SEQ ID NO: 776877 - RNA, 19 nt, Homo sapiens
  misc_RNA (1)...(19): siRNA sense strand
ccgcuuuccugaucucaug

SEQ ID NO: 776878 - RNA, 19 nt, Homo sapiens
  misc_RNA (1)...(19): siRNA sense strand
gaugcagucgugacaagaa

SEQ ID NO: 776879 - RNA, 19 nt, Homo sapiens
  misc_RNA (1)...(19): siRNA sense strand
aauaaacgauacugguaca

SEQ ID NO: 776880 - RNA, 19 nt, Homo sapiens
  misc_RNA (1)...(19): siRNA sense strand
cuguggaacugaauggauu

SEQ ID NO: 776881 - RNA, 19 nt, Homo sapiens
  misc_RNA (1)...(19): siRNA sense strand
ugaaagcaauuaacuuccu

SEQ ID NO: 776882 - RNA, 19 nt, Homo sapiens
  misc_RNA (1)...(19): siRNA sense strand
cgaugaagaacuacacaga

SEQ ID NO: 776883 - RNA, 19 nt, Homo sapiens
  misc_RNA (1)...(19): siRNA sense strand
gcagauugccuggaucaag

SEQ ID NO: 776884 - RNA, 19 nt, Homo sapiens
  misc_RNA (1)...(19): siRNA sense strand
ccuggaggccggaauaaga

SEQ ID NO: 776885 - RNA, 19 nt, Homo sapiens
  misc_RNA (1)...(19): siRNA sense strand
ugaugucacugccaaguac

SEQ ID NO: 776886 - RNA, 19 nt, Homo sapiens
  misc_RNA (1)...(19): siRNA sense strand
ugaucgggcugaacaacga

SEQ ID NO: 776887 - RNA, 19 nt, Homo sapiens
  misc_RNA (1)...(19): siRNA sense strand
ccuccacauuaccaauaua

SEQ ID NO: 776888 - RNA, 19 nt, Homo sapiens
  misc_RNA (1)...(19): siRNA sense strand
gcaggaaagauggugaaug

SEQ ID NO: 776889 - RNA, 19 nt, Homo sapiens
  misc_RNA (1)...(19): siRNA sense strand
agaacuauuugcccugcuu

SEQ ID NO: 776890 - RNA, 19 nt, Homo sapiens
  misc_RNA (1)...(19): siRNA sense strand
uucgauauauugcaggaaa

SEQ ID NO: 776891 - RNA, 19 nt, Homo sapiens
  misc_RNA (1)...(19): siRNA sense strand
ucacagcuggaacaauuga

SEQ ID NO: 776892 - RNA, 19 nt, Homo sapiens
  misc_RNA (1)...(19): siRNA sense strand
cauguugauugaagaugga

SEQ ID NO: 776893 - RNA, 19 nt, Homo sapiens
  misc_RNA (1)...(19): siRNA sense strand
aaacggguauaucgaugca

SEQ ID NO: 776894 - RNA, 19 nt, Homo sapiens
  misc_RNA (1)...(19): siRNA sense strand
ccagucauacagucugauu

SEQ ID NO: 776895 - RNA, 19 nt, Homo sapiens
  misc_RNA (1)...(19): siRNA sense strand
ggaacaauugaauaaacga

SEQ ID NO: 776896 - RNA, 19 nt, Homo sapiens
  misc_RNA (1)...(19): siRNA sense strand
gcuggaacaauugaauaaa

SEQ ID NO: 776897 - RNA, 19 nt, Homo sapiens
  misc_RNA (1)...(19): siRNA sense strand
cuuccuaaaucaagauauc

SEQ ID NO: 776898 - RNA, 19 nt, Homo sapiens
  misc_RNA (1)...(19): siRNA sense strand
gcauugggccaguccagau

SEQ ID NO: 776899 - RNA, 19 nt, Homo sapiens
  misc_RNA (1)...(19): siRNA sense strand
ggucagcaacgaggaguau

SEQ ID NO: 776900 - RNA, 19 nt, Homo sapiens
  misc_RNA (1)...(19): siRNA sense strand
guacugccgccugcucaaa

SEQ ID NO: 776901 - RNA, 19 nt, Homo sapiens
  misc_RNA (1)...(19): siRNA sense strand
ugucugggcaggaguuuga

SEQ ID NO: 776902 - RNA, 19 nt, Homo sapiens
  misc_RNA (1)...(19): siRNA sense strand
uuccugaucucaugaugug

SEQ ID NO: 776903 - RNA, 19 nt, Homo sapiens
  misc_RNA (1)...(19): siRNA sense strand
gccuccacauuaccaauau

SEQ ID NO: 776904 - RNA, 19 nt, Homo sapiens
  misc_RNA (1)...(19): siRNA sense strand
aagcggagcauuugcaaca

SEQ ID NO: 776905 - RNA, 19 nt, Homo sapiens
  misc_RNA (1)...(19): siRNA sense strand
gcaggaguuugaggaagag

SEQ ID NO: 776906 - RNA, 19 nt, Homo sapiens
  misc_RNA (1)...(19): siRNA sense strand
guccagauaucggaagaag

SEQ ID NO: 776907 - RNA, 19 nt, Homo sapiens
  misc_RNA (1)...(19): siRNA sense strand
augaugugcuuaccugaga

SEQ ID NO: 776908 - RNA, 19 nt, Homo sapiens
  misc_RNA (1)...(19): siRNA sense strand
ggugauagugaccacaguu

SEQ ID NO: 776909 - RNA, 19 nt, Homo sapiens
  misc_RNA (1)...(19): siRNA sense strand
caacgaaccugucucauuu

SEQ ID NO: 776910 - RNA, 19 nt, Homo sapiens
  misc_RNA (1)...(19): siRNA sense strand
gcaauuaacuuccuaaauc

SEQ ID NO: 776911 - RNA, 19 nt, Homo sapiens
  misc_RNA (1)...(19): siRNA sense strand
gaagaacuacacagauuua

SEQ ID NO: 776912 - RNA, 19 nt, Homo sapiens
  misc_RNA (1)...(19): siRNA sense strand
gaaagcaauuaacuuccua

SEQ ID NO: 776913 - RNA, 19 nt, Homo sapiens
  misc_RNA (1)...(19): siRNA sense strand
gaagauggauacgcuguga

SEQ ID NO: 776914 - RNA, 19 nt, Homo sapiens
  misc_RNA (1)...(19): siRNA sense strand
aaacgauacugguacauuu

SEQ ID NO: 776915 - RNA, 19 nt, Homo sapiens
  misc_RNA (1)...(19): siRNA sense strand
ccucacagcuggaacaauu

SEQ ID NO: 776916 - RNA, 19 nt, Homo sapiens
  misc_RNA (1)...(19): siRNA sense strand
caggaaagauggugaaugu

SEQ ID NO: 776917 - RNA, 19 nt, Homo sapiens
  misc_RNA (1)...(19): siRNA sense strand
gaagaaaucgaaaggauca

SEQ ID NO: 776918 - RNA, 19 nt, Homo sapiens
  misc_RNA (1)...(19): siRNA sense strand
cuacacagauuuagugaug

SEQ ID NO: 776919 - RNA, 19 nt, Homo sapiens
  misc_RNA (1)...(19): siRNA sense strand
gaacaacgaaccugucuca

SEQ ID NO: 776920 - RNA, 19 nt, Homo sapiens
  misc_RNA (1)...(19): siRNA sense strand
gcacgcccauguugauuga

SEQ ID NO: 776921 - RNA, 19 nt, Homo sapiens
  misc_RNA (1)...(19): siRNA sense strand
ccagauaucggaagaagaa

SEQ ID NO: 776922 - RNA, 19 nt, Homo sapiens
  misc_RNA (1)...(19): siRNA sense strand
ugucuucccucaccguuua

SEQ ID NO: 776923 - RNA, 19 nt, Homo sapiens
  misc_RNA (1)...(19): siRNA sense strand
ggaacuggcugaugucacu

SEQ ID NO: 776924 - RNA, 19 nt, Homo sapiens
  misc_RNA (1)...(19): siRNA sense strand
gagcaaccauggugauagu

SEQ ID NO: 776925 - RNA, 19 nt, Homo sapiens
  misc_RNA (1)...(19): siRNA sense strand
cagauugccuggaucaaga

SEQ ID NO: 776926 - RNA, 19 nt, Homo sapiens
  misc_RNA (1)...(19): siRNA sense strand
caauauauaccgcaccuuu

SEQ ID NO: 776927 - RNA, 19 nt, Homo sapiens
  misc_RNA (1)...(19): siRNA sense strand
caagaacugugucaugucu

SEQ ID NO: 776928 - RNA, 19 nt, Homo sapiens
  misc_RNA (1)...(19): siRNA sense strand
gacacaggcagaacuauuu

SEQ ID NO: 776929 - RNA, 19 nt, Homo sapiens
  misc_RNA (1)...(19): siRNA sense strand
gcuacaggcuugcacuaug

SEQ ID NO: 776930 - RNA, 19 nt, Homo sapiens
  misc_RNA (1)...(19): siRNA sense strand
ugaauaaacgauacuggua

SEQ ID NO: 776931 - RNA, 19 nt, Homo sapiens
  misc_RNA (1)...(19): siRNA sense strand
ccgaggaccuggaaccauu

SEQ ID NO: 776932 - RNA, 19 nt, Homo sapiens
  misc_RNA (1)...(19): siRNA sense strand
gauuacacgugccucuuga

SEQ ID NO: 776933 - RNA, 19 nt, Homo sapiens
  misc_RNA (1)...(19): siRNA sense strand
uaccugagauucgauauau

SEQ ID NO: 776934 - RNA, 19 nt, Homo sapiens
  misc_RNA (1)...(19): siRNA sense strand
ggcaggaguuugaggaaga

SEQ ID NO: 776935 - RNA, 19 nt, Homo sapiens
  misc_RNA (1)...(19): siRNA sense strand
acacagauuuagugaugaa

SEQ ID NO: 776936 - RNA, 19 nt, Homo sapiens
  misc_RNA (1)...(19): siRNA sense strand
aagaagaaaucgaaaggau

SEQ ID NO: 776937 - RNA, 19 nt, Homo sapiens
  misc_RNA (1)...(19): siRNA sense strand
ucaccaggcuccacacugu

SEQ ID NO: 776938 - RNA, 19 nt, Homo sapiens
  misc_RNA (1)...(19): siRNA sense strand
gcucaaaugccuccagaug

SEQ ID NO: 776939 - RNA, 19 nt, Homo sapiens
  misc_RNA (1)...(19): siRNA sense strand
gcccuccgaugaagaacua

SEQ ID NO: 776940 - RNA, 19 nt, Homo sapiens
  misc_RNA (1)...(19): siRNA sense strand
gagcuaauccugcugucuu

SEQ ID NO: 776941 - RNA, 19 nt, Homo sapiens
  misc_RNA (1)...(19): siRNA sense strand
augaagaacuacacagauu

SEQ ID NO: 776942 - RNA, 19 nt, Homo sapiens
  misc_RNA (1)...(19): siRNA sense strand
caugaaagcaauuaacuuc

SEQ ID NO: 776943 - RNA, 19 nt, Homo sapiens
  misc_RNA (1)...(19): siRNA sense strand
guaggucuguggaacugaa

SEQ ID NO: 776944 - RNA, 19 nt, Homo sapiens
  misc_RNA (1)...(19): siRNA sense strand
caacaaacggguauaucga

SEQ ID NO: 776945 - RNA, 19 nt, Homo sapiens
  misc_RNA (1)...(19): siRNA sense strand
ggaagaagaaaucgaaagg

SEQ ID NO: 776946 - RNA, 19 nt, Homo sapiens
  misc_RNA (1)...(19): siRNA sense strand
gaagaagaaaucgaaagga

SEQ ID NO: 776947 - RNA, 19 nt, Homo sapiens
  misc_RNA (1)...(19): siRNA sense strand
ugaagaacuacacagauuu

SEQ ID NO: 776948 - RNA, 19 nt, Homo sapiens
  misc_RNA (1)...(19): siRNA sense strand
acaacgaaccugucucauu

SEQ ID NO: 776949 - RNA, 19 nt, Homo sapiens
  misc_RNA (1)...(19): siRNA sense strand
gaaaucgaaaggaucaugu

SEQ ID NO: 776950 - RNA, 19 nt, Homo sapiens
  misc_RNA (1)...(19): siRNA sense strand
gcaacaaacggguauaucg

SEQ ID NO: 776951 - RNA, 19 nt, Homo sapiens
  misc_RNA (1)...(19): siRNA sense strand
ccgaaccgcuuuccugauc

SEQ ID NO: 776952 - RNA, 19 nt, Homo sapiens
  misc_RNA (1)...(19): siRNA sense strand
gcaaccauggugauaguga

SEQ ID NO: 776953 - RNA, 19 nt, Homo sapiens
  misc_RNA (1)...(19): siRNA sense strand
gcaugaaagcaauuaacuu

SEQ ID NO: 776954 - RNA, 19 nt, Homo sapiens
  misc_RNA (1)...(19): siRNA sense strand
ucaucuaccucuaucacaa

SEQ ID NO: 776955 - RNA, 19 nt, Homo sapiens
  misc_RNA (1)...(19): siRNA sense strand
gaacuauuugcccugcuuu

SEQ ID NO: 776956 - RNA, 19 nt, Homo sapiens
  misc_RNA (1)...(19): siRNA sense strand
caaguuccaucagcuaaag

SEQ ID NO: 776957 - RNA, 19 nt, Homo sapiens
  misc_RNA (1)...(19): siRNA sense strand
ggauuacacgugccucuug

SEQ ID NO: 776958 - RNA, 19 nt, Homo sapiens
  misc_RNA (1)...(19): siRNA sense strand
cagcuggaacaauugaaua

SEQ ID NO: 776959 - RNA, 19 nt, Homo sapiens
  misc_RNA (1)...(19): siRNA sense strand
ccacauuaccaauauauac

SEQ ID NO: 776960 - RNA, 19 nt, Homo sapiens
  misc_RNA (1)...(19): siRNA sense strand
ccugagauucgauauauug

SEQ ID NO: 776961 - RNA, 19 nt, Homo sapiens
  misc_RNA (1)...(19): siRNA sense strand
uaaacgauacugguacauu

SEQ ID NO: 776962 - RNA, 19 nt, Homo sapiens
  misc_RNA (1)...(19): siRNA sense strand
ugacacaggcagaacuauu

SEQ ID NO: 776963 - RNA, 19 nt, Homo sapiens
  misc_RNA (1)...(19): siRNA sense strand
cuacaggcuugcacuaugg

SEQ ID NO: 776964 - RNA, 19 nt, Homo sapiens
  misc_RNA (1)...(19): siRNA sense strand
cuaccucuaucacaaguuc

SEQ ID NO: 776965 - RNA, 19 nt, Homo sapiens
  misc_RNA (1)...(19): siRNA sense strand
gaugaagaacuacacagau

SEQ ID NO: 776966 - RNA, 19 nt, Homo sapiens
  misc_RNA (1)...(19): siRNA sense strand
gauaucggaagaagaaauc

SEQ ID NO: 776967 - RNA, 19 nt, Homo sapiens
  misc_RNA (1)...(19): siRNA sense strand
gccaggauuuuacugaaua

SEQ ID NO: 776968 - RNA, 19 nt, Homo sapiens
  misc_RNA (1)...(19): siRNA sense strand
gagcuugacccaggcacua

SEQ ID NO: 776969 - RNA, 19 nt, Homo sapiens
  misc_RNA (1)...(19): siRNA sense strand
uagcuauucuggccacuca

SEQ ID NO: 776970 - RNA, 19 nt, Homo sapiens
  misc_RNA (1)...(19): siRNA sense strand
ucugcgagcucucaaucaa

SEQ ID NO: 776971 - RNA, 19 nt, Homo sapiens
  misc_RNA (1)...(19): siRNA sense strand
gugcuuaccugagauucga

SEQ ID NO: 776972 - RNA, 19 nt, Homo sapiens
  misc_RNA (1)...(19): siRNA sense strand
gaaccgcuuuccugaucuc

SEQ ID NO: 776973 - RNA, 19 nt, Homo sapiens
  misc_RNA (1)...(19): siRNA sense strand
ucacaaguuccaucagcua

SEQ ID NO: 776974 - RNA, 19 nt, Homo sapiens
  misc_RNA (1)...(19): siRNA sense strand
guacucgcccuccgaugaa

SEQ ID NO: 776975 - RNA, 19 nt, Homo sapiens
  misc_RNA (1)...(19): siRNA sense strand
uuaagguggugcugcauuc

SEQ ID NO: 776976 - RNA, 19 nt, Homo sapiens
  misc_RNA (1)...(19): siRNA sense strand
ggaucaagaaacugccuuu

SEQ ID NO: 776977 - RNA, 19 nt, Homo sapiens
  misc_RNA (1)...(19): siRNA sense strand
ccgcuuuccugaucucaug

SEQ ID NO: 776978 - RNA, 19 nt, Homo sapiens
  misc_RNA (1)...(19): siRNA sense strand
gaugcagucgugacaagaa

SEQ ID NO: 776979 - RNA, 19 nt, Homo sapiens
  misc_RNA (1)...(19): siRNA sense strand
aauaaacgauacugguaca

SEQ ID NO: 776980 - RNA, 19 nt, Homo sapiens
  misc_RNA (1)...(19): siRNA sense strand
cuguggaacugaauggauu

SEQ ID NO: 776981 - RNA, 19 nt, Homo sapiens
  misc_RNA (1)...(19): siRNA sense strand
ugaaagcaauuaacuuccu

SEQ ID NO: 776982 - RNA, 19 nt, Homo sapiens
  misc_RNA (1)...(19): siRNA sense strand
cgaugaagaacuacacaga

SEQ ID NO: 776983 - RNA, 19 nt, Homo sapiens
  misc_RNA (1)...(19): siRNA sense strand
gcagauugccuggaucaag

SEQ ID NO: 776984 - RNA, 19 nt, Homo sapiens
  misc_RNA (1)...(19): siRNA sense strand
ccuggaggccggaauaaga

SEQ ID NO: 776985 - RNA, 19 nt, Homo sapiens
  misc_RNA (1)...(19): siRNA sense strand
ugaugucacugccaaguac

SEQ ID NO: 776986 - RNA, 19 nt, Homo sapiens
  misc_RNA (1)...(19): siRNA sense strand
ugaucgggcugaacaacga

SEQ ID NO: 776987 - RNA, 19 nt, Homo sapiens
  misc_RNA (1)...(19): siRNA sense strand
ccuccacauuaccaauaua

SEQ ID NO: 776988 - RNA, 19 nt, Homo sapiens
  misc_RNA (1)...(19): siRNA sense strand
gcaggaaagauggugaaug

SEQ ID NO: 776989 - RNA, 19 nt, Homo sapiens
  misc_RNA (1)...(19): siRNA sense strand
agaacuauuugcccugcuu

SEQ ID NO: 776990 - RNA, 19 nt, Homo sapiens
  misc_RNA (1)...(19): siRNA sense strand
uucgauauauugcaggaaa

SEQ ID NO: 776991 - RNA, 19 nt, Homo sapiens
  misc_RNA (1)...(19): siRNA sense strand
ucacagcuggaacaauuga

SEQ ID NO: 776992 - RNA, 19 nt, Homo sapiens
  misc_RNA (1)...(19): siRNA sense strand
cauguugauugaagaugga

SEQ ID NO: 776993 - RNA, 19 nt, Homo sapiens
  misc_RNA (1)...(19): siRNA sense strand
aaacggguauaucgaugca

SEQ ID NO: 776994 - RNA, 19 nt, Homo sapiens
  misc_RNA (1)...(19): siRNA sense strand
ccagucauacagucugauu

SEQ ID NO: 776995 - RNA, 19 nt, Homo sapiens
  misc_RNA (1)...(19): siRNA sense strand
ggaacaauugaauaaacga

SEQ ID NO: 776996 - RNA, 19 nt, Homo sapiens
  misc_RNA (1)...(19): siRNA sense strand
gcuggaacaauugaauaaa

SEQ ID NO: 776997 - RNA, 19 nt, Homo sapiens
  misc_RNA (1)...(19): siRNA sense strand
cuuccuaaaucaagauauc

SEQ ID NO: 776998 - RNA, 19 nt, Homo sapiens
  misc_RNA (1)...(19): siRNA sense strand
gcauugggccaguccagau

SEQ ID NO: 776999 - RNA, 19 nt, Homo sapiens
  misc_RNA (1)...(19): siRNA sense strand
ggucagcaacgaggaguau

SEQ ID NO: 777000 - RNA, 19 nt, Homo sapiens
  misc_RNA (1)...(19): siRNA sense strand
guacugccgccugcucaaa

SEQ ID NO: 777001 - RNA, 19 nt, Homo sapiens
  misc_RNA (1)...(19): siRNA sense strand
ugucugggcaggaguuuga

SEQ ID NO: 777002 - RNA, 19 nt, Homo sapiens
  misc_RNA (1)...(19): siRNA sense strand
uuccugaucucaugaugug

SEQ ID NO: 777003 - RNA, 19 nt, Homo sapiens
  misc_RNA (1)...(19): siRNA sense strand
gccuccacauuaccaauau

SEQ ID NO: 777004 - RNA, 19 nt, Homo sapiens
  misc_RNA (1)...(19): siRNA sense strand
aagcggagcauuugcaaca

SEQ ID NO: 777005 - RNA, 19 nt, Homo sapiens
  misc_RNA (1)...(19): siRNA sense strand
gcaggaguuugaggaagag

SEQ ID NO: 777006 - RNA, 19 nt, Homo sapiens
  misc_RNA (1)...(19): siRNA sense strand
guccagauaucggaagaag

SEQ ID NO: 777007 - RNA, 19 nt, Homo sapiens
  misc_RNA (1)...(19): siRNA sense strand
augaugugcuuaccugaga

SEQ ID NO: 777008 - RNA, 19 nt, Homo sapiens
  misc_RNA (1)...(19): siRNA sense strand
ggugauagugaccacaguu

SEQ ID NO: 777009 - RNA, 19 nt, Homo sapiens
  misc_RNA (1)...(19): siRNA sense strand
caacgaaccugucucauuu

SEQ ID NO: 777010 - RNA, 19 nt, Homo sapiens
  misc_RNA (1)...(19): siRNA sense strand
gcaauuaacuuccuaaauc

SEQ ID NO: 777011 - RNA, 19 nt, Homo sapiens
  misc_RNA (1)...(19): siRNA sense strand
gaagaacuacacagauuua

SEQ ID NO: 777012 - RNA, 19 nt, Homo sapiens
  misc_RNA (1)...(19): siRNA sense strand
gaaagcaauuaacuuccua

SEQ ID NO: 777013 - RNA, 19 nt, Homo sapiens
  misc_RNA (1)...(19): siRNA sense strand
gaagauggauacgcuguga

SEQ ID NO: 777014 - RNA, 19 nt, Homo sapiens
  misc_RNA (1)...(19): siRNA sense strand
aaacgauacugguacauuu

SEQ ID NO: 777015 - RNA, 19 nt, Homo sapiens
  misc_RNA (1)...(19): siRNA sense strand
ccucacagcuggaacaauu

SEQ ID NO: 777016 - RNA, 19 nt, Homo sapiens
  misc_RNA (1)...(19): siRNA sense strand
caggaaagauggugaaugu

SEQ ID NO: 777017 - RNA, 19 nt, Homo sapiens
  misc_RNA (1)...(19): siRNA sense strand
gaagaaaucgaaaggauca

SEQ ID NO: 777018 - RNA, 19 nt, Homo sapiens
  misc_RNA (1)...(19): siRNA sense strand
cuacacagauuuagugaug

SEQ ID NO: 777019 - RNA, 19 nt, Homo sapiens
  misc_RNA (1)...(19): siRNA sense strand
gaacaacgaaccugucuca

SEQ ID NO: 777020 - RNA, 19 nt, Homo sapiens
  misc_RNA (1)...(19): siRNA sense strand
gcacgcccauguugauuga

SEQ ID NO: 777021 - RNA, 19 nt, Homo sapiens
  misc_RNA (1)...(19): siRNA sense strand
ccagauaucggaagaagaa

SEQ ID NO: 777022 - RNA, 19 nt, Homo sapiens
  misc_RNA (1)...(19): siRNA sense strand
ugucuucccucaccguuua

SEQ ID NO: 777023 - RNA, 19 nt, Homo sapiens
  misc_RNA (1)...(19): siRNA sense strand
ggaacuggcugaugucacu

SEQ ID NO: 777024 - RNA, 19 nt, Homo sapiens
  misc_RNA (1)...(19): siRNA sense strand
gagcaaccauggugauagu

SEQ ID NO: 777025 - RNA, 19 nt, Homo sapiens
  misc_RNA (1)...(19): siRNA sense strand
cagauugccuggaucaaga

SEQ ID NO: 777026 - RNA, 19 nt, Homo sapiens
  misc_RNA (1)...(19): siRNA sense strand
caauauauaccgcaccuuu

SEQ ID NO: 777027 - RNA, 19 nt, Homo sapiens
  misc_RNA (1)...(19): siRNA sense strand
caagaacugugucaugucu

SEQ ID NO: 777028 - RNA, 19 nt, Homo sapiens
  misc_RNA (1)...(19): siRNA sense strand
gacacaggcagaacuauuu

SEQ ID NO: 777029 - RNA, 19 nt, Homo sapiens
  misc_RNA (1)...(19): siRNA sense strand
gcuacaggcuugcacuaug

SEQ ID NO: 777030 - RNA, 19 nt, Homo sapiens
  misc_RNA (1)...(19): siRNA sense strand
ugaauaaacgauacuggua

SEQ ID NO: 777031 - RNA, 19 nt, Homo sapiens
  misc_RNA (1)...(19): siRNA sense strand
ccgaggaccuggaaccauu

SEQ ID NO: 777032 - RNA, 19 nt, Homo sapiens
  misc_RNA (1)...(19): siRNA sense strand
gauuacacgugccucuuga

SEQ ID NO: 777033 - RNA, 19 nt, Homo sapiens
  misc_RNA (1)...(19): siRNA sense strand
uaccugagauucgauauau

SEQ ID NO: 777034 - RNA, 19 nt, Homo sapiens
  misc_RNA (1)...(19): siRNA sense strand
ggcaggaguuugaggaaga

SEQ ID NO: 777035 - RNA, 19 nt, Homo sapiens
  misc_RNA (1)...(19): siRNA sense strand
acacagauuuagugaugaa

SEQ ID NO: 777036 - RNA, 19 nt, Homo sapiens
  misc_RNA (1)...(19): siRNA sense strand
aagaagaaaucgaaaggau

SEQ ID NO: 777037 - RNA, 19 nt, Homo sapiens
  misc_RNA (1)...(19): siRNA sense strand
ucaccaggcuccacacugu

SEQ ID NO: 777038 - RNA, 19 nt, Homo sapiens
  misc_RNA (1)...(19): siRNA sense strand
gcucaaaugccuccagaug

SEQ ID NO: 777039 - RNA, 19 nt, Homo sapiens
  misc_RNA (1)...(19): siRNA sense strand
gcccuccgaugaagaacua

SEQ ID NO: 777040 - RNA, 19 nt, Homo sapiens
  misc_RNA (1)...(19): siRNA sense strand
gagcuaauccugcugucuu

SEQ ID NO: 777041 - RNA, 19 nt, Homo sapiens
  misc_RNA (1)...(19): siRNA sense strand
augaagaacuacacagauu

SEQ ID NO: 777042 - RNA, 19 nt, Homo sapiens
  misc_RNA (1)...(19): siRNA sense strand
caugaaagcaauuaacuuc

SEQ ID NO: 777043 - RNA, 19 nt, Homo sapiens
  misc_RNA (1)...(19): siRNA sense strand
guaggucuguggaacugaa

SEQ ID NO: 777044 - RNA, 19 nt, Homo sapiens
  misc_RNA (1)...(19): siRNA sense strand
caacaaacggguauaucga

SEQ ID NO: 777045 - RNA, 19 nt, Homo sapiens
  misc_RNA (1)...(19): siRNA sense strand
ggaagaagaaaucgaaagg

SEQ ID NO: 777046 - RNA, 19 nt, Homo sapiens
  misc_RNA (1)...(19): siRNA sense strand
gaagaagaaaucgaaagga

SEQ ID NO: 777047 - RNA, 19 nt, Homo sapiens
  misc_RNA (1)...(19): siRNA sense strand
ugaagaacuacacagauuu

SEQ ID NO: 777048 - RNA, 19 nt, Homo sapiens
  misc_RNA (1)...(19): siRNA sense strand
acaacgaaccugucucauu

SEQ ID NO: 777049 - RNA, 19 nt, Homo sapiens
  misc_RNA (1)...(19): siRNA sense strand
gaaaucgaaaggaucaugu

SEQ ID NO: 777050 - RNA, 19 nt, Homo sapiens
  misc_RNA (1)...(19): siRNA sense strand
gcaacaaacggguauaucg

SEQ ID NO: 777051 - RNA, 19 nt, Homo sapiens
  misc_RNA (1)...(19): siRNA sense strand
ccgaaccgcuuuccugauc

SEQ ID NO: 777052 - RNA, 19 nt, Homo sapiens
  misc_RNA (1)...(19): siRNA sense strand
gcaaccauggugauaguga

SEQ ID NO: 777053 - RNA, 19 nt, Homo sapiens
  misc_RNA (1)...(19): siRNA sense strand
gcaugaaagcaauuaacuu

SEQ ID NO: 777054 - RNA, 19 nt, Homo sapiens
  misc_RNA (1)...(19): siRNA sense strand
ucaucuaccucuaucacaa

SEQ ID NO: 777055 - RNA, 19 nt, Homo sapiens
  misc_RNA (1)...(19): siRNA sense strand
gaacuauuugcccugcuuu

SEQ ID NO: 777056 - RNA, 19 nt, Homo sapiens
  misc_RNA (1)...(19): siRNA sense strand
caaguuccaucagcuaaag

SEQ ID NO: 777057 - RNA, 19 nt, Homo sapiens
  misc_RNA (1)...(19): siRNA sense strand
ggauuacacgugccucuug

SEQ ID NO: 777058 - RNA, 19 nt, Homo sapiens
  misc_RNA (1)...(19): siRNA sense strand
cagcuggaacaauugaaua

SEQ ID NO: 777059 - RNA, 19 nt, Homo sapiens
  misc_RNA (1)...(19): siRNA sense strand
ccacauuaccaauauauac

SEQ ID NO: 777060 - RNA, 19 nt, Homo sapiens
  misc_RNA (1)...(19): siRNA sense strand
ccugagauucgauauauug

SEQ ID NO: 777061 - RNA, 19 nt, Homo sapiens
  misc_RNA (1)...(19): siRNA sense strand
uaaacgauacugguacauu

SEQ ID NO: 777062 - RNA, 19 nt, Homo sapiens
  misc_RNA (1)...(19): siRNA sense strand
ugacacaggcagaacuauu

SEQ ID NO: 777063 - RNA, 19 nt, Homo sapiens
  misc_RNA (1)...(19): siRNA sense strand
cuacaggcuugcacuaugg

SEQ ID NO: 777064 - RNA, 19 nt, Homo sapiens
  misc_RNA (1)...(19): siRNA sense strand
cuaccucuaucacaaguuc

SEQ ID NO: 777065 - RNA, 19 nt, Homo sapiens
  misc_RNA (1)...(19): siRNA sense strand
gaugaagaacuacacagau

SEQ ID NO: 777066 - RNA, 19 nt, Homo sapiens
  misc_RNA (1)...(19): siRNA sense strand
gauaucggaagaagaaauc

SEQ ID NO: 777067 - RNA, 19 nt, Homo sapiens
  misc_RNA (1)...(19): siRNA sense strand
gccaggauuuuacugaaua

SEQ ID NO: 777068 - RNA, 19 nt, Homo sapiens
  misc_RNA (1)...(19): siRNA sense strand
gagcuugacccaggcacua

SEQ ID NO: 777069 - RNA, 19 nt, Homo sapiens
  misc_RNA (1)...(19): siRNA sense strand
uagcuauucuggccacuca

SEQ ID NO: 777070 - RNA, 19 nt, Homo sapiens
  misc_RNA (1)...(19): siRNA sense strand
ucugcgagcucucaaucaa

SEQ ID NO: 777071 - RNA, 19 nt, Homo sapiens
  misc_RNA (1)...(19): siRNA sense strand
gugcuuaccugagauucga

SEQ ID NO: 777072 - RNA, 19 nt, Homo sapiens
  misc_RNA (1)...(19): siRNA sense strand
gaaccgcuuuccugaucuc

SEQ ID NO: 777073 - RNA, 19 nt, Homo sapiens
  misc_RNA (1)...(19): siRNA sense strand
ucacaaguuccaucagcua

SEQ ID NO: 777074 - RNA, 19 nt, Homo sapiens
  misc_RNA (1)...(19): siRNA sense strand
guacucgcccuccgaugaa

SEQ ID NO: 777075 - RNA, 19 nt, Homo sapiens
  misc_RNA (1)...(19): siRNA sense strand
uuaagguggugcugcauuc

SEQ ID NO: 777076 - RNA, 19 nt, Homo sapiens
  misc_RNA (1)...(19): siRNA sense strand
ggaucaagaaacugccuuu

SEQ ID NO: 777077 - RNA, 19 nt, Homo sapiens
  misc_RNA (1)...(19): siRNA sense strand
ccgcuuuccugaucucaug

SEQ ID NO: 777078 - RNA, 19 nt, Homo sapiens
  misc_RNA (1)...(19): siRNA sense strand
gaugcagucgugacaagaa

SEQ ID NO: 777079 - RNA, 19 nt, Homo sapiens
  misc_RNA (1)...(19): siRNA sense strand
aauaaacgauacugguaca

SEQ ID NO: 777080 - RNA, 19 nt, Homo sapiens
  misc_RNA (1)...(19): siRNA sense strand
cuguggaacugaauggauu

SEQ ID NO: 777081 - RNA, 19 nt, Homo sapiens
  misc_RNA (1)...(19): siRNA sense strand
ugaaagcaauuaacuuccu

SEQ ID NO: 777082 - RNA, 19 nt, Homo sapiens
  misc_RNA (1)...(19): siRNA sense strand
cgaugaagaacuacacaga

SEQ ID NO: 777083 - RNA, 19 nt, Homo sapiens
  misc_RNA (1)...(19): siRNA sense strand
gcagauugccuggaucaag

SEQ ID NO: 777084 - RNA, 19 nt, Homo sapiens
  misc_RNA (1)...(19): siRNA sense strand
ccuggaggccggaauaaga

SEQ ID NO: 777085 - RNA, 19 nt, Homo sapiens
  misc_RNA (1)...(19): siRNA sense strand
ugaugucacugccaaguac

SEQ ID NO: 777086 - RNA, 19 nt, Homo sapiens
  misc_RNA (1)...(19): siRNA sense strand
ugaucgggcugaacaacga

SEQ ID NO: 777087 - RNA, 19 nt, Homo sapiens
  misc_RNA (1)...(19): siRNA sense strand
ccuccacauuaccaauaua

SEQ ID NO: 777088 - RNA, 19 nt, Homo sapiens
  misc_RNA (1)...(19): siRNA sense strand
gcaggaaagauggugaaug

SEQ ID NO: 777089 - RNA, 19 nt, Homo sapiens
  misc_RNA (1)...(19): siRNA sense strand
agaacuauuugcccugcuu

SEQ ID NO: 777090 - RNA, 19 nt, Homo sapiens
  misc_RNA (1)...(19): siRNA sense strand
uucgauauauugcaggaaa

SEQ ID NO: 777091 - RNA, 19 nt, Homo sapiens
  misc_RNA (1)...(19): siRNA sense strand
ucacagcuggaacaauuga

SEQ ID NO: 777092 - RNA, 19 nt, Homo sapiens
  misc_RNA (1)...(19): siRNA sense strand
cauguugauugaagaugga

SEQ ID NO: 777093 - RNA, 19 nt, Homo sapiens
  misc_RNA (1)...(19): siRNA sense strand
aaacggguauaucgaugca

SEQ ID NO: 777094 - RNA, 19 nt, Homo sapiens
  misc_RNA (1)...(19): siRNA sense strand
ccagucauacagucugauu

SEQ ID NO: 777095 - RNA, 19 nt, Homo sapiens
  misc_RNA (1)...(19): siRNA sense strand
ggaacaauugaauaaacga

SEQ ID NO: 777096 - RNA, 19 nt, Homo sapiens
  misc_RNA (1)...(19): siRNA sense strand
gcuggaacaauugaauaaa

SEQ ID NO: 777097 - RNA, 19 nt, Homo sapiens
  misc_RNA (1)...(19): siRNA sense strand
cuuccuaaaucaagauauc

SEQ ID NO: 777098 - RNA, 19 nt, Homo sapiens
  misc_RNA (1)...(19): siRNA sense strand
gcauugggccaguccagau

SEQ ID NO: 777099 - RNA, 19 nt, Homo sapiens
  misc_RNA (1)...(19): siRNA sense strand
ggucagcaacgaggaguau

SEQ ID NO: 777100 - RNA, 19 nt, Homo sapiens
  misc_RNA (1)...(19): siRNA sense strand
guacugccgccugcucaaa

SEQ ID NO: 777101 - RNA, 19 nt, Homo sapiens
  misc_RNA (1)...(19): siRNA sense strand
ugucugggcaggaguuuga

SEQ ID NO: 777102 - RNA, 19 nt, Homo sapiens
  misc_RNA (1)...(19): siRNA sense strand
uuccugaucucaugaugug

SEQ ID NO: 777103 - RNA, 19 nt, Homo sapiens
  misc_RNA (1)...(19): siRNA sense strand
gccuccacauuaccaauau

SEQ ID NO: 777104 - RNA, 19 nt, Homo sapiens
  misc_RNA (1)...(19): siRNA sense strand
aagcggagcauuugcaaca

SEQ ID NO: 777105 - RNA, 19 nt, Homo sapiens
  misc_RNA (1)...(19): siRNA sense strand
gcaggaguuugaggaagag

SEQ ID NO: 777106 - RNA, 19 nt, Homo sapiens
  misc_RNA (1)...(19): siRNA sense strand
guccagauaucggaagaag

SEQ ID NO: 777107 - RNA, 19 nt, Homo sapiens
  misc_RNA (1)...(19): siRNA sense strand
augaugugcuuaccugaga

SEQ ID NO: 777108 - RNA, 19 nt, Homo sapiens
  misc_RNA (1)...(19): siRNA sense strand
ggugauagugaccacaguu

SEQ ID NO: 777109 - RNA, 19 nt, Homo sapiens
  misc_RNA (1)...(19): siRNA sense strand
caacgaaccugucucauuu

SEQ ID NO: 777110 - RNA, 19 nt, Homo sapiens
  misc_RNA (1)...(19): siRNA sense strand
gcaauuaacuuccuaaauc

SEQ ID NO: 777111 - RNA, 19 nt, Homo sapiens
  misc_RNA (1)...(19): siRNA sense strand
gaagaacuacacagauuua

SEQ ID NO: 777112 - RNA, 19 nt, Homo sapiens
  misc_RNA (1)...(19): siRNA sense strand
gaaagcaauuaacuuccua

SEQ ID NO: 777113 - RNA, 19 nt, Homo sapiens
  misc_RNA (1)...(19): siRNA sense strand
gaagauggauacgcuguga

SEQ ID NO: 777114 - RNA, 19 nt, Homo sapiens
  misc_RNA (1)...(19): siRNA sense strand
aaacgauacugguacauuu

SEQ ID NO: 777115 - RNA, 19 nt, Homo sapiens
  misc_RNA (1)...(19): siRNA sense strand
ccucacagcuggaacaauu

SEQ ID NO: 777116 - RNA, 19 nt, Homo sapiens
  misc_RNA (1)...(19): siRNA sense strand
caggaaagauggugaaugu

SEQ ID NO: 777117 - RNA, 19 nt, Homo sapiens
  misc_RNA (1)...(19): siRNA sense strand
gaagaaaucgaaaggauca

SEQ ID NO: 777118 - RNA, 19 nt, Homo sapiens
  misc_RNA (1)...(19): siRNA sense strand
cuacacagauuuagugaug

SEQ ID NO: 777119 - RNA, 19 nt, Homo sapiens
  misc_RNA (1)...(19): siRNA sense strand
gaacaacgaaccugucuca

SEQ ID NO: 777120 - RNA, 19 nt, Homo sapiens
  misc_RNA (1)...(19): siRNA sense strand
gcacgcccauguugauuga

SEQ ID NO: 777121 - RNA, 19 nt, Homo sapiens
  misc_RNA (1)...(19): siRNA sense strand
ccagauaucggaagaagaa

SEQ ID NO: 777122 - RNA, 19 nt, Homo sapiens
  misc_RNA (1)...(19): siRNA sense strand
ugucuucccucaccguuua

SEQ ID NO: 777123 - RNA, 19 nt, Homo sapiens
  misc_RNA (1)...(19): siRNA sense strand
ggaacuggcugaugucacu

SEQ ID NO: 777124 - RNA, 19 nt, Homo sapiens
  misc_RNA (1)...(19): siRNA sense strand
gagcaaccauggugauagu

SEQ ID NO: 777125 - RNA, 19 nt, Homo sapiens
  misc_RNA (1)...(19): siRNA sense strand
cagauugccuggaucaaga

SEQ ID NO: 777126 - RNA, 19 nt, Homo sapiens
  misc_RNA (1)...(19): siRNA sense strand
caauauauaccgcaccuuu

SEQ ID NO: 777127 - RNA, 19 nt, Homo sapiens
  misc_RNA (1)...(19): siRNA sense strand
caagaacugugucaugucu

SEQ ID NO: 777128 - RNA, 19 nt, Homo sapiens
  misc_RNA (1)...(19): siRNA sense strand
gacacaggcagaacuauuu

SEQ ID NO: 777129 - RNA, 19 nt, Homo sapiens
  misc_RNA (1)...(19): siRNA sense strand
gcuacaggcuugcacuaug

SEQ ID NO: 777130 - RNA, 19 nt, Homo sapiens
  misc_RNA (1)...(19): siRNA sense strand
ugaauaaacgauacuggua

SEQ ID NO: 777131 - RNA, 19 nt, Homo sapiens
  misc_RNA (1)...(19): siRNA sense strand
ccgaggaccuggaaccauu

SEQ ID NO: 777132 - RNA, 19 nt, Homo sapiens
  misc_RNA (1)...(19): siRNA sense strand
gauuacacgugccucuuga

SEQ ID NO: 777133 - RNA, 19 nt, Homo sapiens
  misc_RNA (1)...(19): siRNA sense strand
uaccugagauucgauauau

SEQ ID NO: 777134 - RNA, 19 nt, Homo sapiens
  misc_RNA (1)...(19): siRNA sense strand
ggcaggaguuugaggaaga

SEQ ID NO: 777135 - RNA, 19 nt, Homo sapiens
  misc_RNA (1)...(19): siRNA sense strand
acacagauuuagugaugaa

SEQ ID NO: 777136 - RNA, 19 nt, Homo sapiens
  misc_RNA (1)...(19): siRNA sense strand
aagaagaaaucgaaaggau

SEQ ID NO: 777137 - RNA, 19 nt, Homo sapiens
  misc_RNA (1)...(19): siRNA sense strand
ucaccaggcuccacacugu

SEQ ID NO: 777138 - RNA, 19 nt, Homo sapiens
  misc_RNA (1)...(19): siRNA sense strand
gcucaaaugccuccagaug

SEQ ID NO: 777139 - RNA, 19 nt, Homo sapiens
  misc_RNA (1)...(19): siRNA sense strand
gcccuccgaugaagaacua

SEQ ID NO: 777140 - RNA, 19 nt, Homo sapiens
  misc_RNA (1)...(19): siRNA sense strand
gagcuaauccugcugucuu

SEQ ID NO: 777141 - RNA, 19 nt, Homo sapiens
  misc_RNA (1)...(19): siRNA sense strand
augaagaacuacacagauu

SEQ ID NO: 777142 - RNA, 19 nt, Homo sapiens
  misc_RNA (1)...(19): siRNA sense strand
caugaaagcaauuaacuuc

SEQ ID NO: 777143 - RNA, 19 nt, Homo sapiens
  misc_RNA (1)...(19): siRNA sense strand
guaggucuguggaacugaa

SEQ ID NO: 777144 - RNA, 19 nt, Homo sapiens
  misc_RNA (1)...(19): siRNA sense strand
caacaaacggguauaucga

SEQ ID NO: 777145 - RNA, 19 nt, Homo sapiens
  misc_RNA (1)...(19): siRNA sense strand
ggaagaagaaaucgaaagg

SEQ ID NO: 777146 - RNA, 19 nt, Homo sapiens
  misc_RNA (1)...(19): siRNA sense strand
gaagaagaaaucgaaagga

SEQ ID NO: 777147 - RNA, 19 nt, Homo sapiens
  misc_RNA (1)...(19): siRNA sense strand
ugaagaacuacacagauuu

SEQ ID NO: 777148 - RNA, 19 nt, Homo sapiens
  misc_RNA (1)...(19): siRNA sense strand
acaacgaaccugucucauu

SEQ ID NO: 777149 - RNA, 19 nt, Homo sapiens
  misc_RNA (1)...(19): siRNA sense strand
gaaaucgaaaggaucaugu

SEQ ID NO: 777150 - RNA, 19 nt, Homo sapiens
  misc_RNA (1)...(19): siRNA sense strand
gcaacaaacggguauaucg

SEQ ID NO: 777151 - RNA, 19 nt, Homo sapiens
  misc_RNA (1)...(19): siRNA sense strand
ccgaaccgcuuuccugauc

SEQ ID NO: 777152 - RNA, 19 nt, Homo sapiens
  misc_RNA (1)...(19): siRNA sense strand
gcaaccauggugauaguga

SEQ ID NO: 777153 - RNA, 19 nt, Homo sapiens
  misc_RNA (1)...(19): siRNA sense strand
gcaugaaagcaauuaacuu

SEQ ID NO: 777154 - RNA, 19 nt, Homo sapiens
  misc_RNA (1)...(19): siRNA sense strand
ucaucuaccucuaucacaa

SEQ ID NO: 777155 - RNA, 19 nt, Homo sapiens
  misc_RNA (1)...(19): siRNA sense strand
gaacuauuugcccugcuuu

SEQ ID NO: 777156 - RNA, 19 nt, Homo sapiens
  misc_RNA (1)...(19): siRNA sense strand
caaguuccaucagcuaaag

SEQ ID NO: 777157 - RNA, 19 nt, Homo sapiens
  misc_RNA (1)...(19): siRNA sense strand
ggauuacacgugccucuug

SEQ ID NO: 777158 - RNA, 19 nt, Homo sapiens
  misc_RNA (1)...(19): siRNA sense strand
cagcuggaacaauugaaua

SEQ ID NO: 777159 - RNA, 19 nt, Homo sapiens
  misc_RNA (1)...(19): siRNA sense strand
ccacauuaccaauauauac

SEQ ID NO: 777160 - RNA, 19 nt, Homo sapiens
  misc_RNA (1)...(19): siRNA sense strand
ccugagauucgauauauug

SEQ ID NO: 777161 - RNA, 19 nt, Homo sapiens
  misc_RNA (1)...(19): siRNA sense strand
uaaacgauacugguacauu

SEQ ID NO: 777162 - RNA, 19 nt, Homo sapiens
  misc_RNA (1)...(19): siRNA sense strand
ugacacaggcagaacuauu

SEQ ID NO: 777163 - RNA, 19 nt, Homo sapiens
  misc_RNA (1)...(19): siRNA sense strand
cuacaggcuugcacuaugg

SEQ ID NO: 777164 - RNA, 19 nt, Homo sapiens
  misc_RNA (1)...(19): siRNA sense strand
cuaccucuaucacaaguuc

SEQ ID NO: 777165 - RNA, 19 nt, Homo sapiens
  misc_RNA (1)...(19): siRNA sense strand
gaugaagaacuacacagau

SEQ ID NO: 777166 - RNA, 19 nt, Homo sapiens
  misc_RNA (1)...(19): siRNA sense strand
gauaucggaagaagaaauc

SEQ ID NO: 777167 - RNA, 19 nt, Homo sapiens
  misc_RNA (1)...(19): siRNA sense strand
gccaggauuuuacugaaua

SEQ ID NO: 777168 - RNA, 19 nt, Homo sapiens
  misc_RNA (1)...(19): siRNA sense strand
gagcuugacccaggcacua

SEQ ID NO: 777169 - RNA, 19 nt, Homo sapiens
  misc_RNA (1)...(19): siRNA sense strand
uagcuauucuggccacuca

SEQ ID NO: 777170 - RNA, 19 nt, Homo sapiens
  misc_RNA (1)...(19): siRNA sense strand
ucugcgagcucucaaucaa

SEQ ID NO: 777171 - RNA, 19 nt, Homo sapiens
  misc_RNA (1)...(19): siRNA sense strand
gugcuuaccugagauucga

SEQ ID NO: 777172 - RNA, 19 nt, Homo sapiens
  misc_RNA (1)...(19): siRNA sense strand
gaaccgcuuuccugaucuc

SEQ ID NO: 777173 - RNA, 19 nt, Homo sapiens
  misc_RNA (1)...(19): siRNA sense strand
ucacaaguuccaucagcua

SEQ ID NO: 777174 - RNA, 19 nt, Homo sapiens
  misc_RNA (1)...(19): siRNA sense strand
guacucgcccuccgaugaa

SEQ ID NO: 777175 - RNA, 19 nt, Homo sapiens
  misc_RNA (1)...(19): siRNA sense strand
uuaagguggugcugcauuc

SEQ ID NO: 777176 - RNA, 19 nt, Homo sapiens
  misc_RNA (1)...(19): siRNA sense strand
ggaucaagaaacugccuuu

SEQ ID NO: 777177 - RNA, 19 nt, Homo sapiens
  misc_RNA (1)...(19): siRNA sense strand
ccgcuuuccugaucucaug

SEQ ID NO: 777178 - RNA, 19 nt, Homo sapiens
  misc_RNA (1)...(19): siRNA sense strand
gaugcagucgugacaagaa

SEQ ID NO: 777179 - RNA, 19 nt, Homo sapiens
  misc_RNA (1)...(19): siRNA sense strand
aauaaacgauacugguaca

SEQ ID NO: 777180 - RNA, 19 nt, Homo sapiens
  misc_RNA (1)...(19): siRNA sense strand
cuguggaacugaauggauu

SEQ ID NO: 777181 - RNA, 19 nt, Homo sapiens
  misc_RNA (1)...(19): siRNA sense strand
ugaaagcaauuaacuuccu

SEQ ID NO: 777182 - RNA, 19 nt, Homo sapiens
  misc_RNA (1)...(19): siRNA sense strand
cgaugaagaacuacacaga

SEQ ID NO: 777183 - RNA, 19 nt, Homo sapiens
  misc_RNA (1)...(19): siRNA sense strand
gcagauugccuggaucaag

SEQ ID NO: 777184 - RNA, 19 nt, Homo sapiens
  misc_RNA (1)...(19): siRNA sense strand
ccuggaggccggaauaaga

SEQ ID NO: 777185 - RNA, 19 nt, Homo sapiens
  misc_RNA (1)...(19): siRNA sense strand
ugaugucacugccaaguac

SEQ ID NO: 777186 - RNA, 19 nt, Homo sapiens
  misc_RNA (1)...(19): siRNA sense strand
ugaucgggcugaacaacga

SEQ ID NO: 777187 - RNA, 19 nt, Homo sapiens
  misc_RNA (1)...(19): siRNA sense strand
ccuccacauuaccaauaua

SEQ ID NO: 777188 - RNA, 19 nt, Homo sapiens
  misc_RNA (1)...(19): siRNA sense strand
gcaggaaagauggugaaug

SEQ ID NO: 777189 - RNA, 19 nt, Homo sapiens
  misc_RNA (1)...(19): siRNA sense strand
agaacuauuugcccugcuu

SEQ ID NO: 777190 - RNA, 19 nt, Homo sapiens
  misc_RNA (1)...(19): siRNA sense strand
uucgauauauugcaggaaa

SEQ ID NO: 777191 - RNA, 19 nt, Homo sapiens
  misc_RNA (1)...(19): siRNA sense strand
ucacagcuggaacaauuga

SEQ ID NO: 777192 - RNA, 19 nt, Homo sapiens
  misc_RNA (1)...(19): siRNA sense strand
cauguugauugaagaugga

SEQ ID NO: 777193 - RNA, 19 nt, Homo sapiens
  misc_RNA (1)...(19): siRNA sense strand
aaacggguauaucgaugca

SEQ ID NO: 777194 - RNA, 19 nt, Homo sapiens
  misc_RNA (1)...(19): siRNA sense strand
ccagucauacagucugauu

SEQ ID NO: 777195 - RNA, 19 nt, Homo sapiens
  misc_RNA (1)...(19): siRNA sense strand
ggaacaauugaauaaacga

SEQ ID NO: 777196 - RNA, 19 nt, Homo sapiens
  misc_RNA (1)...(19): siRNA sense strand
gcuggaacaauugaauaaa

SEQ ID NO: 777197 - RNA, 19 nt, Homo sapiens
  misc_RNA (1)...(19): siRNA sense strand
cuuccuaaaucaagauauc

SEQ ID NO: 777198 - RNA, 19 nt, Homo sapiens
  misc_RNA (1)...(19): siRNA sense strand
gcauugggccaguccagau

SEQ ID NO: 777199 - RNA, 19 nt, Homo sapiens
  misc_RNA (1)...(19): siRNA sense strand
ggucagcaacgaggaguau

SEQ ID NO: 777200 - RNA, 19 nt, Homo sapiens
  misc_RNA (1)...(19): siRNA sense strand
guacugccgccugcucaaa

SEQ ID NO: 777201 - RNA, 19 nt, Homo sapiens
  misc_RNA (1)...(19): siRNA sense strand
ugucugggcaggaguuuga

SEQ ID NO: 777202 - RNA, 19 nt, Homo sapiens
  misc_RNA (1)...(19): siRNA sense strand
uuccugaucucaugaugug

SEQ ID NO: 777203 - RNA, 19 nt, Homo sapiens
  misc_RNA (1)...(19): siRNA sense strand
gccuccacauuaccaauau

SEQ ID NO: 777204 - RNA, 19 nt, Homo sapiens
  misc_RNA (1)...(19): siRNA sense strand
aagcggagcauuugcaaca

SEQ ID NO: 777205 - RNA, 19 nt, Homo sapiens
  misc_RNA (1)...(19): siRNA sense strand
gcaggaguuugaggaagag

SEQ ID NO: 777206 - RNA, 19 nt, Homo sapiens
  misc_RNA (1)...(19): siRNA sense strand
guccagauaucggaagaag

SEQ ID NO: 777207 - RNA, 19 nt, Homo sapiens
  misc_RNA (1)...(19): siRNA sense strand
augaugugcuuaccugaga

SEQ ID NO: 777208 - RNA, 19 nt, Homo sapiens
  misc_RNA (1)...(19): siRNA sense strand
ggugauagugaccacaguu

SEQ ID NO: 777209 - RNA, 19 nt, Homo sapiens
  misc_RNA (1)...(19): siRNA sense strand
caacgaaccugucucauuu

SEQ ID NO: 777210 - RNA, 19 nt, Homo sapiens
  misc_RNA (1)...(19): siRNA sense strand
gcaauuaacuuccuaaauc

SEQ ID NO: 777211 - RNA, 19 nt, Homo sapiens
  misc_RNA (1)...(19): siRNA sense strand
gaagaacuacacagauuua

SEQ ID NO: 777212 - RNA, 19 nt, Homo sapiens
  misc_RNA (1)...(19): siRNA sense strand
gaaagcaauuaacuuccua

SEQ ID NO: 777213 - RNA, 19 nt, Homo sapiens
  misc_RNA (1)...(19): siRNA sense strand
gaagauggauacgcuguga

SEQ ID NO: 777214 - RNA, 19 nt, Homo sapiens
  misc_RNA (1)...(19): siRNA sense strand
aaacgauacugguacauuu

SEQ ID NO: 777215 - RNA, 19 nt, Homo sapiens
  misc_RNA (1)...(19): siRNA sense strand
ccucacagcuggaacaauu

SEQ ID NO: 777216 - RNA, 19 nt, Homo sapiens
  misc_RNA (1)...(19): siRNA sense strand
caggaaagauggugaaugu

SEQ ID NO: 777217 - RNA, 19 nt, Homo sapiens
  misc_RNA (1)...(19): siRNA sense strand
gaagaaaucgaaaggauca

SEQ ID NO: 777218 - RNA, 19 nt, Homo sapiens
  misc_RNA (1)...(19): siRNA sense strand
cuacacagauuuagugaug

SEQ ID NO: 777219 - RNA, 19 nt, Homo sapiens
  misc_RNA (1)...(19): siRNA sense strand
gaacaacgaaccugucuca

SEQ ID NO: 777220 - RNA, 19 nt, Homo sapiens
  misc_RNA (1)...(19): siRNA sense strand
gcacgcccauguugauuga

SEQ ID NO: 777221 - RNA, 19 nt, Homo sapiens
  misc_RNA (1)...(19): siRNA sense strand
ccagauaucggaagaagaa

SEQ ID NO: 777222 - RNA, 19 nt, Homo sapiens
  misc_RNA (1)...(19): siRNA sense strand
ugucuucccucaccguuua

SEQ ID NO: 777223 - RNA, 19 nt, Homo sapiens
  misc_RNA (1)...(19): siRNA sense strand
ggaacuggcugaugucacu

SEQ ID NO: 777224 - RNA, 19 nt, Homo sapiens
  misc_RNA (1)...(19): siRNA sense strand
gagcaaccauggugauagu

SEQ ID NO: 777225 - RNA, 19 nt, Homo sapiens
  misc_RNA (1)...(19): siRNA sense strand
cagauugccuggaucaaga

SEQ ID NO: 777226 - RNA, 19 nt, Homo sapiens
  misc_RNA (1)...(19): siRNA sense strand
caauauauaccgcaccuuu

SEQ ID NO: 777227 - RNA, 19 nt, Homo sapiens
  misc_RNA (1)...(19): siRNA sense strand
caagaacugugucaugucu

SEQ ID NO: 777228 - RNA, 19 nt, Homo sapiens
  misc_RNA (1)...(19): siRNA sense strand
gacacaggcagaacuauuu

SEQ ID NO: 777229 - RNA, 19 nt, Homo sapiens
  misc_RNA (1)...(19): siRNA sense strand
gcuacaggcuugcacuaug

SEQ ID NO: 777230 - RNA, 19 nt, Homo sapiens
  misc_RNA (1)...(19): siRNA sense strand
ugaauaaacgauacuggua

SEQ ID NO: 777231 - RNA, 19 nt, Homo sapiens
  misc_RNA (1)...(19): siRNA sense strand
ccgaggaccuggaaccauu

SEQ ID NO: 777232 - RNA, 19 nt, Homo sapiens
  misc_RNA (1)...(19): siRNA sense strand
gauuacacgugccucuuga

SEQ ID NO: 777233 - RNA, 19 nt, Homo sapiens
  misc_RNA (1)...(19): siRNA sense strand
uaccugagauucgauauau

SEQ ID NO: 777234 - RNA, 19 nt, Homo sapiens
  misc_RNA (1)...(19): siRNA sense strand
ggcaggaguuugaggaaga

SEQ ID NO: 777235 - RNA, 19 nt, Homo sapiens
  misc_RNA (1)...(19): siRNA sense strand
acacagauuuagugaugaa

SEQ ID NO: 777236 - RNA, 19 nt, Homo sapiens
  misc_RNA (1)...(19): siRNA sense strand
aagaagaaaucgaaaggau

SEQ ID NO: 777237 - RNA, 19 nt, Homo sapiens
  misc_RNA (1)...(19): siRNA sense strand
ucaccaggcuccacacugu

SEQ ID NO: 777238 - RNA, 19 nt, Homo sapiens
  misc_RNA (1)...(19): siRNA sense strand
gcucaaaugccuccagaug

SEQ ID NO: 777239 - RNA, 19 nt, Homo sapiens
  misc_RNA (1)...(19): siRNA sense strand
gcccuccgaugaagaacua

SEQ ID NO: 777240 - RNA, 19 nt, Homo sapiens
  misc_RNA (1)...(19): siRNA sense strand
gagcuaauccugcugucuu

SEQ ID NO: 777241 - RNA, 19 nt, Homo sapiens
  misc_RNA (1)...(19): siRNA sense strand
augaagaacuacacagauu

SEQ ID NO: 777242 - RNA, 19 nt, Homo sapiens
  misc_RNA (1)...(19): siRNA sense strand
caugaaagcaauuaacuuc

SEQ ID NO: 777243 - RNA, 19 nt, Homo sapiens
  misc_RNA (1)...(19): siRNA sense strand
guaggucuguggaacugaa

SEQ ID NO: 777244 - RNA, 19 nt, Homo sapiens
  misc_RNA (1)...(19): siRNA sense strand
caacaaacggguauaucga

SEQ ID NO: 777245 - RNA, 19 nt, Homo sapiens
  misc_RNA (1)...(19): siRNA sense strand
ggaagaagaaaucgaaagg

SEQ ID NO: 777246 - RNA, 19 nt, Homo sapiens
  misc_RNA (1)...(19): siRNA sense strand
gaagaagaaaucgaaagga

SEQ ID NO: 777247 - RNA, 19 nt, Homo sapiens
  misc_RNA (1)...(19): siRNA sense strand
ugaagaacuacacagauuu

SEQ ID NO: 777248 - RNA, 19 nt, Homo sapiens
  misc_RNA (1)...(19): siRNA sense strand
acaacgaaccugucucauu

SEQ ID NO: 777249 - RNA, 19 nt, Homo sapiens
  misc_RNA (1)...(19): siRNA sense strand
gaaaucgaaaggaucaugu

SEQ ID NO: 777250 - RNA, 19 nt, Homo sapiens
  misc_RNA (1)...(19): siRNA sense strand
gcaacaaacggguauaucg

SEQ ID NO: 777251 - RNA, 19 nt, Homo sapiens
  misc_RNA (1)...(19): siRNA sense strand
ccgaaccgcuuuccugauc

SEQ ID NO: 777252 - RNA, 19 nt, Homo sapiens
  misc_RNA (1)...(19): siRNA sense strand
gcaaccauggugauaguga

SEQ ID NO: 777253 - RNA, 19 nt, Homo sapiens
  misc_RNA (1)...(19): siRNA sense strand
gcaugaaagcaauuaacuu

SEQ ID NO: 777254 - RNA, 19 nt, Homo sapiens
  misc_RNA (1)...(19): siRNA sense strand
ucaucuaccucuaucacaa

SEQ ID NO: 777255 - RNA, 19 nt, Homo sapiens
  misc_RNA (1)...(19): siRNA sense strand
gaacuauuugcccugcuuu

SEQ ID NO: 777256 - RNA, 19 nt, Homo sapiens
  misc_RNA (1)...(19): siRNA sense strand
caaguuccaucagcuaaag

SEQ ID NO: 777257 - RNA, 19 nt, Homo sapiens
  misc_RNA (1)...(19): siRNA sense strand
ggauuacacgugccucuug

SEQ ID NO: 777258 - RNA, 19 nt, Homo sapiens
  misc_RNA (1)...(19): siRNA sense strand
cagcuggaacaauugaaua

SEQ ID NO: 777259 - RNA, 19 nt, Homo sapiens
  misc_RNA (1)...(19): siRNA sense strand
ccacauuaccaauauauac

SEQ ID NO: 777260 - RNA, 19 nt, Homo sapiens
  misc_RNA (1)...(19): siRNA sense strand
ccugagauucgauauauug

SEQ ID NO: 777261 - RNA, 19 nt, Homo sapiens
  misc_RNA (1)...(19): siRNA sense strand
uaaacgauacugguacauu

SEQ ID NO: 777262 - RNA, 19 nt, Homo sapiens
  misc_RNA (1)...(19): siRNA sense strand
ugacacaggcagaacuauu

SEQ ID NO: 777263 - RNA, 19 nt, Homo sapiens
  misc_RNA (1)...(19): siRNA sense strand
cuacaggcuugcacuaugg

SEQ ID NO: 777264 - RNA, 19 nt, Homo sapiens
  misc_RNA (1)...(19): siRNA sense strand
cuaccucuaucacaaguuc

SEQ ID NO: 777265 - RNA, 19 nt, Homo sapiens
  misc_RNA (1)...(19): siRNA sense strand
gaugaagaacuacacagau

SEQ ID NO: 777266 - RNA, 19 nt, Homo sapiens
  misc_RNA (1)...(19): siRNA sense strand
gauaucggaagaagaaauc

SEQ ID NO: 777267 - RNA, 19 nt, Homo sapiens
  misc_RNA (1)...(19): siRNA sense strand
gccaggauuuuacugaaua

SEQ ID NO: 777268 - RNA, 19 nt, Homo sapiens
  misc_RNA (1)...(19): siRNA sense strand
gagcuugacccaggcacua

SEQ ID NO: 777269 - RNA, 19 nt, Homo sapiens
  misc_RNA (1)...(19): siRNA sense strand
uagcuauucuggccacuca

SEQ ID NO: 777270 - RNA, 19 nt, Homo sapiens
  misc_RNA (1)...(19): siRNA sense strand
ucugcgagcucucaaucaa

SEQ ID NO: 777271 - RNA, 19 nt, Homo sapiens
  misc_RNA (1)...(19): siRNA sense strand
gugcuuaccugagauucga

SEQ ID NO: 777272 - RNA, 19 nt, Homo sapiens
  misc_RNA (1)...(19): siRNA sense strand
gaaccgcuuuccugaucuc

SEQ ID NO: 777273 - RNA, 19 nt, Homo sapiens
  misc_RNA (1)...(19): siRNA sense strand
ucacaaguuccaucagcua

SEQ ID NO: 777274 - RNA, 19 nt, Homo sapiens
  misc_RNA (1)...(19): siRNA sense strand
guacucgcccuccgaugaa

SEQ ID NO: 777275 - RNA, 19 nt, Homo sapiens
  misc_RNA (1)...(19): siRNA sense strand
uuaagguggugcugcauuc

SEQ ID NO: 777276 - RNA, 19 nt, Homo sapiens
  misc_RNA (1)...(19): siRNA sense strand
ggaucaagaaacugccuuu

SEQ ID NO: 777277 - RNA, 19 nt, Homo sapiens
  misc_RNA (1)...(19): siRNA sense strand
ccgcuuuccugaucucaug

SEQ ID NO: 777278 - RNA, 19 nt, Homo sapiens
  misc_RNA (1)...(19): siRNA sense strand
gaugcagucgugacaagaa

SEQ ID NO: 777279 - RNA, 19 nt, Homo sapiens
  misc_RNA (1)...(19): siRNA sense strand
aauaaacgauacugguaca

SEQ ID NO: 777280 - RNA, 19 nt, Homo sapiens
  misc_RNA (1)...(19): siRNA sense strand
cuguggaacugaauggauu

SEQ ID NO: 777281 - RNA, 19 nt, Homo sapiens
  misc_RNA (1)...(19): siRNA sense strand
ugaaagcaauuaacuuccu

SEQ ID NO: 777282 - RNA, 19 nt, Homo sapiens
  misc_RNA (1)...(19): siRNA sense strand
cgaugaagaacuacacaga

SEQ ID NO: 777283 - RNA, 19 nt, Homo sapiens
  misc_RNA (1)...(19): siRNA sense strand
gcagauugccuggaucaag

SEQ ID NO: 777284 - RNA, 19 nt, Homo sapiens
  misc_RNA (1)...(19): siRNA sense strand
ccuggaggccggaauaaga

SEQ ID NO: 777285 - RNA, 19 nt, Homo sapiens
  misc_RNA (1)...(19): siRNA sense strand
ugaugucacugccaaguac

SEQ ID NO: 777286 - RNA, 19 nt, Homo sapiens
  misc_RNA (1)...(19): siRNA sense strand
ugaucgggcugaacaacga

SEQ ID NO: 777287 - RNA, 19 nt, Homo sapiens
  misc_RNA (1)...(19): siRNA sense strand
ccuccacauuaccaauaua

SEQ ID NO: 777288 - RNA, 19 nt, Homo sapiens
  misc_RNA (1)...(19): siRNA sense strand
gcaggaaagauggugaaug

SEQ ID NO: 777289 - RNA, 19 nt, Homo sapiens
  misc_RNA (1)...(19): siRNA sense strand
agaacuauuugcccugcuu

SEQ ID NO: 777290 - RNA, 19 nt, Homo sapiens
  misc_RNA (1)...(19): siRNA sense strand
uucgauauauugcaggaaa

SEQ ID NO: 777291 - RNA, 19 nt, Homo sapiens
  misc_RNA (1)...(19): siRNA sense strand
ucacagcuggaacaauuga

SEQ ID NO: 777292 - RNA, 19 nt, Homo sapiens
  misc_RNA (1)...(19): siRNA sense strand
cauguugauugaagaugga

SEQ ID NO: 777293 - RNA, 19 nt, Homo sapiens
  misc_RNA (1)...(19): siRNA sense strand
aaacggguauaucgaugca

SEQ ID NO: 777294 - RNA, 19 nt, Homo sapiens
  misc_RNA (1)...(19): siRNA sense strand
ccagucauacagucugauu

SEQ ID NO: 777295 - RNA, 19 nt, Homo sapiens
  misc_RNA (1)...(19): siRNA sense strand
ggaacaauugaauaaacga

SEQ ID NO: 777296 - RNA, 19 nt, Homo sapiens
  misc_RNA (1)...(19): siRNA sense strand
gcuggaacaauugaauaaa

SEQ ID NO: 777297 - RNA, 19 nt, Homo sapiens
  misc_RNA (1)...(19): siRNA sense strand
cuuccuaaaucaagauauc

SEQ ID NO: 777298 - RNA, 19 nt, Homo sapiens
  misc_RNA (1)...(19): siRNA sense strand
gcauugggccaguccagau

SEQ ID NO: 777299 - RNA, 19 nt, Homo sapiens
  misc_RNA (1)...(19): siRNA sense strand
ggucagcaacgaggaguau

SEQ ID NO: 777300 - RNA, 19 nt, Homo sapiens
  misc_RNA (1)...(19): siRNA sense strand
guacugccgccugcucaaa

SEQ ID NO: 777301 - RNA, 19 nt, Homo sapiens
  misc_RNA (1)...(19): siRNA sense strand
ugucugggcaggaguuuga

SEQ ID NO: 777302 - RNA, 19 nt, Homo sapiens
  misc_RNA (1)...(19): siRNA sense strand
uuccugaucucaugaugug

SEQ ID NO: 777303 - RNA, 19 nt, Homo sapiens
  misc_RNA (1)...(19): siRNA sense strand
gccuccacauuaccaauau

SEQ ID NO: 777304 - RNA, 19 nt, Homo sapiens
  misc_RNA (1)...(19): siRNA sense strand
aagcggagcauuugcaaca

SEQ ID NO: 777305 - RNA, 19 nt, Homo sapiens
  misc_RNA (1)...(19): siRNA sense strand
gcaggaguuugaggaagag

SEQ ID NO: 777306 - RNA, 19 nt, Homo sapiens
  misc_RNA (1)...(19): siRNA sense strand
guccagauaucggaagaag

SEQ ID NO: 777307 - RNA, 19 nt, Homo sapiens
  misc_RNA (1)...(19): siRNA sense strand
augaugugcuuaccugaga

SEQ ID NO: 777308 - RNA, 19 nt, Homo sapiens
  misc_RNA (1)...(19): siRNA sense strand
ggugauagugaccacaguu

SEQ ID NO: 777309 - RNA, 19 nt, Homo sapiens
  misc_RNA (1)...(19): siRNA sense strand
caacgaaccugucucauuu

SEQ ID NO: 777310 - RNA, 19 nt, Homo sapiens
  misc_RNA (1)...(19): siRNA sense strand
gcaauuaacuuccuaaauc

SEQ ID NO: 777311 - RNA, 19 nt, Homo sapiens
  misc_RNA (1)...(19): siRNA sense strand
gaagaacuacacagauuua

SEQ ID NO: 777312 - RNA, 19 nt, Homo sapiens
  misc_RNA (1)...(19): siRNA sense strand
gaaagcaauuaacuuccua

SEQ ID NO: 777313 - RNA, 19 nt, Homo sapiens
  misc_RNA (1)...(19): siRNA sense strand
gaagauggauacgcuguga

SEQ ID NO: 777314 - RNA, 19 nt, Homo sapiens
  misc_RNA (1)...(19): siRNA sense strand
aaacgauacugguacauuu

SEQ ID NO: 777315 - RNA, 19 nt, Homo sapiens
  misc_RNA (1)...(19): siRNA sense strand
ccucacagcuggaacaauu

SEQ ID NO: 777316 - RNA, 19 nt, Homo sapiens
  misc_RNA (1)...(19): siRNA sense strand
caggaaagauggugaaugu

SEQ ID NO: 777317 - RNA, 19 nt, Homo sapiens
  misc_RNA (1)...(19): siRNA sense strand
gaagaaaucgaaaggauca

SEQ ID NO: 777318 - RNA, 19 nt, Homo sapiens
  misc_RNA (1)...(19): siRNA sense strand
cuacacagauuuagugaug

SEQ ID NO: 777319 - RNA, 19 nt, Homo sapiens
  misc_RNA (1)...(19): siRNA sense strand
gaacaacgaaccugucuca

SEQ ID NO: 777320 - RNA, 19 nt, Homo sapiens
  misc_RNA (1)...(19): siRNA sense strand
gcacgcccauguugauuga

SEQ ID NO: 777321 - RNA, 19 nt, Homo sapiens
  misc_RNA (1)...(19): siRNA sense strand
ccagauaucggaagaagaa

SEQ ID NO: 777322 - RNA, 19 nt, Homo sapiens
  misc_RNA (1)...(19): siRNA sense strand
ugucuucccucaccguuua

SEQ ID NO: 777323 - RNA, 19 nt, Homo sapiens
  misc_RNA (1)...(19): siRNA sense strand
ggaacuggcugaugucacu

SEQ ID NO: 777324 - RNA, 19 nt, Homo sapiens
  misc_RNA (1)...(19): siRNA sense strand
gagcaaccauggugauagu

SEQ ID NO: 777325 - RNA, 19 nt, Homo sapiens
  misc_RNA (1)...(19): siRNA sense strand
cagauugccuggaucaaga

SEQ ID NO: 777326 - RNA, 19 nt, Homo sapiens
  misc_RNA (1)...(19): siRNA sense strand
caauauauaccgcaccuuu

SEQ ID NO: 777327 - RNA, 19 nt, Homo sapiens
  misc_RNA (1)...(19): siRNA sense strand
caagaacugugucaugucu

SEQ ID NO: 777328 - RNA, 19 nt, Homo sapiens
  misc_RNA (1)...(19): siRNA sense strand
gacacaggcagaacuauuu

SEQ ID NO: 777329 - RNA, 19 nt, Homo sapiens
  misc_RNA (1)...(19): siRNA sense strand
gcuacaggcuugcacuaug

SEQ ID NO: 777330 - RNA, 19 nt, Homo sapiens
  misc_RNA (1)...(19): siRNA sense strand
ugaauaaacgauacuggua

SEQ ID NO: 777331 - RNA, 19 nt, Homo sapiens
  misc_RNA (1)...(19): siRNA sense strand
ccgaggaccuggaaccauu

SEQ ID NO: 777332 - RNA, 19 nt, Homo sapiens
  misc_RNA (1)...(19): siRNA sense strand
gauuacacgugccucuuga

SEQ ID NO: 777333 - RNA, 19 nt, Homo sapiens
  misc_RNA (1)...(19): siRNA sense strand
uaccugagauucgauauau

SEQ ID NO: 777334 - RNA, 19 nt, Homo sapiens
  misc_RNA (1)...(19): siRNA sense strand
ggcaggaguuugaggaaga

SEQ ID NO: 777335 - RNA, 19 nt, Homo sapiens
  misc_RNA (1)...(19): siRNA sense strand
acacagauuuagugaugaa

SEQ ID NO: 777336 - RNA, 19 nt, Homo sapiens
  misc_RNA (1)...(19): siRNA sense strand
aagaagaaaucgaaaggau

SEQ ID NO: 777337 - RNA, 19 nt, Homo sapiens
  misc_RNA (1)...(19): siRNA sense strand
ucaccaggcuccacacugu

SEQ ID NO: 777338 - RNA, 19 nt, Homo sapiens
  misc_RNA (1)...(19): siRNA sense strand
gcucaaaugccuccagaug

SEQ ID NO: 777339 - RNA, 19 nt, Homo sapiens
  misc_RNA (1)...(19): siRNA sense strand
gcccuccgaugaagaacua

SEQ ID NO: 777340 - RNA, 19 nt, Homo sapiens
  misc_RNA (1)...(19): siRNA sense strand
gagcuaauccugcugucuu

SEQ ID NO: 777341 - RNA, 19 nt, Homo sapiens
  misc_RNA (1)...(19): siRNA sense strand
augaagaacuacacagauu

SEQ ID NO: 777342 - RNA, 19 nt, Homo sapiens
  misc_RNA (1)...(19): siRNA sense strand
caugaaagcaauuaacuuc

SEQ ID NO: 777343 - RNA, 19 nt, Homo sapiens
  misc_RNA (1)...(19): siRNA sense strand
guaggucuguggaacugaa

SEQ ID NO: 777344 - RNA, 19 nt, Homo sapiens
  misc_RNA (1)...(19): siRNA sense strand
caacaaacggguauaucga

SEQ ID NO: 777345 - RNA, 19 nt, Homo sapiens
  misc_RNA (1)...(19): siRNA sense strand
ggaagaagaaaucgaaagg

SEQ ID NO: 777346 - RNA, 19 nt, Homo sapiens
  misc_RNA (1)...(19): siRNA sense strand
gaagaagaaaucgaaagga

SEQ ID NO: 777347 - RNA, 19 nt, Homo sapiens
  misc_RNA (1)...(19): siRNA sense strand
ugaagaacuacacagauuu

SEQ ID NO: 777348 - RNA, 19 nt, Homo sapiens
  misc_RNA (1)...(19): siRNA sense strand
acaacgaaccugucucauu

SEQ ID NO: 777349 - RNA, 19 nt, Homo sapiens
  misc_RNA (1)...(19): siRNA sense strand
gaaaucgaaaggaucaugu

SEQ ID NO: 777350 - RNA, 19 nt, Homo sapiens
  misc_RNA (1)...(19): siRNA sense strand
gcaacaaacggguauaucg

SEQ ID NO: 777351 - RNA, 19 nt, Homo sapiens
  misc_RNA (1)...(19): siRNA sense strand
ccgaaccgcuuuccugauc

SEQ ID NO: 777352 - RNA, 19 nt, Homo sapiens
  misc_RNA (1)...(19): siRNA sense strand
gcaaccauggugauaguga

SEQ ID NO: 777353 - RNA, 19 nt, Homo sapiens
  misc_RNA (1)...(19): siRNA sense strand
gcaugaaagcaauuaacuu

SEQ ID NO: 777354 - RNA, 19 nt, Homo sapiens
  misc_RNA (1)...(19): siRNA sense strand
ucaucuaccucuaucacaa

SEQ ID NO: 777355 - RNA, 19 nt, Homo sapiens
  misc_RNA (1)...(19): siRNA sense strand
gaacuauuugcccugcuuu

SEQ ID NO: 777356 - RNA, 19 nt, Homo sapiens
  misc_RNA (1)...(19): siRNA sense strand
caaguuccaucagcuaaag

SEQ ID NO: 777357 - RNA, 19 nt, Homo sapiens
  misc_RNA (1)...(19): siRNA sense strand
ggauuacacgugccucuug

SEQ ID NO: 777358 - RNA, 19 nt, Homo sapiens
  misc_RNA (1)...(19): siRNA sense strand
cagcuggaacaauugaaua

SEQ ID NO: 777359 - RNA, 19 nt, Homo sapiens
  misc_RNA (1)...(19): siRNA sense strand
ccacauuaccaauauauac

SEQ ID NO: 777360 - RNA, 19 nt, Homo sapiens
  misc_RNA (1)...(19): siRNA sense strand
ccugagauucgauauauug

SEQ ID NO: 777361 - RNA, 19 nt, Homo sapiens
  misc_RNA (1)...(19): siRNA sense strand
uaaacgauacugguacauu

SEQ ID NO: 777362 - RNA, 19 nt, Homo sapiens
  misc_RNA (1)...(19): siRNA sense strand
ugacacaggcagaacuauu

SEQ ID NO: 777363 - RNA, 19 nt, Homo sapiens
  misc_RNA (1)...(19): siRNA sense strand
cuacaggcuugcacuaugg

SEQ ID NO: 777364 - RNA, 19 nt, Homo sapiens
  misc_RNA (1)...(19): siRNA sense strand
cuaccucuaucacaaguuc

SEQ ID NO: 777365 - RNA, 19 nt, Homo sapiens
  misc_RNA (1)...(19): siRNA sense strand
gaugaagaacuacacagau

SEQ ID NO: 777366 - RNA, 19 nt, Homo sapiens
  misc_RNA (1)...(19): siRNA sense strand
gauaucggaagaagaaauc

SEQ ID NO: 777367 - RNA, 19 nt, Homo sapiens
  misc_RNA (1)...(19): siRNA sense strand
gccaggauuuuacugaaua

SEQ ID NO: 777368 - RNA, 19 nt, Homo sapiens
  misc_RNA (1)...(19): siRNA sense strand
gagcuugacccaggcacua

SEQ ID NO: 777369 - RNA, 19 nt, Homo sapiens
  misc_RNA (1)...(19): siRNA sense strand
uagcuauucuggccacuca

SEQ ID NO: 777370 - RNA, 19 nt, Homo sapiens
  misc_RNA (1)...(19): siRNA sense strand
ucugcgagcucucaaucaa

SEQ ID NO: 777371 - RNA, 19 nt, Homo sapiens
  misc_RNA (1)...(19): siRNA sense strand
gugcuuaccugagauucga

SEQ ID NO: 777372 - RNA, 19 nt, Homo sapiens
  misc_RNA (1)...(19): siRNA sense strand
gaaccgcuuuccugaucuc

SEQ ID NO: 777373 - RNA, 19 nt, Homo sapiens
  misc_RNA (1)...(19): siRNA sense strand
ucacaaguuccaucagcua

SEQ ID NO: 777374 - RNA, 19 nt, Homo sapiens
  misc_RNA (1)...(19): siRNA sense strand
guacucgcccuccgaugaa

SEQ ID NO: 777375 - RNA, 19 nt, Homo sapiens
  misc_RNA (1)...(19): siRNA sense strand
uuaagguggugcugcauuc

SEQ ID NO: 777376 - RNA, 19 nt, Homo sapiens
  misc_RNA (1)...(19): siRNA sense strand
ggaucaagaaacugccuuu

SEQ ID NO: 777377 - RNA, 19 nt, Homo sapiens
  misc_RNA (1)...(19): siRNA sense strand
ccgcuuuccugaucucaug

SEQ ID NO: 777378 - RNA, 19 nt, Homo sapiens
  misc_RNA (1)...(19): siRNA sense strand
gaugcagucgugacaagaa

SEQ ID NO: 777379 - RNA, 19 nt, Homo sapiens
  misc_RNA (1)...(19): siRNA sense strand
aauaaacgauacugguaca

SEQ ID NO: 777380 - RNA, 19 nt, Homo sapiens
  misc_RNA (1)...(19): siRNA sense strand
cuguggaacugaauggauu

SEQ ID NO: 777381 - RNA, 19 nt, Homo sapiens
  misc_RNA (1)...(19): siRNA sense strand
ugaaagcaauuaacuuccu

SEQ ID NO: 777382 - RNA, 19 nt, Homo sapiens
  misc_RNA (1)...(19): siRNA sense strand
cgaugaagaacuacacaga

SEQ ID NO: 777383 - RNA, 19 nt, Homo sapiens
  misc_RNA (1)...(19): siRNA sense strand
gcagauugccuggaucaag

SEQ ID NO: 777384 - RNA, 19 nt, Homo sapiens
  misc_RNA (1)...(19): siRNA sense strand
ccuggaggccggaauaaga

SEQ ID NO: 777385 - RNA, 19 nt, Homo sapiens
  misc_RNA (1)...(19): siRNA sense strand
ugaugucacugccaaguac

SEQ ID NO: 777386 - RNA, 19 nt, Homo sapiens
  misc_RNA (1)...(19): siRNA sense strand
ugaucgggcugaacaacga

SEQ ID NO: 777387 - RNA, 19 nt, Homo sapiens
  misc_RNA (1)...(19): siRNA sense strand
ccuccacauuaccaauaua

SEQ ID NO: 777388 - RNA, 19 nt, Homo sapiens
  misc_RNA (1)...(19): siRNA sense strand
gcaggaaagauggugaaug

SEQ ID NO: 777389 - RNA, 19 nt, Homo sapiens
  misc_RNA (1)...(19): siRNA sense strand
agaacuauuugcccugcuu

SEQ ID NO: 777390 - RNA, 19 nt, Homo sapiens
  misc_RNA (1)...(19): siRNA sense strand
uucgauauauugcaggaaa

SEQ ID NO: 777391 - RNA, 19 nt, Homo sapiens
  misc_RNA (1)...(19): siRNA sense strand
ucacagcuggaacaauuga

SEQ ID NO: 777392 - RNA, 19 nt, Homo sapiens
  misc_RNA (1)...(19): siRNA sense strand
cauguugauugaagaugga

SEQ ID NO: 777393 - RNA, 19 nt, Homo sapiens
  misc_RNA (1)...(19): siRNA sense strand
aaacggguauaucgaugca

SEQ ID NO: 777394 - RNA, 19 nt, Homo sapiens
  misc_RNA (1)...(19): siRNA sense strand
ccagucauacagucugauu

SEQ ID NO: 777395 - RNA, 19 nt, Homo sapiens
  misc_RNA (1)...(19): siRNA sense strand
ggaacaauugaauaaacga

SEQ ID NO: 777396 - RNA, 19 nt, Homo sapiens
  misc_RNA (1)...(19): siRNA sense strand
gcuggaacaauugaauaaa

SEQ ID NO: 777397 - RNA, 19 nt, Homo sapiens
  misc_RNA (1)...(19): siRNA sense strand
cuuccuaaaucaagauauc

SEQ ID NO: 777398 - RNA, 19 nt, Homo sapiens
  misc_RNA (1)...(19): siRNA sense strand
gcauugggccaguccagau

SEQ ID NO: 777399 - RNA, 19 nt, Homo sapiens
  misc_RNA (1)...(19): siRNA sense strand
ggucagcaacgaggaguau

SEQ ID NO: 777400 - RNA, 19 nt, Homo sapiens
  misc_RNA (1)...(19): siRNA sense strand
guacugccgccugcucaaa

SEQ ID NO: 777401 - RNA, 19 nt, Homo sapiens
  misc_RNA (1)...(19): siRNA sense strand
ugucugggcaggaguuuga

SEQ ID NO: 777402 - RNA, 19 nt, Homo sapiens
  misc_RNA (1)...(19): siRNA sense strand
uuccugaucucaugaugug

SEQ ID NO: 777403 - RNA, 19 nt, Homo sapiens
  misc_RNA (1)...(19): siRNA sense strand
gccuccacauuaccaauau

SEQ ID NO: 777404 - RNA, 19 nt, Homo sapiens
  misc_RNA (1)...(19): siRNA sense strand
aagcggagcauuugcaaca

SEQ ID NO: 777405 - RNA, 19 nt, Homo sapiens
  misc_RNA (1)...(19): siRNA sense strand
gcaggaguuugaggaagag

SEQ ID NO: 777406 - RNA, 19 nt, Homo sapiens
  misc_RNA (1)...(19): siRNA sense strand
guccagauaucggaagaag

SEQ ID NO: 777407 - RNA, 19 nt, Homo sapiens
  misc_RNA (1)...(19): siRNA sense strand
augaugugcuuaccugaga

SEQ ID NO: 777408 - RNA, 19 nt, Homo sapiens
  misc_RNA (1)...(19): siRNA sense strand
ggugauagugaccacaguu

SEQ ID NO: 777409 - RNA, 19 nt, Homo sapiens
  misc_RNA (1)...(19): siRNA sense strand
caacgaaccugucucauuu

SEQ ID NO: 777410 - RNA, 19 nt, Homo sapiens
  misc_RNA (1)...(19): siRNA sense strand
gcaauuaacuuccuaaauc

SEQ ID NO: 777411 - RNA, 19 nt, Homo sapiens
  misc_RNA (1)...(19): siRNA sense strand
gaagaacuacacagauuua

SEQ ID NO: 777412 - RNA, 19 nt, Homo sapiens
  misc_RNA (1)...(19): siRNA sense strand
gaaagcaauuaacuuccua

SEQ ID NO: 777413 - RNA, 19 nt, Homo sapiens
  misc_RNA (1)...(19): siRNA sense strand
gaagauggauacgcuguga

SEQ ID NO: 777414 - RNA, 19 nt, Homo sapiens
  misc_RNA (1)...(19): siRNA sense strand
aaacgauacugguacauuu

SEQ ID NO: 777415 - RNA, 19 nt, Homo sapiens
  misc_RNA (1)...(19): siRNA sense strand
ccucacagcuggaacaauu

SEQ ID NO: 777416 - RNA, 19 nt, Homo sapiens
  misc_RNA (1)...(19): siRNA sense strand
caggaaagauggugaaugu

SEQ ID NO: 777417 - RNA, 19 nt, Homo sapiens
  misc_RNA (1)...(19): siRNA sense strand
gaagaaaucgaaaggauca

SEQ ID NO: 777418 - RNA, 19 nt, Homo sapiens
  misc_RNA (1)...(19): siRNA sense strand
cuacacagauuuagugaug

SEQ ID NO: 777419 - RNA, 19 nt, Homo sapiens
  misc_RNA (1)...(19): siRNA sense strand
gaacaacgaaccugucuca

SEQ ID NO: 777420 - RNA, 19 nt, Homo sapiens
  misc_RNA (1)...(19): siRNA sense strand
gcacgcccauguugauuga

SEQ ID NO: 777421 - RNA, 19 nt, Homo sapiens
  misc_RNA (1)...(19): siRNA sense strand
ccagauaucggaagaagaa

SEQ ID NO: 777422 - RNA, 19 nt, Homo sapiens
  misc_RNA (1)...(19): siRNA sense strand
ugucuucccucaccguuua

SEQ ID NO: 777423 - RNA, 19 nt, Homo sapiens
  misc_RNA (1)...(19): siRNA sense strand
ggaacuggcugaugucacu

SEQ ID NO: 777424 - RNA, 19 nt, Homo sapiens
  misc_RNA (1)...(19): siRNA sense strand
gagcaaccauggugauagu

SEQ ID NO: 777425 - RNA, 19 nt, Homo sapiens
  misc_RNA (1)...(19): siRNA sense strand
cagauugccuggaucaaga

SEQ ID NO: 777426 - RNA, 19 nt, Homo sapiens
  misc_RNA (1)...(19): siRNA sense strand
caauauauaccgcaccuuu

SEQ ID NO: 777427 - RNA, 19 nt, Homo sapiens
  misc_RNA (1)...(19): siRNA sense strand
caagaacugugucaugucu

SEQ ID NO: 777428 - RNA, 19 nt, Homo sapiens
  misc_RNA (1)...(19): siRNA sense strand
gacacaggcagaacuauuu

SEQ ID NO: 777429 - RNA, 19 nt, Homo sapiens
  misc_RNA (1)...(19): siRNA sense strand
gcuacaggcuugcacuaug

SEQ ID NO: 777430 - RNA, 19 nt, Homo sapiens
  misc_RNA (1)...(19): siRNA sense strand
ugaauaaacgauacuggua

SEQ ID NO: 777431 - RNA, 19 nt, Homo sapiens
  misc_RNA (1)...(19): siRNA sense strand
ccgaggaccuggaaccauu

SEQ ID NO: 777432 - RNA, 19 nt, Homo sapiens
  misc_RNA (1)...(19): siRNA sense strand
gauuacacgugccucuuga

SEQ ID NO: 777433 - RNA, 19 nt, Homo sapiens
  misc_RNA (1)...(19): siRNA sense strand
uaccugagauucgauauau

SEQ ID NO: 777434 - RNA, 19 nt, Homo sapiens
  misc_RNA (1)...(19): siRNA sense strand
ggcaggaguuugaggaaga

SEQ ID NO: 777435 - RNA, 19 nt, Homo sapiens
  misc_RNA (1)...(19): siRNA sense strand
acacagauuuagugaugaa

SEQ ID NO: 777436 - RNA, 19 nt, Homo sapiens
  misc_RNA (1)...(19): siRNA sense strand
aagaagaaaucgaaaggau

SEQ ID NO: 777437 - RNA, 19 nt, Homo sapiens
  misc_RNA (1)...(19): siRNA sense strand
ucaccaggcuccacacugu

SEQ ID NO: 777438 - RNA, 19 nt, Homo sapiens
  misc_RNA (1)...(19): siRNA sense strand
gcucaaaugccuccagaug

SEQ ID NO: 777439 - RNA, 19 nt, Homo sapiens
  misc_RNA (1)...(19): siRNA sense strand
gcccuccgaugaagaacua

SEQ ID NO: 777440 - RNA, 19 nt, Homo sapiens
  misc_RNA (1)...(19): siRNA sense strand
gagcuaauccugcugucuu

SEQ ID NO: 777441 - RNA, 19 nt, Homo sapiens
  misc_RNA (1)...(19): siRNA sense strand
augaagaacuacacagauu

SEQ ID NO: 777442 - RNA, 19 nt, Homo sapiens
  misc_RNA (1)...(19): siRNA sense strand
caugaaagcaauuaacuuc

SEQ ID NO: 777443 - RNA, 19 nt, Homo sapiens
  misc_RNA (1)...(19): siRNA sense strand
guaggucuguggaacugaa

SEQ ID NO: 777444 - RNA, 19 nt, Homo sapiens
  misc_RNA (1)...(19): siRNA sense strand
caacaaacggguauaucga

SEQ ID NO: 777445 - RNA, 19 nt, Homo sapiens
  misc_RNA (1)...(19): siRNA sense strand
ggaagaagaaaucgaaagg

SEQ ID NO: 777446 - RNA, 19 nt, Homo sapiens
  misc_RNA (1)...(19): siRNA sense strand
gaagaagaaaucgaaagga

SEQ ID NO: 777447 - RNA, 19 nt, Homo sapiens
  misc_RNA (1)...(19): siRNA sense strand
ugaagaacuacacagauuu

SEQ ID NO: 777448 - RNA, 19 nt, Homo sapiens
  misc_RNA (1)...(19): siRNA sense strand
acaacgaaccugucucauu

SEQ ID NO: 777449 - RNA, 19 nt, Homo sapiens
  misc_RNA (1)...(19): siRNA sense strand
gaaaucgaaaggaucaugu

SEQ ID NO: 777450 - RNA, 19 nt, Homo sapiens
  misc_RNA (1)...(19): siRNA sense strand
gcaacaaacggguauaucg

SEQ ID NO: 777451 - RNA, 19 nt, Homo sapiens
  misc_RNA (1)...(19): siRNA sense strand
ccgaaccgcuuuccugauc

SEQ ID NO: 777452 - RNA, 19 nt, Homo sapiens
  misc_RNA (1)...(19): siRNA sense strand
gcaaccauggugauaguga

SEQ ID NO: 777453 - RNA, 19 nt, Homo sapiens
  misc_RNA (1)...(19): siRNA sense strand
gcaugaaagcaauuaacuu

SEQ ID NO: 777454 - RNA, 19 nt, Homo sapiens
  misc_RNA (1)...(19): siRNA sense strand
ucaucuaccucuaucacaa

SEQ ID NO: 777455 - RNA, 19 nt, Homo sapiens
  misc_RNA (1)...(19): siRNA sense strand
gaacuauuugcccugcuuu

SEQ ID NO: 777456 - RNA, 19 nt, Homo sapiens
  misc_RNA (1)...(19): siRNA sense strand
caaguuccaucagcuaaag

SEQ ID NO: 777457 - RNA, 19 nt, Homo sapiens
  misc_RNA (1)...(19): siRNA sense strand
ggauuacacgugccucuug

SEQ ID NO: 777458 - RNA, 19 nt, Homo sapiens
  misc_RNA (1)...(19): siRNA sense strand
cagcuggaacaauugaaua

SEQ ID NO: 777459 - RNA, 19 nt, Homo sapiens
  misc_RNA (1)...(19): siRNA sense strand
ccacauuaccaauauauac

SEQ ID NO: 777460 - RNA, 19 nt, Homo sapiens
  misc_RNA (1)...(19): siRNA sense strand
ccugagauucgauauauug

SEQ ID NO: 777461 - RNA, 19 nt, Homo sapiens
  misc_RNA (1)...(19): siRNA sense strand
uaaacgauacugguacauu

SEQ ID NO: 777462 - RNA, 19 nt, Homo sapiens
  misc_RNA (1)...(19): siRNA sense strand
ugacacaggcagaacuauu

SEQ ID NO: 777463 - RNA, 19 nt, Homo sapiens
  misc_RNA (1)...(19): siRNA sense strand
cuacaggcuugcacuaugg

SEQ ID NO: 777464 - RNA, 19 nt, Homo sapiens
  misc_RNA (1)...(19): siRNA sense strand
cuaccucuaucacaaguuc

SEQ ID NO: 777465 - RNA, 19 nt, Homo sapiens
  misc_RNA (1)...(19): siRNA sense strand
gaugaagaacuacacagau

SEQ ID NO: 777466 - RNA, 19 nt, Homo sapiens
  misc_RNA (1)...(19): siRNA sense strand
gauaucggaagaagaaauc

SEQ ID NO: 777467 - RNA, 19 nt, Homo sapiens
  misc_RNA (1)...(19): siRNA sense strand
gccaggauuuuacugaaua

SEQ ID NO: 777468 - RNA, 19 nt, Homo sapiens
  misc_RNA (1)...(19): siRNA sense strand
gagcuugacccaggcacua

SEQ ID NO: 777469 - RNA, 19 nt, Homo sapiens
  misc_RNA (1)...(19): siRNA sense strand
uagcuauucuggccacuca

SEQ ID NO: 777470 - RNA, 19 nt, Homo sapiens
  misc_RNA (1)...(19): siRNA sense strand
ucugcgagcucucaaucaa

SEQ ID NO: 777471 - RNA, 19 nt, Homo sapiens
  misc_RNA (1)...(19): siRNA sense strand
gugcuuaccugagauucga

SEQ ID NO: 777472 - RNA, 19 nt, Homo sapiens
  misc_RNA (1)...(19): siRNA sense strand
gaaccgcuuuccugaucuc

SEQ ID NO: 777473 - RNA, 19 nt, Homo sapiens
  misc_RNA (1)...(19): siRNA sense strand
ucacaaguuccaucagcua

SEQ ID NO: 777474 - RNA, 19 nt, Homo sapiens
  misc_RNA (1)...(19): siRNA sense strand
guacucgcccuccgaugaa

SEQ ID NO: 777475 - RNA, 19 nt, Homo sapiens
  misc_RNA (1)...(19): siRNA sense strand
uuaagguggugcugcauuc

SEQ ID NO: 777476 - RNA, 19 nt, Homo sapiens
  misc_RNA (1)...(19): siRNA sense strand
ggaucaagaaacugccuuu

SEQ ID NO: 777477 - RNA, 19 nt, Homo sapiens
  misc_RNA (1)...(19): siRNA sense strand
ccgcuuuccugaucucaug

SEQ ID NO: 777478 - RNA, 19 nt, Homo sapiens
  misc_RNA (1)...(19): siRNA sense strand
gaugcagucgugacaagaa

SEQ ID NO: 777479 - RNA, 19 nt, Homo sapiens
  misc_RNA (1)...(19): siRNA sense strand
aauaaacgauacugguaca

SEQ ID NO: 777480 - RNA, 19 nt, Homo sapiens
  misc_RNA (1)...(19): siRNA sense strand
cuguggaacugaauggauu

SEQ ID NO: 777481 - RNA, 19 nt, Homo sapiens
  misc_RNA (1)...(19): siRNA sense strand
ugaaagcaauuaacuuccu

SEQ ID NO: 777482 - RNA, 19 nt, Homo sapiens
  misc_RNA (1)...(19): siRNA sense strand
cgaugaagaacuacacaga

SEQ ID NO: 777483 - RNA, 19 nt, Homo sapiens
  misc_RNA (1)...(19): siRNA sense strand
gcagauugccuggaucaag

SEQ ID NO: 777484 - RNA, 19 nt, Homo sapiens
  misc_RNA (1)...(19): siRNA sense strand
ccuggaggccggaauaaga

SEQ ID NO: 777485 - RNA, 19 nt, Homo sapiens
  misc_RNA (1)...(19): siRNA sense strand
ugaugucacugccaaguac

SEQ ID NO: 777486 - RNA, 19 nt, Homo sapiens
  misc_RNA (1)...(19): siRNA sense strand
ugaucgggcugaacaacga

SEQ ID NO: 777487 - RNA, 19 nt, Homo sapiens
  misc_RNA (1)...(19): siRNA sense strand
ccuccacauuaccaauaua

SEQ ID NO: 777488 - RNA, 19 nt, Homo sapiens
  misc_RNA (1)...(19): siRNA sense strand
gcaggaaagauggugaaug

SEQ ID NO: 777489 - RNA, 19 nt, Homo sapiens
  misc_RNA (1)...(19): siRNA sense strand
agaacuauuugcccugcuu

SEQ ID NO: 777490 - RNA, 19 nt, Homo sapiens
  misc_RNA (1)...(19): siRNA sense strand
uucgauauauugcaggaaa

SEQ ID NO: 777491 - RNA, 19 nt, Homo sapiens
  misc_RNA (1)...(19): siRNA sense strand
ucacagcuggaacaauuga

SEQ ID NO: 777492 - RNA, 19 nt, Homo sapiens
  misc_RNA (1)...(19): siRNA sense strand
cauguugauugaagaugga

SEQ ID NO: 777493 - RNA, 19 nt, Homo sapiens
  misc_RNA (1)...(19): siRNA sense strand
aaacggguauaucgaugca

SEQ ID NO: 777494 - RNA, 19 nt, Homo sapiens
  misc_RNA (1)...(19): siRNA sense strand
ccagucauacagucugauu

SEQ ID NO: 777495 - RNA, 19 nt, Homo sapiens
  misc_RNA (1)...(19): siRNA sense strand
ggaacaauugaauaaacga

SEQ ID NO: 777496 - RNA, 19 nt, Homo sapiens
  misc_RNA (1)...(19): siRNA sense strand
gcuggaacaauugaauaaa

SEQ ID NO: 777497 - RNA, 19 nt, Homo sapiens
  misc_RNA (1)...(19): siRNA sense strand
cuuccuaaaucaagauauc

SEQ ID NO: 777498 - RNA, 19 nt, Homo sapiens
  misc_RNA (1)...(19): siRNA sense strand
gcauugggccaguccagau

SEQ ID NO: 777499 - RNA, 19 nt, Homo sapiens
  misc_RNA (1)...(19): siRNA sense strand
ggucagcaacgaggaguau

SEQ ID NO: 777500 - RNA, 19 nt, Homo sapiens
  misc_RNA (1)...(19): siRNA sense strand
guacugccgccugcucaaa

SEQ ID NO: 777501 - RNA, 19 nt, Homo sapiens
  misc_RNA (1)...(19): siRNA sense strand
ugucugggcaggaguuuga

SEQ ID NO: 777502 - RNA, 19 nt, Homo sapiens
  misc_RNA (1)...(19): siRNA sense strand
uuccugaucucaugaugug

SEQ ID NO: 777503 - RNA, 19 nt, Homo sapiens
  misc_RNA (1)...(19): siRNA sense strand
gccuccacauuaccaauau

SEQ ID NO: 777504 - RNA, 19 nt, Homo sapiens
  misc_RNA (1)...(19): siRNA sense strand
aagcggagcauuugcaaca

SEQ ID NO: 777505 - RNA, 19 nt, Homo sapiens
  misc_RNA (1)...(19): siRNA sense strand
gcaggaguuugaggaagag

SEQ ID NO: 777506 - RNA, 19 nt, Homo sapiens
  misc_RNA (1)...(19): siRNA sense strand
guccagauaucggaagaag

SEQ ID NO: 777507 - RNA, 19 nt, Homo sapiens
  misc_RNA (1)...(19): siRNA sense strand
augaugugcuuaccugaga

SEQ ID NO: 777508 - RNA, 19 nt, Homo sapiens
  misc_RNA (1)...(19): siRNA sense strand
ggugauagugaccacaguu

SEQ ID NO: 777509 - RNA, 19 nt, Homo sapiens
  misc_RNA (1)...(19): siRNA sense strand
caacgaaccugucucauuu

SEQ ID NO: 777510 - RNA, 19 nt, Homo sapiens
  misc_RNA (1)...(19): siRNA sense strand
gcaauuaacuuccuaaauc

SEQ ID NO: 777511 - RNA, 19 nt, Homo sapiens
  misc_RNA (1)...(19): siRNA sense strand
gaagaacuacacagauuua

SEQ ID NO: 777512 - RNA, 19 nt, Homo sapiens
  misc_RNA (1)...(19): siRNA sense strand
gaaagcaauuaacuuccua

SEQ ID NO: 777513 - RNA, 19 nt, Homo sapiens
  misc_RNA (1)...(19): siRNA sense strand
gaagauggauacgcuguga

SEQ ID NO: 777514 - RNA, 19 nt, Homo sapiens
  misc_RNA (1)...(19): siRNA sense strand
aaacgauacugguacauuu

SEQ ID NO: 777515 - RNA, 19 nt, Homo sapiens
  misc_RNA (1)...(19): siRNA sense strand
ccucacagcuggaacaauu

SEQ ID NO: 777516 - RNA, 19 nt, Homo sapiens
  misc_RNA (1)...(19): siRNA sense strand
caggaaagauggugaaugu

SEQ ID NO: 777517 - RNA, 19 nt, Homo sapiens
  misc_RNA (1)...(19): siRNA sense strand
gaagaaaucgaaaggauca

SEQ ID NO: 777518 - RNA, 19 nt, Homo sapiens
  misc_RNA (1)...(19): siRNA sense strand
cuacacagauuuagugaug

SEQ ID NO: 777519 - RNA, 19 nt, Homo sapiens
  misc_RNA (1)...(19): siRNA sense strand
gaacaacgaaccugucuca

SEQ ID NO: 777520 - RNA, 19 nt, Homo sapiens
  misc_RNA (1)...(19): siRNA sense strand
gcacgcccauguugauuga

SEQ ID NO: 777521 - RNA, 19 nt, Homo sapiens
  misc_RNA (1)...(19): siRNA sense strand
ccagauaucggaagaagaa

SEQ ID NO: 777522 - RNA, 19 nt, Homo sapiens
  misc_RNA (1)...(19): siRNA sense strand
ugucuucccucaccguuua

SEQ ID NO: 777523 - RNA, 19 nt, Homo sapiens
  misc_RNA (1)...(19): siRNA sense strand
ggaacuggcugaugucacu

SEQ ID NO: 777524 - RNA, 19 nt, Homo sapiens
  misc_RNA (1)...(19): siRNA sense strand
gagcaaccauggugauagu

SEQ ID NO: 777525 - RNA, 19 nt, Homo sapiens
  misc_RNA (1)...(19): siRNA sense strand
cagauugccuggaucaaga

SEQ ID NO: 777526 - RNA, 19 nt, Homo sapiens
  misc_RNA (1)...(19): siRNA sense strand
caauauauaccgcaccuuu

SEQ ID NO: 777527 - RNA, 19 nt, Homo sapiens
  misc_RNA (1)...(19): siRNA sense strand
caagaacugugucaugucu

SEQ ID NO: 777528 - RNA, 19 nt, Homo sapiens
  misc_RNA (1)...(19): siRNA sense strand
gacacaggcagaacuauuu

SEQ ID NO: 777529 - RNA, 19 nt, Homo sapiens
  misc_RNA (1)...(19): siRNA sense strand
gcuacaggcuugcacuaug

SEQ ID NO: 777530 - RNA, 19 nt, Homo sapiens
  misc_RNA (1)...(19): siRNA sense strand
ugaauaaacgauacuggua

SEQ ID NO: 777531 - RNA, 19 nt, Homo sapiens
  misc_RNA (1)...(19): siRNA sense strand
ccgaggaccuggaaccauu

SEQ ID NO: 777532 - RNA, 19 nt, Homo sapiens
  misc_RNA (1)...(19): siRNA sense strand
gauuacacgugccucuuga

SEQ ID NO: 777533 - RNA, 19 nt, Homo sapiens
  misc_RNA (1)...(19): siRNA sense strand
uaccugagauucgauauau

SEQ ID NO: 777534 - RNA, 19 nt, Homo sapiens
  misc_RNA (1)...(19): siRNA sense strand
ggcaggaguuugaggaaga

SEQ ID NO: 777535 - RNA, 19 nt, Homo sapiens
  misc_RNA (1)...(19): siRNA sense strand
acacagauuuagugaugaa

SEQ ID NO: 777536 - RNA, 19 nt, Homo sapiens
  misc_RNA (1)...(19): siRNA sense strand
aagaagaaaucgaaaggau

SEQ ID NO: 777537 - RNA, 19 nt, Homo sapiens
  misc_RNA (1)...(19): siRNA sense strand
ucaccaggcuccacacugu

SEQ ID NO: 777538 - RNA, 19 nt, Homo sapiens
  misc_RNA (1)...(19): siRNA sense strand
gcucaaaugccuccagaug

SEQ ID NO: 777539 - RNA, 19 nt, Homo sapiens
  misc_RNA (1)...(19): siRNA sense strand
gcccuccgaugaagaacua

SEQ ID NO: 777540 - RNA, 19 nt, Homo sapiens
  misc_RNA (1)...(19): siRNA sense strand
gagcuaauccugcugucuu

SEQ ID NO: 777541 - RNA, 19 nt, Homo sapiens
  misc_RNA (1)...(19): siRNA sense strand
augaagaacuacacagauu

SEQ ID NO: 777542 - RNA, 19 nt, Homo sapiens
  misc_RNA (1)...(19): siRNA sense strand
caugaaagcaauuaacuuc

SEQ ID NO: 777543 - RNA, 19 nt, Homo sapiens
  misc_RNA (1)...(19): siRNA sense strand
guaggucuguggaacugaa

SEQ ID NO: 777544 - RNA, 19 nt, Homo sapiens
  misc_RNA (1)...(19): siRNA sense strand
caacaaacggguauaucga

SEQ ID NO: 777545 - RNA, 19 nt, Homo sapiens
  misc_RNA (1)...(19): siRNA sense strand
ggaagaagaaaucgaaagg

SEQ ID NO: 777546 - RNA, 19 nt, Homo sapiens
  misc_RNA (1)...(19): siRNA sense strand
gaagaagaaaucgaaagga

SEQ ID NO: 777547 - RNA, 19 nt, Homo sapiens
  misc_RNA (1)...(19): siRNA sense strand
ugaagaacuacacagauuu

SEQ ID NO: 777548 - RNA, 19 nt, Homo sapiens
  misc_RNA (1)...(19): siRNA sense strand
acaacgaaccugucucauu

SEQ ID NO: 777549 - RNA, 19 nt, Homo sapiens
  misc_RNA (1)...(19): siRNA sense strand
gaaaucgaaaggaucaugu

SEQ ID NO: 777550 - RNA, 19 nt, Homo sapiens
  misc_RNA (1)...(19): siRNA sense strand
gcaacaaacggguauaucg

SEQ ID NO: 777551 - RNA, 19 nt, Homo sapiens
  misc_RNA (1)...(19): siRNA sense strand
ccgaaccgcuuuccugauc

SEQ ID NO: 777552 - RNA, 19 nt, Homo sapiens
  misc_RNA (1)...(19): siRNA sense strand
gcaaccauggugauaguga

SEQ ID NO: 777553 - RNA, 19 nt, Homo sapiens
  misc_RNA (1)...(19): siRNA sense strand
gcaugaaagcaauuaacuu

SEQ ID NO: 777554 - RNA, 19 nt, Homo sapiens
  misc_RNA (1)...(19): siRNA sense strand
ucaucuaccucuaucacaa

SEQ ID NO: 777555 - RNA, 19 nt, Homo sapiens
  misc_RNA (1)...(19): siRNA sense strand
gaacuauuugcccugcuuu

SEQ ID NO: 777556 - RNA, 19 nt, Homo sapiens
  misc_RNA (1)...(19): siRNA sense strand
caaguuccaucagcuaaag

SEQ ID NO: 777557 - RNA, 19 nt, Homo sapiens
  misc_RNA (1)...(19): siRNA sense strand
ggauuacacgugccucuug

SEQ ID NO: 777558 - RNA, 19 nt, Homo sapiens
  misc_RNA (1)...(19): siRNA sense strand
cagcuggaacaauugaaua

SEQ ID NO: 777559 - RNA, 19 nt, Homo sapiens
  misc_RNA (1)...(19): siRNA sense strand
ccacauuaccaauauauac

SEQ ID NO: 777560 - RNA, 19 nt, Homo sapiens
  misc_RNA (1)...(19): siRNA sense strand
ccugagauucgauauauug

SEQ ID NO: 777561 - RNA, 19 nt, Homo sapiens
  misc_RNA (1)...(19): siRNA sense strand
uaaacgauacugguacauu

SEQ ID NO: 777562 - RNA, 19 nt, Homo sapiens
  misc_RNA (1)...(19): siRNA sense strand
ugacacaggcagaacuauu

SEQ ID NO: 777563 - RNA, 19 nt, Homo sapiens
  misc_RNA (1)...(19): siRNA sense strand
cuacaggcuugcacuaugg

SEQ ID NO: 777564 - RNA, 19 nt, Homo sapiens
  misc_RNA (1)...(19): siRNA sense strand
cuaccucuaucacaaguuc

SEQ ID NO: 777565 - RNA, 19 nt, Homo sapiens
  misc_RNA (1)...(19): siRNA sense strand
gaugaagaacuacacagau

SEQ ID NO: 777566 - RNA, 19 nt, Homo sapiens
  misc_RNA (1)...(19): siRNA sense strand
gauaucggaagaagaaauc

SEQ ID NO: 777567 - RNA, 19 nt, Homo sapiens
  misc_RNA (1)...(19): siRNA sense strand
gccaggauuuuacugaaua

SEQ ID NO: 777568 - RNA, 19 nt, Homo sapiens
  misc_RNA (1)...(19): siRNA sense strand
gagcuugacccaggcacua

SEQ ID NO: 777569 - RNA, 19 nt, Homo sapiens
  misc_RNA (1)...(19): siRNA sense strand
uagcuauucuggccacuca

SEQ ID NO: 777570 - RNA, 19 nt, Homo sapiens
  misc_RNA (1)...(19): siRNA sense strand
ucugcgagcucucaaucaa

SEQ ID NO: 777571 - RNA, 19 nt, Homo sapiens
  misc_RNA (1)...(19): siRNA sense strand
gugcuuaccugagauucga

SEQ ID NO: 777572 - RNA, 19 nt, Homo sapiens
  misc_RNA (1)...(19): siRNA sense strand
gaaccgcuuuccugaucuc

SEQ ID NO: 777573 - RNA, 19 nt, Homo sapiens
  misc_RNA (1)...(19): siRNA sense strand
ucacaaguuccaucagcua

SEQ ID NO: 777574 - RNA, 19 nt, Homo sapiens
  misc_RNA (1)...(19): siRNA sense strand
guacucgcccuccgaugaa

SEQ ID NO: 777575 - RNA, 19 nt, Homo sapiens
  misc_RNA (1)...(19): siRNA sense strand
uuaagguggugcugcauuc

SEQ ID NO: 777576 - RNA, 19 nt, Homo sapiens
  misc_RNA (1)...(19): siRNA sense strand
ggaucaagaaacugccuuu

SEQ ID NO: 777577 - RNA, 19 nt, Homo sapiens
  misc_RNA (1)...(19): siRNA sense strand
ccgcuuuccugaucucaug

SEQ ID NO: 777578 - RNA, 19 nt, Homo sapiens
  misc_RNA (1)...(19): siRNA sense strand
gaugcagucgugacaagaa

SEQ ID NO: 777579 - RNA, 19 nt, Homo sapiens
  misc_RNA (1)...(19): siRNA sense strand
aauaaacgauacugguaca

SEQ ID NO: 777580 - RNA, 19 nt, Homo sapiens
  misc_RNA (1)...(19): siRNA sense strand
cuguggaacugaauggauu

SEQ ID NO: 777581 - RNA, 19 nt, Homo sapiens
  misc_RNA (1)...(19): siRNA sense strand
ugaaagcaauuaacuuccu

SEQ ID NO: 777582 - RNA, 19 nt, Homo sapiens
  misc_RNA (1)...(19): siRNA sense strand
cgaugaagaacuacacaga

SEQ ID NO: 777583 - RNA, 19 nt, Homo sapiens
  misc_RNA (1)...(19): siRNA sense strand
gcagauugccuggaucaag

SEQ ID NO: 777584 - RNA, 19 nt, Homo sapiens
  misc_RNA (1)...(19): siRNA sense strand
ccuggaggccggaauaaga

SEQ ID NO: 777585 - RNA, 19 nt, Homo sapiens
  misc_RNA (1)...(19): siRNA sense strand
ugaugucacugccaaguac

SEQ ID NO: 777586 - RNA, 19 nt, Homo sapiens
  misc_RNA (1)...(19): siRNA sense strand
ugaucgggcugaacaacga

SEQ ID NO: 777587 - RNA, 19 nt, Homo sapiens
  misc_RNA (1)...(19): siRNA sense strand
ccuccacauuaccaauaua

SEQ ID NO: 777588 - RNA, 19 nt, Homo sapiens
  misc_RNA (1)...(19): siRNA sense strand
gcaggaaagauggugaaug

SEQ ID NO: 777589 - RNA, 19 nt, Homo sapiens
  misc_RNA (1)...(19): siRNA sense strand
agaacuauuugcccugcuu

SEQ ID NO: 777590 - RNA, 19 nt, Homo sapiens
  misc_RNA (1)...(19): siRNA sense strand
uucgauauauugcaggaaa

SEQ ID NO: 777591 - RNA, 19 nt, Homo sapiens
  misc_RNA (1)...(19): siRNA sense strand
ucacagcuggaacaauuga

SEQ ID NO: 777592 - RNA, 19 nt, Homo sapiens
  misc_RNA (1)...(19): siRNA sense strand
cauguugauugaagaugga

SEQ ID NO: 777593 - RNA, 19 nt, Homo sapiens
  misc_RNA (1)...(19): siRNA sense strand
aaacggguauaucgaugca

SEQ ID NO: 777594 - RNA, 19 nt, Homo sapiens
  misc_RNA (1)...(19): siRNA sense strand
ccagucauacagucugauu

SEQ ID NO: 777595 - RNA, 19 nt, Homo sapiens
  misc_RNA (1)...(19): siRNA sense strand
ggaacaauugaauaaacga

SEQ ID NO: 777596 - RNA, 19 nt, Homo sapiens
  misc_RNA (1)...(19): siRNA sense strand
gcuggaacaauugaauaaa

SEQ ID NO: 777597 - RNA, 19 nt, Homo sapiens
  misc_RNA (1)...(19): siRNA sense strand
cuuccuaaaucaagauauc

SEQ ID NO: 777598 - RNA, 19 nt, Homo sapiens
  misc_RNA (1)...(19): siRNA sense strand
gcauugggccaguccagau

SEQ ID NO: 777599 - RNA, 19 nt, Homo sapiens
  misc_RNA (1)...(19): siRNA sense strand
ggucagcaacgaggaguau

SEQ ID NO: 777600 - RNA, 19 nt, Homo sapiens
  misc_RNA (1)...(19): siRNA sense strand
guacugccgccugcucaaa

SEQ ID NO: 777601 - RNA, 19 nt, Homo sapiens
  misc_RNA (1)...(19): siRNA sense strand
ugucugggcaggaguuuga

SEQ ID NO: 777602 - RNA, 19 nt, Homo sapiens
  misc_RNA (1)...(19): siRNA sense strand
uuccugaucucaugaugug

SEQ ID NO: 777603 - RNA, 19 nt, Homo sapiens
  misc_RNA (1)...(19): siRNA sense strand
gccuccacauuaccaauau

SEQ ID NO: 777604 - RNA, 19 nt, Homo sapiens
  misc_RNA (1)...(19): siRNA sense strand
aagcggagcauuugcaaca

SEQ ID NO: 777605 - RNA, 19 nt, Homo sapiens
  misc_RNA (1)...(19): siRNA sense strand
gcaggaguuugaggaagag

SEQ ID NO: 777606 - RNA, 19 nt, Homo sapiens
  misc_RNA (1)...(19): siRNA sense strand
guccagauaucggaagaag

SEQ ID NO: 777607 - RNA, 19 nt, Homo sapiens
  misc_RNA (1)...(19): siRNA sense strand
augaugugcuuaccugaga

SEQ ID NO: 777608 - RNA, 19 nt, Homo sapiens
  misc_RNA (1)...(19): siRNA sense strand
ggugauagugaccacaguu

SEQ ID NO: 777609 - RNA, 19 nt, Homo sapiens
  misc_RNA (1)...(19): siRNA sense strand
caacgaaccugucucauuu

SEQ ID NO: 777610 - RNA, 19 nt, Homo sapiens
  misc_RNA (1)...(19): siRNA sense strand
gcaauuaacuuccuaaauc

SEQ ID NO: 777611 - RNA, 19 nt, Homo sapiens
  misc_RNA (1)...(19): siRNA sense strand
gaagaacuacacagauuua

SEQ ID NO: 777612 - RNA, 19 nt, Homo sapiens
  misc_RNA (1)...(19): siRNA sense strand
gaaagcaauuaacuuccua

SEQ ID NO: 777613 - RNA, 19 nt, Homo sapiens
  misc_RNA (1)...(19): siRNA sense strand
gaagauggauacgcuguga

SEQ ID NO: 777614 - RNA, 19 nt, Homo sapiens
  misc_RNA (1)...(19): siRNA sense strand
aaacgauacugguacauuu

SEQ ID NO: 777615 - RNA, 19 nt, Homo sapiens
  misc_RNA (1)...(19): siRNA sense strand
ccucacagcuggaacaauu

SEQ ID NO: 777616 - RNA, 19 nt, Homo sapiens
  misc_RNA (1)...(19): siRNA sense strand
caggaaagauggugaaugu

SEQ ID NO: 777617 - RNA, 19 nt, Homo sapiens
  misc_RNA (1)...(19): siRNA sense strand
gaagaaaucgaaaggauca

SEQ ID NO: 777618 - RNA, 19 nt, Homo sapiens
  misc_RNA (1)...(19): siRNA sense strand
cuacacagauuuagugaug

SEQ ID NO: 777619 - RNA, 19 nt, Homo sapiens
  misc_RNA (1)...(19): siRNA sense strand
gaacaacgaaccugucuca

SEQ ID NO: 777620 - RNA, 19 nt, Homo sapiens
  misc_RNA (1)...(19): siRNA sense strand
gcacgcccauguugauuga

SEQ ID NO: 777621 - RNA, 19 nt, Homo sapiens
  misc_RNA (1)...(19): siRNA sense strand
ccagauaucggaagaagaa

SEQ ID NO: 777622 - RNA, 19 nt, Homo sapiens
  misc_RNA (1)...(19): siRNA sense strand
ugucuucccucaccguuua

SEQ ID NO: 777623 - RNA, 19 nt, Homo sapiens
  misc_RNA (1)...(19): siRNA sense strand
ggaacuggcugaugucacu

SEQ ID NO: 777624 - RNA, 19 nt, Homo sapiens
  misc_RNA (1)...(19): siRNA sense strand
gagcaaccauggugauagu

SEQ ID NO: 777625 - RNA, 19 nt, Homo sapiens
  misc_RNA (1)...(19): siRNA sense strand
cagauugccuggaucaaga

SEQ ID NO: 777626 - RNA, 19 nt, Homo sapiens
  misc_RNA (1)...(19): siRNA sense strand
caauauauaccgcaccuuu

SEQ ID NO: 777627 - RNA, 19 nt, Homo sapiens
  misc_RNA (1)...(19): siRNA sense strand
caagaacugugucaugucu

SEQ ID NO: 777628 - RNA, 19 nt, Homo sapiens
  misc_RNA (1)...(19): siRNA sense strand
gacacaggcagaacuauuu

SEQ ID NO: 777629 - RNA, 19 nt, Homo sapiens
  misc_RNA (1)...(19): siRNA sense strand
gcuacaggcuugcacuaug

SEQ ID NO: 777630 - RNA, 19 nt, Homo sapiens
  misc_RNA (1)...(19): siRNA sense strand
ugaauaaacgauacuggua

SEQ ID NO: 777631 - RNA, 19 nt, Homo sapiens
  misc_RNA (1)...(19): siRNA sense strand
ccgaggaccuggaaccauu

SEQ ID NO: 777632 - RNA, 19 nt, Homo sapiens
  misc_RNA (1)...(19): siRNA sense strand
gauuacacgugccucuuga

SEQ ID NO: 777633 - RNA, 19 nt, Homo sapiens
  misc_RNA (1)...(19): siRNA sense strand
uaccugagauucgauauau

SEQ ID NO: 777634 - RNA, 19 nt, Homo sapiens
  misc_RNA (1)...(19): siRNA sense strand
ggcaggaguuugaggaaga

SEQ ID NO: 777635 - RNA, 19 nt, Homo sapiens
  misc_RNA (1)...(19): siRNA sense strand
acacagauuuagugaugaa

SEQ ID NO: 777636 - RNA, 19 nt, Homo sapiens
  misc_RNA (1)...(19): siRNA sense strand
aagaagaaaucgaaaggau

SEQ ID NO: 777637 - RNA, 19 nt, Homo sapiens
  misc_RNA (1)...(19): siRNA sense strand
ucaccaggcuccacacugu

SEQ ID NO: 777638 - RNA, 19 nt, Homo sapiens
  misc_RNA (1)...(19): siRNA sense strand
gcucaaaugccuccagaug

SEQ ID NO: 777639 - RNA, 19 nt, Homo sapiens
  misc_RNA (1)...(19): siRNA sense strand
gcccuccgaugaagaacua

SEQ ID NO: 777640 - RNA, 19 nt, Homo sapiens
  misc_RNA (1)...(19): siRNA sense strand
gagcuaauccugcugucuu

SEQ ID NO: 777641 - RNA, 19 nt, Homo sapiens
  misc_RNA (1)...(19): siRNA sense strand
augaagaacuacacagauu

SEQ ID NO: 777642 - RNA, 19 nt, Homo sapiens
  misc_RNA (1)...(19): siRNA sense strand
caugaaagcaauuaacuuc

SEQ ID NO: 777643 - RNA, 19 nt, Homo sapiens
  misc_RNA (1)...(19): siRNA sense strand
guaggucuguggaacugaa

SEQ ID NO: 777644 - RNA, 19 nt, Homo sapiens
  misc_RNA (1)...(19): siRNA sense strand
caacaaacggguauaucga

SEQ ID NO: 777645 - RNA, 19 nt, Homo sapiens
  misc_RNA (1)...(19): siRNA sense strand
ggaagaagaaaucgaaagg

SEQ ID NO: 777646 - RNA, 19 nt, Homo sapiens
  misc_RNA (1)...(19): siRNA sense strand
gaagaagaaaucgaaagga

SEQ ID NO: 777647 - RNA, 19 nt, Homo sapiens
  misc_RNA (1)...(19): siRNA sense strand
ugaagaacuacacagauuu

SEQ ID NO: 777648 - RNA, 19 nt, Homo sapiens
  misc_RNA (1)...(19): siRNA sense strand
acaacgaaccugucucauu

SEQ ID NO: 777649 - RNA, 19 nt, Homo sapiens
  misc_RNA (1)...(19): siRNA sense strand
gaaaucgaaaggaucaugu

SEQ ID NO: 777650 - RNA, 19 nt, Homo sapiens
  misc_RNA (1)...(19): siRNA sense strand
gcaacaaacggguauaucg

SEQ ID NO: 777651 - RNA, 19 nt, Homo sapiens
  misc_RNA (1)...(19): siRNA sense strand
ccgaaccgcuuuccugauc

SEQ ID NO: 777652 - RNA, 19 nt, Homo sapiens
  misc_RNA (1)...(19): siRNA sense strand
gcaaccauggugauaguga

SEQ ID NO: 777653 - RNA, 19 nt, Homo sapiens
  misc_RNA (1)...(19): siRNA sense strand
gcaugaaagcaauuaacuu

SEQ ID NO: 777654 - RNA, 19 nt, Homo sapiens
  misc_RNA (1)...(19): siRNA sense strand
ucaucuaccucuaucacaa

SEQ ID NO: 777655 - RNA, 19 nt, Homo sapiens
  misc_RNA (1)...(19): siRNA sense strand
gaacuauuugcccugcuuu

SEQ ID NO: 777656 - RNA, 19 nt, Homo sapiens
  misc_RNA (1)...(19): siRNA sense strand
caaguuccaucagcuaaag

SEQ ID NO: 777657 - RNA, 19 nt, Homo sapiens
  misc_RNA (1)...(19): siRNA sense strand
ggauuacacgugccucuug

SEQ ID NO: 777658 - RNA, 19 nt, Homo sapiens
  misc_RNA (1)...(19): siRNA sense strand
cagcuggaacaauugaaua

SEQ ID NO: 777659 - RNA, 19 nt, Homo sapiens
  misc_RNA (1)...(19): siRNA sense strand
ccacauuaccaauauauac

SEQ ID NO: 777660 - RNA, 19 nt, Homo sapiens
  misc_RNA (1)...(19): siRNA sense strand
ccugagauucgauauauug

SEQ ID NO: 777661 - RNA, 19 nt, Homo sapiens
  misc_RNA (1)...(19): siRNA sense strand
uaaacgauacugguacauu

SEQ ID NO: 777662 - RNA, 19 nt, Homo sapiens
  misc_RNA (1)...(19): siRNA sense strand
ugacacaggcagaacuauu

SEQ ID NO: 777663 - RNA, 19 nt, Homo sapiens
  misc_RNA (1)...(19): siRNA sense strand
cuacaggcuugcacuaugg

SEQ ID NO: 777664 - RNA, 19 nt, Homo sapiens
  misc_RNA (1)...(19): siRNA sense strand
cuaccucuaucacaaguuc

SEQ ID NO: 777665 - RNA, 19 nt, Homo sapiens
  misc_RNA (1)...(19): siRNA sense strand
gaugaagaacuacacagau

SEQ ID NO: 777666 - RNA, 19 nt, Homo sapiens
  misc_RNA (1)...(19): siRNA sense strand
gauaucggaagaagaaauc

SEQ ID NO: 777667 - RNA, 19 nt, Homo sapiens
  misc_RNA (1)...(19): siRNA sense strand
gccaggauuuuacugaaua

SEQ ID NO: 777668 - RNA, 19 nt, Homo sapiens
  misc_RNA (1)...(19): siRNA sense strand
gagcuugacccaggcacua

SEQ ID NO: 777669 - RNA, 19 nt, Homo sapiens
  misc_RNA (1)...(19): siRNA sense strand
uagcuauucuggccacuca

SEQ ID NO: 777670 - RNA, 19 nt, Homo sapiens
  misc_RNA (1)...(19): siRNA sense strand
ucugcgagcucucaaucaa

SEQ ID NO: 777671 - RNA, 19 nt, Homo sapiens
  misc_RNA (1)...(19): siRNA sense strand
gugcuuaccugagauucga

SEQ ID NO: 777672 - RNA, 19 nt, Homo sapiens
  misc_RNA (1)...(19): siRNA sense strand
gaaccgcuuuccugaucuc

SEQ ID NO: 777673 - RNA, 19 nt, Homo sapiens
  misc_RNA (1)...(19): siRNA sense strand
ucacaaguuccaucagcua

SEQ ID NO: 777674 - RNA, 19 nt, Homo sapiens
  misc_RNA (1)...(19): siRNA sense strand
guacucgcccuccgaugaa

SEQ ID NO: 777675 - RNA, 19 nt, Homo sapiens
  misc_RNA (1)...(19): siRNA sense strand
uuaagguggugcugcauuc

SEQ ID NO: 777676 - RNA, 19 nt, Homo sapiens
  misc_RNA (1)...(19): siRNA sense strand
ggaucaagaaacugccuuu

SEQ ID NO: 777677 - RNA, 19 nt, Homo sapiens
  misc_RNA (1)...(19): siRNA sense strand
ccgcuuuccugaucucaug

SEQ ID NO: 777678 - RNA, 19 nt, Homo sapiens
  misc_RNA (1)...(19): siRNA sense strand
gaugcagucgugacaagaa

SEQ ID NO: 777679 - RNA, 19 nt, Homo sapiens
  misc_RNA (1)...(19): siRNA sense strand
aauaaacgauacugguaca

SEQ ID NO: 777680 - RNA, 19 nt, Homo sapiens
  misc_RNA (1)...(19): siRNA sense strand
cuguggaacugaauggauu

SEQ ID NO: 777681 - RNA, 19 nt, Homo sapiens
  misc_RNA (1)...(19): siRNA sense strand
ugaaagcaauuaacuuccu

SEQ ID NO: 777682 - RNA, 19 nt, Homo sapiens
  misc_RNA (1)...(19): siRNA sense strand
cgaugaagaacuacacaga

SEQ ID NO: 777683 - RNA, 19 nt, Homo sapiens
  misc_RNA (1)...(19): siRNA sense strand
gcagauugccuggaucaag

SEQ ID NO: 777684 - RNA, 19 nt, Homo sapiens
  misc_RNA (1)...(19): siRNA sense strand
ccuggaggccggaauaaga

SEQ ID NO: 777685 - RNA, 19 nt, Homo sapiens
  misc_RNA (1)...(19): siRNA sense strand
ugaugucacugccaaguac

SEQ ID NO: 777686 - RNA, 19 nt, Homo sapiens
  misc_RNA (1)...(19): siRNA sense strand
ugaucgggcugaacaacga

SEQ ID NO: 777687 - RNA, 19 nt, Homo sapiens
  misc_RNA (1)...(19): siRNA sense strand
ccuccacauuaccaauaua

SEQ ID NO: 777688 - RNA, 19 nt, Homo sapiens
  misc_RNA (1)...(19): siRNA sense strand
gcaggaaagauggugaaug

SEQ ID NO: 777689 - RNA, 19 nt, Homo sapiens
  misc_RNA (1)...(19): siRNA sense strand
agaacuauuugcccugcuu

SEQ ID NO: 777690 - RNA, 19 nt, Homo sapiens
  misc_RNA (1)...(19): siRNA sense strand
uucgauauauugcaggaaa

SEQ ID NO: 777691 - RNA, 19 nt, Homo sapiens
  misc_RNA (1)...(19): siRNA sense strand
ucacagcuggaacaauuga

SEQ ID NO: 777692 - RNA, 19 nt, Homo sapiens
  misc_RNA (1)...(19): siRNA sense strand
cauguugauugaagaugga

SEQ ID NO: 777693 - RNA, 19 nt, Homo sapiens
  misc_RNA (1)...(19): siRNA sense strand
aaacggguauaucgaugca

SEQ ID NO: 777694 - RNA, 19 nt, Homo sapiens
  misc_RNA (1)...(19): siRNA sense strand
ccagucauacagucugauu

SEQ ID NO: 777695 - RNA, 19 nt, Homo sapiens
  misc_RNA (1)...(19): siRNA sense strand
ggaacaauugaauaaacga

SEQ ID NO: 777696 - RNA, 19 nt, Homo sapiens
  misc_RNA (1)...(19): siRNA sense strand
gcuggaacaauugaauaaa

SEQ ID NO: 777697 - RNA, 19 nt, Homo sapiens
  misc_RNA (1)...(19): siRNA sense strand
cuuccuaaaucaagauauc

SEQ ID NO: 777698 - RNA, 19 nt, Homo sapiens
  misc_RNA (1)...(19): siRNA sense strand
gcauugggccaguccagau

SEQ ID NO: 777699 - RNA, 19 nt, Homo sapiens
  misc_RNA (1)...(19): siRNA sense strand
ggucagcaacgaggaguau

SEQ ID NO: 777700 - RNA, 19 nt, Homo sapiens
  misc_RNA (1)...(19): siRNA sense strand
guacugccgccugcucaaa

SEQ ID NO: 777701 - RNA, 19 nt, Homo sapiens
  misc_RNA (1)...(19): siRNA sense strand
ugucugggcaggaguuuga

SEQ ID NO: 777702 - RNA, 19 nt, Homo sapiens
  misc_RNA (1)...(19): siRNA sense strand
uuccugaucucaugaugug

SEQ ID NO: 777703 - RNA, 19 nt, Homo sapiens
  misc_RNA (1)...(19): siRNA sense strand
gccuccacauuaccaauau

SEQ ID NO: 777704 - RNA, 19 nt, Homo sapiens
  misc_RNA (1)...(19): siRNA sense strand
aagcggagcauuugcaaca

SEQ ID NO: 777705 - RNA, 19 nt, Homo sapiens
  misc_RNA (1)...(19): siRNA sense strand
gcaggaguuugaggaagag

SEQ ID NO: 777706 - RNA, 19 nt, Homo sapiens
  misc_RNA (1)...(19): siRNA sense strand
guccagauaucggaagaag

SEQ ID NO: 777707 - RNA, 19 nt, Homo sapiens
  misc_RNA (1)...(19): siRNA sense strand
augaugugcuuaccugaga

SEQ ID NO: 777708 - RNA, 19 nt, Homo sapiens
  misc_RNA (1)...(19): siRNA sense strand
ggugauagugaccacaguu

SEQ ID NO: 777709 - RNA, 19 nt, Homo sapiens
  misc_RNA (1)...(19): siRNA sense strand
ggaaauaggucuaguacua

SEQ ID NO: 777710 - RNA, 19 nt, Homo sapiens
  misc_RNA (1)...(19): siRNA sense strand
agaaguagaucucccauua

SEQ ID NO: 777711 - RNA, 19 nt, Homo sapiens
  misc_RNA (1)...(19): siRNA sense strand
gaacagagaagaauccaaa

SEQ ID NO: 777712 - RNA, 19 nt, Homo sapiens
  misc_RNA (1)...(19): siRNA sense strand
ggaaagaugccaaauaaga

SEQ ID NO: 777713 - RNA, 19 nt, Homo sapiens
  misc_RNA (1)...(19): siRNA sense strand
gcaaaagacugguuuaaaa

SEQ ID NO: 777714 - RNA, 19 nt, Homo sapiens
  misc_RNA (1)...(19): siRNA sense strand
aaacagagagccuugauua

SEQ ID NO: 777715 - RNA, 19 nt, Homo sapiens
  misc_RNA (1)...(19): siRNA sense strand
aaggaaagaugccaaauaa

SEQ ID NO: 777716 - RNA, 19 nt, Homo sapiens
  misc_RNA (1)...(19): siRNA sense strand
gcgaguagcugcugauguu

SEQ ID NO: 777717 - RNA, 19 nt, Homo sapiens
  misc_RNA (1)...(19): siRNA sense strand
ggacccagcuaaacgaauu

SEQ ID NO: 777718 - RNA, 19 nt, Homo sapiens
  misc_RNA (1)...(19): siRNA sense strand
ggagaaaguuacuguuaug

SEQ ID NO: 777719 - RNA, 19 nt, Homo sapiens
  misc_RNA (1)...(19): siRNA sense strand
gaacuuacgagagguguua

SEQ ID NO: 777720 - RNA, 19 nt, Homo sapiens
  misc_RNA (1)...(19): siRNA sense strand
caauggaucucaaaggaaa

SEQ ID NO: 777721 - RNA, 19 nt, Homo sapiens
  misc_RNA (1)...(19): siRNA sense strand
ugaagaagcccuaauagaa

SEQ ID NO: 777722 - RNA, 19 nt, Homo sapiens
  misc_RNA (1)...(19): siRNA sense strand
gauguuggucuucauauua

SEQ ID NO: 777723 - RNA, 19 nt, Homo sapiens
  misc_RNA (1)...(19): siRNA sense strand
gagaugauauccucaguag

SEQ ID NO: 777724 - RNA, 19 nt, Homo sapiens
  misc_RNA (1)...(19): siRNA sense strand
auaaauaccuugcugaaga

SEQ ID NO: 777725 - RNA, 19 nt, Homo sapiens
  misc_RNA (1)...(19): siRNA sense strand
gaaaagguguguucaaaga

SEQ ID NO: 777726 - RNA, 19 nt, Homo sapiens
  misc_RNA (1)...(19): siRNA sense strand
ggaagaugcuaauucugaa

SEQ ID NO: 777727 - RNA, 19 nt, Homo sapiens
  misc_RNA (1)...(19): siRNA sense strand
ccaauuaaaucucccucua

SEQ ID NO: 777728 - RNA, 19 nt, Homo sapiens
  misc_RNA (1)...(19): siRNA sense strand
gaagcaaaguaaaggaaga

SEQ ID NO: 777729 - RNA, 19 nt, Homo sapiens
  misc_RNA (1)...(19): siRNA sense strand
guaaagaucaucagaaaca

SEQ ID NO: 777730 - RNA, 19 nt, Homo sapiens
  misc_RNA (1)...(19): siRNA sense strand
caagguguauucaguaaug

SEQ ID NO: 777731 - RNA, 19 nt, Homo sapiens
  misc_RNA (1)...(19): siRNA sense strand
gaaguaagucucaagauca

SEQ ID NO: 777732 - RNA, 19 nt, Homo sapiens
  misc_RNA (1)...(19): siRNA sense strand
agaagcaggucuccacuuu

SEQ ID NO: 777733 - RNA, 19 nt, Homo sapiens
  misc_RNA (1)...(19): siRNA sense strand
gggagaaaguuacuguuau

SEQ ID NO: 777734 - RNA, 19 nt, Homo sapiens
  misc_RNA (1)...(19): siRNA sense strand
acaauauccugguuaauga

SEQ ID NO: 777735 - RNA, 19 nt, Homo sapiens
  misc_RNA (1)...(19): siRNA sense strand
gauaaacguuacaaugugu

SEQ ID NO: 777736 - RNA, 19 nt, Homo sapiens
  misc_RNA (1)...(19): siRNA sense strand
gauggaagaugcuaauucu

SEQ ID NO: 777737 - RNA, 19 nt, Homo sapiens
  misc_RNA (1)...(19): siRNA sense strand
gcaggcaauuguucagaaa

SEQ ID NO: 777738 - RNA, 19 nt, Homo sapiens
  misc_RNA (1)...(19): siRNA sense strand
gaaagaugccaaauaagau

SEQ ID NO: 777739 - RNA, 19 nt, Homo sapiens
  misc_RNA (1)...(19): siRNA sense strand
gcaaaguaaaggaagauaa

SEQ ID NO: 777740 - RNA, 19 nt, Homo sapiens
  misc_RNA (1)...(19): siRNA sense strand
caaauuucauugucugaga

SEQ ID NO: 777741 - RNA, 19 nt, Homo sapiens
  misc_RNA (1)...(19): siRNA sense strand
guuggcaccugauauguuu

SEQ ID NO: 777742 - RNA, 19 nt, Homo sapiens
  misc_RNA (1)...(19): siRNA sense strand
gagccgauccuuagaaaga

SEQ ID NO: 777743 - RNA, 19 nt, Homo sapiens
  misc_RNA (1)...(19): siRNA sense strand
gcuguaagauccuauaguc

SEQ ID NO: 777744 - RNA, 19 nt, Homo sapiens
  misc_RNA (1)...(19): siRNA sense strand
gaacacgaccucgagauga

SEQ ID NO: 777745 - RNA, 19 nt, Homo sapiens
  misc_RNA (1)...(19): siRNA sense strand
gaaggucacgguccaaaga

SEQ ID NO: 777746 - RNA, 19 nt, Homo sapiens
  misc_RNA (1)...(19): siRNA sense strand
gacaauauccugguuaaug

SEQ ID NO: 777747 - RNA, 19 nt, Homo sapiens
  misc_RNA (1)...(19): siRNA sense strand
cagacaauauccugguuaa

SEQ ID NO: 777748 - RNA, 19 nt, Homo sapiens
  misc_RNA (1)...(19): siRNA sense strand
agaaguggcuguaaagauc

SEQ ID NO: 777749 - RNA, 19 nt, Homo sapiens
  misc_RNA (1)...(19): siRNA sense strand
uagcaggucuccaagaaga

SEQ ID NO: 777750 - RNA, 19 nt, Homo sapiens
  misc_RNA (1)...(19): siRNA sense strand
ggcaagguguauucaguaa

SEQ ID NO: 777751 - RNA, 19 nt, Homo sapiens
  misc_RNA (1)...(19): siRNA sense strand
ggucugaaacugauaaaga

SEQ ID NO: 777752 - RNA, 19 nt, Homo sapiens
  misc_RNA (1)...(19): siRNA sense strand
aaaggaaagaugccaaaua

SEQ ID NO: 777753 - RNA, 19 nt, Homo sapiens
  misc_RNA (1)...(19): siRNA sense strand
caccuuaucuugucaguag

SEQ ID NO: 777754 - RNA, 19 nt, Homo sapiens
  misc_RNA (1)...(19): siRNA sense strand
caacaugucugugccaucu

SEQ ID NO: 777755 - RNA, 19 nt, Homo sapiens
  misc_RNA (1)...(19): siRNA sense strand
gaagaagcccuaauagaac

SEQ ID NO: 777756 - RNA, 19 nt, Homo sapiens
  misc_RNA (1)...(19): siRNA sense strand
ccagagaggagacgacuuu

SEQ ID NO: 777757 - RNA, 19 nt, Homo sapiens
  misc_RNA (1)...(19): siRNA sense strand
cagaagaagacaaggauaa

SEQ ID NO: 777758 - RNA, 19 nt, Homo sapiens
  misc_RNA (1)...(19): siRNA sense strand
ccuguuggcugacuugauu

SEQ ID NO: 777759 - RNA, 19 nt, Homo sapiens
  misc_RNA (1)...(19): siRNA sense strand
uaacagagagggagaaagu

SEQ ID NO: 777760 - RNA, 19 nt, Homo sapiens
  misc_RNA (1)...(19): siRNA sense strand
ccaaauaagaugauucgaa

SEQ ID NO: 777761 - RNA, 19 nt, Homo sapiens
  misc_RNA (1)...(19): siRNA sense strand
ccaguugauuuaagaggua

SEQ ID NO: 777762 - RNA, 19 nt, Homo sapiens
  misc_RNA (1)...(19): siRNA sense strand
ccagaucuccuacugauga

SEQ ID NO: 777763 - RNA, 19 nt, Homo sapiens
  misc_RNA (1)...(19): siRNA sense strand
caacuaggagcaagucaaa

SEQ ID NO: 777764 - RNA, 19 nt, Homo sapiens
  misc_RNA (1)...(19): siRNA sense strand
aaagaacggacuagacaua

SEQ ID NO: 777765 - RNA, 19 nt, Homo sapiens
  misc_RNA (1)...(19): siRNA sense strand
gaaaguacaccagcuaaag

SEQ ID NO: 777766 - RNA, 19 nt, Homo sapiens
  misc_RNA (1)...(19): siRNA sense strand
ugaagaaaauggagaagua

SEQ ID NO: 777767 - RNA, 19 nt, Homo sapiens
  misc_RNA (1)...(19): siRNA sense strand
gaggguaugucuccagcaa

SEQ ID NO: 777768 - RNA, 19 nt, Homo sapiens
  misc_RNA (1)...(19): siRNA sense strand
gauaaugacauaacaccuu

SEQ ID NO: 777769 - RNA, 19 nt, Homo sapiens
  misc_RNA (1)...(19): siRNA sense strand
cugcugauguuaaagagua

SEQ ID NO: 777770 - RNA, 19 nt, Homo sapiens
  misc_RNA (1)...(19): siRNA sense strand
uuaaaucucccucuaaaga

SEQ ID NO: 777771 - RNA, 19 nt, Homo sapiens
  misc_RNA (1)...(19): siRNA sense strand
aggccgaacuugauaauga

SEQ ID NO: 777772 - RNA, 19 nt, Homo sapiens
  misc_RNA (1)...(19): siRNA sense strand
ccugauauguuuacagaau

SEQ ID NO: 777773 - RNA, 19 nt, Homo sapiens
  misc_RNA (1)...(19): siRNA sense strand
caccugauauguuuacaga

SEQ ID NO: 777774 - RNA, 19 nt, Homo sapiens
  misc_RNA (1)...(19): siRNA sense strand
uaaauaccuugcugaagau

SEQ ID NO: 777775 - RNA, 19 nt, Homo sapiens
  misc_RNA (1)...(19): siRNA sense strand
aggcaauuguucagaaaua

SEQ ID NO: 777776 - RNA, 19 nt, Homo sapiens
  misc_RNA (1)...(19): siRNA sense strand
gcaggaaucuucgucugau

SEQ ID NO: 777777 - RNA, 19 nt, Homo sapiens
  misc_RNA (1)...(19): siRNA sense strand
gagaggagacgacuuucuu

SEQ ID NO: 777778 - RNA, 19 nt, Homo sapiens
  misc_RNA (1)...(19): siRNA sense strand
acauaaacauuccucagaa

SEQ ID NO: 777779 - RNA, 19 nt, Homo sapiens
  misc_RNA (1)...(19): siRNA sense strand
agaagaaguuugucuccaa

SEQ ID NO: 777780 - RNA, 19 nt, Homo sapiens
  misc_RNA (1)...(19): siRNA sense strand
agaaguaagucucaagauc

SEQ ID NO: 777781 - RNA, 19 nt, Homo sapiens
  misc_RNA (1)...(19): siRNA sense strand
acagagagggagaaaguua

SEQ ID NO: 777782 - RNA, 19 nt, Homo sapiens
  misc_RNA (1)...(19): siRNA sense strand
cuucacauguugcggauaa

SEQ ID NO: 777783 - RNA, 19 nt, Homo sapiens
  misc_RNA (1)...(19): siRNA sense strand
cuguaaagaucaucagaaa

SEQ ID NO: 777784 - RNA, 19 nt, Homo sapiens
  misc_RNA (1)...(19): siRNA sense strand
ugauaaccuugaagacuuu

SEQ ID NO: 777785 - RNA, 19 nt, Homo sapiens
  misc_RNA (1)...(19): siRNA sense strand
ggaagucuuucugaaggaa

SEQ ID NO: 777786 - RNA, 19 nt, Homo sapiens
  misc_RNA (1)...(19): siRNA sense strand
gaucuccuacugaugauaa

SEQ ID NO: 777787 - RNA, 19 nt, Homo sapiens
  misc_RNA (1)...(19): siRNA sense strand
ggccagaucuccuacugau

SEQ ID NO: 777788 - RNA, 19 nt, Homo sapiens
  misc_RNA (1)...(19): siRNA sense strand
gucugaaacugauaaagaa

SEQ ID NO: 777789 - RNA, 19 nt, Homo sapiens
  misc_RNA (1)...(19): siRNA sense strand
gcauaaacacagaaguaaa

SEQ ID NO: 777790 - RNA, 19 nt, Homo sapiens
  misc_RNA (1)...(19): siRNA sense strand
ccugaaaucauuauaggua

SEQ ID NO: 777791 - RNA, 19 nt, Homo sapiens
  misc_RNA (1)...(19): siRNA sense strand
aaagaagcauaaacacaga

SEQ ID NO: 777792 - RNA, 19 nt, Homo sapiens
  misc_RNA (1)...(19): siRNA sense strand
gauaucaagccagacaaua

SEQ ID NO: 777793 - RNA, 19 nt, Homo sapiens
  misc_RNA (1)...(19): siRNA sense strand
aauaaugguucaucucaga

SEQ ID NO: 777794 - RNA, 19 nt, Homo sapiens
  misc_RNA (1)...(19): siRNA sense strand
gaaagccaagcauaaucua

SEQ ID NO: 777795 - RNA, 19 nt, Homo sapiens
  misc_RNA (1)...(19): siRNA sense strand
cguagcaggucuccaagaa

SEQ ID NO: 777796 - RNA, 19 nt, Homo sapiens
  misc_RNA (1)...(19): siRNA sense strand
gaucuaagcagagcaaauc

SEQ ID NO: 777797 - RNA, 19 nt, Homo sapiens
  misc_RNA (1)...(19): siRNA sense strand
caauuaaaucucccucuaa

SEQ ID NO: 777798 - RNA, 19 nt, Homo sapiens
  misc_RNA (1)...(19): siRNA sense strand
ccaaagaacggacuagaca

SEQ ID NO: 777799 - RNA, 19 nt, Homo sapiens
  misc_RNA (1)...(19): siRNA sense strand
uaacuggaccgaugcagaa

SEQ ID NO: 777800 - RNA, 19 nt, Homo sapiens
  misc_RNA (1)...(19): siRNA sense strand
aaguagaucucccauuaga

SEQ ID NO: 777801 - RNA, 19 nt, Homo sapiens
  misc_RNA (1)...(19): siRNA sense strand
gaugauauccucaguagac

SEQ ID NO: 777802 - RNA, 19 nt, Homo sapiens
  misc_RNA (1)...(19): siRNA sense strand
uaagaaaguacaccagcua

SEQ ID NO: 777803 - RNA, 19 nt, Homo sapiens
  misc_RNA (1)...(19): siRNA sense strand
guuaugagcaccauuaauc

SEQ ID NO: 777804 - RNA, 19 nt, Homo sapiens
  misc_RNA (1)...(19): siRNA sense strand
ccaauaaccauaugcugaa

SEQ ID NO: 777805 - RNA, 19 nt, Homo sapiens
  misc_RNA (1)...(19): siRNA sense strand
guauagauauguggucugu

SEQ ID NO: 777806 - RNA, 19 nt, Homo sapiens
  misc_RNA (1)...(19): siRNA sense strand
uaagcacagucgucacaaa

SEQ ID NO: 777807 - RNA, 19 nt, Homo sapiens
  misc_RNA (1)...(19): siRNA sense strand
uaaugacaguugaacagaa

SEQ ID NO: 777808 - RNA, 19 nt, Homo sapiens
  misc_RNA (1)...(19): siRNA sense strand
gagcagaagcaaaguaaag

SEQ ID NO: 777809 - RNA, 19 nt, Homo sapiens
  misc_RNA (1)...(19): siRNA sense strand
ggaaauaggucuaguacua

SEQ ID NO: 777810 - RNA, 19 nt, Homo sapiens
  misc_RNA (1)...(19): siRNA sense strand
agaaguagaucucccauua

SEQ ID NO: 777811 - RNA, 19 nt, Homo sapiens
  misc_RNA (1)...(19): siRNA sense strand
gaacagagaagaauccaaa

SEQ ID NO: 777812 - RNA, 19 nt, Homo sapiens
  misc_RNA (1)...(19): siRNA sense strand
ggaaagaugccaaauaaga

SEQ ID NO: 777813 - RNA, 19 nt, Homo sapiens
  misc_RNA (1)...(19): siRNA sense strand
gcaaaagacugguuuaaaa

SEQ ID NO: 777814 - RNA, 19 nt, Homo sapiens
  misc_RNA (1)...(19): siRNA sense strand
aaacagagagccuugauua

SEQ ID NO: 777815 - RNA, 19 nt, Homo sapiens
  misc_RNA (1)...(19): siRNA sense strand
aaggaaagaugccaaauaa

SEQ ID NO: 777816 - RNA, 19 nt, Homo sapiens
  misc_RNA (1)...(19): siRNA sense strand
gcgaguagcugcugauguu

SEQ ID NO: 777817 - RNA, 19 nt, Homo sapiens
  misc_RNA (1)...(19): siRNA sense strand
ggacccagcuaaacgaauu

SEQ ID NO: 777818 - RNA, 19 nt, Homo sapiens
  misc_RNA (1)...(19): siRNA sense strand
ggagaaaguuacuguuaug

SEQ ID NO: 777819 - RNA, 19 nt, Homo sapiens
  misc_RNA (1)...(19): siRNA sense strand
gaacuuacgagagguguua

SEQ ID NO: 777820 - RNA, 19 nt, Homo sapiens
  misc_RNA (1)...(19): siRNA sense strand
caauggaucucaaaggaaa

SEQ ID NO: 777821 - RNA, 19 nt, Homo sapiens
  misc_RNA (1)...(19): siRNA sense strand
ugaagaagcccuaauagaa

SEQ ID NO: 777822 - RNA, 19 nt, Homo sapiens
  misc_RNA (1)...(19): siRNA sense strand
gauguuggucuucauauua

SEQ ID NO: 777823 - RNA, 19 nt, Homo sapiens
  misc_RNA (1)...(19): siRNA sense strand
gagaugauauccucaguag

SEQ ID NO: 777824 - RNA, 19 nt, Homo sapiens
  misc_RNA (1)...(19): siRNA sense strand
auaaauaccuugcugaaga

SEQ ID NO: 777825 - RNA, 19 nt, Homo sapiens
  misc_RNA (1)...(19): siRNA sense strand
gaaaagguguguucaaaga

SEQ ID NO: 777826 - RNA, 19 nt, Homo sapiens
  misc_RNA (1)...(19): siRNA sense strand
ggaagaugcuaauucugaa

SEQ ID NO: 777827 - RNA, 19 nt, Homo sapiens
  misc_RNA (1)...(19): siRNA sense strand
ccaauuaaaucucccucua

SEQ ID NO: 777828 - RNA, 19 nt, Homo sapiens
  misc_RNA (1)...(19): siRNA sense strand
gaagcaaaguaaaggaaga

SEQ ID NO: 777829 - RNA, 19 nt, Homo sapiens
  misc_RNA (1)...(19): siRNA sense strand
guaaagaucaucagaaaca

SEQ ID NO: 777830 - RNA, 19 nt, Homo sapiens
  misc_RNA (1)...(19): siRNA sense strand
caagguguauucaguaaug

SEQ ID NO: 777831 - RNA, 19 nt, Homo sapiens
  misc_RNA (1)...(19): siRNA sense strand
gaaguaagucucaagauca

SEQ ID NO: 777832 - RNA, 19 nt, Homo sapiens
  misc_RNA (1)...(19): siRNA sense strand
agaagcaggucuccacuuu

SEQ ID NO: 777833 - RNA, 19 nt, Homo sapiens
  misc_RNA (1)...(19): siRNA sense strand
gggagaaaguuacuguuau

SEQ ID NO: 777834 - RNA, 19 nt, Homo sapiens
  misc_RNA (1)...(19): siRNA sense strand
acaauauccugguuaauga

SEQ ID NO: 777835 - RNA, 19 nt, Homo sapiens
  misc_RNA (1)...(19): siRNA sense strand
gauaaacguuacaaugugu

SEQ ID NO: 777836 - RNA, 19 nt, Homo sapiens
  misc_RNA (1)...(19): siRNA sense strand
gauggaagaugcuaauucu

SEQ ID NO: 777837 - RNA, 19 nt, Homo sapiens
  misc_RNA (1)...(19): siRNA sense strand
gcaggcaauuguucagaaa

SEQ ID NO: 777838 - RNA, 19 nt, Homo sapiens
  misc_RNA (1)...(19): siRNA sense strand
gaaagaugccaaauaagau

SEQ ID NO: 777839 - RNA, 19 nt, Homo sapiens
  misc_RNA (1)...(19): siRNA sense strand
gcaaaguaaaggaagauaa

SEQ ID NO: 777840 - RNA, 19 nt, Homo sapiens
  misc_RNA (1)...(19): siRNA sense strand
caaauuucauugucugaga

SEQ ID NO: 777841 - RNA, 19 nt, Homo sapiens
  misc_RNA (1)...(19): siRNA sense strand
guuggcaccugauauguuu

SEQ ID NO: 777842 - RNA, 19 nt, Homo sapiens
  misc_RNA (1)...(19): siRNA sense strand
gagccgauccuuagaaaga

SEQ ID NO: 777843 - RNA, 19 nt, Homo sapiens
  misc_RNA (1)...(19): siRNA sense strand
gcuguaagauccuauaguc

SEQ ID NO: 777844 - RNA, 19 nt, Homo sapiens
  misc_RNA (1)...(19): siRNA sense strand
gaacacgaccucgagauga

SEQ ID NO: 777845 - RNA, 19 nt, Homo sapiens
  misc_RNA (1)...(19): siRNA sense strand
gaaggucacgguccaaaga

SEQ ID NO: 777846 - RNA, 19 nt, Homo sapiens
  misc_RNA (1)...(19): siRNA sense strand
gacaauauccugguuaaug

SEQ ID NO: 777847 - RNA, 19 nt, Homo sapiens
  misc_RNA (1)...(19): siRNA sense strand
cagacaauauccugguuaa

SEQ ID NO: 777848 - RNA, 19 nt, Homo sapiens
  misc_RNA (1)...(19): siRNA sense strand
agaaguggcuguaaagauc

SEQ ID NO: 777849 - RNA, 19 nt, Homo sapiens
  misc_RNA (1)...(19): siRNA sense strand
uagcaggucuccaagaaga

SEQ ID NO: 777850 - RNA, 19 nt, Homo sapiens
  misc_RNA (1)...(19): siRNA sense strand
ggcaagguguauucaguaa

SEQ ID NO: 777851 - RNA, 19 nt, Homo sapiens
  misc_RNA (1)...(19): siRNA sense strand
ggucugaaacugauaaaga

SEQ ID NO: 777852 - RNA, 19 nt, Homo sapiens
  misc_RNA (1)...(19): siRNA sense strand
aaaggaaagaugccaaaua

SEQ ID NO: 777853 - RNA, 19 nt, Homo sapiens
  misc_RNA (1)...(19): siRNA sense strand
caccuuaucuugucaguag

SEQ ID NO: 777854 - RNA, 19 nt, Homo sapiens
  misc_RNA (1)...(19): siRNA sense strand
caacaugucugugccaucu

SEQ ID NO: 777855 - RNA, 19 nt, Homo sapiens
  misc_RNA (1)...(19): siRNA sense strand
gaagaagcccuaauagaac

SEQ ID NO: 777856 - RNA, 19 nt, Homo sapiens
  misc_RNA (1)...(19): siRNA sense strand
ccagagaggagacgacuuu

SEQ ID NO: 777857 - RNA, 19 nt, Homo sapiens
  misc_RNA (1)...(19): siRNA sense strand
cagaagaagacaaggauaa

SEQ ID NO: 777858 - RNA, 19 nt, Homo sapiens
  misc_RNA (1)...(19): siRNA sense strand
ccuguuggcugacuugauu

SEQ ID NO: 777859 - RNA, 19 nt, Homo sapiens
  misc_RNA (1)...(19): siRNA sense strand
uaacagagagggagaaagu

SEQ ID NO: 777860 - RNA, 19 nt, Homo sapiens
  misc_RNA (1)...(19): siRNA sense strand
ccaaauaagaugauucgaa

SEQ ID NO: 777861 - RNA, 19 nt, Homo sapiens
  misc_RNA (1)...(19): siRNA sense strand
ccaguugauuuaagaggua

SEQ ID NO: 777862 - RNA, 19 nt, Homo sapiens
  misc_RNA (1)...(19): siRNA sense strand
ccagaucuccuacugauga

SEQ ID NO: 777863 - RNA, 19 nt, Homo sapiens
  misc_RNA (1)...(19): siRNA sense strand
caacuaggagcaagucaaa

SEQ ID NO: 777864 - RNA, 19 nt, Homo sapiens
  misc_RNA (1)...(19): siRNA sense strand
aaagaacggacuagacaua

SEQ ID NO: 777865 - RNA, 19 nt, Homo sapiens
  misc_RNA (1)...(19): siRNA sense strand
gaaaguacaccagcuaaag

SEQ ID NO: 777866 - RNA, 19 nt, Homo sapiens
  misc_RNA (1)...(19): siRNA sense strand
ugaagaaaauggagaagua

SEQ ID NO: 777867 - RNA, 19 nt, Homo sapiens
  misc_RNA (1)...(19): siRNA sense strand
gaggguaugucuccagcaa

SEQ ID NO: 777868 - RNA, 19 nt, Homo sapiens
  misc_RNA (1)...(19): siRNA sense strand
gauaaugacauaacaccuu

SEQ ID NO: 777869 - RNA, 19 nt, Homo sapiens
  misc_RNA (1)...(19): siRNA sense strand
cugcugauguuaaagagua

SEQ ID NO: 777870 - RNA, 19 nt, Homo sapiens
  misc_RNA (1)...(19): siRNA sense strand
uuaaaucucccucuaaaga

SEQ ID NO: 777871 - RNA, 19 nt, Homo sapiens
  misc_RNA (1)...(19): siRNA sense strand
aggccgaacuugauaauga

SEQ ID NO: 777872 - RNA, 19 nt, Homo sapiens
  misc_RNA (1)...(19): siRNA sense strand
ccugauauguuuacagaau

SEQ ID NO: 777873 - RNA, 19 nt, Homo sapiens
  misc_RNA (1)...(19): siRNA sense strand
caccugauauguuuacaga

SEQ ID NO: 777874 - RNA, 19 nt, Homo sapiens
  misc_RNA (1)...(19): siRNA sense strand
uaaauaccuugcugaagau

SEQ ID NO: 777875 - RNA, 19 nt, Homo sapiens
  misc_RNA (1)...(19): siRNA sense strand
aggcaauuguucagaaaua

SEQ ID NO: 777876 - RNA, 19 nt, Homo sapiens
  misc_RNA (1)...(19): siRNA sense strand
gcaggaaucuucgucugau

SEQ ID NO: 777877 - RNA, 19 nt, Homo sapiens
  misc_RNA (1)...(19): siRNA sense strand
gagaggagacgacuuucuu

SEQ ID NO: 777878 - RNA, 19 nt, Homo sapiens
  misc_RNA (1)...(19): siRNA sense strand
acauaaacauuccucagaa

SEQ ID NO: 777879 - RNA, 19 nt, Homo sapiens
  misc_RNA (1)...(19): siRNA sense strand
agaagaaguuugucuccaa

SEQ ID NO: 777880 - RNA, 19 nt, Homo sapiens
  misc_RNA (1)...(19): siRNA sense strand
agaaguaagucucaagauc

SEQ ID NO: 777881 - RNA, 19 nt, Homo sapiens
  misc_RNA (1)...(19): siRNA sense strand
acagagagggagaaaguua

SEQ ID NO: 777882 - RNA, 19 nt, Homo sapiens
  misc_RNA (1)...(19): siRNA sense strand
cuucacauguugcggauaa

SEQ ID NO: 777883 - RNA, 19 nt, Homo sapiens
  misc_RNA (1)...(19): siRNA sense strand
cuguaaagaucaucagaaa

SEQ ID NO: 777884 - RNA, 19 nt, Homo sapiens
  misc_RNA (1)...(19): siRNA sense strand
ugauaaccuugaagacuuu

SEQ ID NO: 777885 - RNA, 19 nt, Homo sapiens
  misc_RNA (1)...(19): siRNA sense strand
ggaagucuuucugaaggaa

SEQ ID NO: 777886 - RNA, 19 nt, Homo sapiens
  misc_RNA (1)...(19): siRNA sense strand
gaucuccuacugaugauaa

SEQ ID NO: 777887 - RNA, 19 nt, Homo sapiens
  misc_RNA (1)...(19): siRNA sense strand
ggccagaucuccuacugau

SEQ ID NO: 777888 - RNA, 19 nt, Homo sapiens
  misc_RNA (1)...(19): siRNA sense strand
gucugaaacugauaaagaa

SEQ ID NO: 777889 - RNA, 19 nt, Homo sapiens
  misc_RNA (1)...(19): siRNA sense strand
gcauaaacacagaaguaaa

SEQ ID NO: 777890 - RNA, 19 nt, Homo sapiens
  misc_RNA (1)...(19): siRNA sense strand
ccugaaaucauuauaggua

SEQ ID NO: 777891 - RNA, 19 nt, Homo sapiens
  misc_RNA (1)...(19): siRNA sense strand
aaagaagcauaaacacaga

SEQ ID NO: 777892 - RNA, 19 nt, Homo sapiens
  misc_RNA (1)...(19): siRNA sense strand
gauaucaagccagacaaua

SEQ ID NO: 777893 - RNA, 19 nt, Homo sapiens
  misc_RNA (1)...(19): siRNA sense strand
aauaaugguucaucucaga

SEQ ID NO: 777894 - RNA, 19 nt, Homo sapiens
  misc_RNA (1)...(19): siRNA sense strand
gaaagccaagcauaaucua

SEQ ID NO: 777895 - RNA, 19 nt, Homo sapiens
  misc_RNA (1)...(19): siRNA sense strand
cguagcaggucuccaagaa

SEQ ID NO: 777896 - RNA, 19 nt, Homo sapiens
  misc_RNA (1)...(19): siRNA sense strand
gaucuaagcagagcaaauc

SEQ ID NO: 777897 - RNA, 19 nt, Homo sapiens
  misc_RNA (1)...(19): siRNA sense strand
caauuaaaucucccucuaa

SEQ ID NO: 777898 - RNA, 19 nt, Homo sapiens
  misc_RNA (1)...(19): siRNA sense strand
ccaaagaacggacuagaca

SEQ ID NO: 777899 - RNA, 19 nt, Homo sapiens
  misc_RNA (1)...(19): siRNA sense strand
uaacuggaccgaugcagaa

SEQ ID NO: 777900 - RNA, 19 nt, Homo sapiens
  misc_RNA (1)...(19): siRNA sense strand
aaguagaucucccauuaga

SEQ ID NO: 777901 - RNA, 19 nt, Homo sapiens
  misc_RNA (1)...(19): siRNA sense strand
gaugauauccucaguagac

SEQ ID NO: 777902 - RNA, 19 nt, Homo sapiens
  misc_RNA (1)...(19): siRNA sense strand
uaagaaaguacaccagcua

SEQ ID NO: 777903 - RNA, 19 nt, Homo sapiens
  misc_RNA (1)...(19): siRNA sense strand
guuaugagcaccauuaauc

SEQ ID NO: 777904 - RNA, 19 nt, Homo sapiens
  misc_RNA (1)...(19): siRNA sense strand
ccaauaaccauaugcugaa

SEQ ID NO: 777905 - RNA, 19 nt, Homo sapiens
  misc_RNA (1)...(19): siRNA sense strand
guauagauauguggucugu

SEQ ID NO: 777906 - RNA, 19 nt, Homo sapiens
  misc_RNA (1)...(19): siRNA sense strand
uaagcacagucgucacaaa

SEQ ID NO: 777907 - RNA, 19 nt, Homo sapiens
  misc_RNA (1)...(19): siRNA sense strand
uaaugacaguugaacagaa

SEQ ID NO: 777908 - RNA, 19 nt, Homo sapiens
  misc_RNA (1)...(19): siRNA sense strand
gagcagaagcaaaguaaag

SEQ ID NO: 777909 - RNA, 19 nt, Homo sapiens
  misc_RNA (1)...(19): siRNA sense strand
gaacauuaacgaggacaua

SEQ ID NO: 777910 - RNA, 19 nt, Homo sapiens
  misc_RNA (1)...(19): siRNA sense strand
ucaaggauauccacugcaa

SEQ ID NO: 777911 - RNA, 19 nt, Homo sapiens
  misc_RNA (1)...(19): siRNA sense strand
gcccagaucgucaaggaua

SEQ ID NO: 777912 - RNA, 19 nt, Homo sapiens
  misc_RNA (1)...(19): siRNA sense strand
cagaagagcacacagaucu

SEQ ID NO: 777913 - RNA, 19 nt, Homo sapiens
  misc_RNA (1)...(19): siRNA sense strand
gcgguggugccaugcauua

SEQ ID NO: 777914 - RNA, 19 nt, Homo sapiens
  misc_RNA (1)...(19): siRNA sense strand
guggugccaugcauuaaga

SEQ ID NO: 777915 - RNA, 19 nt, Homo sapiens
  misc_RNA (1)...(19): siRNA sense strand
ggacauagucaagguggau

SEQ ID NO: 777916 - RNA, 19 nt, Homo sapiens
  misc_RNA (1)...(19): siRNA sense strand
agagcuaccugaucgagau

SEQ ID NO: 777917 - RNA, 19 nt, Homo sapiens
  misc_RNA (1)...(19): siRNA sense strand
ugccaugcauuaagagcua

SEQ ID NO: 777918 - RNA, 19 nt, Homo sapiens
  misc_RNA (1)...(19): siRNA sense strand
gcagaagagcacacagauc

SEQ ID NO: 777919 - RNA, 19 nt, Homo sapiens
  misc_RNA (1)...(19): siRNA sense strand
gcauuaagagcuaccugau

SEQ ID NO: 777920 - RNA, 19 nt, Homo sapiens
  misc_RNA (1)...(19): siRNA sense strand
uaacgaggacauagucaag

SEQ ID NO: 777921 - RNA, 19 nt, Homo sapiens
  misc_RNA (1)...(19): siRNA sense strand
gugggcaccuacagcuuug

SEQ ID NO: 777922 - RNA, 19 nt, Homo sapiens
  misc_RNA (1)...(19): siRNA sense strand
ccuucacugucuccaagua

SEQ ID NO: 777923 - RNA, 19 nt, Homo sapiens
  misc_RNA (1)...(19): siRNA sense strand
caucagccacaucuacuca

SEQ ID NO: 777924 - RNA, 19 nt, Homo sapiens
  misc_RNA (1)...(19): siRNA sense strand
ggcagaagagcacacagau

SEQ ID NO: 777925 - RNA, 19 nt, Homo sapiens
  misc_RNA (1)...(19): siRNA sense strand
caagguggauuuugaagac

SEQ ID NO: 777926 - RNA, 19 nt, Homo sapiens
  misc_RNA (1)...(19): siRNA sense strand
gagcuacaccaccuucacu

SEQ ID NO: 777927 - RNA, 19 nt, Homo sapiens
  misc_RNA (1)...(19): siRNA sense strand
gaacauuaacgaggacaua

SEQ ID NO: 777928 - RNA, 19 nt, Homo sapiens
  misc_RNA (1)...(19): siRNA sense strand
ucaaggauauccacugcaa

SEQ ID NO: 777929 - RNA, 19 nt, Homo sapiens
  misc_RNA (1)...(19): siRNA sense strand
gcccagaucgucaaggaua

SEQ ID NO: 777930 - RNA, 19 nt, Homo sapiens
  misc_RNA (1)...(19): siRNA sense strand
cagaagagcacacagaucu

SEQ ID NO: 777931 - RNA, 19 nt, Homo sapiens
  misc_RNA (1)...(19): siRNA sense strand
gcgguggugccaugcauua

SEQ ID NO: 777932 - RNA, 19 nt, Homo sapiens
  misc_RNA (1)...(19): siRNA sense strand
guggugccaugcauuaaga

SEQ ID NO: 777933 - RNA, 19 nt, Homo sapiens
  misc_RNA (1)...(19): siRNA sense strand
ggacauagucaagguggau

SEQ ID NO: 777934 - RNA, 19 nt, Homo sapiens
  misc_RNA (1)...(19): siRNA sense strand
agagcuaccugaucgagau

SEQ ID NO: 777935 - RNA, 19 nt, Homo sapiens
  misc_RNA (1)...(19): siRNA sense strand
ugccaugcauuaagagcua

SEQ ID NO: 777936 - RNA, 19 nt, Homo sapiens
  misc_RNA (1)...(19): siRNA sense strand
gcagaagagcacacagauc

SEQ ID NO: 777937 - RNA, 19 nt, Homo sapiens
  misc_RNA (1)...(19): siRNA sense strand
gcauuaagagcuaccugau

SEQ ID NO: 777938 - RNA, 19 nt, Homo sapiens
  misc_RNA (1)...(19): siRNA sense strand
uaacgaggacauagucaag

SEQ ID NO: 777939 - RNA, 19 nt, Homo sapiens
  misc_RNA (1)...(19): siRNA sense strand
gugggcaccuacagcuuug

SEQ ID NO: 777940 - RNA, 19 nt, Homo sapiens
  misc_RNA (1)...(19): siRNA sense strand
ccuucacugucuccaagua

SEQ ID NO: 777941 - RNA, 19 nt, Homo sapiens
  misc_RNA (1)...(19): siRNA sense strand
caucagccacaucuacuca

SEQ ID NO: 777942 - RNA, 19 nt, Homo sapiens
  misc_RNA (1)...(19): siRNA sense strand
ggcagaagagcacacagau

SEQ ID NO: 777943 - RNA, 19 nt, Homo sapiens
  misc_RNA (1)...(19): siRNA sense strand
caagguggauuuugaagac

SEQ ID NO: 777944 - RNA, 19 nt, Homo sapiens
  misc_RNA (1)...(19): siRNA sense strand
gagcuacaccaccuucacu

SEQ ID NO: 777945 - RNA, 19 nt, Homo sapiens
  misc_RNA (1)...(19): siRNA sense strand
ggaagaggcuccugguuug

SEQ ID NO: 777946 - RNA, 19 nt, Homo sapiens
  misc_RNA (1)...(19): siRNA sense strand
gaucagggcuguauugaag

SEQ ID NO: 777947 - RNA, 19 nt, Homo sapiens
  misc_RNA (1)...(19): siRNA sense strand
gggcaaaugcaucauaaua

SEQ ID NO: 777948 - RNA, 19 nt, Homo sapiens
  misc_RNA (1)...(19): siRNA sense strand
gaagaggaccauacaaaug

SEQ ID NO: 777949 - RNA, 19 nt, Homo sapiens
  misc_RNA (1)...(19): siRNA sense strand
gaacucuacuucagucaau

SEQ ID NO: 777950 - RNA, 19 nt, Homo sapiens
  misc_RNA (1)...(19): siRNA sense strand
ggcaaaugcaucauaauaa

SEQ ID NO: 777951 - RNA, 19 nt, Homo sapiens
  misc_RNA (1)...(19): siRNA sense strand
gaugcaagaucugcuuaaa

SEQ ID NO: 777952 - RNA, 19 nt, Homo sapiens
  misc_RNA (1)...(19): siRNA sense strand
uauaaugacugcucuugug

SEQ ID NO: 777953 - RNA, 19 nt, Homo sapiens
  misc_RNA (1)...(19): siRNA sense strand
uaccgucccucuucaguaa

SEQ ID NO: 777954 - RNA, 19 nt, Homo sapiens
  misc_RNA (1)...(19): siRNA sense strand
ccaaggaacucuacuucag

SEQ ID NO: 777955 - RNA, 19 nt, Homo sapiens
  misc_RNA (1)...(19): siRNA sense strand
gaaacggaacagacaaaga

SEQ ID NO: 777956 - RNA, 19 nt, Homo sapiens
  misc_RNA (1)...(19): siRNA sense strand
gacccacacuuccaugaga

SEQ ID NO: 777957 - RNA, 19 nt, Homo sapiens
  misc_RNA (1)...(19): siRNA sense strand
ccgaggcgcucuucaagug

SEQ ID NO: 777958 - RNA, 19 nt, Homo sapiens
  misc_RNA (1)...(19): siRNA sense strand
aagauucaguggaugcuaa

SEQ ID NO: 777959 - RNA, 19 nt, Homo sapiens
  misc_RNA (1)...(19): siRNA sense strand
gaugaucagggcuguauug

SEQ ID NO: 777960 - RNA, 19 nt, Homo sapiens
  misc_RNA (1)...(19): siRNA sense strand
ccagaccgguccucguuug

SEQ ID NO: 777961 - RNA, 19 nt, Homo sapiens
  misc_RNA (1)...(19): siRNA sense strand
aaacggaacagacaaagau

SEQ ID NO: 777962 - RNA, 19 nt, Homo sapiens
  misc_RNA (1)...(19): siRNA sense strand
cuuaagccauggagaagaa

SEQ ID NO: 777963 - RNA, 19 nt, Homo sapiens
  misc_RNA (1)...(19): siRNA sense strand
gggaccgagugccuacaua

SEQ ID NO: 777964 - RNA, 19 nt, Homo sapiens
  misc_RNA (1)...(19): siRNA sense strand
ucaaugacacagaugcuaa

SEQ ID NO: 777965 - RNA, 19 nt, Homo sapiens
  misc_RNA (1)...(19): siRNA sense strand
ugacgugauugucuauaau

SEQ ID NO: 777966 - RNA, 19 nt, Homo sapiens
  misc_RNA (1)...(19): siRNA sense strand
cuacauaucaguacaacau

SEQ ID NO: 777967 - RNA, 19 nt, Homo sapiens
  misc_RNA (1)...(19): siRNA sense strand
ggaccgagugccuacauau

SEQ ID NO: 777968 - RNA, 19 nt, Homo sapiens
  misc_RNA (1)...(19): siRNA sense strand
gguugaggauucagcaaau

SEQ ID NO: 777969 - RNA, 19 nt, Homo sapiens
  misc_RNA (1)...(19): siRNA sense strand
ugaagaggaccauacaaau

SEQ ID NO: 777970 - RNA, 19 nt, Homo sapiens
  misc_RNA (1)...(19): siRNA sense strand
gcccaucaaugacacagau

SEQ ID NO: 777971 - RNA, 19 nt, Homo sapiens
  misc_RNA (1)...(19): siRNA sense strand
acauaucaguacaacauga

SEQ ID NO: 777972 - RNA, 19 nt, Homo sapiens
  misc_RNA (1)...(19): siRNA sense strand
ccacgguuccaggcuauua

SEQ ID NO: 777973 - RNA, 19 nt, Homo sapiens
  misc_RNA (1)...(19): siRNA sense strand
guaccgucccucuucagua

SEQ ID NO: 777974 - RNA, 19 nt, Homo sapiens
  misc_RNA (1)...(19): siRNA sense strand
cagggugaaugacagaguu

SEQ ID NO: 777975 - RNA, 19 nt, Homo sapiens
  misc_RNA (1)...(19): siRNA sense strand
gcuaauccucgauacaaga

SEQ ID NO: 777976 - RNA, 19 nt, Homo sapiens
  misc_RNA (1)...(19): siRNA sense strand
cugggcaaaugcaucauaa

SEQ ID NO: 777977 - RNA, 19 nt, Homo sapiens
  misc_RNA (1)...(19): siRNA sense strand
ugacacagaugcuaauccu

SEQ ID NO: 777978 - RNA, 19 nt, Homo sapiens
  misc_RNA (1)...(19): siRNA sense strand
cugaagaggaccauacaaa

SEQ ID NO: 777979 - RNA, 19 nt, Homo sapiens
  misc_RNA (1)...(19): siRNA sense strand
uugacgugauugucuauaa

SEQ ID NO: 777980 - RNA, 19 nt, Homo sapiens
  misc_RNA (1)...(19): siRNA sense strand
uugauaaagugacagguau

SEQ ID NO: 777981 - RNA, 19 nt, Homo sapiens
  misc_RNA (1)...(19): siRNA sense strand
gcugggcaaaugcaucaua

SEQ ID NO: 777982 - RNA, 19 nt, Homo sapiens
  misc_RNA (1)...(19): siRNA sense strand
gaccgguccucguuuguac

SEQ ID NO: 777983 - RNA, 19 nt, Homo sapiens
  misc_RNA (1)...(19): siRNA sense strand
gaagauucaguggaugcua

SEQ ID NO: 777984 - RNA, 19 nt, Homo sapiens
  misc_RNA (1)...(19): siRNA sense strand
gugauugucuauaaugacu

SEQ ID NO: 777985 - RNA, 19 nt, Homo sapiens
  misc_RNA (1)...(19): siRNA sense strand
cagaugcuaauccucgaua

SEQ ID NO: 777986 - RNA, 19 nt, Homo sapiens
  misc_RNA (1)...(19): siRNA sense strand
ggaacucuacuucagucaa

SEQ ID NO: 777987 - RNA, 19 nt, Homo sapiens
  misc_RNA (1)...(19): siRNA sense strand
caaggaacucuacuucagu

SEQ ID NO: 777988 - RNA, 19 nt, Homo sapiens
  misc_RNA (1)...(19): siRNA sense strand
ccucuuaagccauggagaa

SEQ ID NO: 777989 - RNA, 19 nt, Homo sapiens
  misc_RNA (1)...(19): siRNA sense strand
gaagaggcuccugguuugu

SEQ ID NO: 777990 - RNA, 19 nt, Homo sapiens
  misc_RNA (1)...(19): siRNA sense strand
gacgugauugucuauaaug

SEQ ID NO: 777991 - RNA, 19 nt, Homo sapiens
  misc_RNA (1)...(19): siRNA sense strand
cagaugaucagggcuguau

SEQ ID NO: 777992 - RNA, 19 nt, Homo sapiens
  misc_RNA (1)...(19): siRNA sense strand
guugaggauucagcaaaug

SEQ ID NO: 777993 - RNA, 19 nt, Homo sapiens
  misc_RNA (1)...(19): siRNA sense strand
cauaucaguacaacaugaa

SEQ ID NO: 777994 - RNA, 19 nt, Homo sapiens
  misc_RNA (1)...(19): siRNA sense strand
ucuccaugcucaccaagga

SEQ ID NO: 777995 - RNA, 19 nt, Homo sapiens
  misc_RNA (1)...(19): siRNA sense strand
ggguugaggauucagcaaa

SEQ ID NO: 777996 - RNA, 19 nt, Homo sapiens
  misc_RNA (1)...(19): siRNA sense strand
gagggaccgagcuugauga

SEQ ID NO: 777997 - RNA, 19 nt, Homo sapiens
  misc_RNA (1)...(19): siRNA sense strand
gauaaagugacagguaugg

SEQ ID NO: 777998 - RNA, 19 nt, Homo sapiens
  misc_RNA (1)...(19): siRNA sense strand
accaugcgauccaucaaga

SEQ ID NO: 777999 - RNA, 19 nt, Homo sapiens
  misc_RNA (1)...(19): siRNA sense strand
caccaaggaacucuacuuc

SEQ ID NO: 778000 - RNA, 19 nt, Homo sapiens
  misc_RNA (1)...(19): siRNA sense strand
auacaaaugccgccugcuu

SEQ ID NO: 778001 - RNA, 19 nt, Homo sapiens
  misc_RNA (1)...(19): siRNA sense strand
caaugacacagaugcuaau

SEQ ID NO: 778002 - RNA, 19 nt, Homo sapiens
  misc_RNA (1)...(19): siRNA sense strand
uuugauaaagugacaggua

SEQ ID NO: 778003 - RNA, 19 nt, Homo sapiens
  misc_RNA (1)...(19): siRNA sense strand
cgagggaccgagcuugaug

SEQ ID NO: 778004 - RNA, 19 nt, Homo sapiens
  misc_RNA (1)...(19): siRNA sense strand
uugaaaagcugggcaaaug

SEQ ID NO: 778005 - RNA, 19 nt, Homo sapiens
  misc_RNA (1)...(19): siRNA sense strand
ucaccaaggaacucuacuu

SEQ ID NO: 778006 - RNA, 19 nt, Homo sapiens
  misc_RNA (1)...(19): siRNA sense strand
ucagggcuguauugaagag

SEQ ID NO: 778007 - RNA, 19 nt, Homo sapiens
  misc_RNA (1)...(19): siRNA sense strand
gaccgagugccuacauauc

SEQ ID NO: 778008 - RNA, 19 nt, Homo sapiens
  misc_RNA (1)...(19): siRNA sense strand
ucgaaacggaacagacaaa

SEQ ID NO: 778009 - RNA, 19 nt, Homo sapiens
  misc_RNA (1)...(19): siRNA sense strand
gugccuacauaucaguaca

SEQ ID NO: 778010 - RNA, 19 nt, Homo sapiens
  misc_RNA (1)...(19): siRNA sense strand
gcagaugaucagggcugua

SEQ ID NO: 778011 - RNA, 19 nt, Homo sapiens
  misc_RNA (1)...(19): siRNA sense strand
ggaagaggcuccugguuug

SEQ ID NO: 778012 - RNA, 19 nt, Homo sapiens
  misc_RNA (1)...(19): siRNA sense strand
gaucagggcuguauugaag

SEQ ID NO: 778013 - RNA, 19 nt, Homo sapiens
  misc_RNA (1)...(19): siRNA sense strand
gggcaaaugcaucauaaua

SEQ ID NO: 778014 - RNA, 19 nt, Homo sapiens
  misc_RNA (1)...(19): siRNA sense strand
gaagaggaccauacaaaug

SEQ ID NO: 778015 - RNA, 19 nt, Homo sapiens
  misc_RNA (1)...(19): siRNA sense strand
gaacucuacuucagucaau

SEQ ID NO: 778016 - RNA, 19 nt, Homo sapiens
  misc_RNA (1)...(19): siRNA sense strand
ggcaaaugcaucauaauaa

SEQ ID NO: 778017 - RNA, 19 nt, Homo sapiens
  misc_RNA (1)...(19): siRNA sense strand
gaugcaagaucugcuuaaa

SEQ ID NO: 778018 - RNA, 19 nt, Homo sapiens
  misc_RNA (1)...(19): siRNA sense strand
uauaaugacugcucuugug

SEQ ID NO: 778019 - RNA, 19 nt, Homo sapiens
  misc_RNA (1)...(19): siRNA sense strand
uaccgucccucuucaguaa

SEQ ID NO: 778020 - RNA, 19 nt, Homo sapiens
  misc_RNA (1)...(19): siRNA sense strand
ccaaggaacucuacuucag

SEQ ID NO: 778021 - RNA, 19 nt, Homo sapiens
  misc_RNA (1)...(19): siRNA sense strand
gaaacggaacagacaaaga

SEQ ID NO: 778022 - RNA, 19 nt, Homo sapiens
  misc_RNA (1)...(19): siRNA sense strand
gacccacacuuccaugaga

SEQ ID NO: 778023 - RNA, 19 nt, Homo sapiens
  misc_RNA (1)...(19): siRNA sense strand
ccgaggcgcucuucaagug

SEQ ID NO: 778024 - RNA, 19 nt, Homo sapiens
  misc_RNA (1)...(19): siRNA sense strand
aagauucaguggaugcuaa

SEQ ID NO: 778025 - RNA, 19 nt, Homo sapiens
  misc_RNA (1)...(19): siRNA sense strand
gaugaucagggcuguauug

SEQ ID NO: 778026 - RNA, 19 nt, Homo sapiens
  misc_RNA (1)...(19): siRNA sense strand
ccagaccgguccucguuug

SEQ ID NO: 778027 - RNA, 19 nt, Homo sapiens
  misc_RNA (1)...(19): siRNA sense strand
aaacggaacagacaaagau

SEQ ID NO: 778028 - RNA, 19 nt, Homo sapiens
  misc_RNA (1)...(19): siRNA sense strand
cuuaagccauggagaagaa

SEQ ID NO: 778029 - RNA, 19 nt, Homo sapiens
  misc_RNA (1)...(19): siRNA sense strand
gggaccgagugccuacaua

SEQ ID NO: 778030 - RNA, 19 nt, Homo sapiens
  misc_RNA (1)...(19): siRNA sense strand
ucaaugacacagaugcuaa

SEQ ID NO: 778031 - RNA, 19 nt, Homo sapiens
  misc_RNA (1)...(19): siRNA sense strand
ugacgugauugucuauaau

SEQ ID NO: 778032 - RNA, 19 nt, Homo sapiens
  misc_RNA (1)...(19): siRNA sense strand
cuacauaucaguacaacau

SEQ ID NO: 778033 - RNA, 19 nt, Homo sapiens
  misc_RNA (1)...(19): siRNA sense strand
ggaccgagugccuacauau

SEQ ID NO: 778034 - RNA, 19 nt, Homo sapiens
  misc_RNA (1)...(19): siRNA sense strand
gguugaggauucagcaaau

SEQ ID NO: 778035 - RNA, 19 nt, Homo sapiens
  misc_RNA (1)...(19): siRNA sense strand
ugaagaggaccauacaaau

SEQ ID NO: 778036 - RNA, 19 nt, Homo sapiens
  misc_RNA (1)...(19): siRNA sense strand
gcccaucaaugacacagau

SEQ ID NO: 778037 - RNA, 19 nt, Homo sapiens
  misc_RNA (1)...(19): siRNA sense strand
acauaucaguacaacauga

SEQ ID NO: 778038 - RNA, 19 nt, Homo sapiens
  misc_RNA (1)...(19): siRNA sense strand
ccacgguuccaggcuauua

SEQ ID NO: 778039 - RNA, 19 nt, Homo sapiens
  misc_RNA (1)...(19): siRNA sense strand
guaccgucccucuucagua

SEQ ID NO: 778040 - RNA, 19 nt, Homo sapiens
  misc_RNA (1)...(19): siRNA sense strand
cagggugaaugacagaguu

SEQ ID NO: 778041 - RNA, 19 nt, Homo sapiens
  misc_RNA (1)...(19): siRNA sense strand
gcuaauccucgauacaaga

SEQ ID NO: 778042 - RNA, 19 nt, Homo sapiens
  misc_RNA (1)...(19): siRNA sense strand
cugggcaaaugcaucauaa

SEQ ID NO: 778043 - RNA, 19 nt, Homo sapiens
  misc_RNA (1)...(19): siRNA sense strand
ugacacagaugcuaauccu

SEQ ID NO: 778044 - RNA, 19 nt, Homo sapiens
  misc_RNA (1)...(19): siRNA sense strand
cugaagaggaccauacaaa

SEQ ID NO: 778045 - RNA, 19 nt, Homo sapiens
  misc_RNA (1)...(19): siRNA sense strand
uugacgugauugucuauaa

SEQ ID NO: 778046 - RNA, 19 nt, Homo sapiens
  misc_RNA (1)...(19): siRNA sense strand
uugauaaagugacagguau

SEQ ID NO: 778047 - RNA, 19 nt, Homo sapiens
  misc_RNA (1)...(19): siRNA sense strand
gcugggcaaaugcaucaua

SEQ ID NO: 778048 - RNA, 19 nt, Homo sapiens
  misc_RNA (1)...(19): siRNA sense strand
gaccgguccucguuuguac

SEQ ID NO: 778049 - RNA, 19 nt, Homo sapiens
  misc_RNA (1)...(19): siRNA sense strand
gaagauucaguggaugcua

SEQ ID NO: 778050 - RNA, 19 nt, Homo sapiens
  misc_RNA (1)...(19): siRNA sense strand
gugauugucuauaaugacu

SEQ ID NO: 778051 - RNA, 19 nt, Homo sapiens
  misc_RNA (1)...(19): siRNA sense strand
cagaugcuaauccucgaua

SEQ ID NO: 778052 - RNA, 19 nt, Homo sapiens
  misc_RNA (1)...(19): siRNA sense strand
ggaacucuacuucagucaa

SEQ ID NO: 778053 - RNA, 19 nt, Homo sapiens
  misc_RNA (1)...(19): siRNA sense strand
caaggaacucuacuucagu

SEQ ID NO: 778054 - RNA, 19 nt, Homo sapiens
  misc_RNA (1)...(19): siRNA sense strand
ccucuuaagccauggagaa

SEQ ID NO: 778055 - RNA, 19 nt, Homo sapiens
  misc_RNA (1)...(19): siRNA sense strand
gaagaggcuccugguuugu

SEQ ID NO: 778056 - RNA, 19 nt, Homo sapiens
  misc_RNA (1)...(19): siRNA sense strand
gacgugauugucuauaaug

SEQ ID NO: 778057 - RNA, 19 nt, Homo sapiens
  misc_RNA (1)...(19): siRNA sense strand
cagaugaucagggcuguau

SEQ ID NO: 778058 - RNA, 19 nt, Homo sapiens
  misc_RNA (1)...(19): siRNA sense strand
guugaggauucagcaaaug

SEQ ID NO: 778059 - RNA, 19 nt, Homo sapiens
  misc_RNA (1)...(19): siRNA sense strand
cauaucaguacaacaugaa

SEQ ID NO: 778060 - RNA, 19 nt, Homo sapiens
  misc_RNA (1)...(19): siRNA sense strand
ucuccaugcucaccaagga

SEQ ID NO: 778061 - RNA, 19 nt, Homo sapiens
  misc_RNA (1)...(19): siRNA sense strand
ggguugaggauucagcaaa

SEQ ID NO: 778062 - RNA, 19 nt, Homo sapiens
  misc_RNA (1)...(19): siRNA sense strand
gagggaccgagcuugauga

SEQ ID NO: 778063 - RNA, 19 nt, Homo sapiens
  misc_RNA (1)...(19): siRNA sense strand
gauaaagugacagguaugg

SEQ ID NO: 778064 - RNA, 19 nt, Homo sapiens
  misc_RNA (1)...(19): siRNA sense strand
accaugcgauccaucaaga

SEQ ID NO: 778065 - RNA, 19 nt, Homo sapiens
  misc_RNA (1)...(19): siRNA sense strand
caccaaggaacucuacuuc

SEQ ID NO: 778066 - RNA, 19 nt, Homo sapiens
  misc_RNA (1)...(19): siRNA sense strand
auacaaaugccgccugcuu

SEQ ID NO: 778067 - RNA, 19 nt, Homo sapiens
  misc_RNA (1)...(19): siRNA sense strand
caaugacacagaugcuaau

SEQ ID NO: 778068 - RNA, 19 nt, Homo sapiens
  misc_RNA (1)...(19): siRNA sense strand
uuugauaaagugacaggua

SEQ ID NO: 778069 - RNA, 19 nt, Homo sapiens
  misc_RNA (1)...(19): siRNA sense strand
cgagggaccgagcuugaug

SEQ ID NO: 778070 - RNA, 19 nt, Homo sapiens
  misc_RNA (1)...(19): siRNA sense strand
uugaaaagcugggcaaaug

SEQ ID NO: 778071 - RNA, 19 nt, Homo sapiens
  misc_RNA (1)...(19): siRNA sense strand
ucaccaaggaacucuacuu

SEQ ID NO: 778072 - RNA, 19 nt, Homo sapiens
  misc_RNA (1)...(19): siRNA sense strand
ucagggcuguauugaagag

SEQ ID NO: 778073 - RNA, 19 nt, Homo sapiens
  misc_RNA (1)...(19): siRNA sense strand
gaccgagugccuacauauc

SEQ ID NO: 778074 - RNA, 19 nt, Homo sapiens
  misc_RNA (1)...(19): siRNA sense strand
ucgaaacggaacagacaaa

SEQ ID NO: 778075 - RNA, 19 nt, Homo sapiens
  misc_RNA (1)...(19): siRNA sense strand
gugccuacauaucaguaca

SEQ ID NO: 778076 - RNA, 19 nt, Homo sapiens
  misc_RNA (1)...(19): siRNA sense strand
gcagaugaucagggcugua

SEQ ID NO: 778077 - RNA, 19 nt, Homo sapiens
  misc_RNA (1)...(19): siRNA sense strand
ggaagaggcuccugguuug

SEQ ID NO: 778078 - RNA, 19 nt, Homo sapiens
  misc_RNA (1)...(19): siRNA sense strand
gaucagggcuguauugaag

SEQ ID NO: 778079 - RNA, 19 nt, Homo sapiens
  misc_RNA (1)...(19): siRNA sense strand
gggcaaaugcaucauaaua

SEQ ID NO: 778080 - RNA, 19 nt, Homo sapiens
  misc_RNA (1)...(19): siRNA sense strand
gaagaggaccauacaaaug

SEQ ID NO: 778081 - RNA, 19 nt, Homo sapiens
  misc_RNA (1)...(19): siRNA sense strand
gaacucuacuucagucaau

SEQ ID NO: 778082 - RNA, 19 nt, Homo sapiens
  misc_RNA (1)...(19): siRNA sense strand
ggcaaaugcaucauaauaa

SEQ ID NO: 778083 - RNA, 19 nt, Homo sapiens
  misc_RNA (1)...(19): siRNA sense strand
gaugcaagaucugcuuaaa

SEQ ID NO: 778084 - RNA, 19 nt, Homo sapiens
  misc_RNA (1)...(19): siRNA sense strand
uauaaugacugcucuugug

SEQ ID NO: 778085 - RNA, 19 nt, Homo sapiens
  misc_RNA (1)...(19): siRNA sense strand
uaccgucccucuucaguaa

SEQ ID NO: 778086 - RNA, 19 nt, Homo sapiens
  misc_RNA (1)...(19): siRNA sense strand
ccaaggaacucuacuucag

SEQ ID NO: 778087 - RNA, 19 nt, Homo sapiens
  misc_RNA (1)...(19): siRNA sense strand
gaaacggaacagacaaaga

SEQ ID NO: 778088 - RNA, 19 nt, Homo sapiens
  misc_RNA (1)...(19): siRNA sense strand
gacccacacuuccaugaga

SEQ ID NO: 778089 - RNA, 19 nt, Homo sapiens
  misc_RNA (1)...(19): siRNA sense strand
ccgaggcgcucuucaagug

SEQ ID NO: 778090 - RNA, 19 nt, Homo sapiens
  misc_RNA (1)...(19): siRNA sense strand
aagauucaguggaugcuaa

SEQ ID NO: 778091 - RNA, 19 nt, Homo sapiens
  misc_RNA (1)...(19): siRNA sense strand
gaugaucagggcuguauug

SEQ ID NO: 778092 - RNA, 19 nt, Homo sapiens
  misc_RNA (1)...(19): siRNA sense strand
ccagaccgguccucguuug

SEQ ID NO: 778093 - RNA, 19 nt, Homo sapiens
  misc_RNA (1)...(19): siRNA sense strand
aaacggaacagacaaagau

SEQ ID NO: 778094 - RNA, 19 nt, Homo sapiens
  misc_RNA (1)...(19): siRNA sense strand
cuuaagccauggagaagaa

SEQ ID NO: 778095 - RNA, 19 nt, Homo sapiens
  misc_RNA (1)...(19): siRNA sense strand
gggaccgagugccuacaua

SEQ ID NO: 778096 - RNA, 19 nt, Homo sapiens
  misc_RNA (1)...(19): siRNA sense strand
ucaaugacacagaugcuaa

SEQ ID NO: 778097 - RNA, 19 nt, Homo sapiens
  misc_RNA (1)...(19): siRNA sense strand
ugacgugauugucuauaau

SEQ ID NO: 778098 - RNA, 19 nt, Homo sapiens
  misc_RNA (1)...(19): siRNA sense strand
cuacauaucaguacaacau

SEQ ID NO: 778099 - RNA, 19 nt, Homo sapiens
  misc_RNA (1)...(19): siRNA sense strand
ggaccgagugccuacauau

SEQ ID NO: 778100 - RNA, 19 nt, Homo sapiens
  misc_RNA (1)...(19): siRNA sense strand
gguugaggauucagcaaau

SEQ ID NO: 778101 - RNA, 19 nt, Homo sapiens
  misc_RNA (1)...(19): siRNA sense strand
ugaagaggaccauacaaau

SEQ ID NO: 778102 - RNA, 19 nt, Homo sapiens
  misc_RNA (1)...(19): siRNA sense strand
gcccaucaaugacacagau

SEQ ID NO: 778103 - RNA, 19 nt, Homo sapiens
  misc_RNA (1)...(19): siRNA sense strand
acauaucaguacaacauga

SEQ ID NO: 778104 - RNA, 19 nt, Homo sapiens
  misc_RNA (1)...(19): siRNA sense strand
ccacgguuccaggcuauua

SEQ ID NO: 778105 - RNA, 19 nt, Homo sapiens
  misc_RNA (1)...(19): siRNA sense strand
guaccgucccucuucagua

SEQ ID NO: 778106 - RNA, 19 nt, Homo sapiens
  misc_RNA (1)...(19): siRNA sense strand
cagggugaaugacagaguu

SEQ ID NO: 778107 - RNA, 19 nt, Homo sapiens
  misc_RNA (1)...(19): siRNA sense strand
gcuaauccucgauacaaga

SEQ ID NO: 778108 - RNA, 19 nt, Homo sapiens
  misc_RNA (1)...(19): siRNA sense strand
cugggcaaaugcaucauaa

SEQ ID NO: 778109 - RNA, 19 nt, Homo sapiens
  misc_RNA (1)...(19): siRNA sense strand
ugacacagaugcuaauccu

SEQ ID NO: 778110 - RNA, 19 nt, Homo sapiens
  misc_RNA (1)...(19): siRNA sense strand
cugaagaggaccauacaaa

SEQ ID NO: 778111 - RNA, 19 nt, Homo sapiens
  misc_RNA (1)...(19): siRNA sense strand
uugacgugauugucuauaa

SEQ ID NO: 778112 - RNA, 19 nt, Homo sapiens
  misc_RNA (1)...(19): siRNA sense strand
uugauaaagugacagguau

SEQ ID NO: 778113 - RNA, 19 nt, Homo sapiens
  misc_RNA (1)...(19): siRNA sense strand
gcugggcaaaugcaucaua

SEQ ID NO: 778114 - RNA, 19 nt, Homo sapiens
  misc_RNA (1)...(19): siRNA sense strand
gaccgguccucguuuguac

SEQ ID NO: 778115 - RNA, 19 nt, Homo sapiens
  misc_RNA (1)...(19): siRNA sense strand
gaagauucaguggaugcua

SEQ ID NO: 778116 - RNA, 19 nt, Homo sapiens
  misc_RNA (1)...(19): siRNA sense strand
gugauugucuauaaugacu

SEQ ID NO: 778117 - RNA, 19 nt, Homo sapiens
  misc_RNA (1)...(19): siRNA sense strand
cagaugcuaauccucgaua

SEQ ID NO: 778118 - RNA, 19 nt, Homo sapiens
  misc_RNA (1)...(19): siRNA sense strand
ggaacucuacuucagucaa

SEQ ID NO: 778119 - RNA, 19 nt, Homo sapiens
  misc_RNA (1)...(19): siRNA sense strand
caaggaacucuacuucagu

SEQ ID NO: 778120 - RNA, 19 nt, Homo sapiens
  misc_RNA (1)...(19): siRNA sense strand
ccucuuaagccauggagaa

SEQ ID NO: 778121 - RNA, 19 nt, Homo sapiens
  misc_RNA (1)...(19): siRNA sense strand
gaagaggcuccugguuugu

SEQ ID NO: 778122 - RNA, 19 nt, Homo sapiens
  misc_RNA (1)...(19): siRNA sense strand
gacgugauugucuauaaug

SEQ ID NO: 778123 - RNA, 19 nt, Homo sapiens
  misc_RNA (1)...(19): siRNA sense strand
cagaugaucagggcuguau

SEQ ID NO: 778124 - RNA, 19 nt, Homo sapiens
  misc_RNA (1)...(19): siRNA sense strand
guugaggauucagcaaaug

SEQ ID NO: 778125 - RNA, 19 nt, Homo sapiens
  misc_RNA (1)...(19): siRNA sense strand
cauaucaguacaacaugaa

SEQ ID NO: 778126 - RNA, 19 nt, Homo sapiens
  misc_RNA (1)...(19): siRNA sense strand
ucuccaugcucaccaagga

SEQ ID NO: 778127 - RNA, 19 nt, Homo sapiens
  misc_RNA (1)...(19): siRNA sense strand
ggguugaggauucagcaaa

SEQ ID NO: 778128 - RNA, 19 nt, Homo sapiens
  misc_RNA (1)...(19): siRNA sense strand
gagggaccgagcuugauga

SEQ ID NO: 778129 - RNA, 19 nt, Homo sapiens
  misc_RNA (1)...(19): siRNA sense strand
gauaaagugacagguaugg

SEQ ID NO: 778130 - RNA, 19 nt, Homo sapiens
  misc_RNA (1)...(19): siRNA sense strand
accaugcgauccaucaaga

SEQ ID NO: 778131 - RNA, 19 nt, Homo sapiens
  misc_RNA (1)...(19): siRNA sense strand
caccaaggaacucuacuuc

SEQ ID NO: 778132 - RNA, 19 nt, Homo sapiens
  misc_RNA (1)...(19): siRNA sense strand
auacaaaugccgccugcuu

SEQ ID NO: 778133 - RNA, 19 nt, Homo sapiens
  misc_RNA (1)...(19): siRNA sense strand
caaugacacagaugcuaau

SEQ ID NO: 778134 - RNA, 19 nt, Homo sapiens
  misc_RNA (1)...(19): siRNA sense strand
uuugauaaagugacaggua

SEQ ID NO: 778135 - RNA, 19 nt, Homo sapiens
  misc_RNA (1)...(19): siRNA sense strand
cgagggaccgagcuugaug

SEQ ID NO: 778136 - RNA, 19 nt, Homo sapiens
  misc_RNA (1)...(19): siRNA sense strand
uugaaaagcugggcaaaug

SEQ ID NO: 778137 - RNA, 19 nt, Homo sapiens
  misc_RNA (1)...(19): siRNA sense strand
ucaccaaggaacucuacuu

SEQ ID NO: 778138 - RNA, 19 nt, Homo sapiens
  misc_RNA (1)...(19): siRNA sense strand
ucagggcuguauugaagag

SEQ ID NO: 778139 - RNA, 19 nt, Homo sapiens
  misc_RNA (1)...(19): siRNA sense strand
gaccgagugccuacauauc

SEQ ID NO: 778140 - RNA, 19 nt, Homo sapiens
  misc_RNA (1)...(19): siRNA sense strand
ucgaaacggaacagacaaa

SEQ ID NO: 778141 - RNA, 19 nt, Homo sapiens
  misc_RNA (1)...(19): siRNA sense strand
gugccuacauaucaguaca

SEQ ID NO: 778142 - RNA, 19 nt, Homo sapiens
  misc_RNA (1)...(19): siRNA sense strand
gcagaugaucagggcugua

SEQ ID NO: 778143 - RNA, 19 nt, Homo sapiens
  misc_RNA (1)...(19): siRNA sense strand
ggaagaggcuccugguuug

SEQ ID NO: 778144 - RNA, 19 nt, Homo sapiens
  misc_RNA (1)...(19): siRNA sense strand
gaucagggcuguauugaag

SEQ ID NO: 778145 - RNA, 19 nt, Homo sapiens
  misc_RNA (1)...(19): siRNA sense strand
gggcaaaugcaucauaaua

SEQ ID NO: 778146 - RNA, 19 nt, Homo sapiens
  misc_RNA (1)...(19): siRNA sense strand
gaagaggaccauacaaaug

SEQ ID NO: 778147 - RNA, 19 nt, Homo sapiens
  misc_RNA (1)...(19): siRNA sense strand
ggcaaaugcaucauaauaa

SEQ ID NO: 778148 - RNA, 19 nt, Homo sapiens
  misc_RNA (1)...(19): siRNA sense strand
gaugcaagaucugcuuaaa

SEQ ID NO: 778149 - RNA, 19 nt, Homo sapiens
  misc_RNA (1)...(19): siRNA sense strand
uauaaugacugcucuugug

SEQ ID NO: 778150 - RNA, 19 nt, Homo sapiens
  misc_RNA (1)...(19): siRNA sense strand
uaccgucccucuucaguaa

SEQ ID NO: 778151 - RNA, 19 nt, Homo sapiens
  misc_RNA (1)...(19): siRNA sense strand
gaaacggaacagacaaaga

SEQ ID NO: 778152 - RNA, 19 nt, Homo sapiens
  misc_RNA (1)...(19): siRNA sense strand
ccgaggcgcucuucaagug

SEQ ID NO: 778153 - RNA, 19 nt, Homo sapiens
  misc_RNA (1)...(19): siRNA sense strand
aagauucaguggaugcuaa

SEQ ID NO: 778154 - RNA, 19 nt, Homo sapiens
  misc_RNA (1)...(19): siRNA sense strand
gaugaucagggcuguauug

SEQ ID NO: 778155 - RNA, 19 nt, Homo sapiens
  misc_RNA (1)...(19): siRNA sense strand
ccagaccgguccucguuug

SEQ ID NO: 778156 - RNA, 19 nt, Homo sapiens
  misc_RNA (1)...(19): siRNA sense strand
aaacggaacagacaaagau

SEQ ID NO: 778157 - RNA, 19 nt, Homo sapiens
  misc_RNA (1)...(19): siRNA sense strand
cuuaagccauggagaagaa

SEQ ID NO: 778158 - RNA, 19 nt, Homo sapiens
  misc_RNA (1)...(19): siRNA sense strand
gggaccgagugccuacaua

SEQ ID NO: 778159 - RNA, 19 nt, Homo sapiens
  misc_RNA (1)...(19): siRNA sense strand
ucaaugacacagaugcuaa

SEQ ID NO: 778160 - RNA, 19 nt, Homo sapiens
  misc_RNA (1)...(19): siRNA sense strand
ugacgugauugucuauaau

SEQ ID NO: 778161 - RNA, 19 nt, Homo sapiens
  misc_RNA (1)...(19): siRNA sense strand
cuacauaucaguacaacau

SEQ ID NO: 778162 - RNA, 19 nt, Homo sapiens
  misc_RNA (1)...(19): siRNA sense strand
ggaccgagugccuacauau

SEQ ID NO: 778163 - RNA, 19 nt, Homo sapiens
  misc_RNA (1)...(19): siRNA sense strand
gguugaggauucagcaaau

SEQ ID NO: 778164 - RNA, 19 nt, Homo sapiens
  misc_RNA (1)...(19): siRNA sense strand
ugaagaggaccauacaaau

SEQ ID NO: 778165 - RNA, 19 nt, Homo sapiens
  misc_RNA (1)...(19): siRNA sense strand
gcccaucaaugacacagau

SEQ ID NO: 778166 - RNA, 19 nt, Homo sapiens
  misc_RNA (1)...(19): siRNA sense strand
acauaucaguacaacauga

SEQ ID NO: 778167 - RNA, 19 nt, Homo sapiens
  misc_RNA (1)...(19): siRNA sense strand
ccacgguuccaggcuauua

SEQ ID NO: 778168 - RNA, 19 nt, Homo sapiens
  misc_RNA (1)...(19): siRNA sense strand
guaccgucccucuucagua

SEQ ID NO: 778169 - RNA, 19 nt, Homo sapiens
  misc_RNA (1)...(19): siRNA sense strand
gcuaauccucgauacaaga

SEQ ID NO: 778170 - RNA, 19 nt, Homo sapiens
  misc_RNA (1)...(19): siRNA sense strand
cugggcaaaugcaucauaa

SEQ ID NO: 778171 - RNA, 19 nt, Homo sapiens
  misc_RNA (1)...(19): siRNA sense strand
ugacacagaugcuaauccu

SEQ ID NO: 778172 - RNA, 19 nt, Homo sapiens
  misc_RNA (1)...(19): siRNA sense strand
cugaagaggaccauacaaa

SEQ ID NO: 778173 - RNA, 19 nt, Homo sapiens
  misc_RNA (1)...(19): siRNA sense strand
uugacgugauugucuauaa

SEQ ID NO: 778174 - RNA, 19 nt, Homo sapiens
  misc_RNA (1)...(19): siRNA sense strand
uugauaaagugacagguau

SEQ ID NO: 778175 - RNA, 19 nt, Homo sapiens
  misc_RNA (1)...(19): siRNA sense strand
gaccgguccucguuuguac

SEQ ID NO: 778176 - RNA, 19 nt, Homo sapiens
  misc_RNA (1)...(19): siRNA sense strand
gcugggcaaaugcaucaua

SEQ ID NO: 778177 - RNA, 19 nt, Homo sapiens
  misc_RNA (1)...(19): siRNA sense strand
gugauugucuauaaugacu

SEQ ID NO: 778178 - RNA, 19 nt, Homo sapiens
  misc_RNA (1)...(19): siRNA sense strand
gaagauucaguggaugcua

SEQ ID NO: 778179 - RNA, 19 nt, Homo sapiens
  misc_RNA (1)...(19): siRNA sense strand
cagaugcuaauccucgaua

SEQ ID NO: 778180 - RNA, 19 nt, Homo sapiens
  misc_RNA (1)...(19): siRNA sense strand
ccucuuaagccauggagaa

SEQ ID NO: 778181 - RNA, 19 nt, Homo sapiens
  misc_RNA (1)...(19): siRNA sense strand
gaagaggcuccugguuugu

SEQ ID NO: 778182 - RNA, 19 nt, Homo sapiens
  misc_RNA (1)...(19): siRNA sense strand
gacgugauugucuauaaug

SEQ ID NO: 778183 - RNA, 19 nt, Homo sapiens
  misc_RNA (1)...(19): siRNA sense strand
guugaggauucagcaaaug

SEQ ID NO: 778184 - RNA, 19 nt, Homo sapiens
  misc_RNA (1)...(19): siRNA sense strand
cagaugaucagggcuguau

SEQ ID NO: 778185 - RNA, 19 nt, Homo sapiens
  misc_RNA (1)...(19): siRNA sense strand
cauaucaguacaacaugaa

SEQ ID NO: 778186 - RNA, 19 nt, Homo sapiens
  misc_RNA (1)...(19): siRNA sense strand
gagggaccgagcuugauga

SEQ ID NO: 778187 - RNA, 19 nt, Homo sapiens
  misc_RNA (1)...(19): siRNA sense strand
ggguugaggauucagcaaa

SEQ ID NO: 778188 - RNA, 19 nt, Homo sapiens
  misc_RNA (1)...(19): siRNA sense strand
gauaaagugacagguaugg

SEQ ID NO: 778189 - RNA, 19 nt, Homo sapiens
  misc_RNA (1)...(19): siRNA sense strand
accaugcgauccaucaaga

SEQ ID NO: 778190 - RNA, 19 nt, Homo sapiens
  misc_RNA (1)...(19): siRNA sense strand
auacaaaugccgccugcuu

SEQ ID NO: 778191 - RNA, 19 nt, Homo sapiens
  misc_RNA (1)...(19): siRNA sense strand
caaugacacagaugcuaau

SEQ ID NO: 778192 - RNA, 19 nt, Homo sapiens
  misc_RNA (1)...(19): siRNA sense strand
uugaaaagcugggcaaaug

SEQ ID NO: 778193 - RNA, 19 nt, Homo sapiens
  misc_RNA (1)...(19): siRNA sense strand
cgagggaccgagcuugaug

SEQ ID NO: 778194 - RNA, 19 nt, Homo sapiens
  misc_RNA (1)...(19): siRNA sense strand
uuugauaaagugacaggua

SEQ ID NO: 778195 - RNA, 19 nt, Homo sapiens
  misc_RNA (1)...(19): siRNA sense strand
ucagggcuguauugaagag

SEQ ID NO: 778196 - RNA, 19 nt, Homo sapiens
  misc_RNA (1)...(19): siRNA sense strand
gaccgagugccuacauauc

SEQ ID NO: 778197 - RNA, 19 nt, Homo sapiens
  misc_RNA (1)...(19): siRNA sense strand
ucgaaacggaacagacaaa

SEQ ID NO: 778198 - RNA, 19 nt, Homo sapiens
  misc_RNA (1)...(19): siRNA sense strand
gcagaugaucagggcugua

SEQ ID NO: 778199 - RNA, 19 nt, Homo sapiens
  misc_RNA (1)...(19): siRNA sense strand
gugccuacauaucaguaca

SEQ ID NO: 778200 - RNA, 19 nt, Homo sapiens
  misc_RNA (1)...(19): siRNA sense strand
ggaagaggcuccugguuug

SEQ ID NO: 778201 - RNA, 19 nt, Homo sapiens
  misc_RNA (1)...(19): siRNA sense strand
gaucagggcuguauugaag

SEQ ID NO: 778202 - RNA, 19 nt, Homo sapiens
  misc_RNA (1)...(19): siRNA sense strand
gggcaaaugcaucauaaua

SEQ ID NO: 778203 - RNA, 19 nt, Homo sapiens
  misc_RNA (1)...(19): siRNA sense strand
gaagaggaccauacaaaug

SEQ ID NO: 778204 - RNA, 19 nt, Homo sapiens
  misc_RNA (1)...(19): siRNA sense strand
gaacucuacuucagucaau

SEQ ID NO: 778205 - RNA, 19 nt, Homo sapiens
  misc_RNA (1)...(19): siRNA sense strand
ggcaaaugcaucauaauaa

SEQ ID NO: 778206 - RNA, 19 nt, Homo sapiens
  misc_RNA (1)...(19): siRNA sense strand
gaugcaagaucugcuuaaa

SEQ ID NO: 778207 - RNA, 19 nt, Homo sapiens
  misc_RNA (1)...(19): siRNA sense strand
uauaaugacugcucuugug

SEQ ID NO: 778208 - RNA, 19 nt, Homo sapiens
  misc_RNA (1)...(19): siRNA sense strand
uaccgucccucuucaguaa

SEQ ID NO: 778209 - RNA, 19 nt, Homo sapiens
  misc_RNA (1)...(19): siRNA sense strand
ccaaggaacucuacuucag

SEQ ID NO: 778210 - RNA, 19 nt, Homo sapiens
  misc_RNA (1)...(19): siRNA sense strand
gaaacggaacagacaaaga

SEQ ID NO: 778211 - RNA, 19 nt, Homo sapiens
  misc_RNA (1)...(19): siRNA sense strand
gacccacacuuccaugaga

SEQ ID NO: 778212 - RNA, 19 nt, Homo sapiens
  misc_RNA (1)...(19): siRNA sense strand
ccgaggcgcucuucaagug

SEQ ID NO: 778213 - RNA, 19 nt, Homo sapiens
  misc_RNA (1)...(19): siRNA sense strand
aagauucaguggaugcuaa

SEQ ID NO: 778214 - RNA, 19 nt, Homo sapiens
  misc_RNA (1)...(19): siRNA sense strand
gaugaucagggcuguauug

SEQ ID NO: 778215 - RNA, 19 nt, Homo sapiens
  misc_RNA (1)...(19): siRNA sense strand
ccagaccgguccucguuug

SEQ ID NO: 778216 - RNA, 19 nt, Homo sapiens
  misc_RNA (1)...(19): siRNA sense strand
aaacggaacagacaaagau

SEQ ID NO: 778217 - RNA, 19 nt, Homo sapiens
  misc_RNA (1)...(19): siRNA sense strand
cuuaagccauggagaagaa

SEQ ID NO: 778218 - RNA, 19 nt, Homo sapiens
  misc_RNA (1)...(19): siRNA sense strand
gggaccgagugccuacaua

SEQ ID NO: 778219 - RNA, 19 nt, Homo sapiens
  misc_RNA (1)...(19): siRNA sense strand
ucaaugacacagaugcuaa

SEQ ID NO: 778220 - RNA, 19 nt, Homo sapiens
  misc_RNA (1)...(19): siRNA sense strand
ugacgugauugucuauaau

SEQ ID NO: 778221 - RNA, 19 nt, Homo sapiens
  misc_RNA (1)...(19): siRNA sense strand
cuacauaucaguacaacau

SEQ ID NO: 778222 - RNA, 19 nt, Homo sapiens
  misc_RNA (1)...(19): siRNA sense strand
ggaccgagugccuacauau

SEQ ID NO: 778223 - RNA, 19 nt, Homo sapiens
  misc_RNA (1)...(19): siRNA sense strand
gguugaggauucagcaaau

SEQ ID NO: 778224 - RNA, 19 nt, Homo sapiens
  misc_RNA (1)...(19): siRNA sense strand
ugaagaggaccauacaaau

SEQ ID NO: 778225 - RNA, 19 nt, Homo sapiens
  misc_RNA (1)...(19): siRNA sense strand
gcccaucaaugacacagau

SEQ ID NO: 778226 - RNA, 19 nt, Homo sapiens
  misc_RNA (1)...(19): siRNA sense strand
acauaucaguacaacauga

SEQ ID NO: 778227 - RNA, 19 nt, Homo sapiens
  misc_RNA (1)...(19): siRNA sense strand
ccacgguuccaggcuauua

SEQ ID NO: 778228 - RNA, 19 nt, Homo sapiens
  misc_RNA (1)...(19): siRNA sense strand
guaccgucccucuucagua

SEQ ID NO: 778229 - RNA, 19 nt, Homo sapiens
  misc_RNA (1)...(19): siRNA sense strand
cagggugaaugacagaguu

SEQ ID NO: 778230 - RNA, 19 nt, Homo sapiens
  misc_RNA (1)...(19): siRNA sense strand
gcuaauccucgauacaaga

SEQ ID NO: 778231 - RNA, 19 nt, Homo sapiens
  misc_RNA (1)...(19): siRNA sense strand
cugggcaaaugcaucauaa

SEQ ID NO: 778232 - RNA, 19 nt, Homo sapiens
  misc_RNA (1)...(19): siRNA sense strand
ugacacagaugcuaauccu

SEQ ID NO: 778233 - RNA, 19 nt, Homo sapiens
  misc_RNA (1)...(19): siRNA sense strand
cugaagaggaccauacaaa

SEQ ID NO: 778234 - RNA, 19 nt, Homo sapiens
  misc_RNA (1)...(19): siRNA sense strand
uugacgugauugucuauaa

SEQ ID NO: 778235 - RNA, 19 nt, Homo sapiens
  misc_RNA (1)...(19): siRNA sense strand
uugauaaagugacagguau

SEQ ID NO: 778236 - RNA, 19 nt, Homo sapiens
  misc_RNA (1)...(19): siRNA sense strand
gcugggcaaaugcaucaua

SEQ ID NO: 778237 - RNA, 19 nt, Homo sapiens
  misc_RNA (1)...(19): siRNA sense strand
gaccgguccucguuuguac

SEQ ID NO: 778238 - RNA, 19 nt, Homo sapiens
  misc_RNA (1)...(19): siRNA sense strand
gaagauucaguggaugcua

SEQ ID NO: 778239 - RNA, 19 nt, Homo sapiens
  misc_RNA (1)...(19): siRNA sense strand
gugauugucuauaaugacu

SEQ ID NO: 778240 - RNA, 19 nt, Homo sapiens
  misc_RNA (1)...(19): siRNA sense strand
cagaugcuaauccucgaua

SEQ ID NO: 778241 - RNA, 19 nt, Homo sapiens
  misc_RNA (1)...(19): siRNA sense strand
ggaacucuacuucagucaa

SEQ ID NO: 778242 - RNA, 19 nt, Homo sapiens
  misc_RNA (1)...(19): siRNA sense strand
caaggaacucuacuucagu

SEQ ID NO: 778243 - RNA, 19 nt, Homo sapiens
  misc_RNA (1)...(19): siRNA sense strand
ccucuuaagccauggagaa

SEQ ID NO: 778244 - RNA, 19 nt, Homo sapiens
  misc_RNA (1)...(19): siRNA sense strand
gaagaggcuccugguuugu

SEQ ID NO: 778245 - RNA, 19 nt, Homo sapiens
  misc_RNA (1)...(19): siRNA sense strand
gacgugauugucuauaaug

SEQ ID NO: 778246 - RNA, 19 nt, Homo sapiens
  misc_RNA (1)...(19): siRNA sense strand
cagaugaucagggcuguau

SEQ ID NO: 778247 - RNA, 19 nt, Homo sapiens
  misc_RNA (1)...(19): siRNA sense strand
guugaggauucagcaaaug

SEQ ID NO: 778248 - RNA, 19 nt, Homo sapiens
  misc_RNA (1)...(19): siRNA sense strand
cauaucaguacaacaugaa

SEQ ID NO: 778249 - RNA, 19 nt, Homo sapiens
  misc_RNA (1)...(19): siRNA sense strand
ucuccaugcucaccaagga

SEQ ID NO: 778250 - RNA, 19 nt, Homo sapiens
  misc_RNA (1)...(19): siRNA sense strand
ggguugaggauucagcaaa

SEQ ID NO: 778251 - RNA, 19 nt, Homo sapiens
  misc_RNA (1)...(19): siRNA sense strand
gagggaccgagcuugauga

SEQ ID NO: 778252 - RNA, 19 nt, Homo sapiens
  misc_RNA (1)...(19): siRNA sense strand
gauaaagugacagguaugg

SEQ ID NO: 778253 - RNA, 19 nt, Homo sapiens
  misc_RNA (1)...(19): siRNA sense strand
accaugcgauccaucaaga

SEQ ID NO: 778254 - RNA, 19 nt, Homo sapiens
  misc_RNA (1)...(19): siRNA sense strand
caccaaggaacucuacuuc

SEQ ID NO: 778255 - RNA, 19 nt, Homo sapiens
  misc_RNA (1)...(19): siRNA sense strand
auacaaaugccgccugcuu

SEQ ID NO: 778256 - RNA, 19 nt, Homo sapiens
  misc_RNA (1)...(19): siRNA sense strand
caaugacacagaugcuaau

SEQ ID NO: 778257 - RNA, 19 nt, Homo sapiens
  misc_RNA (1)...(19): siRNA sense strand
uuugauaaagugacaggua

SEQ ID NO: 778258 - RNA, 19 nt, Homo sapiens
  misc_RNA (1)...(19): siRNA sense strand
cgagggaccgagcuugaug

SEQ ID NO: 778259 - RNA, 19 nt, Homo sapiens
  misc_RNA (1)...(19): siRNA sense strand
uugaaaagcugggcaaaug

SEQ ID NO: 778260 - RNA, 19 nt, Homo sapiens
  misc_RNA (1)...(19): siRNA sense strand
ucaccaaggaacucuacuu

SEQ ID NO: 778261 - RNA, 19 nt, Homo sapiens
  misc_RNA (1)...(19): siRNA sense strand
ucagggcuguauugaagag

SEQ ID NO: 778262 - RNA, 19 nt, Homo sapiens
  misc_RNA (1)...(19): siRNA sense strand
gaccgagugccuacauauc

SEQ ID NO: 778263 - RNA, 19 nt, Homo sapiens
  misc_RNA (1)...(19): siRNA sense strand
ucgaaacggaacagacaaa

SEQ ID NO: 778264 - RNA, 19 nt, Homo sapiens
  misc_RNA (1)...(19): siRNA sense strand
gugccuacauaucaguaca

SEQ ID NO: 778265 - RNA, 19 nt, Homo sapiens
  misc_RNA (1)...(19): siRNA sense strand
gcagaugaucagggcugua

SEQ ID NO: 778266 - RNA, 19 nt, Homo sapiens
  misc_RNA (1)...(19): siRNA sense strand
ggaagaggcuccugguuug

SEQ ID NO: 778267 - RNA, 19 nt, Homo sapiens
  misc_RNA (1)...(19): siRNA sense strand
gaucagggcuguauugaag

SEQ ID NO: 778268 - RNA, 19 nt, Homo sapiens
  misc_RNA (1)...(19): siRNA sense strand
gggcaaaugcaucauaaua

SEQ ID NO: 778269 - RNA, 19 nt, Homo sapiens
  misc_RNA (1)...(19): siRNA sense strand
gaagaggaccauacaaaug

SEQ ID NO: 778270 - RNA, 19 nt, Homo sapiens
  misc_RNA (1)...(19): siRNA sense strand
gaacucuacuucagucaau

SEQ ID NO: 778271 - RNA, 19 nt, Homo sapiens
  misc_RNA (1)...(19): siRNA sense strand
ggcaaaugcaucauaauaa

SEQ ID NO: 778272 - RNA, 19 nt, Homo sapiens
  misc_RNA (1)...(19): siRNA sense strand
gaugcaagaucugcuuaaa

SEQ ID NO: 778273 - RNA, 19 nt, Homo sapiens
  misc_RNA (1)...(19): siRNA sense strand
uauaaugacugcucuugug

SEQ ID NO: 778274 - RNA, 19 nt, Homo sapiens
  misc_RNA (1)...(19): siRNA sense strand
uaccgucccucuucaguaa

SEQ ID NO: 778275 - RNA, 19 nt, Homo sapiens
  misc_RNA (1)...(19): siRNA sense strand
ccaaggaacucuacuucag

SEQ ID NO: 778276 - RNA, 19 nt, Homo sapiens
  misc_RNA (1)...(19): siRNA sense strand
gaaacggaacagacaaaga

SEQ ID NO: 778277 - RNA, 19 nt, Homo sapiens
  misc_RNA (1)...(19): siRNA sense strand
gacccacacuuccaugaga

SEQ ID NO: 778278 - RNA, 19 nt, Homo sapiens
  misc_RNA (1)...(19): siRNA sense strand
ccgaggcgcucuucaagug

SEQ ID NO: 778279 - RNA, 19 nt, Homo sapiens
  misc_RNA (1)...(19): siRNA sense strand
aagauucaguggaugcuaa

SEQ ID NO: 778280 - RNA, 19 nt, Homo sapiens
  misc_RNA (1)...(19): siRNA sense strand
gaugaucagggcuguauug

SEQ ID NO: 778281 - RNA, 19 nt, Homo sapiens
  misc_RNA (1)...(19): siRNA sense strand
ccagaccgguccucguuug

SEQ ID NO: 778282 - RNA, 19 nt, Homo sapiens
  misc_RNA (1)...(19): siRNA sense strand
aaacggaacagacaaagau

SEQ ID NO: 778283 - RNA, 19 nt, Homo sapiens
  misc_RNA (1)...(19): siRNA sense strand
cuuaagccauggagaagaa

SEQ ID NO: 778284 - RNA, 19 nt, Homo sapiens
  misc_RNA (1)...(19): siRNA sense strand
gggaccgagugccuacaua

SEQ ID NO: 778285 - RNA, 19 nt, Homo sapiens
  misc_RNA (1)...(19): siRNA sense strand
ucaaugacacagaugcuaa

SEQ ID NO: 778286 - RNA, 19 nt, Homo sapiens
  misc_RNA (1)...(19): siRNA sense strand
ugacgugauugucuauaau

SEQ ID NO: 778287 - RNA, 19 nt, Homo sapiens
  misc_RNA (1)...(19): siRNA sense strand
cuacauaucaguacaacau

SEQ ID NO: 778288 - RNA, 19 nt, Homo sapiens
  misc_RNA (1)...(19): siRNA sense strand
ggaccgagugccuacauau

SEQ ID NO: 778289 - RNA, 19 nt, Homo sapiens
  misc_RNA (1)...(19): siRNA sense strand
gguugaggauucagcaaau

SEQ ID NO: 778290 - RNA, 19 nt, Homo sapiens
  misc_RNA (1)...(19): siRNA sense strand
ugaagaggaccauacaaau

SEQ ID NO: 778291 - RNA, 19 nt, Homo sapiens
  misc_RNA (1)...(19): siRNA sense strand
gcccaucaaugacacagau

SEQ ID NO: 778292 - RNA, 19 nt, Homo sapiens
  misc_RNA (1)...(19): siRNA sense strand
acauaucaguacaacauga

SEQ ID NO: 778293 - RNA, 19 nt, Homo sapiens
  misc_RNA (1)...(19): siRNA sense strand
ccacgguuccaggcuauua

SEQ ID NO: 778294 - RNA, 19 nt, Homo sapiens
  misc_RNA (1)...(19): siRNA sense strand
guaccgucccucuucagua

SEQ ID NO: 778295 - RNA, 19 nt, Homo sapiens
  misc_RNA (1)...(19): siRNA sense strand
cagggugaaugacagaguu

SEQ ID NO: 778296 - RNA, 19 nt, Homo sapiens
  misc_RNA (1)...(19): siRNA sense strand
gcuaauccucgauacaaga

SEQ ID NO: 778297 - RNA, 19 nt, Homo sapiens
  misc_RNA (1)...(19): siRNA sense strand
cugggcaaaugcaucauaa

SEQ ID NO: 778298 - RNA, 19 nt, Homo sapiens
  misc_RNA (1)...(19): siRNA sense strand
ugacacagaugcuaauccu

SEQ ID NO: 778299 - RNA, 19 nt, Homo sapiens
  misc_RNA (1)...(19): siRNA sense strand
cugaagaggaccauacaaa

SEQ ID NO: 778300 - RNA, 19 nt, Homo sapiens
  misc_RNA (1)...(19): siRNA sense strand
uugacgugauugucuauaa

SEQ ID NO: 778301 - RNA, 19 nt, Homo sapiens
  misc_RNA (1)...(19): siRNA sense strand
uugauaaagugacagguau

SEQ ID NO: 778302 - RNA, 19 nt, Homo sapiens
  misc_RNA (1)...(19): siRNA sense strand
gcugggcaaaugcaucaua

SEQ ID NO: 778303 - RNA, 19 nt, Homo sapiens
  misc_RNA (1)...(19): siRNA sense strand
gaccgguccucguuuguac

SEQ ID NO: 778304 - RNA, 19 nt, Homo sapiens
  misc_RNA (1)...(19): siRNA sense strand
gaagauucaguggaugcua

SEQ ID NO: 778305 - RNA, 19 nt, Homo sapiens
  misc_RNA (1)...(19): siRNA sense strand
gugauugucuauaaugacu

SEQ ID NO: 778306 - RNA, 19 nt, Homo sapiens
  misc_RNA (1)...(19): siRNA sense strand
cagaugcuaauccucgaua

SEQ ID NO: 778307 - RNA, 19 nt, Homo sapiens
  misc_RNA (1)...(19): siRNA sense strand
ggaacucuacuucagucaa

SEQ ID NO: 778308 - RNA, 19 nt, Homo sapiens
  misc_RNA (1)...(19): siRNA sense strand
caaggaacucuacuucagu

SEQ ID NO: 778309 - RNA, 19 nt, Homo sapiens
  misc_RNA (1)...(19): siRNA sense strand
ccucuuaagccauggagaa

SEQ ID NO: 778310 - RNA, 19 nt, Homo sapiens
  misc_RNA (1)...(19): siRNA sense strand
gaagaggcuccugguuugu

SEQ ID NO: 778311 - RNA, 19 nt, Homo sapiens
  misc_RNA (1)...(19): siRNA sense strand
gacgugauugucuauaaug

SEQ ID NO: 778312 - RNA, 19 nt, Homo sapiens
  misc_RNA (1)...(19): siRNA sense strand
cagaugaucagggcuguau

SEQ ID NO: 778313 - RNA, 19 nt, Homo sapiens
  misc_RNA (1)...(19): siRNA sense strand
guugaggauucagcaaaug

SEQ ID NO: 778314 - RNA, 19 nt, Homo sapiens
  misc_RNA (1)...(19): siRNA sense strand
cauaucaguacaacaugaa

SEQ ID NO: 778315 - RNA, 19 nt, Homo sapiens
  misc_RNA (1)...(19): siRNA sense strand
ucuccaugcucaccaagga

SEQ ID NO: 778316 - RNA, 19 nt, Homo sapiens
  misc_RNA (1)...(19): siRNA sense strand
ggguugaggauucagcaaa

SEQ ID NO: 778317 - RNA, 19 nt, Homo sapiens
  misc_RNA (1)...(19): siRNA sense strand
gagggaccgagcuugauga

SEQ ID NO: 778318 - RNA, 19 nt, Homo sapiens
  misc_RNA (1)...(19): siRNA sense strand
gauaaagugacagguaugg

SEQ ID NO: 778319 - RNA, 19 nt, Homo sapiens
  misc_RNA (1)...(19): siRNA sense strand
accaugcgauccaucaaga

SEQ ID NO: 778320 - RNA, 19 nt, Homo sapiens
  misc_RNA (1)...(19): siRNA sense strand
caccaaggaacucuacuuc

SEQ ID NO: 778321 - RNA, 19 nt, Homo sapiens
  misc_RNA (1)...(19): siRNA sense strand
auacaaaugccgccugcuu

SEQ ID NO: 778322 - RNA, 19 nt, Homo sapiens
  misc_RNA (1)...(19): siRNA sense strand
caaugacacagaugcuaau

SEQ ID NO: 778323 - RNA, 19 nt, Homo sapiens
  misc_RNA (1)...(19): siRNA sense strand
uuugauaaagugacaggua

SEQ ID NO: 778324 - RNA, 19 nt, Homo sapiens
  misc_RNA (1)...(19): siRNA sense strand
cgagggaccgagcuugaug

SEQ ID NO: 778325 - RNA, 19 nt, Homo sapiens
  misc_RNA (1)...(19): siRNA sense strand
uugaaaagcugggcaaaug

SEQ ID NO: 778326 - RNA, 19 nt, Homo sapiens
  misc_RNA (1)...(19): siRNA sense strand
ucaccaaggaacucuacuu

SEQ ID NO: 778327 - RNA, 19 nt, Homo sapiens
  misc_RNA (1)...(19): siRNA sense strand
ucagggcuguauugaagag

SEQ ID NO: 778328 - RNA, 19 nt, Homo sapiens
  misc_RNA (1)...(19): siRNA sense strand
gaccgagugccuacauauc

SEQ ID NO: 778329 - RNA, 19 nt, Homo sapiens
  misc_RNA (1)...(19): siRNA sense strand
ucgaaacggaacagacaaa

SEQ ID NO: 778330 - RNA, 19 nt, Homo sapiens
  misc_RNA (1)...(19): siRNA sense strand
gugccuacauaucaguaca

SEQ ID NO: 778331 - RNA, 19 nt, Homo sapiens
  misc_RNA (1)...(19): siRNA sense strand
gcagaugaucagggcugua

SEQ ID NO: 778332 - RNA, 19 nt, Homo sapiens
  misc_RNA (1)...(19): siRNA sense strand
ggaagaggcuccugguuug

SEQ ID NO: 778333 - RNA, 19 nt, Homo sapiens
  misc_RNA (1)...(19): siRNA sense strand
gaucagggcuguauugaag

SEQ ID NO: 778334 - RNA, 19 nt, Homo sapiens
  misc_RNA (1)...(19): siRNA sense strand
gggcaaaugcaucauaaua

SEQ ID NO: 778335 - RNA, 19 nt, Homo sapiens
  misc_RNA (1)...(19): siRNA sense strand
gaagaggaccauacaaaug

SEQ ID NO: 778336 - RNA, 19 nt, Homo sapiens
  misc_RNA (1)...(19): siRNA sense strand
gaacucuacuucagucaau

SEQ ID NO: 778337 - RNA, 19 nt, Homo sapiens
  misc_RNA (1)...(19): siRNA sense strand
ggcaaaugcaucauaauaa

SEQ ID NO: 778338 - RNA, 19 nt, Homo sapiens
  misc_RNA (1)...(19): siRNA sense strand
gaugcaagaucugcuuaaa

SEQ ID NO: 778339 - RNA, 19 nt, Homo sapiens
  misc_RNA (1)...(19): siRNA sense strand
uauaaugacugcucuugug

SEQ ID NO: 778340 - RNA, 19 nt, Homo sapiens
  misc_RNA (1)...(19): siRNA sense strand
uaccgucccucuucaguaa

SEQ ID NO: 778341 - RNA, 19 nt, Homo sapiens
  misc_RNA (1)...(19): siRNA sense strand
ccaaggaacucuacuucag

SEQ ID NO: 778342 - RNA, 19 nt, Homo sapiens
  misc_RNA (1)...(19): siRNA sense strand
gaaacggaacagacaaaga

SEQ ID NO: 778343 - RNA, 19 nt, Homo sapiens
  misc_RNA (1)...(19): siRNA sense strand
gacccacacuuccaugaga

SEQ ID NO: 778344 - RNA, 19 nt, Homo sapiens
  misc_RNA (1)...(19): siRNA sense strand
ccgaggcgcucuucaagug

SEQ ID NO: 778345 - RNA, 19 nt, Homo sapiens
  misc_RNA (1)...(19): siRNA sense strand
aagauucaguggaugcuaa

SEQ ID NO: 778346 - RNA, 19 nt, Homo sapiens
  misc_RNA (1)...(19): siRNA sense strand
gaugaucagggcuguauug

SEQ ID NO: 778347 - RNA, 19 nt, Homo sapiens
  misc_RNA (1)...(19): siRNA sense strand
ccagaccgguccucguuug

SEQ ID NO: 778348 - RNA, 19 nt, Homo sapiens
  misc_RNA (1)...(19): siRNA sense strand
aaacggaacagacaaagau

SEQ ID NO: 778349 - RNA, 19 nt, Homo sapiens
  misc_RNA (1)...(19): siRNA sense strand
cuuaagccauggagaagaa

SEQ ID NO: 778350 - RNA, 19 nt, Homo sapiens
  misc_RNA (1)...(19): siRNA sense strand
gggaccgagugccuacaua

SEQ ID NO: 778351 - RNA, 19 nt, Homo sapiens
  misc_RNA (1)...(19): siRNA sense strand
ucaaugacacagaugcuaa

SEQ ID NO: 778352 - RNA, 19 nt, Homo sapiens
  misc_RNA (1)...(19): siRNA sense strand
ugacgugauugucuauaau

SEQ ID NO: 778353 - RNA, 19 nt, Homo sapiens
  misc_RNA (1)...(19): siRNA sense strand
cuacauaucaguacaacau

SEQ ID NO: 778354 - RNA, 19 nt, Homo sapiens
  misc_RNA (1)...(19): siRNA sense strand
ggaccgagugccuacauau

SEQ ID NO: 778355 - RNA, 19 nt, Homo sapiens
  misc_RNA (1)...(19): siRNA sense strand
gguugaggauucagcaaau

SEQ ID NO: 778356 - RNA, 19 nt, Homo sapiens
  misc_RNA (1)...(19): siRNA sense strand
ugaagaggaccauacaaau

SEQ ID NO: 778357 - RNA, 19 nt, Homo sapiens
  misc_RNA (1)...(19): siRNA sense strand
gcccaucaaugacacagau

SEQ ID NO: 778358 - RNA, 19 nt, Homo sapiens
  misc_RNA (1)...(19): siRNA sense strand
acauaucaguacaacauga

SEQ ID NO: 778359 - RNA, 19 nt, Homo sapiens
  misc_RNA (1)...(19): siRNA sense strand
ccacgguuccaggcuauua

SEQ ID NO: 778360 - RNA, 19 nt, Homo sapiens
  misc_RNA (1)...(19): siRNA sense strand
guaccgucccucuucagua

SEQ ID NO: 778361 - RNA, 19 nt, Homo sapiens
  misc_RNA (1)...(19): siRNA sense strand
cagggugaaugacagaguu

SEQ ID NO: 778362 - RNA, 19 nt, Homo sapiens
  misc_RNA (1)...(19): siRNA sense strand
gcuaauccucgauacaaga

SEQ ID NO: 778363 - RNA, 19 nt, Homo sapiens
  misc_RNA (1)...(19): siRNA sense strand
cugggcaaaugcaucauaa

SEQ ID NO: 778364 - RNA, 19 nt, Homo sapiens
  misc_RNA (1)...(19): siRNA sense strand
ugacacagaugcuaauccu

SEQ ID NO: 778365 - RNA, 19 nt, Homo sapiens
  misc_RNA (1)...(19): siRNA sense strand
cugaagaggaccauacaaa

SEQ ID NO: 778366 - RNA, 19 nt, Homo sapiens
  misc_RNA (1)...(19): siRNA sense strand
uugacgugauugucuauaa

SEQ ID NO: 778367 - RNA, 19 nt, Homo sapiens
  misc_RNA (1)...(19): siRNA sense strand
uugauaaagugacagguau

SEQ ID NO: 778368 - RNA, 19 nt, Homo sapiens
  misc_RNA (1)...(19): siRNA sense strand
gcugggcaaaugcaucaua

SEQ ID NO: 778369 - RNA, 19 nt, Homo sapiens
  misc_RNA (1)...(19): siRNA sense strand
gaccgguccucguuuguac

SEQ ID NO: 778370 - RNA, 19 nt, Homo sapiens
  misc_RNA (1)...(19): siRNA sense strand
gaagauucaguggaugcua

SEQ ID NO: 778371 - RNA, 19 nt, Homo sapiens
  misc_RNA (1)...(19): siRNA sense strand
gugauugucuauaaugacu

SEQ ID NO: 778372 - RNA, 19 nt, Homo sapiens
  misc_RNA (1)...(19): siRNA sense strand
cagaugcuaauccucgaua

SEQ ID NO: 778373 - RNA, 19 nt, Homo sapiens
  misc_RNA (1)...(19): siRNA sense strand
ggaacucuacuucagucaa

SEQ ID NO: 778374 - RNA, 19 nt, Homo sapiens
  misc_RNA (1)...(19): siRNA sense strand
caaggaacucuacuucagu

SEQ ID NO: 778375 - RNA, 19 nt, Homo sapiens
  misc_RNA (1)...(19): siRNA sense strand
ccucuuaagccauggagaa

SEQ ID NO: 778376 - RNA, 19 nt, Homo sapiens
  misc_RNA (1)...(19): siRNA sense strand
gaagaggcuccugguuugu

SEQ ID NO: 778377 - RNA, 19 nt, Homo sapiens
  misc_RNA (1)...(19): siRNA sense strand
gacgugauugucuauaaug

SEQ ID NO: 778378 - RNA, 19 nt, Homo sapiens
  misc_RNA (1)...(19): siRNA sense strand
cagaugaucagggcuguau

SEQ ID NO: 778379 - RNA, 19 nt, Homo sapiens
  misc_RNA (1)...(19): siRNA sense strand
guugaggauucagcaaaug

SEQ ID NO: 778380 - RNA, 19 nt, Homo sapiens
  misc_RNA (1)...(19): siRNA sense strand
cauaucaguacaacaugaa

SEQ ID NO: 778381 - RNA, 19 nt, Homo sapiens
  misc_RNA (1)...(19): siRNA sense strand
ucuccaugcucaccaagga

SEQ ID NO: 778382 - RNA, 19 nt, Homo sapiens
  misc_RNA (1)...(19): siRNA sense strand
ggguugaggauucagcaaa

SEQ ID NO: 778383 - RNA, 19 nt, Homo sapiens
  misc_RNA (1)...(19): siRNA sense strand
gagggaccgagcuugauga

SEQ ID NO: 778384 - RNA, 19 nt, Homo sapiens
  misc_RNA (1)...(19): siRNA sense strand
gauaaagugacagguaugg

SEQ ID NO: 778385 - RNA, 19 nt, Homo sapiens
  misc_RNA (1)...(19): siRNA sense strand
accaugcgauccaucaaga

SEQ ID NO: 778386 - RNA, 19 nt, Homo sapiens
  misc_RNA (1)...(19): siRNA sense strand
caccaaggaacucuacuuc

SEQ ID NO: 778387 - RNA, 19 nt, Homo sapiens
  misc_RNA (1)...(19): siRNA sense strand
auacaaaugccgccugcuu

SEQ ID NO: 778388 - RNA, 19 nt, Homo sapiens
  misc_RNA (1)...(19): siRNA sense strand
caaugacacagaugcuaau

SEQ ID NO: 778389 - RNA, 19 nt, Homo sapiens
  misc_RNA (1)...(19): siRNA sense strand
uuugauaaagugacaggua

SEQ ID NO: 778390 - RNA, 19 nt, Homo sapiens
  misc_RNA (1)...(19): siRNA sense strand
cgagggaccgagcuugaug

SEQ ID NO: 778391 - RNA, 19 nt, Homo sapiens
  misc_RNA (1)...(19): siRNA sense strand
uugaaaagcugggcaaaug

SEQ ID NO: 778392 - RNA, 19 nt, Homo sapiens
  misc_RNA (1)...(19): siRNA sense strand
ucaccaaggaacucuacuu

SEQ ID NO: 778393 - RNA, 19 nt, Homo sapiens
  misc_RNA (1)...(19): siRNA sense strand
ucagggcuguauugaagag

SEQ ID NO: 778394 - RNA, 19 nt, Homo sapiens
  misc_RNA (1)...(19): siRNA sense strand
gaccgagugccuacauauc

SEQ ID NO: 778395 - RNA, 19 nt, Homo sapiens
  misc_RNA (1)...(19): siRNA sense strand
ucgaaacggaacagacaaa

SEQ ID NO: 778396 - RNA, 19 nt, Homo sapiens
  misc_RNA (1)...(19): siRNA sense strand
gugccuacauaucaguaca

SEQ ID NO: 778397 - RNA, 19 nt, Homo sapiens
  misc_RNA (1)...(19): siRNA sense strand
gcagaugaucagggcugua

SEQ ID NO: 778398 - RNA, 19 nt, Homo sapiens
  misc_RNA (1)...(19): siRNA sense strand
ggaagaggcuccugguuug

SEQ ID NO: 778399 - RNA, 19 nt, Homo sapiens
  misc_RNA (1)...(19): siRNA sense strand
gaucagggcuguauugaag

SEQ ID NO: 778400 - RNA, 19 nt, Homo sapiens
  misc_RNA (1)...(19): siRNA sense strand
gggcaaaugcaucauaaua

SEQ ID NO: 778401 - RNA, 19 nt, Homo sapiens
  misc_RNA (1)...(19): siRNA sense strand
gaagaggaccauacaaaug

SEQ ID NO: 778402 - RNA, 19 nt, Homo sapiens
  misc_RNA (1)...(19): siRNA sense strand
ggcaaaugcaucauaauaa

SEQ ID NO: 778403 - RNA, 19 nt, Homo sapiens
  misc_RNA (1)...(19): siRNA sense strand
gaugcaagaucugcuuaaa

SEQ ID NO: 778404 - RNA, 19 nt, Homo sapiens
  misc_RNA (1)...(19): siRNA sense strand
uauaaugacugcucuugug

SEQ ID NO: 778405 - RNA, 19 nt, Homo sapiens
  misc_RNA (1)...(19): siRNA sense strand
uaccgucccucuucaguaa

SEQ ID NO: 778406 - RNA, 19 nt, Homo sapiens
  misc_RNA (1)...(19): siRNA sense strand
gaaacggaacagacaaaga

SEQ ID NO: 778407 - RNA, 19 nt, Homo sapiens
  misc_RNA (1)...(19): siRNA sense strand
ccgaggcgcucuucaagug

SEQ ID NO: 778408 - RNA, 19 nt, Homo sapiens
  misc_RNA (1)...(19): siRNA sense strand
aagauucaguggaugcuaa

SEQ ID NO: 778409 - RNA, 19 nt, Homo sapiens
  misc_RNA (1)...(19): siRNA sense strand
gaugaucagggcuguauug

SEQ ID NO: 778410 - RNA, 19 nt, Homo sapiens
  misc_RNA (1)...(19): siRNA sense strand
ccagaccgguccucguuug

SEQ ID NO: 778411 - RNA, 19 nt, Homo sapiens
  misc_RNA (1)...(19): siRNA sense strand
aaacggaacagacaaagau

SEQ ID NO: 778412 - RNA, 19 nt, Homo sapiens
  misc_RNA (1)...(19): siRNA sense strand
cuuaagccauggagaagaa

SEQ ID NO: 778413 - RNA, 19 nt, Homo sapiens
  misc_RNA (1)...(19): siRNA sense strand
gggaccgagugccuacaua

SEQ ID NO: 778414 - RNA, 19 nt, Homo sapiens
  misc_RNA (1)...(19): siRNA sense strand
ucaaugacacagaugcuaa

SEQ ID NO: 778415 - RNA, 19 nt, Homo sapiens
  misc_RNA (1)...(19): siRNA sense strand
ugacgugauugucuauaau

SEQ ID NO: 778416 - RNA, 19 nt, Homo sapiens
  misc_RNA (1)...(19): siRNA sense strand
cuacauaucaguacaacau

SEQ ID NO: 778417 - RNA, 19 nt, Homo sapiens
  misc_RNA (1)...(19): siRNA sense strand
ggaccgagugccuacauau

SEQ ID NO: 778418 - RNA, 19 nt, Homo sapiens
  misc_RNA (1)...(19): siRNA sense strand
gguugaggauucagcaaau

SEQ ID NO: 778419 - RNA, 19 nt, Homo sapiens
  misc_RNA (1)...(19): siRNA sense strand
ugaagaggaccauacaaau

SEQ ID NO: 778420 - RNA, 19 nt, Homo sapiens
  misc_RNA (1)...(19): siRNA sense strand
gcccaucaaugacacagau

SEQ ID NO: 778421 - RNA, 19 nt, Homo sapiens
  misc_RNA (1)...(19): siRNA sense strand
acauaucaguacaacauga

SEQ ID NO: 778422 - RNA, 19 nt, Homo sapiens
  misc_RNA (1)...(19): siRNA sense strand
ccacgguuccaggcuauua

SEQ ID NO: 778423 - RNA, 19 nt, Homo sapiens
  misc_RNA (1)...(19): siRNA sense strand
guaccgucccucuucagua

SEQ ID NO: 778424 - RNA, 19 nt, Homo sapiens
  misc_RNA (1)...(19): siRNA sense strand
gcuaauccucgauacaaga

SEQ ID NO: 778425 - RNA, 19 nt, Homo sapiens
  misc_RNA (1)...(19): siRNA sense strand
cugggcaaaugcaucauaa

SEQ ID NO: 778426 - RNA, 19 nt, Homo sapiens
  misc_RNA (1)...(19): siRNA sense strand
ugacacagaugcuaauccu

SEQ ID NO: 778427 - RNA, 19 nt, Homo sapiens
  misc_RNA (1)...(19): siRNA sense strand
cugaagaggaccauacaaa

SEQ ID NO: 778428 - RNA, 19 nt, Homo sapiens
  misc_RNA (1)...(19): siRNA sense strand
uugacgugauugucuauaa

SEQ ID NO: 778429 - RNA, 19 nt, Homo sapiens
  misc_RNA (1)...(19): siRNA sense strand
uugauaaagugacagguau

SEQ ID NO: 778430 - RNA, 19 nt, Homo sapiens
  misc_RNA (1)...(19): siRNA sense strand
gaccgguccucguuuguac

SEQ ID NO: 778431 - RNA, 19 nt, Homo sapiens
  misc_RNA (1)...(19): siRNA sense strand
gcugggcaaaugcaucaua

SEQ ID NO: 778432 - RNA, 19 nt, Homo sapiens
  misc_RNA (1)...(19): siRNA sense strand
gugauugucuauaaugacu

SEQ ID NO: 778433 - RNA, 19 nt, Homo sapiens
  misc_RNA (1)...(19): siRNA sense strand
gaagauucaguggaugcua

SEQ ID NO: 778434 - RNA, 19 nt, Homo sapiens
  misc_RNA (1)...(19): siRNA sense strand
cagaugcuaauccucgaua

SEQ ID NO: 778435 - RNA, 19 nt, Homo sapiens
  misc_RNA (1)...(19): siRNA sense strand
ccucuuaagccauggagaa

SEQ ID NO: 778436 - RNA, 19 nt, Homo sapiens
  misc_RNA (1)...(19): siRNA sense strand
gaagaggcuccugguuugu

SEQ ID NO: 778437 - RNA, 19 nt, Homo sapiens
  misc_RNA (1)...(19): siRNA sense strand
gacgugauugucuauaaug

SEQ ID NO: 778438 - RNA, 19 nt, Homo sapiens
  misc_RNA (1)...(19): siRNA sense strand
guugaggauucagcaaaug

SEQ ID NO: 778439 - RNA, 19 nt, Homo sapiens
  misc_RNA (1)...(19): siRNA sense strand
cagaugaucagggcuguau

SEQ ID NO: 778440 - RNA, 19 nt, Homo sapiens
  misc_RNA (1)...(19): siRNA sense strand
cauaucaguacaacaugaa

SEQ ID NO: 778441 - RNA, 19 nt, Homo sapiens
  misc_RNA (1)...(19): siRNA sense strand
gagggaccgagcuugauga

SEQ ID NO: 778442 - RNA, 19 nt, Homo sapiens
  misc_RNA (1)...(19): siRNA sense strand
ggguugaggauucagcaaa

SEQ ID NO: 778443 - RNA, 19 nt, Homo sapiens
  misc_RNA (1)...(19): siRNA sense strand
gauaaagugacagguaugg

SEQ ID NO: 778444 - RNA, 19 nt, Homo sapiens
  misc_RNA (1)...(19): siRNA sense strand
accaugcgauccaucaaga

SEQ ID NO: 778445 - RNA, 19 nt, Homo sapiens
  misc_RNA (1)...(19): siRNA sense strand
auacaaaugccgccugcuu

SEQ ID NO: 778446 - RNA, 19 nt, Homo sapiens
  misc_RNA (1)...(19): siRNA sense strand
caaugacacagaugcuaau

SEQ ID NO: 778447 - RNA, 19 nt, Homo sapiens
  misc_RNA (1)...(19): siRNA sense strand
uugaaaagcugggcaaaug

SEQ ID NO: 778448 - RNA, 19 nt, Homo sapiens
  misc_RNA (1)...(19): siRNA sense strand
cgagggaccgagcuugaug

SEQ ID NO: 778449 - RNA, 19 nt, Homo sapiens
  misc_RNA (1)...(19): siRNA sense strand
uuugauaaagugacaggua

SEQ ID NO: 778450 - RNA, 19 nt, Homo sapiens
  misc_RNA (1)...(19): siRNA sense strand
ucagggcuguauugaagag

SEQ ID NO: 778451 - RNA, 19 nt, Homo sapiens
  misc_RNA (1)...(19): siRNA sense strand
gaccgagugccuacauauc

SEQ ID NO: 778452 - RNA, 19 nt, Homo sapiens
  misc_RNA (1)...(19): siRNA sense strand
ucgaaacggaacagacaaa

SEQ ID NO: 778453 - RNA, 19 nt, Homo sapiens
  misc_RNA (1)...(19): siRNA sense strand
gcagaugaucagggcugua

SEQ ID NO: 778454 - RNA, 19 nt, Homo sapiens
  misc_RNA (1)...(19): siRNA sense strand
gugccuacauaucaguaca

SEQ ID NO: 778455 - RNA, 19 nt, Homo sapiens
  misc_RNA (1)...(19): siRNA sense strand
ggaagaggcuccugguuug

SEQ ID NO: 778456 - RNA, 19 nt, Homo sapiens
  misc_RNA (1)...(19): siRNA sense strand
gaucagggcuguauugaag

SEQ ID NO: 778457 - RNA, 19 nt, Homo sapiens
  misc_RNA (1)...(19): siRNA sense strand
gggcaaaugcaucauaaua

SEQ ID NO: 778458 - RNA, 19 nt, Homo sapiens
  misc_RNA (1)...(19): siRNA sense strand
gaagaggaccauacaaaug

SEQ ID NO: 778459 - RNA, 19 nt, Homo sapiens
  misc_RNA (1)...(19): siRNA sense strand
gaacucuacuucagucaau

SEQ ID NO: 778460 - RNA, 19 nt, Homo sapiens
  misc_RNA (1)...(19): siRNA sense strand
ggcaaaugcaucauaauaa

SEQ ID NO: 778461 - RNA, 19 nt, Homo sapiens
  misc_RNA (1)...(19): siRNA sense strand
gaugcaagaucugcuuaaa

SEQ ID NO: 778462 - RNA, 19 nt, Homo sapiens
  misc_RNA (1)...(19): siRNA sense strand
uauaaugacugcucuugug

SEQ ID NO: 778463 - RNA, 19 nt, Homo sapiens
  misc_RNA (1)...(19): siRNA sense strand
uaccgucccucuucaguaa

SEQ ID NO: 778464 - RNA, 19 nt, Homo sapiens
  misc_RNA (1)...(19): siRNA sense strand
ccaaggaacucuacuucag

SEQ ID NO: 778465 - RNA, 19 nt, Homo sapiens
  misc_RNA (1)...(19): siRNA sense strand
gaaacggaacagacaaaga

SEQ ID NO: 778466 - RNA, 19 nt, Homo sapiens
  misc_RNA (1)...(19): siRNA sense strand
gacccacacuuccaugaga

SEQ ID NO: 778467 - RNA, 19 nt, Homo sapiens
  misc_RNA (1)...(19): siRNA sense strand
ccgaggcgcucuucaagug

SEQ ID NO: 778468 - RNA, 19 nt, Homo sapiens
  misc_RNA (1)...(19): siRNA sense strand
aagauucaguggaugcuaa

SEQ ID NO: 778469 - RNA, 19 nt, Homo sapiens
  misc_RNA (1)...(19): siRNA sense strand
gaugaucagggcuguauug

SEQ ID NO: 778470 - RNA, 19 nt, Homo sapiens
  misc_RNA (1)...(19): siRNA sense strand
ccagaccgguccucguuug

SEQ ID NO: 778471 - RNA, 19 nt, Homo sapiens
  misc_RNA (1)...(19): siRNA sense strand
aaacggaacagacaaagau

SEQ ID NO: 778472 - RNA, 19 nt, Homo sapiens
  misc_RNA (1)...(19): siRNA sense strand
cuuaagccauggagaagaa

SEQ ID NO: 778473 - RNA, 19 nt, Homo sapiens
  misc_RNA (1)...(19): siRNA sense strand
gggaccgagugccuacaua

SEQ ID NO: 778474 - RNA, 19 nt, Homo sapiens
  misc_RNA (1)...(19): siRNA sense strand
ucaaugacacagaugcuaa

SEQ ID NO: 778475 - RNA, 19 nt, Homo sapiens
  misc_RNA (1)...(19): siRNA sense strand
ugacgugauugucuauaau

SEQ ID NO: 778476 - RNA, 19 nt, Homo sapiens
  misc_RNA (1)...(19): siRNA sense strand
cuacauaucaguacaacau

SEQ ID NO: 778477 - RNA, 19 nt, Homo sapiens
  misc_RNA (1)...(19): siRNA sense strand
ggaccgagugccuacauau

SEQ ID NO: 778478 - RNA, 19 nt, Homo sapiens
  misc_RNA (1)...(19): siRNA sense strand
gguugaggauucagcaaau

SEQ ID NO: 778479 - RNA, 19 nt, Homo sapiens
  misc_RNA (1)...(19): siRNA sense strand
ugaagaggaccauacaaau

SEQ ID NO: 778480 - RNA, 19 nt, Homo sapiens
  misc_RNA (1)...(19): siRNA sense strand
gcccaucaaugacacagau

SEQ ID NO: 778481 - RNA, 19 nt, Homo sapiens
  misc_RNA (1)...(19): siRNA sense strand
acauaucaguacaacauga

SEQ ID NO: 778482 - RNA, 19 nt, Homo sapiens
  misc_RNA (1)...(19): siRNA sense strand
ccacgguuccaggcuauua

SEQ ID NO: 778483 - RNA, 19 nt, Homo sapiens
  misc_RNA (1)...(19): siRNA sense strand
guaccgucccucuucagua

SEQ ID NO: 778484 - RNA, 19 nt, Homo sapiens
  misc_RNA (1)...(19): siRNA sense strand
cagggugaaugacagaguu

SEQ ID NO: 778485 - RNA, 19 nt, Homo sapiens
  misc_RNA (1)...(19): siRNA sense strand
gcuaauccucgauacaaga

SEQ ID NO: 778486 - RNA, 19 nt, Homo sapiens
  misc_RNA (1)...(19): siRNA sense strand
cugggcaaaugcaucauaa

SEQ ID NO: 778487 - RNA, 19 nt, Homo sapiens
  misc_RNA (1)...(19): siRNA sense strand
ugacacagaugcuaauccu

SEQ ID NO: 778488 - RNA, 19 nt, Homo sapiens
  misc_RNA (1)...(19): siRNA sense strand
cugaagaggaccauacaaa

SEQ ID NO: 778489 - RNA, 19 nt, Homo sapiens
  misc_RNA (1)...(19): siRNA sense strand
uugacgugauugucuauaa

SEQ ID NO: 778490 - RNA, 19 nt, Homo sapiens
  misc_RNA (1)...(19): siRNA sense strand
uugauaaagugacagguau

SEQ ID NO: 778491 - RNA, 19 nt, Homo sapiens
  misc_RNA (1)...(19): siRNA sense strand
gcugggcaaaugcaucaua

SEQ ID NO: 778492 - RNA, 19 nt, Homo sapiens
  misc_RNA (1)...(19): siRNA sense strand
gaccgguccucguuuguac

SEQ ID NO: 778493 - RNA, 19 nt, Homo sapiens
  misc_RNA (1)...(19): siRNA sense strand
gaagauucaguggaugcua

SEQ ID NO: 778494 - RNA, 19 nt, Homo sapiens
  misc_RNA (1)...(19): siRNA sense strand
gugauugucuauaaugacu

SEQ ID NO: 778495 - RNA, 19 nt, Homo sapiens
  misc_RNA (1)...(19): siRNA sense strand
cagaugcuaauccucgaua

SEQ ID NO: 778496 - RNA, 19 nt, Homo sapiens
  misc_RNA (1)...(19): siRNA sense strand
ggaacucuacuucagucaa

SEQ ID NO: 778497 - RNA, 19 nt, Homo sapiens
  misc_RNA (1)...(19): siRNA sense strand
caaggaacucuacuucagu

SEQ ID NO: 778498 - RNA, 19 nt, Homo sapiens
  misc_RNA (1)...(19): siRNA sense strand
ccucuuaagccauggagaa

SEQ ID NO: 778499 - RNA, 19 nt, Homo sapiens
  misc_RNA (1)...(19): siRNA sense strand
gaagaggcuccugguuugu

SEQ ID NO: 778500 - RNA, 19 nt, Homo sapiens
  misc_RNA (1)...(19): siRNA sense strand
gacgugauugucuauaaug

SEQ ID NO: 778501 - RNA, 19 nt, Homo sapiens
  misc_RNA (1)...(19): siRNA sense strand
cagaugaucagggcuguau

SEQ ID NO: 778502 - RNA, 19 nt, Homo sapiens
  misc_RNA (1)...(19): siRNA sense strand
guugaggauucagcaaaug

SEQ ID NO: 778503 - RNA, 19 nt, Homo sapiens
  misc_RNA (1)...(19): siRNA sense strand
cauaucaguacaacaugaa

SEQ ID NO: 778504 - RNA, 19 nt, Homo sapiens
  misc_RNA (1)...(19): siRNA sense strand
ucuccaugcucaccaagga

SEQ ID NO: 778505 - RNA, 19 nt, Homo sapiens
  misc_RNA (1)...(19): siRNA sense strand
ggguugaggauucagcaaa

SEQ ID NO: 778506 - RNA, 19 nt, Homo sapiens
  misc_RNA (1)...(19): siRNA sense strand
gagggaccgagcuugauga

SEQ ID NO: 778507 - RNA, 19 nt, Homo sapiens
  misc_RNA (1)...(19): siRNA sense strand
gauaaagugacagguaugg

SEQ ID NO: 778508 - RNA, 19 nt, Homo sapiens
  misc_RNA (1)...(19): siRNA sense strand
accaugcgauccaucaaga

SEQ ID NO: 778509 - RNA, 19 nt, Homo sapiens
  misc_RNA (1)...(19): siRNA sense strand
caccaaggaacucuacuuc

SEQ ID NO: 778510 - RNA, 19 nt, Homo sapiens
  misc_RNA (1)...(19): siRNA sense strand
auacaaaugccgccugcuu

SEQ ID NO: 778511 - RNA, 19 nt, Homo sapiens
  misc_RNA (1)...(19): siRNA sense strand
caaugacacagaugcuaau

SEQ ID NO: 778512 - RNA, 19 nt, Homo sapiens
  misc_RNA (1)...(19): siRNA sense strand
uuugauaaagugacaggua

SEQ ID NO: 778513 - RNA, 19 nt, Homo sapiens
  misc_RNA (1)...(19): siRNA sense strand
cgagggaccgagcuugaug

SEQ ID NO: 778514 - RNA, 19 nt, Homo sapiens
  misc_RNA (1)...(19): siRNA sense strand
uugaaaagcugggcaaaug

SEQ ID NO: 778515 - RNA, 19 nt, Homo sapiens
  misc_RNA (1)...(19): siRNA sense strand
ucaccaaggaacucuacuu

SEQ ID NO: 778516 - RNA, 19 nt, Homo sapiens
  misc_RNA (1)...(19): siRNA sense strand
ucagggcuguauugaagag

SEQ ID NO: 778517 - RNA, 19 nt, Homo sapiens
  misc_RNA (1)...(19): siRNA sense strand
gaccgagugccuacauauc

SEQ ID NO: 778518 - RNA, 19 nt, Homo sapiens
  misc_RNA (1)...(19): siRNA sense strand
ucgaaacggaacagacaaa

SEQ ID NO: 778519 - RNA, 19 nt, Homo sapiens
  misc_RNA (1)...(19): siRNA sense strand
gugccuacauaucaguaca

SEQ ID NO: 778520 - RNA, 19 nt, Homo sapiens
  misc_RNA (1)...(19): siRNA sense strand
gcagaugaucagggcugua

SEQ ID NO: 778521 - RNA, 19 nt, Homo sapiens
  misc_RNA (1)...(19): siRNA sense strand
ggaagaggcuccugguuug

SEQ ID NO: 778522 - RNA, 19 nt, Homo sapiens
  misc_RNA (1)...(19): siRNA sense strand
gaucagggcuguauugaag

SEQ ID NO: 778523 - RNA, 19 nt, Homo sapiens
  misc_RNA (1)...(19): siRNA sense strand
gggcaaaugcaucauaaua

SEQ ID NO: 778524 - RNA, 19 nt, Homo sapiens
  misc_RNA (1)...(19): siRNA sense strand
gaagaggaccauacaaaug

SEQ ID NO: 778525 - RNA, 19 nt, Homo sapiens
  misc_RNA (1)...(19): siRNA sense strand
gaacucuacuucagucaau

SEQ ID NO: 778526 - RNA, 19 nt, Homo sapiens
  misc_RNA (1)...(19): siRNA sense strand
ggcaaaugcaucauaauaa

SEQ ID NO: 778527 - RNA, 19 nt, Homo sapiens
  misc_RNA (1)...(19): siRNA sense strand
gaugcaagaucugcuuaaa

SEQ ID NO: 778528 - RNA, 19 nt, Homo sapiens
  misc_RNA (1)...(19): siRNA sense strand
uauaaugacugcucuugug

SEQ ID NO: 778529 - RNA, 19 nt, Homo sapiens
  misc_RNA (1)...(19): siRNA sense strand
uaccgucccucuucaguaa

SEQ ID NO: 778530 - RNA, 19 nt, Homo sapiens
  misc_RNA (1)...(19): siRNA sense strand
ccaaggaacucuacuucag

SEQ ID NO: 778531 - RNA, 19 nt, Homo sapiens
  misc_RNA (1)...(19): siRNA sense strand
gaaacggaacagacaaaga

SEQ ID NO: 778532 - RNA, 19 nt, Homo sapiens
  misc_RNA (1)...(19): siRNA sense strand
gacccacacuuccaugaga

SEQ ID NO: 778533 - RNA, 19 nt, Homo sapiens
  misc_RNA (1)...(19): siRNA sense strand
ccgaggcgcucuucaagug

SEQ ID NO: 778534 - RNA, 19 nt, Homo sapiens
  misc_RNA (1)...(19): siRNA sense strand
aagauucaguggaugcuaa

SEQ ID NO: 778535 - RNA, 19 nt, Homo sapiens
  misc_RNA (1)...(19): siRNA sense strand
gaugaucagggcuguauug

SEQ ID NO: 778536 - RNA, 19 nt, Homo sapiens
  misc_RNA (1)...(19): siRNA sense strand
ccagaccgguccucguuug

SEQ ID NO: 778537 - RNA, 19 nt, Homo sapiens
  misc_RNA (1)...(19): siRNA sense strand
aaacggaacagacaaagau

SEQ ID NO: 778538 - RNA, 19 nt, Homo sapiens
  misc_RNA (1)...(19): siRNA sense strand
cuuaagccauggagaagaa

SEQ ID NO: 778539 - RNA, 19 nt, Homo sapiens
  misc_RNA (1)...(19): siRNA sense strand
gggaccgagugccuacaua

SEQ ID NO: 778540 - RNA, 19 nt, Homo sapiens
  misc_RNA (1)...(19): siRNA sense strand
ucaaugacacagaugcuaa

SEQ ID NO: 778541 - RNA, 19 nt, Homo sapiens
  misc_RNA (1)...(19): siRNA sense strand
ugacgugauugucuauaau

SEQ ID NO: 778542 - RNA, 19 nt, Homo sapiens
  misc_RNA (1)...(19): siRNA sense strand
cuacauaucaguacaacau

SEQ ID NO: 778543 - RNA, 19 nt, Homo sapiens
  misc_RNA (1)...(19): siRNA sense strand
ggaccgagugccuacauau

SEQ ID NO: 778544 - RNA, 19 nt, Homo sapiens
  misc_RNA (1)...(19): siRNA sense strand
gguugaggauucagcaaau

SEQ ID NO: 778545 - RNA, 19 nt, Homo sapiens
  misc_RNA (1)...(19): siRNA sense strand
ugaagaggaccauacaaau

SEQ ID NO: 778546 - RNA, 19 nt, Homo sapiens
  misc_RNA (1)...(19): siRNA sense strand
gcccaucaaugacacagau

SEQ ID NO: 778547 - RNA, 19 nt, Homo sapiens
  misc_RNA (1)...(19): siRNA sense strand
acauaucaguacaacauga

SEQ ID NO: 778548 - RNA, 19 nt, Homo sapiens
  misc_RNA (1)...(19): siRNA sense strand
ccacgguuccaggcuauua

SEQ ID NO: 778549 - RNA, 19 nt, Homo sapiens
  misc_RNA (1)...(19): siRNA sense strand
guaccgucccucuucagua

SEQ ID NO: 778550 - RNA, 19 nt, Homo sapiens
  misc_RNA (1)...(19): siRNA sense strand
cagggugaaugacagaguu

SEQ ID NO: 778551 - RNA, 19 nt, Homo sapiens
  misc_RNA (1)...(19): siRNA sense strand
gcuaauccucgauacaaga

SEQ ID NO: 778552 - RNA, 19 nt, Homo sapiens
  misc_RNA (1)...(19): siRNA sense strand
cugggcaaaugcaucauaa

SEQ ID NO: 778553 - RNA, 19 nt, Homo sapiens
  misc_RNA (1)...(19): siRNA sense strand
ugacacagaugcuaauccu

SEQ ID NO: 778554 - RNA, 19 nt, Homo sapiens
  misc_RNA (1)...(19): siRNA sense strand
cugaagaggaccauacaaa

SEQ ID NO: 778555 - RNA, 19 nt, Homo sapiens
  misc_RNA (1)...(19): siRNA sense strand
uugacgugauugucuauaa

SEQ ID NO: 778556 - RNA, 19 nt, Homo sapiens
  misc_RNA (1)...(19): siRNA sense strand
uugauaaagugacagguau

SEQ ID NO: 778557 - RNA, 19 nt, Homo sapiens
  misc_RNA (1)...(19): siRNA sense strand
gcugggcaaaugcaucaua

SEQ ID NO: 778558 - RNA, 19 nt, Homo sapiens
  misc_RNA (1)...(19): siRNA sense strand
gaccgguccucguuuguac

SEQ ID NO: 778559 - RNA, 19 nt, Homo sapiens
  misc_RNA (1)...(19): siRNA sense strand
gaagauucaguggaugcua

SEQ ID NO: 778560 - RNA, 19 nt, Homo sapiens
  misc_RNA (1)...(19): siRNA sense strand
gugauugucuauaaugacu

SEQ ID NO: 778561 - RNA, 19 nt, Homo sapiens
  misc_RNA (1)...(19): siRNA sense strand
cagaugcuaauccucgaua

SEQ ID NO: 778562 - RNA, 19 nt, Homo sapiens
  misc_RNA (1)...(19): siRNA sense strand
ggaacucuacuucagucaa

SEQ ID NO: 778563 - RNA, 19 nt, Homo sapiens
  misc_RNA (1)...(19): siRNA sense strand
caaggaacucuacuucagu

SEQ ID NO: 778564 - RNA, 19 nt, Homo sapiens
  misc_RNA (1)...(19): siRNA sense strand
ccucuuaagccauggagaa

SEQ ID NO: 778565 - RNA, 19 nt, Homo sapiens
  misc_RNA (1)...(19): siRNA sense strand
gaagaggcuccugguuugu

SEQ ID NO: 778566 - RNA, 19 nt, Homo sapiens
  misc_RNA (1)...(19): siRNA sense strand
gacgugauugucuauaaug

SEQ ID NO: 778567 - RNA, 19 nt, Homo sapiens
  misc_RNA (1)...(19): siRNA sense strand
cagaugaucagggcuguau

SEQ ID NO: 778568 - RNA, 19 nt, Homo sapiens
  misc_RNA (1)...(19): siRNA sense strand
guugaggauucagcaaaug

SEQ ID NO: 778569 - RNA, 19 nt, Homo sapiens
  misc_RNA (1)...(19): siRNA sense strand
cauaucaguacaacaugaa

SEQ ID NO: 778570 - RNA, 19 nt, Homo sapiens
  misc_RNA (1)...(19): siRNA sense strand
ucuccaugcucaccaagga

SEQ ID NO: 778571 - RNA, 19 nt, Homo sapiens
  misc_RNA (1)...(19): siRNA sense strand
ggguugaggauucagcaaa

SEQ ID NO: 778572 - RNA, 19 nt, Homo sapiens
  misc_RNA (1)...(19): siRNA sense strand
gagggaccgagcuugauga

SEQ ID NO: 778573 - RNA, 19 nt, Homo sapiens
  misc_RNA (1)...(19): siRNA sense strand
gauaaagugacagguaugg

SEQ ID NO: 778574 - RNA, 19 nt, Homo sapiens
  misc_RNA (1)...(19): siRNA sense strand
accaugcgauccaucaaga

SEQ ID NO: 778575 - RNA, 19 nt, Homo sapiens
  misc_RNA (1)...(19): siRNA sense strand
caccaaggaacucuacuuc

SEQ ID NO: 778576 - RNA, 19 nt, Homo sapiens
  misc_RNA (1)...(19): siRNA sense strand
auacaaaugccgccugcuu

SEQ ID NO: 778577 - RNA, 19 nt, Homo sapiens
  misc_RNA (1)...(19): siRNA sense strand
caaugacacagaugcuaau

SEQ ID NO: 778578 - RNA, 19 nt, Homo sapiens
  misc_RNA (1)...(19): siRNA sense strand
uuugauaaagugacaggua

SEQ ID NO: 778579 - RNA, 19 nt, Homo sapiens
  misc_RNA (1)...(19): siRNA sense strand
cgagggaccgagcuugaug

SEQ ID NO: 778580 - RNA, 19 nt, Homo sapiens
  misc_RNA (1)...(19): siRNA sense strand
uugaaaagcugggcaaaug

SEQ ID NO: 778581 - RNA, 19 nt, Homo sapiens
  misc_RNA (1)...(19): siRNA sense strand
ucaccaaggaacucuacuu

SEQ ID NO: 778582 - RNA, 19 nt, Homo sapiens
  misc_RNA (1)...(19): siRNA sense strand
ucagggcuguauugaagag

SEQ ID NO: 778583 - RNA, 19 nt, Homo sapiens
  misc_RNA (1)...(19): siRNA sense strand
gaccgagugccuacauauc

SEQ ID NO: 778584 - RNA, 19 nt, Homo sapiens
  misc_RNA (1)...(19): siRNA sense strand
ucgaaacggaacagacaaa

SEQ ID NO: 778585 - RNA, 19 nt, Homo sapiens
  misc_RNA (1)...(19): siRNA sense strand
gugccuacauaucaguaca

SEQ ID NO: 778586 - RNA, 19 nt, Homo sapiens
  misc_RNA (1)...(19): siRNA sense strand
gcagaugaucagggcugua

SEQ ID NO: 778587 - RNA, 19 nt, Homo sapiens
  misc_RNA (1)...(19): siRNA sense strand
ggaagaggcuccugguuug

SEQ ID NO: 778588 - RNA, 19 nt, Homo sapiens
  misc_RNA (1)...(19): siRNA sense strand
gaucagggcuguauugaag

SEQ ID NO: 778589 - RNA, 19 nt, Homo sapiens
  misc_RNA (1)...(19): siRNA sense strand
gggcaaaugcaucauaaua

SEQ ID NO: 778590 - RNA, 19 nt, Homo sapiens
  misc_RNA (1)...(19): siRNA sense strand
gaagaggaccauacaaaug

SEQ ID NO: 778591 - RNA, 19 nt, Homo sapiens
  misc_RNA (1)...(19): siRNA sense strand
gaacucuacuucagucaau

SEQ ID NO: 778592 - RNA, 19 nt, Homo sapiens
  misc_RNA (1)...(19): siRNA sense strand
ggcaaaugcaucauaauaa

SEQ ID NO: 778593 - RNA, 19 nt, Homo sapiens
  misc_RNA (1)...(19): siRNA sense strand
gaugcaagaucugcuuaaa

SEQ ID NO: 778594 - RNA, 19 nt, Homo sapiens
  misc_RNA (1)...(19): siRNA sense strand
uauaaugacugcucuugug

SEQ ID NO: 778595 - RNA, 19 nt, Homo sapiens
  misc_RNA (1)...(19): siRNA sense strand
uaccgucccucuucaguaa

SEQ ID NO: 778596 - RNA, 19 nt, Homo sapiens
  misc_RNA (1)...(19): siRNA sense strand
ccaaggaacucuacuucag

SEQ ID NO: 778597 - RNA, 19 nt, Homo sapiens
  misc_RNA (1)...(19): siRNA sense strand
gaaacggaacagacaaaga

SEQ ID NO: 778598 - RNA, 19 nt, Homo sapiens
  misc_RNA (1)...(19): siRNA sense strand
gacccacacuuccaugaga

SEQ ID NO: 778599 - RNA, 19 nt, Homo sapiens
  misc_RNA (1)...(19): siRNA sense strand
ccgaggcgcucuucaagug

SEQ ID NO: 778600 - RNA, 19 nt, Homo sapiens
  misc_RNA (1)...(19): siRNA sense strand
aagauucaguggaugcuaa

SEQ ID NO: 778601 - RNA, 19 nt, Homo sapiens
  misc_RNA (1)...(19): siRNA sense strand
gaugaucagggcuguauug

SEQ ID NO: 778602 - RNA, 19 nt, Homo sapiens
  misc_RNA (1)...(19): siRNA sense strand
ccagaccgguccucguuug

SEQ ID NO: 778603 - RNA, 19 nt, Homo sapiens
  misc_RNA (1)...(19): siRNA sense strand
aaacggaacagacaaagau

SEQ ID NO: 778604 - RNA, 19 nt, Homo sapiens
  misc_RNA (1)...(19): siRNA sense strand
cuuaagccauggagaagaa

SEQ ID NO: 778605 - RNA, 19 nt, Homo sapiens
  misc_RNA (1)...(19): siRNA sense strand
gggaccgagugccuacaua

SEQ ID NO: 778606 - RNA, 19 nt, Homo sapiens
  misc_RNA (1)...(19): siRNA sense strand
ucaaugacacagaugcuaa

SEQ ID NO: 778607 - RNA, 19 nt, Homo sapiens
  misc_RNA (1)...(19): siRNA sense strand
ugacgugauugucuauaau

SEQ ID NO: 778608 - RNA, 19 nt, Homo sapiens
  misc_RNA (1)...(19): siRNA sense strand
cuacauaucaguacaacau

SEQ ID NO: 778609 - RNA, 19 nt, Homo sapiens
  misc_RNA (1)...(19): siRNA sense strand
ggaccgagugccuacauau

SEQ ID NO: 778610 - RNA, 19 nt, Homo sapiens
  misc_RNA (1)...(19): siRNA sense strand
gguugaggauucagcaaau

SEQ ID NO: 778611 - RNA, 19 nt, Homo sapiens
  misc_RNA (1)...(19): siRNA sense strand
ugaagaggaccauacaaau

SEQ ID NO: 778612 - RNA, 19 nt, Homo sapiens
  misc_RNA (1)...(19): siRNA sense strand
gcccaucaaugacacagau

SEQ ID NO: 778613 - RNA, 19 nt, Homo sapiens
  misc_RNA (1)...(19): siRNA sense strand
acauaucaguacaacauga

SEQ ID NO: 778614 - RNA, 19 nt, Homo sapiens
  misc_RNA (1)...(19): siRNA sense strand
ccacgguuccaggcuauua

SEQ ID NO: 778615 - RNA, 19 nt, Homo sapiens
  misc_RNA (1)...(19): siRNA sense strand
guaccgucccucuucagua

SEQ ID NO: 778616 - RNA, 19 nt, Homo sapiens
  misc_RNA (1)...(19): siRNA sense strand
cagggugaaugacagaguu

SEQ ID NO: 778617 - RNA, 19 nt, Homo sapiens
  misc_RNA (1)...(19): siRNA sense strand
gcuaauccucgauacaaga

SEQ ID NO: 778618 - RNA, 19 nt, Homo sapiens
  misc_RNA (1)...(19): siRNA sense strand
cugggcaaaugcaucauaa

SEQ ID NO: 778619 - RNA, 19 nt, Homo sapiens
  misc_RNA (1)...(19): siRNA sense strand
ugacacagaugcuaauccu

SEQ ID NO: 778620 - RNA, 19 nt, Homo sapiens
  misc_RNA (1)...(19): siRNA sense strand
cugaagaggaccauacaaa

SEQ ID NO: 778621 - RNA, 19 nt, Homo sapiens
  misc_RNA (1)...(19): siRNA sense strand
uugacgugauugucuauaa

SEQ ID NO: 778622 - RNA, 19 nt, Homo sapiens
  misc_RNA (1)...(19): siRNA sense strand
uugauaaagugacagguau

SEQ ID NO: 778623 - RNA, 19 nt, Homo sapiens
  misc_RNA (1)...(19): siRNA sense strand
gcugggcaaaugcaucaua

SEQ ID NO: 778624 - RNA, 19 nt, Homo sapiens
  misc_RNA (1)...(19): siRNA sense strand
gaccgguccucguuuguac

SEQ ID NO: 778625 - RNA, 19 nt, Homo sapiens
  misc_RNA (1)...(19): siRNA sense strand
gaagauucaguggaugcua

SEQ ID NO: 778626 - RNA, 19 nt, Homo sapiens
  misc_RNA (1)...(19): siRNA sense strand
gugauugucuauaaugacu

SEQ ID NO: 778627 - RNA, 19 nt, Homo sapiens
  misc_RNA (1)...(19): siRNA sense strand
cagaugcuaauccucgaua

SEQ ID NO: 778628 - RNA, 19 nt, Homo sapiens
  misc_RNA (1)...(19): siRNA sense strand
ggaacucuacuucagucaa

SEQ ID NO: 778629 - RNA, 19 nt, Homo sapiens
  misc_RNA (1)...(19): siRNA sense strand
caaggaacucuacuucagu

SEQ ID NO: 778630 - RNA, 19 nt, Homo sapiens
  misc_RNA (1)...(19): siRNA sense strand
ccucuuaagccauggagaa

SEQ ID NO: 778631 - RNA, 19 nt, Homo sapiens
  misc_RNA (1)...(19): siRNA sense strand
gaagaggcuccugguuugu

SEQ ID NO: 778632 - RNA, 19 nt, Homo sapiens
  misc_RNA (1)...(19): siRNA sense strand
gacgugauugucuauaaug

SEQ ID NO: 778633 - RNA, 19 nt, Homo sapiens
  misc_RNA (1)...(19): siRNA sense strand
cagaugaucagggcuguau

SEQ ID NO: 778634 - RNA, 19 nt, Homo sapiens
  misc_RNA (1)...(19): siRNA sense strand
guugaggauucagcaaaug

SEQ ID NO: 778635 - RNA, 19 nt, Homo sapiens
  misc_RNA (1)...(19): siRNA sense strand
cauaucaguacaacaugaa

SEQ ID NO: 778636 - RNA, 19 nt, Homo sapiens
  misc_RNA (1)...(19): siRNA sense strand
ucuccaugcucaccaagga

SEQ ID NO: 778637 - RNA, 19 nt, Homo sapiens
  misc_RNA (1)...(19): siRNA sense strand
ggguugaggauucagcaaa

SEQ ID NO: 778638 - RNA, 19 nt, Homo sapiens
  misc_RNA (1)...(19): siRNA sense strand
gagggaccgagcuugauga

SEQ ID NO: 778639 - RNA, 19 nt, Homo sapiens
  misc_RNA (1)...(19): siRNA sense strand
gauaaagugacagguaugg

SEQ ID NO: 778640 - RNA, 19 nt, Homo sapiens
  misc_RNA (1)...(19): siRNA sense strand
accaugcgauccaucaaga

SEQ ID NO: 778641 - RNA, 19 nt, Homo sapiens
  misc_RNA (1)...(19): siRNA sense strand
caccaaggaacucuacuuc

SEQ ID NO: 778642 - RNA, 19 nt, Homo sapiens
  misc_RNA (1)...(19): siRNA sense strand
auacaaaugccgccugcuu

SEQ ID NO: 778643 - RNA, 19 nt, Homo sapiens
  misc_RNA (1)...(19): siRNA sense strand
caaugacacagaugcuaau

SEQ ID NO: 778644 - RNA, 19 nt, Homo sapiens
  misc_RNA (1)...(19): siRNA sense strand
uuugauaaagugacaggua

SEQ ID NO: 778645 - RNA, 19 nt, Homo sapiens
  misc_RNA (1)...(19): siRNA sense strand
cgagggaccgagcuugaug

SEQ ID NO: 778646 - RNA, 19 nt, Homo sapiens
  misc_RNA (1)...(19): siRNA sense strand
uugaaaagcugggcaaaug

SEQ ID NO: 778647 - RNA, 19 nt, Homo sapiens
  misc_RNA (1)...(19): siRNA sense strand
ucaccaaggaacucuacuu

SEQ ID NO: 778648 - RNA, 19 nt, Homo sapiens
  misc_RNA (1)...(19): siRNA sense strand
ucagggcuguauugaagag

SEQ ID NO: 778649 - RNA, 19 nt, Homo sapiens
  misc_RNA (1)...(19): siRNA sense strand
gaccgagugccuacauauc

SEQ ID NO: 778650 - RNA, 19 nt, Homo sapiens
  misc_RNA (1)...(19): siRNA sense strand
ucgaaacggaacagacaaa

SEQ ID NO: 778651 - RNA, 19 nt, Homo sapiens
  misc_RNA (1)...(19): siRNA sense strand
gugccuacauaucaguaca

SEQ ID NO: 778652 - RNA, 19 nt, Homo sapiens
  misc_RNA (1)...(19): siRNA sense strand
gcagaugaucagggcugua

SEQ ID NO: 778653 - RNA, 19 nt, Homo sapiens
  misc_RNA (1)...(19): siRNA sense strand
ggaagaggcuccugguuug

SEQ ID NO: 778654 - RNA, 19 nt, Homo sapiens
  misc_RNA (1)...(19): siRNA sense strand
gaucagggcuguauugaag

SEQ ID NO: 778655 - RNA, 19 nt, Homo sapiens
  misc_RNA (1)...(19): siRNA sense strand
gggcaaaugcaucauaaua

SEQ ID NO: 778656 - RNA, 19 nt, Homo sapiens
  misc_RNA (1)...(19): siRNA sense strand
gaagaggaccauacaaaug

SEQ ID NO: 778657 - RNA, 19 nt, Homo sapiens
  misc_RNA (1)...(19): siRNA sense strand
ggcaaaugcaucauaauaa

SEQ ID NO: 778658 - RNA, 19 nt, Homo sapiens
  misc_RNA (1)...(19): siRNA sense strand
gaugcaagaucugcuuaaa

SEQ ID NO: 778659 - RNA, 19 nt, Homo sapiens
  misc_RNA (1)...(19): siRNA sense strand
uauaaugacugcucuugug

SEQ ID NO: 778660 - RNA, 19 nt, Homo sapiens
  misc_RNA (1)...(19): siRNA sense strand
uaccgucccucuucaguaa

SEQ ID NO: 778661 - RNA, 19 nt, Homo sapiens
  misc_RNA (1)...(19): siRNA sense strand
gaaacggaacagacaaaga

SEQ ID NO: 778662 - RNA, 19 nt, Homo sapiens
  misc_RNA (1)...(19): siRNA sense strand
ccgaggcgcucuucaagug

SEQ ID NO: 778663 - RNA, 19 nt, Homo sapiens
  misc_RNA (1)...(19): siRNA sense strand
aagauucaguggaugcuaa

SEQ ID NO: 778664 - RNA, 19 nt, Homo sapiens
  misc_RNA (1)...(19): siRNA sense strand
gaugaucagggcuguauug

SEQ ID NO: 778665 - RNA, 19 nt, Homo sapiens
  misc_RNA (1)...(19): siRNA sense strand
ccagaccgguccucguuug

SEQ ID NO: 778666 - RNA, 19 nt, Homo sapiens
  misc_RNA (1)...(19): siRNA sense strand
aaacggaacagacaaagau

SEQ ID NO: 778667 - RNA, 19 nt, Homo sapiens
  misc_RNA (1)...(19): siRNA sense strand
cuuaagccauggagaagaa

SEQ ID NO: 778668 - RNA, 19 nt, Homo sapiens
  misc_RNA (1)...(19): siRNA sense strand
gggaccgagugccuacaua

SEQ ID NO: 778669 - RNA, 19 nt, Homo sapiens
  misc_RNA (1)...(19): siRNA sense strand
ucaaugacacagaugcuaa

SEQ ID NO: 778670 - RNA, 19 nt, Homo sapiens
  misc_RNA (1)...(19): siRNA sense strand
ugacgugauugucuauaau

SEQ ID NO: 778671 - RNA, 19 nt, Homo sapiens
  misc_RNA (1)...(19): siRNA sense strand
cuacauaucaguacaacau

SEQ ID NO: 778672 - RNA, 19 nt, Homo sapiens
  misc_RNA (1)...(19): siRNA sense strand
ggaccgagugccuacauau

SEQ ID NO: 778673 - RNA, 19 nt, Homo sapiens
  misc_RNA (1)...(19): siRNA sense strand
gguugaggauucagcaaau

SEQ ID NO: 778674 - RNA, 19 nt, Homo sapiens
  misc_RNA (1)...(19): siRNA sense strand
ugaagaggaccauacaaau

SEQ ID NO: 778675 - RNA, 19 nt, Homo sapiens
  misc_RNA (1)...(19): siRNA sense strand
gcccaucaaugacacagau

SEQ ID NO: 778676 - RNA, 19 nt, Homo sapiens
  misc_RNA (1)...(19): siRNA sense strand
acauaucaguacaacauga

SEQ ID NO: 778677 - RNA, 19 nt, Homo sapiens
  misc_RNA (1)...(19): siRNA sense strand
ccacgguuccaggcuauua

SEQ ID NO: 778678 - RNA, 19 nt, Homo sapiens
  misc_RNA (1)...(19): siRNA sense strand
guaccgucccucuucagua

SEQ ID NO: 778679 - RNA, 19 nt, Homo sapiens
  misc_RNA (1)...(19): siRNA sense strand
gcuaauccucgauacaaga

SEQ ID NO: 778680 - RNA, 19 nt, Homo sapiens
  misc_RNA (1)...(19): siRNA sense strand
cugggcaaaugcaucauaa

SEQ ID NO: 778681 - RNA, 19 nt, Homo sapiens
  misc_RNA (1)...(19): siRNA sense strand
ugacacagaugcuaauccu

SEQ ID NO: 778682 - RNA, 19 nt, Homo sapiens
  misc_RNA (1)...(19): siRNA sense strand
cugaagaggaccauacaaa

SEQ ID NO: 778683 - RNA, 19 nt, Homo sapiens
  misc_RNA (1)...(19): siRNA sense strand
uugacgugauugucuauaa

SEQ ID NO: 778684 - RNA, 19 nt, Homo sapiens
  misc_RNA (1)...(19): siRNA sense strand
uugauaaagugacagguau

SEQ ID NO: 778685 - RNA, 19 nt, Homo sapiens
  misc_RNA (1)...(19): siRNA sense strand
gaccgguccucguuuguac

SEQ ID NO: 778686 - RNA, 19 nt, Homo sapiens
  misc_RNA (1)...(19): siRNA sense strand
gcugggcaaaugcaucaua

SEQ ID NO: 778687 - RNA, 19 nt, Homo sapiens
  misc_RNA (1)...(19): siRNA sense strand
gugauugucuauaaugacu

SEQ ID NO: 778688 - RNA, 19 nt, Homo sapiens
  misc_RNA (1)...(19): siRNA sense strand
gaagauucaguggaugcua

SEQ ID NO: 778689 - RNA, 19 nt, Homo sapiens
  misc_RNA (1)...(19): siRNA sense strand
cagaugcuaauccucgaua

SEQ ID NO: 778690 - RNA, 19 nt, Homo sapiens
  misc_RNA (1)...(19): siRNA sense strand
ccucuuaagccauggagaa

SEQ ID NO: 778691 - RNA, 19 nt, Homo sapiens
  misc_RNA (1)...(19): siRNA sense strand
gaagaggcuccugguuugu

SEQ ID NO: 778692 - RNA, 19 nt, Homo sapiens
  misc_RNA (1)...(19): siRNA sense strand
gacgugauugucuauaaug

SEQ ID NO: 778693 - RNA, 19 nt, Homo sapiens
  misc_RNA (1)...(19): siRNA sense strand
guugaggauucagcaaaug

SEQ ID NO: 778694 - RNA, 19 nt, Homo sapiens
  misc_RNA (1)...(19): siRNA sense strand
cagaugaucagggcuguau

SEQ ID NO: 778695 - RNA, 19 nt, Homo sapiens
  misc_RNA (1)...(19): siRNA sense strand
cauaucaguacaacaugaa

SEQ ID NO: 778696 - RNA, 19 nt, Homo sapiens
  misc_RNA (1)...(19): siRNA sense strand
gagggaccgagcuugauga

SEQ ID NO: 778697 - RNA, 19 nt, Homo sapiens
  misc_RNA (1)...(19): siRNA sense strand
ggguugaggauucagcaaa

SEQ ID NO: 778698 - RNA, 19 nt, Homo sapiens
  misc_RNA (1)...(19): siRNA sense strand
gauaaagugacagguaugg

SEQ ID NO: 778699 - RNA, 19 nt, Homo sapiens
  misc_RNA (1)...(19): siRNA sense strand
accaugcgauccaucaaga

SEQ ID NO: 778700 - RNA, 19 nt, Homo sapiens
  misc_RNA (1)...(19): siRNA sense strand
auacaaaugccgccugcuu

SEQ ID NO: 778701 - RNA, 19 nt, Homo sapiens
  misc_RNA (1)...(19): siRNA sense strand
caaugacacagaugcuaau

SEQ ID NO: 778702 - RNA, 19 nt, Homo sapiens
  misc_RNA (1)...(19): siRNA sense strand
uugaaaagcugggcaaaug

SEQ ID NO: 778703 - RNA, 19 nt, Homo sapiens
  misc_RNA (1)...(19): siRNA sense strand
cgagggaccgagcuugaug

SEQ ID NO: 778704 - RNA, 19 nt, Homo sapiens
  misc_RNA (1)...(19): siRNA sense strand
uuugauaaagugacaggua

SEQ ID NO: 778705 - RNA, 19 nt, Homo sapiens
  misc_RNA (1)...(19): siRNA sense strand
ucagggcuguauugaagag

SEQ ID NO: 778706 - RNA, 19 nt, Homo sapiens
  misc_RNA (1)...(19): siRNA sense strand
gaccgagugccuacauauc

SEQ ID NO: 778707 - RNA, 19 nt, Homo sapiens
  misc_RNA (1)...(19): siRNA sense strand
ucgaaacggaacagacaaa

SEQ ID NO: 778708 - RNA, 19 nt, Homo sapiens
  misc_RNA (1)...(19): siRNA sense strand
gcagaugaucagggcugua

SEQ ID NO: 778709 - RNA, 19 nt, Homo sapiens
  misc_RNA (1)...(19): siRNA sense strand
gugccuacauaucaguaca

SEQ ID NO: 778710 - RNA, 19 nt, Homo sapiens
  misc_RNA (1)...(19): siRNA sense strand
ggaggacugugagguguuc

SEQ ID NO: 778711 - RNA, 19 nt, Homo sapiens
  misc_RNA (1)...(19): siRNA sense strand
gcgaacccuucaagcucua

SEQ ID NO: 778712 - RNA, 19 nt, Homo sapiens
  misc_RNA (1)...(19): siRNA sense strand
gaggcgacgugcuccaucu

SEQ ID NO: 778713 - RNA, 19 nt, Homo sapiens
  misc_RNA (1)...(19): siRNA sense strand
gaaggaacuggaggacugu

SEQ ID NO: 778714 - RNA, 19 nt, Homo sapiens
  misc_RNA (1)...(19): siRNA sense strand
cagcauggcgaacccuuca

SEQ ID NO: 778715 - RNA, 19 nt, Homo sapiens
  misc_RNA (1)...(19): siRNA sense strand
ccaagcagcuggagacauu

SEQ ID NO: 778716 - RNA, 19 nt, Homo sapiens
  misc_RNA (1)...(19): siRNA sense strand
gcucuuggcucgaugaaau

SEQ ID NO: 778717 - RNA, 19 nt, Homo sapiens
  misc_RNA (1)...(19): siRNA sense strand
gggagcagcuguccucaga

SEQ ID NO: 778718 - RNA, 19 nt, Homo sapiens
  misc_RNA (1)...(19): siRNA sense strand
gagcagcuguccucagaga

SEQ ID NO: 778719 - RNA, 19 nt, Homo sapiens
  misc_RNA (1)...(19): siRNA sense strand
guacagguuugguuucaga

SEQ ID NO: 778720 - RNA, 19 nt, Homo sapiens
  misc_RNA (1)...(19): siRNA sense strand
gaacagaagggccaaagag

SEQ ID NO: 778721 - RNA, 19 nt, Homo sapiens
  misc_RNA (1)...(19): siRNA sense strand
gcaaggaggacuucuucaa

SEQ ID NO: 778722 - RNA, 19 nt, Homo sapiens
  misc_RNA (1)...(19): siRNA sense strand
ggacgaauucuaccucaug

SEQ ID NO: 778723 - RNA, 19 nt, Homo sapiens
  misc_RNA (1)...(19): siRNA sense strand
agaaacgccugaagaagga

SEQ ID NO: 778724 - RNA, 19 nt, Homo sapiens
  misc_RNA (1)...(19): siRNA sense strand
gcacagcuccugccucaag

SEQ ID NO: 778725 - RNA, 19 nt, Homo sapiens
  misc_RNA (1)...(19): siRNA sense strand
cagaagggccaaagagaaa

SEQ ID NO: 778726 - RNA, 19 nt, Homo sapiens
  misc_RNA (1)...(19): siRNA sense strand
gcagcaagcaggagaagga

SEQ ID NO: 778727 - RNA, 19 nt, Homo sapiens
  misc_RNA (1)...(19): siRNA sense strand
gcagaggacugugggguua

SEQ ID NO: 778728 - RNA, 19 nt, Homo sapiens
  misc_RNA (1)...(19): siRNA sense strand
caaggaagacuacgagaca

SEQ ID NO: 778729 - RNA, 19 nt, Homo sapiens
  misc_RNA (1)...(19): siRNA sense strand
aaagagaaacgccugaaga

SEQ ID NO: 778730 - RNA, 19 nt, Homo sapiens
  misc_RNA (1)...(19): siRNA sense strand
gcaaggcccaggacuuugu

SEQ ID NO: 778731 - RNA, 19 nt, Homo sapiens
  misc_RNA (1)...(19): siRNA sense strand
uguaggcuaucccgacuuu

SEQ ID NO: 778732 - RNA, 19 nt, Homo sapiens
  misc_RNA (1)...(19): siRNA sense strand
cagccaagcagaacgauga

SEQ ID NO: 778733 - RNA, 19 nt, Homo sapiens
  misc_RNA (1)...(19): siRNA sense strand
uaucccgacuuuccaacua

SEQ ID NO: 778734 - RNA, 19 nt, Homo sapiens
  misc_RNA (1)...(19): siRNA sense strand
ucugacaucuccacaggaa

SEQ ID NO: 778735 - RNA, 19 nt, Homo sapiens
  misc_RNA (1)...(19): siRNA sense strand
ggucguacagguuugguuu

SEQ ID NO: 778736 - RNA, 19 nt, Homo sapiens
  misc_RNA (1)...(19): siRNA sense strand
gagacaggccuggacauga

SEQ ID NO: 778737 - RNA, 19 nt, Homo sapiens
  misc_RNA (1)...(19): siRNA sense strand
ggacccaccucugacaucu

SEQ ID NO: 778738 - RNA, 19 nt, Homo sapiens
  misc_RNA (1)...(19): siRNA sense strand
gacaguaauuugggcauca

SEQ ID NO: 778739 - RNA, 19 nt, Homo sapiens
  misc_RNA (1)...(19): siRNA sense strand
gcggacaguuaaugaaugg

SEQ ID NO: 778740 - RNA, 19 nt, Homo sapiens
  misc_RNA (1)...(19): siRNA sense strand
gcacauccuggacaaguuc

SEQ ID NO: 778741 - RNA, 19 nt, Homo sapiens
  misc_RNA (1)...(19): siRNA sense strand
agacaggccuggacaugag

SEQ ID NO: 778742 - RNA, 19 nt, Homo sapiens
  misc_RNA (1)...(19): siRNA sense strand
cguuacaggcggacaguua

SEQ ID NO: 778743 - RNA, 19 nt, Homo sapiens
  misc_RNA (1)...(19): siRNA sense strand
ccacaccaauaggauuuau

SEQ ID NO: 778744 - RNA, 19 nt, Homo sapiens
  misc_RNA (1)...(19): siRNA sense strand
ccgcaaggcccaggacuuu

SEQ ID NO: 778745 - RNA, 19 nt, Homo sapiens
  misc_RNA (1)...(19): siRNA sense strand
ggccacaccaauaggauuu

SEQ ID NO: 778746 - RNA, 19 nt, Homo sapiens
  misc_RNA (1)...(19): siRNA sense strand
aagagaaacgccugaagaa

SEQ ID NO: 778747 - RNA, 19 nt, Homo sapiens
  misc_RNA (1)...(19): siRNA sense strand
caccugcacugcuuugcuu

SEQ ID NO: 778748 - RNA, 19 nt, Homo sapiens
  misc_RNA (1)...(19): siRNA sense strand
caaggaggacuucuucaag

SEQ ID NO: 778749 - RNA, 19 nt, Homo sapiens
  misc_RNA (1)...(19): siRNA sense strand
ggcggacaguuaaugaaug

SEQ ID NO: 778750 - RNA, 19 nt, Homo sapiens
  misc_RNA (1)...(19): siRNA sense strand
acagaagggccaaagagaa

SEQ ID NO: 778751 - RNA, 19 nt, Homo sapiens
  misc_RNA (1)...(19): siRNA sense strand
aggaucaaauucucucaga

SEQ ID NO: 778752 - RNA, 19 nt, Homo sapiens
  misc_RNA (1)...(19): siRNA sense strand
guuacaggcggacaguuaa

SEQ ID NO: 778753 - RNA, 19 nt, Homo sapiens
  misc_RNA (1)...(19): siRNA sense strand
gcuggagacauuaaagaau

SEQ ID NO: 778754 - RNA, 19 nt, Homo sapiens
  misc_RNA (1)...(19): siRNA sense strand
aggaagcaguguaggcuau

SEQ ID NO: 778755 - RNA, 19 nt, Homo sapiens
  misc_RNA (1)...(19): siRNA sense strand
cagguuugguuucagaaca

SEQ ID NO: 778756 - RNA, 19 nt, Homo sapiens
  misc_RNA (1)...(19): siRNA sense strand
ggacaugagggucguacag

SEQ ID NO: 778757 - RNA, 19 nt, Homo sapiens
  misc_RNA (1)...(19): siRNA sense strand
gaugggagccccuauggaa

SEQ ID NO: 778758 - RNA, 19 nt, Homo sapiens
  misc_RNA (1)...(19): siRNA sense strand
cugcuuugcuugcaucauc

SEQ ID NO: 778759 - RNA, 19 nt, Homo sapiens
  misc_RNA (1)...(19): siRNA sense strand
cagcuggagacauuaaaga

SEQ ID NO: 778760 - RNA, 19 nt, Homo sapiens
  misc_RNA (1)...(19): siRNA sense strand
caagcagaacgaugacuca

SEQ ID NO: 778761 - RNA, 19 nt, Homo sapiens
  misc_RNA (1)...(19): siRNA sense strand
ggacgggacaggacaaucc

SEQ ID NO: 778762 - RNA, 19 nt, Homo sapiens
  misc_RNA (1)...(19): siRNA sense strand
caaagagaaacgccugaag

SEQ ID NO: 778763 - RNA, 19 nt, Homo sapiens
  misc_RNA (1)...(19): siRNA sense strand
ccaaagagaaacgccugaa

SEQ ID NO: 778764 - RNA, 19 nt, Homo sapiens
  misc_RNA (1)...(19): siRNA sense strand
acucagaggcuggagcuaa

SEQ ID NO: 778765 - RNA, 19 nt, Homo sapiens
  misc_RNA (1)...(19): siRNA sense strand
cuuccgagaggaucaaauu

SEQ ID NO: 778766 - RNA, 19 nt, Homo sapiens
  misc_RNA (1)...(19): siRNA sense strand
caugagggucguacagguu

SEQ ID NO: 778767 - RNA, 19 nt, Homo sapiens
  misc_RNA (1)...(19): siRNA sense strand
aaagaaugcauacaagaac

SEQ ID NO: 778768 - RNA, 19 nt, Homo sapiens
  misc_RNA (1)...(19): siRNA sense strand
gcaugcagggcagggagua

SEQ ID NO: 778769 - RNA, 19 nt, Homo sapiens
  misc_RNA (1)...(19): siRNA sense strand
ucuaccaccugcacugcuu

SEQ ID NO: 778770 - RNA, 19 nt, Homo sapiens
  misc_RNA (1)...(19): siRNA sense strand
gcagcuggagacauuaaag

SEQ ID NO: 778771 - RNA, 19 nt, Homo sapiens
  misc_RNA (1)...(19): siRNA sense strand
gauuacacgguggacagua

SEQ ID NO: 778772 - RNA, 19 nt, Homo sapiens
  misc_RNA (1)...(19): siRNA sense strand
cagucuccauccuccauau

SEQ ID NO: 778773 - RNA, 19 nt, Homo sapiens
  misc_RNA (1)...(19): siRNA sense strand
aagaaugcauacaagaacu

SEQ ID NO: 778774 - RNA, 19 nt, Homo sapiens
  misc_RNA (1)...(19): siRNA sense strand
gggacgaauucuaccucau

SEQ ID NO: 778775 - RNA, 19 nt, Homo sapiens
  misc_RNA (1)...(19): siRNA sense strand
acacgguggacaguaauuu

SEQ ID NO: 778776 - RNA, 19 nt, Homo sapiens
  misc_RNA (1)...(19): siRNA sense strand
ucaagcgcuucggcacaaa

SEQ ID NO: 778777 - RNA, 19 nt, Homo sapiens
  misc_RNA (1)...(19): siRNA sense strand
gcagcagcaagcaggagaa

SEQ ID NO: 778778 - RNA, 19 nt, Homo sapiens
  misc_RNA (1)...(19): siRNA sense strand
aagcagcuggagacauuaa

SEQ ID NO: 778779 - RNA, 19 nt, Homo sapiens
  misc_RNA (1)...(19): siRNA sense strand
caagcagcuggagacauua

SEQ ID NO: 778780 - RNA, 19 nt, Homo sapiens
  misc_RNA (1)...(19): siRNA sense strand
ggacugagccugguguaua

SEQ ID NO: 778781 - RNA, 19 nt, Homo sapiens
  misc_RNA (1)...(19): siRNA sense strand
gaaaggugguucagaaucu

SEQ ID NO: 778782 - RNA, 19 nt, Homo sapiens
  misc_RNA (1)...(19): siRNA sense strand
cagaucagcugccauguug

SEQ ID NO: 778783 - RNA, 19 nt, Homo sapiens
  misc_RNA (1)...(19): siRNA sense strand
gagcagacauuugccugua

SEQ ID NO: 778784 - RNA, 19 nt, Homo sapiens
  misc_RNA (1)...(19): siRNA sense strand
gaacaagaaaccaaaggaa

SEQ ID NO: 778785 - RNA, 19 nt, Homo sapiens
  misc_RNA (1)...(19): siRNA sense strand
uaagugaacugcccagcaa

SEQ ID NO: 778786 - RNA, 19 nt, Homo sapiens
  misc_RNA (1)...(19): siRNA sense strand
gagccuacgugaauauaug

SEQ ID NO: 778787 - RNA, 19 nt, Homo sapiens
  misc_RNA (1)...(19): siRNA sense strand
gcacugagguaguucaaac

SEQ ID NO: 778788 - RNA, 19 nt, Homo sapiens
  misc_RNA (1)...(19): siRNA sense strand
gcaguuugauguaguagug

SEQ ID NO: 778789 - RNA, 19 nt, Homo sapiens
  misc_RNA (1)...(19): siRNA sense strand
gcacagccuucucauggau

SEQ ID NO: 778790 - RNA, 19 nt, Homo sapiens
  misc_RNA (1)...(19): siRNA sense strand
ucacucagccuguccuuaa

SEQ ID NO: 778791 - RNA, 19 nt, Homo sapiens
  misc_RNA (1)...(19): siRNA sense strand
gcagacauuugccuguaga

SEQ ID NO: 778792 - RNA, 19 nt, Homo sapiens
  misc_RNA (1)...(19): siRNA sense strand
ggagugacccagguagaua

SEQ ID NO: 778793 - RNA, 19 nt, Homo sapiens
  misc_RNA (1)...(19): siRNA sense strand
gacugagccugguguauau

SEQ ID NO: 778794 - RNA, 19 nt, Homo sapiens
  misc_RNA (1)...(19): siRNA sense strand
ggccagagccuacgugaau

SEQ ID NO: 778795 - RNA, 19 nt, Homo sapiens
  misc_RNA (1)...(19): siRNA sense strand
ugaccaaccuggccuguag

SEQ ID NO: 778796 - RNA, 19 nt, Homo sapiens
  misc_RNA (1)...(19): siRNA sense strand
gcccaguuauugcuacuug

SEQ ID NO: 778797 - RNA, 19 nt, Homo sapiens
  misc_RNA (1)...(19): siRNA sense strand
caagaaaccaaaggaagaa

SEQ ID NO: 778798 - RNA, 19 nt, Homo sapiens
  misc_RNA (1)...(19): siRNA sense strand
ggaacaagaaaccaaagga

SEQ ID NO: 778799 - RNA, 19 nt, Homo sapiens
  misc_RNA (1)...(19): siRNA sense strand
ggugcaguuugauguagua

SEQ ID NO: 778800 - RNA, 19 nt, Homo sapiens
  misc_RNA (1)...(19): siRNA sense strand
uaaacggccucgccaugug

SEQ ID NO: 778801 - RNA, 19 nt, Homo sapiens
  misc_RNA (1)...(19): siRNA sense strand
ccaugugcauugucacuug

SEQ ID NO: 778802 - RNA, 19 nt, Homo sapiens
  misc_RNA (1)...(19): siRNA sense strand
aaacuuugauggacuuugg

SEQ ID NO: 778803 - RNA, 19 nt, Homo sapiens
  misc_RNA (1)...(19): siRNA sense strand
gcacggcagggauuuguau

SEQ ID NO: 778804 - RNA, 19 nt, Homo sapiens
  misc_RNA (1)...(19): siRNA sense strand
gccagagccuacgugaaua

SEQ ID NO: 778805 - RNA, 19 nt, Homo sapiens
  misc_RNA (1)...(19): siRNA sense strand
gggcuaggcaucuugagaa

SEQ ID NO: 778806 - RNA, 19 nt, Homo sapiens
  misc_RNA (1)...(19): siRNA sense strand
gauccgggcucgaaaucca

SEQ ID NO: 778807 - RNA, 19 nt, Homo sapiens
  misc_RNA (1)...(19): siRNA sense strand
caaggugcaguuugaugua

SEQ ID NO: 778808 - RNA, 19 nt, Homo sapiens
  misc_RNA (1)...(19): siRNA sense strand
acaagaaaccaaaggaaga

SEQ ID NO: 778809 - RNA, 19 nt, Homo sapiens
  misc_RNA (1)...(19): siRNA sense strand
gcagcagucuccagagcau

SEQ ID NO: 778810 - RNA, 19 nt, Homo sapiens
  misc_RNA (1)...(19): siRNA sense strand
ugacccagguagauaacaa

SEQ ID NO: 778811 - RNA, 19 nt, Homo sapiens
  misc_RNA (1)...(19): siRNA sense strand
ggcuaggcaucuugagaaa

SEQ ID NO: 778812 - RNA, 19 nt, Homo sapiens
  misc_RNA (1)...(19): siRNA sense strand
gagugacccagguagauaa

SEQ ID NO: 778813 - RNA, 19 nt, Homo sapiens
  misc_RNA (1)...(19): siRNA sense strand
aagacuggaugguggcuuu

SEQ ID NO: 778814 - RNA, 19 nt, Homo sapiens
  misc_RNA (1)...(19): siRNA sense strand
ugaccgcacugagguaguu

SEQ ID NO: 778815 - RNA, 19 nt, Homo sapiens
  misc_RNA (1)...(19): siRNA sense strand
cauuucagccacaaacuuu

SEQ ID NO: 778816 - RNA, 19 nt, Homo sapiens
  misc_RNA (1)...(19): siRNA sense strand
ccagagcauuccaugagau

SEQ ID NO: 778817 - RNA, 19 nt, Homo sapiens
  misc_RNA (1)...(19): siRNA sense strand
caccugggcugcucacagu

SEQ ID NO: 778818 - RNA, 19 nt, Homo sapiens
  misc_RNA (1)...(19): siRNA sense strand
agaaucaggugcaaacacu

SEQ ID NO: 778819 - RNA, 19 nt, Homo sapiens
  misc_RNA (1)...(19): siRNA sense strand
gcauuucagccacaaacuu

SEQ ID NO: 778820 - RNA, 19 nt, Homo sapiens
  misc_RNA (1)...(19): siRNA sense strand
ccagaggaguugcaaagac

SEQ ID NO: 778821 - RNA, 19 nt, Homo sapiens
  misc_RNA (1)...(19): siRNA sense strand
ggcccacuauggagaauca

SEQ ID NO: 778822 - RNA, 19 nt, Homo sapiens
  misc_RNA (1)...(19): siRNA sense strand
gcuacacgcacuacguaaa

SEQ ID NO: 778823 - RNA, 19 nt, Homo sapiens
  misc_RNA (1)...(19): siRNA sense strand
uagauaacaaguccgguuu

SEQ ID NO: 778824 - RNA, 19 nt, Homo sapiens
  misc_RNA (1)...(19): siRNA sense strand
ggcagggauuuguaucguu

SEQ ID NO: 778825 - RNA, 19 nt, Homo sapiens
  misc_RNA (1)...(19): siRNA sense strand
ccaaggugcaguuugaugu

SEQ ID NO: 778826 - RNA, 19 nt, Homo sapiens
  misc_RNA (1)...(19): siRNA sense strand
guaaaacuaccuaccauug

SEQ ID NO: 778827 - RNA, 19 nt, Homo sapiens
  misc_RNA (1)...(19): siRNA sense strand
ggcacagccuucucaugga

SEQ ID NO: 778828 - RNA, 19 nt, Homo sapiens
  misc_RNA (1)...(19): siRNA sense strand
ggcaagaacugagcuacac

SEQ ID NO: 778829 - RNA, 19 nt, Homo sapiens
  misc_RNA (1)...(19): siRNA sense strand
gcuggaacaagaaaccaaa

SEQ ID NO: 778830 - RNA, 19 nt, Homo sapiens
  misc_RNA (1)...(19): siRNA sense strand
gaucagcugccauguuggu

SEQ ID NO: 778831 - RNA, 19 nt, Homo sapiens
  misc_RNA (1)...(19): siRNA sense strand
ggaaaacccagacuuaucu

SEQ ID NO: 778832 - RNA, 19 nt, Homo sapiens
  misc_RNA (1)...(19): siRNA sense strand
aaaguucucuauggugauc

SEQ ID NO: 778833 - RNA, 19 nt, Homo sapiens
  misc_RNA (1)...(19): siRNA sense strand
gauaacaaguccgguuucc

SEQ ID NO: 778834 - RNA, 19 nt, Homo sapiens
  misc_RNA (1)...(19): siRNA sense strand
gacuuuggcucagguacug

SEQ ID NO: 778835 - RNA, 19 nt, Homo sapiens
  misc_RNA (1)...(19): siRNA sense strand
caugagauccgggcucgaa

SEQ ID NO: 778836 - RNA, 19 nt, Homo sapiens
  misc_RNA (1)...(19): siRNA sense strand
aacccagacuuaucucaga

SEQ ID NO: 778837 - RNA, 19 nt, Homo sapiens
  misc_RNA (1)...(19): siRNA sense strand
cccuucagcuggaacaaga

SEQ ID NO: 778838 - RNA, 19 nt, Homo sapiens
  misc_RNA (1)...(19): siRNA sense strand
gcaaggcugaccgcacuga

SEQ ID NO: 778839 - RNA, 19 nt, Homo sapiens
  misc_RNA (1)...(19): siRNA sense strand
ccagagccuacgugaauau

SEQ ID NO: 778840 - RNA, 19 nt, Homo sapiens
  misc_RNA (1)...(19): siRNA sense strand
gagauccgggcucgaaauc

SEQ ID NO: 778841 - RNA, 19 nt, Homo sapiens
  misc_RNA (1)...(19): siRNA sense strand
uaccuaccauuggcaagaa

SEQ ID NO: 778842 - RNA, 19 nt, Homo sapiens
  misc_RNA (1)...(19): siRNA sense strand
cacucagccuguccuuaaa

SEQ ID NO: 778843 - RNA, 19 nt, Homo sapiens
  misc_RNA (1)...(19): siRNA sense strand
gguggagaauggaacaaaa

SEQ ID NO: 778844 - RNA, 19 nt, Homo sapiens
  misc_RNA (1)...(19): siRNA sense strand
gcguaagacaggucauuuc

SEQ ID NO: 778845 - RNA, 19 nt, Homo sapiens
  misc_RNA (1)...(19): siRNA sense strand
gggcugcucacaguauuug

SEQ ID NO: 778846 - RNA, 19 nt, Homo sapiens
  misc_RNA (1)...(19): siRNA sense strand
ggcguaagacaggucauuu

SEQ ID NO: 778847 - RNA, 19 nt, Homo sapiens
  misc_RNA (1)...(19): siRNA sense strand
guacugguggagaauggaa

SEQ ID NO: 778848 - RNA, 19 nt, Homo sapiens
  misc_RNA (1)...(19): siRNA sense strand
acagaucagcugccauguu

SEQ ID NO: 778849 - RNA, 19 nt, Homo sapiens
  misc_RNA (1)...(19): siRNA sense strand
cacuugugcuguccagaug

SEQ ID NO: 778850 - RNA, 19 nt, Homo sapiens
  misc_RNA (1)...(19): siRNA sense strand
uccagagcauuccaugaga

SEQ ID NO: 778851 - RNA, 19 nt, Homo sapiens
  misc_RNA (1)...(19): siRNA sense strand
caugugcauugucacuugu

SEQ ID NO: 778852 - RNA, 19 nt, Homo sapiens
  misc_RNA (1)...(19): siRNA sense strand
gauguaguagugucagcuu

SEQ ID NO: 778853 - RNA, 19 nt, Homo sapiens
  misc_RNA (1)...(19): siRNA sense strand
cagcugccauguugguuuu

SEQ ID NO: 778854 - RNA, 19 nt, Homo sapiens
  misc_RNA (1)...(19): siRNA sense strand
cagagccuacgugaauaua

SEQ ID NO: 778855 - RNA, 19 nt, Homo sapiens
  misc_RNA (1)...(19): siRNA sense strand
gcucagguacugguucugu

SEQ ID NO: 778856 - RNA, 19 nt, Homo sapiens
  misc_RNA (1)...(19): siRNA sense strand
ucagcugccauguugguuu

SEQ ID NO: 778857 - RNA, 19 nt, Homo sapiens
  misc_RNA (1)...(19): siRNA sense strand
uuauauuccaggugucuuu

SEQ ID NO: 778858 - RNA, 19 nt, Homo sapiens
  misc_RNA (1)...(19): siRNA sense strand
ggacuuuggcucagguacu

SEQ ID NO: 778859 - RNA, 19 nt, Homo sapiens
  misc_RNA (1)...(19): siRNA sense strand
ucacuugugcuguccagau

SEQ ID NO: 778860 - RNA, 19 nt, Homo sapiens
  misc_RNA (1)...(19): siRNA sense strand
uaagggaaaggagaaguca

SEQ ID NO: 778861 - RNA, 19 nt, Homo sapiens
  misc_RNA (1)...(19): siRNA sense strand
gcagagagaauccuucaua

SEQ ID NO: 778862 - RNA, 19 nt, Homo sapiens
  misc_RNA (1)...(19): siRNA sense strand
gauggaauuuggaagauuu

SEQ ID NO: 778863 - RNA, 19 nt, Homo sapiens
  misc_RNA (1)...(19): siRNA sense strand
gagaauccuucauaaagaa

SEQ ID NO: 778864 - RNA, 19 nt, Homo sapiens
  misc_RNA (1)...(19): siRNA sense strand
gguguaacguguauucuuu

SEQ ID NO: 778865 - RNA, 19 nt, Homo sapiens
  misc_RNA (1)...(19): siRNA sense strand
gcugugagcugguuuaaag

SEQ ID NO: 778866 - RNA, 19 nt, Homo sapiens
  misc_RNA (1)...(19): siRNA sense strand
gaaguacaguaaacaugaa

SEQ ID NO: 778867 - RNA, 19 nt, Homo sapiens
  misc_RNA (1)...(19): siRNA sense strand
ggaaguacaguaaacauga

SEQ ID NO: 778868 - RNA, 19 nt, Homo sapiens
  misc_RNA (1)...(19): siRNA sense strand
ugggauggcuguauucuaa

SEQ ID NO: 778869 - RNA, 19 nt, Homo sapiens
  misc_RNA (1)...(19): siRNA sense strand
cagagagaauccuucauaa

SEQ ID NO: 778870 - RNA, 19 nt, Homo sapiens
  misc_RNA (1)...(19): siRNA sense strand
gcaagugaauaccacgaaa

SEQ ID NO: 778871 - RNA, 19 nt, Homo sapiens
  misc_RNA (1)...(19): siRNA sense strand
gagagaauccuucauaaag

SEQ ID NO: 778872 - RNA, 19 nt, Homo sapiens
  misc_RNA (1)...(19): siRNA sense strand
gcuauuauguugcuguguu

SEQ ID NO: 778873 - RNA, 19 nt, Homo sapiens
  misc_RNA (1)...(19): siRNA sense strand
cgaaauucaugcugcugua

SEQ ID NO: 778874 - RNA, 19 nt, Homo sapiens
  misc_RNA (1)...(19): siRNA sense strand
caagugcaauuaacagugu

SEQ ID NO: 778875 - RNA, 19 nt, Homo sapiens
  misc_RNA (1)...(19): siRNA sense strand
uaacugauguaaaggacuu

SEQ ID NO: 778876 - RNA, 19 nt, Homo sapiens
  misc_RNA (1)...(19): siRNA sense strand
agagaauccuucauaaaga

SEQ ID NO: 778877 - RNA, 19 nt, Homo sapiens
  misc_RNA (1)...(19): siRNA sense strand
ggugggaaccuaaauuauu

SEQ ID NO: 778878 - RNA, 19 nt, Homo sapiens
  misc_RNA (1)...(19): siRNA sense strand
gguggaauauuuaaugcuu

SEQ ID NO: 778879 - RNA, 19 nt, Homo sapiens
  misc_RNA (1)...(19): siRNA sense strand
gugggaaccuaaauuauuc

SEQ ID NO: 778880 - RNA, 19 nt, Homo sapiens
  misc_RNA (1)...(19): siRNA sense strand
gauugaagcuuuguuaggu

SEQ ID NO: 778881 - RNA, 19 nt, Homo sapiens
  misc_RNA (1)...(19): siRNA sense strand
cagaauacauaugcuguga

SEQ ID NO: 778882 - RNA, 19 nt, Homo sapiens
  misc_RNA (1)...(19): siRNA sense strand
ggauggcuguauucuaaga

SEQ ID NO: 778883 - RNA, 19 nt, Homo sapiens
  misc_RNA (1)...(19): siRNA sense strand
ggccaucauuuccaucauu

SEQ ID NO: 778884 - RNA, 19 nt, Homo sapiens
  misc_RNA (1)...(19): siRNA sense strand
uaucaucugugucugcuau

SEQ ID NO: 778885 - RNA, 19 nt, Homo sapiens
  misc_RNA (1)...(19): siRNA sense strand
ggaauuuggaagauuugua

SEQ ID NO: 778886 - RNA, 19 nt, Homo sapiens
  misc_RNA (1)...(19): siRNA sense strand
uaaacgagauaugcaagug

SEQ ID NO: 778887 - RNA, 19 nt, Homo sapiens
  misc_RNA (1)...(19): siRNA sense strand
agacaaagggaagaaauaa

SEQ ID NO: 778888 - RNA, 19 nt, Homo sapiens
  misc_RNA (1)...(19): siRNA sense strand
gaucagagagcagagagaa

SEQ ID NO: 778889 - RNA, 19 nt, Homo sapiens
  misc_RNA (1)...(19): siRNA sense strand
uuugauagaccgaguauuu

SEQ ID NO: 778890 - RNA, 19 nt, Homo sapiens
  misc_RNA (1)...(19): siRNA sense strand
agaauuggaaguacaguaa

SEQ ID NO: 778891 - RNA, 19 nt, Homo sapiens
  misc_RNA (1)...(19): siRNA sense strand
uaacguguauucuuucacu

SEQ ID NO: 778892 - RNA, 19 nt, Homo sapiens
  misc_RNA (1)...(19): siRNA sense strand
cgagauaugcaagugaaua

SEQ ID NO: 778893 - RNA, 19 nt, Homo sapiens
  misc_RNA (1)...(19): siRNA sense strand
gagcugguuuaaaggcaaa

SEQ ID NO: 778894 - RNA, 19 nt, Homo sapiens
  misc_RNA (1)...(19): siRNA sense strand
gacaaagggaagaaauaaa

SEQ ID NO: 778895 - RNA, 19 nt, Homo sapiens
  misc_RNA (1)...(19): siRNA sense strand
guguuuggacuucaacuua

SEQ ID NO: 778896 - RNA, 19 nt, Homo sapiens
  misc_RNA (1)...(19): siRNA sense strand
ccuaaauuauucugcaaga

SEQ ID NO: 778897 - RNA, 19 nt, Homo sapiens
  misc_RNA (1)...(19): siRNA sense strand
gccaucauuuccaucauug

SEQ ID NO: 778898 - RNA, 19 nt, Homo sapiens
  misc_RNA (1)...(19): siRNA sense strand
gaacaucagcugggaacug

SEQ ID NO: 778899 - RNA, 19 nt, Homo sapiens
  misc_RNA (1)...(19): siRNA sense strand
gaauuggaaguacaguaaa

SEQ ID NO: 778900 - RNA, 19 nt, Homo sapiens
  misc_RNA (1)...(19): siRNA sense strand
ucaucugugucugcuauua

SEQ ID NO: 778901 - RNA, 19 nt, Homo sapiens
  misc_RNA (1)...(19): siRNA sense strand
gagcagagagaauccuuca

SEQ ID NO: 778902 - RNA, 19 nt, Homo sapiens
  misc_RNA (1)...(19): siRNA sense strand
ggaggaggaggaugaggaa

SEQ ID NO: 778903 - RNA, 19 nt, Homo sapiens
  misc_RNA (1)...(19): siRNA sense strand
agagagaauccuucauaaa

SEQ ID NO: 778904 - RNA, 19 nt, Homo sapiens
  misc_RNA (1)...(19): siRNA sense strand
gcccuucagacucaaguua

SEQ ID NO: 778905 - RNA, 19 nt, Homo sapiens
  misc_RNA (1)...(19): siRNA sense strand
caagacaaagggaagaaau

SEQ ID NO: 778906 - RNA, 19 nt, Homo sapiens
  misc_RNA (1)...(19): siRNA sense strand
gcaagacaaagggaagaaa

SEQ ID NO: 778907 - RNA, 19 nt, Homo sapiens
  misc_RNA (1)...(19): siRNA sense strand
ucuguggucuuacucuauu

SEQ ID NO: 778908 - RNA, 19 nt, Homo sapiens
  misc_RNA (1)...(19): siRNA sense strand
uaucuguggucuuacucua

SEQ ID NO: 778909 - RNA, 19 nt, Homo sapiens
  misc_RNA (1)...(19): siRNA sense strand
gggacucuccuacucauug

SEQ ID NO: 778910 - RNA, 19 nt, Homo sapiens
  misc_RNA (1)...(19): siRNA sense strand
aacaucaucuggguucuuu

SEQ ID NO: 778911 - RNA, 19 nt, Homo sapiens
  misc_RNA (1)...(19): siRNA sense strand
gcccuggguggaauauuua

SEQ ID NO: 778912 - RNA, 19 nt, Homo sapiens
  misc_RNA (1)...(19): siRNA sense strand
ugcccuggguggaauauuu

SEQ ID NO: 778913 - RNA, 19 nt, Homo sapiens
  misc_RNA (1)...(19): siRNA sense strand
gaaauucaugcugcuguau

SEQ ID NO: 778914 - RNA, 19 nt, Homo sapiens
  misc_RNA (1)...(19): siRNA sense strand
aagacaaagggaagaaaua

SEQ ID NO: 778915 - RNA, 19 nt, Homo sapiens
  misc_RNA (1)...(19): siRNA sense strand
cccuguggcuuauauuuau

SEQ ID NO: 778916 - RNA, 19 nt, Homo sapiens
  misc_RNA (1)...(19): siRNA sense strand
gcugauggaauuuggaaga

SEQ ID NO: 778917 - RNA, 19 nt, Homo sapiens
  misc_RNA (1)...(19): siRNA sense strand
gcagcaagugcaauuaaca

SEQ ID NO: 778918 - RNA, 19 nt, Homo sapiens
  misc_RNA (1)...(19): siRNA sense strand
gcaguagcagccacucuug

SEQ ID NO: 778919 - RNA, 19 nt, Homo sapiens
  misc_RNA (1)...(19): siRNA sense strand
ccaauguaguuuuguguuu

SEQ ID NO: 778920 - RNA, 19 nt, Homo sapiens
  misc_RNA (1)...(19): siRNA sense strand
uagcugcuuuguuugcauu

SEQ ID NO: 778921 - RNA, 19 nt, Homo sapiens
  misc_RNA (1)...(19): siRNA sense strand
gcaguugcccagaauacau

SEQ ID NO: 778922 - RNA, 19 nt, Homo sapiens
  misc_RNA (1)...(19): siRNA sense strand
gauguggaacccuuggauu

SEQ ID NO: 778923 - RNA, 19 nt, Homo sapiens
  misc_RNA (1)...(19): siRNA sense strand
gagauaugcaagugaauac

SEQ ID NO: 778924 - RNA, 19 nt, Homo sapiens
  misc_RNA (1)...(19): siRNA sense strand
ccuucagacucaaguuaaa

SEQ ID NO: 778925 - RNA, 19 nt, Homo sapiens
  misc_RNA (1)...(19): siRNA sense strand
aacgagauaugcaagugaa

SEQ ID NO: 778926 - RNA, 19 nt, Homo sapiens
  misc_RNA (1)...(19): siRNA sense strand
ccaggcagcaagugcaauu

SEQ ID NO: 778927 - RNA, 19 nt, Homo sapiens
  misc_RNA (1)...(19): siRNA sense strand
gguuuaaaggcaaagaauu

SEQ ID NO: 778928 - RNA, 19 nt, Homo sapiens
  misc_RNA (1)...(19): siRNA sense strand
ugauggaauuuggaagauu

SEQ ID NO: 778929 - RNA, 19 nt, Homo sapiens
  misc_RNA (1)...(19): siRNA sense strand
cauaugcugugagcugguu

SEQ ID NO: 778930 - RNA, 19 nt, Homo sapiens
  misc_RNA (1)...(19): siRNA sense strand
gaugugcuuccuuggcuuu

SEQ ID NO: 778931 - RNA, 19 nt, Homo sapiens
  misc_RNA (1)...(19): siRNA sense strand
cugcugcccuucagacuca

SEQ ID NO: 778932 - RNA, 19 nt, Homo sapiens
  misc_RNA (1)...(19): siRNA sense strand
agggugggaaccuaaauua

SEQ ID NO: 778933 - RNA, 19 nt, Homo sapiens
  misc_RNA (1)...(19): siRNA sense strand
caagugaauaccacgaaau

SEQ ID NO: 778934 - RNA, 19 nt, Homo sapiens
  misc_RNA (1)...(19): siRNA sense strand
caguugcccagaauacaua

SEQ ID NO: 778935 - RNA, 19 nt, Homo sapiens
  misc_RNA (1)...(19): siRNA sense strand
gauagaccgaguauuugga

SEQ ID NO: 778936 - RNA, 19 nt, Homo sapiens
  misc_RNA (1)...(19): siRNA sense strand
ggacucuccuacucauugc

SEQ ID NO: 778937 - RNA, 19 nt, Homo sapiens
  misc_RNA (1)...(19): siRNA sense strand
cacaugaugcuggccuuua

SEQ ID NO: 778938 - RNA, 19 nt, Homo sapiens
  misc_RNA (1)...(19): siRNA sense strand
ucagagagcagagagaauc

SEQ ID NO: 778939 - RNA, 19 nt, Homo sapiens
  misc_RNA (1)...(19): siRNA sense strand
ggcgaguccuuagcaguug

SEQ ID NO: 778940 - RNA, 19 nt, Homo sapiens
  misc_RNA (1)...(19): siRNA sense strand
guucuucauugccuguguu

SEQ ID NO: 778941 - RNA, 19 nt, Homo sapiens
  misc_RNA (1)...(19): siRNA sense strand
ggaacugcauauggcuuca

SEQ ID NO: 778942 - RNA, 19 nt, Homo sapiens
  misc_RNA (1)...(19): siRNA sense strand
gcugcuguaugccugguau

SEQ ID NO: 778943 - RNA, 19 nt, Homo sapiens
  misc_RNA (1)...(19): siRNA sense strand
caaguuaaacgagauaugc

SEQ ID NO: 778944 - RNA, 19 nt, Homo sapiens
  misc_RNA (1)...(19): siRNA sense strand
gcuguauucuaagauugaa

SEQ ID NO: 778945 - RNA, 19 nt, Homo sapiens
  misc_RNA (1)...(19): siRNA sense strand
aaacagggaagaacaucau

SEQ ID NO: 778946 - RNA, 19 nt, Homo sapiens
  misc_RNA (1)...(19): siRNA sense strand
aaacgagauaugcaaguga

SEQ ID NO: 778947 - RNA, 19 nt, Homo sapiens
  misc_RNA (1)...(19): siRNA sense strand
agauuuguauuugggauug

SEQ ID NO: 778948 - RNA, 19 nt, Homo sapiens
  misc_RNA (1)...(19): siRNA sense strand
aaucuuggguuggccauca

SEQ ID NO: 778949 - RNA, 19 nt, Homo sapiens
  misc_RNA (1)...(19): siRNA sense strand
aagugaauaccacgaaauu

SEQ ID NO: 778950 - RNA, 19 nt, Homo sapiens
  misc_RNA (1)...(19): siRNA sense strand
ccuuggcucuugccuacuu

SEQ ID NO: 778951 - RNA, 19 nt, Homo sapiens
  misc_RNA (1)...(19): siRNA sense strand
ggaauacgauggggcacaa

SEQ ID NO: 778952 - RNA, 19 nt, Homo sapiens
  misc_RNA (1)...(19): siRNA sense strand
cguguauucuuucacuaau

SEQ ID NO: 778953 - RNA, 19 nt, Homo sapiens
  misc_RNA (1)...(19): siRNA sense strand
ccuuagcaguugcccagaa

SEQ ID NO: 778954 - RNA, 19 nt, Homo sapiens
  misc_RNA (1)...(19): siRNA sense strand
gagagcagagagaauccuu

SEQ ID NO: 778955 - RNA, 19 nt, Homo sapiens
  misc_RNA (1)...(19): siRNA sense strand
uguaacguguauucuuuca

SEQ ID NO: 778956 - RNA, 19 nt, Homo sapiens
  misc_RNA (1)...(19): siRNA sense strand
uagaauuggaaguacagua

SEQ ID NO: 778957 - RNA, 19 nt, Homo sapiens
  misc_RNA (1)...(19): siRNA sense strand
cucaugggauggcuguauu

SEQ ID NO: 778958 - RNA, 19 nt, Homo sapiens
  misc_RNA (1)...(19): siRNA sense strand
guguuucuuugguggcuuu

SEQ ID NO: 778959 - RNA, 19 nt, Homo sapiens
  misc_RNA (1)...(19): siRNA sense strand
ggcagcaagugcaauuaac

SEQ ID NO: 778960 - RNA, 19 nt, Homo sapiens
  misc_RNA (1)...(19): siRNA sense strand
gauaugcaagugaauacca

SEQ ID NO: 778961 - RNA, 19 nt, Homo sapiens
  misc_RNA (1)...(19): siRNA sense strand
guacgugacucucguguuc

SEQ ID NO: 778962 - RNA, 19 nt, Homo sapiens
  misc_RNA (1)...(19): siRNA sense strand
ggagggagaccgcaucuga

SEQ ID NO: 778963 - RNA, 19 nt, Homo sapiens
  misc_RNA (1)...(19): siRNA sense strand
ucaccugcguugugcauaa

SEQ ID NO: 778964 - RNA, 19 nt, Homo sapiens
  misc_RNA (1)...(19): siRNA sense strand
ggagaccgcaucugaagag

SEQ ID NO: 778965 - RNA, 19 nt, Homo sapiens
  misc_RNA (1)...(19): siRNA sense strand
ggauucuucugcuaugaca

SEQ ID NO: 778966 - RNA, 19 nt, Homo sapiens
  misc_RNA (1)...(19): siRNA sense strand
gcacacccagggauucuuc

SEQ ID NO: 778967 - RNA, 19 nt, Homo sapiens
  misc_RNA (1)...(19): siRNA sense strand
ggagagcaccaucgugucu

SEQ ID NO: 778968 - RNA, 19 nt, Homo sapiens
  misc_RNA (1)...(19): siRNA sense strand
gagggagaccgcaucugaa

SEQ ID NO: 778969 - RNA, 19 nt, Homo sapiens
  misc_RNA (1)...(19): siRNA sense strand
cagggauucuucugcuaug

SEQ ID NO: 778970 - RNA, 19 nt, Homo sapiens
  misc_RNA (1)...(19): siRNA sense strand
gcaaucccacgccacacuu

SEQ ID NO: 778971 - RNA, 19 nt, Homo sapiens
  misc_RNA (1)...(19): siRNA sense strand
ccagggauucuucugcuau

SEQ ID NO: 778972 - RNA, 19 nt, Homo sapiens
  misc_RNA (1)...(19): siRNA sense strand
ccgagugccuccugcucuu

SEQ ID NO: 778973 - RNA, 19 nt, Homo sapiens
  misc_RNA (1)...(19): siRNA sense strand
uugugauccugcuugcuua

SEQ ID NO: 778974 - RNA, 19 nt, Homo sapiens
  misc_RNA (1)...(19): siRNA sense strand
cccagggauucuucugcua

SEQ ID NO: 778975 - RNA, 19 nt, Homo sapiens
  misc_RNA (1)...(19): siRNA sense strand
ccaguacccuuacauauaa

SEQ ID NO: 778976 - RNA, 19 nt, Homo sapiens
  misc_RNA (1)...(19): siRNA sense strand
gagaaucacuccaaucgaa

SEQ ID NO: 778977 - RNA, 19 nt, Homo sapiens
  misc_RNA (1)...(19): siRNA sense strand
gaucagauucgguauauuu

SEQ ID NO: 778978 - RNA, 19 nt, Homo sapiens
  misc_RNA (1)...(19): siRNA sense strand
gcacacacgucaaaucaug

SEQ ID NO: 778979 - RNA, 19 nt, Homo sapiens
  misc_RNA (1)...(19): siRNA sense strand
agacagggauuaagucaaa

SEQ ID NO: 778980 - RNA, 19 nt, Homo sapiens
  misc_RNA (1)...(19): siRNA sense strand
ggacaaagacaacuagguu

SEQ ID NO: 778981 - RNA, 19 nt, Homo sapiens
  misc_RNA (1)...(19): siRNA sense strand
gaacaugacgacagauuug

SEQ ID NO: 778982 - RNA, 19 nt, Homo sapiens
  misc_RNA (1)...(19): siRNA sense strand
ucauugaccuguugaagaa

SEQ ID NO: 778983 - RNA, 19 nt, Homo sapiens
  misc_RNA (1)...(19): siRNA sense strand
gaagcaagaaaguacauuu

SEQ ID NO: 778984 - RNA, 19 nt, Homo sapiens
  misc_RNA (1)...(19): siRNA sense strand
ggaguucauugaccuguug

SEQ ID NO: 778985 - RNA, 19 nt, Homo sapiens
  misc_RNA (1)...(19): siRNA sense strand
caacaaugccaaugccuuu

SEQ ID NO: 778986 - RNA, 19 nt, Homo sapiens
  misc_RNA (1)...(19): siRNA sense strand
agaagaugcugaccauuga

SEQ ID NO: 778987 - RNA, 19 nt, Homo sapiens
  misc_RNA (1)...(19): siRNA sense strand
ucaagugccuucuguagug

SEQ ID NO: 778988 - RNA, 19 nt, Homo sapiens
  misc_RNA (1)...(19): siRNA sense strand
ggagagugccgaugacuau

SEQ ID NO: 778989 - RNA, 19 nt, Homo sapiens
  misc_RNA (1)...(19): siRNA sense strand
gcaagcagcacuucuguca

SEQ ID NO: 778990 - RNA, 19 nt, Homo sapiens
  misc_RNA (1)...(19): siRNA sense strand
ccacagcccugaugaaacu

SEQ ID NO: 778991 - RNA, 19 nt, Homo sapiens
  misc_RNA (1)...(19): siRNA sense strand
gcagaaccucuaugacuuu

SEQ ID NO: 778992 - RNA, 19 nt, Homo sapiens
  misc_RNA (1)...(19): siRNA sense strand
gaaccucuaugacuuucug

SEQ ID NO: 778993 - RNA, 19 nt, Homo sapiens
  misc_RNA (1)...(19): siRNA sense strand
cagcacagcccuuaaaugu

SEQ ID NO: 778994 - RNA, 19 nt, Homo sapiens
  misc_RNA (1)...(19): siRNA sense strand
caaauacauucgcccaguu

SEQ ID NO: 778995 - RNA, 19 nt, Homo sapiens
  misc_RNA (1)...(19): siRNA sense strand
ccaucaagauccugaagaa

SEQ ID NO: 778996 - RNA, 19 nt, Homo sapiens
  misc_RNA (1)...(19): siRNA sense strand
ugacacacuuacucgauuu

SEQ ID NO: 778997 - RNA, 19 nt, Homo sapiens
  misc_RNA (1)...(19): siRNA sense strand
uauccacgcugaccucaaa

SEQ ID NO: 778998 - RNA, 19 nt, Homo sapiens
  misc_RNA (1)...(19): siRNA sense strand
gaggugcugugcuccauga

SEQ ID NO: 778999 - RNA, 19 nt, Homo sapiens
  misc_RNA (1)...(19): siRNA sense strand
caaccaguacccuuacaua

SEQ ID NO: 779000 - RNA, 19 nt, Homo sapiens
  misc_RNA (1)...(19): siRNA sense strand
auacuaaacuacccaucua

SEQ ID NO: 779001 - RNA, 19 nt, Homo sapiens
  misc_RNA (1)...(19): siRNA sense strand
ggguuugccugcugaauau

SEQ ID NO: 779002 - RNA, 19 nt, Homo sapiens
  misc_RNA (1)...(19): siRNA sense strand
gaagaaccgcccauccuau

SEQ ID NO: 779003 - RNA, 19 nt, Homo sapiens
  misc_RNA (1)...(19): siRNA sense strand
ugaagaagaugcugaccau

SEQ ID NO: 779004 - RNA, 19 nt, Homo sapiens
  misc_RNA (1)...(19): siRNA sense strand
ggagcgacauguugguaga

SEQ ID NO: 779005 - RNA, 19 nt, Homo sapiens
  misc_RNA (1)...(19): siRNA sense strand
ggacucaccauauccuuug

SEQ ID NO: 779006 - RNA, 19 nt, Homo sapiens
  misc_RNA (1)...(19): siRNA sense strand
ggaagggagcgacauguug

SEQ ID NO: 779007 - RNA, 19 nt, Homo sapiens
  misc_RNA (1)...(19): siRNA sense strand
cccgaagucuccauacuaa

SEQ ID NO: 779008 - RNA, 19 nt, Homo sapiens
  misc_RNA (1)...(19): siRNA sense strand
caaaucauguuuccagaac

SEQ ID NO: 779009 - RNA, 19 nt, Homo sapiens
  misc_RNA (1)...(19): siRNA sense strand
gagcagaaccucuaugacu

SEQ ID NO: 779010 - RNA, 19 nt, Homo sapiens
  misc_RNA (1)...(19): siRNA sense strand
ccgccaaggucaaccagua

SEQ ID NO: 779011 - RNA, 19 nt, Homo sapiens
  misc_RNA (1)...(19): siRNA sense strand
gauccaagcgugucaagga

SEQ ID NO: 779012 - RNA, 19 nt, Homo sapiens
  misc_RNA (1)...(19): siRNA sense strand
caacagcgagggcgacuau

SEQ ID NO: 779013 - RNA, 19 nt, Homo sapiens
  misc_RNA (1)...(19): siRNA sense strand
gcaagcgucgggugaauau

SEQ ID NO: 779014 - RNA, 19 nt, Homo sapiens
  misc_RNA (1)...(19): siRNA sense strand
ccacagcacacacgucaaa

SEQ ID NO: 779015 - RNA, 19 nt, Homo sapiens
  misc_RNA (1)...(19): siRNA sense strand
gaagguauggccucacaug

SEQ ID NO: 779016 - RNA, 19 nt, Homo sapiens
  misc_RNA (1)...(19): siRNA sense strand
gacaccagaugaccaugaa

SEQ ID NO: 779017 - RNA, 19 nt, Homo sapiens
  misc_RNA (1)...(19): siRNA sense strand
gcagagacagggauuaagu

SEQ ID NO: 779018 - RNA, 19 nt, Homo sapiens
  misc_RNA (1)...(19): siRNA sense strand
ucaaucaagugccuucugu

SEQ ID NO: 779019 - RNA, 19 nt, Homo sapiens
  misc_RNA (1)...(19): siRNA sense strand
cagcaccagucaucuguga

SEQ ID NO: 779020 - RNA, 19 nt, Homo sapiens
  misc_RNA (1)...(19): siRNA sense strand
gagcucagccucuucagau

SEQ ID NO: 779021 - RNA, 19 nt, Homo sapiens
  misc_RNA (1)...(19): siRNA sense strand
gcucacggaagccauuaua

SEQ ID NO: 779022 - RNA, 19 nt, Homo sapiens
  misc_RNA (1)...(19): siRNA sense strand
aauguggacucaagcguaa

SEQ ID NO: 779023 - RNA, 19 nt, Homo sapiens
  misc_RNA (1)...(19): siRNA sense strand
gaaaugucuccaccuguga

SEQ ID NO: 779024 - RNA, 19 nt, Homo sapiens
  misc_RNA (1)...(19): siRNA sense strand
gacaggaacagcccagauu

SEQ ID NO: 779025 - RNA, 19 nt, Homo sapiens
  misc_RNA (1)...(19): siRNA sense strand
guacggcucccacagcaaa

SEQ ID NO: 779026 - RNA, 19 nt, Homo sapiens
  misc_RNA (1)...(19): siRNA sense strand
acaaccagcugaccacugu

SEQ ID NO: 779027 - RNA, 19 nt, Homo sapiens
  misc_RNA (1)...(19): siRNA sense strand
gacaagagaaucacuccaa

SEQ ID NO: 779028 - RNA, 19 nt, Homo sapiens
  misc_RNA (1)...(19): siRNA sense strand
ccuacgaggucuuagaguu

SEQ ID NO: 779029 - RNA, 19 nt, Homo sapiens
  misc_RNA (1)...(19): siRNA sense strand
gagcauccacccaugauuc

SEQ ID NO: 779030 - RNA, 19 nt, Homo sapiens
  misc_RNA (1)...(19): siRNA sense strand
gaccauugaugcugacaag

SEQ ID NO: 779031 - RNA, 19 nt, Homo sapiens
  misc_RNA (1)...(19): siRNA sense strand
acugugagccuccuugaua

SEQ ID NO: 779032 - RNA, 19 nt, Homo sapiens
  misc_RNA (1)...(19): siRNA sense strand
gaacggcagcggcagacaa

SEQ ID NO: 779033 - RNA, 19 nt, Homo sapiens
  misc_RNA (1)...(19): siRNA sense strand
gaagacaccagaugaccau

SEQ ID NO: 779034 - RNA, 19 nt, Homo sapiens
  misc_RNA (1)...(19): siRNA sense strand
gacaaagacaacuagguuu

SEQ ID NO: 779035 - RNA, 19 nt, Homo sapiens
  misc_RNA (1)...(19): siRNA sense strand
gcuguguuauugcagaauu

SEQ ID NO: 779036 - RNA, 19 nt, Homo sapiens
  misc_RNA (1)...(19): siRNA sense strand
gcugguggauccaucuaga

SEQ ID NO: 779037 - RNA, 19 nt, Homo sapiens
  misc_RNA (1)...(19): siRNA sense strand
gggcaccaaugagaucgua

SEQ ID NO: 779038 - RNA, 19 nt, Homo sapiens
  misc_RNA (1)...(19): siRNA sense strand
ugaagaaccgcccauccua

SEQ ID NO: 779039 - RNA, 19 nt, Homo sapiens
  misc_RNA (1)...(19): siRNA sense strand
ccaagcgugucaaggagaa

SEQ ID NO: 779040 - RNA, 19 nt, Homo sapiens
  misc_RNA (1)...(19): siRNA sense strand
ccagucaucugugagaaau

SEQ ID NO: 779041 - RNA, 19 nt, Homo sapiens
  misc_RNA (1)...(19): siRNA sense strand
ugagaucauccuugguuua

SEQ ID NO: 779042 - RNA, 19 nt, Homo sapiens
  misc_RNA (1)...(19): siRNA sense strand
agacaaccauacagaguca

SEQ ID NO: 779043 - RNA, 19 nt, Homo sapiens
  misc_RNA (1)...(19): siRNA sense strand
gaagcagagacagggauua

SEQ ID NO: 779044 - RNA, 19 nt, Homo sapiens
  misc_RNA (1)...(19): siRNA sense strand
ggucaucgacuuugguuca

SEQ ID NO: 779045 - RNA, 19 nt, Homo sapiens
  misc_RNA (1)...(19): siRNA sense strand
gcgaggagaucgagaacac

SEQ ID NO: 779046 - RNA, 19 nt, Homo sapiens
  misc_RNA (1)...(19): siRNA sense strand
gcaccagucaucugugaga

SEQ ID NO: 779047 - RNA, 19 nt, Homo sapiens
  misc_RNA (1)...(19): siRNA sense strand
guaagcagcaccagucauc

SEQ ID NO: 779048 - RNA, 19 nt, Homo sapiens
  misc_RNA (1)...(19): siRNA sense strand
aagaagaugcugaccauug

SEQ ID NO: 779049 - RNA, 19 nt, Homo sapiens
  misc_RNA (1)...(19): siRNA sense strand
gagcuucggaguaugauca

SEQ ID NO: 779050 - RNA, 19 nt, Homo sapiens
  misc_RNA (1)...(19): siRNA sense strand
ccaaugccuuugacaccaa

SEQ ID NO: 779051 - RNA, 19 nt, Homo sapiens
  misc_RNA (1)...(19): siRNA sense strand
ucacggaagccauuauaau

SEQ ID NO: 779052 - RNA, 19 nt, Homo sapiens
  misc_RNA (1)...(19): siRNA sense strand
gacacggacucaccauauc

SEQ ID NO: 779053 - RNA, 19 nt, Homo sapiens
  misc_RNA (1)...(19): siRNA sense strand
ugacacggacucaccauau

SEQ ID NO: 779054 - RNA, 19 nt, Homo sapiens
  misc_RNA (1)...(19): siRNA sense strand
cagcagcacagcccuuaaa

SEQ ID NO: 779055 - RNA, 19 nt, Homo sapiens
  misc_RNA (1)...(19): siRNA sense strand
cuggcggacuggagaaaua

SEQ ID NO: 779056 - RNA, 19 nt, Homo sapiens
  misc_RNA (1)...(19): siRNA sense strand
cagcacacacgucaaauca

SEQ ID NO: 779057 - RNA, 19 nt, Homo sapiens
  misc_RNA (1)...(19): siRNA sense strand
cauugaugcugacaagaga

SEQ ID NO: 779058 - RNA, 19 nt, Homo sapiens
  misc_RNA (1)...(19): siRNA sense strand
gaggagaucgagaacacaa

SEQ ID NO: 779059 - RNA, 19 nt, Homo sapiens
  misc_RNA (1)...(19): siRNA sense strand
accaguacccuuacauaua

SEQ ID NO: 779060 - RNA, 19 nt, Homo sapiens
  misc_RNA (1)...(19): siRNA sense strand
caccagcggucacucuuca

SEQ ID NO: 779061 - RNA, 19 nt, Homo sapiens
  misc_RNA (1)...(19): siRNA sense strand
acaagagaaucacuccaau

SEQ ID NO: 779062 - RNA, 19 nt, Homo sapiens
  misc_RNA (1)...(19): siRNA sense strand
guuccuggguuggccguua

SEQ ID NO: 779063 - RNA, 19 nt, Homo sapiens
  misc_RNA (1)...(19): siRNA sense strand
gcaggccucucccucuaag

SEQ ID NO: 779064 - RNA, 19 nt, Homo sapiens
  misc_RNA (1)...(19): siRNA sense strand
ucccugggcuguguuauug

SEQ ID NO: 779065 - RNA, 19 nt, Homo sapiens
  misc_RNA (1)...(19): siRNA sense strand
gcagcacagcccuuaaaug

SEQ ID NO: 779066 - RNA, 19 nt, Homo sapiens
  misc_RNA (1)...(19): siRNA sense strand
gaccaugaccuuuaacaac

SEQ ID NO: 779067 - RNA, 19 nt, Homo sapiens
  misc_RNA (1)...(19): siRNA sense strand
ccaccaaccugaccaugac

SEQ ID NO: 779068 - RNA, 19 nt, Homo sapiens
  misc_RNA (1)...(19): siRNA sense strand
uccaggagcuucggaguau

SEQ ID NO: 779069 - RNA, 19 nt, Homo sapiens
  misc_RNA (1)...(19): siRNA sense strand
gcacugugagccuccuuga

SEQ ID NO: 779070 - RNA, 19 nt, Homo sapiens
  misc_RNA (1)...(19): siRNA sense strand
aaccugaccaugaccuuua

SEQ ID NO: 779071 - RNA, 19 nt, Homo sapiens
  misc_RNA (1)...(19): siRNA sense strand
ugaacaugacgacagauuu

SEQ ID NO: 779072 - RNA, 19 nt, Homo sapiens
  misc_RNA (1)...(19): siRNA sense strand
gugaggcaauugacaugug

SEQ ID NO: 779073 - RNA, 19 nt, Homo sapiens
  misc_RNA (1)...(19): siRNA sense strand
caaaagaagcaagaaagua

SEQ ID NO: 779074 - RNA, 19 nt, Homo sapiens
  misc_RNA (1)...(19): siRNA sense strand
caaacccaagccuaccuua

SEQ ID NO: 779075 - RNA, 19 nt, Homo sapiens
  misc_RNA (1)...(19): siRNA sense strand
gaucuggagucaaauauua

SEQ ID NO: 779076 - RNA, 19 nt, Homo sapiens
  misc_RNA (1)...(19): siRNA sense strand
cagagaagcuuuacucauu

SEQ ID NO: 779077 - RNA, 19 nt, Homo sapiens
  misc_RNA (1)...(19): siRNA sense strand
ggacaaggaugcugauaug

SEQ ID NO: 779078 - RNA, 19 nt, Homo sapiens
  misc_RNA (1)...(19): siRNA sense strand
gaacacagccugauugaag

SEQ ID NO: 779079 - RNA, 19 nt, Homo sapiens
  misc_RNA (1)...(19): siRNA sense strand
ggaaggaaguucaagaauc

SEQ ID NO: 779080 - RNA, 19 nt, Homo sapiens
  misc_RNA (1)...(19): siRNA sense strand
gagaggagcucaccaucug

SEQ ID NO: 779081 - RNA, 19 nt, Homo sapiens
  misc_RNA (1)...(19): siRNA sense strand
caaggaugcugauaugcua

SEQ ID NO: 779082 - RNA, 19 nt, Homo sapiens
  misc_RNA (1)...(19): siRNA sense strand
gaaggaaguucaagaaucc

SEQ ID NO: 779083 - RNA, 19 nt, Homo sapiens
  misc_RNA (1)...(19): siRNA sense strand
gaggaagccuuguucuaug

SEQ ID NO: 779084 - RNA, 19 nt, Homo sapiens
  misc_RNA (1)...(19): siRNA sense strand
ggaggaagccuuguucuau

SEQ ID NO: 779085 - RNA, 19 nt, Homo sapiens
  misc_RNA (1)...(19): siRNA sense strand
caaacugacugaagauaag

SEQ ID NO: 779086 - RNA, 19 nt, Homo sapiens
  misc_RNA (1)...(19): siRNA sense strand
uggcagaguugucuucaaa

SEQ ID NO: 779087 - RNA, 19 nt, Homo sapiens
  misc_RNA (1)...(19): siRNA sense strand
uuaacaaacugacugaaga

SEQ ID NO: 779088 - RNA, 19 nt, Homo sapiens
  misc_RNA (1)...(19): siRNA sense strand
uuuaugaucuggagucaaa

SEQ ID NO: 779089 - RNA, 19 nt, Homo sapiens
  misc_RNA (1)...(19): siRNA sense strand
gaccaguacugcuuugaau

SEQ ID NO: 779090 - RNA, 19 nt, Homo sapiens
  misc_RNA (1)...(19): siRNA sense strand
gccaaauacuguagugcua

SEQ ID NO: 779091 - RNA, 19 nt, Homo sapiens
  misc_RNA (1)...(19): siRNA sense strand
agagaagcuuuacucauuu

SEQ ID NO: 779092 - RNA, 19 nt, Homo sapiens
  misc_RNA (1)...(19): siRNA sense strand
aaagugaucugcaacucuu

SEQ ID NO: 779093 - RNA, 19 nt, Homo sapiens
  misc_RNA (1)...(19): siRNA sense strand
ggaaugcaaaugccuuaaa

SEQ ID NO: 779094 - RNA, 19 nt, Homo sapiens
  misc_RNA (1)...(19): siRNA sense strand
caacaucagagcauccuaa

SEQ ID NO: 779095 - RNA, 19 nt, Homo sapiens
  misc_RNA (1)...(19): siRNA sense strand
gaaugcaaaugccuuaaaa

SEQ ID NO: 779096 - RNA, 19 nt, Homo sapiens
  misc_RNA (1)...(19): siRNA sense strand
gaagccuuguucuauggua

SEQ ID NO: 779097 - RNA, 19 nt, Homo sapiens
  misc_RNA (1)...(19): siRNA sense strand
ggauggagcaccuucagaa

SEQ ID NO: 779098 - RNA, 19 nt, Homo sapiens
  misc_RNA (1)...(19): siRNA sense strand
gagacuggcuuuugauauu

SEQ ID NO: 779099 - RNA, 19 nt, Homo sapiens
  misc_RNA (1)...(19): siRNA sense strand
cagaaucagagaagcuuua

SEQ ID NO: 779100 - RNA, 19 nt, Homo sapiens
  misc_RNA (1)...(19): siRNA sense strand
gagaacacagccugauuga

SEQ ID NO: 779101 - RNA, 19 nt, Homo sapiens
  misc_RNA (1)...(19): siRNA sense strand
gcaaacugcagcuacauca

SEQ ID NO: 779102 - RNA, 19 nt, Homo sapiens
  misc_RNA (1)...(19): siRNA sense strand
uggagcaccuucagaauca

SEQ ID NO: 779103 - RNA, 19 nt, Homo sapiens
  misc_RNA (1)...(19): siRNA sense strand
ccaccugccuuugaccuuu

SEQ ID NO: 779104 - RNA, 19 nt, Homo sapiens
  misc_RNA (1)...(19): siRNA sense strand
ugacugaagauaagaaaga

SEQ ID NO: 779105 - RNA, 19 nt, Homo sapiens
  misc_RNA (1)...(19): siRNA sense strand
cugaacggcuucccgauau

SEQ ID NO: 779106 - RNA, 19 nt, Homo sapiens
  misc_RNA (1)...(19): siRNA sense strand
caaauacuguagugcuaag

SEQ ID NO: 779107 - RNA, 19 nt, Homo sapiens
  misc_RNA (1)...(19): siRNA sense strand
gaucauaagcagcaauucu

SEQ ID NO: 779108 - RNA, 19 nt, Homo sapiens
  misc_RNA (1)...(19): siRNA sense strand
acaaacugacugaagauaa

SEQ ID NO: 779109 - RNA, 19 nt, Homo sapiens
  misc_RNA (1)...(19): siRNA sense strand
gcuaacuggugaugagcaa

SEQ ID NO: 779110 - RNA, 19 nt, Homo sapiens
  misc_RNA (1)...(19): siRNA sense strand
ggaccaguacugcuuugaa

SEQ ID NO: 779111 - RNA, 19 nt, Homo sapiens
  misc_RNA (1)...(19): siRNA sense strand
gagaagcuuuacucauuuu

SEQ ID NO: 779112 - RNA, 19 nt, Homo sapiens
  misc_RNA (1)...(19): siRNA sense strand
caacauuucaugagagaag

SEQ ID NO: 779113 - RNA, 19 nt, Homo sapiens
  misc_RNA (1)...(19): siRNA sense strand
gaacggcuucccgauauca

SEQ ID NO: 779114 - RNA, 19 nt, Homo sapiens
  misc_RNA (1)...(19): siRNA sense strand
gcaaguauggaaggaaguu

SEQ ID NO: 779115 - RNA, 19 nt, Homo sapiens
  misc_RNA (1)...(19): siRNA sense strand
ccaaauacuguagugcuaa

SEQ ID NO: 779116 - RNA, 19 nt, Homo sapiens
  misc_RNA (1)...(19): siRNA sense strand
gugaugagcaaguauggaa

SEQ ID NO: 779117 - RNA, 19 nt, Homo sapiens
  misc_RNA (1)...(19): siRNA sense strand
gcaacucuuucaccaucug

SEQ ID NO: 779118 - RNA, 19 nt, Homo sapiens
  misc_RNA (1)...(19): siRNA sense strand
gagagaagaaauacaggau

SEQ ID NO: 779119 - RNA, 19 nt, Homo sapiens
  misc_RNA (1)...(19): siRNA sense strand
gcaucaaccucggccuguu

SEQ ID NO: 779120 - RNA, 19 nt, Homo sapiens
  misc_RNA (1)...(19): siRNA sense strand
cagccugauugaagauuug

SEQ ID NO: 779121 - RNA, 19 nt, Homo sapiens
  misc_RNA (1)...(19): siRNA sense strand
ccacaagcgggaaugcaaa

SEQ ID NO: 779122 - RNA, 19 nt, Homo sapiens
  misc_RNA (1)...(19): siRNA sense strand
ccaguacugcuuugaaugu

SEQ ID NO: 779123 - RNA, 19 nt, Homo sapiens
  misc_RNA (1)...(19): siRNA sense strand
caguaucucuuugcucaau

SEQ ID NO: 779124 - RNA, 19 nt, Homo sapiens
  misc_RNA (1)...(19): siRNA sense strand
uaugaucuggagucaaaua

SEQ ID NO: 779125 - RNA, 19 nt, Homo sapiens
  misc_RNA (1)...(19): siRNA sense strand
gcgaucauaagcagcaauu

SEQ ID NO: 779126 - RNA, 19 nt, Homo sapiens
  misc_RNA (1)...(19): siRNA sense strand
ggagaggagcucaccaucu

SEQ ID NO: 779127 - RNA, 19 nt, Homo sapiens
  misc_RNA (1)...(19): siRNA sense strand
guaucucuuugcucaauca

SEQ ID NO: 779128 - RNA, 19 nt, Homo sapiens
  misc_RNA (1)...(19): siRNA sense strand
uaacaaacugacugaagau

SEQ ID NO: 779129 - RNA, 19 nt, Homo sapiens
  misc_RNA (1)...(19): siRNA sense strand
cccaagcaaugaagaaucu

SEQ ID NO: 779130 - RNA, 19 nt, Homo sapiens
  misc_RNA (1)...(19): siRNA sense strand
agagaacacagccugauug

SEQ ID NO: 779131 - RNA, 19 nt, Homo sapiens
  misc_RNA (1)...(19): siRNA sense strand
cagagaacacagccugauu

SEQ ID NO: 779132 - RNA, 19 nt, Homo sapiens
  misc_RNA (1)...(19): siRNA sense strand
caagcaaugaagaaucuga

SEQ ID NO: 779133 - RNA, 19 nt, Homo sapiens
  misc_RNA (1)...(19): siRNA sense strand
acagccugauugaagauuu

SEQ ID NO: 779134 - RNA, 19 nt, Homo sapiens
  misc_RNA (1)...(19): siRNA sense strand
gaaugcgacgccaacauca

SEQ ID NO: 779135 - RNA, 19 nt, Homo sapiens
  misc_RNA (1)...(19): siRNA sense strand
gauggagcaccuucagaau

SEQ ID NO: 779136 - RNA, 19 nt, Homo sapiens
  misc_RNA (1)...(19): siRNA sense strand
gcagagaacacagccugau

SEQ ID NO: 779137 - RNA, 19 nt, Homo sapiens
  misc_RNA (1)...(19): siRNA sense strand
gagggaccaguacugcuuu

SEQ ID NO: 779138 - RNA, 19 nt, Homo sapiens
  misc_RNA (1)...(19): siRNA sense strand
caacuguucgauuguguuc

SEQ ID NO: 779139 - RNA, 19 nt, Homo sapiens
  misc_RNA (1)...(19): siRNA sense strand
agacuggcuuuugauauua

SEQ ID NO: 779140 - RNA, 19 nt, Homo sapiens
  misc_RNA (1)...(19): siRNA sense strand
caacaucuaccagcugaag

SEQ ID NO: 779141 - RNA, 19 nt, Homo sapiens
  misc_RNA (1)...(19): siRNA sense strand
ucugaacggcuucccgaua

SEQ ID NO: 779142 - RNA, 19 nt, Homo sapiens
  misc_RNA (1)...(19): siRNA sense strand
gccaaacccaggacaagga

SEQ ID NO: 779143 - RNA, 19 nt, Homo sapiens
  misc_RNA (1)...(19): siRNA sense strand
ucaggcaacucguaaugac

SEQ ID NO: 779144 - RNA, 19 nt, Homo sapiens
  misc_RNA (1)...(19): siRNA sense strand
aacacagccugauugaaga

SEQ ID NO: 779145 - RNA, 19 nt, Homo sapiens
  misc_RNA (1)...(19): siRNA sense strand
aggaagccaucccgucaga

SEQ ID NO: 779146 - RNA, 19 nt, Homo sapiens
  misc_RNA (1)...(19): siRNA sense strand
uaugcuaacuggugaugag

SEQ ID NO: 779147 - RNA, 19 nt, Homo sapiens
  misc_RNA (1)...(19): siRNA sense strand
gcuuugaaugugacuguuu

SEQ ID NO: 779148 - RNA, 19 nt, Homo sapiens
  misc_RNA (1)...(19): siRNA sense strand
gaaguugguguuggccuau

SEQ ID NO: 779149 - RNA, 19 nt, Homo sapiens
  misc_RNA (1)...(19): siRNA sense strand
ggaagugggagcagguucu

SEQ ID NO: 779150 - RNA, 19 nt, Homo sapiens
  misc_RNA (1)...(19): siRNA sense strand
caugagagaagaaauacag

SEQ ID NO: 779151 - RNA, 19 nt, Homo sapiens
  misc_RNA (1)...(19): siRNA sense strand
agugacacauggcagagaa

SEQ ID NO: 779152 - RNA, 19 nt, Homo sapiens
  misc_RNA (1)...(19): siRNA sense strand
ucauaagcagcaauucuga

SEQ ID NO: 779153 - RNA, 19 nt, Homo sapiens
  misc_RNA (1)...(19): siRNA sense strand
cgggaaugcaaaugccuua

SEQ ID NO: 779154 - RNA, 19 nt, Homo sapiens
  misc_RNA (1)...(19): siRNA sense strand
gaccccaacuguucgauug

SEQ ID NO: 779155 - RNA, 19 nt, Homo sapiens
  misc_RNA (1)...(19): siRNA sense strand
guuggccuauaucccagua

SEQ ID NO: 779156 - RNA, 19 nt, Homo sapiens
  misc_RNA (1)...(19): siRNA sense strand
gaagaaugcgacgccaaca

SEQ ID NO: 779157 - RNA, 19 nt, Homo sapiens
  misc_RNA (1)...(19): siRNA sense strand
agacuccguucgacuucuu

SEQ ID NO: 779158 - RNA, 19 nt, Homo sapiens
  misc_RNA (1)...(19): siRNA sense strand
aaacugcagcuacaucaag

SEQ ID NO: 779159 - RNA, 19 nt, Homo sapiens
  misc_RNA (1)...(19): siRNA sense strand
uggaggaagccuuguucua

SEQ ID NO: 779160 - RNA, 19 nt, Homo sapiens
  misc_RNA (1)...(19): siRNA sense strand
cauaagcagcaauucugaa

SEQ ID NO: 779161 - RNA, 19 nt, Homo sapiens
  misc_RNA (1)...(19): siRNA sense strand
acuguucgauuguguucaa

SEQ ID NO: 779162 - RNA, 19 nt, Homo sapiens
  misc_RNA (1)...(19): siRNA sense strand
gacugaagauaagaaagag

SEQ ID NO: 779163 - RNA, 19 nt, Homo sapiens
  misc_RNA (1)...(19): siRNA sense strand
cgacuucuuggcagaguug

SEQ ID NO: 779164 - RNA, 19 nt, Homo sapiens
  misc_RNA (1)...(19): siRNA sense strand
caaugaagaaucugagacu

SEQ ID NO: 779165 - RNA, 19 nt, Homo sapiens
  misc_RNA (1)...(19): siRNA sense strand
ugagggaccaguacugcuu

SEQ ID NO: 779166 - RNA, 19 nt, Homo sapiens
  misc_RNA (1)...(19): siRNA sense strand
aaucagagaagcuuuacuc

SEQ ID NO: 779167 - RNA, 19 nt, Homo sapiens
  misc_RNA (1)...(19): siRNA sense strand
uauaucccaguaucucuuu

SEQ ID NO: 779168 - RNA, 19 nt, Homo sapiens
  misc_RNA (1)...(19): siRNA sense strand
ggagaugcaggaaguuggu

SEQ ID NO: 779169 - RNA, 19 nt, Homo sapiens
  misc_RNA (1)...(19): siRNA sense strand
aaauacaggaugccucuca

SEQ ID NO: 779170 - RNA, 19 nt, Homo sapiens
  misc_RNA (1)...(19): siRNA sense strand
auacuguagugcuaagugu

SEQ ID NO: 779171 - RNA, 19 nt, Homo sapiens
  misc_RNA (1)...(19): siRNA sense strand
agaaugcgacgccaacauc

SEQ ID NO: 779172 - RNA, 19 nt, Homo sapiens
  misc_RNA (1)...(19): siRNA sense strand
caaacugcagcuacaucaa

SEQ ID NO: 779173 - RNA, 19 nt, Homo sapiens
  misc_RNA (1)...(19): siRNA sense strand
gagcaccuucagaaucaga

SEQ ID NO: 779174 - RNA, 19 nt, Homo sapiens
  misc_RNA (1)...(19): siRNA sense strand
ccugauugaagauuugauu

SEQ ID NO: 779175 - RNA, 19 nt, Homo sapiens
  misc_RNA (1)...(19): siRNA sense strand
gauuauggcuccuguauac

SEQ ID NO: 779176 - RNA, 19 nt, Homo sapiens
  misc_RNA (1)...(19): siRNA sense strand
ccaccuggcucgugaaaga

SEQ ID NO: 779177 - RNA, 19 nt, Homo sapiens
  misc_RNA (1)...(19): siRNA sense strand
ggagcaaacuggacugcaa

SEQ ID NO: 779178 - RNA, 19 nt, Homo sapiens
  misc_RNA (1)...(19): siRNA sense strand
ucacugcccuccacaucua

SEQ ID NO: 779179 - RNA, 19 nt, Homo sapiens
  misc_RNA (1)...(19): siRNA sense strand
gggcagguccuaagaaaga

SEQ ID NO: 779180 - RNA, 19 nt, Homo sapiens
  misc_RNA (1)...(19): siRNA sense strand
gcgggcagguccuaagaaa

SEQ ID NO: 779181 - RNA, 19 nt, Homo sapiens
  misc_RNA (1)...(19): siRNA sense strand
ggacauccucaaugacgua

SEQ ID NO: 779182 - RNA, 19 nt, Homo sapiens
  misc_RNA (1)...(19): siRNA sense strand
ucaaugacguagccauguu

SEQ ID NO: 779183 - RNA, 19 nt, Homo sapiens
  misc_RNA (1)...(19): siRNA sense strand
gagauuauggcuccuguau

SEQ ID NO: 779184 - RNA, 19 nt, Homo sapiens
  misc_RNA (1)...(19): siRNA sense strand
ccaagugcaucgugagugu

SEQ ID NO: 779185 - RNA, 19 nt, Homo sapiens
  misc_RNA (1)...(19): siRNA sense strand
gacaugcuguucccaaagu

SEQ ID NO: 779186 - RNA, 19 nt, Homo sapiens
  misc_RNA (1)...(19): siRNA sense strand
ccauguuccuugagauuau

SEQ ID NO: 779187 - RNA, 19 nt, Homo sapiens
  misc_RNA (1)...(19): siRNA sense strand
ccaaucuguuucaccauga

SEQ ID NO: 779188 - RNA, 19 nt, Homo sapiens
  misc_RNA (1)...(19): siRNA sense strand
uugcggacauccucaauga

SEQ ID NO: 779189 - RNA, 19 nt, Homo sapiens
  misc_RNA (1)...(19): siRNA sense strand
guagccauguuccuugaga

SEQ ID NO: 779190 - RNA, 19 nt, Homo sapiens
  misc_RNA (1)...(19): siRNA sense strand
ccagcaaccuagccaagug

SEQ ID NO: 779191 - RNA, 19 nt, Homo sapiens
  misc_RNA (1)...(19): siRNA sense strand
cgacccaacugcagccaau

SEQ ID NO: 779192 - RNA, 19 nt, Homo sapiens
  misc_RNA (1)...(19): siRNA sense strand
gccauguuccuugagauua

SEQ ID NO: 779193 - RNA, 19 nt, Homo sapiens
  misc_RNA (1)...(19): siRNA sense strand
caaggagacacacgaagug

SEQ ID NO: 779194 - RNA, 19 nt, Homo sapiens
  misc_RNA (1)...(19): siRNA sense strand
gcuucagccuuggauguuu

SEQ ID NO: 779195 - RNA, 19 nt, Homo sapiens
  misc_RNA (1)...(19): siRNA sense strand
gagcaaacuggacugcaau

SEQ ID NO: 779196 - RNA, 19 nt, Homo sapiens
  misc_RNA (1)...(19): siRNA sense strand
ccuuggauguuucuucuuc

SEQ ID NO: 779197 - RNA, 19 nt, Homo sapiens
  misc_RNA (1)...(19): siRNA sense strand
gaugcucccucugguguca

SEQ ID NO: 779198 - RNA, 19 nt, Homo sapiens
  misc_RNA (1)...(19): siRNA sense strand
ccacaucuacgccaacuac

SEQ ID NO: 779199 - RNA, 19 nt, Homo sapiens
  misc_RNA (1)...(19): siRNA sense strand
ucccaaaguucuugaaagg

SEQ ID NO: 779200 - RNA, 19 nt, Homo sapiens
  misc_RNA (1)...(19): siRNA sense strand
gcuggaagaccgagaagca

SEQ ID NO: 779201 - RNA, 19 nt, Homo sapiens
  misc_RNA (1)...(19): siRNA sense strand
uggacaugcuguucccaaa

SEQ ID NO: 779202 - RNA, 19 nt, Homo sapiens
  misc_RNA (1)...(19): siRNA sense strand
ggacaugcuguucccaaag

SEQ ID NO: 779203 - RNA, 19 nt, Homo sapiens
  misc_RNA (1)...(19): siRNA sense strand
ugacguagccauguuccuu

SEQ ID NO: 779204 - RNA, 19 nt, Homo sapiens
  misc_RNA (1)...(19): siRNA sense strand
uggcuucugucucccgaaa

SEQ ID NO: 779205 - RNA, 19 nt, Homo sapiens
  misc_RNA (1)...(19): siRNA sense strand
ucaaggagacacacgaagu

SEQ ID NO: 779206 - RNA, 19 nt, Homo sapiens
  misc_RNA (1)...(19): siRNA sense strand
cgucagcccggacuacuug

SEQ ID NO: 779207 - RNA, 19 nt, Homo sapiens
  misc_RNA (1)...(19): siRNA sense strand
ccgagaagcaccagcuaga

SEQ ID NO: 779208 - RNA, 19 nt, Homo sapiens
  misc_RNA (1)...(19): siRNA sense strand
ccuaccagcugugggauuc

SEQ ID NO: 779209 - RNA, 19 nt, Homo sapiens
  misc_RNA (1)...(19): siRNA sense strand
cuguauacccaaucuguuu

SEQ ID NO: 779210 - RNA, 19 nt, Homo sapiens
  misc_RNA (1)...(19): siRNA sense strand
gcuccuguauacccaaucu

SEQ ID NO: 779211 - RNA, 19 nt, Homo sapiens
  misc_RNA (1)...(19): siRNA sense strand
ucauggagaccuugaacga

SEQ ID NO: 779212 - RNA, 19 nt, Homo sapiens
  misc_RNA (1)...(19): siRNA sense strand
gcugggucgucgucaagga

SEQ ID NO: 779213 - RNA, 19 nt, Homo sapiens
  misc_RNA (1)...(19): siRNA sense strand
ggucuccagugucuuugag

SEQ ID NO: 779214 - RNA, 19 nt, Homo sapiens
  misc_RNA (1)...(19): siRNA sense strand
gagcugggucgucgucaag

SEQ ID NO: 779215 - RNA, 19 nt, Homo sapiens
  misc_RNA (1)...(19): siRNA sense strand
ggcugguccugaagcacua

SEQ ID NO: 779216 - RNA, 19 nt, Homo sapiens
  misc_RNA (1)...(19): siRNA sense strand
gaccgagaagcaccagcua

SEQ ID NO: 779217 - RNA, 19 nt, Homo sapiens
  misc_RNA (1)...(19): siRNA sense strand
caggaugccggcuggaaga

SEQ ID NO: 779218 - RNA, 19 nt, Homo sapiens
  misc_RNA (1)...(19): siRNA sense strand
cauguuccuugagauuaug

SEQ ID NO: 779219 - RNA, 19 nt, Homo sapiens
  misc_RNA (1)...(19): siRNA sense strand
ggccagcuccgucucuauc

SEQ ID NO: 779220 - RNA, 19 nt, Homo sapiens
  misc_RNA (1)...(19): siRNA sense strand
gaaagagaccuacggguua

SEQ ID NO: 779221 - RNA, 19 nt, Homo sapiens
  misc_RNA (1)...(19): siRNA sense strand
ccacuucacugcacuuaua

SEQ ID NO: 779222 - RNA, 19 nt, Homo sapiens
  misc_RNA (1)...(19): siRNA sense strand
ggacaagacucucaguuca

SEQ ID NO: 779223 - RNA, 19 nt, Homo sapiens
  misc_RNA (1)...(19): siRNA sense strand
ggagaaacgcagugaauuu

SEQ ID NO: 779224 - RNA, 19 nt, Homo sapiens
  misc_RNA (1)...(19): siRNA sense strand
gaccaaaugaguucaaaua

SEQ ID NO: 779225 - RNA, 19 nt, Homo sapiens
  misc_RNA (1)...(19): siRNA sense strand
gcugaugacugcagaaaug

SEQ ID NO: 779226 - RNA, 19 nt, Homo sapiens
  misc_RNA (1)...(19): siRNA sense strand
gauacagucuacgcaguua

SEQ ID NO: 779227 - RNA, 19 nt, Homo sapiens
  misc_RNA (1)...(19): siRNA sense strand
ucaaauguguggaacagaa

SEQ ID NO: 779228 - RNA, 19 nt, Homo sapiens
  misc_RNA (1)...(19): siRNA sense strand
gaacagaggauucacuaag

SEQ ID NO: 779229 - RNA, 19 nt, Homo sapiens
  misc_RNA (1)...(19): siRNA sense strand
aagggaagguuaugaguuu

SEQ ID NO: 779230 - RNA, 19 nt, Homo sapiens
  misc_RNA (1)...(19): siRNA sense strand
guaggacaauggacaggua

SEQ ID NO: 779231 - RNA, 19 nt, Homo sapiens
  misc_RNA (1)...(19): siRNA sense strand
gaagggaagguuaugaguu

SEQ ID NO: 779232 - RNA, 19 nt, Homo sapiens
  misc_RNA (1)...(19): siRNA sense strand
aaacagauuuggcagcaau

SEQ ID NO: 779233 - RNA, 19 nt, Homo sapiens
  misc_RNA (1)...(19): siRNA sense strand
gcagaaaaguuugauuuga

SEQ ID NO: 779234 - RNA, 19 nt, Homo sapiens
  misc_RNA (1)...(19): siRNA sense strand
acucucaguucaaucuuua

SEQ ID NO: 779235 - RNA, 19 nt, Homo sapiens
  misc_RNA (1)...(19): siRNA sense strand
caaccaaguucagcucuuc

SEQ ID NO: 779236 - RNA, 19 nt, Homo sapiens
  misc_RNA (1)...(19): siRNA sense strand
gaaaugugcccagaaccaa

SEQ ID NO: 779237 - RNA, 19 nt, Homo sapiens
  misc_RNA (1)...(19): siRNA sense strand
ucaguccuguccaacauuu

SEQ ID NO: 779238 - RNA, 19 nt, Homo sapiens
  misc_RNA (1)...(19): siRNA sense strand
gcucaguccuguccaacau

SEQ ID NO: 779239 - RNA, 19 nt, Homo sapiens
  misc_RNA (1)...(19): siRNA sense strand
agauuuggcagcaauauuu

SEQ ID NO: 779240 - RNA, 19 nt, Homo sapiens
  misc_RNA (1)...(19): siRNA sense strand
gugcaucgccaaccaaguu

SEQ ID NO: 779241 - RNA, 19 nt, Homo sapiens
  misc_RNA (1)...(19): siRNA sense strand
ggacuuggagcagaacuga

SEQ ID NO: 779242 - RNA, 19 nt, Homo sapiens
  misc_RNA (1)...(19): siRNA sense strand
ucacuauccugaacuuaag

SEQ ID NO: 779243 - RNA, 19 nt, Homo sapiens
  misc_RNA (1)...(19): siRNA sense strand
ggagaccuuuaaccucaga

SEQ ID NO: 779244 - RNA, 19 nt, Homo sapiens
  misc_RNA (1)...(19): siRNA sense strand
gcagugaauuucggaagca

SEQ ID NO: 779245 - RNA, 19 nt, Homo sapiens
  misc_RNA (1)...(19): siRNA sense strand
gacucucaguucaaucuuu

SEQ ID NO: 779246 - RNA, 19 nt, Homo sapiens
  misc_RNA (1)...(19): siRNA sense strand
acaagacucucaguucaau

SEQ ID NO: 779247 - RNA, 19 nt, Homo sapiens
  misc_RNA (1)...(19): siRNA sense strand
acagaggauucacuaagga

SEQ ID NO: 779248 - RNA, 19 nt, Homo sapiens
  misc_RNA (1)...(19): siRNA sense strand
aaagagaccuacggguuag

SEQ ID NO: 779249 - RNA, 19 nt, Homo sapiens
  misc_RNA (1)...(19): siRNA sense strand
caagaagggaagguuauga

SEQ ID NO: 779250 - RNA, 19 nt, Homo sapiens
  misc_RNA (1)...(19): siRNA sense strand
gacaagacucucaguucaa

SEQ ID NO: 779251 - RNA, 19 nt, Homo sapiens
  misc_RNA (1)...(19): siRNA sense strand
cuacgcuacugaucggaaa

SEQ ID NO: 779252 - RNA, 19 nt, Homo sapiens
  misc_RNA (1)...(19): siRNA sense strand
cagaccaaaugaguucaaa

SEQ ID NO: 779253 - RNA, 19 nt, Homo sapiens
  misc_RNA (1)...(19): siRNA sense strand
gacaauggacagguacuga

SEQ ID NO: 779254 - RNA, 19 nt, Homo sapiens
  misc_RNA (1)...(19): siRNA sense strand
uaucaaauguguggaacag

SEQ ID NO: 779255 - RNA, 19 nt, Homo sapiens
  misc_RNA (1)...(19): siRNA sense strand
aagcggacuuggagcagaa

SEQ ID NO: 779256 - RNA, 19 nt, Homo sapiens
  misc_RNA (1)...(19): siRNA sense strand
ggagcaaagcggacuugga

SEQ ID NO: 779257 - RNA, 19 nt, Homo sapiens
  misc_RNA (1)...(19): siRNA sense strand
ccaaccaaguucagcucuu

SEQ ID NO: 779258 - RNA, 19 nt, Homo sapiens
  misc_RNA (1)...(19): siRNA sense strand
uaugugcucugccaagaag

SEQ ID NO: 779259 - RNA, 19 nt, Homo sapiens
  misc_RNA (1)...(19): siRNA sense strand
ucacuaaggacaagacucu

SEQ ID NO: 779260 - RNA, 19 nt, Homo sapiens
  misc_RNA (1)...(19): siRNA sense strand
ccuuuaaccucagaccaaa

SEQ ID NO: 779261 - RNA, 19 nt, Homo sapiens
  misc_RNA (1)...(19): siRNA sense strand
acauugagaugguaaaaga

SEQ ID NO: 779262 - RNA, 19 nt, Homo sapiens
  misc_RNA (1)...(19): siRNA sense strand
gccaagaagggaagguuau

SEQ ID NO: 779263 - RNA, 19 nt, Homo sapiens
  misc_RNA (1)...(19): siRNA sense strand
gguuaguggagaccuuuaa

SEQ ID NO: 779264 - RNA, 19 nt, Homo sapiens
  misc_RNA (1)...(19): siRNA sense strand
ugucugucaucgcugaauu

SEQ ID NO: 779265 - RNA, 19 nt, Homo sapiens
  misc_RNA (1)...(19): siRNA sense strand
gaggauucacuaaggacaa

SEQ ID NO: 779266 - RNA, 19 nt, Homo sapiens
  misc_RNA (1)...(19): siRNA sense strand
ggagcagaacugaaaugug

SEQ ID NO: 779267 - RNA, 19 nt, Homo sapiens
  misc_RNA (1)...(19): siRNA sense strand
ucuaugugcucugccaaga

SEQ ID NO: 779268 - RNA, 19 nt, Homo sapiens
  misc_RNA (1)...(19): siRNA sense strand
aacagaggauucacuaagg

SEQ ID NO: 779269 - RNA, 19 nt, Homo sapiens
  misc_RNA (1)...(19): siRNA sense strand
cagauuuggcagcaauauu

SEQ ID NO: 779270 - RNA, 19 nt, Homo sapiens
  misc_RNA (1)...(19): siRNA sense strand
ggacaauggacagguacug

SEQ ID NO: 779271 - RNA, 19 nt, Homo sapiens
  misc_RNA (1)...(19): siRNA sense strand
gaugacugcagaaauggau

SEQ ID NO: 779272 - RNA, 19 nt, Homo sapiens
  misc_RNA (1)...(19): siRNA sense strand
ggaagaaaagggcauagug

SEQ ID NO: 779273 - RNA, 19 nt, Homo sapiens
  misc_RNA (1)...(19): siRNA sense strand
gcagaagaaauaaaacaga

SEQ ID NO: 779274 - RNA, 19 nt, Homo sapiens
  misc_RNA (1)...(19): siRNA sense strand
gcccagaaccaaaauaaga

SEQ ID NO: 779275 - RNA, 19 nt, Homo sapiens
  misc_RNA (1)...(19): siRNA sense strand
ugaaaugugcccagaacca

SEQ ID NO: 779276 - RNA, 19 nt, Homo sapiens
  misc_RNA (1)...(19): siRNA sense strand
acaauggacagguacugaa

SEQ ID NO: 779277 - RNA, 19 nt, Homo sapiens
  misc_RNA (1)...(19): siRNA sense strand
ccaagaagggaagguuaug

SEQ ID NO: 779278 - RNA, 19 nt, Homo sapiens
  misc_RNA (1)...(19): siRNA sense strand
ucgcugaauuggagcaaag

SEQ ID NO: 779279 - RNA, 19 nt, Homo sapiens
  misc_RNA (1)...(19): siRNA sense strand
uacagucuacgcaguuauu

SEQ ID NO: 779280 - RNA, 19 nt, Homo sapiens
  misc_RNA (1)...(19): siRNA sense strand
uuauaucacuauccugaac

SEQ ID NO: 779281 - RNA, 19 nt, Homo sapiens
  misc_RNA (1)...(19): siRNA sense strand
uggagaaacgcagugaauu

SEQ ID NO: 779282 - RNA, 19 nt, Homo sapiens
  misc_RNA (1)...(19): siRNA sense strand
ugccaagaagggaagguua

SEQ ID NO: 779283 - RNA, 19 nt, Homo sapiens
  misc_RNA (1)...(19): siRNA sense strand
cagcaaggcuucaaaguuu

SEQ ID NO: 779284 - RNA, 19 nt, Homo sapiens
  misc_RNA (1)...(19): siRNA sense strand
gcagcaaggcuucaaaguu

SEQ ID NO: 779285 - RNA, 19 nt, Homo sapiens
  misc_RNA (1)...(19): siRNA sense strand
acaaagaaagggauaguuu

SEQ ID NO: 779286 - RNA, 19 nt, Homo sapiens
  misc_RNA (1)...(19): siRNA sense strand
gaacugcuuuuauuuggau

SEQ ID NO: 779287 - RNA, 19 nt, Homo sapiens
  misc_RNA (1)...(19): siRNA sense strand
ucacaggccagaaguggaa

SEQ ID NO: 779288 - RNA, 19 nt, Homo sapiens
  misc_RNA (1)...(19): siRNA sense strand
cauaacaaagaaagggaua

SEQ ID NO: 779289 - RNA, 19 nt, Homo sapiens
  misc_RNA (1)...(19): siRNA sense strand
ucaaccagguccuccaaag

SEQ ID NO: 779290 - RNA, 19 nt, Homo sapiens
  misc_RNA (1)...(19): siRNA sense strand
gcaaggcuucaaaguuuca

SEQ ID NO: 779291 - RNA, 19 nt, Homo sapiens
  misc_RNA (1)...(19): siRNA sense strand
uaacaaagaaagggauagu

SEQ ID NO: 779292 - RNA, 19 nt, Homo sapiens
  misc_RNA (1)...(19): siRNA sense strand
ccagaaguggaaaggguuu

SEQ ID NO: 779293 - RNA, 19 nt, Homo sapiens
  misc_RNA (1)...(19): siRNA sense strand
cccucaagguggacaguga

SEQ ID NO: 779294 - RNA, 19 nt, Homo sapiens
  misc_RNA (1)...(19): siRNA sense strand
gggaagaacuguaggaaua

SEQ ID NO: 779295 - RNA, 19 nt, Homo sapiens
  misc_RNA (1)...(19): siRNA sense strand
gcacaugacaucaagaaua

SEQ ID NO: 779296 - RNA, 19 nt, Homo sapiens
  misc_RNA (1)...(19): siRNA sense strand
guacuggagugaugaguuu

SEQ ID NO: 779297 - RNA, 19 nt, Homo sapiens
  misc_RNA (1)...(19): siRNA sense strand
cacaugacaucaagaauaa

SEQ ID NO: 779298 - RNA, 19 nt, Homo sapiens
  misc_RNA (1)...(19): siRNA sense strand
uguaagagaucccaugauu

SEQ ID NO: 779299 - RNA, 19 nt, Homo sapiens
  misc_RNA (1)...(19): siRNA sense strand
cagaguaugucauccagua

SEQ ID NO: 779300 - RNA, 19 nt, Homo sapiens
  misc_RNA (1)...(19): siRNA sense strand
ccagaaauuugccaacauu

SEQ ID NO: 779301 - RNA, 19 nt, Homo sapiens
  misc_RNA (1)...(19): siRNA sense strand
ccacggcucuugugccuuu

SEQ ID NO: 779302 - RNA, 19 nt, Homo sapiens
  misc_RNA (1)...(19): siRNA sense strand
caagauaagugccauagag

SEQ ID NO: 779303 - RNA, 19 nt, Homo sapiens
  misc_RNA (1)...(19): siRNA sense strand
gaagaggcauauugcaauc

SEQ ID NO: 779304 - RNA, 19 nt, Homo sapiens
  misc_RNA (1)...(19): siRNA sense strand
uaagagaucccaugauuuc

SEQ ID NO: 779305 - RNA, 19 nt, Homo sapiens
  misc_RNA (1)...(19): siRNA sense strand
aguuguagcuuucaagaua

SEQ ID NO: 779306 - RNA, 19 nt, Homo sapiens
  misc_RNA (1)...(19): siRNA sense strand
caacauggaacuuauugaa

SEQ ID NO: 779307 - RNA, 19 nt, Homo sapiens
  misc_RNA (1)...(19): siRNA sense strand
caccaaaccuccacacuuc

SEQ ID NO: 779308 - RNA, 19 nt, Homo sapiens
  misc_RNA (1)...(19): siRNA sense strand
gaaaugcacaugacaucaa

SEQ ID NO: 779309 - RNA, 19 nt, Homo sapiens
  misc_RNA (1)...(19): siRNA sense strand
gcaucaagcuccauaucug

SEQ ID NO: 779310 - RNA, 19 nt, Homo sapiens
  misc_RNA (1)...(19): siRNA sense strand
gagcaacgccuucuaugau

SEQ ID NO: 779311 - RNA, 19 nt, Homo sapiens
  misc_RNA (1)...(19): siRNA sense strand
gacccaggcuuucagaaga

SEQ ID NO: 779312 - RNA, 19 nt, Homo sapiens
  misc_RNA (1)...(19): siRNA sense strand
gaaauuugccaacauuaca

SEQ ID NO: 779313 - RNA, 19 nt, Homo sapiens
  misc_RNA (1)...(19): siRNA sense strand
cgaagagcaucccagacua

SEQ ID NO: 779314 - RNA, 19 nt, Homo sapiens
  misc_RNA (1)...(19): siRNA sense strand
acauggaacuuauugaaga

SEQ ID NO: 779315 - RNA, 19 nt, Homo sapiens
  misc_RNA (1)...(19): siRNA sense strand
cagaagaucacccuuaguu

SEQ ID NO: 779316 - RNA, 19 nt, Homo sapiens
  misc_RNA (1)...(19): siRNA sense strand
gaagaucacccuuaguucu

SEQ ID NO: 779317 - RNA, 19 nt, Homo sapiens
  misc_RNA (1)...(19): siRNA sense strand
ggagcaacgccuucuauga

SEQ ID NO: 779318 - RNA, 19 nt, Homo sapiens
  misc_RNA (1)...(19): siRNA sense strand
gaaugcaaguuuggcacua

SEQ ID NO: 779319 - RNA, 19 nt, Homo sapiens
  misc_RNA (1)...(19): siRNA sense strand
gaagagcaucccagacuau

SEQ ID NO: 779320 - RNA, 19 nt, Homo sapiens
  misc_RNA (1)...(19): siRNA sense strand
ggacaacauggaacuuauu

SEQ ID NO: 779321 - RNA, 19 nt, Homo sapiens
  misc_RNA (1)...(19): siRNA sense strand
ggcacuagcuguaagagau

SEQ ID NO: 779322 - RNA, 19 nt, Homo sapiens
  misc_RNA (1)...(19): siRNA sense strand
cgauggcaauucuuggaua

SEQ ID NO: 779323 - RNA, 19 nt, Homo sapiens
  misc_RNA (1)...(19): siRNA sense strand
ucaaagccuucguucagaa

SEQ ID NO: 779324 - RNA, 19 nt, Homo sapiens
  misc_RNA (1)...(19): siRNA sense strand
guaagagaucccaugauuu

SEQ ID NO: 779325 - RNA, 19 nt, Homo sapiens
  misc_RNA (1)...(19): siRNA sense strand
gauaagugccauagaguuc

SEQ ID NO: 779326 - RNA, 19 nt, Homo sapiens
  misc_RNA (1)...(19): siRNA sense strand
gaagaacuguaggaauagu

SEQ ID NO: 779327 - RNA, 19 nt, Homo sapiens
  misc_RNA (1)...(19): siRNA sense strand
uaugauagcugcgugaaca

SEQ ID NO: 779328 - RNA, 19 nt, Homo sapiens
  misc_RNA (1)...(19): siRNA sense strand
cucauugucugaacuuuaa

SEQ ID NO: 779329 - RNA, 19 nt, Homo sapiens
  misc_RNA (1)...(19): siRNA sense strand
cuccauaucugccaguauu

SEQ ID NO: 779330 - RNA, 19 nt, Homo sapiens
  misc_RNA (1)...(19): siRNA sense strand
gugaugaguuugguucuug

SEQ ID NO: 779331 - RNA, 19 nt, Homo sapiens
  misc_RNA (1)...(19): siRNA sense strand
guuguagcuuucaagauaa

SEQ ID NO: 779332 - RNA, 19 nt, Homo sapiens
  misc_RNA (1)...(19): siRNA sense strand
ccauagaguucauuuccau

SEQ ID NO: 779333 - RNA, 19 nt, Homo sapiens
  misc_RNA (1)...(19): siRNA sense strand
ugccaacucuuguuucaga

SEQ ID NO: 779334 - RNA, 19 nt, Homo sapiens
  misc_RNA (1)...(19): siRNA sense strand
agcaacgccuucuaugaua

SEQ ID NO: 779335 - RNA, 19 nt, Homo sapiens
  misc_RNA (1)...(19): siRNA sense strand
ccucaccacugacuggauu

SEQ ID NO: 779336 - RNA, 19 nt, Homo sapiens
  misc_RNA (1)...(19): siRNA sense strand
gauggcaauucuuggauag

SEQ ID NO: 779337 - RNA, 19 nt, Homo sapiens
  misc_RNA (1)...(19): siRNA sense strand
gaucccaugauuucucuaa

SEQ ID NO: 779338 - RNA, 19 nt, Homo sapiens
  misc_RNA (1)...(19): siRNA sense strand
gggaggauuuggacaacau

SEQ ID NO: 779339 - RNA, 19 nt, Homo sapiens
  misc_RNA (1)...(19): siRNA sense strand
uagaguucauuuccauuug

SEQ ID NO: 779340 - RNA, 19 nt, Homo sapiens
  misc_RNA (1)...(19): siRNA sense strand
gcuaugccaacucuuguuu

SEQ ID NO: 779341 - RNA, 19 nt, Homo sapiens
  misc_RNA (1)...(19): siRNA sense strand
ccacugacuggauuuggua

SEQ ID NO: 779342 - RNA, 19 nt, Homo sapiens
  misc_RNA (1)...(19): siRNA sense strand
gacaacauggaacuuauug

SEQ ID NO: 779343 - RNA, 19 nt, Homo sapiens
  misc_RNA (1)...(19): siRNA sense strand
cagaucuguuuguaccaua

SEQ ID NO: 779344 - RNA, 19 nt, Homo sapiens
  misc_RNA (1)...(19): siRNA sense strand
cccaugauuucucuaauuc

SEQ ID NO: 779345 - RNA, 19 nt, Homo sapiens
  misc_RNA (1)...(19): siRNA sense strand
ucccaugauuucucuaauu

SEQ ID NO: 779346 - RNA, 19 nt, Homo sapiens
  misc_RNA (1)...(19): siRNA sense strand
caugauuucucuaauucug

SEQ ID NO: 779347 - RNA, 19 nt, Homo sapiens
  misc_RNA (1)...(19): siRNA sense strand
ucagaagauugagcgagua

SEQ ID NO: 779348 - RNA, 19 nt, Homo sapiens
  misc_RNA (1)...(19): siRNA sense strand
cagaaauuugccaacauua

SEQ ID NO: 779349 - RNA, 19 nt, Homo sapiens
  misc_RNA (1)...(19): siRNA sense strand
gagcuacuuugcccgagau

SEQ ID NO: 779350 - RNA, 19 nt, Homo sapiens
  misc_RNA (1)...(19): siRNA sense strand
gagcaucccagacuauugg

SEQ ID NO: 779351 - RNA, 19 nt, Homo sapiens
  misc_RNA (1)...(19): siRNA sense strand
ggccuccucugucaccaaa

SEQ ID NO: 779352 - RNA, 19 nt, Homo sapiens
  misc_RNA (1)...(19): siRNA sense strand
ugagucagccaguaccuuu

SEQ ID NO: 779353 - RNA, 19 nt, Homo sapiens
  misc_RNA (1)...(19): siRNA sense strand
caaccugagugugcugaga

SEQ ID NO: 779354 - RNA, 19 nt, Homo sapiens
  misc_RNA (1)...(19): siRNA sense strand
ccaguaccuuucacucuca

SEQ ID NO: 779355 - RNA, 19 nt, Homo sapiens
  misc_RNA (1)...(19): siRNA sense strand
ugccuaccauuuauagaaa

SEQ ID NO: 779356 - RNA, 19 nt, Homo sapiens
  misc_RNA (1)...(19): siRNA sense strand
ggaagaacuguaggaauag

SEQ ID NO: 779357 - RNA, 19 nt, Homo sapiens
  misc_RNA (1)...(19): siRNA sense strand
ugaagaggcauauugcaau

SEQ ID NO: 779358 - RNA, 19 nt, Homo sapiens
  misc_RNA (1)...(19): siRNA sense strand
ggauuuggacaacauggaa

SEQ ID NO: 779359 - RNA, 19 nt, Homo sapiens
  misc_RNA (1)...(19): siRNA sense strand
uugccaacauuacaacaaa

SEQ ID NO: 779360 - RNA, 19 nt, Homo sapiens
  misc_RNA (1)...(19): siRNA sense strand
uaugccaacucuuguuuca

SEQ ID NO: 779361 - RNA, 19 nt, Homo sapiens
  misc_RNA (1)...(19): siRNA sense strand
gccagaaauuugccaacau

SEQ ID NO: 779362 - RNA, 19 nt, Homo sapiens
  misc_RNA (1)...(19): siRNA sense strand
gaugugacgaccaugcaaa

SEQ ID NO: 779363 - RNA, 19 nt, Homo sapiens
  misc_RNA (1)...(19): siRNA sense strand
caaagccuucguucagaaa

SEQ ID NO: 779364 - RNA, 19 nt, Homo sapiens
  misc_RNA (1)...(19): siRNA sense strand
aaaggauccugugcucuga

SEQ ID NO: 779365 - RNA, 19 nt, Homo sapiens
  misc_RNA (1)...(19): siRNA sense strand
gcuguaagagaucccauga

SEQ ID NO: 779366 - RNA, 19 nt, Homo sapiens
  misc_RNA (1)...(19): siRNA sense strand
caugacaucaagaauaaga

SEQ ID NO: 779367 - RNA, 19 nt, Homo sapiens
  misc_RNA (1)...(19): siRNA sense strand
guugaccaccugagcuaua

SEQ ID NO: 779368 - RNA, 19 nt, Homo sapiens
  misc_RNA (1)...(19): siRNA sense strand
aaggacagaugcagaagca

SEQ ID NO: 779369 - RNA, 19 nt, Homo sapiens
  misc_RNA (1)...(19): siRNA sense strand
uuucagaagaucacccuua

SEQ ID NO: 779370 - RNA, 19 nt, Homo sapiens
  misc_RNA (1)...(19): siRNA sense strand
ucaccaaaccuccacacuu

SEQ ID NO: 779371 - RNA, 19 nt, Homo sapiens
  misc_RNA (1)...(19): siRNA sense strand
ucucauugucugaacuuua

SEQ ID NO: 779372 - RNA, 19 nt, Homo sapiens
  misc_RNA (1)...(19): siRNA sense strand
uuggagaaguuggguauga

SEQ ID NO: 779373 - RNA, 19 nt, Homo sapiens
  misc_RNA (1)...(19): siRNA sense strand
guucagcagccgacaguga

SEQ ID NO: 779374 - RNA, 19 nt, Homo sapiens
  misc_RNA (1)...(19): siRNA sense strand
uggacaacauggaacuuau

SEQ ID NO: 779375 - RNA, 19 nt, Homo sapiens
  misc_RNA (1)...(19): siRNA sense strand
gaacuuuaacgccaugacu

SEQ ID NO: 779376 - RNA, 19 nt, Homo sapiens
  misc_RNA (1)...(19): siRNA sense strand
gacagaugcagaagcagaa

SEQ ID NO: 779377 - RNA, 19 nt, Homo sapiens
  misc_RNA (1)...(19): siRNA sense strand
gaagucuaccaguggcaaa

SEQ ID NO: 779378 - RNA, 19 nt, Homo sapiens
  misc_RNA (1)...(19): siRNA sense strand
gaagauugagcgaguacag

SEQ ID NO: 779379 - RNA, 19 nt, Homo sapiens
  misc_RNA (1)...(19): siRNA sense strand
aaccugcaauaccaaguuu

SEQ ID NO: 779380 - RNA, 19 nt, Homo sapiens
  misc_RNA (1)...(19): siRNA sense strand
guaggaauagucacagcuu

SEQ ID NO: 779381 - RNA, 19 nt, Homo sapiens
  misc_RNA (1)...(19): siRNA sense strand
ccggaaagcacaacuacga

SEQ ID NO: 779382 - RNA, 19 nt, Homo sapiens
  misc_RNA (1)...(19): siRNA sense strand
guucuuggcaggaauaugg

SEQ ID NO: 779383 - RNA, 19 nt, Homo sapiens
  misc_RNA (1)...(19): siRNA sense strand
guaccuuucacucucauug

SEQ ID NO: 779384 - RNA, 19 nt, Homo sapiens
  misc_RNA (1)...(19): siRNA sense strand
gagcuaugccaacucuugu

SEQ ID NO: 779385 - RNA, 19 nt, Homo sapiens
  misc_RNA (1)...(19): siRNA sense strand
gcaguagcgacguggagaa

SEQ ID NO: 779386 - RNA, 19 nt, Homo sapiens
  misc_RNA (1)...(19): siRNA sense strand
uugaccaccugagcuauaa

SEQ ID NO: 779387 - RNA, 19 nt, Homo sapiens
  misc_RNA (1)...(19): siRNA sense strand
aaaugcacaugacaucaag

SEQ ID NO: 779388 - RNA, 19 nt, Homo sapiens
  misc_RNA (1)...(19): siRNA sense strand
ccaggucuacccagaguau

SEQ ID NO: 779389 - RNA, 19 nt, Homo sapiens
  misc_RNA (1)...(19): siRNA sense strand
caccaggucuacccagagu

SEQ ID NO: 779390 - RNA, 19 nt, Homo sapiens
  misc_RNA (1)...(19): siRNA sense strand
ccaucuuugugaucuuuga

SEQ ID NO: 779391 - RNA, 19 nt, Homo sapiens
  misc_RNA (1)...(19): siRNA sense strand
ugagcuaugccaacucuug

SEQ ID NO: 779392 - RNA, 19 nt, Homo sapiens
  misc_RNA (1)...(19): siRNA sense strand
acuuuaacgccaugacuua

SEQ ID NO: 779393 - RNA, 19 nt, Homo sapiens
  misc_RNA (1)...(19): siRNA sense strand
gccuugggcucccuguuca

SEQ ID NO: 779394 - RNA, 19 nt, Homo sapiens
  misc_RNA (1)...(19): siRNA sense strand
gaacagaugugaucaguuu

SEQ ID NO: 779395 - RNA, 19 nt, Homo sapiens
  misc_RNA (1)...(19): siRNA sense strand
gcaaagacauucaaggaaa

SEQ ID NO: 779396 - RNA, 19 nt, Homo sapiens
  misc_RNA (1)...(19): siRNA sense strand
ggagagagcuggcccgaaa

SEQ ID NO: 779397 - RNA, 19 nt, Homo sapiens
  misc_RNA (1)...(19): siRNA sense strand
gaacaagaccgagauauaa

SEQ ID NO: 779398 - RNA, 19 nt, Homo sapiens
  misc_RNA (1)...(19): siRNA sense strand
ggaacaagaccgagauaua

SEQ ID NO: 779399 - RNA, 19 nt, Homo sapiens
  misc_RNA (1)...(19): siRNA sense strand
uaaaggagccagugcaaua

SEQ ID NO: 779400 - RNA, 19 nt, Homo sapiens
  misc_RNA (1)...(19): siRNA sense strand
gcagaaauccuuuaugcaa

SEQ ID NO: 779401 - RNA, 19 nt, Homo sapiens
  misc_RNA (1)...(19): siRNA sense strand
gauccaagcaggaguuaua

SEQ ID NO: 779402 - RNA, 19 nt, Homo sapiens
  misc_RNA (1)...(19): siRNA sense strand
ggagguggcuaaggcauuu

SEQ ID NO: 779403 - RNA, 19 nt, Homo sapiens
  misc_RNA (1)...(19): siRNA sense strand
ccgaagaugucauaucauu

SEQ ID NO: 779404 - RNA, 19 nt, Homo sapiens
  misc_RNA (1)...(19): siRNA sense strand
gggaugaacucacucuaau

SEQ ID NO: 779405 - RNA, 19 nt, Homo sapiens
  misc_RNA (1)...(19): siRNA sense strand
gaaggucgccuccgaaaca

SEQ ID NO: 779406 - RNA, 19 nt, Homo sapiens
  misc_RNA (1)...(19): siRNA sense strand
uaucaggacucucuauaga

SEQ ID NO: 779407 - RNA, 19 nt, Homo sapiens
  misc_RNA (1)...(19): siRNA sense strand
cagaaauccuuuaugcaaa

SEQ ID NO: 779408 - RNA, 19 nt, Homo sapiens
  misc_RNA (1)...(19): siRNA sense strand
gcacuuuccuuugcacuug

SEQ ID NO: 779409 - RNA, 19 nt, Homo sapiens
  misc_RNA (1)...(19): siRNA sense strand
gcacuccuguuuccugcua

SEQ ID NO: 779410 - RNA, 19 nt, Homo sapiens
  misc_RNA (1)...(19): siRNA sense strand
gaugucauaucauucuuug

SEQ ID NO: 779411 - RNA, 19 nt, Homo sapiens
  misc_RNA (1)...(19): siRNA sense strand
gcuauaaguuugugaacau

SEQ ID NO: 779412 - RNA, 19 nt, Homo sapiens
  misc_RNA (1)...(19): siRNA sense strand
ucacuacgguucauugguu

SEQ ID NO: 779413 - RNA, 19 nt, Homo sapiens
  misc_RNA (1)...(19): siRNA sense strand
caacggagagugcguagaa

SEQ ID NO: 779414 - RNA, 19 nt, Homo sapiens
  misc_RNA (1)...(19): siRNA sense strand
cgacaucgaugaguauuca

SEQ ID NO: 779415 - RNA, 19 nt, Homo sapiens
  misc_RNA (1)...(19): siRNA sense strand
gaacacaccauccgcaaca

SEQ ID NO: 779416 - RNA, 19 nt, Homo sapiens
  misc_RNA (1)...(19): siRNA sense strand
guccgaagaugucauauca

SEQ ID NO: 779417 - RNA, 19 nt, Homo sapiens
  misc_RNA (1)...(19): siRNA sense strand
guccaucacuggcuaggua

SEQ ID NO: 779418 - RNA, 19 nt, Homo sapiens
  misc_RNA (1)...(19): siRNA sense strand
ccaagacgguggugguuug

SEQ ID NO: 779419 - RNA, 19 nt, Homo sapiens
  misc_RNA (1)...(19): siRNA sense strand
gggcaccgcuauaaguuug

SEQ ID NO: 779420 - RNA, 19 nt, Homo sapiens
  misc_RNA (1)...(19): siRNA sense strand
gaagaugucauaucauucu

SEQ ID NO: 779421 - RNA, 19 nt, Homo sapiens
  misc_RNA (1)...(19): siRNA sense strand
caagcaggaguuauaguua

SEQ ID NO: 779422 - RNA, 19 nt, Homo sapiens
  misc_RNA (1)...(19): siRNA sense strand
gagaagaacagaugugauc

SEQ ID NO: 779423 - RNA, 19 nt, Homo sapiens
  misc_RNA (1)...(19): siRNA sense strand
ugacacaaauccuucugaa

SEQ ID NO: 779424 - RNA, 19 nt, Homo sapiens
  misc_RNA (1)...(19): siRNA sense strand
cggaagaaauccucucaga

SEQ ID NO: 779425 - RNA, 19 nt, Homo sapiens
  misc_RNA (1)...(19): siRNA sense strand
ugaagacacugaaguuuac

SEQ ID NO: 779426 - RNA, 19 nt, Homo sapiens
  misc_RNA (1)...(19): siRNA sense strand
gaaacugcccagcaccuuu

SEQ ID NO: 779427 - RNA, 19 nt, Homo sapiens
  misc_RNA (1)...(19): siRNA sense strand
cccagaagcuagugaagaa

SEQ ID NO: 779428 - RNA, 19 nt, Homo sapiens
  misc_RNA (1)...(19): siRNA sense strand
ggaggagggucacuauguc

SEQ ID NO: 779429 - RNA, 19 nt, Homo sapiens
  misc_RNA (1)...(19): siRNA sense strand
acacugaaguuuacaacau

SEQ ID NO: 779430 - RNA, 19 nt, Homo sapiens
  misc_RNA (1)...(19): siRNA sense strand
ccgaaacccugguccauca

SEQ ID NO: 779431 - RNA, 19 nt, Homo sapiens
  misc_RNA (1)...(19): siRNA sense strand
uagagauuccgguacauua

SEQ ID NO: 779432 - RNA, 19 nt, Homo sapiens
  misc_RNA (1)...(19): siRNA sense strand
ucugaaagcacuccuguuu

SEQ ID NO: 779433 - RNA, 19 nt, Homo sapiens
  misc_RNA (1)...(19): siRNA sense strand
acacaaauccuucugaaag

SEQ ID NO: 779434 - RNA, 19 nt, Homo sapiens
  misc_RNA (1)...(19): siRNA sense strand
uacacaacaucgucacuaa

SEQ ID NO: 779435 - RNA, 19 nt, Homo sapiens
  misc_RNA (1)...(19): siRNA sense strand
ucaagcugcuggaacaaga

SEQ ID NO: 779436 - RNA, 19 nt, Homo sapiens
  misc_RNA (1)...(19): siRNA sense strand
gagaaggucgccuccgaaa

SEQ ID NO: 779437 - RNA, 19 nt, Homo sapiens
  misc_RNA (1)...(19): siRNA sense strand
agucagaacuucccuacga

SEQ ID NO: 779438 - RNA, 19 nt, Homo sapiens
  misc_RNA (1)...(19): siRNA sense strand
caaugaagacacugaaguu

SEQ ID NO: 779439 - RNA, 19 nt, Homo sapiens
  misc_RNA (1)...(19): siRNA sense strand
gagggucacuaugucauug

SEQ ID NO: 779440 - RNA, 19 nt, Homo sapiens
  misc_RNA (1)...(19): siRNA sense strand
gcaaugaagacacugaagu

SEQ ID NO: 779441 - RNA, 19 nt, Homo sapiens
  misc_RNA (1)...(19): siRNA sense strand
ggaccaguauuuuguuaaa

SEQ ID NO: 779442 - RNA, 19 nt, Homo sapiens
  misc_RNA (1)...(19): siRNA sense strand
caaagcagaguacgucaug

SEQ ID NO: 779443 - RNA, 19 nt, Homo sapiens
  misc_RNA (1)...(19): siRNA sense strand
ccaagcaggaguuauaguu

SEQ ID NO: 779444 - RNA, 19 nt, Homo sapiens
  misc_RNA (1)...(19): siRNA sense strand
cagcaggcaucccgggaaa

SEQ ID NO: 779445 - RNA, 19 nt, Homo sapiens
  misc_RNA (1)...(19): siRNA sense strand
cgacuggaaugaagaaugc

SEQ ID NO: 779446 - RNA, 19 nt, Homo sapiens
  misc_RNA (1)...(19): siRNA sense strand
guagaagggcugcgggaaa

SEQ ID NO: 779447 - RNA, 19 nt, Homo sapiens
  misc_RNA (1)...(19): siRNA sense strand
gcuaaggcauuuccugaac

SEQ ID NO: 779448 - RNA, 19 nt, Homo sapiens
  misc_RNA (1)...(19): siRNA sense strand
gaugaacucacucuaaugg

SEQ ID NO: 779449 - RNA, 19 nt, Homo sapiens
  misc_RNA (1)...(19): siRNA sense strand
gcauuagccuuccauucca

SEQ ID NO: 779450 - RNA, 19 nt, Homo sapiens
  misc_RNA (1)...(19): siRNA sense strand
uagaggaaguguccaaguc

SEQ ID NO: 779451 - RNA, 19 nt, Homo sapiens
  misc_RNA (1)...(19): siRNA sense strand
caaagacauucaaggaaaa

SEQ ID NO: 779452 - RNA, 19 nt, Homo sapiens
  misc_RNA (1)...(19): siRNA sense strand
gaggaccaguauuuuguua

SEQ ID NO: 779453 - RNA, 19 nt, Homo sapiens
  misc_RNA (1)...(19): siRNA sense strand
ucucggaggaccaguauuu

SEQ ID NO: 779454 - RNA, 19 nt, Homo sapiens
  misc_RNA (1)...(19): siRNA sense strand
ucaggacucuggagauagu

SEQ ID NO: 779455 - RNA, 19 nt, Homo sapiens
  misc_RNA (1)...(19): siRNA sense strand
cuagguaucugccaagaac

SEQ ID NO: 779456 - RNA, 19 nt, Homo sapiens
  misc_RNA (1)...(19): siRNA sense strand
cauggaggauaucacauuc

SEQ ID NO: 779457 - RNA, 19 nt, Homo sapiens
  misc_RNA (1)...(19): siRNA sense strand
agauagagauuccgguaca

SEQ ID NO: 779458 - RNA, 19 nt, Homo sapiens
  misc_RNA (1)...(19): siRNA sense strand
uggaggauaucacauucaa

SEQ ID NO: 779459 - RNA, 19 nt, Homo sapiens
  misc_RNA (1)...(19): siRNA sense strand
augaagacacugaaguuua

SEQ ID NO: 779460 - RNA, 19 nt, Homo sapiens
  misc_RNA (1)...(19): siRNA sense strand
cauacgaccuccacuucau

SEQ ID NO: 779461 - RNA, 19 nt, Homo sapiens
  misc_RNA (1)...(19): siRNA sense strand
gcaggcagaaauccuuuau

SEQ ID NO: 779462 - RNA, 19 nt, Homo sapiens
  misc_RNA (1)...(19): siRNA sense strand
gcgagaagaacagauguga

SEQ ID NO: 779463 - RNA, 19 nt, Homo sapiens
  misc_RNA (1)...(19): siRNA sense strand
ggagggucacuaugucauu

SEQ ID NO: 779464 - RNA, 19 nt, Homo sapiens
  misc_RNA (1)...(19): siRNA sense strand
aggagccagugcaauauuu

SEQ ID NO: 779465 - RNA, 19 nt, Homo sapiens
  misc_RNA (1)...(19): siRNA sense strand
ugugaucaguuuagagguu

SEQ ID NO: 779466 - RNA, 19 nt, Homo sapiens
  misc_RNA (1)...(19): siRNA sense strand
gcugcagccucaaggaugu

SEQ ID NO: 779467 - RNA, 19 nt, Homo sapiens
  misc_RNA (1)...(19): siRNA sense strand
ccagugcaauauuucaaca

SEQ ID NO: 779468 - RNA, 19 nt, Homo sapiens
  misc_RNA (1)...(19): siRNA sense strand
gagauuccgguacauuaug

SEQ ID NO: 779469 - RNA, 19 nt, Homo sapiens
  misc_RNA (1)...(19): siRNA sense strand
gacacaaauccuucugaaa

SEQ ID NO: 779470 - RNA, 19 nt, Homo sapiens
  misc_RNA (1)...(19): siRNA sense strand
gggcucccuuuccucauga

SEQ ID NO: 779471 - RNA, 19 nt, Homo sapiens
  misc_RNA (1)...(19): siRNA sense strand
acaaccacgugcccaauuc

SEQ ID NO: 779472 - RNA, 19 nt, Homo sapiens
  misc_RNA (1)...(19): siRNA sense strand
aggcagaaauccuuuaugc

SEQ ID NO: 779473 - RNA, 19 nt, Homo sapiens
  misc_RNA (1)...(19): siRNA sense strand
ugaaugcaaugaagacacu

SEQ ID NO: 779474 - RNA, 19 nt, Homo sapiens
  misc_RNA (1)...(19): siRNA sense strand
ugcaauauuucaacagugu

SEQ ID NO: 779475 - RNA, 19 nt, Homo sapiens
  misc_RNA (1)...(19): siRNA sense strand
ugccgugccucauuuguau

SEQ ID NO: 779476 - RNA, 19 nt, Homo sapiens
  misc_RNA (1)...(19): siRNA sense strand
cagcuggugugacaaagca

SEQ ID NO: 779477 - RNA, 19 nt, Homo sapiens
  misc_RNA (1)...(19): siRNA sense strand
uauaguuacccuagacaaa

SEQ ID NO: 779478 - RNA, 19 nt, Homo sapiens
  misc_RNA (1)...(19): siRNA sense strand
cagaugugaucaguuuaga

SEQ ID NO: 779479 - RNA, 19 nt, Homo sapiens
  misc_RNA (1)...(19): siRNA sense strand
caaguucagccucccagaa

SEQ ID NO: 779480 - RNA, 19 nt, Homo sapiens
  misc_RNA (1)...(19): siRNA sense strand
ucauggaggauaucacauu

SEQ ID NO: 779481 - RNA, 19 nt, Homo sapiens
  misc_RNA (1)...(19): siRNA sense strand
aaaugacuaucugcugauu

SEQ ID NO: 779482 - RNA, 19 nt, Homo sapiens
  misc_RNA (1)...(19): siRNA sense strand
ggccaaagauagagauucc

SEQ ID NO: 779483 - RNA, 19 nt, Homo sapiens
  misc_RNA (1)...(19): siRNA sense strand
cuucagggcuacacaacau

SEQ ID NO: 779484 - RNA, 19 nt, Homo sapiens
  misc_RNA (1)...(19): siRNA sense strand
gucagaacuucccuacgaa

SEQ ID NO: 779485 - RNA, 19 nt, Homo sapiens
  misc_RNA (1)...(19): siRNA sense strand
cgacucaacacaaucuuca

SEQ ID NO: 779486 - RNA, 19 nt, Homo sapiens
  misc_RNA (1)...(19): siRNA sense strand
ggaugaacucacucuaaug

SEQ ID NO: 779487 - RNA, 19 nt, Homo sapiens
  misc_RNA (1)...(19): siRNA sense strand
gacuaucugcugauucauu

SEQ ID NO: 779488 - RNA, 19 nt, Homo sapiens
  misc_RNA (1)...(19): siRNA sense strand
ucaggugaaugcaaugaag

SEQ ID NO: 779489 - RNA, 19 nt, Homo sapiens
  misc_RNA (1)...(19): siRNA sense strand
gugaacauccagaccaaga

SEQ ID NO: 779490 - RNA, 19 nt, Homo sapiens
  misc_RNA (1)...(19): siRNA sense strand
gaagaagauaaugcaauuc

SEQ ID NO: 779491 - RNA, 19 nt, Homo sapiens
  misc_RNA (1)...(19): siRNA sense strand
gcugugugcugcggaacaa

SEQ ID NO: 779492 - RNA, 19 nt, Homo sapiens
  misc_RNA (1)...(19): siRNA sense strand
ccuaucaggacucucuaua

SEQ ID NO: 779493 - RNA, 19 nt, Homo sapiens
  misc_RNA (1)...(19): siRNA sense strand
gcuggaggcccaaaauaua

SEQ ID NO: 779494 - RNA, 19 nt, Homo sapiens
  misc_RNA (1)...(19): siRNA sense strand
ggacuaauguuccgacguu

SEQ ID NO: 779495 - RNA, 19 nt, Homo sapiens
  misc_RNA (1)...(19): siRNA sense strand
ggucuuagcccaaaugaaa

SEQ ID NO: 779496 - RNA, 19 nt, Homo sapiens
  misc_RNA (1)...(19): siRNA sense strand
caagucaaguugugaaaug

SEQ ID NO: 779497 - RNA, 19 nt, Homo sapiens
  misc_RNA (1)...(19): siRNA sense strand
gaaaggccaugagagaaga

SEQ ID NO: 779498 - RNA, 19 nt, Homo sapiens
  misc_RNA (1)...(19): siRNA sense strand
ggaguuauccugcagaaau

SEQ ID NO: 779499 - RNA, 19 nt, Homo sapiens
  misc_RNA (1)...(19): siRNA sense strand
caaagucauuccuguucua

SEQ ID NO: 779500 - RNA, 19 nt, Homo sapiens
  misc_RNA (1)...(19): siRNA sense strand
ucucauugcucauauagaa

SEQ ID NO: 779501 - RNA, 19 nt, Homo sapiens
  misc_RNA (1)...(19): siRNA sense strand
gaugaaaggccaugagaga

SEQ ID NO: 779502 - RNA, 19 nt, Homo sapiens
  misc_RNA (1)...(19): siRNA sense strand
caauaacucugccuggaau

SEQ ID NO: 779503 - RNA, 19 nt, Homo sapiens
  misc_RNA (1)...(19): siRNA sense strand
aaacuaagaccaggacuaa

SEQ ID NO: 779504 - RNA, 19 nt, Homo sapiens
  misc_RNA (1)...(19): siRNA sense strand
ugagaucucugguuguuuc

SEQ ID NO: 779505 - RNA, 19 nt, Homo sapiens
  misc_RNA (1)...(19): siRNA sense strand
gaguuauccugcagaaaug

SEQ ID NO: 779506 - RNA, 19 nt, Homo sapiens
  misc_RNA (1)...(19): siRNA sense strand
gcaaagucauuccuguucu

SEQ ID NO: 779507 - RNA, 19 nt, Homo sapiens
  misc_RNA (1)...(19): siRNA sense strand
gaaauggugguucacacaa

SEQ ID NO: 779508 - RNA, 19 nt, Homo sapiens
  misc_RNA (1)...(19): siRNA sense strand
gaagggaucagccccaaua

SEQ ID NO: 779509 - RNA, 19 nt, Homo sapiens
  misc_RNA (1)...(19): siRNA sense strand
ggagucucauugcucauau

SEQ ID NO: 779510 - RNA, 19 nt, Homo sapiens
  misc_RNA (1)...(19): siRNA sense strand
gagucucauugcucauaua

SEQ ID NO: 779511 - RNA, 19 nt, Homo sapiens
  misc_RNA (1)...(19): siRNA sense strand
ggacacuaaccaaggauga

SEQ ID NO: 779512 - RNA, 19 nt, Homo sapiens
  misc_RNA (1)...(19): siRNA sense strand
aaugagaucucugguuguu

SEQ ID NO: 779513 - RNA, 19 nt, Homo sapiens
  misc_RNA (1)...(19): siRNA sense strand
gcucucuucuucaaacaau

SEQ ID NO: 779514 - RNA, 19 nt, Homo sapiens
  misc_RNA (1)...(19): siRNA sense strand
caaacuaagaccaggacua

SEQ ID NO: 779515 - RNA, 19 nt, Homo sapiens
  misc_RNA (1)...(19): siRNA sense strand
caaggauucugggaagaug

SEQ ID NO: 779516 - RNA, 19 nt, Homo sapiens
  misc_RNA (1)...(19): siRNA sense strand
ugagaacccuacgucugua

SEQ ID NO: 779517 - RNA, 19 nt, Homo sapiens
  misc_RNA (1)...(19): siRNA sense strand
auucagagacuccuaauau

SEQ ID NO: 779518 - RNA, 19 nt, Homo sapiens
  misc_RNA (1)...(19): siRNA sense strand
ccaauaacucugccuggaa

SEQ ID NO: 779519 - RNA, 19 nt, Homo sapiens
  misc_RNA (1)...(19): siRNA sense strand
gugagaacccuacgucugu

SEQ ID NO: 779520 - RNA, 19 nt, Homo sapiens
  misc_RNA (1)...(19): siRNA sense strand
agucauuccuguucuacaa

SEQ ID NO: 779521 - RNA, 19 nt, Homo sapiens
  misc_RNA (1)...(19): siRNA sense strand
ucucggaucucagaccauu

SEQ ID NO: 779522 - RNA, 19 nt, Homo sapiens
  misc_RNA (1)...(19): siRNA sense strand
gaacccuacgucuguauuc

SEQ ID NO: 779523 - RNA, 19 nt, Homo sapiens
  misc_RNA (1)...(19): siRNA sense strand
agaggacacuaaccaagga

SEQ ID NO: 779524 - RNA, 19 nt, Homo sapiens
  misc_RNA (1)...(19): siRNA sense strand
gagagaagacuaggcaaag

SEQ ID NO: 779525 - RNA, 19 nt, Homo sapiens
  misc_RNA (1)...(19): siRNA sense strand
cugcagaaauggugguuca

SEQ ID NO: 779526 - RNA, 19 nt, Homo sapiens
  misc_RNA (1)...(19): siRNA sense strand
uagcccaaaugaaagcaaa

SEQ ID NO: 779527 - RNA, 19 nt, Homo sapiens
  misc_RNA (1)...(19): siRNA sense strand
caauaacuuucaacagacu

SEQ ID NO: 779528 - RNA, 19 nt, Homo sapiens
  misc_RNA (1)...(19): siRNA sense strand
acuaagaccaggacuaaug

SEQ ID NO: 779529 - RNA, 19 nt, Homo sapiens
  misc_RNA (1)...(19): siRNA sense strand
ugagagaagacuaggcaaa

SEQ ID NO: 779530 - RNA, 19 nt, Homo sapiens
  misc_RNA (1)...(19): siRNA sense strand
ugaaaugagaucucugguu

SEQ ID NO: 779531 - RNA, 19 nt, Homo sapiens
  misc_RNA (1)...(19): siRNA sense strand
gucaaguugugaaaugaga

SEQ ID NO: 779532 - RNA, 19 nt, Homo sapiens
  misc_RNA (1)...(19): siRNA sense strand
cagagacuccuaauaugga

SEQ ID NO: 779533 - RNA, 19 nt, Homo sapiens
  misc_RNA (1)...(19): siRNA sense strand
gaagaugaaaggccaugag

SEQ ID NO: 779534 - RNA, 19 nt, Homo sapiens
  misc_RNA (1)...(19): siRNA sense strand
ggcaaagucauuccuguuc

SEQ ID NO: 779535 - RNA, 19 nt, Homo sapiens
  misc_RNA (1)...(19): siRNA sense strand
gcagaaauggugguucaca

SEQ ID NO: 779536 - RNA, 19 nt, Homo sapiens
  misc_RNA (1)...(19): siRNA sense strand
ccagcucucuucuucaaac

SEQ ID NO: 779537 - RNA, 19 nt, Homo sapiens
  misc_RNA (1)...(19): siRNA sense strand
guucacacaagucaaguug

SEQ ID NO: 779538 - RNA, 19 nt, Homo sapiens
  misc_RNA (1)...(19): siRNA sense strand
ucagagacuccuaauaugg

SEQ ID NO: 779539 - RNA, 19 nt, Homo sapiens
  misc_RNA (1)...(19): siRNA sense strand
uguauucucucggaucuca

SEQ ID NO: 779540 - RNA, 19 nt, Homo sapiens
  misc_RNA (1)...(19): siRNA sense strand
uaucucaggagucucauug

SEQ ID NO: 779541 - RNA, 19 nt, Homo sapiens
  misc_RNA (1)...(19): siRNA sense strand
ugaaaggccaugagagaag

SEQ ID NO: 779542 - RNA, 19 nt, Homo sapiens
  misc_RNA (1)...(19): siRNA sense strand
agagaagacuaggcaaagu

SEQ ID NO: 779543 - RNA, 19 nt, Homo sapiens
  misc_RNA (1)...(19): siRNA sense strand
uucagagacuccuaauaug

SEQ ID NO: 779544 - RNA, 19 nt, Homo sapiens
  misc_RNA (1)...(19): siRNA sense strand
gagaacccuacgucuguau

SEQ ID NO: 779545 - RNA, 19 nt, Homo sapiens
  misc_RNA (1)...(19): siRNA sense strand
gacuaauguuccgacguuu

SEQ ID NO: 779546 - RNA, 19 nt, Homo sapiens
  misc_RNA (1)...(19): siRNA sense strand
aagucaaguugugaaauga

SEQ ID NO: 779547 - RNA, 19 nt, Homo sapiens
  misc_RNA (1)...(19): siRNA sense strand
ucauugcucauauagaaga

SEQ ID NO: 779548 - RNA, 19 nt, Homo sapiens
  misc_RNA (1)...(19): siRNA sense strand
acagucaaaucuagaacag

SEQ ID NO: 779549 - RNA, 19 nt, Homo sapiens
  misc_RNA (1)...(19): siRNA sense strand
cuaagaccaggacuaaugu

SEQ ID NO: 779550 - RNA, 19 nt, Homo sapiens
  misc_RNA (1)...(19): siRNA sense strand
aaaauaugccugacaguga

SEQ ID NO: 779551 - RNA, 19 nt, Homo sapiens
  misc_RNA (1)...(19): siRNA sense strand
ggaagaugaaaggccauga

SEQ ID NO: 779552 - RNA, 19 nt, Homo sapiens
  misc_RNA (1)...(19): siRNA sense strand
guugugaaaugagaucucu

SEQ ID NO: 779553 - RNA, 19 nt, Homo sapiens
  misc_RNA (1)...(19): siRNA sense strand
aaauggugguucacacaag

SEQ ID NO: 779554 - RNA, 19 nt, Homo sapiens
  misc_RNA (1)...(19): siRNA sense strand
gauggucuuagcccaaaug

SEQ ID NO: 779555 - RNA, 19 nt, Homo sapiens
  misc_RNA (1)...(19): siRNA sense strand
uuccuguucuacaaacuaa

SEQ ID NO: 779556 - RNA, 19 nt, Homo sapiens
  misc_RNA (1)...(19): siRNA sense strand
aagaugaaaggccaugaga

SEQ ID NO: 779557 - RNA, 19 nt, Homo sapiens
  misc_RNA (1)...(19): siRNA sense strand
caccaaaccuaucagcuuu

SEQ ID NO: 779558 - RNA, 19 nt, Homo sapiens
  misc_RNA (1)...(19): siRNA sense strand
gcacaacagggucuucuuu

SEQ ID NO: 779559 - RNA, 19 nt, Homo sapiens
  misc_RNA (1)...(19): siRNA sense strand
ccaguuagauauuaugaca

SEQ ID NO: 779560 - RNA, 19 nt, Homo sapiens
  misc_RNA (1)...(19): siRNA sense strand
ggacuuuguugugucauga

SEQ ID NO: 779561 - RNA, 19 nt, Homo sapiens
  misc_RNA (1)...(19): siRNA sense strand
gaacucaaccagcacaaca

SEQ ID NO: 779562 - RNA, 19 nt, Homo sapiens
  misc_RNA (1)...(19): siRNA sense strand
acaacagggucuucuuuga

SEQ ID NO: 779563 - RNA, 19 nt, Homo sapiens
  misc_RNA (1)...(19): siRNA sense strand
cguuggagcugauccgaaa

SEQ ID NO: 779564 - RNA, 19 nt, Homo sapiens
  misc_RNA (1)...(19): siRNA sense strand
aacagggucuucuuugauu

SEQ ID NO: 779565 - RNA, 19 nt, Homo sapiens
  misc_RNA (1)...(19): siRNA sense strand
gcucaaauggcaagacgaa

SEQ ID NO: 779566 - RNA, 19 nt, Homo sapiens
  misc_RNA (1)...(19): siRNA sense strand
gcgacggcuucuucacuaa

SEQ ID NO: 779567 - RNA, 19 nt, Homo sapiens
  misc_RNA (1)...(19): siRNA sense strand
caacagggucuucuuugau

SEQ ID NO: 779568 - RNA, 19 nt, Homo sapiens
  misc_RNA (1)...(19): siRNA sense strand
uucgagagguggucaguuu

SEQ ID NO: 779569 - RNA, 19 nt, Homo sapiens
  misc_RNA (1)...(19): siRNA sense strand
ccaccaaaccuaucagcuu

SEQ ID NO: 779570 - RNA, 19 nt, Homo sapiens
  misc_RNA (1)...(19): siRNA sense strand
aaagugggcagcucaaaug

SEQ ID NO: 779571 - RNA, 19 nt, Homo sapiens
  misc_RNA (1)...(19): siRNA sense strand
caaagugggcagcucaaau

SEQ ID NO: 779572 - RNA, 19 nt, Homo sapiens
  misc_RNA (1)...(19): siRNA sense strand
ccaaaccuaucagcuuuua

SEQ ID NO: 779573 - RNA, 19 nt, Homo sapiens
  misc_RNA (1)...(19): siRNA sense strand
ucaaagaugaagaagaaga

SEQ ID NO: 779574 - RNA, 19 nt, Homo sapiens
  misc_RNA (1)...(19): siRNA sense strand
gcaaagugggcagcucaaa

SEQ ID NO: 779575 - RNA, 19 nt, Homo sapiens
  misc_RNA (1)...(19): siRNA sense strand
ugacaaggacaccaccaaa

SEQ ID NO: 779576 - RNA, 19 nt, Homo sapiens
  misc_RNA (1)...(19): siRNA sense strand
ggacaccaccaaaccuauc

SEQ ID NO: 779577 - RNA, 19 nt, Homo sapiens
  misc_RNA (1)...(19): siRNA sense strand
ggaggauggcuuuaaugug

SEQ ID NO: 779578 - RNA, 19 nt, Homo sapiens
  misc_RNA (1)...(19): siRNA sense strand
gggaugagcgcucguacca

SEQ ID NO: 779579 - RNA, 19 nt, Homo sapiens
  misc_RNA (1)...(19): siRNA sense strand
ugcgacggcuucuucacua

SEQ ID NO: 779580 - RNA, 19 nt, Homo sapiens
  misc_RNA (1)...(19): siRNA sense strand
caaagaugaagaagaagag

SEQ ID NO: 779581 - RNA, 19 nt, Homo sapiens
  misc_RNA (1)...(19): siRNA sense strand
gggaaggagcaucaaagau

SEQ ID NO: 779582 - RNA, 19 nt, Homo sapiens
  misc_RNA (1)...(19): siRNA sense strand
gccuggugcucugguauga

SEQ ID NO: 779583 - RNA, 19 nt, Homo sapiens
  misc_RNA (1)...(19): siRNA sense strand
acacagacaagucguugga

SEQ ID NO: 779584 - RNA, 19 nt, Homo sapiens
  misc_RNA (1)...(19): siRNA sense strand
cuuggaggauggcuuuaau

SEQ ID NO: 779585 - RNA, 19 nt, Homo sapiens
  misc_RNA (1)...(19): siRNA sense strand
uccuggcguuggcaauuua

SEQ ID NO: 779586 - RNA, 19 nt, Homo sapiens
  misc_RNA (1)...(19): siRNA sense strand
acaagucguuggagcugau

SEQ ID NO: 779587 - RNA, 19 nt, Homo sapiens
  misc_RNA (1)...(19): siRNA sense strand
cacaacagggucuucuuug

SEQ ID NO: 779588 - RNA, 19 nt, Homo sapiens
  misc_RNA (1)...(19): siRNA sense strand
gcuuggaggauggcuuuaa

SEQ ID NO: 779589 - RNA, 19 nt, Homo sapiens
  misc_RNA (1)...(19): siRNA sense strand
caucacagaguggaaugaa

SEQ ID NO: 779590 - RNA, 19 nt, Homo sapiens
  misc_RNA (1)...(19): siRNA sense strand
ccuaucagcuuuuacuugu

SEQ ID NO: 779591 - RNA, 19 nt, Homo sapiens
  misc_RNA (1)...(19): siRNA sense strand
cgggaaggagcaucaaaga

SEQ ID NO: 779592 - RNA, 19 nt, Homo sapiens
  misc_RNA (1)...(19): siRNA sense strand
ucaaauggcaagacgaacu

SEQ ID NO: 779593 - RNA, 19 nt, Homo sapiens
  misc_RNA (1)...(19): siRNA sense strand
gcuucuucacuaacuauaa

SEQ ID NO: 779594 - RNA, 19 nt, Homo sapiens
  misc_RNA (1)...(19): siRNA sense strand
gacaaggacaccaccaaac

SEQ ID NO: 779595 - RNA, 19 nt, Homo sapiens
  misc_RNA (1)...(19): siRNA sense strand
caaauggcaagacgaacuc

SEQ ID NO: 779596 - RNA, 19 nt, Homo sapiens
  misc_RNA (1)...(19): siRNA sense strand
ccgcuuggaggauggcuuu

SEQ ID NO: 779597 - RNA, 19 nt, Homo sapiens
  misc_RNA (1)...(19): siRNA sense strand
gcuucuccguggcuuuguu

SEQ ID NO: 779598 - RNA, 19 nt, Homo sapiens
  misc_RNA (1)...(19): siRNA sense strand
uggaggauggcuuuaaugu

SEQ ID NO: 779599 - RNA, 19 nt, Homo sapiens
  misc_RNA (1)...(19): siRNA sense strand
guacgugggcguggaugug

SEQ ID NO: 779600 - RNA, 19 nt, Homo sapiens
  misc_RNA (1)...(19): siRNA sense strand
aggaggagcaggaggauca

SEQ ID NO: 779601 - RNA, 19 nt, Homo sapiens
  misc_RNA (1)...(19): siRNA sense strand
aaggacaccaccaaaccua

SEQ ID NO: 779602 - RNA, 19 nt, Homo sapiens
  misc_RNA (1)...(19): siRNA sense strand
ugcgguaccucaccacaca

SEQ ID NO: 779603 - RNA, 19 nt, Homo sapiens
  misc_RNA (1)...(19): siRNA sense strand
ugaucaacaucgagaacuc

SEQ ID NO: 779604 - RNA, 19 nt, Homo sapiens
  misc_RNA (1)...(19): siRNA sense strand
ggaauaauauguccaaguu

SEQ ID NO: 779605 - RNA, 19 nt, Homo sapiens
  misc_RNA (1)...(19): siRNA sense strand
gauacaagcuacaacaaca

SEQ ID NO: 779606 - RNA, 19 nt, Homo sapiens
  misc_RNA (1)...(19): siRNA sense strand
ggacagacuggaauaauau

SEQ ID NO: 779607 - RNA, 19 nt, Homo sapiens
  misc_RNA (1)...(19): siRNA sense strand
caacauaugauacaagcua

SEQ ID NO: 779608 - RNA, 19 nt, Homo sapiens
  misc_RNA (1)...(19): siRNA sense strand
uggacagacuggaauaaua

SEQ ID NO: 779609 - RNA, 19 nt, Homo sapiens
  misc_RNA (1)...(19): siRNA sense strand
ggauggcgaugcaccacua

SEQ ID NO: 779610 - RNA, 19 nt, Homo sapiens
  misc_RNA (1)...(19): siRNA sense strand
ggacacuacuuugaaacaa

SEQ ID NO: 779611 - RNA, 19 nt, Homo sapiens
  misc_RNA (1)...(19): siRNA sense strand
cgauacaaaugcacagaaa

SEQ ID NO: 779612 - RNA, 19 nt, Homo sapiens
  misc_RNA (1)...(19): siRNA sense strand
ccacuaaugagaauaccua

SEQ ID NO: 779613 - RNA, 19 nt, Homo sapiens
  misc_RNA (1)...(19): siRNA sense strand
agauaugaccugaggaaua

SEQ ID NO: 779614 - RNA, 19 nt, Homo sapiens
  misc_RNA (1)...(19): siRNA sense strand
aaagauaugaccugaggaa

SEQ ID NO: 779615 - RNA, 19 nt, Homo sapiens
  misc_RNA (1)...(19): siRNA sense strand
acccuugccuucccaguuu

SEQ ID NO: 779616 - RNA, 19 nt, Homo sapiens
  misc_RNA (1)...(19): siRNA sense strand
ggcgaugcaccacuaauga

SEQ ID NO: 779617 - RNA, 19 nt, Homo sapiens
  misc_RNA (1)...(19): siRNA sense strand
acacuacuuugaaacaaca

SEQ ID NO: 779618 - RNA, 19 nt, Homo sapiens
  misc_RNA (1)...(19): siRNA sense strand
ggaaccaggaaagauauga

SEQ ID NO: 779619 - RNA, 19 nt, Homo sapiens
  misc_RNA (1)...(19): siRNA sense strand
ccaguuuggacacuacuuu

SEQ ID NO: 779620 - RNA, 19 nt, Homo sapiens
  misc_RNA (1)...(19): siRNA sense strand
gcagauggccauggugaag

SEQ ID NO: 779621 - RNA, 19 nt, Homo sapiens
  misc_RNA (1)...(19): siRNA sense strand
aaaugccacuuucaacaca

SEQ ID NO: 779622 - RNA, 19 nt, Homo sapiens
  misc_RNA (1)...(19): siRNA sense strand
gcaccacuaaugagaauac

SEQ ID NO: 779623 - RNA, 19 nt, Homo sapiens
  misc_RNA (1)...(19): siRNA sense strand
cacuguggcagccuuguua

SEQ ID NO: 779624 - RNA, 19 nt, Homo sapiens
  misc_RNA (1)...(19): siRNA sense strand
gacacuacuuugaaacaac

SEQ ID NO: 779625 - RNA, 19 nt, Homo sapiens
  misc_RNA (1)...(19): siRNA sense strand
uaaugcagauggccauggu

SEQ ID NO: 779626 - RNA, 19 nt, Homo sapiens
  misc_RNA (1)...(19): siRNA sense strand
gaauaucgugcagcccaaa

SEQ ID NO: 779627 - RNA, 19 nt, Homo sapiens
  misc_RNA (1)...(19): siRNA sense strand
acaucaaccugaacuggau

SEQ ID NO: 779628 - RNA, 19 nt, Homo sapiens
  misc_RNA (1)...(19): siRNA sense strand
uuuggacacuacuuugaaa

SEQ ID NO: 779629 - RNA, 19 nt, Homo sapiens
  misc_RNA (1)...(19): siRNA sense strand
gaugcaccacuaaugagaa

SEQ ID NO: 779630 - RNA, 19 nt, Homo sapiens
  misc_RNA (1)...(19): siRNA sense strand
caguauggauggcgaugca

SEQ ID NO: 779631 - RNA, 19 nt, Homo sapiens
  misc_RNA (1)...(19): siRNA sense strand
uacaagcuacaacaacaaa

SEQ ID NO: 779632 - RNA, 19 nt, Homo sapiens
  misc_RNA (1)...(19): siRNA sense strand
cagugucucugcugcucaa

SEQ ID NO: 779633 - RNA, 19 nt, Homo sapiens
  misc_RNA (1)...(19): siRNA sense strand
caaaaugccacuuucaaca

SEQ ID NO: 779634 - RNA, 19 nt, Homo sapiens
  misc_RNA (1)...(19): siRNA sense strand
cgaugcaccacuaaugaga

SEQ ID NO: 779635 - RNA, 19 nt, Homo sapiens
  misc_RNA (1)...(19): siRNA sense strand
guggcagccuuguuaaugc

SEQ ID NO: 779636 - RNA, 19 nt, Homo sapiens
  misc_RNA (1)...(19): siRNA sense strand
uaugauacaagcuacaaca

SEQ ID NO: 779637 - RNA, 19 nt, Homo sapiens
  misc_RNA (1)...(19): siRNA sense strand
cauaugauacaagcuacaa

SEQ ID NO: 779638 - RNA, 19 nt, Homo sapiens
  misc_RNA (1)...(19): siRNA sense strand
guuuggacacuacuuugaa

SEQ ID NO: 779639 - RNA, 19 nt, Homo sapiens
  misc_RNA (1)...(19): siRNA sense strand
ccucacaaacccacacugu

SEQ ID NO: 779640 - RNA, 19 nt, Homo sapiens
  misc_RNA (1)...(19): siRNA sense strand
caacaaaaugccacuuuca

SEQ ID NO: 779641 - RNA, 19 nt, Homo sapiens
  misc_RNA (1)...(19): siRNA sense strand
agcgagagccucacugguu

SEQ ID NO: 779642 - RNA, 19 nt, Homo sapiens
  misc_RNA (1)...(19): siRNA sense strand
ggacauacgugaacaaauu

SEQ ID NO: 779643 - RNA, 19 nt, Homo sapiens
  misc_RNA (1)...(19): siRNA sense strand
gaacgggauuguuuaauaa

SEQ ID NO: 779644 - RNA, 19 nt, Homo sapiens
  misc_RNA (1)...(19): siRNA sense strand
ggaaucaccugguucaaga

SEQ ID NO: 779645 - RNA, 19 nt, Homo sapiens
  misc_RNA (1)...(19): siRNA sense strand
gcagagccuuccuccauua

SEQ ID NO: 779646 - RNA, 19 nt, Homo sapiens
  misc_RNA (1)...(19): siRNA sense strand
ggacaucccugaagagcuu

SEQ ID NO: 779647 - RNA, 19 nt, Homo sapiens
  misc_RNA (1)...(19): siRNA sense strand
agaacgggauuguuuaaua

SEQ ID NO: 779648 - RNA, 19 nt, Homo sapiens
  misc_RNA (1)...(19): siRNA sense strand
ccagaguccucguggauuu

SEQ ID NO: 779649 - RNA, 19 nt, Homo sapiens
  misc_RNA (1)...(19): siRNA sense strand
ggacacacccggaccagaa

SEQ ID NO: 779650 - RNA, 19 nt, Homo sapiens
  misc_RNA (1)...(19): siRNA sense strand
gaacuacaguguccccaua

SEQ ID NO: 779651 - RNA, 19 nt, Homo sapiens
  misc_RNA (1)...(19): siRNA sense strand
ggcaguaggugucuccaaa

SEQ ID NO: 779652 - RNA, 19 nt, Homo sapiens
  misc_RNA (1)...(19): siRNA sense strand
uaaaguggacccugauaaa

SEQ ID NO: 779653 - RNA, 19 nt, Homo sapiens
  misc_RNA (1)...(19): siRNA sense strand
caucaaagaccuagacguu

SEQ ID NO: 779654 - RNA, 19 nt, Homo sapiens
  misc_RNA (1)...(19): siRNA sense strand
gagaaaauccccauacuga

SEQ ID NO: 779655 - RNA, 19 nt, Homo sapiens
  misc_RNA (1)...(19): siRNA sense strand
ucaaagaccuagacguuuu

SEQ ID NO: 779656 - RNA, 19 nt, Homo sapiens
  misc_RNA (1)...(19): siRNA sense strand
gaucuggaauaugccauga

SEQ ID NO: 779657 - RNA, 19 nt, Homo sapiens
  misc_RNA (1)...(19): siRNA sense strand
cgacaucacuguggacuac

SEQ ID NO: 779658 - RNA, 19 nt, Homo sapiens
  misc_RNA (1)...(19): siRNA sense strand
cacaggauacccaacuuua

SEQ ID NO: 779659 - RNA, 19 nt, Homo sapiens
  misc_RNA (1)...(19): siRNA sense strand
ccagagcacaggaaguuaa

SEQ ID NO: 779660 - RNA, 19 nt, Homo sapiens
  misc_RNA (1)...(19): siRNA sense strand
gcgcagagccuuccuccau

SEQ ID NO: 779661 - RNA, 19 nt, Homo sapiens
  misc_RNA (1)...(19): siRNA sense strand
caaugggaaucaccugguu

SEQ ID NO: 779662 - RNA, 19 nt, Homo sapiens
  misc_RNA (1)...(19): siRNA sense strand
gacauacgugaacaaauuu

SEQ ID NO: 779663 - RNA, 19 nt, Homo sapiens
  misc_RNA (1)...(19): siRNA sense strand
gccuggagaugauggagaa

SEQ ID NO: 779664 - RNA, 19 nt, Homo sapiens
  misc_RNA (1)...(19): siRNA sense strand
ugagaacgggauuguuuaa

SEQ ID NO: 779665 - RNA, 19 nt, Homo sapiens
  misc_RNA (1)...(19): siRNA sense strand
ccucguggauuuaguugug

SEQ ID NO: 779666 - RNA, 19 nt, Homo sapiens
  misc_RNA (1)...(19): siRNA sense strand
gagcacaggaaguuaaagu

SEQ ID NO: 779667 - RNA, 19 nt, Homo sapiens
  misc_RNA (1)...(19): siRNA sense strand
cuacgccgaucuggaauau

SEQ ID NO: 779668 - RNA, 19 nt, Homo sapiens
  misc_RNA (1)...(19): siRNA sense strand
gaaaaugugccaccucuca

SEQ ID NO: 779669 - RNA, 19 nt, Homo sapiens
  misc_RNA (1)...(19): siRNA sense strand
ucacaggauacccaacuuu

SEQ ID NO: 779670 - RNA, 19 nt, Homo sapiens
  misc_RNA (1)...(19): siRNA sense strand
gaccagaaaccaauuccau

SEQ ID NO: 779671 - RNA, 19 nt, Homo sapiens
  misc_RNA (1)...(19): siRNA sense strand
ucuggaauaugccaugaug

SEQ ID NO: 779672 - RNA, 19 nt, Homo sapiens
  misc_RNA (1)...(19): siRNA sense strand
gggauuguuuaauaagauc

SEQ ID NO: 779673 - RNA, 19 nt, Homo sapiens
  misc_RNA (1)...(19): siRNA sense strand
uuaaaguggacccugauaa

SEQ ID NO: 779674 - RNA, 19 nt, Homo sapiens
  misc_RNA (1)...(19): siRNA sense strand
acugagaacgggauuguuu

SEQ ID NO: 779675 - RNA, 19 nt, Homo sapiens
  misc_RNA (1)...(19): siRNA sense strand
acaggauacccaacuuuaa

SEQ ID NO: 779676 - RNA, 19 nt, Homo sapiens
  misc_RNA (1)...(19): siRNA sense strand
caguaggugucuccaaaca

SEQ ID NO: 779677 - RNA, 19 nt, Homo sapiens
  misc_RNA (1)...(19): siRNA sense strand
guuaaaguggacccugaua

SEQ ID NO: 779678 - RNA, 19 nt, Homo sapiens
  misc_RNA (1)...(19): siRNA sense strand
cgcagagccuuccuccauu

SEQ ID NO: 779679 - RNA, 19 nt, Homo sapiens
  misc_RNA (1)...(19): siRNA sense strand
gaacaaauuuggggcuaca

SEQ ID NO: 779680 - RNA, 19 nt, Homo sapiens
  misc_RNA (1)...(19): siRNA sense strand
cgggauuguuuaauaagau

SEQ ID NO: 779681 - RNA, 19 nt, Homo sapiens
  misc_RNA (1)...(19): siRNA sense strand
caaacaggacauacgugaa

SEQ ID NO: 779682 - RNA, 19 nt, Homo sapiens
  misc_RNA (1)...(19): siRNA sense strand
caggauacccaacuuuaag

SEQ ID NO: 779683 - RNA, 19 nt, Homo sapiens
  misc_RNA (1)...(19): siRNA sense strand
cugagaacgggauuguuua

SEQ ID NO: 779684 - RNA, 19 nt, Homo sapiens
  misc_RNA (1)...(19): siRNA sense strand
gcuacgccgaucuggaaua

SEQ ID NO: 779685 - RNA, 19 nt, Homo sapiens
  misc_RNA (1)...(19): siRNA sense strand
cagagcacaggaaguuaaa

SEQ ID NO: 779686 - RNA, 19 nt, Homo sapiens
  misc_RNA (1)...(19): siRNA sense strand
aagaucagccuggagauga

SEQ ID NO: 779687 - RNA, 19 nt, Homo sapiens
  misc_RNA (1)...(19): siRNA sense strand
caagaucagccuggagaug

SEQ ID NO: 779688 - RNA, 19 nt, Homo sapiens
  misc_RNA (1)...(19): siRNA sense strand
guuccaacaccacgacuga

SEQ ID NO: 779689 - RNA, 19 nt, Homo sapiens
  misc_RNA (1)...(19): siRNA sense strand
aaacaggacauacgugaac

SEQ ID NO: 779690 - RNA, 19 nt, Homo sapiens
  misc_RNA (1)...(19): siRNA sense strand
gagaacgggauuguuuaau

SEQ ID NO: 779691 - RNA, 19 nt, Homo sapiens
  misc_RNA (1)...(19): siRNA sense strand
ccaaagccaaugggaauca

SEQ ID NO: 779692 - RNA, 19 nt, Homo sapiens
  misc_RNA (1)...(19): siRNA sense strand
gcaagcgcccaaagccaau

SEQ ID NO: 779693 - RNA, 19 nt, Homo sapiens
  misc_RNA (1)...(19): siRNA sense strand
gacuacauccucacuccaa

SEQ ID NO: 779694 - RNA, 19 nt, Homo sapiens
  misc_RNA (1)...(19): siRNA sense strand
cagaguccucguggauuua

SEQ ID NO: 779695 - RNA, 19 nt, Homo sapiens
  misc_RNA (1)...(19): siRNA sense strand
cgacugagaacgggauugu

SEQ ID NO: 779696 - RNA, 19 nt, Homo sapiens
  misc_RNA (1)...(19): siRNA sense strand
gacacacccggaccagaaa

SEQ ID NO: 779697 - RNA, 19 nt, Homo sapiens
  misc_RNA (1)...(19): siRNA sense strand
gggaaucaccugguucaag

SEQ ID NO: 779698 - RNA, 19 nt, Homo sapiens
  misc_RNA (1)...(19): siRNA sense strand
ccaacaccacgacugagaa

SEQ ID NO: 779699 - RNA, 19 nt, Homo sapiens
  misc_RNA (1)...(19): siRNA sense strand
gagaaucgggaagggagaa

SEQ ID NO: 779700 - RNA, 19 nt, Homo sapiens
  misc_RNA (1)...(19): siRNA sense strand
caggacauacgugaacaaa

SEQ ID NO: 779701 - RNA, 19 nt, Homo sapiens
  misc_RNA (1)...(19): siRNA sense strand
cagaaaccaauuccaugga

SEQ ID NO: 779702 - RNA, 19 nt, Homo sapiens
  misc_RNA (1)...(19): siRNA sense strand
acgccgaucuggaauaugc

SEQ ID NO: 779703 - RNA, 19 nt, Homo sapiens
  misc_RNA (1)...(19): siRNA sense strand
gcuugcagccgauguuuac

SEQ ID NO: 779704 - RNA, 19 nt, Homo sapiens
  misc_RNA (1)...(19): siRNA sense strand
gccagagcacaggaaguua

SEQ ID NO: 779705 - RNA, 19 nt, Homo sapiens
  misc_RNA (1)...(19): siRNA sense strand
ucguggacaucccugaaga

SEQ ID NO: 779706 - RNA, 19 nt, Homo sapiens
  misc_RNA (1)...(19): siRNA sense strand
ggucguggacaucccugaa

SEQ ID NO: 779707 - RNA, 19 nt, Homo sapiens
  misc_RNA (1)...(19): siRNA sense strand
aggcuacgccgaucuggaa

SEQ ID NO: 779708 - RNA, 19 nt, Homo sapiens
  misc_RNA (1)...(19): siRNA sense strand
acgggauuguuuaauaaga

SEQ ID NO: 779709 - RNA, 19 nt, Homo sapiens
  misc_RNA (1)...(19): siRNA sense strand
aaacaucaaagaccuagac

SEQ ID NO: 779710 - RNA, 19 nt, Homo sapiens
  misc_RNA (1)...(19): siRNA sense strand
ugcagccgauguuuacguu

SEQ ID NO: 779711 - RNA, 19 nt, Homo sapiens
  misc_RNA (1)...(19): siRNA sense strand
ugccagagcacaggaaguu

SEQ ID NO: 779712 - RNA, 19 nt, Homo sapiens
  misc_RNA (1)...(19): siRNA sense strand
gcacucaccauccuuauca

SEQ ID NO: 779713 - RNA, 19 nt, Homo sapiens
  misc_RNA (1)...(19): siRNA sense strand
gcuguuccgugaccucuuu

SEQ ID NO: 779714 - RNA, 19 nt, Homo sapiens
  misc_RNA (1)...(19): siRNA sense strand
ggccagacaucguacucua

SEQ ID NO: 779715 - RNA, 19 nt, Homo sapiens
  misc_RNA (1)...(19): siRNA sense strand
ccagacaucguacucuaua

SEQ ID NO: 779716 - RNA, 19 nt, Homo sapiens
  misc_RNA (1)...(19): siRNA sense strand
guggacagaugccuaccua

SEQ ID NO: 779717 - RNA, 19 nt, Homo sapiens
  misc_RNA (1)...(19): siRNA sense strand
ccaccugaguuaucuccua

SEQ ID NO: 779718 - RNA, 19 nt, Homo sapiens
  misc_RNA (1)...(19): siRNA sense strand
ucaugaaccugcauuacug

SEQ ID NO: 779719 - RNA, 19 nt, Homo sapiens
  misc_RNA (1)...(19): siRNA sense strand
caacagcacucaccauccu

SEQ ID NO: 779720 - RNA, 19 nt, Homo sapiens
  misc_RNA (1)...(19): siRNA sense strand
caucguacucuauaacaaa

SEQ ID NO: 779721 - RNA, 19 nt, Homo sapiens
  misc_RNA (1)...(19): siRNA sense strand
ucaccauccuuaucaugaa

SEQ ID NO: 779722 - RNA, 19 nt, Homo sapiens
  misc_RNA (1)...(19): siRNA sense strand
cagacaucguacucuauaa

SEQ ID NO: 779723 - RNA, 19 nt, Homo sapiens
  misc_RNA (1)...(19): siRNA sense strand
gugcugacccuguaucugu

SEQ ID NO: 779724 - RNA, 19 nt, Homo sapiens
  misc_RNA (1)...(19): siRNA sense strand
cggcaggaguggacagaug

SEQ ID NO: 779725 - RNA, 19 nt, Homo sapiens
  misc_RNA (1)...(19): siRNA sense strand
acagaugccuaccuacgau

SEQ ID NO: 779726 - RNA, 19 nt, Homo sapiens
  misc_RNA (1)...(19): siRNA sense strand
gcucaccgucuuccaguug

SEQ ID NO: 779727 - RNA, 19 nt, Homo sapiens
  misc_RNA (1)...(19): siRNA sense strand
gacagaugccuaccuacga

SEQ ID NO: 779728 - RNA, 19 nt, Homo sapiens
  misc_RNA (1)...(19): siRNA sense strand
aguacuacauggccacuau

SEQ ID NO: 779729 - RNA, 19 nt, Homo sapiens
  misc_RNA (1)...(19): siRNA sense strand
uggcggacuucguggagaa

SEQ ID NO: 779730 - RNA, 19 nt, Homo sapiens
  misc_RNA (1)...(19): siRNA sense strand
gcaccacguagccaccauu

SEQ ID NO: 779731 - RNA, 19 nt, Homo sapiens
  misc_RNA (1)...(19): siRNA sense strand
gacaucguacucuauaaca

SEQ ID NO: 779732 - RNA, 19 nt, Homo sapiens
  misc_RNA (1)...(19): siRNA sense strand
acagcacucaccauccuua

SEQ ID NO: 779733 - RNA, 19 nt, Homo sapiens
  misc_RNA (1)...(19): siRNA sense strand
ggcuggcucucaagcuguu

SEQ ID NO: 779734 - RNA, 19 nt, Homo sapiens
  misc_RNA (1)...(19): siRNA sense strand
acaucguacucuauaacaa

SEQ ID NO: 779735 - RNA, 19 nt, Homo sapiens
  misc_RNA (1)...(19): siRNA sense strand
ugaccucuuugccaacuac

SEQ ID NO: 779736 - RNA, 19 nt, Homo sapiens
  misc_RNA (1)...(19): siRNA sense strand
gagaagacguggaacaucu

SEQ ID NO: 779737 - RNA, 19 nt, Homo sapiens
  misc_RNA (1)...(19): siRNA sense strand
guaaagaucauccgcaguu

SEQ ID NO: 779738 - RNA, 19 nt, Homo sapiens
  misc_RNA (1)...(19): siRNA sense strand
ucauugagguaucuaaaga

SEQ ID NO: 779739 - RNA, 19 nt, Homo sapiens
  misc_RNA (1)...(19): siRNA sense strand
caggacagcuccaccaaca

SEQ ID NO: 779740 - RNA, 19 nt, Homo sapiens
  misc_RNA (1)...(19): siRNA sense strand
cuacguggaugguggcauu

SEQ ID NO: 779741 - RNA, 19 nt, Homo sapiens
  misc_RNA (1)...(19): siRNA sense strand
cagacaaccugccacucua

SEQ ID NO: 779742 - RNA, 19 nt, Homo sapiens
  misc_RNA (1)...(19): siRNA sense strand
uaaagaucauccgcaguuu

SEQ ID NO: 779743 - RNA, 19 nt, Homo sapiens
  misc_RNA (1)...(19): siRNA sense strand
ggacagcuccaccaacauc

SEQ ID NO: 779744 - RNA, 19 nt, Homo sapiens
  misc_RNA (1)...(19): siRNA sense strand
gggcgagagugacaucugu

SEQ ID NO: 779745 - RNA, 19 nt, Homo sapiens
  misc_RNA (1)...(19): siRNA sense strand
ucuaugagcuuaagaacac

SEQ ID NO: 779746 - RNA, 19 nt, Homo sapiens
  misc_RNA (1)...(19): siRNA sense strand
gucauuauaucccacuuca

SEQ ID NO: 779747 - RNA, 19 nt, Homo sapiens
  misc_RNA (1)...(19): siRNA sense strand
gcgcccaagcggaggauua

SEQ ID NO: 779748 - RNA, 19 nt, Homo sapiens
  misc_RNA (1)...(19): siRNA sense strand
gaugguggcauuucagaca

SEQ ID NO: 779749 - RNA, 19 nt, Homo sapiens
  misc_RNA (1)...(19): siRNA sense strand
ugaccacccucuccaacau

SEQ ID NO: 779750 - RNA, 19 nt, Homo sapiens
  misc_RNA (1)...(19): siRNA sense strand
gagcuuaagaacaccauca

SEQ ID NO: 779751 - RNA, 19 nt, Homo sapiens
  misc_RNA (1)...(19): siRNA sense strand
ccaaguucauugagguauc

SEQ ID NO: 779752 - RNA, 19 nt, Homo sapiens
  misc_RNA (1)...(19): siRNA sense strand
caaguucauugagguaucu

SEQ ID NO: 779753 - RNA, 19 nt, Homo sapiens
  misc_RNA (1)...(19): siRNA sense strand
gagcagacgggcagcaucu

SEQ ID NO: 779754 - RNA, 19 nt, Homo sapiens
  misc_RNA (1)...(19): siRNA sense strand
ccuucaaccugguaaagau

SEQ ID NO: 779755 - RNA, 19 nt, Homo sapiens
  misc_RNA (1)...(19): siRNA sense strand
caacaccagcauccaguuc

SEQ ID NO: 779756 - RNA, 19 nt, Homo sapiens
  misc_RNA (1)...(19): siRNA sense strand
guucauugagguaucuaaa

SEQ ID NO: 779757 - RNA, 19 nt, Homo sapiens
  misc_RNA (1)...(19): siRNA sense strand
gggauggccugcgcuuucu

SEQ ID NO: 779758 - RNA, 19 nt, Homo sapiens
  misc_RNA (1)...(19): siRNA sense strand
cauuauaucccacuucaac

SEQ ID NO: 779759 - RNA, 19 nt, Homo sapiens
  misc_RNA (1)...(19): siRNA sense strand
ucagacaaccugccacucu

SEQ ID NO: 779760 - RNA, 19 nt, Homo sapiens
  misc_RNA (1)...(19): siRNA sense strand
acaccagcauccaguucaa

SEQ ID NO: 779761 - RNA, 19 nt, Homo sapiens
  misc_RNA (1)...(19): siRNA sense strand
gagcugcgggucaccaaca

SEQ ID NO: 779762 - RNA, 19 nt, Homo sapiens
  misc_RNA (1)...(19): siRNA sense strand
gcgagaagacguggaacau

SEQ ID NO: 779763 - RNA, 19 nt, Homo sapiens
  misc_RNA (1)...(19): siRNA sense strand
uuaagaacaccaucacagu

SEQ ID NO: 779764 - RNA, 19 nt, Homo sapiens
  misc_RNA (1)...(19): siRNA sense strand
agacguggaacaucucguu

SEQ ID NO: 779765 - RNA, 19 nt, Homo sapiens
  misc_RNA (1)...(19): siRNA sense strand
ccaacgccacgcacaucua

SEQ ID NO: 779766 - RNA, 19 nt, Homo sapiens
  misc_RNA (1)...(19): siRNA sense strand
gagcucauccaggccaaug

SEQ ID NO: 779767 - RNA, 19 nt, Homo sapiens
  misc_RNA (1)...(19): siRNA sense strand
gcuggugccaaguucauug

SEQ ID NO: 779768 - RNA, 19 nt, Homo sapiens
  misc_RNA (1)...(19): siRNA sense strand
caacgccacgcacaucuac

SEQ ID NO: 779769 - RNA, 19 nt, Homo sapiens
  misc_RNA (1)...(19): siRNA sense strand
cugccacucuaugagcuua

SEQ ID NO: 779770 - RNA, 19 nt, Homo sapiens
  misc_RNA (1)...(19): siRNA sense strand
ugaggcuggugccaaguuc

SEQ ID NO: 779771 - RNA, 19 nt, Homo sapiens
  misc_RNA (1)...(19): siRNA sense strand
cguggaugguggcauuuca

SEQ ID NO: 779772 - RNA, 19 nt, Homo sapiens
  misc_RNA (1)...(19): siRNA sense strand
ugucagacggcgagaaugu

SEQ ID NO: 779773 - RNA, 19 nt, Homo sapiens
  misc_RNA (1)...(19): siRNA sense strand
gguccugccugcugauagc

SEQ ID NO: 779774 - RNA, 19 nt, Homo sapiens
  misc_RNA (1)...(19): siRNA sense strand
gacaaccugccacucuaug

SEQ ID NO: 779775 - RNA, 19 nt, Homo sapiens
  misc_RNA (1)...(19): siRNA sense strand
ugagggaauucagcaaaga

SEQ ID NO: 779776 - RNA, 19 nt, Homo sapiens
  misc_RNA (1)...(19): siRNA sense strand
ggugagggaauucagcaaa

SEQ ID NO: 779777 - RNA, 19 nt, Homo sapiens
  misc_RNA (1)...(19): siRNA sense strand
gaugagggaagaugagaag

SEQ ID NO: 779778 - RNA, 19 nt, Homo sapiens
  misc_RNA (1)...(19): siRNA sense strand
gugagggaauucagcaaag

SEQ ID NO: 779779 - RNA, 19 nt, Homo sapiens
  misc_RNA (1)...(19): siRNA sense strand
gagaugagggaagaugaga

SEQ ID NO: 779780 - RNA, 19 nt, Homo sapiens
  misc_RNA (1)...(19): siRNA sense strand
gggagaugagggaagauga

SEQ ID NO: 779781 - RNA, 19 nt, Homo sapiens
  misc_RNA (1)...(19): siRNA sense strand
ggagaugagggaagaugag

SEQ ID NO: 779782 - RNA, 19 nt, Homo sapiens
  misc_RNA (1)...(19): siRNA sense strand
gcuuuguccuggcuuccuu

SEQ ID NO: 779783 - RNA, 19 nt, Homo sapiens
  misc_RNA (1)...(19): siRNA sense strand
gagcaacccuccuuauaug

SEQ ID NO: 779784 - RNA, 19 nt, Homo sapiens
  misc_RNA (1)...(19): siRNA sense strand
ccaaagauguggccaacuu

SEQ ID NO: 779785 - RNA, 19 nt, Homo sapiens
  misc_RNA (1)...(19): siRNA sense strand
gcaaagugaaggugucaua

SEQ ID NO: 779786 - RNA, 19 nt, Homo sapiens
  misc_RNA (1)...(19): siRNA sense strand
gcaaggaugccuacaguga

SEQ ID NO: 779787 - RNA, 19 nt, Homo sapiens
  misc_RNA (1)...(19): siRNA sense strand
gaugaaacgugcuuacaag

SEQ ID NO: 779788 - RNA, 19 nt, Homo sapiens
  misc_RNA (1)...(19): siRNA sense strand
ggucggugauccucucaaa

SEQ ID NO: 779789 - RNA, 19 nt, Homo sapiens
  misc_RNA (1)...(19): siRNA sense strand
cagcaaggaugccuacagu

SEQ ID NO: 779790 - RNA, 19 nt, Homo sapiens
  misc_RNA (1)...(19): siRNA sense strand
caacccuccuuauaugaga

SEQ ID NO: 779791 - RNA, 19 nt, Homo sapiens
  misc_RNA (1)...(19): siRNA sense strand
cugggacucuucuuuguuu

SEQ ID NO: 779792 - RNA, 19 nt, Homo sapiens
  misc_RNA (1)...(19): siRNA sense strand
gguguuggcugugcucuuc

SEQ ID NO: 779793 - RNA, 19 nt, Homo sapiens
  misc_RNA (1)...(19): siRNA sense strand
ccagaaccguaacuauugu

SEQ ID NO: 779794 - RNA, 19 nt, Homo sapiens
  misc_RNA (1)...(19): siRNA sense strand
aagcauuggugcccuugaa

SEQ ID NO: 779795 - RNA, 19 nt, Homo sapiens
  misc_RNA (1)...(19): siRNA sense strand
gccaacuucuuccuacugu

SEQ ID NO: 779796 - RNA, 19 nt, Homo sapiens
  misc_RNA (1)...(19): siRNA sense strand
aaggaugccuacagugaga

SEQ ID NO: 779797 - RNA, 19 nt, Homo sapiens
  misc_RNA (1)...(19): siRNA sense strand
cccagaaccguaacuauug

SEQ ID NO: 779798 - RNA, 19 nt, Homo sapiens
  misc_RNA (1)...(19): siRNA sense strand
gagaugaaacgugcuuaca

SEQ ID NO: 779799 - RNA, 19 nt, Homo sapiens
  misc_RNA (1)...(19): siRNA sense strand
gcccugggacucuucuuug

SEQ ID NO: 779800 - RNA, 19 nt, Homo sapiens
  misc_RNA (1)...(19): siRNA sense strand
uuggaauccugcucacuug

SEQ ID NO: 779801 - RNA, 19 nt, Homo sapiens
  misc_RNA (1)...(19): siRNA sense strand
gcaacccuccuuauaugag

SEQ ID NO: 779802 - RNA, 19 nt, Homo sapiens
  misc_RNA (1)...(19): siRNA sense strand
agaugaaacgugcuuacaa

SEQ ID NO: 779803 - RNA, 19 nt, Homo sapiens
  misc_RNA (1)...(19): siRNA sense strand
caaagauguggccaacuuc

SEQ ID NO: 779804 - RNA, 19 nt, Homo sapiens
  misc_RNA (1)...(19): siRNA sense strand
cccaugcucugguguuugg

SEQ ID NO: 779805 - RNA, 19 nt, Homo sapiens
  misc_RNA (1)...(19): siRNA sense strand
caaagugaaggugucauag

SEQ ID NO: 779806 - RNA, 19 nt, Homo sapiens
  misc_RNA (1)...(19): siRNA sense strand
ugaaacgugcuuacaagag

SEQ ID NO: 779807 - RNA, 19 nt, Homo sapiens
  misc_RNA (1)...(19): siRNA sense strand
ccaacuucuuccuacuguu

SEQ ID NO: 779808 - RNA, 19 nt, Homo sapiens
  misc_RNA (1)...(19): siRNA sense strand
gcauuggugcccuugaagu

SEQ ID NO: 779809 - RNA, 19 nt, Homo sapiens
  misc_RNA (1)...(19): siRNA sense strand
ggcccugggacucuucuuu

SEQ ID NO: 779810 - RNA, 19 nt, Homo sapiens
  misc_RNA (1)...(19): siRNA sense strand
uuacaagagcuauguucga

SEQ ID NO: 779811 - RNA, 19 nt, Homo sapiens
  misc_RNA (1)...(19): siRNA sense strand
ggacucuucuuuguuuuca

SEQ ID NO: 779812 - RNA, 19 nt, Homo sapiens
  misc_RNA (1)...(19): siRNA sense strand
gcucauaccucccacaaau

SEQ ID NO: 779813 - RNA, 19 nt, Homo sapiens
  misc_RNA (1)...(19): siRNA sense strand
caagauguaugagaacuuu

SEQ ID NO: 779814 - RNA, 19 nt, Homo sapiens
  misc_RNA (1)...(19): siRNA sense strand
caauggaucugguucaaga

SEQ ID NO: 779815 - RNA, 19 nt, Homo sapiens
  misc_RNA (1)...(19): siRNA sense strand
ggacccaaguggagagauu

SEQ ID NO: 779816 - RNA, 19 nt, Homo sapiens
  misc_RNA (1)...(19): siRNA sense strand
guaccgggaugcagagauu

SEQ ID NO: 779817 - RNA, 19 nt, Homo sapiens
  misc_RNA (1)...(19): siRNA sense strand
guggccaucuucuuuguua

SEQ ID NO: 779818 - RNA, 19 nt, Homo sapiens
  misc_RNA (1)...(19): siRNA sense strand
gauaugcacugaccacuac

SEQ ID NO: 779819 - RNA, 19 nt, Homo sapiens
  misc_RNA (1)...(19): siRNA sense strand
ggaaggagcaucucuacca

SEQ ID NO: 779820 - RNA, 19 nt, Homo sapiens
  misc_RNA (1)...(19): siRNA sense strand
gugcgggacucaucuaucu

SEQ ID NO: 779821 - RNA, 19 nt, Homo sapiens
  misc_RNA (1)...(19): siRNA sense strand
ggacaguggcgaauacagu

SEQ ID NO: 779822 - RNA, 19 nt, Homo sapiens
  misc_RNA (1)...(19): siRNA sense strand
guggagagauuguggaacu

SEQ ID NO: 779823 - RNA, 19 nt, Homo sapiens
  misc_RNA (1)...(19): siRNA sense strand
gagccucgauaugcacuga

SEQ ID NO: 779824 - RNA, 19 nt, Homo sapiens
  misc_RNA (1)...(19): siRNA sense strand
gcugggaccuagugaagag

SEQ ID NO: 779825 - RNA, 19 nt, Homo sapiens
  misc_RNA (1)...(19): siRNA sense strand
guucaagcgugcaauggau

SEQ ID NO: 779826 - RNA, 19 nt, Homo sapiens
  misc_RNA (1)...(19): siRNA sense strand
gacuuaauccuaccuggaa

SEQ ID NO: 779827 - RNA, 19 nt, Homo sapiens
  misc_RNA (1)...(19): siRNA sense strand
ccaaggagccccacucauu

SEQ ID NO: 779828 - RNA, 19 nt, Homo sapiens
  misc_RNA (1)...(19): siRNA sense strand
ucuaugacaagauguauga

SEQ ID NO: 779829 - RNA, 19 nt, Homo sapiens
  misc_RNA (1)...(19): siRNA sense strand
caucuucuuuguuaucuac

SEQ ID NO: 779830 - RNA, 19 nt, Homo sapiens
  misc_RNA (1)...(19): siRNA sense strand
gcuggacaguggcgaauac

SEQ ID NO: 779831 - RNA, 19 nt, Homo sapiens
  misc_RNA (1)...(19): siRNA sense strand
gagcagugcgggacucauc

SEQ ID NO: 779832 - RNA, 19 nt, Homo sapiens
  misc_RNA (1)...(19): siRNA sense strand
augacaagauguaugagaa

SEQ ID NO: 779833 - RNA, 19 nt, Homo sapiens
  misc_RNA (1)...(19): siRNA sense strand
cugcagagauuagauuucu

SEQ ID NO: 779834 - RNA, 19 nt, Homo sapiens
  misc_RNA (1)...(19): siRNA sense strand
aggaguuucugcagagauu

SEQ ID NO: 779835 - RNA, 19 nt, Homo sapiens
  misc_RNA (1)...(19): siRNA sense strand
gcagugcgggacucaucua

SEQ ID NO: 779836 - RNA, 19 nt, Homo sapiens
  misc_RNA (1)...(19): siRNA sense strand
gaaucgggacgcacaaugg

SEQ ID NO: 779837 - RNA, 19 nt, Homo sapiens
  misc_RNA (1)...(19): siRNA sense strand
gguggaugcuguggacaau

SEQ ID NO: 779838 - RNA, 19 nt, Homo sapiens
  misc_RNA (1)...(19): siRNA sense strand
gacaagauguaugagaacu

SEQ ID NO: 779839 - RNA, 19 nt, Homo sapiens
  misc_RNA (1)...(19): siRNA sense strand
cgauaugcacugaccacua

SEQ ID NO: 779840 - RNA, 19 nt, Homo sapiens
  misc_RNA (1)...(19): siRNA sense strand
ggaguuucugcagagauua

SEQ ID NO: 779841 - RNA, 19 nt, Homo sapiens
  misc_RNA (1)...(19): siRNA sense strand
ccaguggccaucuucuuug

SEQ ID NO: 779842 - RNA, 19 nt, Homo sapiens
  misc_RNA (1)...(19): siRNA sense strand
uacagugugugcccaagga

SEQ ID NO: 779843 - RNA, 19 nt, Homo sapiens
  misc_RNA (1)...(19): siRNA sense strand
cagaggucuuucacagaga

SEQ ID NO: 779844 - RNA, 19 nt, Homo sapiens
  misc_RNA (1)...(19): siRNA sense strand
cacccucuaugacaagaug

SEQ ID NO: 779845 - RNA, 19 nt, Homo sapiens
  misc_RNA (1)...(19): siRNA sense strand
uggaugcuguggacaaugg

SEQ ID NO: 779846 - RNA, 19 nt, Homo sapiens
  misc_RNA (1)...(19): siRNA sense strand
uccaguggccaucuucuuu

SEQ ID NO: 779847 - RNA, 19 nt, Homo sapiens
  misc_RNA (1)...(19): siRNA sense strand
aaacucgcuuccugugaca

SEQ ID NO: 779848 - RNA, 19 nt, Homo sapiens
  misc_RNA (1)...(19): siRNA sense strand
caguggccaucuucuuugu

SEQ ID NO: 779849 - RNA, 19 nt, Homo sapiens
  misc_RNA (1)...(19): siRNA sense strand
gugcaugucccuggaagga

SEQ ID NO: 779850 - RNA, 19 nt, Homo sapiens
  misc_RNA (1)...(19): siRNA sense strand
acucaucuaucugcacuuc

SEQ ID NO: 779851 - RNA, 19 nt, Homo sapiens
  misc_RNA (1)...(19): siRNA sense strand
gcgcucauaccucccacaa

SEQ ID NO: 779852 - RNA, 19 nt, Homo sapiens
  misc_RNA (1)...(19): siRNA sense strand
gcaucucuaccaccuggaa

SEQ ID NO: 779853 - RNA, 19 nt, Homo sapiens
  misc_RNA (1)...(19): siRNA sense strand
uaugacaagauguaugaga

SEQ ID NO: 779854 - RNA, 19 nt, Homo sapiens
  misc_RNA (1)...(19): siRNA sense strand
cgaaucgggacgcacaaug

SEQ ID NO: 779855 - RNA, 19 nt, Homo sapiens
  misc_RNA (1)...(19): siRNA sense strand
guugcucgacuuaauccua

SEQ ID NO: 779856 - RNA, 19 nt, Homo sapiens
  misc_RNA (1)...(19): siRNA sense strand
ugcaauggaucugguucaa

SEQ ID NO: 779857 - RNA, 19 nt, Homo sapiens
  misc_RNA (1)...(19): siRNA sense strand
gagccccacucauuccaaa

SEQ ID NO: 779858 - RNA, 19 nt, Homo sapiens
  misc_RNA (1)...(19): siRNA sense strand
gaacaucugugucuuuauu

SEQ ID NO: 779859 - RNA, 19 nt, Homo sapiens
  misc_RNA (1)...(19): siRNA sense strand
gcagacauuucaagaacua

SEQ ID NO: 779860 - RNA, 19 nt, Homo sapiens
  misc_RNA (1)...(19): siRNA sense strand
gaggaagucuccagaaaug

SEQ ID NO: 779861 - RNA, 19 nt, Homo sapiens
  misc_RNA (1)...(19): siRNA sense strand
ugacaaagccguccaaauc

SEQ ID NO: 779862 - RNA, 19 nt, Homo sapiens
  misc_RNA (1)...(19): siRNA sense strand
gagcagacauuucaagaac

SEQ ID NO: 779863 - RNA, 19 nt, Homo sapiens
  misc_RNA (1)...(19): siRNA sense strand
gaguggguaugagaaauua

SEQ ID NO: 779864 - RNA, 19 nt, Homo sapiens
  misc_RNA (1)...(19): siRNA sense strand
ggaaggaucccaugacaca

SEQ ID NO: 779865 - RNA, 19 nt, Homo sapiens
  misc_RNA (1)...(19): siRNA sense strand
aauaugagaugccugaguu

SEQ ID NO: 779866 - RNA, 19 nt, Homo sapiens
  misc_RNA (1)...(19): siRNA sense strand
ucaaaugcuuuacaucaga

SEQ ID NO: 779867 - RNA, 19 nt, Homo sapiens
  misc_RNA (1)...(19): siRNA sense strand
ccacauggacgcugaaguu

SEQ ID NO: 779868 - RNA, 19 nt, Homo sapiens
  misc_RNA (1)...(19): siRNA sense strand
ccaagaaccagucagauga

SEQ ID NO: 779869 - RNA, 19 nt, Homo sapiens
  misc_RNA (1)...(19): siRNA sense strand
gcucaaggguggaagcaau

SEQ ID NO: 779870 - RNA, 19 nt, Homo sapiens
  misc_RNA (1)...(19): siRNA sense strand
gaagcaauaccaacagaga

SEQ ID NO: 779871 - RNA, 19 nt, Homo sapiens
  misc_RNA (1)...(19): siRNA sense strand
ggacuugggagcagacauu

SEQ ID NO: 779872 - RNA, 19 nt, Homo sapiens
  misc_RNA (1)...(19): siRNA sense strand
caaaugcuuuacaucagaa

SEQ ID NO: 779873 - RNA, 19 nt, Homo sapiens
  misc_RNA (1)...(19): siRNA sense strand
cugaacaucugugucuuua

SEQ ID NO: 779874 - RNA, 19 nt, Homo sapiens
  misc_RNA (1)...(19): siRNA sense strand
ggccaaaggugccagaagu

SEQ ID NO: 779875 - RNA, 19 nt, Homo sapiens
  misc_RNA (1)...(19): siRNA sense strand
cagcauauacugaagaaau

SEQ ID NO: 779876 - RNA, 19 nt, Homo sapiens
  misc_RNA (1)...(19): siRNA sense strand
guagucaaaugcuuuacau

SEQ ID NO: 779877 - RNA, 19 nt, Homo sapiens
  misc_RNA (1)...(19): siRNA sense strand
ggaguggguaugagaaauu

SEQ ID NO: 779878 - RNA, 19 nt, Homo sapiens
  misc_RNA (1)...(19): siRNA sense strand
cauggacgcugaaguugga

SEQ ID NO: 779879 - RNA, 19 nt, Homo sapiens
  misc_RNA (1)...(19): siRNA sense strand
gcaaccuggugcagcauau

SEQ ID NO: 779880 - RNA, 19 nt, Homo sapiens
  misc_RNA (1)...(19): siRNA sense strand
ggagcagacauuucaagaa

SEQ ID NO: 779881 - RNA, 19 nt, Homo sapiens
  misc_RNA (1)...(19): siRNA sense strand
ccugaguucuccucggaua

SEQ ID NO: 779882 - RNA, 19 nt, Homo sapiens
  misc_RNA (1)...(19): siRNA sense strand
cugaagaaauacuauggaa

SEQ ID NO: 779883 - RNA, 19 nt, Homo sapiens
  misc_RNA (1)...(19): siRNA sense strand
gauagcaccaugaggauuc

SEQ ID NO: 779884 - RNA, 19 nt, Homo sapiens
  misc_RNA (1)...(19): siRNA sense strand
ggaagugucccuggaagga

SEQ ID NO: 779885 - RNA, 19 nt, Homo sapiens
  misc_RNA (1)...(19): siRNA sense strand
ccaugaggauucugagcaa

SEQ ID NO: 779886 - RNA, 19 nt, Homo sapiens
  misc_RNA (1)...(19): siRNA sense strand
gccaagaaccagucagaug

SEQ ID NO: 779887 - RNA, 19 nt, Homo sapiens
  misc_RNA (1)...(19): siRNA sense strand
uucaagaacuaauccaaga

SEQ ID NO: 779888 - RNA, 19 nt, Homo sapiens
  misc_RNA (1)...(19): siRNA sense strand
ccacugaacaucugugucu

SEQ ID NO: 779889 - RNA, 19 nt, Homo sapiens
  misc_RNA (1)...(19): siRNA sense strand
ggauggcaaccuucagcua

SEQ ID NO: 779890 - RNA, 19 nt, Homo sapiens
  misc_RNA (1)...(19): siRNA sense strand
gcuccuggucccaauauga

SEQ ID NO: 779891 - RNA, 19 nt, Homo sapiens
  misc_RNA (1)...(19): siRNA sense strand
gggagcagacauuucaaga

SEQ ID NO: 779892 - RNA, 19 nt, Homo sapiens
  misc_RNA (1)...(19): siRNA sense strand
gggaguggguaugagaaau

SEQ ID NO: 779893 - RNA, 19 nt, Homo sapiens
  misc_RNA (1)...(19): siRNA sense strand
uggaagcaauaccaacaga

SEQ ID NO: 779894 - RNA, 19 nt, Homo sapiens
  misc_RNA (1)...(19): siRNA sense strand
cugcuuguauuuauuguag

SEQ ID NO: 779895 - RNA, 19 nt, Homo sapiens
  misc_RNA (1)...(19): siRNA sense strand
agucaaaugcuuuacauca

SEQ ID NO: 779896 - RNA, 19 nt, Homo sapiens
  misc_RNA (1)...(19): siRNA sense strand
gucaaaugcuuuacaucag

SEQ ID NO: 779897 - RNA, 19 nt, Homo sapiens
  misc_RNA (1)...(19): siRNA sense strand
gguggaagcaauaccaaca

SEQ ID NO: 779898 - RNA, 19 nt, Homo sapiens
  misc_RNA (1)...(19): siRNA sense strand
ucgcaaaccaagccaagaa

SEQ ID NO: 779899 - RNA, 19 nt, Homo sapiens
  misc_RNA (1)...(19): siRNA sense strand
caaccuggugcagcauaua

SEQ ID NO: 779900 - RNA, 19 nt, Homo sapiens
  misc_RNA (1)...(19): siRNA sense strand
ggauagcaccaugaggauu

SEQ ID NO: 779901 - RNA, 19 nt, Homo sapiens
  misc_RNA (1)...(19): siRNA sense strand
gcuuguauuuauuguaguc

SEQ ID NO: 779902 - RNA, 19 nt, Homo sapiens
  misc_RNA (1)...(19): siRNA sense strand
cuccagaaaugccaguaau

SEQ ID NO: 779903 - RNA, 19 nt, Homo sapiens
  misc_RNA (1)...(19): siRNA sense strand
uggaauuggugcuguguac

SEQ ID NO: 779904 - RNA, 19 nt, Homo sapiens
  misc_RNA (1)...(19): siRNA sense strand
cuggaaggaucccaugaca

SEQ ID NO: 779905 - RNA, 19 nt, Homo sapiens
  misc_RNA (1)...(19): siRNA sense strand
ugcagcauauacugaagaa

SEQ ID NO: 779906 - RNA, 19 nt, Homo sapiens
  misc_RNA (1)...(19): siRNA sense strand
guuguagauuucuggacuu

SEQ ID NO: 779907 - RNA, 19 nt, Homo sapiens
  misc_RNA (1)...(19): siRNA sense strand
gaagugucccuggaaggau

SEQ ID NO: 779908 - RNA, 19 nt, Homo sapiens
  misc_RNA (1)...(19): siRNA sense strand
ccgccaaguugcagauucu

SEQ ID NO: 779909 - RNA, 19 nt, Homo sapiens
  misc_RNA (1)...(19): siRNA sense strand
agacccagauccacugaac

SEQ ID NO: 779910 - RNA, 19 nt, Homo sapiens
  misc_RNA (1)...(19): siRNA sense strand
gugcguaugaggcucuuug

SEQ ID NO: 779911 - RNA, 19 nt, Homo sapiens
  misc_RNA (1)...(19): siRNA sense strand
gacaaagccguccaaaucc

SEQ ID NO: 779912 - RNA, 19 nt, Homo sapiens
  misc_RNA (1)...(19): siRNA sense strand
caaaccaagccaagaacca

SEQ ID NO: 779913 - RNA, 19 nt, Homo sapiens
  misc_RNA (1)...(19): siRNA sense strand
ccagucagaugaggcaaaa

SEQ ID NO: 779914 - RNA, 19 nt, Homo sapiens
  misc_RNA (1)...(19): siRNA sense strand
caagaaccagucagaugag

SEQ ID NO: 779915 - RNA, 19 nt, Homo sapiens
  misc_RNA (1)...(19): siRNA sense strand
agagagcauuuggcugguu

SEQ ID NO: 779916 - RNA, 19 nt, Homo sapiens
  misc_RNA (1)...(19): siRNA sense strand
gaaguuagcucuauucaac

SEQ ID NO: 779917 - RNA, 19 nt, Homo sapiens
  misc_RNA (1)...(19): siRNA sense strand
ccaaagaccacuacagaua

SEQ ID NO: 779918 - RNA, 19 nt, Homo sapiens
  misc_RNA (1)...(19): siRNA sense strand
gaaaucagguugccgaucu

SEQ ID NO: 779919 - RNA, 19 nt, Homo sapiens
  misc_RNA (1)...(19): siRNA sense strand
ucagacaccucuucaauug

SEQ ID NO: 779920 - RNA, 19 nt, Homo sapiens
  misc_RNA (1)...(19): siRNA sense strand
ggaauuaccagucccauug

SEQ ID NO: 779921 - RNA, 19 nt, Homo sapiens
  misc_RNA (1)...(19): siRNA sense strand
caaagaacgucaugcuaga

SEQ ID NO: 779922 - RNA, 19 nt, Homo sapiens
  misc_RNA (1)...(19): siRNA sense strand
ggacauauacacagagaau

SEQ ID NO: 779923 - RNA, 19 nt, Homo sapiens
  misc_RNA (1)...(19): siRNA sense strand
guaugaaugugaugaaauc

SEQ ID NO: 779924 - RNA, 19 nt, Homo sapiens
  misc_RNA (1)...(19): siRNA sense strand
ggaugaagguguauguucu

SEQ ID NO: 779925 - RNA, 19 nt, Homo sapiens
  misc_RNA (1)...(19): siRNA sense strand
gaggacauauacacagaga

SEQ ID NO: 779926 - RNA, 19 nt, Homo sapiens
  misc_RNA (1)...(19): siRNA sense strand
ccucagcccugcacgguuu

SEQ ID NO: 779927 - RNA, 19 nt, Homo sapiens
  misc_RNA (1)...(19): siRNA sense strand
gcaccgaguucaaccucaa

SEQ ID NO: 779928 - RNA, 19 nt, Homo sapiens
  misc_RNA (1)...(19): siRNA sense strand
caucgcggcugcccaagaa

SEQ ID NO: 779929 - RNA, 19 nt, Homo sapiens
  misc_RNA (1)...(19): siRNA sense strand
ggaacaacauuggcagugu

SEQ ID NO: 779930 - RNA, 19 nt, Homo sapiens
  misc_RNA (1)...(19): siRNA sense strand
caaagaccacuacagauau

SEQ ID NO: 779931 - RNA, 19 nt, Homo sapiens
  misc_RNA (1)...(19): siRNA sense strand
ggugaaagcgaauggauug

SEQ ID NO: 779932 - RNA, 19 nt, Homo sapiens
  misc_RNA (1)...(19): siRNA sense strand
gaacgucaugcuagaagaa

SEQ ID NO: 779933 - RNA, 19 nt, Homo sapiens
  misc_RNA (1)...(19): siRNA sense strand
uacaacauguucaggaauu

SEQ ID NO: 779934 - RNA, 19 nt, Homo sapiens
  misc_RNA (1)...(19): siRNA sense strand
gcacugaugcuggcaaaga

SEQ ID NO: 779935 - RNA, 19 nt, Homo sapiens
  misc_RNA (1)...(19): siRNA sense strand
ccacaugcaagaaguauau

SEQ ID NO: 779936 - RNA, 19 nt, Homo sapiens
  misc_RNA (1)...(19): siRNA sense strand
agacucagcuucccaaggu

SEQ ID NO: 779937 - RNA, 19 nt, Homo sapiens
  misc_RNA (1)...(19): siRNA sense strand
gcgagcaauugcagaaguu

SEQ ID NO: 779938 - RNA, 19 nt, Homo sapiens
  misc_RNA (1)...(19): siRNA sense strand
ccaggcaacucaccaaugg

SEQ ID NO: 779939 - RNA, 19 nt, Homo sapiens
  misc_RNA (1)...(19): siRNA sense strand
gggaacacuuucucucuag

SEQ ID NO: 779940 - RNA, 19 nt, Homo sapiens
  misc_RNA (1)...(19): siRNA sense strand
ggaacacuuucucucuaga

SEQ ID NO: 779941 - RNA, 19 nt, Homo sapiens
  misc_RNA (1)...(19): siRNA sense strand
gcucagacaccucuucaau

SEQ ID NO: 779942 - RNA, 19 nt, Homo sapiens
  misc_RNA (1)...(19): siRNA sense strand
gcacaaccuucagaucaca

SEQ ID NO: 779943 - RNA, 19 nt, Homo sapiens
  misc_RNA (1)...(19): siRNA sense strand
agacaccucuucaauugug

SEQ ID NO: 779944 - RNA, 19 nt, Homo sapiens
  misc_RNA (1)...(19): siRNA sense strand
aaagaccacuacagauaug

SEQ ID NO: 779945 - RNA, 19 nt, Homo sapiens
  misc_RNA (1)...(19): siRNA sense strand
cugcaaggcucuguauuug

SEQ ID NO: 779946 - RNA, 19 nt, Homo sapiens
  misc_RNA (1)...(19): siRNA sense strand
acaacauguucaggaauua

SEQ ID NO: 779947 - RNA, 19 nt, Homo sapiens
  misc_RNA (1)...(19): siRNA sense strand
ggaauuccuucacaucacu

SEQ ID NO: 779948 - RNA, 19 nt, Homo sapiens
  misc_RNA (1)...(19): siRNA sense strand
gcaaccugcugaagaaugc

SEQ ID NO: 779949 - RNA, 19 nt, Homo sapiens
  misc_RNA (1)...(19): siRNA sense strand
cagucucgcuuccucagua

SEQ ID NO: 779950 - RNA, 19 nt, Homo sapiens
  misc_RNA (1)...(19): siRNA sense strand
guuaaccuuugauggcuuu

SEQ ID NO: 779951 - RNA, 19 nt, Homo sapiens
  misc_RNA (1)...(19): siRNA sense strand
acaccagacucuugcuuug

SEQ ID NO: 779952 - RNA, 19 nt, Homo sapiens
  misc_RNA (1)...(19): siRNA sense strand
gaaugacaccauccuggaa

SEQ ID NO: 779953 - RNA, 19 nt, Homo sapiens
  misc_RNA (1)...(19): siRNA sense strand
gauauguaccugcugauuc

SEQ ID NO: 779954 - RNA, 19 nt, Homo sapiens
  misc_RNA (1)...(19): siRNA sense strand
gcucuguauuugcgcgaua

SEQ ID NO: 779955 - RNA, 19 nt, Homo sapiens
  misc_RNA (1)...(19): siRNA sense strand
gcagaaguuagcucuauuc

SEQ ID NO: 779956 - RNA, 19 nt, Homo sapiens
  misc_RNA (1)...(19): siRNA sense strand
gaagcugccacaugcaaga

SEQ ID NO: 779957 - RNA, 19 nt, Homo sapiens
  misc_RNA (1)...(19): siRNA sense strand
gcaagcacuuccacuccau

SEQ ID NO: 779958 - RNA, 19 nt, Homo sapiens
  misc_RNA (1)...(19): siRNA sense strand
uggauuggcugccuuccuu

SEQ ID NO: 779959 - RNA, 19 nt, Homo sapiens
  misc_RNA (1)...(19): siRNA sense strand
gcagaaggacugaagaaaa

SEQ ID NO: 779960 - RNA, 19 nt, Homo sapiens
  misc_RNA (1)...(19): siRNA sense strand
gugcugcccuggccuuugu

SEQ ID NO: 779961 - RNA, 19 nt, Homo sapiens
  misc_RNA (1)...(19): siRNA sense strand
cccgagaccugcagaguca

SEQ ID NO: 779962 - RNA, 19 nt, Homo sapiens
  misc_RNA (1)...(19): siRNA sense strand
uagaggagguugacaagcu

SEQ ID NO: 779963 - RNA, 19 nt, Homo sapiens
  misc_RNA (1)...(19): siRNA sense strand
uccugaaguuguccaauaa

SEQ ID NO: 779964 - RNA, 19 nt, Homo sapiens
  misc_RNA (1)...(19): siRNA sense strand
caguaugaaugugaugaaa

SEQ ID NO: 779965 - RNA, 19 nt, Homo sapiens
  misc_RNA (1)...(19): siRNA sense strand
gacaccagacucuugcuuu

SEQ ID NO: 779966 - RNA, 19 nt, Homo sapiens
  misc_RNA (1)...(19): siRNA sense strand
gaguucaaguucagguuca

SEQ ID NO: 779967 - RNA, 19 nt, Homo sapiens
  misc_RNA (1)...(19): siRNA sense strand
ccaggaauuucucuuuguc

SEQ ID NO: 779968 - RNA, 19 nt, Homo sapiens
  misc_RNA (1)...(19): siRNA sense strand
ucuacaacauguucaggaa

SEQ ID NO: 779969 - RNA, 19 nt, Homo sapiens
  misc_RNA (1)...(19): siRNA sense strand
agaaguauauggccaagcu

SEQ ID NO: 779970 - RNA, 19 nt, Homo sapiens
  misc_RNA (1)...(19): siRNA sense strand
ccaauaacugcaucaccua

SEQ ID NO: 779971 - RNA, 19 nt, Homo sapiens
  misc_RNA (1)...(19): siRNA sense strand
auccugaaguuguccaaua

SEQ ID NO: 779972 - RNA, 19 nt, Homo sapiens
  misc_RNA (1)...(19): siRNA sense strand
gcugaagccuugggugauc

SEQ ID NO: 779973 - RNA, 19 nt, Homo sapiens
  misc_RNA (1)...(19): siRNA sense strand
caacaccuccuugcaguuc

SEQ ID NO: 779974 - RNA, 19 nt, Homo sapiens
  misc_RNA (1)...(19): siRNA sense strand
ggccugauguuggucaaga

SEQ ID NO: 779975 - RNA, 19 nt, Homo sapiens
  misc_RNA (1)...(19): siRNA sense strand
ugugcggacucuacucuuu

SEQ ID NO: 779976 - RNA, 19 nt, Homo sapiens
  misc_RNA (1)...(19): siRNA sense strand
ggaauuucucuuugucuuc

SEQ ID NO: 779977 - RNA, 19 nt, Homo sapiens
  misc_RNA (1)...(19): siRNA sense strand
ggcaaagaacgucaugcua

SEQ ID NO: 779978 - RNA, 19 nt, Homo sapiens
  misc_RNA (1)...(19): siRNA sense strand
agggaacacuuucucucua

SEQ ID NO: 779979 - RNA, 19 nt, Homo sapiens
  misc_RNA (1)...(19): siRNA sense strand
uggaggacauauacacaga

SEQ ID NO: 779980 - RNA, 19 nt, Homo sapiens
  misc_RNA (1)...(19): siRNA sense strand
ucugcaaggcucuguauuu

SEQ ID NO: 779981 - RNA, 19 nt, Homo sapiens
  misc_RNA (1)...(19): siRNA sense strand
gacauucuccggguuguga

SEQ ID NO: 779982 - RNA, 19 nt, Homo sapiens
  misc_RNA (1)...(19): siRNA sense strand
ucuccaggaugaaggugua

SEQ ID NO: 779983 - RNA, 19 nt, Homo sapiens
  misc_RNA (1)...(19): siRNA sense strand
guacuugggccugucagaa

SEQ ID NO: 779984 - RNA, 19 nt, Homo sapiens
  misc_RNA (1)...(19): siRNA sense strand
gccaccagcuuugcucaga

SEQ ID NO: 779985 - RNA, 19 nt, Homo sapiens
  misc_RNA (1)...(19): siRNA sense strand
guacauccgcaccgaguuc

SEQ ID NO: 779986 - RNA, 19 nt, Homo sapiens
  misc_RNA (1)...(19): siRNA sense strand
cacugaugcuggcaaagaa

SEQ ID NO: 779987 - RNA, 19 nt, Homo sapiens
  misc_RNA (1)...(19): siRNA sense strand
uugcagaaguuagcucuau

SEQ ID NO: 779988 - RNA, 19 nt, Homo sapiens
  misc_RNA (1)...(19): siRNA sense strand
agggcaaccugcugaagaa

SEQ ID NO: 779989 - RNA, 19 nt, Homo sapiens
  misc_RNA (1)...(19): siRNA sense strand
gagggaacacuuucucucu

SEQ ID NO: 779990 - RNA, 19 nt, Homo sapiens
  misc_RNA (1)...(19): siRNA sense strand
ucaagggcuucucugaaca

SEQ ID NO: 779991 - RNA, 19 nt, Homo sapiens
  misc_RNA (1)...(19): siRNA sense strand
ccugaugacauuucucuug

SEQ ID NO: 779992 - RNA, 19 nt, Homo sapiens
  misc_RNA (1)...(19): siRNA sense strand
ggacaccagacucuugcuu

SEQ ID NO: 779993 - RNA, 19 nt, Homo sapiens
  misc_RNA (1)...(19): siRNA sense strand
guccaaaugccaccaggaa

SEQ ID NO: 779994 - RNA, 19 nt, Homo sapiens
  misc_RNA (1)...(19): siRNA sense strand
gacaccgucuggaauaagg

SEQ ID NO: 779995 - RNA, 19 nt, Homo sapiens
  misc_RNA (1)...(19): siRNA sense strand
cccugaccguguccuguua

SEQ ID NO: 779996 - RNA, 19 nt, Homo sapiens
  misc_RNA (1)...(19): siRNA sense strand
gcagcuggacuacaacucu

SEQ ID NO: 779997 - RNA, 19 nt, Homo sapiens
  misc_RNA (1)...(19): siRNA sense strand
gccagccucucucccacuu

SEQ ID NO: 779998 - RNA, 19 nt, Homo sapiens
  misc_RNA (1)...(19): siRNA sense strand
auauguaccugcugauucu

SEQ ID NO: 779999 - RNA, 19 nt, Homo sapiens
  misc_RNA (1)...(19): siRNA sense strand
guccagacccugcucuuca

SEQ ID NO: 780000 - RNA, 19 nt, Homo sapiens
  misc_RNA (1)...(19): siRNA sense strand
cauuggcccugccuuugga

SEQ ID NO: 780001 - RNA, 19 nt, Homo sapiens
  misc_RNA (1)...(19): siRNA sense strand
gugcacacuccauggcuaa

SEQ ID NO: 780002 - RNA, 19 nt, Homo sapiens
  misc_RNA (1)...(19): siRNA sense strand
guucagccucucacgauga

SEQ ID NO: 780003 - RNA, 19 nt, Homo sapiens
  misc_RNA (1)...(19): siRNA sense strand
ccucaagggcuucucugaa

SEQ ID NO: 780004 - RNA, 19 nt, Homo sapiens
  misc_RNA (1)...(19): siRNA sense strand
aggaauuucucuuugucuu

SEQ ID NO: 780005 - RNA, 19 nt, Homo sapiens
  misc_RNA (1)...(19): siRNA sense strand
uggacaccgucuggaauaa

SEQ ID NO: 780006 - RNA, 19 nt, Homo sapiens
  misc_RNA (1)...(19): siRNA sense strand
acagcagcguggcagcuuu

SEQ ID NO: 780007 - RNA, 19 nt, Homo sapiens
  misc_RNA (1)...(19): siRNA sense strand
uaacugcaucaccuaccua

SEQ ID NO: 780008 - RNA, 19 nt, Homo sapiens
  misc_RNA (1)...(19): siRNA sense strand
ugcagaaguuagcucuauu

SEQ ID NO: 780009 - RNA, 19 nt, Homo sapiens
  misc_RNA (1)...(19): siRNA sense strand
cuggacaccgucuggaaua

SEQ ID NO: 780010 - RNA, 19 nt, Homo sapiens
  misc_RNA (1)...(19): siRNA sense strand
agaacgucaugcuagaaga

SEQ ID NO: 780011 - RNA, 19 nt, Homo sapiens
  misc_RNA (1)...(19): siRNA sense strand
aguuagcucuauucaacaa

SEQ ID NO: 780012 - RNA, 19 nt, Homo sapiens
  misc_RNA (1)...(19): siRNA sense strand
cgagcaauugcagaaguua

SEQ ID NO: 780013 - RNA, 19 nt, Homo sapiens
  misc_RNA (1)...(19): siRNA sense strand
guauuugcgcgauaacaau

SEQ ID NO: 780014 - RNA, 19 nt, Homo sapiens
  misc_RNA (1)...(19): siRNA sense strand
ccaaaugccaccaggaacu

SEQ ID NO: 780015 - RNA, 19 nt, Homo sapiens
  misc_RNA (1)...(19): siRNA sense strand
cucaagggcuucucugaac

SEQ ID NO: 780016 - RNA, 19 nt, Homo sapiens
  misc_RNA (1)...(19): siRNA sense strand
ggacaugggucaucacuga

SEQ ID NO: 780017 - RNA, 19 nt, Homo sapiens
  misc_RNA (1)...(19): siRNA sense strand
gaaggacgcucaaauacug

SEQ ID NO: 780018 - RNA, 19 nt, Homo sapiens
  misc_RNA (1)...(19): siRNA sense strand
ugaaggagcugauggagaa

SEQ ID NO: 780019 - RNA, 19 nt, Homo sapiens
  misc_RNA (1)...(19): siRNA sense strand
gcauggaggucguaucuau

SEQ ID NO: 780020 - RNA, 19 nt, Homo sapiens
  misc_RNA (1)...(19): siRNA sense strand
gaucgugucucaauccauu

SEQ ID NO: 780021 - RNA, 19 nt, Homo sapiens
  misc_RNA (1)...(19): siRNA sense strand
acaaggagaucaugaagga

SEQ ID NO: 780022 - RNA, 19 nt, Homo sapiens
  misc_RNA (1)...(19): siRNA sense strand
ggcccaaccugauucauga

SEQ ID NO: 780023 - RNA, 19 nt, Homo sapiens
  misc_RNA (1)...(19): siRNA sense strand
gaaguggcccaaccugauu

SEQ ID NO: 780024 - RNA, 19 nt, Homo sapiens
  misc_RNA (1)...(19): siRNA sense strand
ggucguaucuauccagucu

SEQ ID NO: 780025 - RNA, 19 nt, Homo sapiens
  misc_RNA (1)...(19): siRNA sense strand
cccagaaccugcugucuug

SEQ ID NO: 780026 - RNA, 19 nt, Homo sapiens
  misc_RNA (1)...(19): siRNA sense strand
gaacguacugggacaacug

SEQ ID NO: 780027 - RNA, 19 nt, Homo sapiens
  misc_RNA (1)...(19): siRNA sense strand
gaggagacgcugccagaug

SEQ ID NO: 780028 - RNA, 19 nt, Homo sapiens
  misc_RNA (1)...(19): siRNA sense strand
ggaggugcaugaggacuuc

SEQ ID NO: 780029 - RNA, 19 nt, Homo sapiens
  misc_RNA (1)...(19): siRNA sense strand
ggaaggacgcucaaauacu

SEQ ID NO: 780030 - RNA, 19 nt, Homo sapiens
  misc_RNA (1)...(19): siRNA sense strand
gauggaaggacgcucaaau

SEQ ID NO: 780031 - RNA, 19 nt, Homo sapiens
  misc_RNA (1)...(19): siRNA sense strand
agaaccugcugucuuguga

SEQ ID NO: 780032 - RNA, 19 nt, Homo sapiens
  misc_RNA (1)...(19): siRNA sense strand
gaacaggcaguggcagugu

SEQ ID NO: 780033 - RNA, 19 nt, Homo sapiens
  misc_RNA (1)...(19): siRNA sense strand
ggagaauggcccuguccaa

SEQ ID NO: 780034 - RNA, 19 nt, Homo sapiens
  misc_RNA (1)...(19): siRNA sense strand
ccaaggauguaugcaugga

SEQ ID NO: 780035 - RNA, 19 nt, Homo sapiens
  misc_RNA (1)...(19): siRNA sense strand
ggacuucuuccuauacaag

SEQ ID NO: 780036 - RNA, 19 nt, Homo sapiens
  misc_RNA (1)...(19): siRNA sense strand
ucaugagccucuugaccaa

SEQ ID NO: 780037 - RNA, 19 nt, Homo sapiens
  misc_RNA (1)...(19): siRNA sense strand
ggcauccgaucgugucuca

SEQ ID NO: 780038 - RNA, 19 nt, Homo sapiens
  misc_RNA (1)...(19): siRNA sense strand
acugugaccucuucugcaa

SEQ ID NO: 780039 - RNA, 19 nt, Homo sapiens
  misc_RNA (1)...(19): siRNA sense strand
ucguaucuauccagucuug

SEQ ID NO: 780040 - RNA, 19 nt, Homo sapiens
  misc_RNA (1)...(19): siRNA sense strand
caucaaccagggcaacuau

SEQ ID NO: 780041 - RNA, 19 nt, Homo sapiens
  misc_RNA (1)...(19): siRNA sense strand
auggaaggacgcucaaaua

SEQ ID NO: 780042 - RNA, 19 nt, Homo sapiens
  misc_RNA (1)...(19): siRNA sense strand
guggcagugugaccaagaa

SEQ ID NO: 780043 - RNA, 19 nt, Homo sapiens
  misc_RNA (1)...(19): siRNA sense strand
cgacugcugcccugacuuc

SEQ ID NO: 780044 - RNA, 19 nt, Homo sapiens
  misc_RNA (1)...(19): siRNA sense strand
cauccgaucgugucucaau

SEQ ID NO: 780045 - RNA, 19 nt, Homo sapiens
  misc_RNA (1)...(19): siRNA sense strand
cgacaaggagaucaugaag

SEQ ID NO: 780046 - RNA, 19 nt, Homo sapiens
  misc_RNA (1)...(19): siRNA sense strand
gggacccacucagucaaga

SEQ ID NO: 780047 - RNA, 19 nt, Homo sapiens
  misc_RNA (1)...(19): siRNA sense strand
ggaacguacugggacaacu

SEQ ID NO: 780048 - RNA, 19 nt, Homo sapiens
  misc_RNA (1)...(19): siRNA sense strand
agaaguggcccaaccugau

SEQ ID NO: 780049 - RNA, 19 nt, Homo sapiens
  misc_RNA (1)...(19): siRNA sense strand
gcaccauccgcccaucuuc

SEQ ID NO: 780050 - RNA, 19 nt, Homo sapiens
  misc_RNA (1)...(19): siRNA sense strand
gcaguggcagugugaccaa

SEQ ID NO: 780051 - RNA, 19 nt, Homo sapiens
  misc_RNA (1)...(19): siRNA sense strand
cguacugggacaacuguaa

SEQ ID NO: 780052 - RNA, 19 nt, Homo sapiens
  misc_RNA (1)...(19): siRNA sense strand
uggaggacaugggucauca

SEQ ID NO: 780053 - RNA, 19 nt, Homo sapiens
  misc_RNA (1)...(19): siRNA sense strand
caacgacaaggagaucaug

SEQ ID NO: 780054 - RNA, 19 nt, Homo sapiens
  misc_RNA (1)...(19): siRNA sense strand
gcagugugaccaagaacca

SEQ ID NO: 780055 - RNA, 19 nt, Homo sapiens
  misc_RNA (1)...(19): siRNA sense strand
ggccuaggcuucaacauca

SEQ ID NO: 780056 - RNA, 19 nt, Homo sapiens
  misc_RNA (1)...(19): siRNA sense strand
ugaagcugguuguccguua

SEQ ID NO: 780057 - RNA, 19 nt, Homo sapiens
  misc_RNA (1)...(19): siRNA sense strand
uguaugagcagcuuuauga

SEQ ID NO: 780058 - RNA, 19 nt, Homo sapiens
  misc_RNA (1)...(19): siRNA sense strand
caucauggguggcaaagag

SEQ ID NO: 780059 - RNA, 19 nt, Homo sapiens
  misc_RNA (1)...(19): siRNA sense strand
gagcaaaacucgcccaucu

SEQ ID NO: 780060 - RNA, 19 nt, Homo sapiens
  misc_RNA (1)...(19): siRNA sense strand
gccaacagcaucagagcua

SEQ ID NO: 780061 - RNA, 19 nt, Homo sapiens
  misc_RNA (1)...(19): siRNA sense strand
cacaguggcugccuucaca

SEQ ID NO: 780062 - RNA, 19 nt, Homo sapiens
  misc_RNA (1)...(19): siRNA sense strand
gaagcugguuguccguuac

SEQ ID NO: 780063 - RNA, 19 nt, Homo sapiens
  misc_RNA (1)...(19): siRNA sense strand
caacaucauggguggcaaa

SEQ ID NO: 780064 - RNA, 19 nt, Homo sapiens
  misc_RNA (1)...(19): siRNA sense strand
gaugagggccuaggcuuca

SEQ ID NO: 780065 - RNA, 19 nt, Homo sapiens
  misc_RNA (1)...(19): siRNA sense strand
gggccuaggcuucaacauc

SEQ ID NO: 780066 - RNA, 19 nt, Homo sapiens
  misc_RNA (1)...(19): siRNA sense strand
cuuggagucucgagguuga

SEQ ID NO: 780067 - RNA, 19 nt, Homo sapiens
  misc_RNA (1)...(19): siRNA sense strand
uaguggagcuacccaagac

SEQ ID NO: 780068 - RNA, 19 nt, Homo sapiens
  misc_RNA (1)...(19): siRNA sense strand
gcaaaacucgcccaucuac

SEQ ID NO: 780069 - RNA, 19 nt, Homo sapiens
  misc_RNA (1)...(19): siRNA sense strand
gggagaaugucuacgauga

SEQ ID NO: 780070 - RNA, 19 nt, Homo sapiens
  misc_RNA (1)...(19): siRNA sense strand
ugaaacaguucuacuccua

SEQ ID NO: 780071 - RNA, 19 nt, Homo sapiens
  misc_RNA (1)...(19): siRNA sense strand
gagaacagcugccgauacu

SEQ ID NO: 780072 - RNA, 19 nt, Homo sapiens
  misc_RNA (1)...(19): siRNA sense strand
gaacagacagcaacaacga

SEQ ID NO: 780073 - RNA, 19 nt, Homo sapiens
  misc_RNA (1)...(19): siRNA sense strand
gaacaggcagcccaucaaa

SEQ ID NO: 780074 - RNA, 19 nt, Homo sapiens
  misc_RNA (1)...(19): siRNA sense strand
ugaccaagaugaaacaguu

SEQ ID NO: 780075 - RNA, 19 nt, Homo sapiens
  misc_RNA (1)...(19): siRNA sense strand
gcugaguccuucuuccaua

SEQ ID NO: 780076 - RNA, 19 nt, Homo sapiens
  misc_RNA (1)...(19): siRNA sense strand
uugggcagcuggacuauua

SEQ ID NO: 780077 - RNA, 19 nt, Homo sapiens
  misc_RNA (1)...(19): siRNA sense strand
acaaagaccacuucuacua

SEQ ID NO: 780078 - RNA, 19 nt, Homo sapiens
  misc_RNA (1)...(19): siRNA sense strand
ggagcugggugccgucaaa

SEQ ID NO: 780079 - RNA, 19 nt, Homo sapiens
  misc_RNA (1)...(19): siRNA sense strand
gcacugaagcugcacaaug

SEQ ID NO: 780080 - RNA, 19 nt, Homo sapiens
  misc_RNA (1)...(19): siRNA sense strand
gcgaagaagccaccgagua

SEQ ID NO: 780081 - RNA, 19 nt, Homo sapiens
  misc_RNA (1)...(19): siRNA sense strand
uggacaagcgcucuaauua

SEQ ID NO: 780082 - RNA, 19 nt, Homo sapiens
  misc_RNA (1)...(19): siRNA sense strand
gggaagggaccuaauguga

SEQ ID NO: 780083 - RNA, 19 nt, Homo sapiens
  misc_RNA (1)...(19): siRNA sense strand
gaacagcugccgauacuac

SEQ ID NO: 780084 - RNA, 19 nt, Homo sapiens
  misc_RNA (1)...(19): siRNA sense strand
ccacaaagaccacuucuac

SEQ ID NO: 780085 - RNA, 19 nt, Homo sapiens
  misc_RNA (1)...(19): siRNA sense strand
caggacaaaugaccaguug

SEQ ID NO: 780086 - RNA, 19 nt, Homo sapiens
  misc_RNA (1)...(19): siRNA sense strand
gaacagcaggagaaaggaa

SEQ ID NO: 780087 - RNA, 19 nt, Homo sapiens
  misc_RNA (1)...(19): siRNA sense strand
ggacugccauggacaucug

SEQ ID NO: 780088 - RNA, 19 nt, Homo sapiens
  misc_RNA (1)...(19): siRNA sense strand
ggagguuuguagaauaugu

SEQ ID NO: 780089 - RNA, 19 nt, Homo sapiens
  misc_RNA (1)...(19): siRNA sense strand
ggacaagcgcucuaauuac

SEQ ID NO: 780090 - RNA, 19 nt, Homo sapiens
  misc_RNA (1)...(19): siRNA sense strand
cgaagaagccaccgaguag

SEQ ID NO: 780091 - RNA, 19 nt, Homo sapiens
  misc_RNA (1)...(19): siRNA sense strand
ccucugaccuucucgaaca

SEQ ID NO: 780092 - RNA, 19 nt, Homo sapiens
  misc_RNA (1)...(19): siRNA sense strand
cagcaucugugcaccucua

SEQ ID NO: 780093 - RNA, 19 nt, Homo sapiens
  misc_RNA (1)...(19): siRNA sense strand
gacaacaaccugcgcauca

SEQ ID NO: 780094 - RNA, 19 nt, Homo sapiens
  misc_RNA (1)...(19): siRNA sense strand
gacaagcgcucuaauuacc

SEQ ID NO: 780095 - RNA, 19 nt, Homo sapiens
  misc_RNA (1)...(19): siRNA sense strand
ccuacgacauccucauuga

SEQ ID NO: 780096 - RNA, 19 nt, Homo sapiens
  misc_RNA (1)...(19): siRNA sense strand
gacucaggauggcuacuuu

SEQ ID NO: 780097 - RNA, 19 nt, Homo sapiens
  misc_RNA (1)...(19): siRNA sense strand
ugaguccacugccgaauuc

SEQ ID NO: 780098 - RNA, 19 nt, Homo sapiens
  misc_RNA (1)...(19): siRNA sense strand
ccaccuaccugcagagcau

SEQ ID NO: 780099 - RNA, 19 nt, Homo sapiens
  misc_RNA (1)...(19): siRNA sense strand
ggagugcgacgcucacaug

SEQ ID NO: 780100 - RNA, 19 nt, Homo sapiens
  misc_RNA (1)...(19): siRNA sense strand
uuacugccgccacaaguua

SEQ ID NO: 780101 - RNA, 19 nt, Homo sapiens
  misc_RNA (1)...(19): siRNA sense strand
caaucuggcugugagcaaa

SEQ ID NO: 780102 - RNA, 19 nt, Homo sapiens
  misc_RNA (1)...(19): siRNA sense strand
gcaagugccaguacaagca

SEQ ID NO: 780103 - RNA, 19 nt, Homo sapiens
  misc_RNA (1)...(19): siRNA sense strand
aaagaccacuucuacuaca

SEQ ID NO: 780104 - RNA, 19 nt, Homo sapiens
  misc_RNA (1)...(19): siRNA sense strand
ucaaggccaucuaccacaa

SEQ ID NO: 780105 - RNA, 19 nt, Homo sapiens
  misc_RNA (1)...(19): siRNA sense strand
gagaaagugcgaacagaca

SEQ ID NO: 780106 - RNA, 19 nt, Homo sapiens
  misc_RNA (1)...(19): siRNA sense strand
cacugaagcugcacaaugg

SEQ ID NO: 780107 - RNA, 19 nt, Homo sapiens
  misc_RNA (1)...(19): siRNA sense strand
gauaccgagauaugaauuu

SEQ ID NO: 780108 - RNA, 19 nt, Homo sapiens
  misc_RNA (1)...(19): siRNA sense strand
ccggagguuuguagaauau

SEQ ID NO: 780109 - RNA, 19 nt, Homo sapiens
  misc_RNA (1)...(19): siRNA sense strand
gcaacaacgagaacucugu

SEQ ID NO: 780110 - RNA, 19 nt, Homo sapiens
  misc_RNA (1)...(19): siRNA sense strand
gaagaagccaccgaguaga

SEQ ID NO: 780111 - RNA, 19 nt, Homo sapiens
  misc_RNA (1)...(19): siRNA sense strand
agggauggcuggacucguu

SEQ ID NO: 780112 - RNA, 19 nt, Homo sapiens
  misc_RNA (1)...(19): siRNA sense strand
gagaggcuauuccgcaacu

SEQ ID NO: 780113 - RNA, 19 nt, Homo sapiens
  misc_RNA (1)...(19): siRNA sense strand
aaacaguucuacuccuaca

SEQ ID NO: 780114 - RNA, 19 nt, Homo sapiens
  misc_RNA (1)...(19): siRNA sense strand
caaagaccacuucuacuac

SEQ ID NO: 780115 - RNA, 19 nt, Homo sapiens
  misc_RNA (1)...(19): siRNA sense strand
gaggcuauuccgcaacuuu

SEQ ID NO: 780116 - RNA, 19 nt, Homo sapiens
  misc_RNA (1)...(19): siRNA sense strand
gcugugagcaaacuagaga

SEQ ID NO: 780117 - RNA, 19 nt, Homo sapiens
  misc_RNA (1)...(19): siRNA sense strand
cgagauaugaauuucuuga

SEQ ID NO: 780118 - RNA, 19 nt, Homo sapiens
  misc_RNA (1)...(19): siRNA sense strand
uggcguuucucucccgaua

SEQ ID NO: 780119 - RNA, 19 nt, Homo sapiens
  misc_RNA (1)...(19): siRNA sense strand
gaggguaaagccaacaaga

SEQ ID NO: 780120 - RNA, 19 nt, Homo sapiens
  misc_RNA (1)...(19): siRNA sense strand
uuccagggcuuucugauca

SEQ ID NO: 780121 - RNA, 19 nt, Homo sapiens
  misc_RNA (1)...(19): siRNA sense strand
ggagaacagcugccgauac

SEQ ID NO: 780122 - RNA, 19 nt, Homo sapiens
  misc_RNA (1)...(19): siRNA sense strand
gaagcaccagccugaguug

SEQ ID NO: 780123 - RNA, 19 nt, Homo sapiens
  misc_RNA (1)...(19): siRNA sense strand
cgagaacucuguccccaaa

SEQ ID NO: 780124 - RNA, 19 nt, Homo sapiens
  misc_RNA (1)...(19): siRNA sense strand
gcuggacuauuaccuguac

SEQ ID NO: 780125 - RNA, 19 nt, Homo sapiens
  misc_RNA (1)...(19): siRNA sense strand
guggacaagcgcucuaauu

SEQ ID NO: 780126 - RNA, 19 nt, Homo sapiens
  misc_RNA (1)...(19): siRNA sense strand
gcacugccgccaggagauu

SEQ ID NO: 780127 - RNA, 19 nt, Homo sapiens
  misc_RNA (1)...(19): siRNA sense strand
ggguggaucccgucaaugu

SEQ ID NO: 780128 - RNA, 19 nt, Homo sapiens
  misc_RNA (1)...(19): siRNA sense strand
aagagaaagugcgaacaga

SEQ ID NO: 780129 - RNA, 19 nt, Homo sapiens
  misc_RNA (1)...(19): siRNA sense strand
uggaugagccgguggguau

SEQ ID NO: 780130 - RNA, 19 nt, Homo sapiens
  misc_RNA (1)...(19): siRNA sense strand
uugaagccguggugaauca

SEQ ID NO: 780131 - RNA, 19 nt, Homo sapiens
  misc_RNA (1)...(19): siRNA sense strand
gaaagagaaagugcgaaca

SEQ ID NO: 780132 - RNA, 19 nt, Homo sapiens
  misc_RNA (1)...(19): siRNA sense strand
cgaauucacacacuacaag

SEQ ID NO: 780133 - RNA, 19 nt, Homo sapiens
  misc_RNA (1)...(19): siRNA sense strand
caaguuagggcugcugaug

SEQ ID NO: 780134 - RNA, 19 nt, Homo sapiens
  misc_RNA (1)...(19): siRNA sense strand
ggauguggacugccaugga

SEQ ID NO: 780135 - RNA, 19 nt, Homo sapiens
  misc_RNA (1)...(19): siRNA sense strand
gcaguugcagcgcauguuc

SEQ ID NO: 780136 - RNA, 19 nt, Homo sapiens
  misc_RNA (1)...(19): siRNA sense strand
gcgcaucaccaacuggaau

SEQ ID NO: 780137 - RNA, 19 nt, Homo sapiens
  misc_RNA (1)...(19): siRNA sense strand
agccugaguuggcgaagaa

SEQ ID NO: 780138 - RNA, 19 nt, Homo sapiens
  misc_RNA (1)...(19): siRNA sense strand
ugaauuucuugaagucaca

SEQ ID NO: 780139 - RNA, 19 nt, Homo sapiens
  misc_RNA (1)...(19): siRNA sense strand
gaaaggaaaaggacauaca

SEQ ID NO: 780140 - RNA, 19 nt, Homo sapiens
  misc_RNA (1)...(19): siRNA sense strand
ucaucacccuggagacuca

SEQ ID NO: 780141 - RNA, 19 nt, Homo sapiens
  misc_RNA (1)...(19): siRNA sense strand
cagccaacccggucagaau

SEQ ID NO: 780142 - RNA, 19 nt, Homo sapiens
  misc_RNA (1)...(19): siRNA sense strand
ggguaaagccaacaagaac

SEQ ID NO: 780143 - RNA, 19 nt, Homo sapiens
  misc_RNA (1)...(19): siRNA sense strand
gggagaacagcugccgaua

SEQ ID NO: 780144 - RNA, 19 nt, Homo sapiens
  misc_RNA (1)...(19): siRNA sense strand
accggagguuuguagaaua

SEQ ID NO: 780145 - RNA, 19 nt, Homo sapiens
  misc_RNA (1)...(19): siRNA sense strand
guaaagccaacaagaacgu

SEQ ID NO: 780146 - RNA, 19 nt, Homo sapiens
  misc_RNA (1)...(19): siRNA sense strand
gugaaucaggaaaucauug

SEQ ID NO: 780147 - RNA, 19 nt, Homo sapiens
  misc_RNA (1)...(19): siRNA sense strand
ggugaaucaggaaaucauu

SEQ ID NO: 780148 - RNA, 19 nt, Homo sapiens
  misc_RNA (1)...(19): siRNA sense strand
accgagauaugaauuucuu

SEQ ID NO: 780149 - RNA, 19 nt, Homo sapiens
  misc_RNA (1)...(19): siRNA sense strand
ggucagaaucgccuuuguc

SEQ ID NO: 780150 - RNA, 19 nt, Homo sapiens
  misc_RNA (1)...(19): siRNA sense strand
caaggccaucuaccacaaa

SEQ ID NO: 780151 - RNA, 19 nt, Homo sapiens
  misc_RNA (1)...(19): siRNA sense strand
cgaacaggcagcccaucaa

SEQ ID NO: 780152 - RNA, 19 nt, Homo sapiens
  misc_RNA (1)...(19): siRNA sense strand
caucugugcaccucuacuu

SEQ ID NO: 780153 - RNA, 19 nt, Homo sapiens
  misc_RNA (1)...(19): siRNA sense strand
agacgcuggucguguggaa

SEQ ID NO: 780154 - RNA, 19 nt, Homo sapiens
  misc_RNA (1)...(19): siRNA sense strand
auaccgagauaugaauuuc

SEQ ID NO: 780155 - RNA, 19 nt, Homo sapiens
  misc_RNA (1)...(19): siRNA sense strand
ccugggacuucuucaucaa

SEQ ID NO: 780156 - RNA, 19 nt, Homo sapiens
  misc_RNA (1)...(19): siRNA sense strand
caccuuguaccacuccuuu

SEQ ID NO: 780157 - RNA, 19 nt, Homo sapiens
  misc_RNA (1)...(19): siRNA sense strand
ucauugggcagcuggacua

SEQ ID NO: 780158 - RNA, 19 nt, Homo sapiens
  misc_RNA (1)...(19): siRNA sense strand
ccaagaugaaacaguucua

SEQ ID NO: 780159 - RNA, 19 nt, Homo sapiens
  misc_RNA (1)...(19): siRNA sense strand
ggagaaugucuacgaugag

SEQ ID NO: 780160 - RNA, 19 nt, Homo sapiens
  misc_RNA (1)...(19): siRNA sense strand
guccucagccugcccauca

SEQ ID NO: 780161 - RNA, 19 nt, Homo sapiens
  misc_RNA (1)...(19): siRNA sense strand
agaagcaccagccugaguu

SEQ ID NO: 780162 - RNA, 19 nt, Homo sapiens
  misc_RNA (1)...(19): siRNA sense strand
ccagccuccuguccaccua

SEQ ID NO: 780163 - RNA, 19 nt, Homo sapiens
  misc_RNA (1)...(19): siRNA sense strand
ccuccgcaaugccuacaug

SEQ ID NO: 780164 - RNA, 19 nt, Homo sapiens
  misc_RNA (1)...(19): siRNA sense strand
cugccgaauucacacacua

SEQ ID NO: 780165 - RNA, 19 nt, Homo sapiens
  misc_RNA (1)...(19): siRNA sense strand
caccuacgacauccucauu

SEQ ID NO: 780166 - RNA, 19 nt, Homo sapiens
  misc_RNA (1)...(19): siRNA sense strand
guggaucccgucaauguca

SEQ ID NO: 780167 - RNA, 19 nt, Homo sapiens
  misc_RNA (1)...(19): siRNA sense strand
caagguucauucggaagca

SEQ ID NO: 780168 - RNA, 19 nt, Homo sapiens
  misc_RNA (1)...(19): siRNA sense strand
ggucuucgacgggcugaga

SEQ ID NO: 780169 - RNA, 19 nt, Homo sapiens
  misc_RNA (1)...(19): siRNA sense strand
uaagaaagcuggauugacu

SEQ ID NO: 780170 - RNA, 19 nt, Homo sapiens
  misc_RNA (1)...(19): siRNA sense strand
gaagagucccuuaccauga

SEQ ID NO: 780171 - RNA, 19 nt, Homo sapiens
  misc_RNA (1)...(19): siRNA sense strand
ugacuguuguuccuucaua

SEQ ID NO: 780172 - RNA, 19 nt, Homo sapiens
  misc_RNA (1)...(19): siRNA sense strand
cuaccaagguucuuucaga

SEQ ID NO: 780173 - RNA, 19 nt, Homo sapiens
  misc_RNA (1)...(19): siRNA sense strand
caaaaucucuggaguggaa

SEQ ID NO: 780174 - RNA, 19 nt, Homo sapiens
  misc_RNA (1)...(19): siRNA sense strand
ggaauggagcuaucucaga

SEQ ID NO: 780175 - RNA, 19 nt, Homo sapiens
  misc_RNA (1)...(19): siRNA sense strand
cauauaaugccuugagaaa

SEQ ID NO: 780176 - RNA, 19 nt, Homo sapiens
  misc_RNA (1)...(19): siRNA sense strand
uggauagacuucugcguaa

SEQ ID NO: 780177 - RNA, 19 nt, Homo sapiens
  misc_RNA (1)...(19): siRNA sense strand
ggaacauucuaccaagguu

SEQ ID NO: 780178 - RNA, 19 nt, Homo sapiens
  misc_RNA (1)...(19): siRNA sense strand
aaagcuggauugacuguug

SEQ ID NO: 780179 - RNA, 19 nt, Homo sapiens
  misc_RNA (1)...(19): siRNA sense strand
aaaggcaguuuguuuggaa

SEQ ID NO: 780180 - RNA, 19 nt, Homo sapiens
  misc_RNA (1)...(19): siRNA sense strand
gggcuggacuuagaucaga

SEQ ID NO: 780181 - RNA, 19 nt, Homo sapiens
  misc_RNA (1)...(19): siRNA sense strand
ucacgaaagagccaaguuu

SEQ ID NO: 780182 - RNA, 19 nt, Homo sapiens
  misc_RNA (1)...(19): siRNA sense strand
ucaauuaggcaucacgaaa

SEQ ID NO: 780183 - RNA, 19 nt, Homo sapiens
  misc_RNA (1)...(19): siRNA sense strand
ggaguggaauggagcuauc

SEQ ID NO: 780184 - RNA, 19 nt, Homo sapiens
  misc_RNA (1)...(19): siRNA sense strand
uaccaugacccacagauuu

SEQ ID NO: 780185 - RNA, 19 nt, Homo sapiens
  misc_RNA (1)...(19): siRNA sense strand
cuucagauguggaaaauaa

SEQ ID NO: 780186 - RNA, 19 nt, Homo sapiens
  misc_RNA (1)...(19): siRNA sense strand
gauagacuucugcguaaga

SEQ ID NO: 780187 - RNA, 19 nt, Homo sapiens
  misc_RNA (1)...(19): siRNA sense strand
cccaugggcuggacuuaga

SEQ ID NO: 780188 - RNA, 19 nt, Homo sapiens
  misc_RNA (1)...(19): siRNA sense strand
ucaaggggcugagugaaua

SEQ ID NO: 780189 - RNA, 19 nt, Homo sapiens
  misc_RNA (1)...(19): siRNA sense strand
ucagaucaauuaggcauca

SEQ ID NO: 780190 - RNA, 19 nt, Homo sapiens
  misc_RNA (1)...(19): siRNA sense strand
guuguuccuucauauaaug

SEQ ID NO: 780191 - RNA, 19 nt, Homo sapiens
  misc_RNA (1)...(19): siRNA sense strand
auaaugaggguguaacaaa

SEQ ID NO: 780192 - RNA, 19 nt, Homo sapiens
  misc_RNA (1)...(19): siRNA sense strand
aaagaagagucccuuacca

SEQ ID NO: 780193 - RNA, 19 nt, Homo sapiens
  misc_RNA (1)...(19): siRNA sense strand
gaggguguaacaaaccaua

SEQ ID NO: 780194 - RNA, 19 nt, Homo sapiens
  misc_RNA (1)...(19): siRNA sense strand
caaaccauacaccaguuaa

SEQ ID NO: 780195 - RNA, 19 nt, Homo sapiens
  misc_RNA (1)...(19): siRNA sense strand
gaacuggaacauucuacca

SEQ ID NO: 780196 - RNA, 19 nt, Homo sapiens
  misc_RNA (1)...(19): siRNA sense strand
uaaugaggguguaacaaac

SEQ ID NO: 780197 - RNA, 19 nt, Homo sapiens
  misc_RNA (1)...(19): siRNA sense strand
aauuaggcaucacgaaaga

SEQ ID NO: 780198 - RNA, 19 nt, Homo sapiens
  misc_RNA (1)...(19): siRNA sense strand
gaaagagccaaguuuuauu

SEQ ID NO: 780199 - RNA, 19 nt, Homo sapiens
  misc_RNA (1)...(19): siRNA sense strand
ccauacaccaguuaaugaa

SEQ ID NO: 780200 - RNA, 19 nt, Homo sapiens
  misc_RNA (1)...(19): siRNA sense strand
acaaaccauacaccaguua

SEQ ID NO: 780201 - RNA, 19 nt, Homo sapiens
  misc_RNA (1)...(19): siRNA sense strand
gagccaaguuuuauuucaa

SEQ ID NO: 780202 - RNA, 19 nt, Homo sapiens
  misc_RNA (1)...(19): siRNA sense strand
ggaaaauaaugagggugua

SEQ ID NO: 780203 - RNA, 19 nt, Homo sapiens
  misc_RNA (1)...(19): siRNA sense strand
aagaaacugcuccagcuuu

SEQ ID NO: 780204 - RNA, 19 nt, Homo sapiens
  misc_RNA (1)...(19): siRNA sense strand
gugaauaccagaggaacuu

SEQ ID NO: 780205 - RNA, 19 nt, Homo sapiens
  misc_RNA (1)...(19): siRNA sense strand
ggauagacuucugcguaag

SEQ ID NO: 780206 - RNA, 19 nt, Homo sapiens
  misc_RNA (1)...(19): siRNA sense strand
caauuaggcaucacgaaag

SEQ ID NO: 780207 - RNA, 19 nt, Homo sapiens
  misc_RNA (1)...(19): siRNA sense strand
gaaaauaaugaggguguaa

SEQ ID NO: 780208 - RNA, 19 nt, Homo sapiens
  misc_RNA (1)...(19): siRNA sense strand
gacuguuguuccuucauau

SEQ ID NO: 780209 - RNA, 19 nt, Homo sapiens
  misc_RNA (1)...(19): siRNA sense strand
cagaaaauguagauaaugg

SEQ ID NO: 780210 - RNA, 19 nt, Homo sapiens
  misc_RNA (1)...(19): siRNA sense strand
cgaaagagccaaguuuuau

SEQ ID NO: 780211 - RNA, 19 nt, Homo sapiens
  misc_RNA (1)...(19): siRNA sense strand
ucacaagaagcagaacaaa

SEQ ID NO: 780212 - RNA, 19 nt, Homo sapiens
  misc_RNA (1)...(19): siRNA sense strand
agaaacugcuccagcuuuu

SEQ ID NO: 780213 - RNA, 19 nt, Homo sapiens
  misc_RNA (1)...(19): siRNA sense strand
aacaaaccauacaccaguu

SEQ ID NO: 780214 - RNA, 19 nt, Homo sapiens
  misc_RNA (1)...(19): siRNA sense strand
cauacaccaguuaaugaaa

SEQ ID NO: 780215 - RNA, 19 nt, Homo sapiens
  misc_RNA (1)...(19): siRNA sense strand
cguaagaaagcuggauuga

SEQ ID NO: 780216 - RNA, 19 nt, Homo sapiens
  misc_RNA (1)...(19): siRNA sense strand
auaaugccuugagaaauuc

SEQ ID NO: 780217 - RNA, 19 nt, Homo sapiens
  misc_RNA (1)...(19): siRNA sense strand
ucauauaaugccuugagaa

SEQ ID NO: 780218 - RNA, 19 nt, Homo sapiens
  misc_RNA (1)...(19): siRNA sense strand
ggaaacaccaaaaucacaa

SEQ ID NO: 780219 - RNA, 19 nt, Homo sapiens
  misc_RNA (1)...(19): siRNA sense strand
gcguaagaaagcuggauug

SEQ ID NO: 780220 - RNA, 19 nt, Homo sapiens
  misc_RNA (1)...(19): siRNA sense strand
gcaguuuguuuggaagacu

SEQ ID NO: 780221 - RNA, 19 nt, Homo sapiens
  misc_RNA (1)...(19): siRNA sense strand
aaagaaacugcuccagcuu

SEQ ID NO: 780222 - RNA, 19 nt, Homo sapiens
  misc_RNA (1)...(19): siRNA sense strand
aaccauacaccaguuaaug

SEQ ID NO: 780223 - RNA, 19 nt, Homo sapiens
  misc_RNA (1)...(19): siRNA sense strand
gaaagcuggauugacuguu

SEQ ID NO: 780224 - RNA, 19 nt, Homo sapiens
  misc_RNA (1)...(19): siRNA sense strand
aagagucccuuaccaugac

SEQ ID NO: 780225 - RNA, 19 nt, Homo sapiens
  misc_RNA (1)...(19): siRNA sense strand
gaagagucccuuaccauga

SEQ ID NO: 780226 - RNA, 19 nt, Homo sapiens
  misc_RNA (1)...(19): siRNA sense strand
cuaccaagguucuuucaga

SEQ ID NO: 780227 - RNA, 19 nt, Homo sapiens
  misc_RNA (1)...(19): siRNA sense strand
caaaaucucuggaguggaa

SEQ ID NO: 780228 - RNA, 19 nt, Homo sapiens
  misc_RNA (1)...(19): siRNA sense strand
ggaauggagcuaucucaga

SEQ ID NO: 780229 - RNA, 19 nt, Homo sapiens
  misc_RNA (1)...(19): siRNA sense strand
ggaacauucuaccaagguu

SEQ ID NO: 780230 - RNA, 19 nt, Homo sapiens
  misc_RNA (1)...(19): siRNA sense strand
gggcuggacuuagaucaga

SEQ ID NO: 780231 - RNA, 19 nt, Homo sapiens
  misc_RNA (1)...(19): siRNA sense strand
ucacgaaagagccaaguuu

SEQ ID NO: 780232 - RNA, 19 nt, Homo sapiens
  misc_RNA (1)...(19): siRNA sense strand
ucaauuaggcaucacgaaa

SEQ ID NO: 780233 - RNA, 19 nt, Homo sapiens
  misc_RNA (1)...(19): siRNA sense strand
ggaguggaauggagcuauc

SEQ ID NO: 780234 - RNA, 19 nt, Homo sapiens
  misc_RNA (1)...(19): siRNA sense strand
uaccaugacccacagauuu

SEQ ID NO: 780235 - RNA, 19 nt, Homo sapiens
  misc_RNA (1)...(19): siRNA sense strand
cuucagauguggaaaauaa

SEQ ID NO: 780236 - RNA, 19 nt, Homo sapiens
  misc_RNA (1)...(19): siRNA sense strand
cccaugggcuggacuuaga

SEQ ID NO: 780237 - RNA, 19 nt, Homo sapiens
  misc_RNA (1)...(19): siRNA sense strand
ucaaggggcugagugaaua

SEQ ID NO: 780238 - RNA, 19 nt, Homo sapiens
  misc_RNA (1)...(19): siRNA sense strand
ucagaucaauuaggcauca

SEQ ID NO: 780239 - RNA, 19 nt, Homo sapiens
  misc_RNA (1)...(19): siRNA sense strand
auaaugaggguguaacaaa

SEQ ID NO: 780240 - RNA, 19 nt, Homo sapiens
  misc_RNA (1)...(19): siRNA sense strand
aaagaagagucccuuacca

SEQ ID NO: 780241 - RNA, 19 nt, Homo sapiens
  misc_RNA (1)...(19): siRNA sense strand
gaggguguaacaaaccaua

SEQ ID NO: 780242 - RNA, 19 nt, Homo sapiens
  misc_RNA (1)...(19): siRNA sense strand
caaaccauacaccaguuaa

SEQ ID NO: 780243 - RNA, 19 nt, Homo sapiens
  misc_RNA (1)...(19): siRNA sense strand
gaacuggaacauucuacca

SEQ ID NO: 780244 - RNA, 19 nt, Homo sapiens
  misc_RNA (1)...(19): siRNA sense strand
uaaugaggguguaacaaac

SEQ ID NO: 780245 - RNA, 19 nt, Homo sapiens
  misc_RNA (1)...(19): siRNA sense strand
aauuaggcaucacgaaaga

SEQ ID NO: 780246 - RNA, 19 nt, Homo sapiens
  misc_RNA (1)...(19): siRNA sense strand
gaaagagccaaguuuuauu

SEQ ID NO: 780247 - RNA, 19 nt, Homo sapiens
  misc_RNA (1)...(19): siRNA sense strand
ccauacaccaguuaaugaa

SEQ ID NO: 780248 - RNA, 19 nt, Homo sapiens
  misc_RNA (1)...(19): siRNA sense strand
acaaaccauacaccaguua

SEQ ID NO: 780249 - RNA, 19 nt, Homo sapiens
  misc_RNA (1)...(19): siRNA sense strand
gagccaaguuuuauuucaa

SEQ ID NO: 780250 - RNA, 19 nt, Homo sapiens
  misc_RNA (1)...(19): siRNA sense strand
ggaaaauaaugagggugua

SEQ ID NO: 780251 - RNA, 19 nt, Homo sapiens
  misc_RNA (1)...(19): siRNA sense strand
gugaauaccagaggaacuu

SEQ ID NO: 780252 - RNA, 19 nt, Homo sapiens
  misc_RNA (1)...(19): siRNA sense strand
caauuaggcaucacgaaag

SEQ ID NO: 780253 - RNA, 19 nt, Homo sapiens
  misc_RNA (1)...(19): siRNA sense strand
gaaaauaaugaggguguaa

SEQ ID NO: 780254 - RNA, 19 nt, Homo sapiens
  misc_RNA (1)...(19): siRNA sense strand
cagaaaauguagauaaugg

SEQ ID NO: 780255 - RNA, 19 nt, Homo sapiens
  misc_RNA (1)...(19): siRNA sense strand
cgaaagagccaaguuuuau

SEQ ID NO: 780256 - RNA, 19 nt, Homo sapiens
  misc_RNA (1)...(19): siRNA sense strand
ucacaagaagcagaacaaa

SEQ ID NO: 780257 - RNA, 19 nt, Homo sapiens
  misc_RNA (1)...(19): siRNA sense strand
aacaaaccauacaccaguu

SEQ ID NO: 780258 - RNA, 19 nt, Homo sapiens
  misc_RNA (1)...(19): siRNA sense strand
cauacaccaguuaaugaaa

SEQ ID NO: 780259 - RNA, 19 nt, Homo sapiens
  misc_RNA (1)...(19): siRNA sense strand
ggaaacaccaaaaucacaa

SEQ ID NO: 780260 - RNA, 19 nt, Homo sapiens
  misc_RNA (1)...(19): siRNA sense strand
aagagucccuuaccaugac

SEQ ID NO: 780261 - RNA, 19 nt, Homo sapiens
  misc_RNA (1)...(19): siRNA sense strand
aaccauacaccaguuaaug

SEQ ID NO: 780262 - RNA, 19 nt, Homo sapiens
  misc_RNA (1)...(19): siRNA sense strand
gcaaaccuauaucagaaua

SEQ ID NO: 780263 - RNA, 19 nt, Homo sapiens
  misc_RNA (1)...(19): siRNA sense strand
ggaaaucaguccucuuugu

SEQ ID NO: 780264 - RNA, 19 nt, Homo sapiens
  misc_RNA (1)...(19): siRNA sense strand
gcacaggacaggcacuuua

SEQ ID NO: 780265 - RNA, 19 nt, Homo sapiens
  misc_RNA (1)...(19): siRNA sense strand
gaaaucaguccucuuugua

SEQ ID NO: 780266 - RNA, 19 nt, Homo sapiens
  misc_RNA (1)...(19): siRNA sense strand
gaaagggucugugaagaau

SEQ ID NO: 780267 - RNA, 19 nt, Homo sapiens
  misc_RNA (1)...(19): siRNA sense strand
ggcgaaaucuuguuugaga

SEQ ID NO: 780268 - RNA, 19 nt, Homo sapiens
  misc_RNA (1)...(19): siRNA sense strand
aagcucaccuccacaauaa

SEQ ID NO: 780269 - RNA, 19 nt, Homo sapiens
  misc_RNA (1)...(19): siRNA sense strand
gaaaugacacaggauauug

SEQ ID NO: 780270 - RNA, 19 nt, Homo sapiens
  misc_RNA (1)...(19): siRNA sense strand
gaacuugaacagaaauuug

SEQ ID NO: 780271 - RNA, 19 nt, Homo sapiens
  misc_RNA (1)...(19): siRNA sense strand
gaagugugcugacauuugc

SEQ ID NO: 780272 - RNA, 19 nt, Homo sapiens
  misc_RNA (1)...(19): siRNA sense strand
gaaacagccugguaacacu

SEQ ID NO: 780273 - RNA, 19 nt, Homo sapiens
  misc_RNA (1)...(19): siRNA sense strand
caacaggcagaaugaauuu

SEQ ID NO: 780274 - RNA, 19 nt, Homo sapiens
  misc_RNA (1)...(19): siRNA sense strand
ggaaaugacacaggauauu

SEQ ID NO: 780275 - RNA, 19 nt, Homo sapiens
  misc_RNA (1)...(19): siRNA sense strand
gcugggagauauacgacua

SEQ ID NO: 780276 - RNA, 19 nt, Homo sapiens
  misc_RNA (1)...(19): siRNA sense strand
aaucaucacuggcgaucua

SEQ ID NO: 780277 - RNA, 19 nt, Homo sapiens
  misc_RNA (1)...(19): siRNA sense strand
acagaaauuugaacuggaa

SEQ ID NO: 780278 - RNA, 19 nt, Homo sapiens
  misc_RNA (1)...(19): siRNA sense strand
caauacccauggacucauu

SEQ ID NO: 780279 - RNA, 19 nt, Homo sapiens
  misc_RNA (1)...(19): siRNA sense strand
aaggugaacuugaacagaa

SEQ ID NO: 780280 - RNA, 19 nt, Homo sapiens
  misc_RNA (1)...(19): siRNA sense strand
ggacaggcacuuuaugcuu

SEQ ID NO: 780281 - RNA, 19 nt, Homo sapiens
  misc_RNA (1)...(19): siRNA sense strand
gaagauuaccacagccaaa

SEQ ID NO: 780282 - RNA, 19 nt, Homo sapiens
  misc_RNA (1)...(19): siRNA sense strand
caaagauacuuccaugcau

SEQ ID NO: 780283 - RNA, 19 nt, Homo sapiens
  misc_RNA (1)...(19): siRNA sense strand
cauucaccauuucaaguua

SEQ ID NO: 780284 - RNA, 19 nt, Homo sapiens
  misc_RNA (1)...(19): siRNA sense strand
ggagugaaagggucuguga

SEQ ID NO: 780285 - RNA, 19 nt, Homo sapiens
  misc_RNA (1)...(19): siRNA sense strand
caaggcauaugcucuccaa

SEQ ID NO: 780286 - RNA, 19 nt, Homo sapiens
  misc_RNA (1)...(19): siRNA sense strand
uugcaaaccuauaucagaa

SEQ ID NO: 780287 - RNA, 19 nt, Homo sapiens
  misc_RNA (1)...(19): siRNA sense strand
cagcugggcuccuugaucu

SEQ ID NO: 780288 - RNA, 19 nt, Homo sapiens
  misc_RNA (1)...(19): siRNA sense strand
ugaaagggucugugaagaa

SEQ ID NO: 780289 - RNA, 19 nt, Homo sapiens
  misc_RNA (1)...(19): siRNA sense strand
ccuccacaauaaagacuua

SEQ ID NO: 780290 - RNA, 19 nt, Homo sapiens
  misc_RNA (1)...(19): siRNA sense strand
ggaugaagacuaccuugga

SEQ ID NO: 780291 - RNA, 19 nt, Homo sapiens
  misc_RNA (1)...(19): siRNA sense strand
gcgaaaucuuguuugagaa

SEQ ID NO: 780292 - RNA, 19 nt, Homo sapiens
  misc_RNA (1)...(19): siRNA sense strand
ggcauaugcucuccaaagu

SEQ ID NO: 780293 - RNA, 19 nt, Homo sapiens
  misc_RNA (1)...(19): siRNA sense strand
cagaaugccaaauguguuu

SEQ ID NO: 780294 - RNA, 19 nt, Homo sapiens
  misc_RNA (1)...(19): siRNA sense strand
gugaaagggucugugaaga

SEQ ID NO: 780295 - RNA, 19 nt, Homo sapiens
  misc_RNA (1)...(19): siRNA sense strand
aaagcucaccuccacaaua

SEQ ID NO: 780296 - RNA, 19 nt, Homo sapiens
  misc_RNA (1)...(19): siRNA sense strand
aaagauuccaucccuagua

SEQ ID NO: 780297 - RNA, 19 nt, Homo sapiens
  misc_RNA (1)...(19): siRNA sense strand
guugagagguguggcgaaa

SEQ ID NO: 780298 - RNA, 19 nt, Homo sapiens
  misc_RNA (1)...(19): siRNA sense strand
ugagagguguggcgaaauc

SEQ ID NO: 780299 - RNA, 19 nt, Homo sapiens
  misc_RNA (1)...(19): siRNA sense strand
ugucugugcuggagaauca

SEQ ID NO: 780300 - RNA, 19 nt, Homo sapiens
  misc_RNA (1)...(19): siRNA sense strand
guggcgaaaucuuguuuga

SEQ ID NO: 780301 - RNA, 19 nt, Homo sapiens
  misc_RNA (1)...(19): siRNA sense strand
ucaacaggcagaaugaauu

SEQ ID NO: 780302 - RNA, 19 nt, Homo sapiens
  misc_RNA (1)...(19): siRNA sense strand
gcuccuacccauucauuga

SEQ ID NO: 780303 - RNA, 19 nt, Homo sapiens
  misc_RNA (1)...(19): siRNA sense strand
aagauuccaucccuaguau

SEQ ID NO: 780304 - RNA, 19 nt, Homo sapiens
  misc_RNA (1)...(19): siRNA sense strand
gcugcuucguggaauuaua

SEQ ID NO: 780305 - RNA, 19 nt, Homo sapiens
  misc_RNA (1)...(19): siRNA sense strand
cacuggcgaucuacaauug

SEQ ID NO: 780306 - RNA, 19 nt, Homo sapiens
  misc_RNA (1)...(19): siRNA sense strand
gcugacauuugcaauccuu

SEQ ID NO: 780307 - RNA, 19 nt, Homo sapiens
  misc_RNA (1)...(19): siRNA sense strand
ccacaauaaagacuuaaga

SEQ ID NO: 780308 - RNA, 19 nt, Homo sapiens
  misc_RNA (1)...(19): siRNA sense strand
ucaaagauacuuccaugca

SEQ ID NO: 780309 - RNA, 19 nt, Homo sapiens
  misc_RNA (1)...(19): siRNA sense strand
ucaguccucuuuguaauca

SEQ ID NO: 780310 - RNA, 19 nt, Homo sapiens
  misc_RNA (1)...(19): siRNA sense strand
gaucagaaugccaaaugug

SEQ ID NO: 780311 - RNA, 19 nt, Homo sapiens
  misc_RNA (1)...(19): siRNA sense strand
ugaagugugcugacauuug

SEQ ID NO: 780312 - RNA, 19 nt, Homo sapiens
  misc_RNA (1)...(19): siRNA sense strand
ggaaacagccugguaacac

SEQ ID NO: 780313 - RNA, 19 nt, Homo sapiens
  misc_RNA (1)...(19): siRNA sense strand
ggacaagcaaggcauaugc

SEQ ID NO: 780314 - RNA, 19 nt, Homo sapiens
  misc_RNA (1)...(19): siRNA sense strand
aaucaguccucuuuguaau

SEQ ID NO: 780315 - RNA, 19 nt, Homo sapiens
  misc_RNA (1)...(19): siRNA sense strand
aaaucaguccucuuuguaa

SEQ ID NO: 780316 - RNA, 19 nt, Homo sapiens
  misc_RNA (1)...(19): siRNA sense strand
gacauuugcaauccuugua

SEQ ID NO: 780317 - RNA, 19 nt, Homo sapiens
  misc_RNA (1)...(19): siRNA sense strand
aaauugguuucaugagcua

SEQ ID NO: 780318 - RNA, 19 nt, Homo sapiens
  misc_RNA (1)...(19): siRNA sense strand
ugacacaggauauugaaca

SEQ ID NO: 780319 - RNA, 19 nt, Homo sapiens
  misc_RNA (1)...(19): siRNA sense strand
gggcccauuucacggguaa

SEQ ID NO: 780320 - RNA, 19 nt, Homo sapiens
  misc_RNA (1)...(19): siRNA sense strand
cuggaaaucaguccucuuu

SEQ ID NO: 780321 - RNA, 19 nt, Homo sapiens
  misc_RNA (1)...(19): siRNA sense strand
cuugaagugugcugacauu

SEQ ID NO: 780322 - RNA, 19 nt, Homo sapiens
  misc_RNA (1)...(19): siRNA sense strand
gaucuuggcaacagacauc

SEQ ID NO: 780323 - RNA, 19 nt, Homo sapiens
  misc_RNA (1)...(19): siRNA sense strand
agucaugguucaagaagau

SEQ ID NO: 780324 - RNA, 19 nt, Homo sapiens
  misc_RNA (1)...(19): siRNA sense strand
gaaagauuccaucccuagu

SEQ ID NO: 780325 - RNA, 19 nt, Homo sapiens
  misc_RNA (1)...(19): siRNA sense strand
gagguguggcgaaaucuug

SEQ ID NO: 780326 - RNA, 19 nt, Homo sapiens
  misc_RNA (1)...(19): siRNA sense strand
uggcaugcuucgagaauca

SEQ ID NO: 780327 - RNA, 19 nt, Homo sapiens
  misc_RNA (1)...(19): siRNA sense strand
ggacucauucaccauuuca

SEQ ID NO: 780328 - RNA, 19 nt, Homo sapiens
  misc_RNA (1)...(19): siRNA sense strand
aagggucugugaagaauuc

SEQ ID NO: 780329 - RNA, 19 nt, Homo sapiens
  misc_RNA (1)...(19): siRNA sense strand
gaaagcucaccuccacaau

SEQ ID NO: 780330 - RNA, 19 nt, Homo sapiens
  misc_RNA (1)...(19): siRNA sense strand
ugaaagcucaccuccacaa

SEQ ID NO: 780331 - RNA, 19 nt, Homo sapiens
  misc_RNA (1)...(19): siRNA sense strand
gacaucaacaggcagaaug

SEQ ID NO: 780332 - RNA, 19 nt, Homo sapiens
  misc_RNA (1)...(19): siRNA sense strand
cgaucagaaugccaaaugu

SEQ ID NO: 780333 - RNA, 19 nt, Homo sapiens
  misc_RNA (1)...(19): siRNA sense strand
gcauaugcucuccaaagug

SEQ ID NO: 780334 - RNA, 19 nt, Homo sapiens
  misc_RNA (1)...(19): siRNA sense strand
ucagaucgccuugaagugu

SEQ ID NO: 780335 - RNA, 19 nt, Homo sapiens
  misc_RNA (1)...(19): siRNA sense strand
uaaccaccaucuugcaaac

SEQ ID NO: 780336 - RNA, 19 nt, Homo sapiens
  misc_RNA (1)...(19): siRNA sense strand
uagauauggugaccuuaca

SEQ ID NO: 780337 - RNA, 19 nt, Homo sapiens
  misc_RNA (1)...(19): siRNA sense strand
aaggaaaugacacaggaua

SEQ ID NO: 780338 - RNA, 19 nt, Homo sapiens
  misc_RNA (1)...(19): siRNA sense strand
aaaugacacaggauauuga

SEQ ID NO: 780339 - RNA, 19 nt, Homo sapiens
  misc_RNA (1)...(19): siRNA sense strand
caccauuucaaguuagaua

SEQ ID NO: 780340 - RNA, 19 nt, Homo sapiens
  misc_RNA (1)...(19): siRNA sense strand
acaacaaggcccaguggaa

SEQ ID NO: 780341 - RNA, 19 nt, Homo sapiens
  misc_RNA (1)...(19): siRNA sense strand
ucacuggcgaucuacaauu

SEQ ID NO: 780342 - RNA, 19 nt, Homo sapiens
  misc_RNA (1)...(19): siRNA sense strand
agcaagcaguggagugaaa

SEQ ID NO: 780343 - RNA, 19 nt, Homo sapiens
  misc_RNA (1)...(19): siRNA sense strand
aauggaaacagccugguaa

SEQ ID NO: 780344 - RNA, 19 nt, Homo sapiens
  misc_RNA (1)...(19): siRNA sense strand
gcucaccuccacaauaaag

SEQ ID NO: 780345 - RNA, 19 nt, Homo sapiens
  misc_RNA (1)...(19): siRNA sense strand
ccaccaucuugcaaaccua

SEQ ID NO: 780346 - RNA, 19 nt, Homo sapiens
  misc_RNA (1)...(19): siRNA sense strand
ucacgccucuggacaucau

SEQ ID NO: 780347 - RNA, 19 nt, Homo sapiens
  misc_RNA (1)...(19): siRNA sense strand
ucauucaccauuucaaguu

SEQ ID NO: 780348 - RNA, 19 nt, Homo sapiens
  misc_RNA (1)...(19): siRNA sense strand
aaauggaaacagccuggua

SEQ ID NO: 780349 - RNA, 19 nt, Homo sapiens
  misc_RNA (1)...(19): siRNA sense strand
ccuaguauacaaauugguu

SEQ ID NO: 780350 - RNA, 19 nt, Homo sapiens
  misc_RNA (1)...(19): siRNA sense strand
ucaaggcugcuucguggaa

SEQ ID NO: 780351 - RNA, 19 nt, Homo sapiens
  misc_RNA (1)...(19): siRNA sense strand
cauuugcaauccuuguaga

SEQ ID NO: 780352 - RNA, 19 nt, Homo sapiens
  misc_RNA (1)...(19): siRNA sense strand
ucagaaugccaaauguguu

SEQ ID NO: 780353 - RNA, 19 nt, Homo sapiens
  misc_RNA (1)...(19): siRNA sense strand
gcagcugggcuccuugauc

SEQ ID NO: 780354 - RNA, 19 nt, Homo sapiens
  misc_RNA (1)...(19): siRNA sense strand
caaggcugcuucguggaau

SEQ ID NO: 780355 - RNA, 19 nt, Homo sapiens
  misc_RNA (1)...(19): siRNA sense strand
aaagugggaaugugggauu

SEQ ID NO: 780356 - RNA, 19 nt, Homo sapiens
  misc_RNA (1)...(19): siRNA sense strand
ugaagacuaccuuggacaa

SEQ ID NO: 780357 - RNA, 19 nt, Homo sapiens
  misc_RNA (1)...(19): siRNA sense strand
gacacaggauauugaacag

SEQ ID NO: 780358 - RNA, 19 nt, Homo sapiens
  misc_RNA (1)...(19): siRNA sense strand
uugcaauccuuguagaauc

SEQ ID NO: 780359 - RNA, 19 nt, Homo sapiens
  misc_RNA (1)...(19): siRNA sense strand
ccgaucagaaugccaaaug

SEQ ID NO: 780360 - RNA, 19 nt, Homo sapiens
  misc_RNA (1)...(19): siRNA sense strand
caucccuaguauacaaauu

SEQ ID NO: 780361 - RNA, 19 nt, Homo sapiens
  misc_RNA (1)...(19): siRNA sense strand
uuccaucccuaguauacaa

SEQ ID NO: 780362 - RNA, 19 nt, Homo sapiens
  misc_RNA (1)...(19): siRNA sense strand
ggaagaacaucuacuauaa

SEQ ID NO: 780363 - RNA, 19 nt, Homo sapiens
  misc_RNA (1)...(19): siRNA sense strand
gugacaagaugcugaagua

SEQ ID NO: 780364 - RNA, 19 nt, Homo sapiens
  misc_RNA (1)...(19): siRNA sense strand
ggaugacucuggacaaaga

SEQ ID NO: 780365 - RNA, 19 nt, Homo sapiens
  misc_RNA (1)...(19): siRNA sense strand
gggaagaacaucuacuaua

SEQ ID NO: 780366 - RNA, 19 nt, Homo sapiens
  misc_RNA (1)...(19): siRNA sense strand
gaacaucuacuauaagagu

SEQ ID NO: 780367 - RNA, 19 nt, Homo sapiens
  misc_RNA (1)...(19): siRNA sense strand
gaagaagccaacuggauga

SEQ ID NO: 780368 - RNA, 19 nt, Homo sapiens
  misc_RNA (1)...(19): siRNA sense strand
aaaccuacauucccugcua

SEQ ID NO: 780369 - RNA, 19 nt, Homo sapiens
  misc_RNA (1)...(19): siRNA sense strand
gaacaacaaggcccacaug

SEQ ID NO: 780370 - RNA, 19 nt, Homo sapiens
  misc_RNA (1)...(19): siRNA sense strand
ccaaggacgucacaacauc

SEQ ID NO: 780371 - RNA, 19 nt, Homo sapiens
  misc_RNA (1)...(19): siRNA sense strand
gcugucaucugccuuggaa

SEQ ID NO: 780372 - RNA, 19 nt, Homo sapiens
  misc_RNA (1)...(19): siRNA sense strand
acaagugggucaucgaaga

SEQ ID NO: 780373 - RNA, 19 nt, Homo sapiens
  misc_RNA (1)...(19): siRNA sense strand
gaagaacaucuacuauaag

SEQ ID NO: 780374 - RNA, 19 nt, Homo sapiens
  misc_RNA (1)...(19): siRNA sense strand
caagcagccuucggaggua

SEQ ID NO: 780375 - RNA, 19 nt, Homo sapiens
  misc_RNA (1)...(19): siRNA sense strand
ccauuaugcugguggaaga

SEQ ID NO: 780376 - RNA, 19 nt, Homo sapiens
  misc_RNA (1)...(19): siRNA sense strand
gacaagaugcugaaguaug

SEQ ID NO: 780377 - RNA, 19 nt, Homo sapiens
  misc_RNA (1)...(19): siRNA sense strand
acaagaugcugaaguaugc

SEQ ID NO: 780378 - RNA, 19 nt, Homo sapiens
  misc_RNA (1)...(19): siRNA sense strand
cagggaagaacaucuacua

SEQ ID NO: 780379 - RNA, 19 nt, Homo sapiens
  misc_RNA (1)...(19): siRNA sense strand
ggaugccagugacaagaug

SEQ ID NO: 780380 - RNA, 19 nt, Homo sapiens
  misc_RNA (1)...(19): siRNA sense strand
gcagaggguggcuuugaug

SEQ ID NO: 780381 - RNA, 19 nt, Homo sapiens
  misc_RNA (1)...(19): siRNA sense strand
gaccaaggacgucacaaca

SEQ ID NO: 780382 - RNA, 19 nt, Homo sapiens
  misc_RNA (1)...(19): siRNA sense strand
ucuccuggcuugaguaagu

SEQ ID NO: 780383 - RNA, 19 nt, Homo sapiens
  misc_RNA (1)...(19): siRNA sense strand
guacaaggcauggcugcuu

SEQ ID NO: 780384 - RNA, 19 nt, Homo sapiens
  misc_RNA (1)...(19): siRNA sense strand
cgacaagugggucaucgaa

SEQ ID NO: 780385 - RNA, 19 nt, Homo sapiens
  misc_RNA (1)...(19): siRNA sense strand
uacauucccugcuacuuca

SEQ ID NO: 780386 - RNA, 19 nt, Homo sapiens
  misc_RNA (1)...(19): siRNA sense strand
caagugggucaucgaagaa

SEQ ID NO: 780387 - RNA, 19 nt, Homo sapiens
  misc_RNA (1)...(19): siRNA sense strand
cagcagaggguggcuuuga

SEQ ID NO: 780388 - RNA, 19 nt, Homo sapiens
  misc_RNA (1)...(19): siRNA sense strand
cuacauucccugcuacuuc

SEQ ID NO: 780389 - RNA, 19 nt, Homo sapiens
  misc_RNA (1)...(19): siRNA sense strand
guaaguuccggcucuccua

SEQ ID NO: 780390 - RNA, 19 nt, Homo sapiens
  misc_RNA (1)...(19): siRNA sense strand
gcguguggcagcuguauau

SEQ ID NO: 780391 - RNA, 19 nt, Homo sapiens
  misc_RNA (1)...(19): siRNA sense strand
gcaaaggggaccagaguga

SEQ ID NO: 780392 - RNA, 19 nt, Homo sapiens
  misc_RNA (1)...(19): siRNA sense strand
cuggaugacucuggacaaa

SEQ ID NO: 780393 - RNA, 19 nt, Homo sapiens
  misc_RNA (1)...(19): siRNA sense strand
gaccacauccucaguacag

SEQ ID NO: 780394 - RNA, 19 nt, Homo sapiens
  misc_RNA (1)...(19): siRNA sense strand
ugggcgacuucaagccuua

SEQ ID NO: 780395 - RNA, 19 nt, Homo sapiens
  misc_RNA (1)...(19): siRNA sense strand
gcucaagaggacagacuga

SEQ ID NO: 780396 - RNA, 19 nt, Homo sapiens
  misc_RNA (1)...(19): siRNA sense strand
caucugccuuggaaacagu

SEQ ID NO: 780397 - RNA, 19 nt, Homo sapiens
  misc_RNA (1)...(19): siRNA sense strand
cacacugucuggcauccuu

SEQ ID NO: 780398 - RNA, 19 nt, Homo sapiens
  misc_RNA (1)...(19): siRNA sense strand
gcucuccuggcuugaguaa

SEQ ID NO: 780399 - RNA, 19 nt, Homo sapiens
  misc_RNA (1)...(19): siRNA sense strand
ucauugaucaucgcaacua

SEQ ID NO: 780400 - RNA, 19 nt, Homo sapiens
  misc_RNA (1)...(19): siRNA sense strand
caaggacgucacaacauca

SEQ ID NO: 780401 - RNA, 19 nt, Homo sapiens
  misc_RNA (1)...(19): siRNA sense strand
ccagugacaagaugcugaa

SEQ ID NO: 780402 - RNA, 19 nt, Homo sapiens
  misc_RNA (1)...(19): siRNA sense strand
aagcagccuucggagguaa

SEQ ID NO: 780403 - RNA, 19 nt, Homo sapiens
  misc_RNA (1)...(19): siRNA sense strand
ucgaagaagccaacuggau

SEQ ID NO: 780404 - RNA, 19 nt, Homo sapiens
  misc_RNA (1)...(19): siRNA sense strand
gugcugauagugaacaaca

SEQ ID NO: 780405 - RNA, 19 nt, Homo sapiens
  misc_RNA (1)...(19): siRNA sense strand
ggagaugucuggcucugua

SEQ ID NO: 780406 - RNA, 19 nt, Homo sapiens
  misc_RNA (1)...(19): siRNA sense strand
acacggaucuguacaauug

SEQ ID NO: 780407 - RNA, 19 nt, Homo sapiens
  misc_RNA (1)...(19): siRNA sense strand
gagaagaauuugaccuuug

SEQ ID NO: 780408 - RNA, 19 nt, Homo sapiens
  misc_RNA (1)...(19): siRNA sense strand
gaaagugaccagugugaaa

SEQ ID NO: 780409 - RNA, 19 nt, Homo sapiens
  misc_RNA (1)...(19): siRNA sense strand
gagcguuucuucccauuug

SEQ ID NO: 780410 - RNA, 19 nt, Homo sapiens
  misc_RNA (1)...(19): siRNA sense strand
gcagugugcuggcucuuug

SEQ ID NO: 780411 - RNA, 19 nt, Homo sapiens
  misc_RNA (1)...(19): siRNA sense strand
gggaguccaauauaaauua

SEQ ID NO: 780412 - RNA, 19 nt, Homo sapiens
  misc_RNA (1)...(19): siRNA sense strand
gagcucagacgauggauuu

SEQ ID NO: 780413 - RNA, 19 nt, Homo sapiens
  misc_RNA (1)...(19): siRNA sense strand
aaacuuaggccauggauau

SEQ ID NO: 780414 - RNA, 19 nt, Homo sapiens
  misc_RNA (1)...(19): siRNA sense strand
agaagaauuugaccuuuga

SEQ ID NO: 780415 - RNA, 19 nt, Homo sapiens
  misc_RNA (1)...(19): siRNA sense strand
ugaagaaagugaccagugu

SEQ ID NO: 780416 - RNA, 19 nt, Homo sapiens
  misc_RNA (1)...(19): siRNA sense strand
ggucuaagcccaccucaga

SEQ ID NO: 780417 - RNA, 19 nt, Homo sapiens
  misc_RNA (1)...(19): siRNA sense strand
ccaaagaugcccaauacuu

SEQ ID NO: 780418 - RNA, 19 nt, Homo sapiens
  misc_RNA (1)...(19): siRNA sense strand
ccacguggccuugugaaua

SEQ ID NO: 780419 - RNA, 19 nt, Homo sapiens
  misc_RNA (1)...(19): siRNA sense strand
gaagugauggcacaacaga

SEQ ID NO: 780420 - RNA, 19 nt, Homo sapiens
  misc_RNA (1)...(19): siRNA sense strand
aaacaaggguccauuccau

SEQ ID NO: 780421 - RNA, 19 nt, Homo sapiens
  misc_RNA (1)...(19): siRNA sense strand
cauccacugugcaauauga

SEQ ID NO: 780422 - RNA, 19 nt, Homo sapiens
  misc_RNA (1)...(19): siRNA sense strand
uauuugagaucuccuguug

SEQ ID NO: 780423 - RNA, 19 nt, Homo sapiens
  misc_RNA (1)...(19): siRNA sense strand
ugcucaaucucacauauua

SEQ ID NO: 780424 - RNA, 19 nt, Homo sapiens
  misc_RNA (1)...(19): siRNA sense strand
cauccacccucgagauaaa

SEQ ID NO: 780425 - RNA, 19 nt, Homo sapiens
  misc_RNA (1)...(19): siRNA sense strand
gaagagcucagacgaugga

SEQ ID NO: 780426 - RNA, 19 nt, Homo sapiens
  misc_RNA (1)...(19): siRNA sense strand
uaacacggaucuguacaau

SEQ ID NO: 780427 - RNA, 19 nt, Homo sapiens
  misc_RNA (1)...(19): siRNA sense strand
cuucagauuugucuaagaa

SEQ ID NO: 780428 - RNA, 19 nt, Homo sapiens
  misc_RNA (1)...(19): siRNA sense strand
ugagaagaauuugaccuuu

SEQ ID NO: 780429 - RNA, 19 nt, Homo sapiens
  misc_RNA (1)...(19): siRNA sense strand
cagaguaacaugcagauga

SEQ ID NO: 780430 - RNA, 19 nt, Homo sapiens
  misc_RNA (1)...(19): siRNA sense strand
uggaggaccuuucgaagug

SEQ ID NO: 780431 - RNA, 19 nt, Homo sapiens
  misc_RNA (1)...(19): siRNA sense strand
gaaaccaucaugaagaaag

SEQ ID NO: 780432 - RNA, 19 nt, Homo sapiens
  misc_RNA (1)...(19): siRNA sense strand
cacguggccuugugaauau

SEQ ID NO: 780433 - RNA, 19 nt, Homo sapiens
  misc_RNA (1)...(19): siRNA sense strand
gauagagacucgccuuuug

SEQ ID NO: 780434 - RNA, 19 nt, Homo sapiens
  misc_RNA (1)...(19): siRNA sense strand
ucagauuugucuaagaaga

SEQ ID NO: 780435 - RNA, 19 nt, Homo sapiens
  misc_RNA (1)...(19): siRNA sense strand
gaaggaccacugccugaga

SEQ ID NO: 780436 - RNA, 19 nt, Homo sapiens
  misc_RNA (1)...(19): siRNA sense strand
aggaaaccaucaugaagaa

SEQ ID NO: 780437 - RNA, 19 nt, Homo sapiens
  misc_RNA (1)...(19): siRNA sense strand
ggaggaccuuucgaaguga

SEQ ID NO: 780438 - RNA, 19 nt, Homo sapiens
  misc_RNA (1)...(19): siRNA sense strand
gcaaauccaggugcagaaa

SEQ ID NO: 780439 - RNA, 19 nt, Homo sapiens
  misc_RNA (1)...(19): siRNA sense strand
gcuauggaucucugugaua

SEQ ID NO: 780440 - RNA, 19 nt, Homo sapiens
  misc_RNA (1)...(19): siRNA sense strand
ccauggauauuucaaguac

SEQ ID NO: 780441 - RNA, 19 nt, Homo sapiens
  misc_RNA (1)...(19): siRNA sense strand
uuucauggcuguagcuaug

SEQ ID NO: 780442 - RNA, 19 nt, Homo sapiens
  misc_RNA (1)...(19): siRNA sense strand
acaacagacuuuggagaaa

SEQ ID NO: 780443 - RNA, 19 nt, Homo sapiens
  misc_RNA (1)...(19): siRNA sense strand
cuucauugcuuucauuaca

SEQ ID NO: 780444 - RNA, 19 nt, Homo sapiens
  misc_RNA (1)...(19): siRNA sense strand
caggaaaccaucaugaaga

SEQ ID NO: 780445 - RNA, 19 nt, Homo sapiens
  misc_RNA (1)...(19): siRNA sense strand
cagauccguuggcaucaaa

SEQ ID NO: 780446 - RNA, 19 nt, Homo sapiens
  misc_RNA (1)...(19): siRNA sense strand
ggccauggauauuucaagu

SEQ ID NO: 780447 - RNA, 19 nt, Homo sapiens
  misc_RNA (1)...(19): siRNA sense strand
gguacuggauccuaugaag

SEQ ID NO: 780448 - RNA, 19 nt, Homo sapiens
  misc_RNA (1)...(19): siRNA sense strand
gcaauaugacucugaaagg

SEQ ID NO: 780449 - RNA, 19 nt, Homo sapiens
  misc_RNA (1)...(19): siRNA sense strand
caagggaguugucuaacac

SEQ ID NO: 780450 - RNA, 19 nt, Homo sapiens
  misc_RNA (1)...(19): siRNA sense strand
caacagacuuuggagaaaa

SEQ ID NO: 780451 - RNA, 19 nt, Homo sapiens
  misc_RNA (1)...(19): siRNA sense strand
cagcagacuucggcuaugu

SEQ ID NO: 780452 - RNA, 19 nt, Homo sapiens
  misc_RNA (1)...(19): siRNA sense strand
gacaacaagauauuugaga

SEQ ID NO: 780453 - RNA, 19 nt, Homo sapiens
  misc_RNA (1)...(19): siRNA sense strand
gcugcucaaucucacauau

SEQ ID NO: 780454 - RNA, 19 nt, Homo sapiens
  misc_RNA (1)...(19): siRNA sense strand
ggucaggaaaccaucauga

SEQ ID NO: 780455 - RNA, 19 nt, Homo sapiens
  misc_RNA (1)...(19): siRNA sense strand
ugaaagggguaguauggua

SEQ ID NO: 780456 - RNA, 19 nt, Homo sapiens
  misc_RNA (1)...(19): siRNA sense strand
gcacucuguucucuggaau

SEQ ID NO: 780457 - RNA, 19 nt, Homo sapiens
  misc_RNA (1)...(19): siRNA sense strand
ucucacauauuaccagcaa

SEQ ID NO: 780458 - RNA, 19 nt, Homo sapiens
  misc_RNA (1)...(19): siRNA sense strand
cacaacagacuuuggagaa

SEQ ID NO: 780459 - RNA, 19 nt, Homo sapiens
  misc_RNA (1)...(19): siRNA sense strand
uggcuuaucggcugcauuu

SEQ ID NO: 780460 - RNA, 19 nt, Homo sapiens
  misc_RNA (1)...(19): siRNA sense strand
acccaaagaugcccaauac

SEQ ID NO: 780461 - RNA, 19 nt, Homo sapiens
  misc_RNA (1)...(19): siRNA sense strand
cacauucccugcacucauc

SEQ ID NO: 780462 - RNA, 19 nt, Homo sapiens
  misc_RNA (1)...(19): siRNA sense strand
caacaagauauuugagauc

SEQ ID NO: 780463 - RNA, 19 nt, Homo sapiens
  misc_RNA (1)...(19): siRNA sense strand
gcagacggagcguuucuuc

SEQ ID NO: 780464 - RNA, 19 nt, Homo sapiens
  misc_RNA (1)...(19): siRNA sense strand
gcaucaaacagcagacuuc

SEQ ID NO: 780465 - RNA, 19 nt, Homo sapiens
  misc_RNA (1)...(19): siRNA sense strand
ucacauauuaccagcaaau

SEQ ID NO: 780466 - RNA, 19 nt, Homo sapiens
  misc_RNA (1)...(19): siRNA sense strand
guucaugacguccuguuug

SEQ ID NO: 780467 - RNA, 19 nt, Homo sapiens
  misc_RNA (1)...(19): siRNA sense strand
gcgaucgauucuugucaug

SEQ ID NO: 780468 - RNA, 19 nt, Homo sapiens
  misc_RNA (1)...(19): siRNA sense strand
aaaccaucaugaagaaagu

SEQ ID NO: 780469 - RNA, 19 nt, Homo sapiens
  misc_RNA (1)...(19): siRNA sense strand
ugucuaacacugcggcaua

SEQ ID NO: 780470 - RNA, 19 nt, Homo sapiens
  misc_RNA (1)...(19): siRNA sense strand
ggaccacguggccuuguga

SEQ ID NO: 780471 - RNA, 19 nt, Homo sapiens
  misc_RNA (1)...(19): siRNA sense strand
gcagugaccaucgaugcaa

SEQ ID NO: 780472 - RNA, 19 nt, Homo sapiens
  misc_RNA (1)...(19): siRNA sense strand
ugaaagcucacucugauac

SEQ ID NO: 780473 - RNA, 19 nt, Homo sapiens
  misc_RNA (1)...(19): siRNA sense strand
gcacauucccugcacucau

SEQ ID NO: 780474 - RNA, 19 nt, Homo sapiens
  misc_RNA (1)...(19): siRNA sense strand
ucauugcuuucauuacaga

SEQ ID NO: 780475 - RNA, 19 nt, Homo sapiens
  misc_RNA (1)...(19): siRNA sense strand
aaggaccacugccugagaa

SEQ ID NO: 780476 - RNA, 19 nt, Homo sapiens
  misc_RNA (1)...(19): siRNA sense strand
gugagaagaauuugaccuu

SEQ ID NO: 780477 - RNA, 19 nt, Homo sapiens
  misc_RNA (1)...(19): siRNA sense strand
gcauccacccucgagauaa

SEQ ID NO: 780478 - RNA, 19 nt, Homo sapiens
  misc_RNA (1)...(19): siRNA sense strand
ccagauccguuggcaucaa

SEQ ID NO: 780479 - RNA, 19 nt, Homo sapiens
  misc_RNA (1)...(19): siRNA sense strand
ccaguaagcacucuguucu

SEQ ID NO: 780480 - RNA, 19 nt, Homo sapiens
  misc_RNA (1)...(19): siRNA sense strand
ggacaacaagauauuugag

SEQ ID NO: 780481 - RNA, 19 nt, Homo sapiens
  misc_RNA (1)...(19): siRNA sense strand
gaccacugccugagaagau

SEQ ID NO: 780482 - RNA, 19 nt, Homo sapiens
  misc_RNA (1)...(19): siRNA sense strand
uaagaagagcucagacgau

SEQ ID NO: 780483 - RNA, 19 nt, Homo sapiens
  misc_RNA (1)...(19): siRNA sense strand
guaacaugcagaugacugu

SEQ ID NO: 780484 - RNA, 19 nt, Homo sapiens
  misc_RNA (1)...(19): siRNA sense strand
gaagaauuugaccuuugaa

SEQ ID NO: 780485 - RNA, 19 nt, Homo sapiens
  misc_RNA (1)...(19): siRNA sense strand
ggaaaccaucaugaagaaa

SEQ ID NO: 780486 - RNA, 19 nt, Homo sapiens
  misc_RNA (1)...(19): siRNA sense strand
ucccugcacucaucgaaga

SEQ ID NO: 780487 - RNA, 19 nt, Homo sapiens
  misc_RNA (1)...(19): siRNA sense strand
acaugcagaugacuguguu

SEQ ID NO: 780488 - RNA, 19 nt, Homo sapiens
  misc_RNA (1)...(19): siRNA sense strand
ucuaagcccaccucagaaa

SEQ ID NO: 780489 - RNA, 19 nt, Homo sapiens
  misc_RNA (1)...(19): siRNA sense strand
uuugagaucuccuguugca

SEQ ID NO: 780490 - RNA, 19 nt, Homo sapiens
  misc_RNA (1)...(19): siRNA sense strand
ucuguacaauugcacauuc

SEQ ID NO: 780491 - RNA, 19 nt, Homo sapiens
  misc_RNA (1)...(19): siRNA sense strand
gccaugauccauccacugu

SEQ ID NO: 780492 - RNA, 19 nt, Homo sapiens
  misc_RNA (1)...(19): siRNA sense strand
gccauggauauuucaagua

SEQ ID NO: 780493 - RNA, 19 nt, Homo sapiens
  misc_RNA (1)...(19): siRNA sense strand
cuuaggccauggauauuuc

SEQ ID NO: 780494 - RNA, 19 nt, Homo sapiens
  misc_RNA (1)...(19): siRNA sense strand
ggagcuggaggaccuuguu

SEQ ID NO: 780495 - RNA, 19 nt, Homo sapiens
  misc_RNA (1)...(19): siRNA sense strand
ggcgaucgauucuugucau

SEQ ID NO: 780496 - RNA, 19 nt, Homo sapiens
  misc_RNA (1)...(19): siRNA sense strand
gcuuccagcuucuaugaac

SEQ ID NO: 780497 - RNA, 19 nt, Homo sapiens
  misc_RNA (1)...(19): siRNA sense strand
ucgaagugauggcacaaca

SEQ ID NO: 780498 - RNA, 19 nt, Homo sapiens
  misc_RNA (1)...(19): siRNA sense strand
uuuaugacacucugcagua

SEQ ID NO: 780499 - RNA, 19 nt, Homo sapiens
  misc_RNA (1)...(19): siRNA sense strand
ggauauuucaaguacaugu

SEQ ID NO: 780500 - RNA, 19 nt, Homo sapiens
  misc_RNA (1)...(19): siRNA sense strand
cuuauggugagaagaauuu

SEQ ID NO: 780501 - RNA, 19 nt, Homo sapiens
  misc_RNA (1)...(19): siRNA sense strand
gcucuccgcuaugcuugga

SEQ ID NO: 780502 - RNA, 19 nt, Homo sapiens
  misc_RNA (1)...(19): siRNA sense strand
ggagcguuucuucccauuu

SEQ ID NO: 780503 - RNA, 19 nt, Homo sapiens
  misc_RNA (1)...(19): siRNA sense strand
gucaggaaaccaucaugaa

SEQ ID NO: 780504 - RNA, 19 nt, Homo sapiens
  misc_RNA (1)...(19): siRNA sense strand
gaugcccaauacuuucaug

SEQ ID NO: 780505 - RNA, 19 nt, Homo sapiens
  misc_RNA (1)...(19): siRNA sense strand
ggagaugucuggcucugua

SEQ ID NO: 780506 - RNA, 19 nt, Homo sapiens
  misc_RNA (1)...(19): siRNA sense strand
acacggaucuguacaauug

SEQ ID NO: 780507 - RNA, 19 nt, Homo sapiens
  misc_RNA (1)...(19): siRNA sense strand
gagaagaauuugaccuuug

SEQ ID NO: 780508 - RNA, 19 nt, Homo sapiens
  misc_RNA (1)...(19): siRNA sense strand
gaaagugaccagugugaaa

SEQ ID NO: 780509 - RNA, 19 nt, Homo sapiens
  misc_RNA (1)...(19): siRNA sense strand
gagcguuucuucccauuug

SEQ ID NO: 780510 - RNA, 19 nt, Homo sapiens
  misc_RNA (1)...(19): siRNA sense strand
gcagugugcuggcucuuug

SEQ ID NO: 780511 - RNA, 19 nt, Homo sapiens
  misc_RNA (1)...(19): siRNA sense strand
gggaguccaauauaaauua

SEQ ID NO: 780512 - RNA, 19 nt, Homo sapiens
  misc_RNA (1)...(19): siRNA sense strand
gagcucagacgauggauuu

SEQ ID NO: 780513 - RNA, 19 nt, Homo sapiens
  misc_RNA (1)...(19): siRNA sense strand
aaacuuaggccauggauau

SEQ ID NO: 780514 - RNA, 19 nt, Homo sapiens
  misc_RNA (1)...(19): siRNA sense strand
agaagaauuugaccuuuga

SEQ ID NO: 780515 - RNA, 19 nt, Homo sapiens
  misc_RNA (1)...(19): siRNA sense strand
ugaagaaagugaccagugu

SEQ ID NO: 780516 - RNA, 19 nt, Homo sapiens
  misc_RNA (1)...(19): siRNA sense strand
ggucuaagcccaccucaga

SEQ ID NO: 780517 - RNA, 19 nt, Homo sapiens
  misc_RNA (1)...(19): siRNA sense strand
ccaaagaugcccaauacuu

SEQ ID NO: 780518 - RNA, 19 nt, Homo sapiens
  misc_RNA (1)...(19): siRNA sense strand
ccacguggccuugugaaua

SEQ ID NO: 780519 - RNA, 19 nt, Homo sapiens
  misc_RNA (1)...(19): siRNA sense strand
gaagugauggcacaacaga

SEQ ID NO: 780520 - RNA, 19 nt, Homo sapiens
  misc_RNA (1)...(19): siRNA sense strand
aaacaaggguccauuccau

SEQ ID NO: 780521 - RNA, 19 nt, Homo sapiens
  misc_RNA (1)...(19): siRNA sense strand
cauccacugugcaauauga

SEQ ID NO: 780522 - RNA, 19 nt, Homo sapiens
  misc_RNA (1)...(19): siRNA sense strand
uauuugagaucuccuguug

SEQ ID NO: 780523 - RNA, 19 nt, Homo sapiens
  misc_RNA (1)...(19): siRNA sense strand
ugcucaaucucacauauua

SEQ ID NO: 780524 - RNA, 19 nt, Homo sapiens
  misc_RNA (1)...(19): siRNA sense strand
cauccacccucgagauaaa

SEQ ID NO: 780525 - RNA, 19 nt, Homo sapiens
  misc_RNA (1)...(19): siRNA sense strand
gaagagcucagacgaugga

SEQ ID NO: 780526 - RNA, 19 nt, Homo sapiens
  misc_RNA (1)...(19): siRNA sense strand
uaacacggaucuguacaau

SEQ ID NO: 780527 - RNA, 19 nt, Homo sapiens
  misc_RNA (1)...(19): siRNA sense strand
cuucagauuugucuaagaa

SEQ ID NO: 780528 - RNA, 19 nt, Homo sapiens
  misc_RNA (1)...(19): siRNA sense strand
ugagaagaauuugaccuuu

SEQ ID NO: 780529 - RNA, 19 nt, Homo sapiens
  misc_RNA (1)...(19): siRNA sense strand
cagaguaacaugcagauga

SEQ ID NO: 780530 - RNA, 19 nt, Homo sapiens
  misc_RNA (1)...(19): siRNA sense strand
uggaggaccuuucgaagug

SEQ ID NO: 780531 - RNA, 19 nt, Homo sapiens
  misc_RNA (1)...(19): siRNA sense strand
gaaaccaucaugaagaaag

SEQ ID NO: 780532 - RNA, 19 nt, Homo sapiens
  misc_RNA (1)...(19): siRNA sense strand
cacguggccuugugaauau

SEQ ID NO: 780533 - RNA, 19 nt, Homo sapiens
  misc_RNA (1)...(19): siRNA sense strand
gauagagacucgccuuuug

SEQ ID NO: 780534 - RNA, 19 nt, Homo sapiens
  misc_RNA (1)...(19): siRNA sense strand
ucagauuugucuaagaaga

SEQ ID NO: 780535 - RNA, 19 nt, Homo sapiens
  misc_RNA (1)...(19): siRNA sense strand
gaaggaccacugccugaga

SEQ ID NO: 780536 - RNA, 19 nt, Homo sapiens
  misc_RNA (1)...(19): siRNA sense strand
aggaaaccaucaugaagaa

SEQ ID NO: 780537 - RNA, 19 nt, Homo sapiens
  misc_RNA (1)...(19): siRNA sense strand
ggaggaccuuucgaaguga

SEQ ID NO: 780538 - RNA, 19 nt, Homo sapiens
  misc_RNA (1)...(19): siRNA sense strand
gcaaauccaggugcagaaa

SEQ ID NO: 780539 - RNA, 19 nt, Homo sapiens
  misc_RNA (1)...(19): siRNA sense strand
gcuauggaucucugugaua

SEQ ID NO: 780540 - RNA, 19 nt, Homo sapiens
  misc_RNA (1)...(19): siRNA sense strand
ccauggauauuucaaguac

SEQ ID NO: 780541 - RNA, 19 nt, Homo sapiens
  misc_RNA (1)...(19): siRNA sense strand
uuucauggcuguagcuaug

SEQ ID NO: 780542 - RNA, 19 nt, Homo sapiens
  misc_RNA (1)...(19): siRNA sense strand
caggaaaccaucaugaaga

SEQ ID NO: 780543 - RNA, 19 nt, Homo sapiens
  misc_RNA (1)...(19): siRNA sense strand
cuucauugcuuucauuaca

SEQ ID NO: 780544 - RNA, 19 nt, Homo sapiens
  misc_RNA (1)...(19): siRNA sense strand
cagauccguuggcaucaaa

SEQ ID NO: 780545 - RNA, 19 nt, Homo sapiens
  misc_RNA (1)...(19): siRNA sense strand
ggccauggauauuucaagu

SEQ ID NO: 780546 - RNA, 19 nt, Homo sapiens
  misc_RNA (1)...(19): siRNA sense strand
acaacagacuuuggagaaa

SEQ ID NO: 780547 - RNA, 19 nt, Homo sapiens
  misc_RNA (1)...(19): siRNA sense strand
gguacuggauccuaugaag

SEQ ID NO: 780548 - RNA, 19 nt, Homo sapiens
  misc_RNA (1)...(19): siRNA sense strand
gcaauaugacucugaaagg

SEQ ID NO: 780549 - RNA, 19 nt, Homo sapiens
  misc_RNA (1)...(19): siRNA sense strand
caagggaguugucuaacac

SEQ ID NO: 780550 - RNA, 19 nt, Homo sapiens
  misc_RNA (1)...(19): siRNA sense strand
caacagacuuuggagaaaa

SEQ ID NO: 780551 - RNA, 19 nt, Homo sapiens
  misc_RNA (1)...(19): siRNA sense strand
cagcagacuucggcuaugu

SEQ ID NO: 780552 - RNA, 19 nt, Homo sapiens
  misc_RNA (1)...(19): siRNA sense strand
gacaacaagauauuugaga

SEQ ID NO: 780553 - RNA, 19 nt, Homo sapiens
  misc_RNA (1)...(19): siRNA sense strand
gcugcucaaucucacauau

SEQ ID NO: 780554 - RNA, 19 nt, Homo sapiens
  misc_RNA (1)...(19): siRNA sense strand
ggucaggaaaccaucauga

SEQ ID NO: 780555 - RNA, 19 nt, Homo sapiens
  misc_RNA (1)...(19): siRNA sense strand
ugaaagggguaguauggua

SEQ ID NO: 780556 - RNA, 19 nt, Homo sapiens
  misc_RNA (1)...(19): siRNA sense strand
gcacucuguucucuggaau

SEQ ID NO: 780557 - RNA, 19 nt, Homo sapiens
  misc_RNA (1)...(19): siRNA sense strand
ucucacauauuaccagcaa

SEQ ID NO: 780558 - RNA, 19 nt, Homo sapiens
  misc_RNA (1)...(19): siRNA sense strand
cacaacagacuuuggagaa

SEQ ID NO: 780559 - RNA, 19 nt, Homo sapiens
  misc_RNA (1)...(19): siRNA sense strand
uggcuuaucggcugcauuu

SEQ ID NO: 780560 - RNA, 19 nt, Homo sapiens
  misc_RNA (1)...(19): siRNA sense strand
acccaaagaugcccaauac

SEQ ID NO: 780561 - RNA, 19 nt, Homo sapiens
  misc_RNA (1)...(19): siRNA sense strand
cacauucccugcacucauc

SEQ ID NO: 780562 - RNA, 19 nt, Homo sapiens
  misc_RNA (1)...(19): siRNA sense strand
caacaagauauuugagauc

SEQ ID NO: 780563 - RNA, 19 nt, Homo sapiens
  misc_RNA (1)...(19): siRNA sense strand
gcagacggagcguuucuuc

SEQ ID NO: 780564 - RNA, 19 nt, Homo sapiens
  misc_RNA (1)...(19): siRNA sense strand
gcaucaaacagcagacuuc

SEQ ID NO: 780565 - RNA, 19 nt, Homo sapiens
  misc_RNA (1)...(19): siRNA sense strand
ucgcuuugcuucauacauc

SEQ ID NO: 780566 - RNA, 19 nt, Homo sapiens
  misc_RNA (1)...(19): siRNA sense strand
ucacauauuaccagcaaau

SEQ ID NO: 780567 - RNA, 19 nt, Homo sapiens
  misc_RNA (1)...(19): siRNA sense strand
guucaugacguccuguuug

SEQ ID NO: 780568 - RNA, 19 nt, Homo sapiens
  misc_RNA (1)...(19): siRNA sense strand
gcgaucgauucuugucaug

SEQ ID NO: 780569 - RNA, 19 nt, Homo sapiens
  misc_RNA (1)...(19): siRNA sense strand
aaaccaucaugaagaaagu

SEQ ID NO: 780570 - RNA, 19 nt, Homo sapiens
  misc_RNA (1)...(19): siRNA sense strand
ugucuaacacugcggcaua

SEQ ID NO: 780571 - RNA, 19 nt, Homo sapiens
  misc_RNA (1)...(19): siRNA sense strand
ggaccacguggccuuguga

SEQ ID NO: 780572 - RNA, 19 nt, Homo sapiens
  misc_RNA (1)...(19): siRNA sense strand
gcagugaccaucgaugcaa

SEQ ID NO: 780573 - RNA, 19 nt, Homo sapiens
  misc_RNA (1)...(19): siRNA sense strand
ugaaagcucacucugauac

SEQ ID NO: 780574 - RNA, 19 nt, Homo sapiens
  misc_RNA (1)...(19): siRNA sense strand
gcacauucccugcacucau

SEQ ID NO: 780575 - RNA, 19 nt, Homo sapiens
  misc_RNA (1)...(19): siRNA sense strand
ucauugcuuucauuacaga

SEQ ID NO: 780576 - RNA, 19 nt, Homo sapiens
  misc_RNA (1)...(19): siRNA sense strand
aaggaccacugccugagaa

SEQ ID NO: 780577 - RNA, 19 nt, Homo sapiens
  misc_RNA (1)...(19): siRNA sense strand
gugagaagaauuugaccuu

SEQ ID NO: 780578 - RNA, 19 nt, Homo sapiens
  misc_RNA (1)...(19): siRNA sense strand
gcauccacccucgagauaa

SEQ ID NO: 780579 - RNA, 19 nt, Homo sapiens
  misc_RNA (1)...(19): siRNA sense strand
ccagauccguuggcaucaa

SEQ ID NO: 780580 - RNA, 19 nt, Homo sapiens
  misc_RNA (1)...(19): siRNA sense strand
ccaguaagcacucuguucu

SEQ ID NO: 780581 - RNA, 19 nt, Homo sapiens
  misc_RNA (1)...(19): siRNA sense strand
ggacaacaagauauuugag

SEQ ID NO: 780582 - RNA, 19 nt, Homo sapiens
  misc_RNA (1)...(19): siRNA sense strand
gaccacugccugagaagau

SEQ ID NO: 780583 - RNA, 19 nt, Homo sapiens
  misc_RNA (1)...(19): siRNA sense strand
uaagaagagcucagacgau

SEQ ID NO: 780584 - RNA, 19 nt, Homo sapiens
  misc_RNA (1)...(19): siRNA sense strand
guaacaugcagaugacugu

SEQ ID NO: 780585 - RNA, 19 nt, Homo sapiens
  misc_RNA (1)...(19): siRNA sense strand
gaagaauuugaccuuugaa

SEQ ID NO: 780586 - RNA, 19 nt, Homo sapiens
  misc_RNA (1)...(19): siRNA sense strand
ucccugcacucaucgaaga

SEQ ID NO: 780587 - RNA, 19 nt, Homo sapiens
  misc_RNA (1)...(19): siRNA sense strand
ggaaaccaucaugaagaaa

SEQ ID NO: 780588 - RNA, 19 nt, Homo sapiens
  misc_RNA (1)...(19): siRNA sense strand
acaugcagaugacuguguu

SEQ ID NO: 780589 - RNA, 19 nt, Homo sapiens
  misc_RNA (1)...(19): siRNA sense strand
ucuaagcccaccucagaaa

SEQ ID NO: 780590 - RNA, 19 nt, Homo sapiens
  misc_RNA (1)...(19): siRNA sense strand
uuugagaucuccuguugca

SEQ ID NO: 780591 - RNA, 19 nt, Homo sapiens
  misc_RNA (1)...(19): siRNA sense strand
ucuguacaauugcacauuc

SEQ ID NO: 780592 - RNA, 19 nt, Homo sapiens
  misc_RNA (1)...(19): siRNA sense strand
gccaugauccauccacugu

SEQ ID NO: 780593 - RNA, 19 nt, Homo sapiens
  misc_RNA (1)...(19): siRNA sense strand
gccauggauauuucaagua

SEQ ID NO: 780594 - RNA, 19 nt, Homo sapiens
  misc_RNA (1)...(19): siRNA sense strand
cuuaggccauggauauuuc

SEQ ID NO: 780595 - RNA, 19 nt, Homo sapiens
  misc_RNA (1)...(19): siRNA sense strand
ggagcuggaggaccuuguu

SEQ ID NO: 780596 - RNA, 19 nt, Homo sapiens
  misc_RNA (1)...(19): siRNA sense strand
ggcgaucgauucuugucau

SEQ ID NO: 780597 - RNA, 19 nt, Homo sapiens
  misc_RNA (1)...(19): siRNA sense strand
gcuuccagcuucuaugaac

SEQ ID NO: 780598 - RNA, 19 nt, Homo sapiens
  misc_RNA (1)...(19): siRNA sense strand
ucgaagugauggcacaaca

SEQ ID NO: 780599 - RNA, 19 nt, Homo sapiens
  misc_RNA (1)...(19): siRNA sense strand
uuuaugacacucugcagua

SEQ ID NO: 780600 - RNA, 19 nt, Homo sapiens
  misc_RNA (1)...(19): siRNA sense strand
ggauauuucaaguacaugu

SEQ ID NO: 780601 - RNA, 19 nt, Homo sapiens
  misc_RNA (1)...(19): siRNA sense strand
cuuauggugagaagaauuu

SEQ ID NO: 780602 - RNA, 19 nt, Homo sapiens
  misc_RNA (1)...(19): siRNA sense strand
gcucuccgcuaugcuugga

SEQ ID NO: 780603 - RNA, 19 nt, Homo sapiens
  misc_RNA (1)...(19): siRNA sense strand
ucaggaaaccaucaugaag

SEQ ID NO: 780604 - RNA, 19 nt, Homo sapiens
  misc_RNA (1)...(19): siRNA sense strand
gucaggaaaccaucaugaa

SEQ ID NO: 780605 - RNA, 19 nt, Homo sapiens
  misc_RNA (1)...(19): siRNA sense strand
ggaaagaagugcauuguuu

SEQ ID NO: 780606 - RNA, 19 nt, Homo sapiens
  misc_RNA (1)...(19): siRNA sense strand
agaagaagcugaaauguua

SEQ ID NO: 780607 - RNA, 19 nt, Homo sapiens
  misc_RNA (1)...(19): siRNA sense strand
gcaaagggcacaugaauua

SEQ ID NO: 780608 - RNA, 19 nt, Homo sapiens
  misc_RNA (1)...(19): siRNA sense strand
gagcaggagugucuaguua

SEQ ID NO: 780609 - RNA, 19 nt, Homo sapiens
  misc_RNA (1)...(19): siRNA sense strand
uaucgaagaugaagacuua

SEQ ID NO: 780610 - RNA, 19 nt, Homo sapiens
  misc_RNA (1)...(19): siRNA sense strand
ggaaggcgguuuauaguga

SEQ ID NO: 780611 - RNA, 19 nt, Homo sapiens
  misc_RNA (1)...(19): siRNA sense strand
gcaguugucucaauaucua

SEQ ID NO: 780612 - RNA, 19 nt, Homo sapiens
  misc_RNA (1)...(19): siRNA sense strand
gcaggagugucuaguuaua

SEQ ID NO: 780613 - RNA, 19 nt, Homo sapiens
  misc_RNA (1)...(19): siRNA sense strand
cauaaagacucuagaagaa

SEQ ID NO: 780614 - RNA, 19 nt, Homo sapiens
  misc_RNA (1)...(19): siRNA sense strand
gaggagauagcaacaauua

SEQ ID NO: 780615 - RNA, 19 nt, Homo sapiens
  misc_RNA (1)...(19): siRNA sense strand
gcagagauuuaaagaagaa

SEQ ID NO: 780616 - RNA, 19 nt, Homo sapiens
  misc_RNA (1)...(19): siRNA sense strand
uaaaggagaccgaguagua

SEQ ID NO: 780617 - RNA, 19 nt, Homo sapiens
  misc_RNA (1)...(19): siRNA sense strand
gauaagacaucucauagca

SEQ ID NO: 780618 - RNA, 19 nt, Homo sapiens
  misc_RNA (1)...(19): siRNA sense strand
gaaagccgauuacgagaau

SEQ ID NO: 780619 - RNA, 19 nt, Homo sapiens
  misc_RNA (1)...(19): siRNA sense strand
ggucuucaguuucuucaua

SEQ ID NO: 780620 - RNA, 19 nt, Homo sapiens
  misc_RNA (1)...(19): siRNA sense strand
aguaguaccuccuuucuua

SEQ ID NO: 780621 - RNA, 19 nt, Homo sapiens
  misc_RNA (1)...(19): siRNA sense strand
ggaaugaacuugucucacu

SEQ ID NO: 780622 - RNA, 19 nt, Homo sapiens
  misc_RNA (1)...(19): siRNA sense strand
ggucagccauccucaagua

SEQ ID NO: 780623 - RNA, 19 nt, Homo sapiens
  misc_RNA (1)...(19): siRNA sense strand
gaaggaaauuauugaagga

SEQ ID NO: 780624 - RNA, 19 nt, Homo sapiens
  misc_RNA (1)...(19): siRNA sense strand
ccuccaaacuuuagucaua

SEQ ID NO: 780625 - RNA, 19 nt, Homo sapiens
  misc_RNA (1)...(19): siRNA sense strand
gaucaagugcgagaaauua

SEQ ID NO: 780626 - RNA, 19 nt, Homo sapiens
  misc_RNA (1)...(19): siRNA sense strand
gcgagcagcugccaccuuu

SEQ ID NO: 780627 - RNA, 19 nt, Homo sapiens
  misc_RNA (1)...(19): siRNA sense strand
acaaaggucuggacacuga

SEQ ID NO: 780628 - RNA, 19 nt, Homo sapiens
  misc_RNA (1)...(19): siRNA sense strand
caauugagaagaacacuua

SEQ ID NO: 780629 - RNA, 19 nt, Homo sapiens
  misc_RNA (1)...(19): siRNA sense strand
caaagacagaguaucauua

SEQ ID NO: 780630 - RNA, 19 nt, Homo sapiens
  misc_RNA (1)...(19): siRNA sense strand
caacaauuauggugaacaa

SEQ ID NO: 780631 - RNA, 19 nt, Homo sapiens
  misc_RNA (1)...(19): siRNA sense strand
ggagaaauaugaugaaucc

SEQ ID NO: 780632 - RNA, 19 nt, Homo sapiens
  misc_RNA (1)...(19): siRNA sense strand
caagaucacugacacaaag

SEQ ID NO: 780633 - RNA, 19 nt, Homo sapiens
  misc_RNA (1)...(19): siRNA sense strand
ugaaguagauucugauaca

SEQ ID NO: 780634 - RNA, 19 nt, Homo sapiens
  misc_RNA (1)...(19): siRNA sense strand
cagcagacacuaauucaua

SEQ ID NO: 780635 - RNA, 19 nt, Homo sapiens
  misc_RNA (1)...(19): siRNA sense strand
ggaccaacauuuccaguag

SEQ ID NO: 780636 - RNA, 19 nt, Homo sapiens
  misc_RNA (1)...(19): siRNA sense strand
gaaauaacagauacaguug

SEQ ID NO: 780637 - RNA, 19 nt, Homo sapiens
  misc_RNA (1)...(19): siRNA sense strand
ggagauagcaacaauuaug

SEQ ID NO: 780638 - RNA, 19 nt, Homo sapiens
  misc_RNA (1)...(19): siRNA sense strand
cagaagauguugcacaaga

SEQ ID NO: 780639 - RNA, 19 nt, Homo sapiens
  misc_RNA (1)...(19): siRNA sense strand
ggcagaggcuccuuuaaga

SEQ ID NO: 780640 - RNA, 19 nt, Homo sapiens
  misc_RNA (1)...(19): siRNA sense strand
gagugcagcuucagucuug

SEQ ID NO: 780641 - RNA, 19 nt, Homo sapiens
  misc_RNA (1)...(19): siRNA sense strand
caagcaaacuccugacuuc

SEQ ID NO: 780642 - RNA, 19 nt, Homo sapiens
  misc_RNA (1)...(19): siRNA sense strand
ggugaacaaugacuuuauu

SEQ ID NO: 780643 - RNA, 19 nt, Homo sapiens
  misc_RNA (1)...(19): siRNA sense strand
guauaucuguguuaucuga

SEQ ID NO: 780644 - RNA, 19 nt, Homo sapiens
  misc_RNA (1)...(19): siRNA sense strand
gaagaucaaaguucuaaga

SEQ ID NO: 780645 - RNA, 19 nt, Homo sapiens
  misc_RNA (1)...(19): siRNA sense strand
gaagugaaggaaauuauug

SEQ ID NO: 780646 - RNA, 19 nt, Homo sapiens
  misc_RNA (1)...(19): siRNA sense strand
uaaaugggccgucuucuga

SEQ ID NO: 780647 - RNA, 19 nt, Homo sapiens
  misc_RNA (1)...(19): siRNA sense strand
gaacuuagacgugcccaaa

SEQ ID NO: 780648 - RNA, 19 nt, Homo sapiens
  misc_RNA (1)...(19): siRNA sense strand
ggaaggagaguucaaacaa

SEQ ID NO: 780649 - RNA, 19 nt, Homo sapiens
  misc_RNA (1)...(19): siRNA sense strand
caauuauggugaacaauga

SEQ ID NO: 780650 - RNA, 19 nt, Homo sapiens
  misc_RNA (1)...(19): siRNA sense strand
gaacuuaugacgucuggaa

SEQ ID NO: 780651 - RNA, 19 nt, Homo sapiens
  misc_RNA (1)...(19): siRNA sense strand
agucaaagccuuaguaauu

SEQ ID NO: 780652 - RNA, 19 nt, Homo sapiens
  misc_RNA (1)...(19): siRNA sense strand
caaagaaggcccuguccua

SEQ ID NO: 780653 - RNA, 19 nt, Homo sapiens
  misc_RNA (1)...(19): siRNA sense strand
caacguggcuucuguuugc

SEQ ID NO: 780654 - RNA, 19 nt, Homo sapiens
  misc_RNA (1)...(19): siRNA sense strand
ucagugcuaucaaguagua

SEQ ID NO: 780655 - RNA, 19 nt, Homo sapiens
  misc_RNA (1)...(19): siRNA sense strand
guaccuccuuucuuaagua

SEQ ID NO: 780656 - RNA, 19 nt, Homo sapiens
  misc_RNA (1)...(19): siRNA sense strand
uaaagaagaagcugaaaug

SEQ ID NO: 780657 - RNA, 19 nt, Homo sapiens
  misc_RNA (1)...(19): siRNA sense strand
gcaugaaauugaaucuuug

SEQ ID NO: 780658 - RNA, 19 nt, Homo sapiens
  misc_RNA (1)...(19): siRNA sense strand
gaaauuggaaggagaguuc

SEQ ID NO: 780659 - RNA, 19 nt, Homo sapiens
  misc_RNA (1)...(19): siRNA sense strand
gcagcaggaugauaucgaa

SEQ ID NO: 780660 - RNA, 19 nt, Homo sapiens
  misc_RNA (1)...(19): siRNA sense strand
gaacuccaccuaucauuca

SEQ ID NO: 780661 - RNA, 19 nt, Homo sapiens
  misc_RNA (1)...(19): siRNA sense strand
ccagaagcaugaaauugaa

SEQ ID NO: 780662 - RNA, 19 nt, Homo sapiens
  misc_RNA (1)...(19): siRNA sense strand
gaaggaugcauacgacaaa

SEQ ID NO: 780663 - RNA, 19 nt, Homo sapiens
  misc_RNA (1)...(19): siRNA sense strand
caaagugggucguuucucu

SEQ ID NO: 780664 - RNA, 19 nt, Homo sapiens
  misc_RNA (1)...(19): siRNA sense strand
ggagaccucacuagucaua

SEQ ID NO: 780665 - RNA, 19 nt, Homo sapiens
  misc_RNA (1)...(19): siRNA sense strand
gcaacaagcagcccuccua

SEQ ID NO: 780666 - RNA, 19 nt, Homo sapiens
  misc_RNA (1)...(19): siRNA sense strand
ucgaagagcuggagaccaa

SEQ ID NO: 780667 - RNA, 19 nt, Homo sapiens
  misc_RNA (1)...(19): siRNA sense strand
caguauggcuuuccagcua

SEQ ID NO: 780668 - RNA, 19 nt, Homo sapiens
  misc_RNA (1)...(19): siRNA sense strand
guacuucuacuccuacuuu

SEQ ID NO: 780669 - RNA, 19 nt, Homo sapiens
  misc_RNA (1)...(19): siRNA sense strand
gagagucguuuguggauca

SEQ ID NO: 780670 - RNA, 19 nt, Homo sapiens
  misc_RNA (1)...(19): siRNA sense strand
caacugugguuccuaguca

SEQ ID NO: 780671 - RNA, 19 nt, Homo sapiens
  misc_RNA (1)...(19): siRNA sense strand
caacagacaguuucauaug

SEQ ID NO: 780672 - RNA, 19 nt, Homo sapiens
  misc_RNA (1)...(19): siRNA sense strand
acccaaagcuccuggaauu

SEQ ID NO: 780673 - RNA, 19 nt, Homo sapiens
  misc_RNA (1)...(19): siRNA sense strand
gaucuuaaaugugacaaca

SEQ ID NO: 780674 - RNA, 19 nt, Homo sapiens
  misc_RNA (1)...(19): siRNA sense strand
ggucacaccugggcaaguu

SEQ ID NO: 780675 - RNA, 19 nt, Homo sapiens
  misc_RNA (1)...(19): siRNA sense strand
gcaaacuccugacuucuac

SEQ ID NO: 780676 - RNA, 19 nt, Homo sapiens
  misc_RNA (1)...(19): siRNA sense strand
ccaggagauucaaauauug

SEQ ID NO: 780677 - RNA, 19 nt, Homo sapiens
  misc_RNA (1)...(19): siRNA sense strand
cccaggagauucaaauauu

SEQ ID NO: 780678 - RNA, 19 nt, Homo sapiens
  misc_RNA (1)...(19): siRNA sense strand
cagcaucccaauauuguua

SEQ ID NO: 780679 - RNA, 19 nt, Homo sapiens
  misc_RNA (1)...(19): siRNA sense strand
agucagauaucgaagauga

SEQ ID NO: 780680 - RNA, 19 nt, Homo sapiens
  misc_RNA (1)...(19): siRNA sense strand
ucagagccuucacaucuaa

SEQ ID NO: 780681 - RNA, 19 nt, Homo sapiens
  misc_RNA (1)...(19): siRNA sense strand
gcugaaaccgugguaguua

SEQ ID NO: 780682 - RNA, 19 nt, Homo sapiens
  misc_RNA (1)...(19): siRNA sense strand
gaaggagaguucaaacaac

SEQ ID NO: 780683 - RNA, 19 nt, Homo sapiens
  misc_RNA (1)...(19): siRNA sense strand
guaguagaaugucaauuag

SEQ ID NO: 780684 - RNA, 19 nt, Homo sapiens
  misc_RNA (1)...(19): siRNA sense strand
caacagacagugcaguauu

SEQ ID NO: 780685 - RNA, 19 nt, Homo sapiens
  misc_RNA (1)...(19): siRNA sense strand
gaaagauauuccaucaaag

SEQ ID NO: 780686 - RNA, 19 nt, Homo sapiens
  misc_RNA (1)...(19): siRNA sense strand
caaaguagcaauuccugaa

SEQ ID NO: 780687 - RNA, 19 nt, Homo sapiens
  misc_RNA (1)...(19): siRNA sense strand
guagaacaauccagugcuu

SEQ ID NO: 780688 - RNA, 19 nt, Homo sapiens
  misc_RNA (1)...(19): siRNA sense strand
gaagauguugcacaagaaa

SEQ ID NO: 780689 - RNA, 19 nt, Homo sapiens
  misc_RNA (1)...(19): siRNA sense strand
gaccauggcuaaagcuauc

SEQ ID NO: 780690 - RNA, 19 nt, Homo sapiens
  misc_RNA (1)...(19): siRNA sense strand
gccagaagcaugaaauuga

SEQ ID NO: 780691 - RNA, 19 nt, Homo sapiens
  misc_RNA (1)...(19): siRNA sense strand
ggaccuacuucuacaccuu

SEQ ID NO: 780692 - RNA, 19 nt, Homo sapiens
  misc_RNA (1)...(19): siRNA sense strand
ucaccgcgaucuuaaaugu

SEQ ID NO: 780693 - RNA, 19 nt, Homo sapiens
  misc_RNA (1)...(19): siRNA sense strand
gaagacgacgacccacuaa

SEQ ID NO: 780694 - RNA, 19 nt, Homo sapiens
  misc_RNA (1)...(19): siRNA sense strand
uuaaaggucuucaguuucu

SEQ ID NO: 780695 - RNA, 19 nt, Homo sapiens
  misc_RNA (1)...(19): siRNA sense strand
agagaagccugaacuguca

SEQ ID NO: 780696 - RNA, 19 nt, Homo sapiens
  misc_RNA (1)...(19): siRNA sense strand
acaguugcuuugccaguua

SEQ ID NO: 780697 - RNA, 19 nt, Homo sapiens
  misc_RNA (1)...(19): siRNA sense strand
cauaucaacuccucaugug

SEQ ID NO: 780698 - RNA, 19 nt, Homo sapiens
  misc_RNA (1)...(19): siRNA sense strand
gaaccaugccuucuuccaa

SEQ ID NO: 780699 - RNA, 19 nt, Homo sapiens
  misc_RNA (1)...(19): siRNA sense strand
caacugugcaucuccauga

SEQ ID NO: 780700 - RNA, 19 nt, Homo sapiens
  misc_RNA (1)...(19): siRNA sense strand
ucauuuaacuccucuuaca

SEQ ID NO: 780701 - RNA, 19 nt, Homo sapiens
  misc_RNA (1)...(19): siRNA sense strand
gaaggguguuucucaaguc

SEQ ID NO: 780702 - RNA, 19 nt, Homo sapiens
  misc_RNA (1)...(19): siRNA sense strand
guccagagauuaucacagu

SEQ ID NO: 780703 - RNA, 19 nt, Homo sapiens
  misc_RNA (1)...(19): siRNA sense strand
ccaagccaccucuaacuaa

SEQ ID NO: 780704 - RNA, 19 nt, Homo sapiens
  misc_RNA (1)...(19): siRNA sense strand
ggucagggauccucugucu

SEQ ID NO: 780705 - RNA, 19 nt, Homo sapiens
  misc_RNA (1)...(19): siRNA sense strand
gaaguuacauccugauaaa

SEQ ID NO: 780706 - RNA, 19 nt, Homo sapiens
  misc_RNA (1)...(19): siRNA sense strand
gaauaaggaugaacuuuga

SEQ ID NO: 780707 - RNA, 19 nt, Homo sapiens
  misc_RNA (1)...(19): siRNA sense strand
gaaauuggcauugaaguua

SEQ ID NO: 780708 - RNA, 19 nt, Homo sapiens
  misc_RNA (1)...(19): siRNA sense strand
ggagaacugugguuuguaa

SEQ ID NO: 780709 - RNA, 19 nt, Homo sapiens
  misc_RNA (1)...(19): siRNA sense strand
gaacugugguuuguaaauu

SEQ ID NO: 780710 - RNA, 19 nt, Homo sapiens
  misc_RNA (1)...(19): siRNA sense strand
caucaaaucuucuuuaugg

SEQ ID NO: 780711 - RNA, 19 nt, Homo sapiens
  misc_RNA (1)...(19): siRNA sense strand
uaugaaagcuggaacuauu

SEQ ID NO: 780712 - RNA, 19 nt, Homo sapiens
  misc_RNA (1)...(19): siRNA sense strand
gaaauaucauggagacaga

SEQ ID NO: 780713 - RNA, 19 nt, Homo sapiens
  misc_RNA (1)...(19): siRNA sense strand
ucaaagauacccugagaua

SEQ ID NO: 780714 - RNA, 19 nt, Homo sapiens
  misc_RNA (1)...(19): siRNA sense strand
gaaagaagagaauuugaug

SEQ ID NO: 780715 - RNA, 19 nt, Homo sapiens
  misc_RNA (1)...(19): siRNA sense strand
aaccauggcuuguugauuu

SEQ ID NO: 780716 - RNA, 19 nt, Homo sapiens
  misc_RNA (1)...(19): siRNA sense strand
gguauuggcuggcugauca

SEQ ID NO: 780717 - RNA, 19 nt, Homo sapiens
  misc_RNA (1)...(19): siRNA sense strand
agcaaucgcugccuuaaua

SEQ ID NO: 780718 - RNA, 19 nt, Homo sapiens
  misc_RNA (1)...(19): siRNA sense strand
uguauaacauucaggcuua

SEQ ID NO: 780719 - RNA, 19 nt, Homo sapiens
  misc_RNA (1)...(19): siRNA sense strand
ggaauaaggaugaacuuug

SEQ ID NO: 780720 - RNA, 19 nt, Homo sapiens
  misc_RNA (1)...(19): siRNA sense strand
gacauuaacuggacugauc

SEQ ID NO: 780721 - RNA, 19 nt, Homo sapiens
  misc_RNA (1)...(19): siRNA sense strand
gagcaucaaaucuucuuua

SEQ ID NO: 780722 - RNA, 19 nt, Homo sapiens
  misc_RNA (1)...(19): siRNA sense strand
gcagauaaauaccagagau

SEQ ID NO: 780723 - RNA, 19 nt, Homo sapiens
  misc_RNA (1)...(19): siRNA sense strand
caagaagagcagauaaaua

SEQ ID NO: 780724 - RNA, 19 nt, Homo sapiens
  misc_RNA (1)...(19): siRNA sense strand
uaaagaaguggauggguua

SEQ ID NO: 780725 - RNA, 19 nt, Homo sapiens
  misc_RNA (1)...(19): siRNA sense strand
ugaaaggagucaacagcua

SEQ ID NO: 780726 - RNA, 19 nt, Homo sapiens
  misc_RNA (1)...(19): siRNA sense strand
caaaugauccugagcugaa

SEQ ID NO: 780727 - RNA, 19 nt, Homo sapiens
  misc_RNA (1)...(19): siRNA sense strand
gcaagaggaauaaggauga

SEQ ID NO: 780728 - RNA, 19 nt, Homo sapiens
  misc_RNA (1)...(19): siRNA sense strand
guucaaagauacccugaga

SEQ ID NO: 780729 - RNA, 19 nt, Homo sapiens
  misc_RNA (1)...(19): siRNA sense strand
gacaaggaaccaaagaaua

SEQ ID NO: 780730 - RNA, 19 nt, Homo sapiens
  misc_RNA (1)...(19): siRNA sense strand
cauaugaaguacucaaaga

SEQ ID NO: 780731 - RNA, 19 nt, Homo sapiens
  misc_RNA (1)...(19): siRNA sense strand
gaaagagcaaagagaaauu

SEQ ID NO: 780732 - RNA, 19 nt, Homo sapiens
  misc_RNA (1)...(19): siRNA sense strand
aaagaaccauggcuuguug

SEQ ID NO: 780733 - RNA, 19 nt, Homo sapiens
  misc_RNA (1)...(19): siRNA sense strand
gagggacucuguaacaugu

SEQ ID NO: 780734 - RNA, 19 nt, Homo sapiens
  misc_RNA (1)...(19): siRNA sense strand
uaacuguggugaugauaga

SEQ ID NO: 780735 - RNA, 19 nt, Homo sapiens
  misc_RNA (1)...(19): siRNA sense strand
caacgacagugguauucaa

SEQ ID NO: 780736 - RNA, 19 nt, Homo sapiens
  misc_RNA (1)...(19): siRNA sense strand
gaaaggagucaacagcuau

SEQ ID NO: 780737 - RNA, 19 nt, Homo sapiens
  misc_RNA (1)...(19): siRNA sense strand
ggaaagaagagaauuugau

SEQ ID NO: 780738 - RNA, 19 nt, Homo sapiens
  misc_RNA (1)...(19): siRNA sense strand
cgaacuaguuacacaaaga

SEQ ID NO: 780739 - RNA, 19 nt, Homo sapiens
  misc_RNA (1)...(19): siRNA sense strand
ccaaagaaagugugaauuc

SEQ ID NO: 780740 - RNA, 19 nt, Homo sapiens
  misc_RNA (1)...(19): siRNA sense strand
ggacaaggaaccaaagaau

SEQ ID NO: 780741 - RNA, 19 nt, Homo sapiens
  misc_RNA (1)...(19): siRNA sense strand
caucaucgguggcuguuau

SEQ ID NO: 780742 - RNA, 19 nt, Homo sapiens
  misc_RNA (1)...(19): siRNA sense strand
gaacuaguuacacaaagaa

SEQ ID NO: 780743 - RNA, 19 nt, Homo sapiens
  misc_RNA (1)...(19): siRNA sense strand
gcucagacaugccagaaag

SEQ ID NO: 780744 - RNA, 19 nt, Homo sapiens
  misc_RNA (1)...(19): siRNA sense strand
gaacuacuuucggcaaaca

SEQ ID NO: 780745 - RNA, 19 nt, Homo sapiens
  misc_RNA (1)...(19): siRNA sense strand
ggacaucacucugcugaac

SEQ ID NO: 780746 - RNA, 19 nt, Homo sapiens
  misc_RNA (1)...(19): siRNA sense strand
gaaaucaaggcaagaggaa

SEQ ID NO: 780747 - RNA, 19 nt, Homo sapiens
  misc_RNA (1)...(19): siRNA sense strand
gcaagcaguagagaaauaa

SEQ ID NO: 780748 - RNA, 19 nt, Homo sapiens
  misc_RNA (1)...(19): siRNA sense strand
gcucuuggcuaggaugauu

SEQ ID NO: 780749 - RNA, 19 nt, Homo sapiens
  misc_RNA (1)...(19): siRNA sense strand
gaaguacagugacagaacu

SEQ ID NO: 780750 - RNA, 19 nt, Homo sapiens
  misc_RNA (1)...(19): siRNA sense strand
uaagacaagcuuucaagaa

SEQ ID NO: 780751 - RNA, 19 nt, Homo sapiens
  misc_RNA (1)...(19): siRNA sense strand
gaaacucuccgaaaucaag

SEQ ID NO: 780752 - RNA, 19 nt, Homo sapiens
  misc_RNA (1)...(19): siRNA sense strand
uaacuggacugaucaacgu

SEQ ID NO: 780753 - RNA, 19 nt, Homo sapiens
  misc_RNA (1)...(19): siRNA sense strand
caagguggccaguaugaaa

SEQ ID NO: 780754 - RNA, 19 nt, Homo sapiens
  misc_RNA (1)...(19): siRNA sense strand
uaaucaagguggccaguau

SEQ ID NO: 780755 - RNA, 19 nt, Homo sapiens
  misc_RNA (1)...(19): siRNA sense strand
acaaggaaccaaagaauau

SEQ ID NO: 780756 - RNA, 19 nt, Homo sapiens
  misc_RNA (1)...(19): siRNA sense strand
aaaggaucauucucuguuu

SEQ ID NO: 780757 - RNA, 19 nt, Homo sapiens
  misc_RNA (1)...(19): siRNA sense strand
gagcuuuacuaccagaguu

SEQ ID NO: 780758 - RNA, 19 nt, Homo sapiens
  misc_RNA (1)...(19): siRNA sense strand
aaaagggacuugaggauaa

SEQ ID NO: 780759 - RNA, 19 nt, Homo sapiens
  misc_RNA (1)...(19): siRNA sense strand
ggagucugguuaaauaaag

SEQ ID NO: 780760 - RNA, 19 nt, Homo sapiens
  misc_RNA (1)...(19): siRNA sense strand
gaucaacgugggcaguaua

SEQ ID NO: 780761 - RNA, 19 nt, Homo sapiens
  misc_RNA (1)...(19): siRNA sense strand
gcuuagauauuacaacaag

SEQ ID NO: 780762 - RNA, 19 nt, Homo sapiens
  misc_RNA (1)...(19): siRNA sense strand
gaacuuuggacaggaaauu

SEQ ID NO: 780763 - RNA, 19 nt, Homo sapiens
  misc_RNA (1)...(19): siRNA sense strand
gcuguuaacuguggugaug

SEQ ID NO: 780764 - RNA, 19 nt, Homo sapiens
  misc_RNA (1)...(19): siRNA sense strand
guggauggguuacuucgaa

SEQ ID NO: 780765 - RNA, 19 nt, Homo sapiens
  misc_RNA (1)...(19): siRNA sense strand
agaaugcuuugccgaauga

SEQ ID NO: 780766 - RNA, 19 nt, Homo sapiens
  misc_RNA (1)...(19): siRNA sense strand
agugugaauucucauguua

SEQ ID NO: 780767 - RNA, 19 nt, Homo sapiens
  misc_RNA (1)...(19): siRNA sense strand
uggauggucuuguuaaugu

SEQ ID NO: 780768 - RNA, 19 nt, Homo sapiens
  misc_RNA (1)...(19): siRNA sense strand
ggaggagauuguuugacuu

SEQ ID NO: 780769 - RNA, 19 nt, Homo sapiens
  misc_RNA (1)...(19): siRNA sense strand
ucaaguauccacagaucua

SEQ ID NO: 780770 - RNA, 19 nt, Homo sapiens
  misc_RNA (1)...(19): siRNA sense strand
caaagauacccugagauaa

SEQ ID NO: 780771 - RNA, 19 nt, Homo sapiens
  misc_RNA (1)...(19): siRNA sense strand
gagauuguuugacuucaca

SEQ ID NO: 780772 - RNA, 19 nt, Homo sapiens
  misc_RNA (1)...(19): siRNA sense strand
cauguuggauggucuuguu

SEQ ID NO: 780773 - RNA, 19 nt, Homo sapiens
  misc_RNA (1)...(19): siRNA sense strand
ucacucugcugaacaaauc

SEQ ID NO: 780774 - RNA, 19 nt, Homo sapiens
  misc_RNA (1)...(19): siRNA sense strand
ugcaagcaguagagaaaua

SEQ ID NO: 780775 - RNA, 19 nt, Homo sapiens
  misc_RNA (1)...(19): siRNA sense strand
gcaaucgcugccuuaauaa

SEQ ID NO: 780776 - RNA, 19 nt, Homo sapiens
  misc_RNA (1)...(19): siRNA sense strand
aagaagagcagauaaauac

SEQ ID NO: 780777 - RNA, 19 nt, Homo sapiens
  misc_RNA (1)...(19): siRNA sense strand
gaucagggccuauccaacu

SEQ ID NO: 780778 - RNA, 19 nt, Homo sapiens
  misc_RNA (1)...(19): siRNA sense strand
agugaaagcuggaaaagua

SEQ ID NO: 780779 - RNA, 19 nt, Homo sapiens
  misc_RNA (1)...(19): siRNA sense strand
gaucuaacaccucagacuu

SEQ ID NO: 780780 - RNA, 19 nt, Homo sapiens
  misc_RNA (1)...(19): siRNA sense strand
aaagauacccugagauaag

SEQ ID NO: 780781 - RNA, 19 nt, Homo sapiens
  misc_RNA (1)...(19): siRNA sense strand
ucaacgaacuaguuacaca

SEQ ID NO: 780782 - RNA, 19 nt, Homo sapiens
  misc_RNA (1)...(19): siRNA sense strand
ggagccacuuuaaauaaca

SEQ ID NO: 780783 - RNA, 19 nt, Homo sapiens
  misc_RNA (1)...(19): siRNA sense strand
ggauggucuuguuaaugua

SEQ ID NO: 780784 - RNA, 19 nt, Homo sapiens
  misc_RNA (1)...(19): siRNA sense strand
aauuggagcuguuaacugu

SEQ ID NO: 780785 - RNA, 19 nt, Homo sapiens
  misc_RNA (1)...(19): siRNA sense strand
gaaaagggacuugaggaua

SEQ ID NO: 780786 - RNA, 19 nt, Homo sapiens
  misc_RNA (1)...(19): siRNA sense strand
gaaagugugaauucucaug

SEQ ID NO: 780787 - RNA, 19 nt, Homo sapiens
  misc_RNA (1)...(19): siRNA sense strand
uaaaggacaaggaaccaaa

SEQ ID NO: 780788 - RNA, 19 nt, Homo sapiens
  misc_RNA (1)...(19): siRNA sense strand
caagaggaauaaggaugaa

SEQ ID NO: 780789 - RNA, 19 nt, Homo sapiens
  misc_RNA (1)...(19): siRNA sense strand
aaucaaggcaagaggaaua

SEQ ID NO: 780790 - RNA, 19 nt, Homo sapiens
  misc_RNA (1)...(19): siRNA sense strand
uaucacaguuacaaugguu

SEQ ID NO: 780791 - RNA, 19 nt, Homo sapiens
  misc_RNA (1)...(19): siRNA sense strand
gaugguugauuucuauucu

SEQ ID NO: 780792 - RNA, 19 nt, Homo sapiens
  misc_RNA (1)...(19): siRNA sense strand
caaagaaccauggcuuguu

SEQ ID NO: 780793 - RNA, 19 nt, Homo sapiens
  misc_RNA (1)...(19): siRNA sense strand
ggaaaacguucaaagauac

SEQ ID NO: 780794 - RNA, 19 nt, Homo sapiens
  misc_RNA (1)...(19): siRNA sense strand
ucaacucauuggaugcuaa

SEQ ID NO: 780795 - RNA, 19 nt, Homo sapiens
  misc_RNA (1)...(19): siRNA sense strand
uggaaacucuccgaaauca

SEQ ID NO: 780796 - RNA, 19 nt, Homo sapiens
  misc_RNA (1)...(19): siRNA sense strand
cgaaagagcaaagagaaau

SEQ ID NO: 780797 - RNA, 19 nt, Homo sapiens
  misc_RNA (1)...(19): siRNA sense strand
cuaggaugauuaaaggaaa

SEQ ID NO: 780798 - RNA, 19 nt, Homo sapiens
  misc_RNA (1)...(19): siRNA sense strand
gcuuaaguuugguacacua

SEQ ID NO: 780799 - RNA, 19 nt, Homo sapiens
  misc_RNA (1)...(19): siRNA sense strand
gcuuggaccucaaaauuuu

SEQ ID NO: 780800 - RNA, 19 nt, Homo sapiens
  misc_RNA (1)...(19): siRNA sense strand
cauguuagaaguacaguga

SEQ ID NO: 780801 - RNA, 19 nt, Homo sapiens
  misc_RNA (1)...(19): siRNA sense strand
gauaguguauauggccauu

SEQ ID NO: 780802 - RNA, 19 nt, Homo sapiens
  misc_RNA (1)...(19): siRNA sense strand
ugaaguuacauccugauaa

SEQ ID NO: 780803 - RNA, 19 nt, Homo sapiens
  misc_RNA (1)...(19): siRNA sense strand
aagauacccugagauaaga

SEQ ID NO: 780804 - RNA, 19 nt, Homo sapiens
  misc_RNA (1)...(19): siRNA sense strand
gaaauucaucauggaaaga

SEQ ID NO: 780805 - RNA, 19 nt, Homo sapiens
  misc_RNA (1)...(19): siRNA sense strand
gcacagaagugguaauaaa

SEQ ID NO: 780806 - RNA, 19 nt, Homo sapiens
  misc_RNA (1)...(19): siRNA sense strand
ccaaagagauucguaauga

SEQ ID NO: 780807 - RNA, 19 nt, Homo sapiens
  misc_RNA (1)...(19): siRNA sense strand
gaaggaggcucacugaaga

SEQ ID NO: 780808 - RNA, 19 nt, Homo sapiens
  misc_RNA (1)...(19): siRNA sense strand
ggaggaugaugcuauauuu

SEQ ID NO: 780809 - RNA, 19 nt, Homo sapiens
  misc_RNA (1)...(19): siRNA sense strand
cgaagaagaucgaaaauua

SEQ ID NO: 780810 - RNA, 19 nt, Homo sapiens
  misc_RNA (1)...(19): siRNA sense strand
ugaaggaacucaaggaauu

SEQ ID NO: 780811 - RNA, 19 nt, Homo sapiens
  misc_RNA (1)...(19): siRNA sense strand
ggaaggaugcacauauuua

SEQ ID NO: 780812 - RNA, 19 nt, Homo sapiens
  misc_RNA (1)...(19): siRNA sense strand
gagugaaucuuccuucuug

SEQ ID NO: 780813 - RNA, 19 nt, Homo sapiens
  misc_RNA (1)...(19): siRNA sense strand
gaaggaugcacauauuuaa

SEQ ID NO: 780814 - RNA, 19 nt, Homo sapiens
  misc_RNA (1)...(19): siRNA sense strand
ugaggcagcugucugagua

SEQ ID NO: 780815 - RNA, 19 nt, Homo sapiens
  misc_RNA (1)...(19): siRNA sense strand
cggaagaccuguccaguga

SEQ ID NO: 780816 - RNA, 19 nt, Homo sapiens
  misc_RNA (1)...(19): siRNA sense strand
gcaaacagcggcacaacaa

SEQ ID NO: 780817 - RNA, 19 nt, Homo sapiens
  misc_RNA (1)...(19): siRNA sense strand
ccaagugccuggugcauug

SEQ ID NO: 780818 - RNA, 19 nt, Homo sapiens
  misc_RNA (1)...(19): siRNA sense strand
gaagaaucgucacccaaga

SEQ ID NO: 780819 - RNA, 19 nt, Homo sapiens
  misc_RNA (1)...(19): siRNA sense strand
acaaugagaugcuacuuau

SEQ ID NO: 780820 - RNA, 19 nt, Homo sapiens
  misc_RNA (1)...(19): siRNA sense strand
agaaggaugugaagaagaa

SEQ ID NO: 780821 - RNA, 19 nt, Homo sapiens
  misc_RNA (1)...(19): siRNA sense strand
caaagagauucguaaugaa

SEQ ID NO: 780822 - RNA, 19 nt, Homo sapiens
  misc_RNA (1)...(19): siRNA sense strand
caggaaggaugcacauauu

SEQ ID NO: 780823 - RNA, 19 nt, Homo sapiens
  misc_RNA (1)...(19): siRNA sense strand
gaaaggcgcagcccucuuc

SEQ ID NO: 780824 - RNA, 19 nt, Homo sapiens
  misc_RNA (1)...(19): siRNA sense strand
gacaaugagaugcuacuua

SEQ ID NO: 780825 - RNA, 19 nt, Homo sapiens
  misc_RNA (1)...(19): siRNA sense strand
gacaagcccucccuuaucu

SEQ ID NO: 780826 - RNA, 19 nt, Homo sapiens
  misc_RNA (1)...(19): siRNA sense strand
gagaaacagaugaauugua

SEQ ID NO: 780827 - RNA, 19 nt, Homo sapiens
  misc_RNA (1)...(19): siRNA sense strand
cauggaggaugaugcuaua

SEQ ID NO: 780828 - RNA, 19 nt, Homo sapiens
  misc_RNA (1)...(19): siRNA sense strand
caucugggcuaccuacuau

SEQ ID NO: 780829 - RNA, 19 nt, Homo sapiens
  misc_RNA (1)...(19): siRNA sense strand
ggaacucaaggaauuuaua

SEQ ID NO: 780830 - RNA, 19 nt, Homo sapiens
  misc_RNA (1)...(19): siRNA sense strand
acagaugaauuguaacuug

SEQ ID NO: 780831 - RNA, 19 nt, Homo sapiens
  misc_RNA (1)...(19): siRNA sense strand
gcaggaaggaugcacauau

SEQ ID NO: 780832 - RNA, 19 nt, Homo sapiens
  misc_RNA (1)...(19): siRNA sense strand
gcgcagcccucuucuuaca

SEQ ID NO: 780833 - RNA, 19 nt, Homo sapiens
  misc_RNA (1)...(19): siRNA sense strand
ggacaagcccucccuuauc

SEQ ID NO: 780834 - RNA, 19 nt, Homo sapiens
  misc_RNA (1)...(19): siRNA sense strand
cagaugaauuguaacuuga

SEQ ID NO: 780835 - RNA, 19 nt, Homo sapiens
  misc_RNA (1)...(19): siRNA sense strand
cuacuuaucuugggacaga

SEQ ID NO: 780836 - RNA, 19 nt, Homo sapiens
  misc_RNA (1)...(19): siRNA sense strand
ggaaggaggcucacugaag

SEQ ID NO: 780837 - RNA, 19 nt, Homo sapiens
  misc_RNA (1)...(19): siRNA sense strand
uagagaaacagaugaauug

SEQ ID NO: 780838 - RNA, 19 nt, Homo sapiens
  misc_RNA (1)...(19): siRNA sense strand
gaacucaaggaauuuauag

SEQ ID NO: 780839 - RNA, 19 nt, Homo sapiens
  misc_RNA (1)...(19): siRNA sense strand
gaaggaacucaaggaauuu

SEQ ID NO: 780840 - RNA, 19 nt, Homo sapiens
  misc_RNA (1)...(19): siRNA sense strand
ccacuggaaugaagcguau

SEQ ID NO: 780841 - RNA, 19 nt, Homo sapiens
  misc_RNA (1)...(19): siRNA sense strand
ucacaaggccugcgaagug

SEQ ID NO: 780842 - RNA, 19 nt, Homo sapiens
  misc_RNA (1)...(19): siRNA sense strand
cggagaaccuaaacaacaa

SEQ ID NO: 780843 - RNA, 19 nt, Homo sapiens
  misc_RNA (1)...(19): siRNA sense strand
caacccagcucgaucaaaa

SEQ ID NO: 780844 - RNA, 19 nt, Homo sapiens
  misc_RNA (1)...(19): siRNA sense strand
ccuaugcaaugaaggaauu

SEQ ID NO: 780845 - RNA, 19 nt, Homo sapiens
  misc_RNA (1)...(19): siRNA sense strand
gcagcugucugaguaugaa

SEQ ID NO: 780846 - RNA, 19 nt, Homo sapiens
  misc_RNA (1)...(19): siRNA sense strand
ggaccgagcgccucaucaa

SEQ ID NO: 780847 - RNA, 19 nt, Homo sapiens
  misc_RNA (1)...(19): siRNA sense strand
cagaagugguaauaaagga

SEQ ID NO: 780848 - RNA, 19 nt, Homo sapiens
  misc_RNA (1)...(19): siRNA sense strand
ccaacggcauggaggauga

SEQ ID NO: 780849 - RNA, 19 nt, Homo sapiens
  misc_RNA (1)...(19): siRNA sense strand
caggugaucugccucaaca

SEQ ID NO: 780850 - RNA, 19 nt, Homo sapiens
  misc_RNA (1)...(19): siRNA sense strand
cagcacagaagugguaaua

SEQ ID NO: 780851 - RNA, 19 nt, Homo sapiens
  misc_RNA (1)...(19): siRNA sense strand
gcgauagcauccacagugu

SEQ ID NO: 780852 - RNA, 19 nt, Homo sapiens
  misc_RNA (1)...(19): siRNA sense strand
ugaggcuucuguucaguaa

SEQ ID NO: 780853 - RNA, 19 nt, Homo sapiens
  misc_RNA (1)...(19): siRNA sense strand
gcaccaggaguccaucauu

SEQ ID NO: 780854 - RNA, 19 nt, Homo sapiens
  misc_RNA (1)...(19): siRNA sense strand
ggagugaugagaagucaga

SEQ ID NO: 780855 - RNA, 19 nt, Homo sapiens
  misc_RNA (1)...(19): siRNA sense strand
uaaacaaagcgaagaggaa

SEQ ID NO: 780856 - RNA, 19 nt, Homo sapiens
  misc_RNA (1)...(19): siRNA sense strand
ccacaagcaugcaggugau

SEQ ID NO: 780857 - RNA, 19 nt, Homo sapiens
  misc_RNA (1)...(19): siRNA sense strand
aggcgcagcccucuucuua

SEQ ID NO: 780858 - RNA, 19 nt, Homo sapiens
  misc_RNA (1)...(19): siRNA sense strand
aguaaaagcugcaccauug

SEQ ID NO: 780859 - RNA, 19 nt, Homo sapiens
  misc_RNA (1)...(19): siRNA sense strand
ccacaccaguaguuucuca

SEQ ID NO: 780860 - RNA, 19 nt, Homo sapiens
  misc_RNA (1)...(19): siRNA sense strand
gugagaaggaugugaagaa

SEQ ID NO: 780861 - RNA, 19 nt, Homo sapiens
  misc_RNA (1)...(19): siRNA sense strand
aaagccagcugcccuucuu

SEQ ID NO: 780862 - RNA, 19 nt, Homo sapiens
  misc_RNA (1)...(19): siRNA sense strand
gcaagguuccggacucugu

SEQ ID NO: 780863 - RNA, 19 nt, Homo sapiens
  misc_RNA (1)...(19): siRNA sense strand
gaugagccaggaucuagaa

SEQ ID NO: 780864 - RNA, 19 nt, Homo sapiens
  misc_RNA (1)...(19): siRNA sense strand
caccaggaguccaucauuc

SEQ ID NO: 780865 - RNA, 19 nt, Homo sapiens
  misc_RNA (1)...(19): siRNA sense strand
aaaugugacuuccaaagag

SEQ ID NO: 780866 - RNA, 19 nt, Homo sapiens
  misc_RNA (1)...(19): siRNA sense strand
gaccugaggcuucuguuca

SEQ ID NO: 780867 - RNA, 19 nt, Homo sapiens
  misc_RNA (1)...(19): siRNA sense strand
gaauuagagaaacagauga

SEQ ID NO: 780868 - RNA, 19 nt, Homo sapiens
  misc_RNA (1)...(19): siRNA sense strand
ugaauuagagaaacagaug

SEQ ID NO: 780869 - RNA, 19 nt, Homo sapiens
  misc_RNA (1)...(19): siRNA sense strand
uauuugggauccuuaacaa

SEQ ID NO: 780870 - RNA, 19 nt, Homo sapiens
  misc_RNA (1)...(19): siRNA sense strand
uaaagagcccuucguggau

SEQ ID NO: 780871 - RNA, 19 nt, Homo sapiens
  misc_RNA (1)...(19): siRNA sense strand
gaugaauuguaacuugaag

SEQ ID NO: 780872 - RNA, 19 nt, Homo sapiens
  misc_RNA (1)...(19): siRNA sense strand
aaucuuccuucuugcauga

SEQ ID NO: 780873 - RNA, 19 nt, Homo sapiens
  misc_RNA (1)...(19): siRNA sense strand
ccaaggaccugaggcuucu

SEQ ID NO: 780874 - RNA, 19 nt, Homo sapiens
  misc_RNA (1)...(19): siRNA sense strand
gguaauaaaggaagaaucg

SEQ ID NO: 780875 - RNA, 19 nt, Homo sapiens
  misc_RNA (1)...(19): siRNA sense strand
uauagacaaugagaugcua

SEQ ID NO: 780876 - RNA, 19 nt, Homo sapiens
  misc_RNA (1)...(19): siRNA sense strand
ugagaaggaugugaagaag

SEQ ID NO: 780877 - RNA, 19 nt, Homo sapiens
  misc_RNA (1)...(19): siRNA sense strand
gagcuagagcggcugaaga

SEQ ID NO: 780878 - RNA, 19 nt, Homo sapiens
  misc_RNA (1)...(19): siRNA sense strand
gaggaugaugcuauauuug

SEQ ID NO: 780879 - RNA, 19 nt, Homo sapiens
  misc_RNA (1)...(19): siRNA sense strand
gagaaggaugugaagaaga

SEQ ID NO: 780880 - RNA, 19 nt, Homo sapiens
  misc_RNA (1)...(19): siRNA sense strand
gccaagcuccgaagcauca

SEQ ID NO: 780881 - RNA, 19 nt, Homo sapiens
  misc_RNA (1)...(19): siRNA sense strand
gcugcaaccuccaaaccau

SEQ ID NO: 780882 - RNA, 19 nt, Homo sapiens
  misc_RNA (1)...(19): siRNA sense strand
uauuuaagccugugucugu

SEQ ID NO: 780883 - RNA, 19 nt, Homo sapiens
  misc_RNA (1)...(19): siRNA sense strand
aaucgucacccaagaaaga

SEQ ID NO: 780884 - RNA, 19 nt, Homo sapiens
  misc_RNA (1)...(19): siRNA sense strand
gagccaggaucuagaaaau

SEQ ID NO: 780885 - RNA, 19 nt, Homo sapiens
  misc_RNA (1)...(19): siRNA sense strand
gcagcccucuucuuacaac

SEQ ID NO: 780886 - RNA, 19 nt, Homo sapiens
  misc_RNA (1)...(19): siRNA sense strand
aggcuucuguucaguaaug

SEQ ID NO: 780887 - RNA, 19 nt, Homo sapiens
  misc_RNA (1)...(19): siRNA sense strand
caaaaguccugccaaaguc

SEQ ID NO: 780888 - RNA, 19 nt, Homo sapiens
  misc_RNA (1)...(19): siRNA sense strand
uaucauaacauccgagucu

SEQ ID NO: 780889 - RNA, 19 nt, Homo sapiens
  misc_RNA (1)...(19): siRNA sense strand
gaccgagcgccucaucaaa

SEQ ID NO: 780890 - RNA, 19 nt, Homo sapiens
  misc_RNA (1)...(19): siRNA sense strand
ggaccacaccaguaguuuc

SEQ ID NO: 780891 - RNA, 19 nt, Homo sapiens
  misc_RNA (1)...(19): siRNA sense strand
cuaaacaacaacagcaaga

SEQ ID NO: 780892 - RNA, 19 nt, Homo sapiens
  misc_RNA (1)...(19): siRNA sense strand
aaugugacuuccaaagaga

SEQ ID NO: 780893 - RNA, 19 nt, Homo sapiens
  misc_RNA (1)...(19): siRNA sense strand
ucucggcucugaauggaau

SEQ ID NO: 780894 - RNA, 19 nt, Homo sapiens
  misc_RNA (1)...(19): siRNA sense strand
caagcacaccaaagagcua

SEQ ID NO: 780895 - RNA, 19 nt, Homo sapiens
  misc_RNA (1)...(19): siRNA sense strand
gcucaacucggagaaccua

SEQ ID NO: 780896 - RNA, 19 nt, Homo sapiens
  misc_RNA (1)...(19): siRNA sense strand
ugaauuguaacuugaagga

SEQ ID NO: 780897 - RNA, 19 nt, Homo sapiens
  misc_RNA (1)...(19): siRNA sense strand
gccaggaucuagaaaaugu

SEQ ID NO: 780898 - RNA, 19 nt, Homo sapiens
  misc_RNA (1)...(19): siRNA sense strand
gagaagccgacaaccaaca

SEQ ID NO: 780899 - RNA, 19 nt, Homo sapiens
  misc_RNA (1)...(19): siRNA sense strand
uaacauccgagucuacgau

SEQ ID NO: 780900 - RNA, 19 nt, Homo sapiens
  misc_RNA (1)...(19): siRNA sense strand
uagaaaaugugacuuccaa

SEQ ID NO: 780901 - RNA, 19 nt, Homo sapiens
  misc_RNA (1)...(19): siRNA sense strand
gcucagggguugauuacau

SEQ ID NO: 780902 - RNA, 19 nt, Homo sapiens
  misc_RNA (1)...(19): siRNA sense strand
gaccacaccaguaguuucu

SEQ ID NO: 780903 - RNA, 19 nt, Homo sapiens
  misc_RNA (1)...(19): siRNA sense strand
cugagaagccgacaaccaa

SEQ ID NO: 780904 - RNA, 19 nt, Homo sapiens
  misc_RNA (1)...(19): siRNA sense strand
gcuauauuugggauccuua

SEQ ID NO: 780905 - RNA, 19 nt, Homo sapiens
  misc_RNA (1)...(19): siRNA sense strand
ggaaaugucucucaaagaa

SEQ ID NO: 780906 - RNA, 19 nt, Homo sapiens
  misc_RNA (1)...(19): siRNA sense strand
ggacagagcugcuaauaag

SEQ ID NO: 780907 - RNA, 19 nt, Homo sapiens
  misc_RNA (1)...(19): siRNA sense strand
gaaaugaacagcauagaua

SEQ ID NO: 780908 - RNA, 19 nt, Homo sapiens
  misc_RNA (1)...(19): siRNA sense strand
gaagauguuuguugaugua

SEQ ID NO: 780909 - RNA, 19 nt, Homo sapiens
  misc_RNA (1)...(19): siRNA sense strand
agacagaccucaaguacua

SEQ ID NO: 780910 - RNA, 19 nt, Homo sapiens
  misc_RNA (1)...(19): siRNA sense strand
caacagaacuagaauaacu

SEQ ID NO: 780911 - RNA, 19 nt, Homo sapiens
  misc_RNA (1)...(19): siRNA sense strand
cagcauaucugccaccaaa

SEQ ID NO: 780912 - RNA, 19 nt, Homo sapiens
  misc_RNA (1)...(19): siRNA sense strand
uagaauaacuccagaggaa

SEQ ID NO: 780913 - RNA, 19 nt, Homo sapiens
  misc_RNA (1)...(19): siRNA sense strand
aaacauacuucugggaaua

SEQ ID NO: 780914 - RNA, 19 nt, Homo sapiens
  misc_RNA (1)...(19): siRNA sense strand
guucaucccucucuacuga

SEQ ID NO: 780915 - RNA, 19 nt, Homo sapiens
  misc_RNA (1)...(19): siRNA sense strand
ggaaauguccauccaguug

SEQ ID NO: 780916 - RNA, 19 nt, Homo sapiens
  misc_RNA (1)...(19): siRNA sense strand
ugagauaccugagugauga

SEQ ID NO: 780917 - RNA, 19 nt, Homo sapiens
  misc_RNA (1)...(19): siRNA sense strand
ggaguggacaggagcauua

SEQ ID NO: 780918 - RNA, 19 nt, Homo sapiens
  misc_RNA (1)...(19): siRNA sense strand
caugugaccuugaggauga

SEQ ID NO: 780919 - RNA, 19 nt, Homo sapiens
  misc_RNA (1)...(19): siRNA sense strand
agaagauggugauaaagua

SEQ ID NO: 780920 - RNA, 19 nt, Homo sapiens
  misc_RNA (1)...(19): siRNA sense strand
gaggaaaugucucucaaag

SEQ ID NO: 780921 - RNA, 19 nt, Homo sapiens
  misc_RNA (1)...(19): siRNA sense strand
gacaguugauggaaauaaa

SEQ ID NO: 780922 - RNA, 19 nt, Homo sapiens
  misc_RNA (1)...(19): siRNA sense strand
caaacacccuggagacgaa

SEQ ID NO: 780923 - RNA, 19 nt, Homo sapiens
  misc_RNA (1)...(19): siRNA sense strand
gcugauaaauauacccaaa

SEQ ID NO: 780924 - RNA, 19 nt, Homo sapiens
  misc_RNA (1)...(19): siRNA sense strand
ccaaauggcccagguguaa

SEQ ID NO: 780925 - RNA, 19 nt, Homo sapiens
  misc_RNA (1)...(19): siRNA sense strand
agaggaagaugcuacaguu

SEQ ID NO: 780926 - RNA, 19 nt, Homo sapiens
  misc_RNA (1)...(19): siRNA sense strand
ugaaacgucuccugcauca

SEQ ID NO: 780927 - RNA, 19 nt, Homo sapiens
  misc_RNA (1)...(19): siRNA sense strand
ucaaagaagagaaacauga

SEQ ID NO: 780928 - RNA, 19 nt, Homo sapiens
  misc_RNA (1)...(19): siRNA sense strand
cagaagauguuuguugaug

SEQ ID NO: 780929 - RNA, 19 nt, Homo sapiens
  misc_RNA (1)...(19): siRNA sense strand
caaagaagagaaacaugaa

SEQ ID NO: 780930 - RNA, 19 nt, Homo sapiens
  misc_RNA (1)...(19): siRNA sense strand
agguguaacuucuacuuua

SEQ ID NO: 780931 - RNA, 19 nt, Homo sapiens
  misc_RNA (1)...(19): siRNA sense strand
uaauaaagccacaacguau

SEQ ID NO: 780932 - RNA, 19 nt, Homo sapiens
  misc_RNA (1)...(19): siRNA sense strand
gaaaagauccaacuauuag

SEQ ID NO: 780933 - RNA, 19 nt, Homo sapiens
  misc_RNA (1)...(19): siRNA sense strand
gaagauggugauaaaguau

SEQ ID NO: 780934 - RNA, 19 nt, Homo sapiens
  misc_RNA (1)...(19): siRNA sense strand
aaaugucucucaaagaaga

SEQ ID NO: 780935 - RNA, 19 nt, Homo sapiens
  misc_RNA (1)...(19): siRNA sense strand
gaccaagaacugauugaaa

SEQ ID NO: 780936 - RNA, 19 nt, Homo sapiens
  misc_RNA (1)...(19): siRNA sense strand
cuaauaaagccacaacgua

SEQ ID NO: 780937 - RNA, 19 nt, Homo sapiens
  misc_RNA (1)...(19): siRNA sense strand
gcucagaagauguuuguug

SEQ ID NO: 780938 - RNA, 19 nt, Homo sapiens
  misc_RNA (1)...(19): siRNA sense strand
gaauaacuccagaggaaau

SEQ ID NO: 780939 - RNA, 19 nt, Homo sapiens
  misc_RNA (1)...(19): siRNA sense strand
cacaggauauguuugauuc

SEQ ID NO: 780940 - RNA, 19 nt, Homo sapiens
  misc_RNA (1)...(19): siRNA sense strand
gaaacaugaugcuaaaaug

SEQ ID NO: 780941 - RNA, 19 nt, Homo sapiens
  misc_RNA (1)...(19): siRNA sense strand
ugauggaagugguucauug

SEQ ID NO: 780942 - RNA, 19 nt, Homo sapiens
  misc_RNA (1)...(19): siRNA sense strand
ucugauagcucugauggaa

SEQ ID NO: 780943 - RNA, 19 nt, Homo sapiens
  misc_RNA (1)...(19): siRNA sense strand
acugaugaauggauagaua

SEQ ID NO: 780944 - RNA, 19 nt, Homo sapiens
  misc_RNA (1)...(19): siRNA sense strand
gugaagacuuuagugauga

SEQ ID NO: 780945 - RNA, 19 nt, Homo sapiens
  misc_RNA (1)...(19): siRNA sense strand
auagaagacuccaacagaa

SEQ ID NO: 780946 - RNA, 19 nt, Homo sapiens
  misc_RNA (1)...(19): siRNA sense strand
ggauugcacugcuguaaaa

SEQ ID NO: 780947 - RNA, 19 nt, Homo sapiens
  misc_RNA (1)...(19): siRNA sense strand
gaacucucuccaucugaua

SEQ ID NO: 780948 - RNA, 19 nt, Homo sapiens
  misc_RNA (1)...(19): siRNA sense strand
ggaugaugaucuuaugcuu

SEQ ID NO: 780949 - RNA, 19 nt, Homo sapiens
  misc_RNA (1)...(19): siRNA sense strand
gguguaacuucuacuuuag

SEQ ID NO: 780950 - RNA, 19 nt, Homo sapiens
  misc_RNA (1)...(19): siRNA sense strand
gcagacagaccucaaguac

SEQ ID NO: 780951 - RNA, 19 nt, Homo sapiens
  misc_RNA (1)...(19): siRNA sense strand
ggaagaugcuacaguuuug

SEQ ID NO: 780952 - RNA, 19 nt, Homo sapiens
  misc_RNA (1)...(19): siRNA sense strand
uauagaagacuccaacaga

SEQ ID NO: 780953 - RNA, 19 nt, Homo sapiens
  misc_RNA (1)...(19): siRNA sense strand
ugacaggagugaauguaca

SEQ ID NO: 780954 - RNA, 19 nt, Homo sapiens
  misc_RNA (1)...(19): siRNA sense strand
gcacaugguucaggauugc

SEQ ID NO: 780955 - RNA, 19 nt, Homo sapiens
  misc_RNA (1)...(19): siRNA sense strand
augaugaucuuaugcuuga

SEQ ID NO: 780956 - RNA, 19 nt, Homo sapiens
  misc_RNA (1)...(19): siRNA sense strand
ggaugaagaaggcuuggaa

SEQ ID NO: 780957 - RNA, 19 nt, Homo sapiens
  misc_RNA (1)...(19): siRNA sense strand
ugauagcucugauggaaca

SEQ ID NO: 780958 - RNA, 19 nt, Homo sapiens
  misc_RNA (1)...(19): siRNA sense strand
uaugacaguugauggaaau

SEQ ID NO: 780959 - RNA, 19 nt, Homo sapiens
  misc_RNA (1)...(19): siRNA sense strand
cagccacccugaccacuau

SEQ ID NO: 780960 - RNA, 19 nt, Homo sapiens
  misc_RNA (1)...(19): siRNA sense strand
uaugaguccucugaaauga

SEQ ID NO: 780961 - RNA, 19 nt, Homo sapiens
  misc_RNA (1)...(19): siRNA sense strand
gaagacuccaacagaacua

SEQ ID NO: 780962 - RNA, 19 nt, Homo sapiens
  misc_RNA (1)...(19): siRNA sense strand
cucagaagauguuuguuga

SEQ ID NO: 780963 - RNA, 19 nt, Homo sapiens
  misc_RNA (1)...(19): siRNA sense strand
ugaggaugaugaucuuaug

SEQ ID NO: 780964 - RNA, 19 nt, Homo sapiens
  misc_RNA (1)...(19): siRNA sense strand
gcuaugaguccucugaaau

SEQ ID NO: 780965 - RNA, 19 nt, Homo sapiens
  misc_RNA (1)...(19): siRNA sense strand
gaauggauagauauaagug

SEQ ID NO: 780966 - RNA, 19 nt, Homo sapiens
  misc_RNA (1)...(19): siRNA sense strand
agugaagacuuuagugaug

SEQ ID NO: 780967 - RNA, 19 nt, Homo sapiens
  misc_RNA (1)...(19): siRNA sense strand
gaggaagaugcuacaguuu

SEQ ID NO: 780968 - RNA, 19 nt, Homo sapiens
  misc_RNA (1)...(19): siRNA sense strand
ggaccaagaacugauugaa

SEQ ID NO: 780969 - RNA, 19 nt, Homo sapiens
  misc_RNA (1)...(19): siRNA sense strand
cagagcugguucuucguuu

SEQ ID NO: 780970 - RNA, 19 nt, Homo sapiens
  misc_RNA (1)...(19): siRNA sense strand
ggagcuaugaguccucuga

SEQ ID NO: 780971 - RNA, 19 nt, Homo sapiens
  misc_RNA (1)...(19): siRNA sense strand
gagcugguucuucguuuga

SEQ ID NO: 780972 - RNA, 19 nt, Homo sapiens
  misc_RNA (1)...(19): siRNA sense strand
aaauucaccugcugacaca

SEQ ID NO: 780973 - RNA, 19 nt, Homo sapiens
  misc_RNA (1)...(19): siRNA sense strand
cagaagauggugauaaagu

SEQ ID NO: 780974 - RNA, 19 nt, Homo sapiens
  misc_RNA (1)...(19): siRNA sense strand
ggaugcaccucuugaaaau

SEQ ID NO: 780975 - RNA, 19 nt, Homo sapiens
  misc_RNA (1)...(19): siRNA sense strand
ccacaggauauguuugauu

SEQ ID NO: 780976 - RNA, 19 nt, Homo sapiens
  misc_RNA (1)...(19): siRNA sense strand
uccaacagaacuagaauaa

SEQ ID NO: 780977 - RNA, 19 nt, Homo sapiens
  misc_RNA (1)...(19): siRNA sense strand
gcuuggaacccauuggaaa

SEQ ID NO: 780978 - RNA, 19 nt, Homo sapiens
  misc_RNA (1)...(19): siRNA sense strand
ccacuaucaucaccaugga

SEQ ID NO: 780979 - RNA, 19 nt, Homo sapiens
  misc_RNA (1)...(19): siRNA sense strand
gaaucuccuuugggucauu

SEQ ID NO: 780980 - RNA, 19 nt, Homo sapiens
  misc_RNA (1)...(19): siRNA sense strand
gcaugauauucaacuguca

SEQ ID NO: 780981 - RNA, 19 nt, Homo sapiens
  misc_RNA (1)...(19): siRNA sense strand
agaagauguuuguugaugu

SEQ ID NO: 780982 - RNA, 19 nt, Homo sapiens
  misc_RNA (1)...(19): siRNA sense strand
uaauaaggaccaagaacug

SEQ ID NO: 780983 - RNA, 19 nt, Homo sapiens
  misc_RNA (1)...(19): siRNA sense strand
ugaacucucuccaucugau

SEQ ID NO: 780984 - RNA, 19 nt, Homo sapiens
  misc_RNA (1)...(19): siRNA sense strand
aaacaaccagaccaugaaa

SEQ ID NO: 780985 - RNA, 19 nt, Homo sapiens
  misc_RNA (1)...(19): siRNA sense strand
ugaaucaugugaccuugag

SEQ ID NO: 780986 - RNA, 19 nt, Homo sapiens
  misc_RNA (1)...(19): siRNA sense strand
gaacagcauagauauuuug

SEQ ID NO: 780987 - RNA, 19 nt, Homo sapiens
  misc_RNA (1)...(19): siRNA sense strand
caccacaggauauguuuga

SEQ ID NO: 780988 - RNA, 19 nt, Homo sapiens
  misc_RNA (1)...(19): siRNA sense strand
gaaaugucucucaaagaag

SEQ ID NO: 780989 - RNA, 19 nt, Homo sapiens
  misc_RNA (1)...(19): siRNA sense strand
acauuuccuugucgucuuu

SEQ ID NO: 780990 - RNA, 19 nt, Homo sapiens
  misc_RNA (1)...(19): siRNA sense strand
cuaugacaguugauggaaa

SEQ ID NO: 780991 - RNA, 19 nt, Homo sapiens
  misc_RNA (1)...(19): siRNA sense strand
ggcacaugguucaggauug

SEQ ID NO: 780992 - RNA, 19 nt, Homo sapiens
  misc_RNA (1)...(19): siRNA sense strand
gacaauaugaaccgcuuug

SEQ ID NO: 780993 - RNA, 19 nt, Homo sapiens
  misc_RNA (1)...(19): siRNA sense strand
aauguggagugugacaaua

SEQ ID NO: 780994 - RNA, 19 nt, Homo sapiens
  misc_RNA (1)...(19): siRNA sense strand
ccucugaaaugaacagcau

SEQ ID NO: 780995 - RNA, 19 nt, Homo sapiens
  misc_RNA (1)...(19): siRNA sense strand
ugagugaugauguggauga

SEQ ID NO: 780996 - RNA, 19 nt, Homo sapiens
  misc_RNA (1)...(19): siRNA sense strand
uaaggaccaagaacugauu

SEQ ID NO: 780997 - RNA, 19 nt, Homo sapiens
  misc_RNA (1)...(19): siRNA sense strand
ugaaaugaacagcauagau

SEQ ID NO: 780998 - RNA, 19 nt, Homo sapiens
  misc_RNA (1)...(19): siRNA sense strand
gaaguacucaaugggaaug

SEQ ID NO: 780999 - RNA, 19 nt, Homo sapiens
  misc_RNA (1)...(19): siRNA sense strand
ugacaguugauggaaauaa

SEQ ID NO: 781000 - RNA, 19 nt, Homo sapiens
  misc_RNA (1)...(19): siRNA sense strand
gaacuucagcuugcaacuc

SEQ ID NO: 781001 - RNA, 19 nt, Homo sapiens
  misc_RNA (1)...(19): siRNA sense strand
gauccaacuauuagaacuu

SEQ ID NO: 781002 - RNA, 19 nt, Homo sapiens
  misc_RNA (1)...(19): siRNA sense strand
gauguuuguugauguacca

SEQ ID NO: 781003 - RNA, 19 nt, Homo sapiens
  misc_RNA (1)...(19): siRNA sense strand
ucaucccucucuacugaaa

SEQ ID NO: 781004 - RNA, 19 nt, Homo sapiens
  misc_RNA (1)...(19): siRNA sense strand
gauauucaacugucauugc

SEQ ID NO: 781005 - RNA, 19 nt, Homo sapiens
  misc_RNA (1)...(19): siRNA sense strand
gaacacggaugcuuaaaga

SEQ ID NO: 781006 - RNA, 19 nt, Homo sapiens
  misc_RNA (1)...(19): siRNA sense strand
gagaguauauugacuauga

SEQ ID NO: 781007 - RNA, 19 nt, Homo sapiens
  misc_RNA (1)...(19): siRNA sense strand
caacauagcucaaguucau

SEQ ID NO: 781008 - RNA, 19 nt, Homo sapiens
  misc_RNA (1)...(19): siRNA sense strand
ucaaacagauugcuaauga

SEQ ID NO: 781009 - RNA, 19 nt, Homo sapiens
  misc_RNA (1)...(19): siRNA sense strand
gagaaacucuuccuacaga

SEQ ID NO: 781010 - RNA, 19 nt, Homo sapiens
  misc_RNA (1)...(19): siRNA sense strand
aaugaagacucaccaauua

SEQ ID NO: 781011 - RNA, 19 nt, Homo sapiens
  misc_RNA (1)...(19): siRNA sense strand
agagagagcuccagaacua

SEQ ID NO: 781012 - RNA, 19 nt, Homo sapiens
  misc_RNA (1)...(19): siRNA sense strand
gaugaauucugcaacauuu

SEQ ID NO: 781013 - RNA, 19 nt, Homo sapiens
  misc_RNA (1)...(19): siRNA sense strand
ggaagaaccuccaggaaca

SEQ ID NO: 781014 - RNA, 19 nt, Homo sapiens
  misc_RNA (1)...(19): siRNA sense strand
ggaagaggaucuaggagaa

SEQ ID NO: 781015 - RNA, 19 nt, Homo sapiens
  misc_RNA (1)...(19): siRNA sense strand
gaacacagaagcuuuauuc

SEQ ID NO: 781016 - RNA, 19 nt, Homo sapiens
  misc_RNA (1)...(19): siRNA sense strand
cguaguaucugaugacuuu

SEQ ID NO: 781017 - RNA, 19 nt, Homo sapiens
  misc_RNA (1)...(19): siRNA sense strand
gaaaagugguguucaagua

SEQ ID NO: 781018 - RNA, 19 nt, Homo sapiens
  misc_RNA (1)...(19): siRNA sense strand
uaacugaacuuucucgaau

SEQ ID NO: 781019 - RNA, 19 nt, Homo sapiens
  misc_RNA (1)...(19): siRNA sense strand
gcaaagcagucguggagaa

SEQ ID NO: 781020 - RNA, 19 nt, Homo sapiens
  misc_RNA (1)...(19): siRNA sense strand
cuaaugugcugguaugaua

SEQ ID NO: 781021 - RNA, 19 nt, Homo sapiens
  misc_RNA (1)...(19): siRNA sense strand
cauaguauaucucaccaua

SEQ ID NO: 781022 - RNA, 19 nt, Homo sapiens
  misc_RNA (1)...(19): siRNA sense strand
ggaagugaauggauguauu

SEQ ID NO: 781023 - RNA, 19 nt, Homo sapiens
  misc_RNA (1)...(19): siRNA sense strand
gaaauaccuugugaaacua

SEQ ID NO: 781024 - RNA, 19 nt, Homo sapiens
  misc_RNA (1)...(19): siRNA sense strand
caacaucaguacacucaaa

SEQ ID NO: 781025 - RNA, 19 nt, Homo sapiens
  misc_RNA (1)...(19): siRNA sense strand
ugaagaugaugaccuauuu

SEQ ID NO: 781026 - RNA, 19 nt, Homo sapiens
  misc_RNA (1)...(19): siRNA sense strand
gaaauaagccaaguaaauc

SEQ ID NO: 781027 - RNA, 19 nt, Homo sapiens
  misc_RNA (1)...(19): siRNA sense strand
cagaagagaugaauaugga

SEQ ID NO: 781028 - RNA, 19 nt, Homo sapiens
  misc_RNA (1)...(19): siRNA sense strand
caacuuaccucgauuugag

SEQ ID NO: 781029 - RNA, 19 nt, Homo sapiens
  misc_RNA (1)...(19): siRNA sense strand
ggauucaggugaugugauu

SEQ ID NO: 781030 - RNA, 19 nt, Homo sapiens
  misc_RNA (1)...(19): siRNA sense strand
gcgaaaugauaacuucuaa

SEQ ID NO: 781031 - RNA, 19 nt, Homo sapiens
  misc_RNA (1)...(19): siRNA sense strand
gaacauauuacaugacgaa

SEQ ID NO: 781032 - RNA, 19 nt, Homo sapiens
  misc_RNA (1)...(19): siRNA sense strand
uaagaaaguuggaagugaa

SEQ ID NO: 781033 - RNA, 19 nt, Homo sapiens
  misc_RNA (1)...(19): siRNA sense strand
gaagguaggauucguguga

SEQ ID NO: 781034 - RNA, 19 nt, Homo sapiens
  misc_RNA (1)...(19): siRNA sense strand
gaugaugaccuauuugaaa

SEQ ID NO: 781035 - RNA, 19 nt, Homo sapiens
  misc_RNA (1)...(19): siRNA sense strand
caagaaauaagccaaguaa

SEQ ID NO: 781036 - RNA, 19 nt, Homo sapiens
  misc_RNA (1)...(19): siRNA sense strand
gagguguuguuucgcauua

SEQ ID NO: 781037 - RNA, 19 nt, Homo sapiens
  misc_RNA (1)...(19): siRNA sense strand
caagaaaacuggcuguuaa

SEQ ID NO: 781038 - RNA, 19 nt, Homo sapiens
  misc_RNA (1)...(19): siRNA sense strand
agaaauaccuugugaaacu

SEQ ID NO: 781039 - RNA, 19 nt, Homo sapiens
  misc_RNA (1)...(19): siRNA sense strand
gguaugugcuccagaagaa

SEQ ID NO: 781040 - RNA, 19 nt, Homo sapiens
  misc_RNA (1)...(19): siRNA sense strand
gaacacuaccugagaagaa

SEQ ID NO: 781041 - RNA, 19 nt, Homo sapiens
  misc_RNA (1)...(19): siRNA sense strand
gaaguacagucaucucauc

SEQ ID NO: 781042 - RNA, 19 nt, Homo sapiens
  misc_RNA (1)...(19): siRNA sense strand
agaagccgauguacuauuu

SEQ ID NO: 781043 - RNA, 19 nt, Homo sapiens
  misc_RNA (1)...(19): siRNA sense strand
gaaguugacagccaucgua

SEQ ID NO: 781044 - RNA, 19 nt, Homo sapiens
  misc_RNA (1)...(19): siRNA sense strand
caacaccaaucucuucuuc

SEQ ID NO: 781045 - RNA, 19 nt, Homo sapiens
  misc_RNA (1)...(19): siRNA sense strand
acacuugucuuuaaugaga

SEQ ID NO: 781046 - RNA, 19 nt, Homo sapiens
  misc_RNA (1)...(19): siRNA sense strand
ggagguaccuggauauacu

SEQ ID NO: 781047 - RNA, 19 nt, Homo sapiens
  misc_RNA (1)...(19): siRNA sense strand
ugaaacaucugcaguugug

SEQ ID NO: 781048 - RNA, 19 nt, Homo sapiens
  misc_RNA (1)...(19): siRNA sense strand
cagaugaacuuaccguaga

SEQ ID NO: 781049 - RNA, 19 nt, Homo sapiens
  misc_RNA (1)...(19): siRNA sense strand
aaaguucccugccauagaa

SEQ ID NO: 781050 - RNA, 19 nt, Homo sapiens
  misc_RNA (1)...(19): siRNA sense strand
gagagaguauauugacuau

SEQ ID NO: 781051 - RNA, 19 nt, Homo sapiens
  misc_RNA (1)...(19): siRNA sense strand
gcccuuccaucauacuuua

SEQ ID NO: 781052 - RNA, 19 nt, Homo sapiens
  misc_RNA (1)...(19): siRNA sense strand
gcuaaugaguaccauaaug

SEQ ID NO: 781053 - RNA, 19 nt, Homo sapiens
  misc_RNA (1)...(19): siRNA sense strand
agaauuuccuggaggguua

SEQ ID NO: 781054 - RNA, 19 nt, Homo sapiens
  misc_RNA (1)...(19): siRNA sense strand
uagagaagccgauguacua

SEQ ID NO: 781055 - RNA, 19 nt, Homo sapiens
  misc_RNA (1)...(19): siRNA sense strand
gcaagcaaagaaagaauaa

SEQ ID NO: 781056 - RNA, 19 nt, Homo sapiens
  misc_RNA (1)...(19): siRNA sense strand
aagaggauguguucuauga

SEQ ID NO: 781057 - RNA, 19 nt, Homo sapiens
  misc_RNA (1)...(19): siRNA sense strand
gaugauuuguuuccucuga

SEQ ID NO: 781058 - RNA, 19 nt, Homo sapiens
  misc_RNA (1)...(19): siRNA sense strand
caucagugcucccauccua

SEQ ID NO: 781059 - RNA, 19 nt, Homo sapiens
  misc_RNA (1)...(19): siRNA sense strand
gagcugguauuauccuuau

SEQ ID NO: 781060 - RNA, 19 nt, Homo sapiens
  misc_RNA (1)...(19): siRNA sense strand
gcaaaguugguaacaagua

SEQ ID NO: 781061 - RNA, 19 nt, Homo sapiens
  misc_RNA (1)...(19): siRNA sense strand
guaccuggauauacuaaga

SEQ ID NO: 781062 - RNA, 19 nt, Homo sapiens
  misc_RNA (1)...(19): siRNA sense strand
ccuggaggguuaacaauaa

SEQ ID NO: 781063 - RNA, 19 nt, Homo sapiens
  misc_RNA (1)...(19): siRNA sense strand
gcaaggaguuaccaucuac

SEQ ID NO: 781064 - RNA, 19 nt, Homo sapiens
  misc_RNA (1)...(19): siRNA sense strand
gaauauuacccaccugauu

SEQ ID NO: 781065 - RNA, 19 nt, Homo sapiens
  misc_RNA (1)...(19): siRNA sense strand
cauauuacaugacgaagau

SEQ ID NO: 781066 - RNA, 19 nt, Homo sapiens
  misc_RNA (1)...(19): siRNA sense strand
cuucuacacuugucuuuaa

SEQ ID NO: 781067 - RNA, 19 nt, Homo sapiens
  misc_RNA (1)...(19): siRNA sense strand
gaagagaugaauauggauu

SEQ ID NO: 781068 - RNA, 19 nt, Homo sapiens
  misc_RNA (1)...(19): siRNA sense strand
ggguuuaaaucucaaauuc

SEQ ID NO: 781069 - RNA, 19 nt, Homo sapiens
  misc_RNA (1)...(19): siRNA sense strand
ugagaaguauggucuuuau

SEQ ID NO: 781070 - RNA, 19 nt, Homo sapiens
  misc_RNA (1)...(19): siRNA sense strand
gaauugaccagaaagcauu

SEQ ID NO: 781071 - RNA, 19 nt, Homo sapiens
  misc_RNA (1)...(19): siRNA sense strand
gaacgauguuguacaaggu

SEQ ID NO: 781072 - RNA, 19 nt, Homo sapiens
  misc_RNA (1)...(19): siRNA sense strand
gaaaugauaacuucuaagg

SEQ ID NO: 781073 - RNA, 19 nt, Homo sapiens
  misc_RNA (1)...(19): siRNA sense strand
gggagaaacucuuccuaca

SEQ ID NO: 781074 - RNA, 19 nt, Homo sapiens
  misc_RNA (1)...(19): siRNA sense strand
guacagucaucucaucaug

SEQ ID NO: 781075 - RNA, 19 nt, Homo sapiens
  misc_RNA (1)...(19): siRNA sense strand
gaugaugaauucugcaaca

SEQ ID NO: 781076 - RNA, 19 nt, Homo sapiens
  misc_RNA (1)...(19): siRNA sense strand
gacugaagaugaugaccua

SEQ ID NO: 781077 - RNA, 19 nt, Homo sapiens
  misc_RNA (1)...(19): siRNA sense strand
aaaugaaggcgaaaugaua

SEQ ID NO: 781078 - RNA, 19 nt, Homo sapiens
  misc_RNA (1)...(19): siRNA sense strand
gagaagaaguucgauuugg

SEQ ID NO: 781079 - RNA, 19 nt, Homo sapiens
  misc_RNA (1)...(19): siRNA sense strand
gaagaaaagugguguucaa

SEQ ID NO: 781080 - RNA, 19 nt, Homo sapiens
  misc_RNA (1)...(19): siRNA sense strand
caaugaagacucaccaauu

SEQ ID NO: 781081 - RNA, 19 nt, Homo sapiens
  misc_RNA (1)...(19): siRNA sense strand
gcaccuuuccugucugaua

SEQ ID NO: 781082 - RNA, 19 nt, Homo sapiens
  misc_RNA (1)...(19): siRNA sense strand
ugaagacucaccaauuaua

SEQ ID NO: 781083 - RNA, 19 nt, Homo sapiens
  misc_RNA (1)...(19): siRNA sense strand
ccaaguaaaucaacaucau

SEQ ID NO: 781084 - RNA, 19 nt, Homo sapiens
  misc_RNA (1)...(19): siRNA sense strand
ccaagaggauguguucuau

SEQ ID NO: 781085 - RNA, 19 nt, Homo sapiens
  misc_RNA (1)...(19): siRNA sense strand
gcaaauguggguuuaaauc

SEQ ID NO: 781086 - RNA, 19 nt, Homo sapiens
  misc_RNA (1)...(19): siRNA sense strand
gugaguggauaccuuguuu

SEQ ID NO: 781087 - RNA, 19 nt, Homo sapiens
  misc_RNA (1)...(19): siRNA sense strand
acucacaggucguaaauau

SEQ ID NO: 781088 - RNA, 19 nt, Homo sapiens
  misc_RNA (1)...(19): siRNA sense strand
uaaagugguucaucuugga

SEQ ID NO: 781089 - RNA, 19 nt, Homo sapiens
  misc_RNA (1)...(19): siRNA sense strand
guucaaguauuccagcaaa

SEQ ID NO: 781090 - RNA, 19 nt, Homo sapiens
  misc_RNA (1)...(19): siRNA sense strand
ugagaaauaccuugugaaa

SEQ ID NO: 781091 - RNA, 19 nt, Homo sapiens
  misc_RNA (1)...(19): siRNA sense strand
cagccuaacucuggaauug

SEQ ID NO: 781092 - RNA, 19 nt, Homo sapiens
  misc_RNA (1)...(19): siRNA sense strand
uaaaguacaacccaggaua

SEQ ID NO: 781093 - RNA, 19 nt, Homo sapiens
  misc_RNA (1)...(19): siRNA sense strand
gaagcuuuauucaggaaga

SEQ ID NO: 781094 - RNA, 19 nt, Homo sapiens
  misc_RNA (1)...(19): siRNA sense strand
gaccagaaagcauuauauu

SEQ ID NO: 781095 - RNA, 19 nt, Homo sapiens
  misc_RNA (1)...(19): siRNA sense strand
caacauagugagugccuaa

SEQ ID NO: 781096 - RNA, 19 nt, Homo sapiens
  misc_RNA (1)...(19): siRNA sense strand
gggaagcugugguguuaau

SEQ ID NO: 781097 - RNA, 19 nt, Homo sapiens
  misc_RNA (1)...(19): siRNA sense strand
uaacaaguaccucaaugaa

SEQ ID NO: 781098 - RNA, 19 nt, Homo sapiens
  misc_RNA (1)...(19): siRNA sense strand
aaacaugacccucacagaa

SEQ ID NO: 781099 - RNA, 19 nt, Homo sapiens
  misc_RNA (1)...(19): siRNA sense strand
cuaagaaaguuggaaguga

SEQ ID NO: 781100 - RNA, 19 nt, Homo sapiens
  misc_RNA (1)...(19): siRNA sense strand
gaaccagcauaaauauucu

SEQ ID NO: 781101 - RNA, 19 nt, Homo sapiens
  misc_RNA (1)...(19): siRNA sense strand
gccaggaacuacaaggaaa

SEQ ID NO: 781102 - RNA, 19 nt, Homo sapiens
  misc_RNA (1)...(19): siRNA sense strand
auaagaugcucaccuggua

SEQ ID NO: 781103 - RNA, 19 nt, Homo sapiens
  misc_RNA (1)...(19): siRNA sense strand
cgaauuuguucccuuguug

SEQ ID NO: 781104 - RNA, 19 nt, Homo sapiens
  misc_RNA (1)...(19): siRNA sense strand
caaacagauugcuaaugaa

SEQ ID NO: 781105 - RNA, 19 nt, Homo sapiens
  misc_RNA (1)...(19): siRNA sense strand
ggaagaaacgcaagcagaa

SEQ ID NO: 781106 - RNA, 19 nt, Homo sapiens
  misc_RNA (1)...(19): siRNA sense strand
gccagaagcugcccaugga

SEQ ID NO: 781107 - RNA, 19 nt, Homo sapiens
  misc_RNA (1)...(19): siRNA sense strand
gggcugacaugaugaccaa

SEQ ID NO: 781108 - RNA, 19 nt, Homo sapiens
  misc_RNA (1)...(19): siRNA sense strand
ggacagggcagguggagau

SEQ ID NO: 781109 - RNA, 19 nt, Homo sapiens
  misc_RNA (1)...(19): siRNA sense strand
gaaggucauugagaaguuc

SEQ ID NO: 781110 - RNA, 19 nt, Homo sapiens
  misc_RNA (1)...(19): siRNA sense strand
ugggugcucuggccuauaa

SEQ ID NO: 781111 - RNA, 19 nt, Homo sapiens
  misc_RNA (1)...(19): siRNA sense strand
ugaaggucauugagaaguu

SEQ ID NO: 781112 - RNA, 19 nt, Homo sapiens
  misc_RNA (1)...(19): siRNA sense strand
acaccaaugugagggauaa

SEQ ID NO: 781113 - RNA, 19 nt, Homo sapiens
  misc_RNA (1)...(19): siRNA sense strand
ggcgggagaucaucgaugu

SEQ ID NO: 781114 - RNA, 19 nt, Homo sapiens
  misc_RNA (1)...(19): siRNA sense strand
ucacuggcccuguggauga

SEQ ID NO: 781115 - RNA, 19 nt, Homo sapiens
  misc_RNA (1)...(19): siRNA sense strand
ggaggaggagaaugagaaa

SEQ ID NO: 781116 - RNA, 19 nt, Homo sapiens
  misc_RNA (1)...(19): siRNA sense strand
ucaucgagcugcggaagaa

SEQ ID NO: 781117 - RNA, 19 nt, Homo sapiens
  misc_RNA (1)...(19): siRNA sense strand
ggagcagacaccaauguga

SEQ ID NO: 781118 - RNA, 19 nt, Homo sapiens
  misc_RNA (1)...(19): siRNA sense strand
acauggaaauccuggagaa

SEQ ID NO: 781119 - RNA, 19 nt, Homo sapiens
  misc_RNA (1)...(19): siRNA sense strand
cacaggaggaggagaauga

SEQ ID NO: 781120 - RNA, 19 nt, Homo sapiens
  misc_RNA (1)...(19): siRNA sense strand
gaaaucaaugccagagaca

SEQ ID NO: 781121 - RNA, 19 nt, Homo sapiens
  misc_RNA (1)...(19): siRNA sense strand
cagggcagguggagauugu

SEQ ID NO: 781122 - RNA, 19 nt, Homo sapiens
  misc_RNA (1)...(19): siRNA sense strand
gaagaaacgcaagcagaag

SEQ ID NO: 781123 - RNA, 19 nt, Homo sapiens
  misc_RNA (1)...(19): siRNA sense strand
gggauacugcccugcauga

SEQ ID NO: 781124 - RNA, 19 nt, Homo sapiens
  misc_RNA (1)...(19): siRNA sense strand
ggaggagaaugagaaacuc

SEQ ID NO: 781125 - RNA, 19 nt, Homo sapiens
  misc_RNA (1)...(19): siRNA sense strand
ggagauuguggagcacuuu

SEQ ID NO: 781126 - RNA, 19 nt, Homo sapiens
  misc_RNA (1)...(19): siRNA sense strand
gauuguggagcacuuucua

SEQ ID NO: 781127 - RNA, 19 nt, Homo sapiens
  misc_RNA (1)...(19): siRNA sense strand
gaagcugcccauggacuug

SEQ ID NO: 781128 - RNA, 19 nt, Homo sapiens
  misc_RNA (1)...(19): siRNA sense strand
guggugaaacuucugcaaa

SEQ ID NO: 781129 - RNA, 19 nt, Homo sapiens
  misc_RNA (1)...(19): siRNA sense strand
gaaggugaagggccaagag

SEQ ID NO: 781130 - RNA, 19 nt, Homo sapiens
  misc_RNA (1)...(19): siRNA sense strand
gaggcucaaccgcuacaaa

SEQ ID NO: 781131 - RNA, 19 nt, Homo sapiens
  misc_RNA (1)...(19): siRNA sense strand
ggugggugcucuggccuau

SEQ ID NO: 781132 - RNA, 19 nt, Homo sapiens
  misc_RNA (1)...(19): siRNA sense strand
ccauggagcagacaccaau

SEQ ID NO: 781133 - RNA, 19 nt, Homo sapiens
  misc_RNA (1)...(19): siRNA sense strand
uggugaaacuucugcaaag

SEQ ID NO: 781134 - RNA, 19 nt, Homo sapiens
  misc_RNA (1)...(19): siRNA sense strand
aagaaacgcaagcagaaga

SEQ ID NO: 781135 - RNA, 19 nt, Homo sapiens
  misc_RNA (1)...(19): siRNA sense strand
cgacacgugcgaccaguuc

SEQ ID NO: 781136 - RNA, 19 nt, Homo sapiens
  misc_RNA (1)...(19): siRNA sense strand
gcugacaugaugaccaaga

SEQ ID NO: 781137 - RNA, 19 nt, Homo sapiens
  misc_RNA (1)...(19): siRNA sense strand
ccuggaaggccacauggaa

SEQ ID NO: 781138 - RNA, 19 nt, Homo sapiens
  misc_RNA (1)...(19): siRNA sense strand
ggaaggccacauggaaauc

SEQ ID NO: 781139 - RNA, 19 nt, Homo sapiens
  misc_RNA (1)...(19): siRNA sense strand
cugacaugaugaccaagaa

SEQ ID NO: 781140 - RNA, 19 nt, Homo sapiens
  misc_RNA (1)...(19): siRNA sense strand
acuuagagguggugaaacu

SEQ ID NO: 781141 - RNA, 19 nt, Homo sapiens
  misc_RNA (1)...(19): siRNA sense strand
agaaacgcaagcagaagaa

SEQ ID NO: 781142 - RNA, 19 nt, Homo sapiens
  misc_RNA (1)...(19): siRNA sense strand
cugcagaggcgguuaugga

SEQ ID NO: 781143 - RNA, 19 nt, Homo sapiens
  misc_RNA (1)...(19): siRNA sense strand
ggugaaacuucugcaaagc

SEQ ID NO: 781144 - RNA, 19 nt, Homo sapiens
  misc_RNA (1)...(19): siRNA sense strand
ggaaauccuggagaagcuu

SEQ ID NO: 781145 - RNA, 19 nt, Homo sapiens
  misc_RNA (1)...(19): siRNA sense strand
gcacaggaggaggagaaug

SEQ ID NO: 781146 - RNA, 19 nt, Homo sapiens
  misc_RNA (1)...(19): siRNA sense strand
gaucacuggcccuguggau

SEQ ID NO: 781147 - RNA, 19 nt, Homo sapiens
  misc_RNA (1)...(19): siRNA sense strand
uagagguggugaaacuucu

SEQ ID NO: 781148 - RNA, 19 nt, Homo sapiens
  misc_RNA (1)...(19): siRNA sense strand
ggaggggccuaaugauagu

SEQ ID NO: 781149 - RNA, 19 nt, Homo sapiens
  misc_RNA (1)...(19): siRNA sense strand
gaggagacgcacgccagaa

SEQ ID NO: 781150 - RNA, 19 nt, Homo sapiens
  misc_RNA (1)...(19): siRNA sense strand
gaugcgggcuuuccauuua

SEQ ID NO: 781151 - RNA, 19 nt, Homo sapiens
  misc_RNA (1)...(19): siRNA sense strand
gaaagucagggccagauua

SEQ ID NO: 781152 - RNA, 19 nt, Homo sapiens
  misc_RNA (1)...(19): siRNA sense strand
guacaucaaugaagugugu

SEQ ID NO: 781153 - RNA, 19 nt, Homo sapiens
  misc_RNA (1)...(19): siRNA sense strand
caaccgagcacacccaaua

SEQ ID NO: 781154 - RNA, 19 nt, Homo sapiens
  misc_RNA (1)...(19): siRNA sense strand
gaaguuuccuuugauauca

SEQ ID NO: 781155 - RNA, 19 nt, Homo sapiens
  misc_RNA (1)...(19): siRNA sense strand
uaucagaaauggaaacaga

SEQ ID NO: 781156 - RNA, 19 nt, Homo sapiens
  misc_RNA (1)...(19): siRNA sense strand
ggauaucaauagccauuug

SEQ ID NO: 781157 - RNA, 19 nt, Homo sapiens
  misc_RNA (1)...(19): siRNA sense strand
ggaggagccugauauuugg

SEQ ID NO: 781158 - RNA, 19 nt, Homo sapiens
  misc_RNA (1)...(19): siRNA sense strand
cagaugcucuucucauuca

SEQ ID NO: 781159 - RNA, 19 nt, Homo sapiens
  misc_RNA (1)...(19): siRNA sense strand
ggaaaccccugccccauaa

SEQ ID NO: 781160 - RNA, 19 nt, Homo sapiens
  misc_RNA (1)...(19): siRNA sense strand
ccugauauuugguuugauu

SEQ ID NO: 781161 - RNA, 19 nt, Homo sapiens
  misc_RNA (1)...(19): siRNA sense strand
ucauucaugucccucuuua

SEQ ID NO: 781162 - RNA, 19 nt, Homo sapiens
  misc_RNA (1)...(19): siRNA sense strand
gcagcaggccggauuaaau

SEQ ID NO: 781163 - RNA, 19 nt, Homo sapiens
  misc_RNA (1)...(19): siRNA sense strand
ggaaguggaugugcuaagg

SEQ ID NO: 781164 - RNA, 19 nt, Homo sapiens
  misc_RNA (1)...(19): siRNA sense strand
gaagagaugacagugagaa

SEQ ID NO: 781165 - RNA, 19 nt, Homo sapiens
  misc_RNA (1)...(19): siRNA sense strand
cagcaggccggauuaaauu

SEQ ID NO: 781166 - RNA, 19 nt, Homo sapiens
  misc_RNA (1)...(19): siRNA sense strand
gaggaggagccugauauuu

SEQ ID NO: 781167 - RNA, 19 nt, Homo sapiens
  misc_RNA (1)...(19): siRNA sense strand
guuagucggugcccagaug

SEQ ID NO: 781168 - RNA, 19 nt, Homo sapiens
  misc_RNA (1)...(19): siRNA sense strand
cuugaaguuuccuuugaua

SEQ ID NO: 781169 - RNA, 19 nt, Homo sapiens
  misc_RNA (1)...(19): siRNA sense strand
ggaugcgggcuuuccauuu

SEQ ID NO: 781170 - RNA, 19 nt, Homo sapiens
  misc_RNA (1)...(19): siRNA sense strand
aggaggagccugauauuug

SEQ ID NO: 781171 - RNA, 19 nt, Homo sapiens
  misc_RNA (1)...(19): siRNA sense strand
cccagaugcucuucucauu

SEQ ID NO: 781172 - RNA, 19 nt, Homo sapiens
  misc_RNA (1)...(19): siRNA sense strand
gcugauggguuugucugaa

SEQ ID NO: 781173 - RNA, 19 nt, Homo sapiens
  misc_RNA (1)...(19): siRNA sense strand
ccaagugucuuuucauuca

SEQ ID NO: 781174 - RNA, 19 nt, Homo sapiens
  misc_RNA (1)...(19): siRNA sense strand
cggcaggacugaugauugg

SEQ ID NO: 781175 - RNA, 19 nt, Homo sapiens
  misc_RNA (1)...(19): siRNA sense strand
aaagucagggccagauuaa

SEQ ID NO: 781176 - RNA, 19 nt, Homo sapiens
  misc_RNA (1)...(19): siRNA sense strand
ggagccugauauuugguuu

SEQ ID NO: 781177 - RNA, 19 nt, Homo sapiens
  misc_RNA (1)...(19): siRNA sense strand
caaacugaccauaggaaga

SEQ ID NO: 781178 - RNA, 19 nt, Homo sapiens
  misc_RNA (1)...(19): siRNA sense strand
gugcuaagguucagguuuu

SEQ ID NO: 781179 - RNA, 19 nt, Homo sapiens
  misc_RNA (1)...(19): siRNA sense strand
gcaggccggauuaaauuug

SEQ ID NO: 781180 - RNA, 19 nt, Homo sapiens
  misc_RNA (1)...(19): siRNA sense strand
gaugaggaggagccugaua

SEQ ID NO: 781181 - RNA, 19 nt, Homo sapiens
  misc_RNA (1)...(19): siRNA sense strand
uaaaugcgaguauugaaag

SEQ ID NO: 781182 - RNA, 19 nt, Homo sapiens
  misc_RNA (1)...(19): siRNA sense strand
gagggaaguggaugugcua

SEQ ID NO: 781183 - RNA, 19 nt, Homo sapiens
  misc_RNA (1)...(19): siRNA sense strand
cugauggguuugucugaaa

SEQ ID NO: 781184 - RNA, 19 nt, Homo sapiens
  misc_RNA (1)...(19): siRNA sense strand
ggccggauuaaauuuguua

SEQ ID NO: 781185 - RNA, 19 nt, Homo sapiens
  misc_RNA (1)...(19): siRNA sense strand
caggauaucaauagccauu

SEQ ID NO: 781186 - RNA, 19 nt, Homo sapiens
  misc_RNA (1)...(19): siRNA sense strand
ccauuuagccaggauauca

SEQ ID NO: 781187 - RNA, 19 nt, Homo sapiens
  misc_RNA (1)...(19): siRNA sense strand
gaaauggaaacagagagau

SEQ ID NO: 781188 - RNA, 19 nt, Homo sapiens
  misc_RNA (1)...(19): siRNA sense strand
agucagggccagauuaaga

SEQ ID NO: 781189 - RNA, 19 nt, Homo sapiens
  misc_RNA (1)...(19): siRNA sense strand
ugaaguuuccuuugauauc

SEQ ID NO: 781190 - RNA, 19 nt, Homo sapiens
  misc_RNA (1)...(19): siRNA sense strand
agggccagauuaagaugua

SEQ ID NO: 781191 - RNA, 19 nt, Homo sapiens
  misc_RNA (1)...(19): siRNA sense strand
aaauggaaacagagagauu

SEQ ID NO: 781192 - RNA, 19 nt, Homo sapiens
  misc_RNA (1)...(19): siRNA sense strand
agaaauggaaacagagaga

SEQ ID NO: 781193 - RNA, 19 nt, Homo sapiens
  misc_RNA (1)...(19): siRNA sense strand
ucagaaauggaaacagaga

SEQ ID NO: 781194 - RNA, 19 nt, Homo sapiens
  misc_RNA (1)...(19): siRNA sense strand
aaguggaugugcuaagguu

SEQ ID NO: 781195 - RNA, 19 nt, Homo sapiens
  misc_RNA (1)...(19): siRNA sense strand
ugaggaggagccugauauu

SEQ ID NO: 781196 - RNA, 19 nt, Homo sapiens
  misc_RNA (1)...(19): siRNA sense strand
ccagaugcucuucucauuc

SEQ ID NO: 781197 - RNA, 19 nt, Homo sapiens
  misc_RNA (1)...(19): siRNA sense strand
gauggcggcaggacugaug

SEQ ID NO: 781198 - RNA, 19 nt, Homo sapiens
  misc_RNA (1)...(19): siRNA sense strand
gcggcaggacugaugauug

SEQ ID NO: 781199 - RNA, 19 nt, Homo sapiens
  misc_RNA (1)...(19): siRNA sense strand
guuaauaagcaugacaguu

SEQ ID NO: 781200 - RNA, 19 nt, Homo sapiens
  misc_RNA (1)...(19): siRNA sense strand
caggccggauuaaauuugu

SEQ ID NO: 781201 - RNA, 19 nt, Homo sapiens
  misc_RNA (1)...(19): siRNA sense strand
ggaagagaugacagugaga

SEQ ID NO: 781202 - RNA, 19 nt, Homo sapiens
  misc_RNA (1)...(19): siRNA sense strand
ggagugcucaaaauuguaa

SEQ ID NO: 781203 - RNA, 19 nt, Homo sapiens
  misc_RNA (1)...(19): siRNA sense strand
gagaugacagugagaagcu

SEQ ID NO: 781204 - RNA, 19 nt, Homo sapiens
  misc_RNA (1)...(19): siRNA sense strand
gaaguggaugugcuaaggu

SEQ ID NO: 781205 - RNA, 19 nt, Homo sapiens
  misc_RNA (1)...(19): siRNA sense strand
ggugccugcuacugcguuu

SEQ ID NO: 781206 - RNA, 19 nt, Homo sapiens
  misc_RNA (1)...(19): siRNA sense strand
agccugauauuugguuuga

SEQ ID NO: 781207 - RNA, 19 nt, Homo sapiens
  misc_RNA (1)...(19): siRNA sense strand
ugaaagucagggccagauu

SEQ ID NO: 781208 - RNA, 19 nt, Homo sapiens
  misc_RNA (1)...(19): siRNA sense strand
ggaagaggagugggacgau

SEQ ID NO: 781209 - RNA, 19 nt, Homo sapiens
  misc_RNA (1)...(19): siRNA sense strand
aaacugaccauaggaagag

SEQ ID NO: 781210 - RNA, 19 nt, Homo sapiens
  misc_RNA (1)...(19): siRNA sense strand
gagcacacccaauaaaaca

SEQ ID NO: 781211 - RNA, 19 nt, Homo sapiens
  misc_RNA (1)...(19): siRNA sense strand
uaggaagagaugacaguga

SEQ ID NO: 781212 - RNA, 19 nt, Homo sapiens
  misc_RNA (1)...(19): siRNA sense strand
gagacugugucacguugcu

SEQ ID NO: 781213 - RNA, 19 nt, Homo sapiens
  misc_RNA (1)...(19): siRNA sense strand
gccucucaauggcuagaaa

SEQ ID NO: 781214 - RNA, 19 nt, Homo sapiens
  misc_RNA (1)...(19): siRNA sense strand
ccauuuggccagccucuca

SEQ ID NO: 781215 - RNA, 19 nt, Homo sapiens
  misc_RNA (1)...(19): siRNA sense strand
aaauggcaguuguguucug

SEQ ID NO: 781216 - RNA, 19 nt, Homo sapiens
  misc_RNA (1)...(19): siRNA sense strand
aagaggagugggacgauga

SEQ ID NO: 781217 - RNA, 19 nt, Homo sapiens
  misc_RNA (1)...(19): siRNA sense strand
ucaugucccucuuuaucag

SEQ ID NO: 781218 - RNA, 19 nt, Homo sapiens
  misc_RNA (1)...(19): siRNA sense strand
cauaggaagagaugacagu

SEQ ID NO: 781219 - RNA, 19 nt, Homo sapiens
  misc_RNA (1)...(19): siRNA sense strand
gauaucaauagccauuugg

SEQ ID NO: 781220 - RNA, 19 nt, Homo sapiens
  misc_RNA (1)...(19): siRNA sense strand
uuuacaaacugaccauagg

SEQ ID NO: 781221 - RNA, 19 nt, Homo sapiens
  misc_RNA (1)...(19): siRNA sense strand
caacagagaucuaucaaug

SEQ ID NO: 781222 - RNA, 19 nt, Homo sapiens
  misc_RNA (1)...(19): siRNA sense strand
gaagagaaacugaagaaua

SEQ ID NO: 781223 - RNA, 19 nt, Homo sapiens
  misc_RNA (1)...(19): siRNA sense strand
gcuauuggcuuuuguuuua

SEQ ID NO: 781224 - RNA, 19 nt, Homo sapiens
  misc_RNA (1)...(19): siRNA sense strand
cgaaugaaauccauguuug

SEQ ID NO: 781225 - RNA, 19 nt, Homo sapiens
  misc_RNA (1)...(19): siRNA sense strand
ugaaauccauguuugcuau

SEQ ID NO: 781226 - RNA, 19 nt, Homo sapiens
  misc_RNA (1)...(19): siRNA sense strand
gacagaacauucagaagau

SEQ ID NO: 781227 - RNA, 19 nt, Homo sapiens
  misc_RNA (1)...(19): siRNA sense strand
cgacagaacauucagaaga

SEQ ID NO: 781228 - RNA, 19 nt, Homo sapiens
  misc_RNA (1)...(19): siRNA sense strand
gcaggcagguggauuucuu

SEQ ID NO: 781229 - RNA, 19 nt, Homo sapiens
  misc_RNA (1)...(19): siRNA sense strand
gaagaaggaaacaauaaca

SEQ ID NO: 781230 - RNA, 19 nt, Homo sapiens
  misc_RNA (1)...(19): siRNA sense strand
caaggacugucucaucgaa

SEQ ID NO: 781231 - RNA, 19 nt, Homo sapiens
  misc_RNA (1)...(19): siRNA sense strand
gaaaauagagagacaagaa

SEQ ID NO: 781232 - RNA, 19 nt, Homo sapiens
  misc_RNA (1)...(19): siRNA sense strand
gaauaacaacagagaucua

SEQ ID NO: 781233 - RNA, 19 nt, Homo sapiens
  misc_RNA (1)...(19): siRNA sense strand
ggacagacaaguacaagag

SEQ ID NO: 781234 - RNA, 19 nt, Homo sapiens
  misc_RNA (1)...(19): siRNA sense strand
uaacaacagagaucuauca

SEQ ID NO: 781235 - RNA, 19 nt, Homo sapiens
  misc_RNA (1)...(19): siRNA sense strand
cauguuugcuauuggcuuu

SEQ ID NO: 781236 - RNA, 19 nt, Homo sapiens
  misc_RNA (1)...(19): siRNA sense strand
caagcaggcagguggauuu

SEQ ID NO: 781237 - RNA, 19 nt, Homo sapiens
  misc_RNA (1)...(19): siRNA sense strand
agagucagcuggucgacaa

SEQ ID NO: 781238 - RNA, 19 nt, Homo sapiens
  misc_RNA (1)...(19): siRNA sense strand
acagagaucuaucaauggu

SEQ ID NO: 781239 - RNA, 19 nt, Homo sapiens
  misc_RNA (1)...(19): siRNA sense strand
gacaagaagagaaacugaa

SEQ ID NO: 781240 - RNA, 19 nt, Homo sapiens
  misc_RNA (1)...(19): siRNA sense strand
cuaaugggaauguucaauu

SEQ ID NO: 781241 - RNA, 19 nt, Homo sapiens
  misc_RNA (1)...(19): siRNA sense strand
gaaauccauguuugcuauu

SEQ ID NO: 781242 - RNA, 19 nt, Homo sapiens
  misc_RNA (1)...(19): siRNA sense strand
ugaagaauaacaacagaga

SEQ ID NO: 781243 - RNA, 19 nt, Homo sapiens
  misc_RNA (1)...(19): siRNA sense strand
gacacucuccucaucguuu

SEQ ID NO: 781244 - RNA, 19 nt, Homo sapiens
  misc_RNA (1)...(19): siRNA sense strand
uaucaaugguucgaaugaa

SEQ ID NO: 781245 - RNA, 19 nt, Homo sapiens
  misc_RNA (1)...(19): siRNA sense strand
agagagacaagaagagaaa

SEQ ID NO: 781246 - RNA, 19 nt, Homo sapiens
  misc_RNA (1)...(19): siRNA sense strand
gagaaacugaagaauaaca

SEQ ID NO: 781247 - RNA, 19 nt, Homo sapiens
  misc_RNA (1)...(19): siRNA sense strand
aagaagagaaacugaagaa

SEQ ID NO: 781248 - RNA, 19 nt, Homo sapiens
  misc_RNA (1)...(19): siRNA sense strand
ggaaacaauaacagaguca

SEQ ID NO: 781249 - RNA, 19 nt, Homo sapiens
  misc_RNA (1)...(19): siRNA sense strand
gaagaauaacaacagagau

SEQ ID NO: 781250 - RNA, 19 nt, Homo sapiens
  misc_RNA (1)...(19): siRNA sense strand
guagagugguggcaaagcu

SEQ ID NO: 781251 - RNA, 19 nt, Homo sapiens
  misc_RNA (1)...(19): siRNA sense strand
acagaacauucagaagauu

SEQ ID NO: 781252 - RNA, 19 nt, Homo sapiens
  misc_RNA (1)...(19): siRNA sense strand
agaaggaaacaauaacaga

SEQ ID NO: 781253 - RNA, 19 nt, Homo sapiens
  misc_RNA (1)...(19): siRNA sense strand
aaauagagagacaagaaga

SEQ ID NO: 781254 - RNA, 19 nt, Homo sapiens
  misc_RNA (1)...(19): siRNA sense strand
ucgaaugaaauccauguuu

SEQ ID NO: 781255 - RNA, 19 nt, Homo sapiens
  misc_RNA (1)...(19): siRNA sense strand
caagaagagaaacugaaga

SEQ ID NO: 781256 - RNA, 19 nt, Homo sapiens
  misc_RNA (1)...(19): siRNA sense strand
gaaugaaauccauguuugc

SEQ ID NO: 781257 - RNA, 19 nt, Homo sapiens
  misc_RNA (1)...(19): siRNA sense strand
ggagaugacaccacagacu

SEQ ID NO: 781258 - RNA, 19 nt, Homo sapiens
  misc_RNA (1)...(19): siRNA sense strand
uuacugcccuaaugggaau

SEQ ID NO: 781259 - RNA, 19 nt, Homo sapiens
  misc_RNA (1)...(19): siRNA sense strand
gacaaguacaagagacuga

SEQ ID NO: 781260 - RNA, 19 nt, Homo sapiens
  misc_RNA (1)...(19): siRNA sense strand
aaauccauguuugcuauug

SEQ ID NO: 781261 - RNA, 19 nt, Homo sapiens
  misc_RNA (1)...(19): siRNA sense strand
agacaagaagagaaacuga

SEQ ID NO: 781262 - RNA, 19 nt, Homo sapiens
  misc_RNA (1)...(19): siRNA sense strand
aucaaugguucgaaugaaa

SEQ ID NO: 781263 - RNA, 19 nt, Homo sapiens
  misc_RNA (1)...(19): siRNA sense strand
gacagacaaguacaagaga

SEQ ID NO: 781264 - RNA, 19 nt, Homo sapiens
  misc_RNA (1)...(19): siRNA sense strand
aagaauaacaacagagauc

SEQ ID NO: 781265 - RNA, 19 nt, Homo sapiens
  misc_RNA (1)...(19): siRNA sense strand
ggacacucuccucaucguu

SEQ ID NO: 781266 - RNA, 19 nt, Homo sapiens
  misc_RNA (1)...(19): siRNA sense strand
ucaaugguucgaaugaaau

SEQ ID NO: 781267 - RNA, 19 nt, Homo sapiens
  misc_RNA (1)...(19): siRNA sense strand
acugaagaauaacaacaga

SEQ ID NO: 781268 - RNA, 19 nt, Homo sapiens
  misc_RNA (1)...(19): siRNA sense strand
aggacugucucaucgaaau

SEQ ID NO: 781269 - RNA, 19 nt, Homo sapiens
  misc_RNA (1)...(19): siRNA sense strand
gagacaagaagagaaacug

SEQ ID NO: 781270 - RNA, 19 nt, Homo sapiens
  misc_RNA (1)...(19): siRNA sense strand
gaaacugaagaauaacaac

SEQ ID NO: 781271 - RNA, 19 nt, Homo sapiens
  misc_RNA (1)...(19): siRNA sense strand
gaaaagaagaaggaaacaa

SEQ ID NO: 781272 - RNA, 19 nt, Homo sapiens
  misc_RNA (1)...(19): siRNA sense strand
uuacaggacagacaaguac

SEQ ID NO: 781273 - RNA, 19 nt, Homo sapiens
  misc_RNA (1)...(19): siRNA sense strand
cagaacauucagaagauuc

SEQ ID NO: 781274 - RNA, 19 nt, Homo sapiens
  misc_RNA (1)...(19): siRNA sense strand
acaagaagagaaacugaag

SEQ ID NO: 781275 - RNA, 19 nt, Homo sapiens
  misc_RNA (1)...(19): siRNA sense strand
gagacugaaggcagaagug

SEQ ID NO: 781276 - RNA, 19 nt, Homo sapiens
  misc_RNA (1)...(19): siRNA sense strand
cuaucaaugguucgaauga

SEQ ID NO: 781277 - RNA, 19 nt, Homo sapiens
  misc_RNA (1)...(19): siRNA sense strand
ggacugucucaucgaaauc

SEQ ID NO: 781278 - RNA, 19 nt, Homo sapiens
  misc_RNA (1)...(19): siRNA sense strand
ggaaugagauuguugauaa

SEQ ID NO: 781279 - RNA, 19 nt, Homo sapiens
  misc_RNA (1)...(19): siRNA sense strand
gaagauaccuuucuccaaa

SEQ ID NO: 781280 - RNA, 19 nt, Homo sapiens
  misc_RNA (1)...(19): siRNA sense strand
caacaagugucuuugguua

SEQ ID NO: 781281 - RNA, 19 nt, Homo sapiens
  misc_RNA (1)...(19): siRNA sense strand
ggagagagauguuaucaug

SEQ ID NO: 781282 - RNA, 19 nt, Homo sapiens
  misc_RNA (1)...(19): siRNA sense strand
gaauguggcugaccuuauu

SEQ ID NO: 781283 - RNA, 19 nt, Homo sapiens
  misc_RNA (1)...(19): siRNA sense strand
ggaaagguguggcuauaaa

SEQ ID NO: 781284 - RNA, 19 nt, Homo sapiens
  misc_RNA (1)...(19): siRNA sense strand
gagaguguuugauauguua

SEQ ID NO: 781285 - RNA, 19 nt, Homo sapiens
  misc_RNA (1)...(19): siRNA sense strand
gaggaaagguguggcuaua

SEQ ID NO: 781286 - RNA, 19 nt, Homo sapiens
  misc_RNA (1)...(19): siRNA sense strand
gcuauuauucccuguauua

SEQ ID NO: 781287 - RNA, 19 nt, Homo sapiens
  misc_RNA (1)...(19): siRNA sense strand
gagagcaacuggaaugaga

SEQ ID NO: 781288 - RNA, 19 nt, Homo sapiens
  misc_RNA (1)...(19): siRNA sense strand
uaaaggguaugaugugauu

SEQ ID NO: 781289 - RNA, 19 nt, Homo sapiens
  misc_RNA (1)...(19): siRNA sense strand
ugaagcagaugaaauguug

SEQ ID NO: 781290 - RNA, 19 nt, Homo sapiens
  misc_RNA (1)...(19): siRNA sense strand
gaucacuacugacuuguug

SEQ ID NO: 781291 - RNA, 19 nt, Homo sapiens
  misc_RNA (1)...(19): siRNA sense strand
gccagagacuucacaguuu

SEQ ID NO: 781292 - RNA, 19 nt, Homo sapiens
  misc_RNA (1)...(19): siRNA sense strand
acaagugucuuugguuaua

SEQ ID NO: 781293 - RNA, 19 nt, Homo sapiens
  misc_RNA (1)...(19): siRNA sense strand
ggagaguguuugauauguu

SEQ ID NO: 781294 - RNA, 19 nt, Homo sapiens
  misc_RNA (1)...(19): siRNA sense strand
ggaugaagcagaugaaaug

SEQ ID NO: 781295 - RNA, 19 nt, Homo sapiens
  misc_RNA (1)...(19): siRNA sense strand
ggauacacuuugugacuug

SEQ ID NO: 781296 - RNA, 19 nt, Homo sapiens
  misc_RNA (1)...(19): siRNA sense strand
gcuauaaacuuuguuacug

SEQ ID NO: 781297 - RNA, 19 nt, Homo sapiens
  misc_RNA (1)...(19): siRNA sense strand
gagacuuucuacaauacua

SEQ ID NO: 781298 - RNA, 19 nt, Homo sapiens
  misc_RNA (1)...(19): siRNA sense strand
gagcuauuauucccuguau

SEQ ID NO: 781299 - RNA, 19 nt, Homo sapiens
  misc_RNA (1)...(19): siRNA sense strand
aaacacaaguauucagguu

SEQ ID NO: 781300 - RNA, 19 nt, Homo sapiens
  misc_RNA (1)...(19): siRNA sense strand
gacccaagcacuaguauug

SEQ ID NO: 781301 - RNA, 19 nt, Homo sapiens
  misc_RNA (1)...(19): siRNA sense strand
ggauugaugugcaacaagu

SEQ ID NO: 781302 - RNA, 19 nt, Homo sapiens
  misc_RNA (1)...(19): siRNA sense strand
caacuggaaugagauuguu

SEQ ID NO: 781303 - RNA, 19 nt, Homo sapiens
  misc_RNA (1)...(19): siRNA sense strand
gaagaagacaagaggauuc

SEQ ID NO: 781304 - RNA, 19 nt, Homo sapiens
  misc_RNA (1)...(19): siRNA sense strand
caugagagauccaauucga

SEQ ID NO: 781305 - RNA, 19 nt, Homo sapiens
  misc_RNA (1)...(19): siRNA sense strand
cagcagagagcuauuauuc

SEQ ID NO: 781306 - RNA, 19 nt, Homo sapiens
  misc_RNA (1)...(19): siRNA sense strand
ccagagacuucacaguuuc

SEQ ID NO: 781307 - RNA, 19 nt, Homo sapiens
  misc_RNA (1)...(19): siRNA sense strand
caagugucuuugguuauaa

SEQ ID NO: 781308 - RNA, 19 nt, Homo sapiens
  misc_RNA (1)...(19): siRNA sense strand
caaggagacccaagcacua

SEQ ID NO: 781309 - RNA, 19 nt, Homo sapiens
  misc_RNA (1)...(19): siRNA sense strand
gaggagaugcccaugaaug

SEQ ID NO: 781310 - RNA, 19 nt, Homo sapiens
  misc_RNA (1)...(19): siRNA sense strand
gaggauucuucgugacauu

SEQ ID NO: 781311 - RNA, 19 nt, Homo sapiens
  misc_RNA (1)...(19): siRNA sense strand
caacagauccaaaagguaa

SEQ ID NO: 781312 - RNA, 19 nt, Homo sapiens
  misc_RNA (1)...(19): siRNA sense strand
ggagacccaagcacuagua

SEQ ID NO: 781313 - RNA, 19 nt, Homo sapiens
  misc_RNA (1)...(19): siRNA sense strand
uggaggagaugcccaugaa

SEQ ID NO: 781314 - RNA, 19 nt, Homo sapiens
  misc_RNA (1)...(19): siRNA sense strand
gcaacaagugucuuugguu

SEQ ID NO: 781315 - RNA, 19 nt, Homo sapiens
  misc_RNA (1)...(19): siRNA sense strand
uacgagacacugaccauua

SEQ ID NO: 781316 - RNA, 19 nt, Homo sapiens
  misc_RNA (1)...(19): siRNA sense strand
gcugaagcaccacauauug

SEQ ID NO: 781317 - RNA, 19 nt, Homo sapiens
  misc_RNA (1)...(19): siRNA sense strand
agaacuggcucaacagauc

SEQ ID NO: 781318 - RNA, 19 nt, Homo sapiens
  misc_RNA (1)...(19): siRNA sense strand
gggagaguguuugauaugu

SEQ ID NO: 781319 - RNA, 19 nt, Homo sapiens
  misc_RNA (1)...(19): siRNA sense strand
gaaugagauuguugauaac

SEQ ID NO: 781320 - RNA, 19 nt, Homo sapiens
  misc_RNA (1)...(19): siRNA sense strand
gaagcaccacauauuguug

SEQ ID NO: 781321 - RNA, 19 nt, Homo sapiens
  misc_RNA (1)...(19): siRNA sense strand
ucugaucacuacugacuug

SEQ ID NO: 781322 - RNA, 19 nt, Homo sapiens
  misc_RNA (1)...(19): siRNA sense strand
gauguuaucaugagggaau

SEQ ID NO: 781323 - RNA, 19 nt, Homo sapiens
  misc_RNA (1)...(19): siRNA sense strand
agagagauguuaucaugag

SEQ ID NO: 781324 - RNA, 19 nt, Homo sapiens
  misc_RNA (1)...(19): siRNA sense strand
ccacauauuguuguuggua

SEQ ID NO: 781325 - RNA, 19 nt, Homo sapiens
  misc_RNA (1)...(19): siRNA sense strand
gcaacuggaaugagauugu

SEQ ID NO: 781326 - RNA, 19 nt, Homo sapiens
  misc_RNA (1)...(19): siRNA sense strand
gagcaacuggaaugagauu

SEQ ID NO: 781327 - RNA, 19 nt, Homo sapiens
  misc_RNA (1)...(19): siRNA sense strand
gcacuuggagacuauaugg

SEQ ID NO: 781328 - RNA, 19 nt, Homo sapiens
  misc_RNA (1)...(19): siRNA sense strand
ggaggaaagguguggcuau

SEQ ID NO: 781329 - RNA, 19 nt, Homo sapiens
  misc_RNA (1)...(19): siRNA sense strand
ccacaaugccaacugaugu

SEQ ID NO: 781330 - RNA, 19 nt, Homo sapiens
  misc_RNA (1)...(19): siRNA sense strand
gaaauguugagccgugguu

SEQ ID NO: 781331 - RNA, 19 nt, Homo sapiens
  misc_RNA (1)...(19): siRNA sense strand
gauuauaacagagaacaug

SEQ ID NO: 781332 - RNA, 19 nt, Homo sapiens
  misc_RNA (1)...(19): siRNA sense strand
gagagagauguuaucauga

SEQ ID NO: 781333 - RNA, 19 nt, Homo sapiens
  misc_RNA (1)...(19): siRNA sense strand
cagaaggagagagauguua

SEQ ID NO: 781334 - RNA, 19 nt, Homo sapiens
  misc_RNA (1)...(19): siRNA sense strand
uggacuggcugacugagaa

SEQ ID NO: 781335 - RNA, 19 nt, Homo sapiens
  misc_RNA (1)...(19): siRNA sense strand
aggaagaauugacccuuga

SEQ ID NO: 781336 - RNA, 19 nt, Homo sapiens
  misc_RNA (1)...(19): siRNA sense strand
gaaggagagagauguuauc

SEQ ID NO: 781337 - RNA, 19 nt, Homo sapiens
  misc_RNA (1)...(19): siRNA sense strand
ggaagaauugacccuugaa

SEQ ID NO: 781338 - RNA, 19 nt, Homo sapiens
  misc_RNA (1)...(19): siRNA sense strand
ggcaagacagccacauuug

SEQ ID NO: 781339 - RNA, 19 nt, Homo sapiens
  misc_RNA (1)...(19): siRNA sense strand
ugagagauccaauucgaau

SEQ ID NO: 781340 - RNA, 19 nt, Homo sapiens
  misc_RNA (1)...(19): siRNA sense strand
guauucagguuguguuugc

SEQ ID NO: 781341 - RNA, 19 nt, Homo sapiens
  misc_RNA (1)...(19): siRNA sense strand
ugaagcaccacauauuguu

SEQ ID NO: 781342 - RNA, 19 nt, Homo sapiens
  misc_RNA (1)...(19): siRNA sense strand
acagccacauuugcuauuu

SEQ ID NO: 781343 - RNA, 19 nt, Homo sapiens
  misc_RNA (1)...(19): siRNA sense strand
agguguggcuauaaacuuu

SEQ ID NO: 781344 - RNA, 19 nt, Homo sapiens
  misc_RNA (1)...(19): siRNA sense strand
caucuaugcuuacgguuuu

SEQ ID NO: 781345 - RNA, 19 nt, Homo sapiens
  misc_RNA (1)...(19): siRNA sense strand
gaauggaaguuggauacac

SEQ ID NO: 781346 - RNA, 19 nt, Homo sapiens
  misc_RNA (1)...(19): siRNA sense strand
gagagaggaauggaaguug

SEQ ID NO: 781347 - RNA, 19 nt, Homo sapiens
  misc_RNA (1)...(19): siRNA sense strand
gaggaauggaaguuggaua

SEQ ID NO: 781348 - RNA, 19 nt, Homo sapiens
  misc_RNA (1)...(19): siRNA sense strand
acauugagacuuucuacaa

SEQ ID NO: 781349 - RNA, 19 nt, Homo sapiens
  misc_RNA (1)...(19): siRNA sense strand
ccgggagaguguuugauau

SEQ ID NO: 781350 - RNA, 19 nt, Homo sapiens
  misc_RNA (1)...(19): siRNA sense strand
cuuguuggcucgcgggauu

SEQ ID NO: 781351 - RNA, 19 nt, Homo sapiens
  misc_RNA (1)...(19): siRNA sense strand
ggcugaagcaccacauauu

SEQ ID NO: 781352 - RNA, 19 nt, Homo sapiens
  misc_RNA (1)...(19): siRNA sense strand
gaaagguguggcuauaaac

SEQ ID NO: 781353 - RNA, 19 nt, Homo sapiens
  misc_RNA (1)...(19): siRNA sense strand
gaagaauugacccuugaag

SEQ ID NO: 781354 - RNA, 19 nt, Homo sapiens
  misc_RNA (1)...(19): siRNA sense strand
gcucaagcucagucaggua

SEQ ID NO: 781355 - RNA, 19 nt, Homo sapiens
  misc_RNA (1)...(19): siRNA sense strand
uucgugacauugagacuuu

SEQ ID NO: 781356 - RNA, 19 nt, Homo sapiens
  misc_RNA (1)...(19): siRNA sense strand
ugaagaagacaagaggauu

SEQ ID NO: 781357 - RNA, 19 nt, Homo sapiens
  misc_RNA (1)...(19): siRNA sense strand
guauuaaaggguaugaugu

SEQ ID NO: 781358 - RNA, 19 nt, Homo sapiens
  misc_RNA (1)...(19): siRNA sense strand
cugcauugguggaacaaau

SEQ ID NO: 781359 - RNA, 19 nt, Homo sapiens
  misc_RNA (1)...(19): siRNA sense strand
gaauuccggucagggucaa

SEQ ID NO: 781360 - RNA, 19 nt, Homo sapiens
  misc_RNA (1)...(19): siRNA sense strand
cagccacauuugcuauuuc

SEQ ID NO: 781361 - RNA, 19 nt, Homo sapiens
  misc_RNA (1)...(19): siRNA sense strand
ggagaugcccaugaaugug

SEQ ID NO: 781362 - RNA, 19 nt, Homo sapiens
  misc_RNA (1)...(19): siRNA sense strand
guggcuauaaacuuuguua

SEQ ID NO: 781363 - RNA, 19 nt, Homo sapiens
  misc_RNA (1)...(19): siRNA sense strand
gaccagaaggagagagaug

SEQ ID NO: 781364 - RNA, 19 nt, Homo sapiens
  misc_RNA (1)...(19): siRNA sense strand
ugccagagacuucacaguu

SEQ ID NO: 781365 - RNA, 19 nt, Homo sapiens
  misc_RNA (1)...(19): siRNA sense strand
guacgagacacugaccauu

SEQ ID NO: 781366 - RNA, 19 nt, Homo sapiens
  misc_RNA (1)...(19): siRNA sense strand
caagacagccacauuugcu

SEQ ID NO: 781367 - RNA, 19 nt, Homo sapiens
  misc_RNA (1)...(19): siRNA sense strand
gagaggaauggaaguugga

SEQ ID NO: 781368 - RNA, 19 nt, Homo sapiens
  misc_RNA (1)...(19): siRNA sense strand
aaagguaauucuggcacuu

SEQ ID NO: 781369 - RNA, 19 nt, Homo sapiens
  misc_RNA (1)...(19): siRNA sense strand
ggucaagucguguucugau

SEQ ID NO: 781370 - RNA, 19 nt, Homo sapiens
  misc_RNA (1)...(19): siRNA sense strand
cuaccuaccaaucgugaaa

SEQ ID NO: 781371 - RNA, 19 nt, Homo sapiens
  misc_RNA (1)...(19): siRNA sense strand
auuaugaucuaccuaccaa

SEQ ID NO: 781372 - RNA, 19 nt, Homo sapiens
  misc_RNA (1)...(19): siRNA sense strand
gcuauucagcagagagcua

SEQ ID NO: 781373 - RNA, 19 nt, Homo sapiens
  misc_RNA (1)...(19): siRNA sense strand
gagaacuggcucaacagau

SEQ ID NO: 781374 - RNA, 19 nt, Homo sapiens
  misc_RNA (1)...(19): siRNA sense strand
agaaggagagagauguuau

SEQ ID NO: 781375 - RNA, 19 nt, Homo sapiens
  misc_RNA (1)...(19): siRNA sense strand
ccagaaggagagagauguu

SEQ ID NO: 781376 - RNA, 19 nt, Homo sapiens
  misc_RNA (1)...(19): siRNA sense strand
uggauacacuuugugacuu

SEQ ID NO: 781377 - RNA, 19 nt, Homo sapiens
  misc_RNA (1)...(19): siRNA sense strand
ugaauguggcugaccuuau

SEQ ID NO: 781378 - RNA, 19 nt, Homo sapiens
  misc_RNA (1)...(19): siRNA sense strand
gaaagaaccucaugaugua

SEQ ID NO: 781379 - RNA, 19 nt, Homo sapiens
  misc_RNA (1)...(19): siRNA sense strand
gagagaaacuacccuaaua

SEQ ID NO: 781380 - RNA, 19 nt, Homo sapiens
  misc_RNA (1)...(19): siRNA sense strand
gaucuacacuugauucuaa

SEQ ID NO: 781381 - RNA, 19 nt, Homo sapiens
  misc_RNA (1)...(19): siRNA sense strand
gaaagguacuuacaucuug

SEQ ID NO: 781382 - RNA, 19 nt, Homo sapiens
  misc_RNA (1)...(19): siRNA sense strand
gaagaaagcacgacaagaa

SEQ ID NO: 781383 - RNA, 19 nt, Homo sapiens
  misc_RNA (1)...(19): siRNA sense strand
gcagucaguucaucaguua

SEQ ID NO: 781384 - RNA, 19 nt, Homo sapiens
  misc_RNA (1)...(19): siRNA sense strand
cgaagaaucucagcaguua

SEQ ID NO: 781385 - RNA, 19 nt, Homo sapiens
  misc_RNA (1)...(19): siRNA sense strand
cggaggaacuuucuuaaua

SEQ ID NO: 781386 - RNA, 19 nt, Homo sapiens
  misc_RNA (1)...(19): siRNA sense strand
gaagaagaaguaaccauua

SEQ ID NO: 781387 - RNA, 19 nt, Homo sapiens
  misc_RNA (1)...(19): siRNA sense strand
ccaaagaugucccuugaaa

SEQ ID NO: 781388 - RNA, 19 nt, Homo sapiens
  misc_RNA (1)...(19): siRNA sense strand
gaagaugccaugaccaaua

SEQ ID NO: 781389 - RNA, 19 nt, Homo sapiens
  misc_RNA (1)...(19): siRNA sense strand
gaagaggacccuaagagua

SEQ ID NO: 781390 - RNA, 19 nt, Homo sapiens
  misc_RNA (1)...(19): siRNA sense strand
ggaagaaguuauccuguug

SEQ ID NO: 781391 - RNA, 19 nt, Homo sapiens
  misc_RNA (1)...(19): siRNA sense strand
gaacaagcagcuaccuuua

SEQ ID NO: 781392 - RNA, 19 nt, Homo sapiens
  misc_RNA (1)...(19): siRNA sense strand
cagaguaugugaugaauug

SEQ ID NO: 781393 - RNA, 19 nt, Homo sapiens
  misc_RNA (1)...(19): siRNA sense strand
gcagcuaccuuuaaacuag

SEQ ID NO: 781394 - RNA, 19 nt, Homo sapiens
  misc_RNA (1)...(19): siRNA sense strand
gcagucagaugaguucuuu

SEQ ID NO: 781395 - RNA, 19 nt, Homo sapiens
  misc_RNA (1)...(19): siRNA sense strand
gaucuacaaugcauaucua

SEQ ID NO: 781396 - RNA, 19 nt, Homo sapiens
  misc_RNA (1)...(19): siRNA sense strand
gaaauugcccuucuuaaag

SEQ ID NO: 781397 - RNA, 19 nt, Homo sapiens
  misc_RNA (1)...(19): siRNA sense strand
ggaggaacuuucuuaauag

SEQ ID NO: 781398 - RNA, 19 nt, Homo sapiens
  misc_RNA (1)...(19): siRNA sense strand
ggaagaggaagaagaagua

SEQ ID NO: 781399 - RNA, 19 nt, Homo sapiens
  misc_RNA (1)...(19): siRNA sense strand
guacacccauccucaguaa

SEQ ID NO: 781400 - RNA, 19 nt, Homo sapiens
  misc_RNA (1)...(19): siRNA sense strand
gcaguuguaugaucuucua

SEQ ID NO: 781401 - RNA, 19 nt, Homo sapiens
  misc_RNA (1)...(19): siRNA sense strand
gaucagcaaugcaaugaau

SEQ ID NO: 781402 - RNA, 19 nt, Homo sapiens
  misc_RNA (1)...(19): siRNA sense strand
ccaauacacucuuauaugg

SEQ ID NO: 781403 - RNA, 19 nt, Homo sapiens
  misc_RNA (1)...(19): siRNA sense strand
gaacgucuucuuucuauug

SEQ ID NO: 781404 - RNA, 19 nt, Homo sapiens
  misc_RNA (1)...(19): siRNA sense strand
ggaacuucuugcauacuua

SEQ ID NO: 781405 - RNA, 19 nt, Homo sapiens
  misc_RNA (1)...(19): siRNA sense strand
guuuaaaccuuucagauga

SEQ ID NO: 781406 - RNA, 19 nt, Homo sapiens
  misc_RNA (1)...(19): siRNA sense strand
ugaaagaaguguccaguca

SEQ ID NO: 781407 - RNA, 19 nt, Homo sapiens
  misc_RNA (1)...(19): siRNA sense strand
agaagaccauccaguauuu

SEQ ID NO: 781408 - RNA, 19 nt, Homo sapiens
  misc_RNA (1)...(19): siRNA sense strand
ggaagaagaaguaaccauu

SEQ ID NO: 781409 - RNA, 19 nt, Homo sapiens
  misc_RNA (1)...(19): siRNA sense strand
gcaaagcacaccuaaguau

SEQ ID NO: 781410 - RNA, 19 nt, Homo sapiens
  misc_RNA (1)...(19): siRNA sense strand
gguagauacuggaaaugua

SEQ ID NO: 781411 - RNA, 19 nt, Homo sapiens
  misc_RNA (1)...(19): siRNA sense strand
gagaaagugcauugaauuu

SEQ ID NO: 781412 - RNA, 19 nt, Homo sapiens
  misc_RNA (1)...(19): siRNA sense strand
ggagaaagugcauugaauu

SEQ ID NO: 781413 - RNA, 19 nt, Homo sapiens
  misc_RNA (1)...(19): siRNA sense strand
gccaacaccuugcagcuuu

SEQ ID NO: 781414 - RNA, 19 nt, Homo sapiens
  misc_RNA (1)...(19): siRNA sense strand
gaagaaguaaccauuaaug

SEQ ID NO: 781415 - RNA, 19 nt, Homo sapiens
  misc_RNA (1)...(19): siRNA sense strand
aguaaugugucucauguua

SEQ ID NO: 781416 - RNA, 19 nt, Homo sapiens
  misc_RNA (1)...(19): siRNA sense strand
acaagcagcuaccuuuaaa

SEQ ID NO: 781417 - RNA, 19 nt, Homo sapiens
  misc_RNA (1)...(19): siRNA sense strand
uaaguaaugugucucaugu

SEQ ID NO: 781418 - RNA, 19 nt, Homo sapiens
  misc_RNA (1)...(19): siRNA sense strand
gaaaaucucccaaacaauu

SEQ ID NO: 781419 - RNA, 19 nt, Homo sapiens
  misc_RNA (1)...(19): siRNA sense strand
gauggaaucucgagcuugu

SEQ ID NO: 781420 - RNA, 19 nt, Homo sapiens
  misc_RNA (1)...(19): siRNA sense strand
caucgggacucaauuguug

SEQ ID NO: 781421 - RNA, 19 nt, Homo sapiens
  misc_RNA (1)...(19): siRNA sense strand
guagguagauacuggaaau

SEQ ID NO: 781422 - RNA, 19 nt, Homo sapiens
  misc_RNA (1)...(19): siRNA sense strand
gcucugcauucuauucuuu

SEQ ID NO: 781423 - RNA, 19 nt, Homo sapiens
  misc_RNA (1)...(19): siRNA sense strand
ggaauuccuuguguggaua

SEQ ID NO: 781424 - RNA, 19 nt, Homo sapiens
  misc_RNA (1)...(19): siRNA sense strand
guacacaagagaaagauuu

SEQ ID NO: 781425 - RNA, 19 nt, Homo sapiens
  misc_RNA (1)...(19): siRNA sense strand
gcucgaaguuggacuggaa

SEQ ID NO: 781426 - RNA, 19 nt, Homo sapiens
  misc_RNA (1)...(19): siRNA sense strand
gaggaacuuucuuaauaga

SEQ ID NO: 781427 - RNA, 19 nt, Homo sapiens
  misc_RNA (1)...(19): siRNA sense strand
cugcaaaucuggauaaauc

SEQ ID NO: 781428 - RNA, 19 nt, Homo sapiens
  misc_RNA (1)...(19): siRNA sense strand
caaacuagagcaaagaauu

SEQ ID NO: 781429 - RNA, 19 nt, Homo sapiens
  misc_RNA (1)...(19): siRNA sense strand
ggaguggagugaugcagaa

SEQ ID NO: 781430 - RNA, 19 nt, Homo sapiens
  misc_RNA (1)...(19): siRNA sense strand
ugaagaugauguccuggua

SEQ ID NO: 781431 - RNA, 19 nt, Homo sapiens
  misc_RNA (1)...(19): siRNA sense strand
guaaagcaggaguuaauaa

SEQ ID NO: 781432 - RNA, 19 nt, Homo sapiens
  misc_RNA (1)...(19): siRNA sense strand
caacagaguaugugaugaa

SEQ ID NO: 781433 - RNA, 19 nt, Homo sapiens
  misc_RNA (1)...(19): siRNA sense strand
guuagaaaccucuuuagaa

SEQ ID NO: 781434 - RNA, 19 nt, Homo sapiens
  misc_RNA (1)...(19): siRNA sense strand
gaagauuuggaaccuguua

SEQ ID NO: 781435 - RNA, 19 nt, Homo sapiens
  misc_RNA (1)...(19): siRNA sense strand
uugccaaacuucugaauaa

SEQ ID NO: 781436 - RNA, 19 nt, Homo sapiens
  misc_RNA (1)...(19): siRNA sense strand
gaagauuucacaucaacaa

SEQ ID NO: 781437 - RNA, 19 nt, Homo sapiens
  misc_RNA (1)...(19): siRNA sense strand
aaagauagcugucauuuuc

SEQ ID NO: 781438 - RNA, 19 nt, Homo sapiens
  misc_RNA (1)...(19): siRNA sense strand
guaaagauagcugucauuu

SEQ ID NO: 781439 - RNA, 19 nt, Homo sapiens
  misc_RNA (1)...(19): siRNA sense strand
ggaaacagagccucacaga

SEQ ID NO: 781440 - RNA, 19 nt, Homo sapiens
  misc_RNA (1)...(19): siRNA sense strand
caugaaagcagucagauga

SEQ ID NO: 781441 - RNA, 19 nt, Homo sapiens
  misc_RNA (1)...(19): siRNA sense strand
ucagacuuccuacuaauua

SEQ ID NO: 781442 - RNA, 19 nt, Homo sapiens
  misc_RNA (1)...(19): siRNA sense strand
ggaaucagcaaauguggaa

SEQ ID NO: 781443 - RNA, 19 nt, Homo sapiens
  misc_RNA (1)...(19): siRNA sense strand
gaaauguaaucuugguucu

SEQ ID NO: 781444 - RNA, 19 nt, Homo sapiens
  misc_RNA (1)...(19): siRNA sense strand
caugaccaauacacucuua

SEQ ID NO: 781445 - RNA, 19 nt, Homo sapiens
  misc_RNA (1)...(19): siRNA sense strand
caacaacagcauucugaaa

SEQ ID NO: 781446 - RNA, 19 nt, Homo sapiens
  misc_RNA (1)...(19): siRNA sense strand
gcaccugggagcuacuuua

SEQ ID NO: 781447 - RNA, 19 nt, Homo sapiens
  misc_RNA (1)...(19): siRNA sense strand
aguaugcccuacaaucuua

SEQ ID NO: 781448 - RNA, 19 nt, Homo sapiens
  misc_RNA (1)...(19): siRNA sense strand
agaaagaaccucaugaugu

SEQ ID NO: 781449 - RNA, 19 nt, Homo sapiens
  misc_RNA (1)...(19): siRNA sense strand
gaagaccauccaguauuua

SEQ ID NO: 781450 - RNA, 19 nt, Homo sapiens
  misc_RNA (1)...(19): siRNA sense strand
ggaaguaaauaugaaagag

SEQ ID NO: 781451 - RNA, 19 nt, Homo sapiens
  misc_RNA (1)...(19): siRNA sense strand
aaagaaguguccagucaga

SEQ ID NO: 781452 - RNA, 19 nt, Homo sapiens
  misc_RNA (1)...(19): siRNA sense strand
ggagacguuugucaguaaa

SEQ ID NO: 781453 - RNA, 19 nt, Homo sapiens
  misc_RNA (1)...(19): siRNA sense strand
gcagagacggguaucacua

SEQ ID NO: 781454 - RNA, 19 nt, Homo sapiens
  misc_RNA (1)...(19): siRNA sense strand
gaagaaacaggcuuuguac

SEQ ID NO: 781455 - RNA, 19 nt, Homo sapiens
  misc_RNA (1)...(19): siRNA sense strand
gggaagcaaguaaauguaa

SEQ ID NO: 781456 - RNA, 19 nt, Homo sapiens
  misc_RNA (1)...(19): siRNA sense strand
gcagaucauuacggaauug

SEQ ID NO: 781457 - RNA, 19 nt, Homo sapiens
  misc_RNA (1)...(19): siRNA sense strand
ggagacggcccaaggcaaa

SEQ ID NO: 781458 - RNA, 19 nt, Homo sapiens
  misc_RNA (1)...(19): siRNA sense strand
ccaacaccuugcagcuuua

SEQ ID NO: 781459 - RNA, 19 nt, Homo sapiens
  misc_RNA (1)...(19): siRNA sense strand
caaugaauuugcuccgaaa

SEQ ID NO: 781460 - RNA, 19 nt, Homo sapiens
  misc_RNA (1)...(19): siRNA sense strand
uaccaggacuugcucauau

SEQ ID NO: 781461 - RNA, 19 nt, Homo sapiens
  misc_RNA (1)...(19): siRNA sense strand
gcaaaucuggauaaaucua

SEQ ID NO: 781462 - RNA, 19 nt, Homo sapiens
  misc_RNA (1)...(19): siRNA sense strand
gcaguuaguuuagccaaca

SEQ ID NO: 781463 - RNA, 19 nt, Homo sapiens
  misc_RNA (1)...(19): siRNA sense strand
gcaagaacaagaaacacaa

SEQ ID NO: 781464 - RNA, 19 nt, Homo sapiens
  misc_RNA (1)...(19): siRNA sense strand
gaaagcagucagaugaguu

SEQ ID NO: 781465 - RNA, 19 nt, Homo sapiens
  misc_RNA (1)...(19): siRNA sense strand
aagaggacccuaagaguaa

SEQ ID NO: 781466 - RNA, 19 nt, Homo sapiens
  misc_RNA (1)...(19): siRNA sense strand
gaaagcacgacaagaagga

SEQ ID NO: 781467 - RNA, 19 nt, Homo sapiens
  misc_RNA (1)...(19): siRNA sense strand
gaagauuuccucuccaaag

SEQ ID NO: 781468 - RNA, 19 nt, Homo sapiens
  misc_RNA (1)...(19): siRNA sense strand
ccugaaaucuuacguguac

SEQ ID NO: 781469 - RNA, 19 nt, Homo sapiens
  misc_RNA (1)...(19): siRNA sense strand
ggauuauucuguuccugaa

SEQ ID NO: 781470 - RNA, 19 nt, Homo sapiens
  misc_RNA (1)...(19): siRNA sense strand
uugaaggcuuuauggauua

SEQ ID NO: 781471 - RNA, 19 nt, Homo sapiens
  misc_RNA (1)...(19): siRNA sense strand
agaagaaacaggcuuugua

SEQ ID NO: 781472 - RNA, 19 nt, Homo sapiens
  misc_RNA (1)...(19): siRNA sense strand
guaaucaagucugaagaug

SEQ ID NO: 781473 - RNA, 19 nt, Homo sapiens
  misc_RNA (1)...(19): siRNA sense strand
caacagcauucugaaaaua

SEQ ID NO: 781474 - RNA, 19 nt, Homo sapiens
  misc_RNA (1)...(19): siRNA sense strand
guucugaaaucacauacug

SEQ ID NO: 781475 - RNA, 19 nt, Homo sapiens
  misc_RNA (1)...(19): siRNA sense strand
gaauacaucccaguucaga

SEQ ID NO: 781476 - RNA, 19 nt, Homo sapiens
  misc_RNA (1)...(19): siRNA sense strand
ccauuaauguuacaagcaa

SEQ ID NO: 781477 - RNA, 19 nt, Homo sapiens
  misc_RNA (1)...(19): siRNA sense strand
aaucucagcaguuaguuua

SEQ ID NO: 781478 - RNA, 19 nt, Homo sapiens
  misc_RNA (1)...(19): siRNA sense strand
cuagugaacugucaauaua

SEQ ID NO: 781479 - RNA, 19 nt, Homo sapiens
  misc_RNA (1)...(19): siRNA sense strand
gaccguaaguccugugaga

SEQ ID NO: 781480 - RNA, 19 nt, Homo sapiens
  misc_RNA (1)...(19): siRNA sense strand
ggacagggcccuagugaac

SEQ ID NO: 781481 - RNA, 19 nt, Homo sapiens
  misc_RNA (1)...(19): siRNA sense strand
cuaugcagcuugugugaau

SEQ ID NO: 781482 - RNA, 19 nt, Homo sapiens
  misc_RNA (1)...(19): siRNA sense strand
caugagagacuuugugugu

SEQ ID NO: 781483 - RNA, 19 nt, Homo sapiens
  misc_RNA (1)...(19): siRNA sense strand
cacccacgcucccagauug

SEQ ID NO: 781484 - RNA, 19 nt, Homo sapiens
  misc_RNA (1)...(19): siRNA sense strand
gcacccacgcucccagauu

SEQ ID NO: 781485 - RNA, 19 nt, Homo sapiens
  misc_RNA (1)...(19): siRNA sense strand
gcgugaggccucuaucuug

SEQ ID NO: 781486 - RNA, 19 nt, Homo sapiens
  misc_RNA (1)...(19): siRNA sense strand
ggaccuaugcagcuugugu

SEQ ID NO: 781487 - RNA, 19 nt, Homo sapiens
  misc_RNA (1)...(19): siRNA sense strand
agauugcgcugcuugagau

SEQ ID NO: 781488 - RNA, 19 nt, Homo sapiens
  misc_RNA (1)...(19): siRNA sense strand
ccuagugaacugucaauau

SEQ ID NO: 781489 - RNA, 19 nt, Homo sapiens
  misc_RNA (1)...(19): siRNA sense strand
ugacggcucggccuacauu

SEQ ID NO: 781490 - RNA, 19 nt, Homo sapiens
  misc_RNA (1)...(19): siRNA sense strand
cgaagcagccauccucaca

SEQ ID NO: 781491 - RNA, 19 nt, Homo sapiens
  misc_RNA (1)...(19): siRNA sense strand
gugcacacccucuuagauc

SEQ ID NO: 781492 - RNA, 19 nt, Homo sapiens
  misc_RNA (1)...(19): siRNA sense strand
gcagauggugggaccuaug

SEQ ID NO: 781493 - RNA, 19 nt, Homo sapiens
  misc_RNA (1)...(19): siRNA sense strand
aagcagccauccucacaca

SEQ ID NO: 781494 - RNA, 19 nt, Homo sapiens
  misc_RNA (1)...(19): siRNA sense strand
ggauacccaugagagacuu

SEQ ID NO: 781495 - RNA, 19 nt, Homo sapiens
  misc_RNA (1)...(19): siRNA sense strand
ccacgcucccagauugaua

SEQ ID NO: 781496 - RNA, 19 nt, Homo sapiens
  misc_RNA (1)...(19): siRNA sense strand
ggugggaccuaugcagcuu

SEQ ID NO: 781497 - RNA, 19 nt, Homo sapiens
  misc_RNA (1)...(19): siRNA sense strand
ccgccagacuuucgaagca

SEQ ID NO: 781498 - RNA, 19 nt, Homo sapiens
  misc_RNA (1)...(19): siRNA sense strand
gcacacccucuuagaucga

SEQ ID NO: 781499 - RNA, 19 nt, Homo sapiens
  misc_RNA (1)...(19): siRNA sense strand
cagauugcgcugcuugaga

SEQ ID NO: 781500 - RNA, 19 nt, Homo sapiens
  misc_RNA (1)...(19): siRNA sense strand
gagaugugcacacccucuu

SEQ ID NO: 781501 - RNA, 19 nt, Homo sapiens
  misc_RNA (1)...(19): siRNA sense strand
acagggcccuagugaacug

SEQ ID NO: 781502 - RNA, 19 nt, Homo sapiens
  misc_RNA (1)...(19): siRNA sense strand
gaugugcacacccucuuag

SEQ ID NO: 781503 - RNA, 19 nt, Homo sapiens
  misc_RNA (1)...(19): siRNA sense strand
agugaacugucaauauagu

SEQ ID NO: 781504 - RNA, 19 nt, Homo sapiens
  misc_RNA (1)...(19): siRNA sense strand
agugcuggaugccgggaua

SEQ ID NO: 781505 - RNA, 19 nt, Homo sapiens
  misc_RNA (1)...(19): siRNA sense strand
ggcacuggcuguggucuac

SEQ ID NO: 781506 - RNA, 19 nt, Homo sapiens
  misc_RNA (1)...(19): siRNA sense strand
agaugugcacacccucuua

SEQ ID NO: 781507 - RNA, 19 nt, Homo sapiens
  misc_RNA (1)...(19): siRNA sense strand
gagcuggcauuuccuauua

SEQ ID NO: 781508 - RNA, 19 nt, Homo sapiens
  misc_RNA (1)...(19): siRNA sense strand
ggagaaaugugucugaauu

SEQ ID NO: 781509 - RNA, 19 nt, Homo sapiens
  misc_RNA (1)...(19): siRNA sense strand
gguaagaacuuuaacacaa

SEQ ID NO: 781510 - RNA, 19 nt, Homo sapiens
  misc_RNA (1)...(19): siRNA sense strand
agacacagcuucuuuaaug

SEQ ID NO: 781511 - RNA, 19 nt, Homo sapiens
  misc_RNA (1)...(19): siRNA sense strand
cgcagaaccuuguguauua

SEQ ID NO: 781512 - RNA, 19 nt, Homo sapiens
  misc_RNA (1)...(19): siRNA sense strand
ucacagauguuguuauuca

SEQ ID NO: 781513 - RNA, 19 nt, Homo sapiens
  misc_RNA (1)...(19): siRNA sense strand
ugaagaauauuccagugua

SEQ ID NO: 781514 - RNA, 19 nt, Homo sapiens
  misc_RNA (1)...(19): siRNA sense strand
cgauucagcuugaugguuu

SEQ ID NO: 781515 - RNA, 19 nt, Homo sapiens
  misc_RNA (1)...(19): siRNA sense strand
aaacagcuauccauuacaa

SEQ ID NO: 781516 - RNA, 19 nt, Homo sapiens
  misc_RNA (1)...(19): siRNA sense strand
aagaauaccugaagagaau

SEQ ID NO: 781517 - RNA, 19 nt, Homo sapiens
  misc_RNA (1)...(19): siRNA sense strand
gcagaaccuuguguauuaa

SEQ ID NO: 781518 - RNA, 19 nt, Homo sapiens
  misc_RNA (1)...(19): siRNA sense strand
ccuucaaccugauguauua

SEQ ID NO: 781519 - RNA, 19 nt, Homo sapiens
  misc_RNA (1)...(19): siRNA sense strand
ccagauauaugugguaaga

SEQ ID NO: 781520 - RNA, 19 nt, Homo sapiens
  misc_RNA (1)...(19): siRNA sense strand
gaacaggaucuacaaacaa

SEQ ID NO: 781521 - RNA, 19 nt, Homo sapiens
  misc_RNA (1)...(19): siRNA sense strand
gaaguugauuucuaaugga

SEQ ID NO: 781522 - RNA, 19 nt, Homo sapiens
  misc_RNA (1)...(19): siRNA sense strand
cauaaacucugauaaaggu

SEQ ID NO: 781523 - RNA, 19 nt, Homo sapiens
  misc_RNA (1)...(19): siRNA sense strand
gugcagcuguguuggauuu

SEQ ID NO: 781524 - RNA, 19 nt, Homo sapiens
  misc_RNA (1)...(19): siRNA sense strand
cagaggcaguauacaguua

SEQ ID NO: 781525 - RNA, 19 nt, Homo sapiens
  misc_RNA (1)...(19): siRNA sense strand
guggaggacugcagcauuu

SEQ ID NO: 781526 - RNA, 19 nt, Homo sapiens
  misc_RNA (1)...(19): siRNA sense strand
gaacauacaggaucucaag

SEQ ID NO: 781527 - RNA, 19 nt, Homo sapiens
  misc_RNA (1)...(19): siRNA sense strand
gaaaauagccgcauucaca

SEQ ID NO: 781528 - RNA, 19 nt, Homo sapiens
  misc_RNA (1)...(19): siRNA sense strand
ggugaacaguauagacuuu

SEQ ID NO: 781529 - RNA, 19 nt, Homo sapiens
  misc_RNA (1)...(19): siRNA sense strand
gaaaacagcuauccauuac

SEQ ID NO: 781530 - RNA, 19 nt, Homo sapiens
  misc_RNA (1)...(19): siRNA sense strand
gcucacaguucucugaaga

SEQ ID NO: 781531 - RNA, 19 nt, Homo sapiens
  misc_RNA (1)...(19): siRNA sense strand
uauagggccugaaguggua

SEQ ID NO: 781532 - RNA, 19 nt, Homo sapiens
  misc_RNA (1)...(19): siRNA sense strand
gauuggaacuagaaacaga

SEQ ID NO: 781533 - RNA, 19 nt, Homo sapiens
  misc_RNA (1)...(19): siRNA sense strand
gaagaauauuccaguguag

SEQ ID NO: 781534 - RNA, 19 nt, Homo sapiens
  misc_RNA (1)...(19): siRNA sense strand
gaacugccaccaaaugaga

SEQ ID NO: 781535 - RNA, 19 nt, Homo sapiens
  misc_RNA (1)...(19): siRNA sense strand
gcggaguccuguaaauaaa

SEQ ID NO: 781536 - RNA, 19 nt, Homo sapiens
  misc_RNA (1)...(19): siRNA sense strand
cuaaauaccuuccacaaaa

SEQ ID NO: 781537 - RNA, 19 nt, Homo sapiens
  misc_RNA (1)...(19): siRNA sense strand
gaaauggaucggagaaaug

SEQ ID NO: 781538 - RNA, 19 nt, Homo sapiens
  misc_RNA (1)...(19): siRNA sense strand
gagagugugugccaacaga

SEQ ID NO: 781539 - RNA, 19 nt, Homo sapiens
  misc_RNA (1)...(19): siRNA sense strand
ccucagagaucaccuaugg

SEQ ID NO: 781540 - RNA, 19 nt, Homo sapiens
  misc_RNA (1)...(19): siRNA sense strand
gaagauagcgcuaaaugcu

SEQ ID NO: 781541 - RNA, 19 nt, Homo sapiens
  misc_RNA (1)...(19): siRNA sense strand
uggcauauguguccucaaa

SEQ ID NO: 781542 - RNA, 19 nt, Homo sapiens
  misc_RNA (1)...(19): siRNA sense strand
ccacaaaagugcuauuaaa

SEQ ID NO: 781543 - RNA, 19 nt, Homo sapiens
  misc_RNA (1)...(19): siRNA sense strand
aagaugaacugccaccaaa

SEQ ID NO: 781544 - RNA, 19 nt, Homo sapiens
  misc_RNA (1)...(19): siRNA sense strand
gcauucacauaaacucuga

SEQ ID NO: 781545 - RNA, 19 nt, Homo sapiens
  misc_RNA (1)...(19): siRNA sense strand
ggcccaagaucaacauuau

SEQ ID NO: 781546 - RNA, 19 nt, Homo sapiens
  misc_RNA (1)...(19): siRNA sense strand
gaacaguauagacuuugua

SEQ ID NO: 781547 - RNA, 19 nt, Homo sapiens
  misc_RNA (1)...(19): siRNA sense strand
gaauauagaaucccagaag

SEQ ID NO: 781548 - RNA, 19 nt, Homo sapiens
  misc_RNA (1)...(19): siRNA sense strand
gcagucaguuauuaaaucu

SEQ ID NO: 781549 - RNA, 19 nt, Homo sapiens
  misc_RNA (1)...(19): siRNA sense strand
acucacagauguuguuauu

SEQ ID NO: 781550 - RNA, 19 nt, Homo sapiens
  misc_RNA (1)...(19): siRNA sense strand
caaacuguaugaauagaca

SEQ ID NO: 781551 - RNA, 19 nt, Homo sapiens
  misc_RNA (1)...(19): siRNA sense strand
cuuuauaucugaaggauga

SEQ ID NO: 781552 - RNA, 19 nt, Homo sapiens
  misc_RNA (1)...(19): siRNA sense strand
uacaggaucucaagaacuu

SEQ ID NO: 781553 - RNA, 19 nt, Homo sapiens
  misc_RNA (1)...(19): siRNA sense strand
gagaugaacagccuaaaca

SEQ ID NO: 781554 - RNA, 19 nt, Homo sapiens
  misc_RNA (1)...(19): siRNA sense strand
gcauuucaccgaagaagaa

SEQ ID NO: 781555 - RNA, 19 nt, Homo sapiens
  misc_RNA (1)...(19): siRNA sense strand
gaagaugaacugccaccaa

SEQ ID NO: 781556 - RNA, 19 nt, Homo sapiens
  misc_RNA (1)...(19): siRNA sense strand
uggaggagauucugcugua

SEQ ID NO: 781557 - RNA, 19 nt, Homo sapiens
  misc_RNA (1)...(19): siRNA sense strand
gaacgcaguagauaaguca

SEQ ID NO: 781558 - RNA, 19 nt, Homo sapiens
  misc_RNA (1)...(19): siRNA sense strand
gcuaaaugcucacaguucu

SEQ ID NO: 781559 - RNA, 19 nt, Homo sapiens
  misc_RNA (1)...(19): siRNA sense strand
guacuaagaguuguugauu

SEQ ID NO: 781560 - RNA, 19 nt, Homo sapiens
  misc_RNA (1)...(19): siRNA sense strand
ccaacagaauaucaugaaa

SEQ ID NO: 781561 - RNA, 19 nt, Homo sapiens
  misc_RNA (1)...(19): siRNA sense strand
gauuaaagcccagauuuca

SEQ ID NO: 781562 - RNA, 19 nt, Homo sapiens
  misc_RNA (1)...(19): siRNA sense strand
ggaacaggcccaagaucaa

SEQ ID NO: 781563 - RNA, 19 nt, Homo sapiens
  misc_RNA (1)...(19): siRNA sense strand
caguauagacuuuguagaa

SEQ ID NO: 781564 - RNA, 19 nt, Homo sapiens
  misc_RNA (1)...(19): siRNA sense strand
ugaaguugauuucuaaugg

SEQ ID NO: 781565 - RNA, 19 nt, Homo sapiens
  misc_RNA (1)...(19): siRNA sense strand
ucuuaguggucauuucuua

SEQ ID NO: 781566 - RNA, 19 nt, Homo sapiens
  misc_RNA (1)...(19): siRNA sense strand
acuaagaguuguugauuuc

SEQ ID NO: 781567 - RNA, 19 nt, Homo sapiens
  misc_RNA (1)...(19): siRNA sense strand
cagauguuguuauucauga

SEQ ID NO: 781568 - RNA, 19 nt, Homo sapiens
  misc_RNA (1)...(19): siRNA sense strand
gcucaggaauacuguguuc

SEQ ID NO: 781569 - RNA, 19 nt, Homo sapiens
  misc_RNA (1)...(19): siRNA sense strand
auaacuagcucuaauaugc

SEQ ID NO: 781570 - RNA, 19 nt, Homo sapiens
  misc_RNA (1)...(19): siRNA sense strand
gaaaaucacaguaucagaa

SEQ ID NO: 781571 - RNA, 19 nt, Homo sapiens
  misc_RNA (1)...(19): siRNA sense strand
aaagcacaguuccgcauuu

SEQ ID NO: 781572 - RNA, 19 nt, Homo sapiens
  misc_RNA (1)...(19): siRNA sense strand
gaucucaaguccacauuuu

SEQ ID NO: 781573 - RNA, 19 nt, Homo sapiens
  misc_RNA (1)...(19): siRNA sense strand
aaggagugguucugauuaa

SEQ ID NO: 781574 - RNA, 19 nt, Homo sapiens
  misc_RNA (1)...(19): siRNA sense strand
gcauuuacaguguuucuug

SEQ ID NO: 781575 - RNA, 19 nt, Homo sapiens
  misc_RNA (1)...(19): siRNA sense strand
uaaagucccagaaucuauu

SEQ ID NO: 781576 - RNA, 19 nt, Homo sapiens
  misc_RNA (1)...(19): siRNA sense strand
gcgcagaaccuuguguauu

SEQ ID NO: 781577 - RNA, 19 nt, Homo sapiens
  misc_RNA (1)...(19): siRNA sense strand
agaaauggaucggagaaau

SEQ ID NO: 781578 - RNA, 19 nt, Homo sapiens
  misc_RNA (1)...(19): siRNA sense strand
gaugaacugccaccaaaug

SEQ ID NO: 781579 - RNA, 19 nt, Homo sapiens
  misc_RNA (1)...(19): siRNA sense strand
cacauaaacucugauaaag

SEQ ID NO: 781580 - RNA, 19 nt, Homo sapiens
  misc_RNA (1)...(19): siRNA sense strand
gagauaagaauaccugaag

SEQ ID NO: 781581 - RNA, 19 nt, Homo sapiens
  misc_RNA (1)...(19): siRNA sense strand
uaaaugugcagcuguguug

SEQ ID NO: 781582 - RNA, 19 nt, Homo sapiens
  misc_RNA (1)...(19): siRNA sense strand
uccaauugcuccacugaaa

SEQ ID NO: 781583 - RNA, 19 nt, Homo sapiens
  misc_RNA (1)...(19): siRNA sense strand
gccagaaguauaauuguuu

SEQ ID NO: 781584 - RNA, 19 nt, Homo sapiens
  misc_RNA (1)...(19): siRNA sense strand
uaagaauaccugaagagaa

SEQ ID NO: 781585 - RNA, 19 nt, Homo sapiens
  misc_RNA (1)...(19): siRNA sense strand
ggcggaguccuguaaauaa

SEQ ID NO: 781586 - RNA, 19 nt, Homo sapiens
  misc_RNA (1)...(19): siRNA sense strand
gcauauucccuugaacuuu

SEQ ID NO: 781587 - RNA, 19 nt, Homo sapiens
  misc_RNA (1)...(19): siRNA sense strand
gaaccuuguguauuaaaga

SEQ ID NO: 781588 - RNA, 19 nt, Homo sapiens
  misc_RNA (1)...(19): siRNA sense strand
agaacaggaucuacaaaca

SEQ ID NO: 781589 - RNA, 19 nt, Homo sapiens
  misc_RNA (1)...(19): siRNA sense strand
cagaagauagcgcuaaaug

SEQ ID NO: 781590 - RNA, 19 nt, Homo sapiens
  misc_RNA (1)...(19): siRNA sense strand
aaaggagugguucugauua

SEQ ID NO: 781591 - RNA, 19 nt, Homo sapiens
  misc_RNA (1)...(19): siRNA sense strand
gaagauucacuccucuaga

SEQ ID NO: 781592 - RNA, 19 nt, Homo sapiens
  misc_RNA (1)...(19): siRNA sense strand
uuuagcugcuugccacuua

SEQ ID NO: 781593 - RNA, 19 nt, Homo sapiens
  misc_RNA (1)...(19): siRNA sense strand
acauuaugcgcuuguauua

SEQ ID NO: 781594 - RNA, 19 nt, Homo sapiens
  misc_RNA (1)...(19): siRNA sense strand
ggaccaaauucuggcucua

SEQ ID NO: 781595 - RNA, 19 nt, Homo sapiens
  misc_RNA (1)...(19): siRNA sense strand
gggccagucugaagcucua

SEQ ID NO: 781596 - RNA, 19 nt, Homo sapiens
  misc_RNA (1)...(19): siRNA sense strand
cuaaacaucagccagauau

SEQ ID NO: 781597 - RNA, 19 nt, Homo sapiens
  misc_RNA (1)...(19): siRNA sense strand
aaacaucagccagauauau

SEQ ID NO: 781598 - RNA, 19 nt, Homo sapiens
  misc_RNA (1)...(19): siRNA sense strand
gaacuagaaacagaugaga

SEQ ID NO: 781599 - RNA, 19 nt, Homo sapiens
  misc_RNA (1)...(19): siRNA sense strand
gggaguuauucaucuauuc

SEQ ID NO: 781600 - RNA, 19 nt, Homo sapiens
  misc_RNA (1)...(19): siRNA sense strand
gaccaaauucuggcucuaa

SEQ ID NO: 781601 - RNA, 19 nt, Homo sapiens
  misc_RNA (1)...(19): siRNA sense strand
aauauagaaucccagaaga

SEQ ID NO: 781602 - RNA, 19 nt, Homo sapiens
  misc_RNA (1)...(19): siRNA sense strand
caaagcugauagagaagau

SEQ ID NO: 781603 - RNA, 19 nt, Homo sapiens
  misc_RNA (1)...(19): siRNA sense strand
gaagcuguaccucugaaga

SEQ ID NO: 781604 - RNA, 19 nt, Homo sapiens
  misc_RNA (1)...(19): siRNA sense strand
ugaagaacauacaggaucu

SEQ ID NO: 781605 - RNA, 19 nt, Homo sapiens
  misc_RNA (1)...(19): siRNA sense strand
ggagauaagaauaccugaa

SEQ ID NO: 781606 - RNA, 19 nt, Homo sapiens
  misc_RNA (1)...(19): siRNA sense strand
gaugagaacaggaucuaca

SEQ ID NO: 781607 - RNA, 19 nt, Homo sapiens
  misc_RNA (1)...(19): siRNA sense strand
ugauuuaccugggauuuaa

SEQ ID NO: 781608 - RNA, 19 nt, Homo sapiens
  misc_RNA (1)...(19): siRNA sense strand
uuaucccucuugugauuua

SEQ ID NO: 781609 - RNA, 19 nt, Homo sapiens
  misc_RNA (1)...(19): siRNA sense strand
cuuuaucccucuugugauu

SEQ ID NO: 781610 - RNA, 19 nt, Homo sapiens
  misc_RNA (1)...(19): siRNA sense strand
caaagaggccaagcagaga

SEQ ID NO: 781611 - RNA, 19 nt, Homo sapiens
  misc_RNA (1)...(19): siRNA sense strand
gugauuuaccugggauuua

SEQ ID NO: 781612 - RNA, 19 nt, Homo sapiens
  misc_RNA (1)...(19): siRNA sense strand
ggcuuuaucccucuuguga

SEQ ID NO: 781613 - RNA, 19 nt, Homo sapiens
  misc_RNA (1)...(19): siRNA sense strand
cggaaugccugaaccaacu

SEQ ID NO: 781614 - RNA, 19 nt, Homo sapiens
  misc_RNA (1)...(19): siRNA sense strand
gggugcagaucccggaaug

SEQ ID NO: 781615 - RNA, 19 nt, Homo sapiens
  misc_RNA (1)...(19): siRNA sense strand
gccauucgcuggggcuuua

SEQ ID NO: 781616 - RNA, 19 nt, Homo sapiens
  misc_RNA (1)...(19): siRNA sense strand
ggagccaguuugccauucg

SEQ ID NO: 781617 - RNA, 19 nt, Homo sapiens
  misc_RNA (1)...(19): siRNA sense strand
gacuacagcagcucuucaa

SEQ ID NO: 781618 - RNA, 19 nt, Homo sapiens
  misc_RNA (1)...(19): siRNA sense strand
gggagccaguuugccauuc

SEQ ID NO: 781619 - RNA, 19 nt, Homo sapiens
  misc_RNA (1)...(19): siRNA sense strand
gagccuacuuuggggauaa

SEQ ID NO: 781620 - RNA, 19 nt, Homo sapiens
  misc_RNA (1)...(19): siRNA sense strand
gggaaaagcugaccaauua

SEQ ID NO: 781621 - RNA, 19 nt, Homo sapiens
  misc_RNA (1)...(19): siRNA sense strand
ugacauggcuagcuugaua

SEQ ID NO: 781622 - RNA, 19 nt, Homo sapiens
  misc_RNA (1)...(19): siRNA sense strand
gaacuggacugagcuuuga

SEQ ID NO: 781623 - RNA, 19 nt, Homo sapiens
  misc_RNA (1)...(19): siRNA sense strand
caaauuaggucacuacaca

SEQ ID NO: 781624 - RNA, 19 nt, Homo sapiens
  misc_RNA (1)...(19): siRNA sense strand
gcaauaaccacaugaaaga

SEQ ID NO: 781625 - RNA, 19 nt, Homo sapiens
  misc_RNA (1)...(19): siRNA sense strand
aagaagcaguuacaaguua

SEQ ID NO: 781626 - RNA, 19 nt, Homo sapiens
  misc_RNA (1)...(19): siRNA sense strand
caagaaaguuuggaaguug

SEQ ID NO: 781627 - RNA, 19 nt, Homo sapiens
  misc_RNA (1)...(19): siRNA sense strand
gaacuuauagagcaacuga

SEQ ID NO: 781628 - RNA, 19 nt, Homo sapiens
  misc_RNA (1)...(19): siRNA sense strand
gaagaagcaguuacaaguu

SEQ ID NO: 781629 - RNA, 19 nt, Homo sapiens
  misc_RNA (1)...(19): siRNA sense strand
acagaaauguuuaccaguu

SEQ ID NO: 781630 - RNA, 19 nt, Homo sapiens
  misc_RNA (1)...(19): siRNA sense strand
ucacugccuugaauaaauu

SEQ ID NO: 781631 - RNA, 19 nt, Homo sapiens
  misc_RNA (1)...(19): siRNA sense strand
gcaccugguuuaugcaguu

SEQ ID NO: 781632 - RNA, 19 nt, Homo sapiens
  misc_RNA (1)...(19): siRNA sense strand
gcaguuacaaguuaucaaa

SEQ ID NO: 781633 - RNA, 19 nt, Homo sapiens
  misc_RNA (1)...(19): siRNA sense strand
cagcuaaugucaggaauga

SEQ ID NO: 781634 - RNA, 19 nt, Homo sapiens
  misc_RNA (1)...(19): siRNA sense strand
ucacagccuuugacagaaa

SEQ ID NO: 781635 - RNA, 19 nt, Homo sapiens
  misc_RNA (1)...(19): siRNA sense strand
auggcuagcuugauaaaua

SEQ ID NO: 781636 - RNA, 19 nt, Homo sapiens
  misc_RNA (1)...(19): siRNA sense strand
aauccagccuucauuagua

SEQ ID NO: 781637 - RNA, 19 nt, Homo sapiens
  misc_RNA (1)...(19): siRNA sense strand
ccaauaaugcaguuuacua

SEQ ID NO: 781638 - RNA, 19 nt, Homo sapiens
  misc_RNA (1)...(19): siRNA sense strand
cagaugcgauaaaggauug

SEQ ID NO: 781639 - RNA, 19 nt, Homo sapiens
  misc_RNA (1)...(19): siRNA sense strand
gaaaauagcagaacagaag

SEQ ID NO: 781640 - RNA, 19 nt, Homo sapiens
  misc_RNA (1)...(19): siRNA sense strand
acaagaaaguuuggaaguu

SEQ ID NO: 781641 - RNA, 19 nt, Homo sapiens
  misc_RNA (1)...(19): siRNA sense strand
uggcuagcuugauaaauaa

SEQ ID NO: 781642 - RNA, 19 nt, Homo sapiens
  misc_RNA (1)...(19): siRNA sense strand
gcaguuuacuauugcaaca

SEQ ID NO: 781643 - RNA, 19 nt, Homo sapiens
  misc_RNA (1)...(19): siRNA sense strand
ucaagcaccugguuuaugc

SEQ ID NO: 781644 - RNA, 19 nt, Homo sapiens
  misc_RNA (1)...(19): siRNA sense strand
cagaaauguuuaccaguuc

SEQ ID NO: 781645 - RNA, 19 nt, Homo sapiens
  misc_RNA (1)...(19): siRNA sense strand
caacagcuaaugucaggaa

SEQ ID NO: 781646 - RNA, 19 nt, Homo sapiens
  misc_RNA (1)...(19): siRNA sense strand
ggaacuggacugagcuuug

SEQ ID NO: 781647 - RNA, 19 nt, Homo sapiens
  misc_RNA (1)...(19): siRNA sense strand
cuacacagaugcgauaaag

SEQ ID NO: 781648 - RNA, 19 nt, Homo sapiens
  misc_RNA (1)...(19): siRNA sense strand
uagagcaacugagaaauca

SEQ ID NO: 781649 - RNA, 19 nt, Homo sapiens
  misc_RNA (1)...(19): siRNA sense strand
gcuaaugucaggaaugaug

SEQ ID NO: 781650 - RNA, 19 nt, Homo sapiens
  misc_RNA (1)...(19): siRNA sense strand
agagagguauccaguccua

SEQ ID NO: 781651 - RNA, 19 nt, Homo sapiens
  misc_RNA (1)...(19): siRNA sense strand
ugaagaagcaguuacaagu

SEQ ID NO: 781652 - RNA, 19 nt, Homo sapiens
  misc_RNA (1)...(19): siRNA sense strand
ucacuacacagaugcgaua

SEQ ID NO: 781653 - RNA, 19 nt, Homo sapiens
  misc_RNA (1)...(19): siRNA sense strand
gcaacaaaauccugaacuu

SEQ ID NO: 781654 - RNA, 19 nt, Homo sapiens
  misc_RNA (1)...(19): siRNA sense strand
acacagaugcgauaaagga

SEQ ID NO: 781655 - RNA, 19 nt, Homo sapiens
  misc_RNA (1)...(19): siRNA sense strand
gauacacaccuagcaguuu

SEQ ID NO: 781656 - RNA, 19 nt, Homo sapiens
  misc_RNA (1)...(19): siRNA sense strand
cagcagauacagcaacaaa

SEQ ID NO: 781657 - RNA, 19 nt, Homo sapiens
  misc_RNA (1)...(19): siRNA sense strand
gaaaagcugaccaauuaaa

SEQ ID NO: 781658 - RNA, 19 nt, Homo sapiens
  misc_RNA (1)...(19): siRNA sense strand
gaucagcccagaagauaca

SEQ ID NO: 781659 - RNA, 19 nt, Homo sapiens
  misc_RNA (1)...(19): siRNA sense strand
caacaaaauccugaacuua

SEQ ID NO: 781660 - RNA, 19 nt, Homo sapiens
  misc_RNA (1)...(19): siRNA sense strand
acacacaggcaauagaauu

SEQ ID NO: 781661 - RNA, 19 nt, Homo sapiens
  misc_RNA (1)...(19): siRNA sense strand
ugaaggcaauaaccacaug

SEQ ID NO: 781662 - RNA, 19 nt, Homo sapiens
  misc_RNA (1)...(19): siRNA sense strand
acacuuacaccucggauga

SEQ ID NO: 781663 - RNA, 19 nt, Homo sapiens
  misc_RNA (1)...(19): siRNA sense strand
uaguauggcggcaaguuua

SEQ ID NO: 781664 - RNA, 19 nt, Homo sapiens
  misc_RNA (1)...(19): siRNA sense strand
caccucggaugaacaagaa

SEQ ID NO: 781665 - RNA, 19 nt, Homo sapiens
  misc_RNA (1)...(19): siRNA sense strand
cagaacagaaguuaagaga

SEQ ID NO: 781666 - RNA, 19 nt, Homo sapiens
  misc_RNA (1)...(19): siRNA sense strand
ggaugaacaagaaaguuug

SEQ ID NO: 781667 - RNA, 19 nt, Homo sapiens
  misc_RNA (1)...(19): siRNA sense strand
caaaaggcauuagaucuug

SEQ ID NO: 781668 - RNA, 19 nt, Homo sapiens
  misc_RNA (1)...(19): siRNA sense strand
cccagaagauacacaccua

SEQ ID NO: 781669 - RNA, 19 nt, Homo sapiens
  misc_RNA (1)...(19): siRNA sense strand
aagaucagcccagaagaua

SEQ ID NO: 781670 - RNA, 19 nt, Homo sapiens
  misc_RNA (1)...(19): siRNA sense strand
uaaauaauccagccuucau

SEQ ID NO: 781671 - RNA, 19 nt, Homo sapiens
  misc_RNA (1)...(19): siRNA sense strand
cggaugaacaagaaaguuu

SEQ ID NO: 781672 - RNA, 19 nt, Homo sapiens
  misc_RNA (1)...(19): siRNA sense strand
gcgauaaaggauugugaaa

SEQ ID NO: 781673 - RNA, 19 nt, Homo sapiens
  misc_RNA (1)...(19): siRNA sense strand
cuaucaagcaccugguuua

SEQ ID NO: 781674 - RNA, 19 nt, Homo sapiens
  misc_RNA (1)...(19): siRNA sense strand
guuuggaaguugcaauuca

SEQ ID NO: 781675 - RNA, 19 nt, Homo sapiens
  misc_RNA (1)...(19): siRNA sense strand
gcuuugacauggcuagcuu

SEQ ID NO: 781676 - RNA, 19 nt, Homo sapiens
  misc_RNA (1)...(19): siRNA sense strand
uccuauaagucaaaucuga

SEQ ID NO: 781677 - RNA, 19 nt, Homo sapiens
  misc_RNA (1)...(19): siRNA sense strand
agaagcaguuacaaguuau

SEQ ID NO: 781678 - RNA, 19 nt, Homo sapiens
  misc_RNA (1)...(19): siRNA sense strand
uaagaucagcccagaagau

SEQ ID NO: 781679 - RNA, 19 nt, Homo sapiens
  misc_RNA (1)...(19): siRNA sense strand
auacacaccuagcaguuuc

SEQ ID NO: 781680 - RNA, 19 nt, Homo sapiens
  misc_RNA (1)...(19): siRNA sense strand
ggcaauaaccacaugaaag

SEQ ID NO: 781681 - RNA, 19 nt, Homo sapiens
  misc_RNA (1)...(19): siRNA sense strand
gagcaacugagaaaucaca

SEQ ID NO: 781682 - RNA, 19 nt, Homo sapiens
  misc_RNA (1)...(19): siRNA sense strand
uuauagagcaacugagaaa

SEQ ID NO: 781683 - RNA, 19 nt, Homo sapiens
  misc_RNA (1)...(19): siRNA sense strand
caggaaugaugacaaaugc

SEQ ID NO: 781684 - RNA, 19 nt, Homo sapiens
  misc_RNA (1)...(19): siRNA sense strand
caaguucaacagcuaaugu

SEQ ID NO: 781685 - RNA, 19 nt, Homo sapiens
  misc_RNA (1)...(19): siRNA sense strand
gaaggcaauaaccacauga

SEQ ID NO: 781686 - RNA, 19 nt, Homo sapiens
  misc_RNA (1)...(19): siRNA sense strand
ucaggaaugaugacaaaug

SEQ ID NO: 781687 - RNA, 19 nt, Homo sapiens
  misc_RNA (1)...(19): siRNA sense strand
uagcagaacagaaguuaag

SEQ ID NO: 781688 - RNA, 19 nt, Homo sapiens
  misc_RNA (1)...(19): siRNA sense strand
gagcaaauuaggucacuac

SEQ ID NO: 781689 - RNA, 19 nt, Homo sapiens
  misc_RNA (1)...(19): siRNA sense strand
uuaggucacuacacagaug

SEQ ID NO: 781690 - RNA, 19 nt, Homo sapiens
  misc_RNA (1)...(19): siRNA sense strand
ggcccucacugccuugaau

SEQ ID NO: 781691 - RNA, 19 nt, Homo sapiens
  misc_RNA (1)...(19): siRNA sense strand
gcaguuauucguuucuuac

SEQ ID NO: 781692 - RNA, 19 nt, Homo sapiens
  misc_RNA (1)...(19): siRNA sense strand
uuucacagccuuugacaga

SEQ ID NO: 781693 - RNA, 19 nt, Homo sapiens
  misc_RNA (1)...(19): siRNA sense strand
aauagcagaacagaaguua

SEQ ID NO: 781694 - RNA, 19 nt, Homo sapiens
  misc_RNA (1)...(19): siRNA sense strand
ugcaguuauucguuucuua

SEQ ID NO: 781695 - RNA, 19 nt, Homo sapiens
  misc_RNA (1)...(19): siRNA sense strand
auaaccacaugaaagaaga

SEQ ID NO: 781696 - RNA, 19 nt, Homo sapiens
  misc_RNA (1)...(19): siRNA sense strand
gcagauacagcaacaaaau

SEQ ID NO: 781697 - RNA, 19 nt, Homo sapiens
  misc_RNA (1)...(19): siRNA sense strand
gggaccugcugcuggaguu

SEQ ID NO: 781698 - RNA, 19 nt, Homo sapiens
  misc_RNA (1)...(19): siRNA sense strand
uuacacacaggcaauagaa

SEQ ID NO: 781699 - RNA, 19 nt, Homo sapiens
  misc_RNA (1)...(19): siRNA sense strand
uaaugcaguuuacuauugc

SEQ ID NO: 781700 - RNA, 19 nt, Homo sapiens
  misc_RNA (1)...(19): siRNA sense strand
cggcaaguuuaaugcagaa

SEQ ID NO: 781701 - RNA, 19 nt, Homo sapiens
  misc_RNA (1)...(19): siRNA sense strand
gacauggcuagcuugauaa

SEQ ID NO: 781702 - RNA, 19 nt, Homo sapiens
  misc_RNA (1)...(19): siRNA sense strand
ugaacaagaaaguuuggaa

SEQ ID NO: 781703 - RNA, 19 nt, Homo sapiens
  misc_RNA (1)...(19): siRNA sense strand
caccugguuuaugcaguua

SEQ ID NO: 781704 - RNA, 19 nt, Homo sapiens
  misc_RNA (1)...(19): siRNA sense strand
gcaguuucacagccuuuga

SEQ ID NO: 781705 - RNA, 19 nt, Homo sapiens
  misc_RNA (1)...(19): siRNA sense strand
ccugguuuaugcaguuauu

SEQ ID NO: 781706 - RNA, 19 nt, Homo sapiens
  misc_RNA (1)...(19): siRNA sense strand
caaggccuaugggagaaug

SEQ ID NO: 781707 - RNA, 19 nt, Homo sapiens
  misc_RNA (1)...(19): siRNA sense strand
gggaacaaagucagaugga

SEQ ID NO: 781708 - RNA, 19 nt, Homo sapiens
  misc_RNA (1)...(19): siRNA sense strand
gccuuugacagaaauguuu

SEQ ID NO: 781709 - RNA, 19 nt, Homo sapiens
  misc_RNA (1)...(19): siRNA sense strand
aaauaauccagccuucauu

SEQ ID NO: 781710 - RNA, 19 nt, Homo sapiens
  misc_RNA (1)...(19): siRNA sense strand
caauaaccacaugaaagaa

SEQ ID NO: 781711 - RNA, 19 nt, Homo sapiens
  misc_RNA (1)...(19): siRNA sense strand
ggaucccaauaaugcaguu

SEQ ID NO: 781712 - RNA, 19 nt, Homo sapiens
  misc_RNA (1)...(19): siRNA sense strand
gcagaacagaaguuaagag

SEQ ID NO: 781713 - RNA, 19 nt, Homo sapiens
  misc_RNA (1)...(19): siRNA sense strand
cucacugccuugaauaaau

SEQ ID NO: 781714 - RNA, 19 nt, Homo sapiens
  misc_RNA (1)...(19): siRNA sense strand
ugcaguggauuguuacaca

SEQ ID NO: 781715 - RNA, 19 nt, Homo sapiens
  misc_RNA (1)...(19): siRNA sense strand
accaguuccuucuguaaga

SEQ ID NO: 781716 - RNA, 19 nt, Homo sapiens
  misc_RNA (1)...(19): siRNA sense strand
uuaguauggcggcaaguuu

SEQ ID NO: 781717 - RNA, 19 nt, Homo sapiens
  misc_RNA (1)...(19): siRNA sense strand
uuacaccucggaugaacaa

SEQ ID NO: 781718 - RNA, 19 nt, Homo sapiens
  misc_RNA (1)...(19): siRNA sense strand
aaucacauccggagcagau

SEQ ID NO: 781719 - RNA, 19 nt, Homo sapiens
  misc_RNA (1)...(19): siRNA sense strand
gaaguuaagagagguaucc

SEQ ID NO: 781720 - RNA, 19 nt, Homo sapiens
  misc_RNA (1)...(19): siRNA sense strand
gaagaaagcuauggcaauu

SEQ ID NO: 781721 - RNA, 19 nt, Homo sapiens
  misc_RNA (1)...(19): siRNA sense strand
gaaauagccucugaaauuc

SEQ ID NO: 781722 - RNA, 19 nt, Homo sapiens
  misc_RNA (1)...(19): siRNA sense strand
agaaauagccucugaaauu

SEQ ID NO: 781723 - RNA, 19 nt, Homo sapiens
  misc_RNA (1)...(19): siRNA sense strand
gcacuuggaggaccauuua

SEQ ID NO: 781724 - RNA, 19 nt, Homo sapiens
  misc_RNA (1)...(19): siRNA sense strand
gcaggaguuuguuuaauga

SEQ ID NO: 781725 - RNA, 19 nt, Homo sapiens
  misc_RNA (1)...(19): siRNA sense strand
caucgaaucuugcgaacaa

SEQ ID NO: 781726 - RNA, 19 nt, Homo sapiens
  misc_RNA (1)...(19): siRNA sense strand
uagaaaugcccuagaaaua

SEQ ID NO: 781727 - RNA, 19 nt, Homo sapiens
  misc_RNA (1)...(19): siRNA sense strand
caaagcgcauggagacuaa

SEQ ID NO: 781728 - RNA, 19 nt, Homo sapiens
  misc_RNA (1)...(19): siRNA sense strand
gaucaauggucucagaaau

SEQ ID NO: 781729 - RNA, 19 nt, Homo sapiens
  misc_RNA (1)...(19): siRNA sense strand
gaauuugaagccuacauua

SEQ ID NO: 781730 - RNA, 19 nt, Homo sapiens
  misc_RNA (1)...(19): siRNA sense strand
gaacauggaauugugguuu

SEQ ID NO: 781731 - RNA, 19 nt, Homo sapiens
  misc_RNA (1)...(19): siRNA sense strand
gcacaggcacaaaguauau

SEQ ID NO: 781732 - RNA, 19 nt, Homo sapiens
  misc_RNA (1)...(19): siRNA sense strand
ggagugacccugaauguuc

SEQ ID NO: 781733 - RNA, 19 nt, Homo sapiens
  misc_RNA (1)...(19): siRNA sense strand
gaaaugcccuagaaauagc

SEQ ID NO: 781734 - RNA, 19 nt, Homo sapiens
  misc_RNA (1)...(19): siRNA sense strand
ggcaauugcugaugcuuug

SEQ ID NO: 781735 - RNA, 19 nt, Homo sapiens
  misc_RNA (1)...(19): siRNA sense strand
ucaauggucucagaaauuc

SEQ ID NO: 781736 - RNA, 19 nt, Homo sapiens
  misc_RNA (1)...(19): siRNA sense strand
gcaaagcgcauggagacua

SEQ ID NO: 781737 - RNA, 19 nt, Homo sapiens
  misc_RNA (1)...(19): siRNA sense strand
gaucagaaccgggaauuca

SEQ ID NO: 781738 - RNA, 19 nt, Homo sapiens
  misc_RNA (1)...(19): siRNA sense strand
ggaauuugaagccuacauu

SEQ ID NO: 781739 - RNA, 19 nt, Homo sapiens
  misc_RNA (1)...(19): siRNA sense strand
uaagaaagcccacaaaucc

SEQ ID NO: 781740 - RNA, 19 nt, Homo sapiens
  misc_RNA (1)...(19): siRNA sense strand
ggaaccacaucgugcacuu

SEQ ID NO: 781741 - RNA, 19 nt, Homo sapiens
  misc_RNA (1)...(19): siRNA sense strand
gcgaacaacacgauacuug

SEQ ID NO: 781742 - RNA, 19 nt, Homo sapiens
  misc_RNA (1)...(19): siRNA sense strand
gaauugugguuuucucuuu

SEQ ID NO: 781743 - RNA, 19 nt, Homo sapiens
  misc_RNA (1)...(19): siRNA sense strand
ggaaagcacaggcacaaag

SEQ ID NO: 781744 - RNA, 19 nt, Homo sapiens
  misc_RNA (1)...(19): siRNA sense strand
gagcuggagugacccugaa

SEQ ID NO: 781745 - RNA, 19 nt, Homo sapiens
  misc_RNA (1)...(19): siRNA sense strand
gaaagcacaggcacaaagu

SEQ ID NO: 781746 - RNA, 19 nt, Homo sapiens
  misc_RNA (1)...(19): siRNA sense strand
ucucagaugccaugacuuu

SEQ ID NO: 781747 - RNA, 19 nt, Homo sapiens
  misc_RNA (1)...(19): siRNA sense strand
acacaucaauuugguuguu

SEQ ID NO: 781748 - RNA, 19 nt, Homo sapiens
  misc_RNA (1)...(19): siRNA sense strand
cagggaagcugcugguagu

SEQ ID NO: 781749 - RNA, 19 nt, Homo sapiens
  misc_RNA (1)...(19): siRNA sense strand
ugcaggaguuuguuuaaug

SEQ ID NO: 781750 - RNA, 19 nt, Homo sapiens
  misc_RNA (1)...(19): siRNA sense strand
ggcaugaggugguuguagu

SEQ ID NO: 781751 - RNA, 19 nt, Homo sapiens
  misc_RNA (1)...(19): siRNA sense strand
cgugauugguuuccucuug

SEQ ID NO: 781752 - RNA, 19 nt, Homo sapiens
  misc_RNA (1)...(19): siRNA sense strand
gacccugaauguucuggaa

SEQ ID NO: 781753 - RNA, 19 nt, Homo sapiens
  misc_RNA (1)...(19): siRNA sense strand
cagaugccaugacuuucaa

SEQ ID NO: 781754 - RNA, 19 nt, Homo sapiens
  misc_RNA (1)...(19): siRNA sense strand
ugaggugguuguagucaug

SEQ ID NO: 781755 - RNA, 19 nt, Homo sapiens
  misc_RNA (1)...(19): siRNA sense strand
cccacgaccucaccuggua

SEQ ID NO: 781756 - RNA, 19 nt, Homo sapiens
  misc_RNA (1)...(19): siRNA sense strand
gugaucagauggacaaugc

SEQ ID NO: 781757 - RNA, 19 nt, Homo sapiens
  misc_RNA (1)...(19): siRNA sense strand
gaucuucauuggugguauc

SEQ ID NO: 781758 - RNA, 19 nt, Homo sapiens
  misc_RNA (1)...(19): siRNA sense strand
cuagaaauagccucugaaa

SEQ ID NO: 781759 - RNA, 19 nt, Homo sapiens
  misc_RNA (1)...(19): siRNA sense strand
uggcuuaauuguugcuaaa

SEQ ID NO: 781760 - RNA, 19 nt, Homo sapiens
  misc_RNA (1)...(19): siRNA sense strand
gaugacccgugccuuuauc

SEQ ID NO: 781761 - RNA, 19 nt, Homo sapiens
  misc_RNA (1)...(19): siRNA sense strand
gaucagauggacaaugcaa

SEQ ID NO: 781762 - RNA, 19 nt, Homo sapiens
  misc_RNA (1)...(19): siRNA sense strand
cuucaucaccuuuaaaugu

SEQ ID NO: 781763 - RNA, 19 nt, Homo sapiens
  misc_RNA (1)...(19): siRNA sense strand
cguacacucuggaagauca

SEQ ID NO: 781764 - RNA, 19 nt, Homo sapiens
  misc_RNA (1)...(19): siRNA sense strand
gaaauuccagagaagaaag

SEQ ID NO: 781765 - RNA, 19 nt, Homo sapiens
  misc_RNA (1)...(19): siRNA sense strand
agaaaugcccuagaaauag

SEQ ID NO: 781766 - RNA, 19 nt, Homo sapiens
  misc_RNA (1)...(19): siRNA sense strand
uggagaacauggaauugug

SEQ ID NO: 781767 - RNA, 19 nt, Homo sapiens
  misc_RNA (1)...(19): siRNA sense strand
ccuuggacgugauugguuu

SEQ ID NO: 781768 - RNA, 19 nt, Homo sapiens
  misc_RNA (1)...(19): siRNA sense strand
ccgaugacccgugccuuua

SEQ ID NO: 781769 - RNA, 19 nt, Homo sapiens
  misc_RNA (1)...(19): siRNA sense strand
agaaagcuauggcaauugc

SEQ ID NO: 781770 - RNA, 19 nt, Homo sapiens
  misc_RNA (1)...(19): siRNA sense strand
cagaaauuccagagaagaa

SEQ ID NO: 781771 - RNA, 19 nt, Homo sapiens
  misc_RNA (1)...(19): siRNA sense strand
uuugaagccuacauuaaug

SEQ ID NO: 781772 - RNA, 19 nt, Homo sapiens
  misc_RNA (1)...(19): siRNA sense strand
ggaucaauggucucagaaa

SEQ ID NO: 781773 - RNA, 19 nt, Homo sapiens
  misc_RNA (1)...(19): siRNA sense strand
gagugacccugaauguucu

SEQ ID NO: 781774 - RNA, 19 nt, Homo sapiens
  misc_RNA (1)...(19): siRNA sense strand
guuaagaaagcccacaaau

SEQ ID NO: 781775 - RNA, 19 nt, Homo sapiens
  misc_RNA (1)...(19): siRNA sense strand
cuuggaggaccauuuauuu

SEQ ID NO: 781776 - RNA, 19 nt, Homo sapiens
  misc_RNA (1)...(19): siRNA sense strand
uuaagaaagcccacaaauc

SEQ ID NO: 781777 - RNA, 19 nt, Homo sapiens
  misc_RNA (1)...(19): siRNA sense strand
gcacagugaagacuuacuc

SEQ ID NO: 781778 - RNA, 19 nt, Homo sapiens
  misc_RNA (1)...(19): siRNA sense strand
ccucugaaauucuccaaac

SEQ ID NO: 781779 - RNA, 19 nt, Homo sapiens
  misc_RNA (1)...(19): siRNA sense strand
uuagaaaugcccuagaaau

SEQ ID NO: 781780 - RNA, 19 nt, Homo sapiens
  misc_RNA (1)...(19): siRNA sense strand
gcccugcuccucuuuccua

SEQ ID NO: 781781 - RNA, 19 nt, Homo sapiens
  misc_RNA (1)...(19): siRNA sense strand
acaaauccaagacccauug

SEQ ID NO: 781782 - RNA, 19 nt, Homo sapiens
  misc_RNA (1)...(19): siRNA sense strand
gugaugaugcccuuguuug

SEQ ID NO: 781783 - RNA, 19 nt, Homo sapiens
  misc_RNA (1)...(19): siRNA sense strand
ucagaugccaugacuuuca

SEQ ID NO: 781784 - RNA, 19 nt, Homo sapiens
  misc_RNA (1)...(19): siRNA sense strand
gcauugcaggaguuuguuu

SEQ ID NO: 781785 - RNA, 19 nt, Homo sapiens
  misc_RNA (1)...(19): siRNA sense strand
gaacccgaccaucgaaucu

SEQ ID NO: 781786 - RNA, 19 nt, Homo sapiens
  misc_RNA (1)...(19): siRNA sense strand
ugggaucaauggucucaga

SEQ ID NO: 781787 - RNA, 19 nt, Homo sapiens
  misc_RNA (1)...(19): siRNA sense strand
gaccagccccguuccuuua

SEQ ID NO: 781788 - RNA, 19 nt, Homo sapiens
  misc_RNA (1)...(19): siRNA sense strand
guucucagaugccaugacu

SEQ ID NO: 781789 - RNA, 19 nt, Homo sapiens
  misc_RNA (1)...(19): siRNA sense strand
cauugcaggaguuuguuua

SEQ ID NO: 781790 - RNA, 19 nt, Homo sapiens
  misc_RNA (1)...(19): siRNA sense strand
cugcuccucuuuccuaugu

SEQ ID NO: 781791 - RNA, 19 nt, Homo sapiens
  misc_RNA (1)...(19): siRNA sense strand
agaaagcccacaaauccaa

SEQ ID NO: 781792 - RNA, 19 nt, Homo sapiens
  misc_RNA (1)...(19): siRNA sense strand
cauugccuauggaauuuga

SEQ ID NO: 781793 - RNA, 19 nt, Homo sapiens
  misc_RNA (1)...(19): siRNA sense strand
gaaccacaucgugcacuug

SEQ ID NO: 781794 - RNA, 19 nt, Homo sapiens
  misc_RNA (1)...(19): siRNA sense strand
gaagaucagaaccgggaau

SEQ ID NO: 781795 - RNA, 19 nt, Homo sapiens
  misc_RNA (1)...(19): siRNA sense strand
agaagaaagcuauggcaau

SEQ ID NO: 781796 - RNA, 19 nt, Homo sapiens
  misc_RNA (1)...(19): siRNA sense strand
ugaauguucuggaaaugac

SEQ ID NO: 781797 - RNA, 19 nt, Homo sapiens
  misc_RNA (1)...(19): siRNA sense strand
ggugaugaugcccuuguuu

SEQ ID NO: 781798 - RNA, 19 nt, Homo sapiens
  misc_RNA (1)...(19): siRNA sense strand
agacuuacucaaccucgua

SEQ ID NO: 781799 - RNA, 19 nt, Homo sapiens
  misc_RNA (1)...(19): siRNA sense strand
caacugucaucagggaaag

SEQ ID NO: 781800 - RNA, 19 nt, Homo sapiens
  misc_RNA (1)...(19): siRNA sense strand
ucaucaccuuuaaauguug

SEQ ID NO: 781801 - RNA, 19 nt, Homo sapiens
  misc_RNA (1)...(19): siRNA sense strand
uuaaguggcuaccccaaaa

SEQ ID NO: 781802 - RNA, 19 nt, Homo sapiens
  misc_RNA (1)...(19): siRNA sense strand
ggaacccgaccaucgaauc

SEQ ID NO: 781803 - RNA, 19 nt, Homo sapiens
  misc_RNA (1)...(19): siRNA sense strand
cugcugaccuguggcuuug

SEQ ID NO: 781804 - RNA, 19 nt, Homo sapiens
  misc_RNA (1)...(19): siRNA sense strand
aagcacaggcacaaaguau

SEQ ID NO: 781805 - RNA, 19 nt, Homo sapiens
  misc_RNA (1)...(19): siRNA sense strand
caaauccaagacccauuga

SEQ ID NO: 781806 - RNA, 19 nt, Homo sapiens
  misc_RNA (1)...(19): siRNA sense strand
ccucguacacucuggaaga

SEQ ID NO: 781807 - RNA, 19 nt, Homo sapiens
  misc_RNA (1)...(19): siRNA sense strand
guggcuuaauuguugcuaa

SEQ ID NO: 781808 - RNA, 19 nt, Homo sapiens
  misc_RNA (1)...(19): siRNA sense strand
aaagcacaggcacaaagua

SEQ ID NO: 781809 - RNA, 19 nt, Homo sapiens
  misc_RNA (1)...(19): siRNA sense strand
auugcacagugaagacuua

SEQ ID NO: 781810 - RNA, 19 nt, Homo sapiens
  misc_RNA (1)...(19): siRNA sense strand
ucaacugucaucagggaaa

SEQ ID NO: 781811 - RNA, 19 nt, Homo sapiens
  misc_RNA (1)...(19): siRNA sense strand
cacaucaauuugguuguug

SEQ ID NO: 781812 - RNA, 19 nt, Homo sapiens
  misc_RNA (1)...(19): siRNA sense strand
cccuagaaauagccucuga

SEQ ID NO: 781813 - RNA, 19 nt, Homo sapiens
  misc_RNA (1)...(19): siRNA sense strand
acagugcccugcuccucuu

SEQ ID NO: 781814 - RNA, 19 nt, Homo sapiens
  misc_RNA (1)...(19): siRNA sense strand
acaggcacaaaguauauuu

SEQ ID NO: 781815 - RNA, 19 nt, Homo sapiens
  misc_RNA (1)...(19): siRNA sense strand
uggccuucaucaccuuuaa

SEQ ID NO: 781816 - RNA, 19 nt, Homo sapiens
  misc_RNA (1)...(19): siRNA sense strand
ggguggaguuugugaugag

SEQ ID NO: 781817 - RNA, 19 nt, Homo sapiens
  misc_RNA (1)...(19): siRNA sense strand
ugcagucggugguggagaa

SEQ ID NO: 781818 - RNA, 19 nt, Homo sapiens
  misc_RNA (1)...(19): siRNA sense strand
uuacaaggagaacaucaug

SEQ ID NO: 781819 - RNA, 19 nt, Homo sapiens
  misc_RNA (1)...(19): siRNA sense strand
caucaccuuuaaauguugu

SEQ ID NO: 781820 - RNA, 19 nt, Homo sapiens
  misc_RNA (1)...(19): siRNA sense strand
gaagaaagcuauggcaauu

SEQ ID NO: 781821 - RNA, 19 nt, Homo sapiens
  misc_RNA (1)...(19): siRNA sense strand
gaaauagccucugaaauuc

SEQ ID NO: 781822 - RNA, 19 nt, Homo sapiens
  misc_RNA (1)...(19): siRNA sense strand
agaaauagccucugaaauu

SEQ ID NO: 781823 - RNA, 19 nt, Homo sapiens
  misc_RNA (1)...(19): siRNA sense strand
gcacuuggaggaacauuua

SEQ ID NO: 781824 - RNA, 19 nt, Homo sapiens
  misc_RNA (1)...(19): siRNA sense strand
gcaggaguuuguuuaauga

SEQ ID NO: 781825 - RNA, 19 nt, Homo sapiens
  misc_RNA (1)...(19): siRNA sense strand
caucgaaucuugcgaacaa

SEQ ID NO: 781826 - RNA, 19 nt, Homo sapiens
  misc_RNA (1)...(19): siRNA sense strand
gaucaauggucucagaaau

SEQ ID NO: 781827 - RNA, 19 nt, Homo sapiens
  misc_RNA (1)...(19): siRNA sense strand
caaagcgcauggagacuaa

SEQ ID NO: 781828 - RNA, 19 nt, Homo sapiens
  misc_RNA (1)...(19): siRNA sense strand
gaauuugaagccuacauua

SEQ ID NO: 781829 - RNA, 19 nt, Homo sapiens
  misc_RNA (1)...(19): siRNA sense strand
gaacauggaauugugguuu

SEQ ID NO: 781830 - RNA, 19 nt, Homo sapiens
  misc_RNA (1)...(19): siRNA sense strand
gaaagccagugccuaugga

SEQ ID NO: 781831 - RNA, 19 nt, Homo sapiens
  misc_RNA (1)...(19): siRNA sense strand
ggcaauugcugaugcuuug

SEQ ID NO: 781832 - RNA, 19 nt, Homo sapiens
  misc_RNA (1)...(19): siRNA sense strand
ucaauggucucagaaauuc

SEQ ID NO: 781833 - RNA, 19 nt, Homo sapiens
  misc_RNA (1)...(19): siRNA sense strand
gcaaagcgcauggagacua

SEQ ID NO: 781834 - RNA, 19 nt, Homo sapiens
  misc_RNA (1)...(19): siRNA sense strand
gaccgggaguucaugguuu

SEQ ID NO: 781835 - RNA, 19 nt, Homo sapiens
  misc_RNA (1)...(19): siRNA sense strand
ggaaccacaucaugcacuu

SEQ ID NO: 781836 - RNA, 19 nt, Homo sapiens
  misc_RNA (1)...(19): siRNA sense strand
ggaauuugaagccuacauu

SEQ ID NO: 781837 - RNA, 19 nt, Homo sapiens
  misc_RNA (1)...(19): siRNA sense strand
uaagaaagcccacaaaucc

SEQ ID NO: 781838 - RNA, 19 nt, Homo sapiens
  misc_RNA (1)...(19): siRNA sense strand
gcgaacaacacgauacuug

SEQ ID NO: 781839 - RNA, 19 nt, Homo sapiens
  misc_RNA (1)...(19): siRNA sense strand
gaauugugguuuucucuuu

SEQ ID NO: 781840 - RNA, 19 nt, Homo sapiens
  misc_RNA (1)...(19): siRNA sense strand
gccagugccuauggaauuu

SEQ ID NO: 781841 - RNA, 19 nt, Homo sapiens
  misc_RNA (1)...(19): siRNA sense strand
gagcuggagugacccugaa

SEQ ID NO: 781842 - RNA, 19 nt, Homo sapiens
  misc_RNA (1)...(19): siRNA sense strand
acaaguucauccaauggua

SEQ ID NO: 781843 - RNA, 19 nt, Homo sapiens
  misc_RNA (1)...(19): siRNA sense strand
uuaacaaguucauccaaug

SEQ ID NO: 781844 - RNA, 19 nt, Homo sapiens
  misc_RNA (1)...(19): siRNA sense strand
cauacacucuggaggauca

SEQ ID NO: 781845 - RNA, 19 nt, Homo sapiens
  misc_RNA (1)...(19): siRNA sense strand
acacaucaauuugguuguu

SEQ ID NO: 781846 - RNA, 19 nt, Homo sapiens
  misc_RNA (1)...(19): siRNA sense strand
cagggaagcugcugguagu

SEQ ID NO: 781847 - RNA, 19 nt, Homo sapiens
  misc_RNA (1)...(19): siRNA sense strand
ugcaggaguuuguuuaaug

SEQ ID NO: 781848 - RNA, 19 nt, Homo sapiens
  misc_RNA (1)...(19): siRNA sense strand
ggaaagccagugccuaugg

SEQ ID NO: 781849 - RNA, 19 nt, Homo sapiens
  misc_RNA (1)...(19): siRNA sense strand
ucucagacgccaugacuuu

SEQ ID NO: 781850 - RNA, 19 nt, Homo sapiens
  misc_RNA (1)...(19): siRNA sense strand
cgugauugguuuccucuug

SEQ ID NO: 781851 - RNA, 19 nt, Homo sapiens
  misc_RNA (1)...(19): siRNA sense strand
gaucuucauuggugguauc

SEQ ID NO: 781852 - RNA, 19 nt, Homo sapiens
  misc_RNA (1)...(19): siRNA sense strand
cccacgaccucaccuggua

SEQ ID NO: 781853 - RNA, 19 nt, Homo sapiens
  misc_RNA (1)...(19): siRNA sense strand
gugaucagauggacaaugc

SEQ ID NO: 781854 - RNA, 19 nt, Homo sapiens
  misc_RNA (1)...(19): siRNA sense strand
gaagugcauuuucucuauu

SEQ ID NO: 781855 - RNA, 19 nt, Homo sapiens
  misc_RNA (1)...(19): siRNA sense strand
gaugacccgugccuuuauc

SEQ ID NO: 781856 - RNA, 19 nt, Homo sapiens
  misc_RNA (1)...(19): siRNA sense strand
gaugggagccacugguuca

SEQ ID NO: 781857 - RNA, 19 nt, Homo sapiens
  misc_RNA (1)...(19): siRNA sense strand
gaucagauggacaaugcaa

SEQ ID NO: 781858 - RNA, 19 nt, Homo sapiens
  misc_RNA (1)...(19): siRNA sense strand
cuucaucaccuuuaaaugu

SEQ ID NO: 781859 - RNA, 19 nt, Homo sapiens
  misc_RNA (1)...(19): siRNA sense strand
ugaaugcucuggaaaugac

SEQ ID NO: 781860 - RNA, 19 nt, Homo sapiens
  misc_RNA (1)...(19): siRNA sense strand
gacccugaaugcucuggaa

SEQ ID NO: 781861 - RNA, 19 nt, Homo sapiens
  misc_RNA (1)...(19): siRNA sense strand
agacuuacucaaccucaua

SEQ ID NO: 781862 - RNA, 19 nt, Homo sapiens
  misc_RNA (1)...(19): siRNA sense strand
ccugaaugcucuggaaaug

SEQ ID NO: 781863 - RNA, 19 nt, Homo sapiens
  misc_RNA (1)...(19): siRNA sense strand
gaaauuccagagaagaaag

SEQ ID NO: 781864 - RNA, 19 nt, Homo sapiens
  misc_RNA (1)...(19): siRNA sense strand
ggaccgggaguucaugguu

SEQ ID NO: 781865 - RNA, 19 nt, Homo sapiens
  misc_RNA (1)...(19): siRNA sense strand
ccuuggacgugauugguuu

SEQ ID NO: 781866 - RNA, 19 nt, Homo sapiens
  misc_RNA (1)...(19): siRNA sense strand
ccgaugacccgugccuuua

SEQ ID NO: 781867 - RNA, 19 nt, Homo sapiens
  misc_RNA (1)...(19): siRNA sense strand
agaaagcuauggcaauugc

SEQ ID NO: 781868 - RNA, 19 nt, Homo sapiens
  misc_RNA (1)...(19): siRNA sense strand
cagaaauuccagagaagaa

SEQ ID NO: 781869 - RNA, 19 nt, Homo sapiens
  misc_RNA (1)...(19): siRNA sense strand
uggagaacauggaauugug

SEQ ID NO: 781870 - RNA, 19 nt, Homo sapiens
  misc_RNA (1)...(19): siRNA sense strand
uuagaaauagccucugaaa

SEQ ID NO: 781871 - RNA, 19 nt, Homo sapiens
  misc_RNA (1)...(19): siRNA sense strand
uuugaagccuacauuaaug

SEQ ID NO: 781872 - RNA, 19 nt, Homo sapiens
  misc_RNA (1)...(19): siRNA sense strand
ggaucaauggucucagaaa

SEQ ID NO: 781873 - RNA, 19 nt, Homo sapiens
  misc_RNA (1)...(19): siRNA sense strand
cgaagugcauuuucucuau

SEQ ID NO: 781874 - RNA, 19 nt, Homo sapiens
  misc_RNA (1)...(19): siRNA sense strand
guuaagaaagcccacaaau

SEQ ID NO: 781875 - RNA, 19 nt, Homo sapiens
  misc_RNA (1)...(19): siRNA sense strand
ucuuagaaauagccucuga

SEQ ID NO: 781876 - RNA, 19 nt, Homo sapiens
  misc_RNA (1)...(19): siRNA sense strand
ucaaggagagaguauggaa

SEQ ID NO: 781877 - RNA, 19 nt, Homo sapiens
  misc_RNA (1)...(19): siRNA sense strand
gcacagugaagacuuacuc

SEQ ID NO: 781878 - RNA, 19 nt, Homo sapiens
  misc_RNA (1)...(19): siRNA sense strand
uuaagaaagcccacaaauc

SEQ ID NO: 781879 - RNA, 19 nt, Homo sapiens
  misc_RNA (1)...(19): siRNA sense strand
ccucugaaauucuccaaac

SEQ ID NO: 781880 - RNA, 19 nt, Homo sapiens
  misc_RNA (1)...(19): siRNA sense strand
gcccugcuccucuuuccua

SEQ ID NO: 781881 - RNA, 19 nt, Homo sapiens
  misc_RNA (1)...(19): siRNA sense strand
acaaauccaagacccauug

SEQ ID NO: 781882 - RNA, 19 nt, Homo sapiens
  misc_RNA (1)...(19): siRNA sense strand
gaucaggaccgggaguuca

SEQ ID NO: 781883 - RNA, 19 nt, Homo sapiens
  misc_RNA (1)...(19): siRNA sense strand
gugaugaugcccuuguuug

SEQ ID NO: 781884 - RNA, 19 nt, Homo sapiens
  misc_RNA (1)...(19): siRNA sense strand
cuacagccacacaucaauu

SEQ ID NO: 781885 - RNA, 19 nt, Homo sapiens
  misc_RNA (1)...(19): siRNA sense strand
ggaggaacauuuauuuugc

SEQ ID NO: 781886 - RNA, 19 nt, Homo sapiens
  misc_RNA (1)...(19): siRNA sense strand
gaacccgaccaucgaaucu

SEQ ID NO: 781887 - RNA, 19 nt, Homo sapiens
  misc_RNA (1)...(19): siRNA sense strand
ugggaucaauggucucaga

SEQ ID NO: 781888 - RNA, 19 nt, Homo sapiens
  misc_RNA (1)...(19): siRNA sense strand
caaguucauccaaugguau

SEQ ID NO: 781889 - RNA, 19 nt, Homo sapiens
  misc_RNA (1)...(19): siRNA sense strand
agaaagcccacaaauccaa

SEQ ID NO: 781890 - RNA, 19 nt, Homo sapiens
  misc_RNA (1)...(19): siRNA sense strand
cugcuccucuuuccuaugu

SEQ ID NO: 781891 - RNA, 19 nt, Homo sapiens
  misc_RNA (1)...(19): siRNA sense strand
uaacaaguucauccaaugg

SEQ ID NO: 781892 - RNA, 19 nt, Homo sapiens
  misc_RNA (1)...(19): siRNA sense strand
ggugaugaugcccuuguuu

SEQ ID NO: 781893 - RNA, 19 nt, Homo sapiens
  misc_RNA (1)...(19): siRNA sense strand
agaagaaagcuauggcaau

SEQ ID NO: 781894 - RNA, 19 nt, Homo sapiens
  misc_RNA (1)...(19): siRNA sense strand
cagacgccaugacuuucaa

SEQ ID NO: 781895 - RNA, 19 nt, Homo sapiens
  misc_RNA (1)...(19): siRNA sense strand
cugcugaccuguggcuuug

SEQ ID NO: 781896 - RNA, 19 nt, Homo sapiens
  misc_RNA (1)...(19): siRNA sense strand
ucaucaccuuuaaauguug

SEQ ID NO: 781897 - RNA, 19 nt, Homo sapiens
  misc_RNA (1)...(19): siRNA sense strand
uuaaguggcuaccccaaaa

SEQ ID NO: 781898 - RNA, 19 nt, Homo sapiens
  misc_RNA (1)...(19): siRNA sense strand
ggaacccgaccaucgaauc

SEQ ID NO: 781899 - RNA, 19 nt, Homo sapiens
  misc_RNA (1)...(19): siRNA sense strand
cagugccuauggaauuuga

SEQ ID NO: 781900 - RNA, 19 nt, Homo sapiens
  misc_RNA (1)...(19): siRNA sense strand
caacugucaucagggaaag

SEQ ID NO: 781901 - RNA, 19 nt, Homo sapiens
  misc_RNA (1)...(19): siRNA sense strand
cuuggaggaacauuuauuu

SEQ ID NO: 781902 - RNA, 19 nt, Homo sapiens
  misc_RNA (1)...(19): siRNA sense strand
gagaguauggaaccacauc

SEQ ID NO: 781903 - RNA, 19 nt, Homo sapiens
  misc_RNA (1)...(19): siRNA sense strand
caaauccaagacccauuga

SEQ ID NO: 781904 - RNA, 19 nt, Homo sapiens
  misc_RNA (1)...(19): siRNA sense strand
uacagccacacaucaauuu

SEQ ID NO: 781905 - RNA, 19 nt, Homo sapiens
  misc_RNA (1)...(19): siRNA sense strand
acagugcccugcuccucuu

SEQ ID NO: 781906 - RNA, 19 nt, Homo sapiens
  misc_RNA (1)...(19): siRNA sense strand
auugcacagugaagacuua

SEQ ID NO: 781907 - RNA, 19 nt, Homo sapiens
  misc_RNA (1)...(19): siRNA sense strand
ucaacugucaucagggaaa

SEQ ID NO: 781908 - RNA, 19 nt, Homo sapiens
  misc_RNA (1)...(19): siRNA sense strand
cacaucaauuugguuguug

SEQ ID NO: 781909 - RNA, 19 nt, Homo sapiens
  misc_RNA (1)...(19): siRNA sense strand
ugcagucggugguggagaa

SEQ ID NO: 781910 - RNA, 19 nt, Homo sapiens
  misc_RNA (1)...(19): siRNA sense strand
uggccuucaucaccuuuaa

SEQ ID NO: 781911 - RNA, 19 nt, Homo sapiens
  misc_RNA (1)...(19): siRNA sense strand
ggguggaguuugugaugag

SEQ ID NO: 781912 - RNA, 19 nt, Homo sapiens
  misc_RNA (1)...(19): siRNA sense strand
agacuucucuuaggguucu

SEQ ID NO: 781913 - RNA, 19 nt, Homo sapiens
  misc_RNA (1)...(19): siRNA sense strand
caucaccuuuaaauguugu

SEQ ID NO: 781914 - RNA, 19 nt, Homo sapiens
  misc_RNA (1)...(19): siRNA sense strand
agaaauuccagagaagaaa

SEQ ID NO: 781915 - RNA, 19 nt, Homo sapiens
  misc_RNA (1)...(19): siRNA sense strand
ucagaaauuccagagaaga

SEQ ID NO: 781916 - RNA, 19 nt, Homo sapiens
  misc_RNA (1)...(19): siRNA sense strand
gaaccacaucaugcacuug

SEQ ID NO: 781917 - RNA, 19 nt, Homo sapiens
  misc_RNA (1)...(19): siRNA sense strand
gaugaugcccuuguuuggu

SEQ ID NO: 781918 - RNA, 19 nt, Homo sapiens
  misc_RNA (1)...(19): siRNA sense strand
acaaaaguuucaaggagaa

SEQ ID NO: 781919 - RNA, 19 nt, Homo sapiens
  misc_RNA (1)...(19): siRNA sense strand
ucagauggacaaugcaaag

SEQ ID NO: 781920 - RNA, 19 nt, Homo sapiens
  misc_RNA (1)...(19): siRNA sense strand
gaaagagaauccugcaaug

SEQ ID NO: 781921 - RNA, 19 nt, Homo sapiens
  misc_RNA (1)...(19): siRNA sense strand
gaauugaucucccaguaca

SEQ ID NO: 781922 - RNA, 19 nt, Homo sapiens
  misc_RNA (1)...(19): siRNA sense strand
gaauaagccuggcgauuuu

SEQ ID NO: 781923 - RNA, 19 nt, Homo sapiens
  misc_RNA (1)...(19): siRNA sense strand
gagcaagaaauccaucaua

SEQ ID NO: 781924 - RNA, 19 nt, Homo sapiens
  misc_RNA (1)...(19): siRNA sense strand
gcacaguucucagcauuca

SEQ ID NO: 781925 - RNA, 19 nt, Homo sapiens
  misc_RNA (1)...(19): siRNA sense strand
gaacaacccagccaucauc

SEQ ID NO: 781926 - RNA, 19 nt, Homo sapiens
  misc_RNA (1)...(19): siRNA sense strand
gaaagccaccaucuugauu

SEQ ID NO: 781927 - RNA, 19 nt, Homo sapiens
  misc_RNA (1)...(19): siRNA sense strand
caucaucgcagguguguuu

SEQ ID NO: 781928 - RNA, 19 nt, Homo sapiens
  misc_RNA (1)...(19): siRNA sense strand
gcccaagcauucccuuaaa

SEQ ID NO: 781929 - RNA, 19 nt, Homo sapiens
  misc_RNA (1)...(19): siRNA sense strand
guaacaacaugcugaacga

SEQ ID NO: 781930 - RNA, 19 nt, Homo sapiens
  misc_RNA (1)...(19): siRNA sense strand
ggaggaagcgacugacuug

SEQ ID NO: 781931 - RNA, 19 nt, Homo sapiens
  misc_RNA (1)...(19): siRNA sense strand
gagaagcagagaccuuuaa

SEQ ID NO: 781932 - RNA, 19 nt, Homo sapiens
  misc_RNA (1)...(19): siRNA sense strand
agaauaagccuggcgauuu

SEQ ID NO: 781933 - RNA, 19 nt, Homo sapiens
  misc_RNA (1)...(19): siRNA sense strand
ucgcagguguguuugauaa

SEQ ID NO: 781934 - RNA, 19 nt, Homo sapiens
  misc_RNA (1)...(19): siRNA sense strand
gaaaugcugugagccuugu

SEQ ID NO: 781935 - RNA, 19 nt, Homo sapiens
  misc_RNA (1)...(19): siRNA sense strand
cagcacaguucucagcauu

SEQ ID NO: 781936 - RNA, 19 nt, Homo sapiens
  misc_RNA (1)...(19): siRNA sense strand
gcaccgaccgcgugaagaa

SEQ ID NO: 781937 - RNA, 19 nt, Homo sapiens
  misc_RNA (1)...(19): siRNA sense strand
ugaaucaggugcuguugga

SEQ ID NO: 781938 - RNA, 19 nt, Homo sapiens
  misc_RNA (1)...(19): siRNA sense strand
gggcauacaugagugugaa

SEQ ID NO: 781939 - RNA, 19 nt, Homo sapiens
  misc_RNA (1)...(19): siRNA sense strand
uaaaggagucagugaaaga

SEQ ID NO: 781940 - RNA, 19 nt, Homo sapiens
  misc_RNA (1)...(19): siRNA sense strand
gcaagaaauccaucauaca

SEQ ID NO: 781941 - RNA, 19 nt, Homo sapiens
  misc_RNA (1)...(19): siRNA sense strand
uggaauugaucucccagua

SEQ ID NO: 781942 - RNA, 19 nt, Homo sapiens
  misc_RNA (1)...(19): siRNA sense strand
gcagcaaaccagacacuga

SEQ ID NO: 781943 - RNA, 19 nt, Homo sapiens
  misc_RNA (1)...(19): siRNA sense strand
cagaagugcuggcugagau

SEQ ID NO: 781944 - RNA, 19 nt, Homo sapiens
  misc_RNA (1)...(19): siRNA sense strand
cagaguggguucccuuuag

SEQ ID NO: 781945 - RNA, 19 nt, Homo sapiens
  misc_RNA (1)...(19): siRNA sense strand
gacccugacucacccaaga

SEQ ID NO: 781946 - RNA, 19 nt, Homo sapiens
  misc_RNA (1)...(19): siRNA sense strand
gggcuccguucaccaacua

SEQ ID NO: 781947 - RNA, 19 nt, Homo sapiens
  misc_RNA (1)...(19): siRNA sense strand
aaccagagcccacuaguga

SEQ ID NO: 781948 - RNA, 19 nt, Homo sapiens
  misc_RNA (1)...(19): siRNA sense strand
gggagaugaugacgcuuau

SEQ ID NO: 781949 - RNA, 19 nt, Homo sapiens
  misc_RNA (1)...(19): siRNA sense strand
caagagggcauacaugagu

SEQ ID NO: 781950 - RNA, 19 nt, Homo sapiens
  misc_RNA (1)...(19): siRNA sense strand
aaagccaccaucuugauua

SEQ ID NO: 781951 - RNA, 19 nt, Homo sapiens
  misc_RNA (1)...(19): siRNA sense strand
caagaaauccaucauacag

SEQ ID NO: 781952 - RNA, 19 nt, Homo sapiens
  misc_RNA (1)...(19): siRNA sense strand
ucagguggcuagcagucua

SEQ ID NO: 781953 - RNA, 19 nt, Homo sapiens
  misc_RNA (1)...(19): siRNA sense strand
gcgggaugcucgcuucuuc

SEQ ID NO: 781954 - RNA, 19 nt, Homo sapiens
  misc_RNA (1)...(19): siRNA sense strand
gaaccagagcccacuagug

SEQ ID NO: 781955 - RNA, 19 nt, Homo sapiens
  misc_RNA (1)...(19): siRNA sense strand
ugaaagagaauccugcaau

SEQ ID NO: 781956 - RNA, 19 nt, Homo sapiens
  misc_RNA (1)...(19): siRNA sense strand
gaugcucgcuucuucuucu

SEQ ID NO: 781957 - RNA, 19 nt, Homo sapiens
  misc_RNA (1)...(19): siRNA sense strand
uccgguaucucuucacauu

SEQ ID NO: 781958 - RNA, 19 nt, Homo sapiens
  misc_RNA (1)...(19): siRNA sense strand
guacucacuuccucaacau

SEQ ID NO: 781959 - RNA, 19 nt, Homo sapiens
  misc_RNA (1)...(19): siRNA sense strand
gcugaacaguacucacuuc

SEQ ID NO: 781960 - RNA, 19 nt, Homo sapiens
  misc_RNA (1)...(19): siRNA sense strand
caacaugcugaacgacuuu

SEQ ID NO: 781961 - RNA, 19 nt, Homo sapiens
  misc_RNA (1)...(19): siRNA sense strand
cagcaaaccagacacugaa

SEQ ID NO: 781962 - RNA, 19 nt, Homo sapiens
  misc_RNA (1)...(19): siRNA sense strand
ggaaacgggagaccucugu

SEQ ID NO: 781963 - RNA, 19 nt, Homo sapiens
  misc_RNA (1)...(19): siRNA sense strand
gagauucugucgccuuugc

SEQ ID NO: 781964 - RNA, 19 nt, Homo sapiens
  misc_RNA (1)...(19): siRNA sense strand
cgguaucucuucacauuuc

SEQ ID NO: 781965 - RNA, 19 nt, Homo sapiens
  misc_RNA (1)...(19): siRNA sense strand
gaccuuuaacucccaagua

SEQ ID NO: 781966 - RNA, 19 nt, Homo sapiens
  misc_RNA (1)...(19): siRNA sense strand
acucuaccaugucuuuaaa

SEQ ID NO: 781967 - RNA, 19 nt, Homo sapiens
  misc_RNA (1)...(19): siRNA sense strand
ggacgcagcaaaccagaca

SEQ ID NO: 781968 - RNA, 19 nt, Homo sapiens
  misc_RNA (1)...(19): siRNA sense strand
aaagagaauccugcaauga

SEQ ID NO: 781969 - RNA, 19 nt, Homo sapiens
  misc_RNA (1)...(19): siRNA sense strand
gcagguguguuugauaacu

SEQ ID NO: 781970 - RNA, 19 nt, Homo sapiens
  misc_RNA (1)...(19): siRNA sense strand
ggcccaagcauucccuuaa

SEQ ID NO: 781971 - RNA, 19 nt, Homo sapiens
  misc_RNA (1)...(19): siRNA sense strand
gagcuucuccacagcauca

SEQ ID NO: 781972 - RNA, 19 nt, Homo sapiens
  misc_RNA (1)...(19): siRNA sense strand
gcaaucaaagauccaagga

SEQ ID NO: 781973 - RNA, 19 nt, Homo sapiens
  misc_RNA (1)...(19): siRNA sense strand
gacggcacauggcccugua

SEQ ID NO: 781974 - RNA, 19 nt, Homo sapiens
  misc_RNA (1)...(19): siRNA sense strand
gggcuggacacgcaagaaa

SEQ ID NO: 781975 - RNA, 19 nt, Homo sapiens
  misc_RNA (1)...(19): siRNA sense strand
ggacucuaccaugucuuua

SEQ ID NO: 781976 - RNA, 19 nt, Homo sapiens
  misc_RNA (1)...(19): siRNA sense strand
gggacucuaccaugucuuu

SEQ ID NO: 781977 - RNA, 19 nt, Homo sapiens
  misc_RNA (1)...(19): siRNA sense strand
acaacaugcugaacgacuu

SEQ ID NO: 781978 - RNA, 19 nt, Homo sapiens
  misc_RNA (1)...(19): siRNA sense strand
ucugucacguggaguguaa

SEQ ID NO: 781979 - RNA, 19 nt, Homo sapiens
  misc_RNA (1)...(19): siRNA sense strand
uaggacugcccaucuuaua

SEQ ID NO: 781980 - RNA, 19 nt, Homo sapiens
  misc_RNA (1)...(19): siRNA sense strand
gcuuaucucggcaaucaaa

SEQ ID NO: 781981 - RNA, 19 nt, Homo sapiens
  misc_RNA (1)...(19): siRNA sense strand
acgcuuaucucggcaauca

SEQ ID NO: 781982 - RNA, 19 nt, Homo sapiens
  misc_RNA (1)...(19): siRNA sense strand
cgagaagcagagaccuuua

SEQ ID NO: 781983 - RNA, 19 nt, Homo sapiens
  misc_RNA (1)...(19): siRNA sense strand
gcagggaugggcucuguca

SEQ ID NO: 781984 - RNA, 19 nt, Homo sapiens
  misc_RNA (1)...(19): siRNA sense strand
caaaccagacacugaagga

SEQ ID NO: 781985 - RNA, 19 nt, Homo sapiens
  misc_RNA (1)...(19): siRNA sense strand
gacucuaccaugucuuuaa

SEQ ID NO: 781986 - RNA, 19 nt, Homo sapiens
  misc_RNA (1)...(19): siRNA sense strand
agaguggguucccuuuaga

SEQ ID NO: 781987 - RNA, 19 nt, Homo sapiens
  misc_RNA (1)...(19): siRNA sense strand
ggacugcccaucuuauacu

SEQ ID NO: 781988 - RNA, 19 nt, Homo sapiens
  misc_RNA (1)...(19): siRNA sense strand
ggacacgcaagaaauccuu

SEQ ID NO: 781989 - RNA, 19 nt, Homo sapiens
  misc_RNA (1)...(19): siRNA sense strand
uggguucccuuuagagaug

SEQ ID NO: 781990 - RNA, 19 nt, Homo sapiens
  misc_RNA (1)...(19): siRNA sense strand
aagaaauccuugguugaga

SEQ ID NO: 781991 - RNA, 19 nt, Homo sapiens
  misc_RNA (1)...(19): siRNA sense strand
gacauguucugggacucua

SEQ ID NO: 781992 - RNA, 19 nt, Homo sapiens
  misc_RNA (1)...(19): siRNA sense strand
cccaagagggcauacauga

SEQ ID NO: 781993 - RNA, 19 nt, Homo sapiens
  misc_RNA (1)...(19): siRNA sense strand
ggguugugcuugugaacug

SEQ ID NO: 781994 - RNA, 19 nt, Homo sapiens
  misc_RNA (1)...(19): siRNA sense strand
ggaauugaucucccaguac

SEQ ID NO: 781995 - RNA, 19 nt, Homo sapiens
  misc_RNA (1)...(19): siRNA sense strand
cugagauucugucgccuuu

SEQ ID NO: 781996 - RNA, 19 nt, Homo sapiens
  misc_RNA (1)...(19): siRNA sense strand
agagggaacaccugaauca

SEQ ID NO: 781997 - RNA, 19 nt, Homo sapiens
  misc_RNA (1)...(19): siRNA sense strand
gaggaaagcaaccaaaaug

SEQ ID NO: 781998 - RNA, 19 nt, Homo sapiens
  misc_RNA (1)...(19): siRNA sense strand
guucgaagacccagagcuu

SEQ ID NO: 781999 - RNA, 19 nt, Homo sapiens
  misc_RNA (1)...(19): siRNA sense strand
ggcagccacuuacgaugga

SEQ ID NO: 782000 - RNA, 19 nt, Homo sapiens
  misc_RNA (1)...(19): siRNA sense strand
ccccagaccugacugaaaa

SEQ ID NO: 782001 - RNA, 19 nt, Homo sapiens
  misc_RNA (1)...(19): siRNA sense strand
ccucagcccagcauauuau

SEQ ID NO: 782002 - RNA, 19 nt, Homo sapiens
  misc_RNA (1)...(19): siRNA sense strand
caaguaggacugcccaucu

SEQ ID NO: 782003 - RNA, 19 nt, Homo sapiens
  misc_RNA (1)...(19): siRNA sense strand
ugggagaugaugacgcuua

SEQ ID NO: 782004 - RNA, 19 nt, Homo sapiens
  misc_RNA (1)...(19): siRNA sense strand
ccgagaagcagagaccuuu

SEQ ID NO: 782005 - RNA, 19 nt, Homo sapiens
  misc_RNA (1)...(19): siRNA sense strand
acaaggacgcugucacuca

SEQ ID NO: 782006 - RNA, 19 nt, Homo sapiens
  misc_RNA (1)...(19): siRNA sense strand
acagaguggguucccuuua

SEQ ID NO: 782007 - RNA, 19 nt, Homo sapiens
  misc_RNA (1)...(19): siRNA sense strand
caucgcagguguguuugau

SEQ ID NO: 782008 - RNA, 19 nt, Homo sapiens
  misc_RNA (1)...(19): siRNA sense strand
aagcagagaccuuuaacuc

SEQ ID NO: 782009 - RNA, 19 nt, Homo sapiens
  misc_RNA (1)...(19): siRNA sense strand
agcaagaaauccaucauac

SEQ ID NO: 782010 - RNA, 19 nt, Homo sapiens
  misc_RNA (1)...(19): siRNA sense strand
aggagucagugaaagagaa

SEQ ID NO: 782011 - RNA, 19 nt, Homo sapiens
  misc_RNA (1)...(19): siRNA sense strand
gcccugcagcugaacagua

SEQ ID NO: 782012 - RNA, 19 nt, Homo sapiens
  misc_RNA (1)...(19): siRNA sense strand
caccugggcacacugguuu

SEQ ID NO: 782013 - RNA, 19 nt, Homo sapiens
  misc_RNA (1)...(19): siRNA sense strand
cugaggaugggcacuauuu

SEQ ID NO: 782014 - RNA, 19 nt, Homo sapiens
  misc_RNA (1)...(19): siRNA sense strand
guaggacugcccaucuuau

SEQ ID NO: 782015 - RNA, 19 nt, Homo sapiens
  misc_RNA (1)...(19): siRNA sense strand
ccaagcauucccuuaaaca

SEQ ID NO: 782016 - RNA, 19 nt, Homo sapiens
  misc_RNA (1)...(19): siRNA sense strand
caucaccucuuuggagucu

SEQ ID NO: 782017 - RNA, 19 nt, Homo sapiens
  misc_RNA (1)...(19): siRNA sense strand
cagaacaacccagccauca

SEQ ID NO: 782018 - RNA, 19 nt, Homo sapiens
  misc_RNA (1)...(19): siRNA sense strand
uuaaaggagucagugaaag

SEQ ID NO: 782019 - RNA, 19 nt, Homo sapiens
  misc_RNA (1)...(19): siRNA sense strand
gcucugaggaugggcacua

SEQ ID NO: 782020 - RNA, 19 nt, Homo sapiens
  misc_RNA (1)...(19): siRNA sense strand
gaaagagaauccugcaaug

SEQ ID NO: 782021 - RNA, 19 nt, Homo sapiens
  misc_RNA (1)...(19): siRNA sense strand
gaauugaucucccaguaca

SEQ ID NO: 782022 - RNA, 19 nt, Homo sapiens
  misc_RNA (1)...(19): siRNA sense strand
gaauaagccuggcgauuuu

SEQ ID NO: 782023 - RNA, 19 nt, Homo sapiens
  misc_RNA (1)...(19): siRNA sense strand
gagcaagaaauccaucaua

SEQ ID NO: 782024 - RNA, 19 nt, Homo sapiens
  misc_RNA (1)...(19): siRNA sense strand
gcacaguucucagcauuca

SEQ ID NO: 782025 - RNA, 19 nt, Homo sapiens
  misc_RNA (1)...(19): siRNA sense strand
gaacaacccagccaucauc

SEQ ID NO: 782026 - RNA, 19 nt, Homo sapiens
  misc_RNA (1)...(19): siRNA sense strand
gaaagccaccaucuugauu

SEQ ID NO: 782027 - RNA, 19 nt, Homo sapiens
  misc_RNA (1)...(19): siRNA sense strand
caucaucgcagguguguuu

SEQ ID NO: 782028 - RNA, 19 nt, Homo sapiens
  misc_RNA (1)...(19): siRNA sense strand
gcccaagcauucccuuaaa

SEQ ID NO: 782029 - RNA, 19 nt, Homo sapiens
  misc_RNA (1)...(19): siRNA sense strand
guaacaacaugcugaacga

SEQ ID NO: 782030 - RNA, 19 nt, Homo sapiens
  misc_RNA (1)...(19): siRNA sense strand
ggaggaagcgacugacuug

SEQ ID NO: 782031 - RNA, 19 nt, Homo sapiens
  misc_RNA (1)...(19): siRNA sense strand
gagaagcagagaccuuuaa

SEQ ID NO: 782032 - RNA, 19 nt, Homo sapiens
  misc_RNA (1)...(19): siRNA sense strand
agaauaagccuggcgauuu

SEQ ID NO: 782033 - RNA, 19 nt, Homo sapiens
  misc_RNA (1)...(19): siRNA sense strand
ucgcagguguguuugauaa

SEQ ID NO: 782034 - RNA, 19 nt, Homo sapiens
  misc_RNA (1)...(19): siRNA sense strand
gaaaugcugugagccuugu

SEQ ID NO: 782035 - RNA, 19 nt, Homo sapiens
  misc_RNA (1)...(19): siRNA sense strand
cagcacaguucucagcauu

SEQ ID NO: 782036 - RNA, 19 nt, Homo sapiens
  misc_RNA (1)...(19): siRNA sense strand
gcaccgaccgcgugaagaa

SEQ ID NO: 782037 - RNA, 19 nt, Homo sapiens
  misc_RNA (1)...(19): siRNA sense strand
ugaaucaggugcuguugga

SEQ ID NO: 782038 - RNA, 19 nt, Homo sapiens
  misc_RNA (1)...(19): siRNA sense strand
gggcauacaugagugugaa

SEQ ID NO: 782039 - RNA, 19 nt, Homo sapiens
  misc_RNA (1)...(19): siRNA sense strand
uaaaggagucagugaaaga

SEQ ID NO: 782040 - RNA, 19 nt, Homo sapiens
  misc_RNA (1)...(19): siRNA sense strand
gcaagaaauccaucauaca

SEQ ID NO: 782041 - RNA, 19 nt, Homo sapiens
  misc_RNA (1)...(19): siRNA sense strand
uggaauugaucucccagua

SEQ ID NO: 782042 - RNA, 19 nt, Homo sapiens
  misc_RNA (1)...(19): siRNA sense strand
gcagcaaaccagacacuga

SEQ ID NO: 782043 - RNA, 19 nt, Homo sapiens
  misc_RNA (1)...(19): siRNA sense strand
cagaagugcuggcugagau

SEQ ID NO: 782044 - RNA, 19 nt, Homo sapiens
  misc_RNA (1)...(19): siRNA sense strand
cagaguggguucccuuuag

SEQ ID NO: 782045 - RNA, 19 nt, Homo sapiens
  misc_RNA (1)...(19): siRNA sense strand
gacccugacucacccaaga

SEQ ID NO: 782046 - RNA, 19 nt, Homo sapiens
  misc_RNA (1)...(19): siRNA sense strand
gggcuccguucaccaacua

SEQ ID NO: 782047 - RNA, 19 nt, Homo sapiens
  misc_RNA (1)...(19): siRNA sense strand
aaccagagcccacuaguga

SEQ ID NO: 782048 - RNA, 19 nt, Homo sapiens
  misc_RNA (1)...(19): siRNA sense strand
gggagaugaugacgcuuau

SEQ ID NO: 782049 - RNA, 19 nt, Homo sapiens
  misc_RNA (1)...(19): siRNA sense strand
caagagggcauacaugagu

SEQ ID NO: 782050 - RNA, 19 nt, Homo sapiens
  misc_RNA (1)...(19): siRNA sense strand
aaagccaccaucuugauua

SEQ ID NO: 782051 - RNA, 19 nt, Homo sapiens
  misc_RNA (1)...(19): siRNA sense strand
caagaaauccaucauacag

SEQ ID NO: 782052 - RNA, 19 nt, Homo sapiens
  misc_RNA (1)...(19): siRNA sense strand
ucagguggcuagcagucua

SEQ ID NO: 782053 - RNA, 19 nt, Homo sapiens
  misc_RNA (1)...(19): siRNA sense strand
gcgggaugcucgcuucuuc

SEQ ID NO: 782054 - RNA, 19 nt, Homo sapiens
  misc_RNA (1)...(19): siRNA sense strand
gaaccagagcccacuagug

SEQ ID NO: 782055 - RNA, 19 nt, Homo sapiens
  misc_RNA (1)...(19): siRNA sense strand
ugaaagagaauccugcaau

SEQ ID NO: 782056 - RNA, 19 nt, Homo sapiens
  misc_RNA (1)...(19): siRNA sense strand
gaugcucgcuucuucuucu

SEQ ID NO: 782057 - RNA, 19 nt, Homo sapiens
  misc_RNA (1)...(19): siRNA sense strand
uccgguaucucuucacauu

SEQ ID NO: 782058 - RNA, 19 nt, Homo sapiens
  misc_RNA (1)...(19): siRNA sense strand
guacucacuuccucaacau

SEQ ID NO: 782059 - RNA, 19 nt, Homo sapiens
  misc_RNA (1)...(19): siRNA sense strand
gcugaacaguacucacuuc

SEQ ID NO: 782060 - RNA, 19 nt, Homo sapiens
  misc_RNA (1)...(19): siRNA sense strand
caacaugcugaacgacuuu

SEQ ID NO: 782061 - RNA, 19 nt, Homo sapiens
  misc_RNA (1)...(19): siRNA sense strand
cagcaaaccagacacugaa

SEQ ID NO: 782062 - RNA, 19 nt, Homo sapiens
  misc_RNA (1)...(19): siRNA sense strand
ggaaacgggagaccucugu

SEQ ID NO: 782063 - RNA, 19 nt, Homo sapiens
  misc_RNA (1)...(19): siRNA sense strand
gagauucugucgccuuugc

SEQ ID NO: 782064 - RNA, 19 nt, Homo sapiens
  misc_RNA (1)...(19): siRNA sense strand
cgguaucucuucacauuuc

SEQ ID NO: 782065 - RNA, 19 nt, Homo sapiens
  misc_RNA (1)...(19): siRNA sense strand
gaccuuuaacucccaagua

SEQ ID NO: 782066 - RNA, 19 nt, Homo sapiens
  misc_RNA (1)...(19): siRNA sense strand
acucuaccaugucuuuaaa

SEQ ID NO: 782067 - RNA, 19 nt, Homo sapiens
  misc_RNA (1)...(19): siRNA sense strand
ggacgcagcaaaccagaca

SEQ ID NO: 782068 - RNA, 19 nt, Homo sapiens
  misc_RNA (1)...(19): siRNA sense strand
aaagagaauccugcaauga

SEQ ID NO: 782069 - RNA, 19 nt, Homo sapiens
  misc_RNA (1)...(19): siRNA sense strand
gcagguguguuugauaacu

SEQ ID NO: 782070 - RNA, 19 nt, Homo sapiens
  misc_RNA (1)...(19): siRNA sense strand
ggcccaagcauucccuuaa

SEQ ID NO: 782071 - RNA, 19 nt, Homo sapiens
  misc_RNA (1)...(19): siRNA sense strand
gagcuucuccacagcauca

SEQ ID NO: 782072 - RNA, 19 nt, Homo sapiens
  misc_RNA (1)...(19): siRNA sense strand
gcaaucaaagauccaagga

SEQ ID NO: 782073 - RNA, 19 nt, Homo sapiens
  misc_RNA (1)...(19): siRNA sense strand
gacggcacauggcccugua

SEQ ID NO: 782074 - RNA, 19 nt, Homo sapiens
  misc_RNA (1)...(19): siRNA sense strand
gggcuggacacgcaagaaa

SEQ ID NO: 782075 - RNA, 19 nt, Homo sapiens
  misc_RNA (1)...(19): siRNA sense strand
ggacucuaccaugucuuua

SEQ ID NO: 782076 - RNA, 19 nt, Homo sapiens
  misc_RNA (1)...(19): siRNA sense strand
gggacucuaccaugucuuu

SEQ ID NO: 782077 - RNA, 19 nt, Homo sapiens
  misc_RNA (1)...(19): siRNA sense strand
acaacaugcugaacgacuu

SEQ ID NO: 782078 - RNA, 19 nt, Homo sapiens
  misc_RNA (1)...(19): siRNA sense strand
ucugucacguggaguguaa

SEQ ID NO: 782079 - RNA, 19 nt, Homo sapiens
  misc_RNA (1)...(19): siRNA sense strand
uaggacugcccaucuuaua

SEQ ID NO: 782080 - RNA, 19 nt, Homo sapiens
  misc_RNA (1)...(19): siRNA sense strand
gcuuaucucggcaaucaaa

SEQ ID NO: 782081 - RNA, 19 nt, Homo sapiens
  misc_RNA (1)...(19): siRNA sense strand
acgcuuaucucggcaauca

SEQ ID NO: 782082 - RNA, 19 nt, Homo sapiens
  misc_RNA (1)...(19): siRNA sense strand
cgagaagcagagaccuuua

SEQ ID NO: 782083 - RNA, 19 nt, Homo sapiens
  misc_RNA (1)...(19): siRNA sense strand
gcagggaugggcucuguca

SEQ ID NO: 782084 - RNA, 19 nt, Homo sapiens
  misc_RNA (1)...(19): siRNA sense strand
caaaccagacacugaagga

SEQ ID NO: 782085 - RNA, 19 nt, Homo sapiens
  misc_RNA (1)...(19): siRNA sense strand
gacucuaccaugucuuuaa

SEQ ID NO: 782086 - RNA, 19 nt, Homo sapiens
  misc_RNA (1)...(19): siRNA sense strand
agaguggguucccuuuaga

SEQ ID NO: 782087 - RNA, 19 nt, Homo sapiens
  misc_RNA (1)...(19): siRNA sense strand
ggacugcccaucuuauacu

SEQ ID NO: 782088 - RNA, 19 nt, Homo sapiens
  misc_RNA (1)...(19): siRNA sense strand
ggacacgcaagaaauccuu

SEQ ID NO: 782089 - RNA, 19 nt, Homo sapiens
  misc_RNA (1)...(19): siRNA sense strand
uggguucccuuuagagaug

SEQ ID NO: 782090 - RNA, 19 nt, Homo sapiens
  misc_RNA (1)...(19): siRNA sense strand
aagaaauccuugguugaga

SEQ ID NO: 782091 - RNA, 19 nt, Homo sapiens
  misc_RNA (1)...(19): siRNA sense strand
gacauguucugggacucua

SEQ ID NO: 782092 - RNA, 19 nt, Homo sapiens
  misc_RNA (1)...(19): siRNA sense strand
cccaagagggcauacauga

SEQ ID NO: 782093 - RNA, 19 nt, Homo sapiens
  misc_RNA (1)...(19): siRNA sense strand
ggguugugcuugugaacug

SEQ ID NO: 782094 - RNA, 19 nt, Homo sapiens
  misc_RNA (1)...(19): siRNA sense strand
ggaauugaucucccaguac

SEQ ID NO: 782095 - RNA, 19 nt, Homo sapiens
  misc_RNA (1)...(19): siRNA sense strand
cugagauucugucgccuuu

SEQ ID NO: 782096 - RNA, 19 nt, Homo sapiens
  misc_RNA (1)...(19): siRNA sense strand
agagggaacaccugaauca

SEQ ID NO: 782097 - RNA, 19 nt, Homo sapiens
  misc_RNA (1)...(19): siRNA sense strand
gaggaaagcaaccaaaaug

SEQ ID NO: 782098 - RNA, 19 nt, Homo sapiens
  misc_RNA (1)...(19): siRNA sense strand
guucgaagacccagagcuu

SEQ ID NO: 782099 - RNA, 19 nt, Homo sapiens
  misc_RNA (1)...(19): siRNA sense strand
ggcagccacuuacgaugga

SEQ ID NO: 782100 - RNA, 19 nt, Homo sapiens
  misc_RNA (1)...(19): siRNA sense strand
ccccagaccugacugaaaa

SEQ ID NO: 782101 - RNA, 19 nt, Homo sapiens
  misc_RNA (1)...(19): siRNA sense strand
ccucagcccagcauauuau

SEQ ID NO: 782102 - RNA, 19 nt, Homo sapiens
  misc_RNA (1)...(19): siRNA sense strand
caaguaggacugcccaucu

SEQ ID NO: 782103 - RNA, 19 nt, Homo sapiens
  misc_RNA (1)...(19): siRNA sense strand
ugggagaugaugacgcuua

SEQ ID NO: 782104 - RNA, 19 nt, Homo sapiens
  misc_RNA (1)...(19): siRNA sense strand
ccgagaagcagagaccuuu

SEQ ID NO: 782105 - RNA, 19 nt, Homo sapiens
  misc_RNA (1)...(19): siRNA sense strand
acaaggacgcugucacuca

SEQ ID NO: 782106 - RNA, 19 nt, Homo sapiens
  misc_RNA (1)...(19): siRNA sense strand
acagaguggguucccuuua

SEQ ID NO: 782107 - RNA, 19 nt, Homo sapiens
  misc_RNA (1)...(19): siRNA sense strand
caucgcagguguguuugau

SEQ ID NO: 782108 - RNA, 19 nt, Homo sapiens
  misc_RNA (1)...(19): siRNA sense strand
aagcagagaccuuuaacuc

SEQ ID NO: 782109 - RNA, 19 nt, Homo sapiens
  misc_RNA (1)...(19): siRNA sense strand
agcaagaaauccaucauac

SEQ ID NO: 782110 - RNA, 19 nt, Homo sapiens
  misc_RNA (1)...(19): siRNA sense strand
aggagucagugaaagagaa

SEQ ID NO: 782111 - RNA, 19 nt, Homo sapiens
  misc_RNA (1)...(19): siRNA sense strand
gcccugcagcugaacagua

SEQ ID NO: 782112 - RNA, 19 nt, Homo sapiens
  misc_RNA (1)...(19): siRNA sense strand
caccugggcacacugguuu

SEQ ID NO: 782113 - RNA, 19 nt, Homo sapiens
  misc_RNA (1)...(19): siRNA sense strand
cugaggaugggcacuauuu

SEQ ID NO: 782114 - RNA, 19 nt, Homo sapiens
  misc_RNA (1)...(19): siRNA sense strand
guaggacugcccaucuuau

SEQ ID NO: 782115 - RNA, 19 nt, Homo sapiens
  misc_RNA (1)...(19): siRNA sense strand
ccaagcauucccuuaaaca

SEQ ID NO: 782116 - RNA, 19 nt, Homo sapiens
  misc_RNA (1)...(19): siRNA sense strand
caucaccucuuuggagucu

SEQ ID NO: 782117 - RNA, 19 nt, Homo sapiens
  misc_RNA (1)...(19): siRNA sense strand
cagaacaacccagccauca

SEQ ID NO: 782118 - RNA, 19 nt, Homo sapiens
  misc_RNA (1)...(19): siRNA sense strand
uuaaaggagucagugaaag

SEQ ID NO: 782119 - RNA, 19 nt, Homo sapiens
  misc_RNA (1)...(19): siRNA sense strand
gcucugaggaugggcacua

SEQ ID NO: 782120 - RNA, 19 nt, Homo sapiens
  misc_RNA (1)...(19): siRNA sense strand
ccaagaagcuggaacauua

SEQ ID NO: 782121 - RNA, 19 nt, Homo sapiens
  misc_RNA (1)...(19): siRNA sense strand
gagagagacuggauuauua

SEQ ID NO: 782122 - RNA, 19 nt, Homo sapiens
  misc_RNA (1)...(19): siRNA sense strand
gaaagguacuguccaagaa

SEQ ID NO: 782123 - RNA, 19 nt, Homo sapiens
  misc_RNA (1)...(19): siRNA sense strand
agacaugaaugaaguauug

SEQ ID NO: 782124 - RNA, 19 nt, Homo sapiens
  misc_RNA (1)...(19): siRNA sense strand
gaucaaaccugccagaaaa

SEQ ID NO: 782125 - RNA, 19 nt, Homo sapiens
  misc_RNA (1)...(19): siRNA sense strand
guaagaaucugaaggacau

SEQ ID NO: 782126 - RNA, 19 nt, Homo sapiens
  misc_RNA (1)...(19): siRNA sense strand
gaagaagcagcccugaaua

SEQ ID NO: 782127 - RNA, 19 nt, Homo sapiens
  misc_RNA (1)...(19): siRNA sense strand
gaagaugcauuacauaagc

SEQ ID NO: 782128 - RNA, 19 nt, Homo sapiens
  misc_RNA (1)...(19): siRNA sense strand
gaagucaucgggaaaggua

SEQ ID NO: 782129 - RNA, 19 nt, Homo sapiens
  misc_RNA (1)...(19): siRNA sense strand
agaauaaacuggacaccuu

SEQ ID NO: 782130 - RNA, 19 nt, Homo sapiens
  misc_RNA (1)...(19): siRNA sense strand
ggaaagguacuguccaaga

SEQ ID NO: 782131 - RNA, 19 nt, Homo sapiens
  misc_RNA (1)...(19): siRNA sense strand
acacacugguuuacucaua

SEQ ID NO: 782132 - RNA, 19 nt, Homo sapiens
  misc_RNA (1)...(19): siRNA sense strand
gcaaagagacaugaaugaa

SEQ ID NO: 782133 - RNA, 19 nt, Homo sapiens
  misc_RNA (1)...(19): siRNA sense strand
aagcagcccugaauaaaug

SEQ ID NO: 782134 - RNA, 19 nt, Homo sapiens
  misc_RNA (1)...(19): siRNA sense strand
ggauuugauuugugagaaa

SEQ ID NO: 782135 - RNA, 19 nt, Homo sapiens
  misc_RNA (1)...(19): siRNA sense strand
aaagagacaugaaugaagu

SEQ ID NO: 782136 - RNA, 19 nt, Homo sapiens
  misc_RNA (1)...(19): siRNA sense strand
gaacauuauuauccagcaa

SEQ ID NO: 782137 - RNA, 19 nt, Homo sapiens
  misc_RNA (1)...(19): siRNA sense strand
gcuacagagugauggauuu

SEQ ID NO: 782138 - RNA, 19 nt, Homo sapiens
  misc_RNA (1)...(19): siRNA sense strand
uggaaugacuccucuaaug

SEQ ID NO: 782139 - RNA, 19 nt, Homo sapiens
  misc_RNA (1)...(19): siRNA sense strand
gaagcagcccugaauaaau

SEQ ID NO: 782140 - RNA, 19 nt, Homo sapiens
  misc_RNA (1)...(19): siRNA sense strand
gaaaagggagcaaguaaaa

SEQ ID NO: 782141 - RNA, 19 nt, Homo sapiens
  misc_RNA (1)...(19): siRNA sense strand
gcaagaauguucgugucaa

SEQ ID NO: 782142 - RNA, 19 nt, Homo sapiens
  misc_RNA (1)...(19): siRNA sense strand
gcaaccagaggcugaagua

SEQ ID NO: 782143 - RNA, 19 nt, Homo sapiens
  misc_RNA (1)...(19): siRNA sense strand
auacacagcccucauguuu

SEQ ID NO: 782144 - RNA, 19 nt, Homo sapiens
  misc_RNA (1)...(19): siRNA sense strand
aauaaaugcuacagaguga

SEQ ID NO: 782145 - RNA, 19 nt, Homo sapiens
  misc_RNA (1)...(19): siRNA sense strand
gaaguagguaucucucaaa

SEQ ID NO: 782146 - RNA, 19 nt, Homo sapiens
  misc_RNA (1)...(19): siRNA sense strand
ugaaugaaguauuggcuau

SEQ ID NO: 782147 - RNA, 19 nt, Homo sapiens
  misc_RNA (1)...(19): siRNA sense strand
gaagcuggaacauuauuau

SEQ ID NO: 782148 - RNA, 19 nt, Homo sapiens
  misc_RNA (1)...(19): siRNA sense strand
agaaggagcuacuggaagu

SEQ ID NO: 782149 - RNA, 19 nt, Homo sapiens
  misc_RNA (1)...(19): siRNA sense strand
gagccgauguaaauuguca

SEQ ID NO: 782150 - RNA, 19 nt, Homo sapiens
  misc_RNA (1)...(19): siRNA sense strand
ggacgagaauggaaugacu

SEQ ID NO: 782151 - RNA, 19 nt, Homo sapiens
  misc_RNA (1)...(19): siRNA sense strand
guaauaaagacaucacaug

SEQ ID NO: 782152 - RNA, 19 nt, Homo sapiens
  misc_RNA (1)...(19): siRNA sense strand
ugaaguagguaucucucaa

SEQ ID NO: 782153 - RNA, 19 nt, Homo sapiens
  misc_RNA (1)...(19): siRNA sense strand
ggagaaggagcuacuggaa

SEQ ID NO: 782154 - RNA, 19 nt, Homo sapiens
  misc_RNA (1)...(19): siRNA sense strand
cgagagagacuggauuauu

SEQ ID NO: 782155 - RNA, 19 nt, Homo sapiens
  misc_RNA (1)...(19): siRNA sense strand
aagcgaagcugaguuggaa

SEQ ID NO: 782156 - RNA, 19 nt, Homo sapiens
  misc_RNA (1)...(19): siRNA sense strand
gcagcugguucgaagcauu

SEQ ID NO: 782157 - RNA, 19 nt, Homo sapiens
  misc_RNA (1)...(19): siRNA sense strand
agaaauguaugaagcaaag

SEQ ID NO: 782158 - RNA, 19 nt, Homo sapiens
  misc_RNA (1)...(19): siRNA sense strand
gaauguucgugucaacugu

SEQ ID NO: 782159 - RNA, 19 nt, Homo sapiens
  misc_RNA (1)...(19): siRNA sense strand
uaagcuguaucuuucagaa

SEQ ID NO: 782160 - RNA, 19 nt, Homo sapiens
  misc_RNA (1)...(19): siRNA sense strand
ugauggauuugauuuguga

SEQ ID NO: 782161 - RNA, 19 nt, Homo sapiens
  misc_RNA (1)...(19): siRNA sense strand
aaagacaucacauggguaa

SEQ ID NO: 782162 - RNA, 19 nt, Homo sapiens
  misc_RNA (1)...(19): siRNA sense strand
ucugauggcuuuccagugu

SEQ ID NO: 782163 - RNA, 19 nt, Homo sapiens
  misc_RNA (1)...(19): siRNA sense strand
gagacuggauuauuacacu

SEQ ID NO: 782164 - RNA, 19 nt, Homo sapiens
  misc_RNA (1)...(19): siRNA sense strand
cacacugguuuacucauaa

SEQ ID NO: 782165 - RNA, 19 nt, Homo sapiens
  misc_RNA (1)...(19): siRNA sense strand
acaggugucugaggaguaa

SEQ ID NO: 782166 - RNA, 19 nt, Homo sapiens
  misc_RNA (1)...(19): siRNA sense strand
aagaagcagcccugaauaa

SEQ ID NO: 782167 - RNA, 19 nt, Homo sapiens
  misc_RNA (1)...(19): siRNA sense strand
ugaaagcgaagcugaguug

SEQ ID NO: 782168 - RNA, 19 nt, Homo sapiens
  misc_RNA (1)...(19): siRNA sense strand
ugaaggacauuuacgaaaa

SEQ ID NO: 782169 - RNA, 19 nt, Homo sapiens
  misc_RNA (1)...(19): siRNA sense strand
gaagcaaagagacaugaau

SEQ ID NO: 782170 - RNA, 19 nt, Homo sapiens
  misc_RNA (1)...(19): siRNA sense strand
cuaugaagaugcauuacau

SEQ ID NO: 782171 - RNA, 19 nt, Homo sapiens
  misc_RNA (1)...(19): siRNA sense strand
ggaaggaaagaaagaaucu

SEQ ID NO: 782172 - RNA, 19 nt, Homo sapiens
  misc_RNA (1)...(19): siRNA sense strand
guucugaucccacugcauu

SEQ ID NO: 782173 - RNA, 19 nt, Homo sapiens
  misc_RNA (1)...(19): siRNA sense strand
gcauugcuccuguugaaau

SEQ ID NO: 782174 - RNA, 19 nt, Homo sapiens
  misc_RNA (1)...(19): siRNA sense strand
ggaaugacuccucuaaugc

SEQ ID NO: 782175 - RNA, 19 nt, Homo sapiens
  misc_RNA (1)...(19): siRNA sense strand
caaagagacaugaaugaag

SEQ ID NO: 782176 - RNA, 19 nt, Homo sapiens
  misc_RNA (1)...(19): siRNA sense strand
acacagcccucauguuugc

SEQ ID NO: 782177 - RNA, 19 nt, Homo sapiens
  misc_RNA (1)...(19): siRNA sense strand
aaugaaguauuggcuauga

SEQ ID NO: 782178 - RNA, 19 nt, Homo sapiens
  misc_RNA (1)...(19): siRNA sense strand
uugcugcacuuucugguaa

SEQ ID NO: 782179 - RNA, 19 nt, Homo sapiens
  misc_RNA (1)...(19): siRNA sense strand
gaaugacuccucuaaugca

SEQ ID NO: 782180 - RNA, 19 nt, Homo sapiens
  misc_RNA (1)...(19): siRNA sense strand
agaagaagcagcccugaau

SEQ ID NO: 782181 - RNA, 19 nt, Homo sapiens
  misc_RNA (1)...(19): siRNA sense strand
ucgugaugcuuguaaauga

SEQ ID NO: 782182 - RNA, 19 nt, Homo sapiens
  misc_RNA (1)...(19): siRNA sense strand
gaagaacagcagcucagau

SEQ ID NO: 782183 - RNA, 19 nt, Homo sapiens
  misc_RNA (1)...(19): siRNA sense strand
gaaaagagacaagaggaaa

SEQ ID NO: 782184 - RNA, 19 nt, Homo sapiens
  misc_RNA (1)...(19): siRNA sense strand
gaccauaaucaacaauuuc

SEQ ID NO: 782185 - RNA, 19 nt, Homo sapiens
  misc_RNA (1)...(19): siRNA sense strand
ucagaaaugcauuaacuuc

SEQ ID NO: 782186 - RNA, 19 nt, Homo sapiens
  misc_RNA (1)...(19): siRNA sense strand
gaaguauuggcuaugaaga

SEQ ID NO: 782187 - RNA, 19 nt, Homo sapiens
  misc_RNA (1)...(19): siRNA sense strand
gagaaauguaugaagcaaa

SEQ ID NO: 782188 - RNA, 19 nt, Homo sapiens
  misc_RNA (1)...(19): siRNA sense strand
agaagcagcccugaauaaa

SEQ ID NO: 782189 - RNA, 19 nt, Homo sapiens
  misc_RNA (1)...(19): siRNA sense strand
gcugcacuuucugguaaua

SEQ ID NO: 782190 - RNA, 19 nt, Homo sapiens
  misc_RNA (1)...(19): siRNA sense strand
gaaaaccacggcaaacuug

SEQ ID NO: 782191 - RNA, 19 nt, Homo sapiens
  misc_RNA (1)...(19): siRNA sense strand
gagaaaagggagcaaguaa

SEQ ID NO: 782192 - RNA, 19 nt, Homo sapiens
  misc_RNA (1)...(19): siRNA sense strand
ugagaaauguaugaagcaa

SEQ ID NO: 782193 - RNA, 19 nt, Homo sapiens
  misc_RNA (1)...(19): siRNA sense strand
cgggaaagguacuguccaa

SEQ ID NO: 782194 - RNA, 19 nt, Homo sapiens
  misc_RNA (1)...(19): siRNA sense strand
ggaagaacagcagcucaga

SEQ ID NO: 782195 - RNA, 19 nt, Homo sapiens
  misc_RNA (1)...(19): siRNA sense strand
caagaauguucgugucaac

SEQ ID NO: 782196 - RNA, 19 nt, Homo sapiens
  misc_RNA (1)...(19): siRNA sense strand
ugucaacucugugggaaga

SEQ ID NO: 782197 - RNA, 19 nt, Homo sapiens
  misc_RNA (1)...(19): siRNA sense strand
ugaugucaauucuaacugu

SEQ ID NO: 782198 - RNA, 19 nt, Homo sapiens
  misc_RNA (1)...(19): siRNA sense strand
uaaaagauguucaguuugc

SEQ ID NO: 782199 - RNA, 19 nt, Homo sapiens
  misc_RNA (1)...(19): siRNA sense strand
agacuggauuauuacacua

SEQ ID NO: 782200 - RNA, 19 nt, Homo sapiens
  misc_RNA (1)...(19): siRNA sense strand
cgauaugugcaaauuacua

SEQ ID NO: 782201 - RNA, 19 nt, Homo sapiens
  misc_RNA (1)...(19): siRNA sense strand
guagguaucucucaaaagg

SEQ ID NO: 782202 - RNA, 19 nt, Homo sapiens
  misc_RNA (1)...(19): siRNA sense strand
aaacuggacaccuugauca

SEQ ID NO: 782203 - RNA, 19 nt, Homo sapiens
  misc_RNA (1)...(19): siRNA sense strand
caagaagcuggaacauuau

SEQ ID NO: 782204 - RNA, 19 nt, Homo sapiens
  misc_RNA (1)...(19): siRNA sense strand
cauguuugcugcacuuucu

SEQ ID NO: 782205 - RNA, 19 nt, Homo sapiens
  misc_RNA (1)...(19): siRNA sense strand
acagagugauggauuugau

SEQ ID NO: 782206 - RNA, 19 nt, Homo sapiens
  misc_RNA (1)...(19): siRNA sense strand
cauugcuccuguugaaauu

SEQ ID NO: 782207 - RNA, 19 nt, Homo sapiens
  misc_RNA (1)...(19): siRNA sense strand
uaaaugcuacagagugaug

SEQ ID NO: 782208 - RNA, 19 nt, Homo sapiens
  misc_RNA (1)...(19): siRNA sense strand
gaaggacauuuacgaaaag

SEQ ID NO: 782209 - RNA, 19 nt, Homo sapiens
  misc_RNA (1)...(19): siRNA sense strand
agaaucugaaggacauuua

SEQ ID NO: 782210 - RNA, 19 nt, Homo sapiens
  misc_RNA (1)...(19): siRNA sense strand
cugguuuacucauaagaaa

SEQ ID NO: 782211 - RNA, 19 nt, Homo sapiens
  misc_RNA (1)...(19): siRNA sense strand
ucaacuguuuggacgagaa

SEQ ID NO: 782212 - RNA, 19 nt, Homo sapiens
  misc_RNA (1)...(19): siRNA sense strand
aagaacagcagcucagaug

SEQ ID NO: 782213 - RNA, 19 nt, Homo sapiens
  misc_RNA (1)...(19): siRNA sense strand
ugaucaaaccugccagaaa

SEQ ID NO: 782214 - RNA, 19 nt, Homo sapiens
  misc_RNA (1)...(19): siRNA sense strand
gauguggaauuuugcacua

SEQ ID NO: 782215 - RNA, 19 nt, Homo sapiens
  misc_RNA (1)...(19): siRNA sense strand
ucacuggccagguggguuu

SEQ ID NO: 782216 - RNA, 19 nt, Homo sapiens
  misc_RNA (1)...(19): siRNA sense strand
gaucgugaugcuuguaaau

SEQ ID NO: 782217 - RNA, 19 nt, Homo sapiens
  misc_RNA (1)...(19): siRNA sense strand
gaaucuucauccugucaag

SEQ ID NO: 782218 - RNA, 19 nt, Homo sapiens
  misc_RNA (1)...(19): siRNA sense strand
gcuaugaagaugcauuaca

SEQ ID NO: 782219 - RNA, 19 nt, Homo sapiens
  misc_RNA (1)...(19): siRNA sense strand
gugauggauuugauuugug

SEQ ID NO: 782220 - RNA, 19 nt, Homo sapiens
  misc_RNA (1)...(19): siRNA sense strand
gaacauggcuucaauuaag

SEQ ID NO: 782221 - RNA, 19 nt, Homo sapiens
  misc_RNA (1)...(19): siRNA sense strand
cuucaaagguuuacucuua

SEQ ID NO: 782222 - RNA, 19 nt, Homo sapiens
  misc_RNA (1)...(19): siRNA sense strand
uaaaguugcuggagaguaa

SEQ ID NO: 782223 - RNA, 19 nt, Homo sapiens
  misc_RNA (1)...(19): siRNA sense strand
uaaauuaccuuggcgauug

SEQ ID NO: 782224 - RNA, 19 nt, Homo sapiens
  misc_RNA (1)...(19): siRNA sense strand
ucaaaggacuguaaauuuc

SEQ ID NO: 782225 - RNA, 19 nt, Homo sapiens
  misc_RNA (1)...(19): siRNA sense strand
uaaaucaucucaggacuuu

SEQ ID NO: 782226 - RNA, 19 nt, Homo sapiens
  misc_RNA (1)...(19): siRNA sense strand
gaagauggcucaaaauaug

SEQ ID NO: 782227 - RNA, 19 nt, Homo sapiens
  misc_RNA (1)...(19): siRNA sense strand
gaauucaguucaccuaaug

SEQ ID NO: 782228 - RNA, 19 nt, Homo sapiens
  misc_RNA (1)...(19): siRNA sense strand
ccaggcauaucgucaguua

SEQ ID NO: 782229 - RNA, 19 nt, Homo sapiens
  misc_RNA (1)...(19): siRNA sense strand
cagcaucucuuugaaguuu

SEQ ID NO: 782230 - RNA, 19 nt, Homo sapiens
  misc_RNA (1)...(19): siRNA sense strand
agaagaagauugugguuga

SEQ ID NO: 782231 - RNA, 19 nt, Homo sapiens
  misc_RNA (1)...(19): siRNA sense strand
ggacaucaaguaauaagaa

SEQ ID NO: 782232 - RNA, 19 nt, Homo sapiens
  misc_RNA (1)...(19): siRNA sense strand
gcacgugcccuuuggagua

SEQ ID NO: 782233 - RNA, 19 nt, Homo sapiens
  misc_RNA (1)...(19): siRNA sense strand
gaccagauauucaaguuca

SEQ ID NO: 782234 - RNA, 19 nt, Homo sapiens
  misc_RNA (1)...(19): siRNA sense strand
gaagaggagaugucacuuu

SEQ ID NO: 782235 - RNA, 19 nt, Homo sapiens
  misc_RNA (1)...(19): siRNA sense strand
ggauaugacugggcagaaa

SEQ ID NO: 782236 - RNA, 19 nt, Homo sapiens
  misc_RNA (1)...(19): siRNA sense strand
gagaagcuaagaugugaua

SEQ ID NO: 782237 - RNA, 19 nt, Homo sapiens
  misc_RNA (1)...(19): siRNA sense strand
gaauaacaccuguauguag

SEQ ID NO: 782238 - RNA, 19 nt, Homo sapiens
  misc_RNA (1)...(19): siRNA sense strand
ggaauaacaccuguaugua

SEQ ID NO: 782239 - RNA, 19 nt, Homo sapiens
  misc_RNA (1)...(19): siRNA sense strand
aagaagaaguagcugauuu

SEQ ID NO: 782240 - RNA, 19 nt, Homo sapiens
  misc_RNA (1)...(19): siRNA sense strand
ucgacgaggugcuuuauaa

SEQ ID NO: 782241 - RNA, 19 nt, Homo sapiens
  misc_RNA (1)...(19): siRNA sense strand
cagaacauggcuucaauua

SEQ ID NO: 782242 - RNA, 19 nt, Homo sapiens
  misc_RNA (1)...(19): siRNA sense strand
cagagaagcuaagauguga

SEQ ID NO: 782243 - RNA, 19 nt, Homo sapiens
  misc_RNA (1)...(19): siRNA sense strand
gaagaagauugugguugaa

SEQ ID NO: 782244 - RNA, 19 nt, Homo sapiens
  misc_RNA (1)...(19): siRNA sense strand
gaagaguacauucggguuu

SEQ ID NO: 782245 - RNA, 19 nt, Homo sapiens
  misc_RNA (1)...(19): siRNA sense strand
caaagacagugcuacaaca

SEQ ID NO: 782246 - RNA, 19 nt, Homo sapiens
  misc_RNA (1)...(19): siRNA sense strand
ccaagagacuagcagagaa

SEQ ID NO: 782247 - RNA, 19 nt, Homo sapiens
  misc_RNA (1)...(19): siRNA sense strand
gucaaaggacuguaaauuu

SEQ ID NO: 782248 - RNA, 19 nt, Homo sapiens
  misc_RNA (1)...(19): siRNA sense strand
gaacggcuguaguagaucu

SEQ ID NO: 782249 - RNA, 19 nt, Homo sapiens
  misc_RNA (1)...(19): siRNA sense strand
guagaucucucugggaaug

SEQ ID NO: 782250 - RNA, 19 nt, Homo sapiens
  misc_RNA (1)...(19): siRNA sense strand
ggucaaaggacuguaaauu

SEQ ID NO: 782251 - RNA, 19 nt, Homo sapiens
  misc_RNA (1)...(19): siRNA sense strand
gcagagaagcuaagaugug

SEQ ID NO: 782252 - RNA, 19 nt, Homo sapiens
  misc_RNA (1)...(19): siRNA sense strand
uaaagaagcagcagaugau

SEQ ID NO: 782253 - RNA, 19 nt, Homo sapiens
  misc_RNA (1)...(19): siRNA sense strand
uaagacaacuaaagaacuc

SEQ ID NO: 782254 - RNA, 19 nt, Homo sapiens
  misc_RNA (1)...(19): siRNA sense strand
gaagauugugguugaauuc

SEQ ID NO: 782255 - RNA, 19 nt, Homo sapiens
  misc_RNA (1)...(19): siRNA sense strand
ggaagagacuuuuggaugu

SEQ ID NO: 782256 - RNA, 19 nt, Homo sapiens
  misc_RNA (1)...(19): siRNA sense strand
caacuaaagaacucaagaa

SEQ ID NO: 782257 - RNA, 19 nt, Homo sapiens
  misc_RNA (1)...(19): siRNA sense strand
uagaucgaauggacaagua

SEQ ID NO: 782258 - RNA, 19 nt, Homo sapiens
  misc_RNA (1)...(19): siRNA sense strand
aagaguacauucggguuua

SEQ ID NO: 782259 - RNA, 19 nt, Homo sapiens
  misc_RNA (1)...(19): siRNA sense strand
ucgcagcacucauuauuca

SEQ ID NO: 782260 - RNA, 19 nt, Homo sapiens
  misc_RNA (1)...(19): siRNA sense strand
gcuauugcuugccagcuuu

SEQ ID NO: 782261 - RNA, 19 nt, Homo sapiens
  misc_RNA (1)...(19): siRNA sense strand
gugauacaguggugaguga

SEQ ID NO: 782262 - RNA, 19 nt, Homo sapiens
  misc_RNA (1)...(19): siRNA sense strand
cgaggugcuuuauaaauca

SEQ ID NO: 782263 - RNA, 19 nt, Homo sapiens
  misc_RNA (1)...(19): siRNA sense strand
gcucgcagcacucauuauu

SEQ ID NO: 782264 - RNA, 19 nt, Homo sapiens
  misc_RNA (1)...(19): siRNA sense strand
cgaauggacaaguauaauu

SEQ ID NO: 782265 - RNA, 19 nt, Homo sapiens
  misc_RNA (1)...(19): siRNA sense strand
gaucgaauggacaaguaua

SEQ ID NO: 782266 - RNA, 19 nt, Homo sapiens
  misc_RNA (1)...(19): siRNA sense strand
gaaaucaguacuggucaaa

SEQ ID NO: 782267 - RNA, 19 nt, Homo sapiens
  misc_RNA (1)...(19): siRNA sense strand
guucuaccaucauaggaaa

SEQ ID NO: 782268 - RNA, 19 nt, Homo sapiens
  misc_RNA (1)...(19): siRNA sense strand
ggauguggguaccugaaug

SEQ ID NO: 782269 - RNA, 19 nt, Homo sapiens
  misc_RNA (1)...(19): siRNA sense strand
ugaugggacuucucucuau

SEQ ID NO: 782270 - RNA, 19 nt, Homo sapiens
  misc_RNA (1)...(19): siRNA sense strand
uaucgucaguuaccuucua

SEQ ID NO: 782271 - RNA, 19 nt, Homo sapiens
  misc_RNA (1)...(19): siRNA sense strand
guggguaccugaaugacuu

SEQ ID NO: 782272 - RNA, 19 nt, Homo sapiens
  misc_RNA (1)...(19): siRNA sense strand
aagaggagaugucacuuuc

SEQ ID NO: 782273 - RNA, 19 nt, Homo sapiens
  misc_RNA (1)...(19): siRNA sense strand
agaagcagcagaugauaaa

SEQ ID NO: 782274 - RNA, 19 nt, Homo sapiens
  misc_RNA (1)...(19): siRNA sense strand
cagcaaguauuccaaaugc

SEQ ID NO: 782275 - RNA, 19 nt, Homo sapiens
  misc_RNA (1)...(19): siRNA sense strand
gaugggacuucucucuaug

SEQ ID NO: 782276 - RNA, 19 nt, Homo sapiens
  misc_RNA (1)...(19): siRNA sense strand
uaacaaagacagugcuaca

SEQ ID NO: 782277 - RNA, 19 nt, Homo sapiens
  misc_RNA (1)...(19): siRNA sense strand
agaagauugugguugaauu

SEQ ID NO: 782278 - RNA, 19 nt, Homo sapiens
  misc_RNA (1)...(19): siRNA sense strand
caaaggacuguaaauuuca

SEQ ID NO: 782279 - RNA, 19 nt, Homo sapiens
  misc_RNA (1)...(19): siRNA sense strand
guacuguaaugcgaaguga

SEQ ID NO: 782280 - RNA, 19 nt, Homo sapiens
  misc_RNA (1)...(19): siRNA sense strand
gcaucucuuugaaguuuau

SEQ ID NO: 782281 - RNA, 19 nt, Homo sapiens
  misc_RNA (1)...(19): siRNA sense strand
gauuggaacugggcgaugu

SEQ ID NO: 782282 - RNA, 19 nt, Homo sapiens
  misc_RNA (1)...(19): siRNA sense strand
uaucugcaguuccaauuuc

SEQ ID NO: 782283 - RNA, 19 nt, Homo sapiens
  misc_RNA (1)...(19): siRNA sense strand
caauuaaggaugcuacaga

SEQ ID NO: 782284 - RNA, 19 nt, Homo sapiens
  misc_RNA (1)...(19): siRNA sense strand
uuacaagcgucugggagua

SEQ ID NO: 782285 - RNA, 19 nt, Homo sapiens
  misc_RNA (1)...(19): siRNA sense strand
ggaaugaagacucgaagag

SEQ ID NO: 782286 - RNA, 19 nt, Homo sapiens
  misc_RNA (1)...(19): siRNA sense strand
agacagugcuacaacaagu

SEQ ID NO: 782287 - RNA, 19 nt, Homo sapiens
  misc_RNA (1)...(19): siRNA sense strand
uuucaaagcuguccguucu

SEQ ID NO: 782288 - RNA, 19 nt, Homo sapiens
  misc_RNA (1)...(19): siRNA sense strand
acucuuaucugacuacaag

SEQ ID NO: 782289 - RNA, 19 nt, Homo sapiens
  misc_RNA (1)...(19): siRNA sense strand
uaaggaugcuacagaacau

SEQ ID NO: 782290 - RNA, 19 nt, Homo sapiens
  misc_RNA (1)...(19): siRNA sense strand
aauuaaggaugcuacagaa

SEQ ID NO: 782291 - RNA, 19 nt, Homo sapiens
  misc_RNA (1)...(19): siRNA sense strand
ggacuccuacugagaacaa

SEQ ID NO: 782292 - RNA, 19 nt, Homo sapiens
  misc_RNA (1)...(19): siRNA sense strand
gggaguauauuuugaugaa

SEQ ID NO: 782293 - RNA, 19 nt, Homo sapiens
  misc_RNA (1)...(19): siRNA sense strand
ggaguucuuccaacgauug

SEQ ID NO: 782294 - RNA, 19 nt, Homo sapiens
  misc_RNA (1)...(19): siRNA sense strand
gcacuuucacuguggcaaa

SEQ ID NO: 782295 - RNA, 19 nt, Homo sapiens
  misc_RNA (1)...(19): siRNA sense strand
uggaauaacaccuguaugu

SEQ ID NO: 782296 - RNA, 19 nt, Homo sapiens
  misc_RNA (1)...(19): siRNA sense strand
aagguuuacucuuaucuga

SEQ ID NO: 782297 - RNA, 19 nt, Homo sapiens
  misc_RNA (1)...(19): siRNA sense strand
uacagaacauggcuucaau

SEQ ID NO: 782298 - RNA, 19 nt, Homo sapiens
  misc_RNA (1)...(19): siRNA sense strand
gaagcuaagaugugauaca

SEQ ID NO: 782299 - RNA, 19 nt, Homo sapiens
  misc_RNA (1)...(19): siRNA sense strand
ucaaagcuguccguucugu

SEQ ID NO: 782300 - RNA, 19 nt, Homo sapiens
  misc_RNA (1)...(19): siRNA sense strand
gacgaggugcuuuauaaau

SEQ ID NO: 782301 - RNA, 19 nt, Homo sapiens
  misc_RNA (1)...(19): siRNA sense strand
acaagcgucugggaguaua

SEQ ID NO: 782302 - RNA, 19 nt, Homo sapiens
  misc_RNA (1)...(19): siRNA sense strand
ugaaaucaguacuggucaa

SEQ ID NO: 782303 - RNA, 19 nt, Homo sapiens
  misc_RNA (1)...(19): siRNA sense strand
caacaaguaauugaagaug

SEQ ID NO: 782304 - RNA, 19 nt, Homo sapiens
  misc_RNA (1)...(19): siRNA sense strand
gcaguuccaauuucccaaa

SEQ ID NO: 782305 - RNA, 19 nt, Homo sapiens
  misc_RNA (1)...(19): siRNA sense strand
gauguggguaccugaauga

SEQ ID NO: 782306 - RNA, 19 nt, Homo sapiens
  misc_RNA (1)...(19): siRNA sense strand
ucaaagguuuacucuuauc

SEQ ID NO: 782307 - RNA, 19 nt, Homo sapiens
  misc_RNA (1)...(19): siRNA sense strand
auucaggacuucaaagguu

SEQ ID NO: 782308 - RNA, 19 nt, Homo sapiens
  misc_RNA (1)...(19): siRNA sense strand
aggaacggcuguaguagau

SEQ ID NO: 782309 - RNA, 19 nt, Homo sapiens
  misc_RNA (1)...(19): siRNA sense strand
ggaacugggcgaugugcaa

SEQ ID NO: 782310 - RNA, 19 nt, Homo sapiens
  misc_RNA (1)...(19): siRNA sense strand
gaccauucaagaccagaua

SEQ ID NO: 782311 - RNA, 19 nt, Homo sapiens
  misc_RNA (1)...(19): siRNA sense strand
gauugugguugaauucagu

SEQ ID NO: 782312 - RNA, 19 nt, Homo sapiens
  misc_RNA (1)...(19): siRNA sense strand
uuucgggacuugagcauug

SEQ ID NO: 782313 - RNA, 19 nt, Homo sapiens
  misc_RNA (1)...(19): siRNA sense strand
acgaggugcuuuauaaauc

SEQ ID NO: 782314 - RNA, 19 nt, Homo sapiens
  misc_RNA (1)...(19): siRNA sense strand
cgacgaggugcuuuauaaa

SEQ ID NO: 782315 - RNA, 19 nt, Homo sapiens
  misc_RNA (1)...(19): siRNA sense strand
gaacuuuucucuggacuuc

SEQ ID NO: 782316 - RNA, 19 nt, Homo sapiens
  misc_RNA (1)...(19): siRNA sense strand
aagaccagauauucaaguu

SEQ ID NO: 782317 - RNA, 19 nt, Homo sapiens
  misc_RNA (1)...(19): siRNA sense strand
uaauaaagaagcagcagau

SEQ ID NO: 782318 - RNA, 19 nt, Homo sapiens
  misc_RNA (1)...(19): siRNA sense strand
gcaaaucucaaagaagcuu

SEQ ID NO: 782319 - RNA, 19 nt, Homo sapiens
  misc_RNA (1)...(19): siRNA sense strand
ugcugaagaucaugggaua

SEQ ID NO: 782320 - RNA, 19 nt, Homo sapiens
  misc_RNA (1)...(19): siRNA sense strand
ggaagaagaugcucggaaa

SEQ ID NO: 782321 - RNA, 19 nt, Homo sapiens
  misc_RNA (1)...(19): siRNA sense strand
ccaagaagaugcuuuguug

SEQ ID NO: 782322 - RNA, 19 nt, Homo sapiens
  misc_RNA (1)...(19): siRNA sense strand
gaacaagauuccugugcua

SEQ ID NO: 782323 - RNA, 19 nt, Homo sapiens
  misc_RNA (1)...(19): siRNA sense strand
ugaagaaccuuuagccaaa

SEQ ID NO: 782324 - RNA, 19 nt, Homo sapiens
  misc_RNA (1)...(19): siRNA sense strand
gaagaugcuuuguugaguu

SEQ ID NO: 782325 - RNA, 19 nt, Homo sapiens
  misc_RNA (1)...(19): siRNA sense strand
gaaagcaucugugugguau

SEQ ID NO: 782326 - RNA, 19 nt, Homo sapiens
  misc_RNA (1)...(19): siRNA sense strand
ccacaaagaggcaagauaa

SEQ ID NO: 782327 - RNA, 19 nt, Homo sapiens
  misc_RNA (1)...(19): siRNA sense strand
caacagaucuugcauuacg

SEQ ID NO: 782328 - RNA, 19 nt, Homo sapiens
  misc_RNA (1)...(19): siRNA sense strand
uuggaaaccucaaauagua

SEQ ID NO: 782329 - RNA, 19 nt, Homo sapiens
  misc_RNA (1)...(19): siRNA sense strand
gaucuugcauuacgauguu

SEQ ID NO: 782330 - RNA, 19 nt, Homo sapiens
  misc_RNA (1)...(19): siRNA sense strand
gauacagaaucacagauga

SEQ ID NO: 782331 - RNA, 19 nt, Homo sapiens
  misc_RNA (1)...(19): siRNA sense strand
aaauguaacucaagagaga

SEQ ID NO: 782332 - RNA, 19 nt, Homo sapiens
  misc_RNA (1)...(19): siRNA sense strand
ccaaacgcauaaagaauga

SEQ ID NO: 782333 - RNA, 19 nt, Homo sapiens
  misc_RNA (1)...(19): siRNA sense strand
cuuaagagaugaaacagaa

SEQ ID NO: 782334 - RNA, 19 nt, Homo sapiens
  misc_RNA (1)...(19): siRNA sense strand
ggaaagcaucuguguggua

SEQ ID NO: 782335 - RNA, 19 nt, Homo sapiens
  misc_RNA (1)...(19): siRNA sense strand
aaacagaaauaccugaaca

SEQ ID NO: 782336 - RNA, 19 nt, Homo sapiens
  misc_RNA (1)...(19): siRNA sense strand
gauggaggauacagaauca

SEQ ID NO: 782337 - RNA, 19 nt, Homo sapiens
  misc_RNA (1)...(19): siRNA sense strand
caagauuccugugcuaaga

SEQ ID NO: 782338 - RNA, 19 nt, Homo sapiens
  misc_RNA (1)...(19): siRNA sense strand
aaacagcaggcuucuauuu

SEQ ID NO: 782339 - RNA, 19 nt, Homo sapiens
  misc_RNA (1)...(19): siRNA sense strand
caaagaggcaagauaauca

SEQ ID NO: 782340 - RNA, 19 nt, Homo sapiens
  misc_RNA (1)...(19): siRNA sense strand
ggguugauauugccuuaaa

SEQ ID NO: 782341 - RNA, 19 nt, Homo sapiens
  misc_RNA (1)...(19): siRNA sense strand
ggcuugaauucuacacuua

SEQ ID NO: 782342 - RNA, 19 nt, Homo sapiens
  misc_RNA (1)...(19): siRNA sense strand
aaauagggcaucuuuguaa

SEQ ID NO: 782343 - RNA, 19 nt, Homo sapiens
  misc_RNA (1)...(19): siRNA sense strand
ggaaaggaaugaagaaccu

SEQ ID NO: 782344 - RNA, 19 nt, Homo sapiens
  misc_RNA (1)...(19): siRNA sense strand
gauucaagguggauggaaa

SEQ ID NO: 782345 - RNA, 19 nt, Homo sapiens
  misc_RNA (1)...(19): siRNA sense strand
ugaaacagcaggcuucuau

SEQ ID NO: 782346 - RNA, 19 nt, Homo sapiens
  misc_RNA (1)...(19): siRNA sense strand
ucaaauaguaccacaaaga

SEQ ID NO: 782347 - RNA, 19 nt, Homo sapiens
  misc_RNA (1)...(19): siRNA sense strand
agugaaggcuugaauucua

SEQ ID NO: 782348 - RNA, 19 nt, Homo sapiens
  misc_RNA (1)...(19): siRNA sense strand
gaggcaagauaaucagaau

SEQ ID NO: 782349 - RNA, 19 nt, Homo sapiens
  misc_RNA (1)...(19): siRNA sense strand
caaccaagcaccugaaaca

SEQ ID NO: 782350 - RNA, 19 nt, Homo sapiens
  misc_RNA (1)...(19): siRNA sense strand
ggcaagauaaucagaauga

SEQ ID NO: 782351 - RNA, 19 nt, Homo sapiens
  misc_RNA (1)...(19): siRNA sense strand
guuaacugcuuuaccaaau

SEQ ID NO: 782352 - RNA, 19 nt, Homo sapiens
  misc_RNA (1)...(19): siRNA sense strand
uaacugcuuuaccaaauca

SEQ ID NO: 782353 - RNA, 19 nt, Homo sapiens
  misc_RNA (1)...(19): siRNA sense strand
gauauugccuuaaaagaug

SEQ ID NO: 782354 - RNA, 19 nt, Homo sapiens
  misc_RNA (1)...(19): siRNA sense strand
gaaaauagggcaucuuugu

SEQ ID NO: 782355 - RNA, 19 nt, Homo sapiens
  misc_RNA (1)...(19): siRNA sense strand
ugauggcgcugauuguuug

SEQ ID NO: 782356 - RNA, 19 nt, Homo sapiens
  misc_RNA (1)...(19): siRNA sense strand
gggauucaguccugcuuug

SEQ ID NO: 782357 - RNA, 19 nt, Homo sapiens
  misc_RNA (1)...(19): siRNA sense strand
cagaaauaccugaacaauu

SEQ ID NO: 782358 - RNA, 19 nt, Homo sapiens
  misc_RNA (1)...(19): siRNA sense strand
uagggcaucuuuguaaauu

SEQ ID NO: 782359 - RNA, 19 nt, Homo sapiens
  misc_RNA (1)...(19): siRNA sense strand
ucagaaugaugauagugaa

SEQ ID NO: 782360 - RNA, 19 nt, Homo sapiens
  misc_RNA (1)...(19): siRNA sense strand
cacaguauaugaagaucaa

SEQ ID NO: 782361 - RNA, 19 nt, Homo sapiens
  misc_RNA (1)...(19): siRNA sense strand
ggaaaacacagaaagaaaa

SEQ ID NO: 782362 - RNA, 19 nt, Homo sapiens
  misc_RNA (1)...(19): siRNA sense strand
uaugucccauccagcauua

SEQ ID NO: 782363 - RNA, 19 nt, Homo sapiens
  misc_RNA (1)...(19): siRNA sense strand
agauauuaaugcaggcuua

SEQ ID NO: 782364 - RNA, 19 nt, Homo sapiens
  misc_RNA (1)...(19): siRNA sense strand
gaucaacuagcaaagcauu

SEQ ID NO: 782365 - RNA, 19 nt, Homo sapiens
  misc_RNA (1)...(19): siRNA sense strand
gaugauggaggauacagaa

SEQ ID NO: 782366 - RNA, 19 nt, Homo sapiens
  misc_RNA (1)...(19): siRNA sense strand
aagaugcuuuguugaguuu

SEQ ID NO: 782367 - RNA, 19 nt, Homo sapiens
  misc_RNA (1)...(19): siRNA sense strand
caccagaaacaacugcuua

SEQ ID NO: 782368 - RNA, 19 nt, Homo sapiens
  misc_RNA (1)...(19): siRNA sense strand
ugaagagcaugaugaugga

SEQ ID NO: 782369 - RNA, 19 nt, Homo sapiens
  misc_RNA (1)...(19): siRNA sense strand
gccaaacgcauaaagaaug

SEQ ID NO: 782370 - RNA, 19 nt, Homo sapiens
  misc_RNA (1)...(19): siRNA sense strand
guuccaauuucuucucuau

SEQ ID NO: 782371 - RNA, 19 nt, Homo sapiens
  misc_RNA (1)...(19): siRNA sense strand
ggauacagaaucacagaug

SEQ ID NO: 782372 - RNA, 19 nt, Homo sapiens
  misc_RNA (1)...(19): siRNA sense strand
gaaacagcaggcuucuauu

SEQ ID NO: 782373 - RNA, 19 nt, Homo sapiens
  misc_RNA (1)...(19): siRNA sense strand
gaaugaugauagugaagag

SEQ ID NO: 782374 - RNA, 19 nt, Homo sapiens
  misc_RNA (1)...(19): siRNA sense strand
uagaugcgguuacuaugug

SEQ ID NO: 782375 - RNA, 19 nt, Homo sapiens
  misc_RNA (1)...(19): siRNA sense strand
acagcaggcuucuauuuua

SEQ ID NO: 782376 - RNA, 19 nt, Homo sapiens
  misc_RNA (1)...(19): siRNA sense strand
ggaauuggaaagcaucugu

SEQ ID NO: 782377 - RNA, 19 nt, Homo sapiens
  misc_RNA (1)...(19): siRNA sense strand
aauagggcaucuuuguaaa

SEQ ID NO: 782378 - RNA, 19 nt, Homo sapiens
  misc_RNA (1)...(19): siRNA sense strand
ccucaaauaguaccacaaa

SEQ ID NO: 782379 - RNA, 19 nt, Homo sapiens
  misc_RNA (1)...(19): siRNA sense strand
gaagaaccuuuagccaaac

SEQ ID NO: 782380 - RNA, 19 nt, Homo sapiens
  misc_RNA (1)...(19): siRNA sense strand
caaauaguaccacaaagag

SEQ ID NO: 782381 - RNA, 19 nt, Homo sapiens
  misc_RNA (1)...(19): siRNA sense strand
gguaggaauuggaaagcau

SEQ ID NO: 782382 - RNA, 19 nt, Homo sapiens
  misc_RNA (1)...(19): siRNA sense strand
aaggucgaauccaguauuu

SEQ ID NO: 782383 - RNA, 19 nt, Homo sapiens
  misc_RNA (1)...(19): siRNA sense strand
gcaugaugauggaggauac

SEQ ID NO: 782384 - RNA, 19 nt, Homo sapiens
  misc_RNA (1)...(19): siRNA sense strand
guagaugcgguuacuaugu

SEQ ID NO: 782385 - RNA, 19 nt, Homo sapiens
  misc_RNA (1)...(19): siRNA sense strand
ccucuggugucuuuggaaa

SEQ ID NO: 782386 - RNA, 19 nt, Homo sapiens
  misc_RNA (1)...(19): siRNA sense strand
caaggucgaauccaguauu

SEQ ID NO: 782387 - RNA, 19 nt, Homo sapiens
  misc_RNA (1)...(19): siRNA sense strand
gaugauggcgcugauuguu

SEQ ID NO: 782388 - RNA, 19 nt, Homo sapiens
  misc_RNA (1)...(19): siRNA sense strand
aaugcaggcuuaagagaug

SEQ ID NO: 782389 - RNA, 19 nt, Homo sapiens
  misc_RNA (1)...(19): siRNA sense strand
gggcaucuuuguaaauugc

SEQ ID NO: 782390 - RNA, 19 nt, Homo sapiens
  misc_RNA (1)...(19): siRNA sense strand
gaggauacagaaucacaga

SEQ ID NO: 782391 - RNA, 19 nt, Homo sapiens
  misc_RNA (1)...(19): siRNA sense strand
gaaauaccugaacaauuag

SEQ ID NO: 782392 - RNA, 19 nt, Homo sapiens
  misc_RNA (1)...(19): siRNA sense strand
ggguagaugcgguuacuau

SEQ ID NO: 782393 - RNA, 19 nt, Homo sapiens
  misc_RNA (1)...(19): siRNA sense strand
uagccaaacgcauaaagaa

SEQ ID NO: 782394 - RNA, 19 nt, Homo sapiens
  misc_RNA (1)...(19): siRNA sense strand
caaaacacacaguauauga

SEQ ID NO: 782395 - RNA, 19 nt, Homo sapiens
  misc_RNA (1)...(19): siRNA sense strand
caauuucuucucuaucuga

SEQ ID NO: 782396 - RNA, 19 nt, Homo sapiens
  misc_RNA (1)...(19): siRNA sense strand
cuuuguaaauugcugauug

SEQ ID NO: 782397 - RNA, 19 nt, Homo sapiens
  misc_RNA (1)...(19): siRNA sense strand
ugccugggcuucuuagugu

SEQ ID NO: 782398 - RNA, 19 nt, Homo sapiens
  misc_RNA (1)...(19): siRNA sense strand
gaggguagaugcgguuacu

SEQ ID NO: 782399 - RNA, 19 nt, Homo sapiens
  misc_RNA (1)...(19): siRNA sense strand
caagaagaugcuuuguuga

SEQ ID NO: 782400 - RNA, 19 nt, Homo sapiens
  misc_RNA (1)...(19): siRNA sense strand
gaagagcaguuggaaaagu

SEQ ID NO: 782401 - RNA, 19 nt, Homo sapiens
  misc_RNA (1)...(19): siRNA sense strand
gaaaacaucuuuggaaacc

SEQ ID NO: 782402 - RNA, 19 nt, Homo sapiens
  misc_RNA (1)...(19): siRNA sense strand
gccaaggaaggaaaugaaa

SEQ ID NO: 782403 - RNA, 19 nt, Homo sapiens
  misc_RNA (1)...(19): siRNA sense strand
auaugaagaucaacuagca

SEQ ID NO: 782404 - RNA, 19 nt, Homo sapiens
  misc_RNA (1)...(19): siRNA sense strand
gguccaagaagaugcuuug

SEQ ID NO: 782405 - RNA, 19 nt, Homo sapiens
  misc_RNA (1)...(19): siRNA sense strand
gugaaggcuugaauucuac

SEQ ID NO: 782406 - RNA, 19 nt, Homo sapiens
  misc_RNA (1)...(19): siRNA sense strand
gcuugaauucuacacuuaa

SEQ ID NO: 782407 - RNA, 19 nt, Homo sapiens
  misc_RNA (1)...(19): siRNA sense strand
cagaugauggcgcugauug

SEQ ID NO: 782408 - RNA, 19 nt, Homo sapiens
  misc_RNA (1)...(19): siRNA sense strand
cggaaaacaucuuuggaaa

SEQ ID NO: 782409 - RNA, 19 nt, Homo sapiens
  misc_RNA (1)...(19): siRNA sense strand
agaagaugcuuuguugagu

SEQ ID NO: 782410 - RNA, 19 nt, Homo sapiens
  misc_RNA (1)...(19): siRNA sense strand
aagaucaacuagcaaagca

SEQ ID NO: 782411 - RNA, 19 nt, Homo sapiens
  misc_RNA (1)...(19): siRNA sense strand
uaccaaaucauucuucauc

SEQ ID NO: 782412 - RNA, 19 nt, Homo sapiens
  misc_RNA (1)...(19): siRNA sense strand
agaauccuguguccuuuag

SEQ ID NO: 782413 - RNA, 19 nt, Homo sapiens
  misc_RNA (1)...(19): siRNA sense strand
acaaagaggcaagauaauc

SEQ ID NO: 782414 - RNA, 19 nt, Homo sapiens
  misc_RNA (1)...(19): siRNA sense strand
ggugugauuggagacauua

SEQ ID NO: 782415 - RNA, 19 nt, Homo sapiens
  misc_RNA (1)...(19): siRNA sense strand
ggccaaggaaggaaaugaa

SEQ ID NO: 782416 - RNA, 19 nt, Homo sapiens
  misc_RNA (1)...(19): siRNA sense strand
gaagaucaacuagcaaagc

SEQ ID NO: 782417 - RNA, 19 nt, Homo sapiens
  misc_RNA (1)...(19): siRNA sense strand
uccaauuucuucucuaucu

SEQ ID NO: 782418 - RNA, 19 nt, Homo sapiens
  misc_RNA (1)...(19): siRNA sense strand
aaacacacaguauaugaag

SEQ ID NO: 782419 - RNA, 19 nt, Homo sapiens
  misc_RNA (1)...(19): siRNA sense strand
gaagaugcucggaaaagaa

SEQ ID NO: 782420 - RNA, 19 nt, Homo sapiens
  misc_RNA (1)...(19): siRNA sense strand
gauguugguucacuaaaua

SEQ ID NO: 782421 - RNA, 19 nt, Homo sapiens
  misc_RNA (1)...(19): siRNA sense strand
gacaaguccugcucauaua

SEQ ID NO: 782422 - RNA, 19 nt, Homo sapiens
  misc_RNA (1)...(19): siRNA sense strand
aaagagagcucaagacauc

SEQ ID NO: 782423 - RNA, 19 nt, Homo sapiens
  misc_RNA (1)...(19): siRNA sense strand
gaggaaauguggaaaugaa

SEQ ID NO: 782424 - RNA, 19 nt, Homo sapiens
  misc_RNA (1)...(19): siRNA sense strand
gcacacaggaguugucuaa

SEQ ID NO: 782425 - RNA, 19 nt, Homo sapiens
  misc_RNA (1)...(19): siRNA sense strand
guucuuaccugccuucaaa

SEQ ID NO: 782426 - RNA, 19 nt, Homo sapiens
  misc_RNA (1)...(19): siRNA sense strand
ucaaauguguccgaacuua

SEQ ID NO: 782427 - RNA, 19 nt, Homo sapiens
  misc_RNA (1)...(19): siRNA sense strand
ggaaauggaugaugcuucu

SEQ ID NO: 782428 - RNA, 19 nt, Homo sapiens
  misc_RNA (1)...(19): siRNA sense strand
gauaagaagucacccgaau

SEQ ID NO: 782429 - RNA, 19 nt, Homo sapiens
  misc_RNA (1)...(19): siRNA sense strand
gacaaauccugauauguug

SEQ ID NO: 782430 - RNA, 19 nt, Homo sapiens
  misc_RNA (1)...(19): siRNA sense strand
gcucaagacaucucuguua

SEQ ID NO: 782431 - RNA, 19 nt, Homo sapiens
  misc_RNA (1)...(19): siRNA sense strand
ggacauggagaccaauaua

SEQ ID NO: 782432 - RNA, 19 nt, Homo sapiens
  misc_RNA (1)...(19): siRNA sense strand
gaacuuaauguccuggaua

SEQ ID NO: 782433 - RNA, 19 nt, Homo sapiens
  misc_RNA (1)...(19): siRNA sense strand
gcaguugccuuuguuaaau

SEQ ID NO: 782434 - RNA, 19 nt, Homo sapiens
  misc_RNA (1)...(19): siRNA sense strand
ugacaaauccugauauguu

SEQ ID NO: 782435 - RNA, 19 nt, Homo sapiens
  misc_RNA (1)...(19): siRNA sense strand
caccuagccugguuauaua

SEQ ID NO: 782436 - RNA, 19 nt, Homo sapiens
  misc_RNA (1)...(19): siRNA sense strand
cagugagucuucaguauaa

SEQ ID NO: 782437 - RNA, 19 nt, Homo sapiens
  misc_RNA (1)...(19): siRNA sense strand
acacuaagacuacguuuaa

SEQ ID NO: 782438 - RNA, 19 nt, Homo sapiens
  misc_RNA (1)...(19): siRNA sense strand
gaggcuacuuuauggcuua

SEQ ID NO: 782439 - RNA, 19 nt, Homo sapiens
  misc_RNA (1)...(19): siRNA sense strand
gaaugcaccugaggaaaug

SEQ ID NO: 782440 - RNA, 19 nt, Homo sapiens
  misc_RNA (1)...(19): siRNA sense strand
gcacaaguaaagaaacuaa

SEQ ID NO: 782441 - RNA, 19 nt, Homo sapiens
  misc_RNA (1)...(19): siRNA sense strand
ggaagcaucuaguaucucu

SEQ ID NO: 782442 - RNA, 19 nt, Homo sapiens
  misc_RNA (1)...(19): siRNA sense strand
ccaauucuguuguuacaug

SEQ ID NO: 782443 - RNA, 19 nt, Homo sapiens
  misc_RNA (1)...(19): siRNA sense strand
gaugaugcuucuccugaaa

SEQ ID NO: 782444 - RNA, 19 nt, Homo sapiens
  misc_RNA (1)...(19): siRNA sense strand
ucaaacaugucaaacugaa

SEQ ID NO: 782445 - RNA, 19 nt, Homo sapiens
  misc_RNA (1)...(19): siRNA sense strand
ggcaaugggagaaauguua

SEQ ID NO: 782446 - RNA, 19 nt, Homo sapiens
  misc_RNA (1)...(19): siRNA sense strand
uaucucugcuagugauuua

SEQ ID NO: 782447 - RNA, 19 nt, Homo sapiens
  misc_RNA (1)...(19): siRNA sense strand
ugauauaagugacaagaga

SEQ ID NO: 782448 - RNA, 19 nt, Homo sapiens
  misc_RNA (1)...(19): siRNA sense strand
agugauaccucaagacaaa

SEQ ID NO: 782449 - RNA, 19 nt, Homo sapiens
  misc_RNA (1)...(19): siRNA sense strand
ucacaaauguuggguacaa

SEQ ID NO: 782450 - RNA, 19 nt, Homo sapiens
  misc_RNA (1)...(19): siRNA sense strand
ucauauacauccucaccua

SEQ ID NO: 782451 - RNA, 19 nt, Homo sapiens
  misc_RNA (1)...(19): siRNA sense strand
gaauauaggagcaacuaau

SEQ ID NO: 782452 - RNA, 19 nt, Homo sapiens
  misc_RNA (1)...(19): siRNA sense strand
gaggaagcaucuaguaucu

SEQ ID NO: 782453 - RNA, 19 nt, Homo sapiens
  misc_RNA (1)...(19): siRNA sense strand
ggucaccuguacacucaua

SEQ ID NO: 782454 - RNA, 19 nt, Homo sapiens
  misc_RNA (1)...(19): siRNA sense strand
gaugagcccagcacaagua

SEQ ID NO: 782455 - RNA, 19 nt, Homo sapiens
  misc_RNA (1)...(19): siRNA sense strand
gacaguugauuguaguaaa

SEQ ID NO: 782456 - RNA, 19 nt, Homo sapiens
  misc_RNA (1)...(19): siRNA sense strand
gaaguaguuggaaaucuuu

SEQ ID NO: 782457 - RNA, 19 nt, Homo sapiens
  misc_RNA (1)...(19): siRNA sense strand
gaaguauucagaugauuug

SEQ ID NO: 782458 - RNA, 19 nt, Homo sapiens
  misc_RNA (1)...(19): siRNA sense strand
caaauauucugggaggaaa

SEQ ID NO: 782459 - RNA, 19 nt, Homo sapiens
  misc_RNA (1)...(19): siRNA sense strand
ugacagaauuguagauaag

SEQ ID NO: 782460 - RNA, 19 nt, Homo sapiens
  misc_RNA (1)...(19): siRNA sense strand
ucacagaauuggacaugga

SEQ ID NO: 782461 - RNA, 19 nt, Homo sapiens
  misc_RNA (1)...(19): siRNA sense strand
caucccaggugaguucuua

SEQ ID NO: 782462 - RNA, 19 nt, Homo sapiens
  misc_RNA (1)...(19): siRNA sense strand
gggaggaaauguggaaaug

SEQ ID NO: 782463 - RNA, 19 nt, Homo sapiens
  misc_RNA (1)...(19): siRNA sense strand
guauuuagauucagaugca

SEQ ID NO: 782464 - RNA, 19 nt, Homo sapiens
  misc_RNA (1)...(19): siRNA sense strand
gcugacaaauccugauaug

SEQ ID NO: 782465 - RNA, 19 nt, Homo sapiens
  misc_RNA (1)...(19): siRNA sense strand
ugacaaguccugcucauau

SEQ ID NO: 782466 - RNA, 19 nt, Homo sapiens
  misc_RNA (1)...(19): siRNA sense strand
caacuaaucaaacauguca

SEQ ID NO: 782467 - RNA, 19 nt, Homo sapiens
  misc_RNA (1)...(19): siRNA sense strand
ggaugaugcuucuccugaa

SEQ ID NO: 782468 - RNA, 19 nt, Homo sapiens
  misc_RNA (1)...(19): siRNA sense strand
gcccuccuccuuuguauua

SEQ ID NO: 782469 - RNA, 19 nt, Homo sapiens
  misc_RNA (1)...(19): siRNA sense strand
aaaguaaggccgaauguga

SEQ ID NO: 782470 - RNA, 19 nt, Homo sapiens
  misc_RNA (1)...(19): siRNA sense strand
caucagaucacuuugaaga

SEQ ID NO: 782471 - RNA, 19 nt, Homo sapiens
  misc_RNA (1)...(19): siRNA sense strand
agaaguaguuggaaaucuu

SEQ ID NO: 782472 - RNA, 19 nt, Homo sapiens
  misc_RNA (1)...(19): siRNA sense strand
acacgaacauccuccaaug

SEQ ID NO: 782473 - RNA, 19 nt, Homo sapiens
  misc_RNA (1)...(19): siRNA sense strand
guacaucagaucacuuuga

SEQ ID NO: 782474 - RNA, 19 nt, Homo sapiens
  misc_RNA (1)...(19): siRNA sense strand
caagacaucucuguuaaaa

SEQ ID NO: 782475 - RNA, 19 nt, Homo sapiens
  misc_RNA (1)...(19): siRNA sense strand
aaucaaacaugucaaacug

SEQ ID NO: 782476 - RNA, 19 nt, Homo sapiens
  misc_RNA (1)...(19): siRNA sense strand
uguaaauccuccacauauu

SEQ ID NO: 782477 - RNA, 19 nt, Homo sapiens
  misc_RNA (1)...(19): siRNA sense strand
uccaagcaaugcaaagaua

SEQ ID NO: 782478 - RNA, 19 nt, Homo sapiens
  misc_RNA (1)...(19): siRNA sense strand
caugauagcaguucaagga

SEQ ID NO: 782479 - RNA, 19 nt, Homo sapiens
  misc_RNA (1)...(19): siRNA sense strand
gccugaagauaaguauuua

SEQ ID NO: 782480 - RNA, 19 nt, Homo sapiens
  misc_RNA (1)...(19): siRNA sense strand
cagaaggauuugaaggaaa

SEQ ID NO: 782481 - RNA, 19 nt, Homo sapiens
  misc_RNA (1)...(19): siRNA sense strand
gcaguggugcccuccauaa

SEQ ID NO: 782482 - RNA, 19 nt, Homo sapiens
  misc_RNA (1)...(19): siRNA sense strand
uauauaggacugaggauaa

SEQ ID NO: 782483 - RNA, 19 nt, Homo sapiens
  misc_RNA (1)...(19): siRNA sense strand
guaaauccuccacauauuc

SEQ ID NO: 782484 - RNA, 19 nt, Homo sapiens
  misc_RNA (1)...(19): siRNA sense strand
uuucaaagacucaggauaa

SEQ ID NO: 782485 - RNA, 19 nt, Homo sapiens
  misc_RNA (1)...(19): siRNA sense strand
ggaggaagcaucuaguauc

SEQ ID NO: 782486 - RNA, 19 nt, Homo sapiens
  misc_RNA (1)...(19): siRNA sense strand
acacaggaguugucuaaag

SEQ ID NO: 782487 - RNA, 19 nt, Homo sapiens
  misc_RNA (1)...(19): siRNA sense strand
gaagaaggcaaugaugaug

SEQ ID NO: 782488 - RNA, 19 nt, Homo sapiens
  misc_RNA (1)...(19): siRNA sense strand
guuuaaagcugacaaaucc

SEQ ID NO: 782489 - RNA, 19 nt, Homo sapiens
  misc_RNA (1)...(19): siRNA sense strand
agacaaaucaguggaguuu

SEQ ID NO: 782490 - RNA, 19 nt, Homo sapiens
  misc_RNA (1)...(19): siRNA sense strand
cauggagaccaauauauuu

SEQ ID NO: 782491 - RNA, 19 nt, Homo sapiens
  misc_RNA (1)...(19): siRNA sense strand
agaaggcaaugaugauguu

SEQ ID NO: 782492 - RNA, 19 nt, Homo sapiens
  misc_RNA (1)...(19): siRNA sense strand
cucaagacaucucuguuaa

SEQ ID NO: 782493 - RNA, 19 nt, Homo sapiens
  misc_RNA (1)...(19): siRNA sense strand
cagcagaaguuucaaagcu

SEQ ID NO: 782494 - RNA, 19 nt, Homo sapiens
  misc_RNA (1)...(19): siRNA sense strand
guauucagaugauuugucu

SEQ ID NO: 782495 - RNA, 19 nt, Homo sapiens
  misc_RNA (1)...(19): siRNA sense strand
ccacaacugccugaagaua

SEQ ID NO: 782496 - RNA, 19 nt, Homo sapiens
  misc_RNA (1)...(19): siRNA sense strand
ucagugagucuucaguaua

SEQ ID NO: 782497 - RNA, 19 nt, Homo sapiens
  misc_RNA (1)...(19): siRNA sense strand
ucaccuagccugguuauau

SEQ ID NO: 782498 - RNA, 19 nt, Homo sapiens
  misc_RNA (1)...(19): siRNA sense strand
gagcaacuaaucaaacaug

SEQ ID NO: 782499 - RNA, 19 nt, Homo sapiens
  misc_RNA (1)...(19): siRNA sense strand
uacaucagaucacuuugaa

SEQ ID NO: 782500 - RNA, 19 nt, Homo sapiens
  misc_RNA (1)...(19): siRNA sense strand
gaggacaccagcagaaguu

SEQ ID NO: 782501 - RNA, 19 nt, Homo sapiens
  misc_RNA (1)...(19): siRNA sense strand
gaguuguccuuguuauaug

SEQ ID NO: 782502 - RNA, 19 nt, Homo sapiens
  misc_RNA (1)...(19): siRNA sense strand
ggccgaaugugauaaugug

SEQ ID NO: 782503 - RNA, 19 nt, Homo sapiens
  misc_RNA (1)...(19): siRNA sense strand
caaauguguccgaacuuaa

SEQ ID NO: 782504 - RNA, 19 nt, Homo sapiens
  misc_RNA (1)...(19): siRNA sense strand
gcuagugauuuaucuucaa

SEQ ID NO: 782505 - RNA, 19 nt, Homo sapiens
  misc_RNA (1)...(19): siRNA sense strand
uaaaugaggaagucacaga

SEQ ID NO: 782506 - RNA, 19 nt, Homo sapiens
  misc_RNA (1)...(19): siRNA sense strand
gaugauguugguucacuaa

SEQ ID NO: 782507 - RNA, 19 nt, Homo sapiens
  misc_RNA (1)...(19): siRNA sense strand
acagaaggauuugaaggaa

SEQ ID NO: 782508 - RNA, 19 nt, Homo sapiens
  misc_RNA (1)...(19): siRNA sense strand
gauauaagugacaagagaa

SEQ ID NO: 782509 - RNA, 19 nt, Homo sapiens
  misc_RNA (1)...(19): siRNA sense strand
ggauagcaguacaucagau

SEQ ID NO: 782510 - RNA, 19 nt, Homo sapiens
  misc_RNA (1)...(19): siRNA sense strand
aaagacaguugauuguagu

SEQ ID NO: 782511 - RNA, 19 nt, Homo sapiens
  misc_RNA (1)...(19): siRNA sense strand
ccagauagaucaaaauagu

SEQ ID NO: 782512 - RNA, 19 nt, Homo sapiens
  misc_RNA (1)...(19): siRNA sense strand
cagaggcacagaaggauuu

SEQ ID NO: 782513 - RNA, 19 nt, Homo sapiens
  misc_RNA (1)...(19): siRNA sense strand
ucagaucacuuugaagaag

SEQ ID NO: 782514 - RNA, 19 nt, Homo sapiens
  misc_RNA (1)...(19): siRNA sense strand
aaacaucccaggugaguuc

SEQ ID NO: 782515 - RNA, 19 nt, Homo sapiens
  misc_RNA (1)...(19): siRNA sense strand
caauauacaagcaagucua

SEQ ID NO: 782516 - RNA, 19 nt, Homo sapiens
  misc_RNA (1)...(19): siRNA sense strand
ggucugaagccaagaagga

SEQ ID NO: 782517 - RNA, 19 nt, Homo sapiens
  misc_RNA (1)...(19): siRNA sense strand
caaugaugauguugguuca

SEQ ID NO: 782518 - RNA, 19 nt, Homo sapiens
  misc_RNA (1)...(19): siRNA sense strand
aaauaaacuuccaggauac

SEQ ID NO: 782519 - RNA, 19 nt, Homo sapiens
  misc_RNA (1)...(19): siRNA sense strand
caagcaaugcaaagauauu

SEQ ID NO: 782520 - RNA, 19 nt, Homo sapiens
  misc_RNA (1)...(19): siRNA sense strand
gaagaaagcuauggcaauu

SEQ ID NO: 782521 - RNA, 19 nt, Homo sapiens
  misc_RNA (1)...(19): siRNA sense strand
caucgaaucuugcgaacaa

SEQ ID NO: 782522 - RNA, 19 nt, Homo sapiens
  misc_RNA (1)...(19): siRNA sense strand
gaucaauggucucagaaau

SEQ ID NO: 782523 - RNA, 19 nt, Homo sapiens
  misc_RNA (1)...(19): siRNA sense strand
caaagcgcauggagacuaa

SEQ ID NO: 782524 - RNA, 19 nt, Homo sapiens
  misc_RNA (1)...(19): siRNA sense strand
gaauuugaagccuacauua

SEQ ID NO: 782525 - RNA, 19 nt, Homo sapiens
  misc_RNA (1)...(19): siRNA sense strand
gaacauggaauugugguuu

SEQ ID NO: 782526 - RNA, 19 nt, Homo sapiens
  misc_RNA (1)...(19): siRNA sense strand
caauaugucuuuggucuau

SEQ ID NO: 782527 - RNA, 19 nt, Homo sapiens
  misc_RNA (1)...(19): siRNA sense strand
gccacuaucucaggaauuu

SEQ ID NO: 782528 - RNA, 19 nt, Homo sapiens
  misc_RNA (1)...(19): siRNA sense strand
ggagugacccugaauguuc

SEQ ID NO: 782529 - RNA, 19 nt, Homo sapiens
  misc_RNA (1)...(19): siRNA sense strand
guguggagcuacuacauaa

SEQ ID NO: 782530 - RNA, 19 nt, Homo sapiens
  misc_RNA (1)...(19): siRNA sense strand
ggcaauugcugaugcuuug

SEQ ID NO: 782531 - RNA, 19 nt, Homo sapiens
  misc_RNA (1)...(19): siRNA sense strand
ucaauggucucagaaauuc

SEQ ID NO: 782532 - RNA, 19 nt, Homo sapiens
  misc_RNA (1)...(19): siRNA sense strand
gcaaagcgcauggagacua

SEQ ID NO: 782533 - RNA, 19 nt, Homo sapiens
  misc_RNA (1)...(19): siRNA sense strand
gaauaugcacaucaaagaa

SEQ ID NO: 782534 - RNA, 19 nt, Homo sapiens
  misc_RNA (1)...(19): siRNA sense strand
ccaaacccuuccuccuaua

SEQ ID NO: 782535 - RNA, 19 nt, Homo sapiens
  misc_RNA (1)...(19): siRNA sense strand
ucagaaguauggcaauguu

SEQ ID NO: 782536 - RNA, 19 nt, Homo sapiens
  misc_RNA (1)...(19): siRNA sense strand
ggaauuugaagccuacauu

SEQ ID NO: 782537 - RNA, 19 nt, Homo sapiens
  misc_RNA (1)...(19): siRNA sense strand
uaagaaagcccacaaaucc

SEQ ID NO: 782538 - RNA, 19 nt, Homo sapiens
  misc_RNA (1)...(19): siRNA sense strand
gcgaacaacacgauacuug

SEQ ID NO: 782539 - RNA, 19 nt, Homo sapiens
  misc_RNA (1)...(19): siRNA sense strand
ccuccuauauuccuagauu

SEQ ID NO: 782540 - RNA, 19 nt, Homo sapiens
  misc_RNA (1)...(19): siRNA sense strand
ccacaggacugcugcuucu

SEQ ID NO: 782541 - RNA, 19 nt, Homo sapiens
  misc_RNA (1)...(19): siRNA sense strand
gaauugugguuuucucuuu

SEQ ID NO: 782542 - RNA, 19 nt, Homo sapiens
  misc_RNA (1)...(19): siRNA sense strand
ggacccaggaugaauuuga

SEQ ID NO: 782543 - RNA, 19 nt, Homo sapiens
  misc_RNA (1)...(19): siRNA sense strand
gagcuggagugacccugaa

SEQ ID NO: 782544 - RNA, 19 nt, Homo sapiens
  misc_RNA (1)...(19): siRNA sense strand
ccugaaugcuacuuccuuu

SEQ ID NO: 782545 - RNA, 19 nt, Homo sapiens
  misc_RNA (1)...(19): siRNA sense strand
ugaauaugcacaucaaaga

SEQ ID NO: 782546 - RNA, 19 nt, Homo sapiens
  misc_RNA (1)...(19): siRNA sense strand
gaaugcuacuuccuuugau

SEQ ID NO: 782547 - RNA, 19 nt, Homo sapiens
  misc_RNA (1)...(19): siRNA sense strand
gaaguauggcaauguugaa

SEQ ID NO: 782548 - RNA, 19 nt, Homo sapiens
  misc_RNA (1)...(19): siRNA sense strand
ugaaugcuacuuccuuuga

SEQ ID NO: 782549 - RNA, 19 nt, Homo sapiens
  misc_RNA (1)...(19): siRNA sense strand
guccaaacccuuccuccua

SEQ ID NO: 782550 - RNA, 19 nt, Homo sapiens
  misc_RNA (1)...(19): siRNA sense strand
gacccaggaugaauuugau

SEQ ID NO: 782551 - RNA, 19 nt, Homo sapiens
  misc_RNA (1)...(19): siRNA sense strand
cgugauugguuuccucuug

SEQ ID NO: 782552 - RNA, 19 nt, Homo sapiens
  misc_RNA (1)...(19): siRNA sense strand
gacccugaauguucuggaa

SEQ ID NO: 782553 - RNA, 19 nt, Homo sapiens
  misc_RNA (1)...(19): siRNA sense strand
ugaauuugaucgccaugug

SEQ ID NO: 782554 - RNA, 19 nt, Homo sapiens
  misc_RNA (1)...(19): siRNA sense strand
ugaacaauaugucuuuggu

SEQ ID NO: 782555 - RNA, 19 nt, Homo sapiens
  misc_RNA (1)...(19): siRNA sense strand
cccacgaccucaccuggua

SEQ ID NO: 782556 - RNA, 19 nt, Homo sapiens
  misc_RNA (1)...(19): siRNA sense strand
gugaucagauggacaaugc

SEQ ID NO: 782557 - RNA, 19 nt, Homo sapiens
  misc_RNA (1)...(19): siRNA sense strand
ccaugugauuuagacuuua

SEQ ID NO: 782558 - RNA, 19 nt, Homo sapiens
  misc_RNA (1)...(19): siRNA sense strand
gcuaaguaccugucgauuc

SEQ ID NO: 782559 - RNA, 19 nt, Homo sapiens
  misc_RNA (1)...(19): siRNA sense strand
cuaaguaccugucgauucc

SEQ ID NO: 782560 - RNA, 19 nt, Homo sapiens
  misc_RNA (1)...(19): siRNA sense strand
gaugacccgugccuuuauc

SEQ ID NO: 782561 - RNA, 19 nt, Homo sapiens
  misc_RNA (1)...(19): siRNA sense strand
uccaugugauuuagacuuu

SEQ ID NO: 782562 - RNA, 19 nt, Homo sapiens
  misc_RNA (1)...(19): siRNA sense strand
caacaggaagccacuaucu

SEQ ID NO: 782563 - RNA, 19 nt, Homo sapiens
  misc_RNA (1)...(19): siRNA sense strand
cuucaucaccuuuaaaugu

SEQ ID NO: 782564 - RNA, 19 nt, Homo sapiens
  misc_RNA (1)...(19): siRNA sense strand
gaucagauggacaaugcaa

SEQ ID NO: 782565 - RNA, 19 nt, Homo sapiens
  misc_RNA (1)...(19): siRNA sense strand
gggccacacucaacuguac

SEQ ID NO: 782566 - RNA, 19 nt, Homo sapiens
  misc_RNA (1)...(19): siRNA sense strand
gaaauuccagagaagaaag

SEQ ID NO: 782567 - RNA, 19 nt, Homo sapiens
  misc_RNA (1)...(19): siRNA sense strand
gucgauuccuacuguguuu

SEQ ID NO: 782568 - RNA, 19 nt, Homo sapiens
  misc_RNA (1)...(19): siRNA sense strand
ccuuggacgugauugguuu

SEQ ID NO: 782569 - RNA, 19 nt, Homo sapiens
  misc_RNA (1)...(19): siRNA sense strand
ccgaugacccgugccuuua

SEQ ID NO: 782570 - RNA, 19 nt, Homo sapiens
  misc_RNA (1)...(19): siRNA sense strand
agaaagcuauggcaauugc

SEQ ID NO: 782571 - RNA, 19 nt, Homo sapiens
  misc_RNA (1)...(19): siRNA sense strand
cagaaauuccagagaagaa

SEQ ID NO: 782572 - RNA, 19 nt, Homo sapiens
  misc_RNA (1)...(19): siRNA sense strand
uggagaacauggaauugug

SEQ ID NO: 782573 - RNA, 19 nt, Homo sapiens
  misc_RNA (1)...(19): siRNA sense strand
cuagauuacuaacaaccaa

SEQ ID NO: 782574 - RNA, 19 nt, Homo sapiens
  misc_RNA (1)...(19): siRNA sense strand
uccaaacccuuccuccuau

SEQ ID NO: 782575 - RNA, 19 nt, Homo sapiens
  misc_RNA (1)...(19): siRNA sense strand
gcacaucaaagaagagaac

SEQ ID NO: 782576 - RNA, 19 nt, Homo sapiens
  misc_RNA (1)...(19): siRNA sense strand
gcaaagggucaagaacaug

SEQ ID NO: 782577 - RNA, 19 nt, Homo sapiens
  misc_RNA (1)...(19): siRNA sense strand
ggaucaauggucucagaaa

SEQ ID NO: 782578 - RNA, 19 nt, Homo sapiens
  misc_RNA (1)...(19): siRNA sense strand
uuugaagccuacauuaaug

SEQ ID NO: 782579 - RNA, 19 nt, Homo sapiens
  misc_RNA (1)...(19): siRNA sense strand
gggacuuugugauggacua

SEQ ID NO: 782580 - RNA, 19 nt, Homo sapiens
  misc_RNA (1)...(19): siRNA sense strand
guuaagaaagcccacaaau

SEQ ID NO: 782581 - RNA, 19 nt, Homo sapiens
  misc_RNA (1)...(19): siRNA sense strand
gagugacccugaauguucu

SEQ ID NO: 782582 - RNA, 19 nt, Homo sapiens
  misc_RNA (1)...(19): siRNA sense strand
acaggaagccacuaucuca

SEQ ID NO: 782583 - RNA, 19 nt, Homo sapiens
  misc_RNA (1)...(19): siRNA sense strand
uuaagaaagcccacaaauc

SEQ ID NO: 782584 - RNA, 19 nt, Homo sapiens
  misc_RNA (1)...(19): siRNA sense strand
agaaguauggcaauguuga

SEQ ID NO: 782585 - RNA, 19 nt, Homo sapiens
  misc_RNA (1)...(19): siRNA sense strand
acaaauccaagacccauug

SEQ ID NO: 782586 - RNA, 19 nt, Homo sapiens
  misc_RNA (1)...(19): siRNA sense strand
gugaugaugcccuuguuug

SEQ ID NO: 782587 - RNA, 19 nt, Homo sapiens
  misc_RNA (1)...(19): siRNA sense strand
gauauucucagucaugcau

SEQ ID NO: 782588 - RNA, 19 nt, Homo sapiens
  misc_RNA (1)...(19): siRNA sense strand
guggagcuacuacauaaug

SEQ ID NO: 782589 - RNA, 19 nt, Homo sapiens
  misc_RNA (1)...(19): siRNA sense strand
gaacccgaccaucgaaucu

SEQ ID NO: 782590 - RNA, 19 nt, Homo sapiens
  misc_RNA (1)...(19): siRNA sense strand
ugggaucaauggucucaga

SEQ ID NO: 782591 - RNA, 19 nt, Homo sapiens
  misc_RNA (1)...(19): siRNA sense strand
caauucagaccacaugaca

SEQ ID NO: 782592 - RNA, 19 nt, Homo sapiens
  misc_RNA (1)...(19): siRNA sense strand
agaaagcccacaaauccaa

SEQ ID NO: 782593 - RNA, 19 nt, Homo sapiens
  misc_RNA (1)...(19): siRNA sense strand
uggagcuacuacauaauga

SEQ ID NO: 782594 - RNA, 19 nt, Homo sapiens
  misc_RNA (1)...(19): siRNA sense strand
ugaauguucuggaaaugac

SEQ ID NO: 782595 - RNA, 19 nt, Homo sapiens
  misc_RNA (1)...(19): siRNA sense strand
gacaaccuaugccauuucg

SEQ ID NO: 782596 - RNA, 19 nt, Homo sapiens
  misc_RNA (1)...(19): siRNA sense strand
ggugaugaugcccuuguuu

SEQ ID NO: 782597 - RNA, 19 nt, Homo sapiens
  misc_RNA (1)...(19): siRNA sense strand
agaagaaagcuauggcaau

SEQ ID NO: 782598 - RNA, 19 nt, Homo sapiens
  misc_RNA (1)...(19): siRNA sense strand
ugcaaagggucaagaacau

SEQ ID NO: 782599 - RNA, 19 nt, Homo sapiens
  misc_RNA (1)...(19): siRNA sense strand
ccugacaaccuaugccauu

SEQ ID NO: 782600 - RNA, 19 nt, Homo sapiens
  misc_RNA (1)...(19): siRNA sense strand
cugacaaccuaugccauuu

SEQ ID NO: 782601 - RNA, 19 nt, Homo sapiens
  misc_RNA (1)...(19): siRNA sense strand
cuccuauauuccuagauua

SEQ ID NO: 782602 - RNA, 19 nt, Homo sapiens
  misc_RNA (1)...(19): siRNA sense strand
caaacccuuccuccuauau

SEQ ID NO: 782603 - RNA, 19 nt, Homo sapiens
  misc_RNA (1)...(19): siRNA sense strand
ucaucaccuuuaaauguug

SEQ ID NO: 782604 - RNA, 19 nt, Homo sapiens
  misc_RNA (1)...(19): siRNA sense strand
gaggugaauaugcacauca

SEQ ID NO: 782605 - RNA, 19 nt, Homo sapiens
  misc_RNA (1)...(19): siRNA sense strand
uuaaguggcuaccccaaaa

SEQ ID NO: 782606 - RNA, 19 nt, Homo sapiens
  misc_RNA (1)...(19): siRNA sense strand
ggaacccgaccaucgaauc

SEQ ID NO: 782607 - RNA, 19 nt, Homo sapiens
  misc_RNA (1)...(19): siRNA sense strand
gugaauaugcacaucaaag

SEQ ID NO: 782608 - RNA, 19 nt, Homo sapiens
  misc_RNA (1)...(19): siRNA sense strand
caaauccaagacccauuga

SEQ ID NO: 782609 - RNA, 19 nt, Homo sapiens
  misc_RNA (1)...(19): siRNA sense strand
guggauauucucagucaug

SEQ ID NO: 782610 - RNA, 19 nt, Homo sapiens
  misc_RNA (1)...(19): siRNA sense strand
guugaacaauaugucuuug

SEQ ID NO: 782611 - RNA, 19 nt, Homo sapiens
  misc_RNA (1)...(19): siRNA sense strand
auucagaccacaugacauu

SEQ ID NO: 782612 - RNA, 19 nt, Homo sapiens
  misc_RNA (1)...(19): siRNA sense strand
cauaaugaggcccugauca

SEQ ID NO: 782613 - RNA, 19 nt, Homo sapiens
  misc_RNA (1)...(19): siRNA sense strand
ugucagugguggauauucu

SEQ ID NO: 782614 - RNA, 19 nt, Homo sapiens
  misc_RNA (1)...(19): siRNA sense strand
ugguggauauucucaguca

SEQ ID NO: 782615 - RNA, 19 nt, Homo sapiens
  misc_RNA (1)...(19): siRNA sense strand
uggccuucaucaccuuuaa

SEQ ID NO: 782616 - RNA, 19 nt, Homo sapiens
  misc_RNA (1)...(19): siRNA sense strand
ggguggaguuugugaugag

SEQ ID NO: 782617 - RNA, 19 nt, Homo sapiens
  misc_RNA (1)...(19): siRNA sense strand
gaagccacuaucucaggaa

SEQ ID NO: 782618 - RNA, 19 nt, Homo sapiens
  misc_RNA (1)...(19): siRNA sense strand
ggccaaucaugcccaacau

SEQ ID NO: 782619 - RNA, 19 nt, Homo sapiens
  misc_RNA (1)...(19): siRNA sense strand
ggucuuguguggagcuacu

SEQ ID NO: 782620 - RNA, 19 nt, Homo sapiens
  misc_RNA (1)...(19): siRNA sense strand
gagaagaagugcuuuauug

SEQ ID NO: 782621 - RNA, 19 nt, Homo sapiens
  misc_RNA (1)...(19): siRNA sense strand
ggacgcagcuguaugacaa

SEQ ID NO: 782622 - RNA, 19 nt, Homo sapiens
  misc_RNA (1)...(19): siRNA sense strand
gaagcgcgcucuacuuuca

SEQ ID NO: 782623 - RNA, 19 nt, Homo sapiens
  misc_RNA (1)...(19): siRNA sense strand
caaugacuaugcagaaauu

SEQ ID NO: 782624 - RNA, 19 nt, Homo sapiens
  misc_RNA (1)...(19): siRNA sense strand
gagggcagguucacuuuca

SEQ ID NO: 782625 - RNA, 19 nt, Homo sapiens
  misc_RNA (1)...(19): siRNA sense strand
gaaccgggcuggguagagu

SEQ ID NO: 782626 - RNA, 19 nt, Homo sapiens
  misc_RNA (1)...(19): siRNA sense strand
ggagaagaagugcuuuauu

SEQ ID NO: 782627 - RNA, 19 nt, Homo sapiens
  misc_RNA (1)...(19): siRNA sense strand
gaagaagugcuuuauugag

SEQ ID NO: 782628 - RNA, 19 nt, Homo sapiens
  misc_RNA (1)...(19): siRNA sense strand
cuaaagacaaguugaguga

SEQ ID NO: 782629 - RNA, 19 nt, Homo sapiens
  misc_RNA (1)...(19): siRNA sense strand
gccaaugacuaugcagaaa

SEQ ID NO: 782630 - RNA, 19 nt, Homo sapiens
  misc_RNA (1)...(19): siRNA sense strand
agaaauugcugcuaaagac

SEQ ID NO: 782631 - RNA, 19 nt, Homo sapiens
  misc_RNA (1)...(19): siRNA sense strand
aaagacaaguugagugagu

SEQ ID NO: 782632 - RNA, 19 nt, Homo sapiens
  misc_RNA (1)...(19): siRNA sense strand
cggaagcgcgcucuacuuu

SEQ ID NO: 782633 - RNA, 19 nt, Homo sapiens
  misc_RNA (1)...(19): siRNA sense strand
caccagaucugucuucacu

SEQ ID NO: 782634 - RNA, 19 nt, Homo sapiens
  misc_RNA (1)...(19): siRNA sense strand
ggacauccagguaggugaa

SEQ ID NO: 782635 - RNA, 19 nt, Homo sapiens
  misc_RNA (1)...(19): siRNA sense strand
agaagaagugcuuuauuga

SEQ ID NO: 782636 - RNA, 19 nt, Homo sapiens
  misc_RNA (1)...(19): siRNA sense strand
gaacaugccaaugacuaug

SEQ ID NO: 782637 - RNA, 19 nt, Homo sapiens
  misc_RNA (1)...(19): siRNA sense strand
acaagcagcgggaggagua

SEQ ID NO: 782638 - RNA, 19 nt, Homo sapiens
  misc_RNA (1)...(19): siRNA sense strand
agaaagagcagaacuacca

SEQ ID NO: 782639 - RNA, 19 nt, Homo sapiens
  misc_RNA (1)...(19): siRNA sense strand
gaaauugcugcuaaagaca

SEQ ID NO: 782640 - RNA, 19 nt, Homo sapiens
  misc_RNA (1)...(19): siRNA sense strand
uaggugaacaugccaauga

SEQ ID NO: 782641 - RNA, 19 nt, Homo sapiens
  misc_RNA (1)...(19): siRNA sense strand
ccaccaaguucucccucuu

SEQ ID NO: 782642 - RNA, 19 nt, Homo sapiens
  misc_RNA (1)...(19): siRNA sense strand
gagagacggagaagaagug

SEQ ID NO: 782643 - RNA, 19 nt, Homo sapiens
  misc_RNA (1)...(19): siRNA sense strand
ggaggcaugcugagaguuc

SEQ ID NO: 782644 - RNA, 19 nt, Homo sapiens
  misc_RNA (1)...(19): siRNA sense strand
gugaacaugccaaugacua

SEQ ID NO: 782645 - RNA, 19 nt, Homo sapiens
  misc_RNA (1)...(19): siRNA sense strand
cagaaauugcugcuaaaga

SEQ ID NO: 782646 - RNA, 19 nt, Homo sapiens
  misc_RNA (1)...(19): siRNA sense strand
ucggagagacggagaagaa

SEQ ID NO: 782647 - RNA, 19 nt, Homo sapiens
  misc_RNA (1)...(19): siRNA sense strand
gcauguuuguggaggugaa

SEQ ID NO: 782648 - RNA, 19 nt, Homo sapiens
  misc_RNA (1)...(19): siRNA sense strand
gaucugucuucacuccaau

SEQ ID NO: 782649 - RNA, 19 nt, Homo sapiens
  misc_RNA (1)...(19): siRNA sense strand
gugcuguggugguccauuc

SEQ ID NO: 782650 - RNA, 19 nt, Homo sapiens
  misc_RNA (1)...(19): siRNA sense strand
ugaaggacccagaggacaa

SEQ ID NO: 782651 - RNA, 19 nt, Homo sapiens
  misc_RNA (1)...(19): siRNA sense strand
gcagguucacuuucacuuc

SEQ ID NO: 782652 - RNA, 19 nt, Homo sapiens
  misc_RNA (1)...(19): siRNA sense strand
ccaaugacuaugcagaaau

SEQ ID NO: 782653 - RNA, 19 nt, Homo sapiens
  misc_RNA (1)...(19): siRNA sense strand
ggagagacggagaagaagu

SEQ ID NO: 782654 - RNA, 19 nt, Homo sapiens
  misc_RNA (1)...(19): siRNA sense strand
caccaaguucucccucuuu

SEQ ID NO: 782655 - RNA, 19 nt, Homo sapiens
  misc_RNA (1)...(19): siRNA sense strand
uggaacaaguggagcagau

SEQ ID NO: 782656 - RNA, 19 nt, Homo sapiens
  misc_RNA (1)...(19): siRNA sense strand
ggaagcgcgcucuacuuuc

SEQ ID NO: 782657 - RNA, 19 nt, Homo sapiens
  misc_RNA (1)...(19): siRNA sense strand
gagcaccagaucugucuuc

SEQ ID NO: 782658 - RNA, 19 nt, Homo sapiens
  misc_RNA (1)...(19): siRNA sense strand
agacggagaagaagugcuu

SEQ ID NO: 782659 - RNA, 19 nt, Homo sapiens
  misc_RNA (1)...(19): siRNA sense strand
ugcgacagcugguggaaca

SEQ ID NO: 782660 - RNA, 19 nt, Homo sapiens
  misc_RNA (1)...(19): siRNA sense strand
ugaacaugccaaugacuau

SEQ ID NO: 782661 - RNA, 19 nt, Homo sapiens
  misc_RNA (1)...(19): siRNA sense strand
gaggcaugcugagaguuca

SEQ ID NO: 782662 - RNA, 19 nt, Homo sapiens
  misc_RNA (1)...(19): siRNA sense strand
aagacaaguugagugaguu

SEQ ID NO: 782663 - RNA, 19 nt, Homo sapiens
  misc_RNA (1)...(19): siRNA sense strand
gcagaugcggcaccucaag

SEQ ID NO: 782664 - RNA, 19 nt, Homo sapiens
  misc_RNA (1)...(19): siRNA sense strand
gacagcugguggaacaagu

SEQ ID NO: 782665 - RNA, 19 nt, Homo sapiens
  misc_RNA (1)...(19): siRNA sense strand
gaaggacccagaggacaag

SEQ ID NO: 782666 - RNA, 19 nt, Homo sapiens
  misc_RNA (1)...(19): siRNA sense strand
ccagaaagagcagaacuac

SEQ ID NO: 782667 - RNA, 19 nt, Homo sapiens
  misc_RNA (1)...(19): siRNA sense strand
gcggaagcgcgcucuacuu

SEQ ID NO: 782668 - RNA, 19 nt, Homo sapiens
  misc_RNA (1)...(19): siRNA sense strand
agaucugucuucacuccaa

SEQ ID NO: 782669 - RNA, 19 nt, Homo sapiens
  misc_RNA (1)...(19): siRNA sense strand
ugucuucacuccaauucca

SEQ ID NO: 782670 - RNA, 19 nt, Homo sapiens
  misc_RNA (1)...(19): siRNA sense strand
accaaguucucccucuuug

SEQ ID NO: 782671 - RNA, 19 nt, Homo sapiens
  misc_RNA (1)...(19): siRNA sense strand
caaguucucccucuuugcu

SEQ ID NO: 782672 - RNA, 19 nt, Homo sapiens
  misc_RNA (1)...(19): siRNA sense strand
cagaugcggcaccucaaga

SEQ ID NO: 782673 - RNA, 19 nt, Homo sapiens
  misc_RNA (1)...(19): siRNA sense strand
cggagaagaagugcuuuau

SEQ ID NO: 782674 - RNA, 19 nt, Homo sapiens
  misc_RNA (1)...(19): siRNA sense strand
ggaacaaguggagcagauc

SEQ ID NO: 782675 - RNA, 19 nt, Homo sapiens
  misc_RNA (1)...(19): siRNA sense strand
ggacgagggugacaauaga

SEQ ID NO: 782676 - RNA, 19 nt, Homo sapiens
  misc_RNA (1)...(19): siRNA sense strand
caucaguguucaaagaaua

SEQ ID NO: 782677 - RNA, 19 nt, Homo sapiens
  misc_RNA (1)...(19): siRNA sense strand
ccaaggaggugcaaaugga

SEQ ID NO: 782678 - RNA, 19 nt, Homo sapiens
  misc_RNA (1)...(19): siRNA sense strand
acagagccauacugcguua

SEQ ID NO: 782679 - RNA, 19 nt, Homo sapiens
  misc_RNA (1)...(19): siRNA sense strand
gaagcgguuucuccuggaa

SEQ ID NO: 782680 - RNA, 19 nt, Homo sapiens
  misc_RNA (1)...(19): siRNA sense strand
ccuaucaacucaucagugu

SEQ ID NO: 782681 - RNA, 19 nt, Homo sapiens
  misc_RNA (1)...(19): siRNA sense strand
agaguguggugucauguuu

SEQ ID NO: 782682 - RNA, 19 nt, Homo sapiens
  misc_RNA (1)...(19): siRNA sense strand
caacucaucaguguucaaa

SEQ ID NO: 782683 - RNA, 19 nt, Homo sapiens
  misc_RNA (1)...(19): siRNA sense strand
acucaucaguguucaaaga

SEQ ID NO: 782684 - RNA, 19 nt, Homo sapiens
  misc_RNA (1)...(19): siRNA sense strand
caaccugacugcgagacaa

SEQ ID NO: 782685 - RNA, 19 nt, Homo sapiens
  misc_RNA (1)...(19): siRNA sense strand
gagccauacugcguuauag

SEQ ID NO: 782686 - RNA, 19 nt, Homo sapiens
  misc_RNA (1)...(19): siRNA sense strand
gacccaagccagaggagaa

SEQ ID NO: 782687 - RNA, 19 nt, Homo sapiens
  misc_RNA (1)...(19): siRNA sense strand
ccucaaguguuguaaaauu

SEQ ID NO: 782688 - RNA, 19 nt, Homo sapiens
  misc_RNA (1)...(19): siRNA sense strand
aauagaguguggugucaug

SEQ ID NO: 782689 - RNA, 19 nt, Homo sapiens
  misc_RNA (1)...(19): siRNA sense strand
uaucaacucaucaguguuc

SEQ ID NO: 782690 - RNA, 19 nt, Homo sapiens
  misc_RNA (1)...(19): siRNA sense strand
gcagugcuccgcugguugu

SEQ ID NO: 782691 - RNA, 19 nt, Homo sapiens
  misc_RNA (1)...(19): siRNA sense strand
gaacggacgagggugacaa

SEQ ID NO: 782692 - RNA, 19 nt, Homo sapiens
  misc_RNA (1)...(19): siRNA sense strand
acaauagagugugguguca

SEQ ID NO: 782693 - RNA, 19 nt, Homo sapiens
  misc_RNA (1)...(19): siRNA sense strand
ggccaccuaucaacucauc

SEQ ID NO: 782694 - RNA, 19 nt, Homo sapiens
  misc_RNA (1)...(19): siRNA sense strand
ucaucaguguucaaagaau

SEQ ID NO: 782695 - RNA, 19 nt, Homo sapiens
  misc_RNA (1)...(19): siRNA sense strand
agagccauacugcguuaua

SEQ ID NO: 782696 - RNA, 19 nt, Homo sapiens
  misc_RNA (1)...(19): siRNA sense strand
gcugggagcaugggugaga

SEQ ID NO: 782697 - RNA, 19 nt, Homo sapiens
  misc_RNA (1)...(19): siRNA sense strand
gagggugacaauagagugu

SEQ ID NO: 782698 - RNA, 19 nt, Homo sapiens
  misc_RNA (1)...(19): siRNA sense strand
uaccucaaguguuguaaaa

SEQ ID NO: 782699 - RNA, 19 nt, Homo sapiens
  misc_RNA (1)...(19): siRNA sense strand
ggcagaaccuguugagaaa

SEQ ID NO: 782700 - RNA, 19 nt, Homo sapiens
  misc_RNA (1)...(19): siRNA sense strand
ugggaaagaugccuucaaa

SEQ ID NO: 782701 - RNA, 19 nt, Homo sapiens
  misc_RNA (1)...(19): siRNA sense strand
gaagugaggcaggcaguuu

SEQ ID NO: 782702 - RNA, 19 nt, Homo sapiens
  misc_RNA (1)...(19): siRNA sense strand
ggaaagaugccuucaaaau

SEQ ID NO: 782703 - RNA, 19 nt, Homo sapiens
  misc_RNA (1)...(19): siRNA sense strand
cggcagaaccuguugagaa

SEQ ID NO: 782704 - RNA, 19 nt, Homo sapiens
  misc_RNA (1)...(19): siRNA sense strand
cuaugcagcucuucaaugg

SEQ ID NO: 782705 - RNA, 19 nt, Homo sapiens
  misc_RNA (1)...(19): siRNA sense strand
ggacgacuucuacaggaaa

SEQ ID NO: 782706 - RNA, 19 nt, Homo sapiens
  misc_RNA (1)...(19): siRNA sense strand
gaaagaugccuucaaaauc

SEQ ID NO: 782707 - RNA, 19 nt, Homo sapiens
  misc_RNA (1)...(19): siRNA sense strand
acaaccaucucuucugcaa

SEQ ID NO: 782708 - RNA, 19 nt, Homo sapiens
  misc_RNA (1)...(19): siRNA sense strand
ggagaggugcggcaagugu

SEQ ID NO: 782709 - RNA, 19 nt, Homo sapiens
  misc_RNA (1)...(19): siRNA sense strand
gguggcaucgucugucuuu

SEQ ID NO: 782710 - RNA, 19 nt, Homo sapiens
  misc_RNA (1)...(19): siRNA sense strand
ggcaucgucugucuuuauc

SEQ ID NO: 782711 - RNA, 19 nt, Homo sapiens
  misc_RNA (1)...(19): siRNA sense strand
ucgaaugcaugggaagaaa

SEQ ID NO: 782712 - RNA, 19 nt, Homo sapiens
  misc_RNA (1)...(19): siRNA sense strand
cagaaccuguugagaaagg

SEQ ID NO: 782713 - RNA, 19 nt, Homo sapiens
  misc_RNA (1)...(19): siRNA sense strand
gcagccagaacgaggugua

SEQ ID NO: 782714 - RNA, 19 nt, Homo sapiens
  misc_RNA (1)...(19): siRNA sense strand
gaaacuuccaugaaaauug

SEQ ID NO: 782715 - RNA, 19 nt, Homo sapiens
  misc_RNA (1)...(19): siRNA sense strand
gcaccuaugcagcucuuca

SEQ ID NO: 782716 - RNA, 19 nt, Homo sapiens
  misc_RNA (1)...(19): siRNA sense strand
gacgacuucuacaggaaau

SEQ ID NO: 782717 - RNA, 19 nt, Homo sapiens
  misc_RNA (1)...(19): siRNA sense strand
ucaggcccauggaggaaga

SEQ ID NO: 782718 - RNA, 19 nt, Homo sapiens
  misc_RNA (1)...(19): siRNA sense strand
aaagaugccuucaaaaucg

SEQ ID NO: 782719 - RNA, 19 nt, Homo sapiens
  misc_RNA (1)...(19): siRNA sense strand
ugaggcaggcaguuuguga

SEQ ID NO: 782720 - RNA, 19 nt, Homo sapiens
  misc_RNA (1)...(19): siRNA sense strand
cucacucauugcagacuua

SEQ ID NO: 782721 - RNA, 19 nt, Homo sapiens
  misc_RNA (1)...(19): siRNA sense strand
uggcaucgucugucuuuau

SEQ ID NO: 782722 - RNA, 19 nt, Homo sapiens
  misc_RNA (1)...(19): siRNA sense strand
ggaagugaggcaggcaguu

SEQ ID NO: 782723 - RNA, 19 nt, Homo sapiens
  misc_RNA (1)...(19): siRNA sense strand
gaaugcaugggaagaaacu

SEQ ID NO: 782724 - RNA, 19 nt, Homo sapiens
  misc_RNA (1)...(19): siRNA sense strand
uggacgacuucuacaggaa

SEQ ID NO: 782725 - RNA, 19 nt, Homo sapiens
  misc_RNA (1)...(19): siRNA sense strand
cagugcuucugccuucuga

SEQ ID NO: 782726 - RNA, 19 nt, Homo sapiens
  misc_RNA (1)...(19): siRNA sense strand
cgacuucuacaggaaauuc

SEQ ID NO: 782727 - RNA, 19 nt, Homo sapiens
  misc_RNA (1)...(19): siRNA sense strand
uguacugccuggacgacuu

SEQ ID NO: 782728 - RNA, 19 nt, Homo sapiens
  misc_RNA (1)...(19): siRNA sense strand
ugaacaaccaucucuucug

SEQ ID NO: 782729 - RNA, 19 nt, Homo sapiens
  misc_RNA (1)...(19): siRNA sense strand
ccacggaccaaggcugcua

SEQ ID NO: 782730 - RNA, 19 nt, Homo sapiens
  misc_RNA (1)...(19): siRNA sense strand
uaauugagcugguggauga

SEQ ID NO: 782731 - RNA, 19 nt, Homo sapiens
  misc_RNA (1)...(19): siRNA sense strand
gagagugacuucugccuaa

SEQ ID NO: 782732 - RNA, 19 nt, Homo sapiens
  misc_RNA (1)...(19): siRNA sense strand
gagaaugggucauccagaa

SEQ ID NO: 782733 - RNA, 19 nt, Homo sapiens
  misc_RNA (1)...(19): siRNA sense strand
caagaaaagugaugcauua

SEQ ID NO: 782734 - RNA, 19 nt, Homo sapiens
  misc_RNA (1)...(19): siRNA sense strand
ccaaagguaugaaguacuu

SEQ ID NO: 782735 - RNA, 19 nt, Homo sapiens
  misc_RNA (1)...(19): siRNA sense strand
gaagaacuacaaacacaaa

SEQ ID NO: 782736 - RNA, 19 nt, Homo sapiens
  misc_RNA (1)...(19): siRNA sense strand
ggagcaaacuacagagaug

SEQ ID NO: 782737 - RNA, 19 nt, Homo sapiens
  misc_RNA (1)...(19): siRNA sense strand
gaaggucuuucucugcuau

SEQ ID NO: 782738 - RNA, 19 nt, Homo sapiens
  misc_RNA (1)...(19): siRNA sense strand
gcucugagucuuccacaua

SEQ ID NO: 782739 - RNA, 19 nt, Homo sapiens
  misc_RNA (1)...(19): siRNA sense strand
gcaauuaccacccuuucuu

SEQ ID NO: 782740 - RNA, 19 nt, Homo sapiens
  misc_RNA (1)...(19): siRNA sense strand
guaaagauggccagaauca

SEQ ID NO: 782741 - RNA, 19 nt, Homo sapiens
  misc_RNA (1)...(19): siRNA sense strand
uuaccacccuuucuucuuu

SEQ ID NO: 782742 - RNA, 19 nt, Homo sapiens
  misc_RNA (1)...(19): siRNA sense strand
gaacuacaaacacaaagga

SEQ ID NO: 782743 - RNA, 19 nt, Homo sapiens
  misc_RNA (1)...(19): siRNA sense strand
gcaaguuuaucgccgucua

SEQ ID NO: 782744 - RNA, 19 nt, Homo sapiens
  misc_RNA (1)...(19): siRNA sense strand
ggacaagaagaacuacaaa

SEQ ID NO: 782745 - RNA, 19 nt, Homo sapiens
  misc_RNA (1)...(19): siRNA sense strand
caguaaagauggccagaau

SEQ ID NO: 782746 - RNA, 19 nt, Homo sapiens
  misc_RNA (1)...(19): siRNA sense strand
caaccuuuccugaauauga

SEQ ID NO: 782747 - RNA, 19 nt, Homo sapiens
  misc_RNA (1)...(19): siRNA sense strand
ugaaugucguccaguguuu

SEQ ID NO: 782748 - RNA, 19 nt, Homo sapiens
  misc_RNA (1)...(19): siRNA sense strand
aagaagaacuacaaacaca

SEQ ID NO: 782749 - RNA, 19 nt, Homo sapiens
  misc_RNA (1)...(19): siRNA sense strand
ucucaaccuuuccugaaua

SEQ ID NO: 782750 - RNA, 19 nt, Homo sapiens
  misc_RNA (1)...(19): siRNA sense strand
caacaugcaccaguuuauu

SEQ ID NO: 782751 - RNA, 19 nt, Homo sapiens
  misc_RNA (1)...(19): siRNA sense strand
ggaugacacuaacacaaca

SEQ ID NO: 782752 - RNA, 19 nt, Homo sapiens
  misc_RNA (1)...(19): siRNA sense strand
guuuaucgccgucuacuuu

SEQ ID NO: 782753 - RNA, 19 nt, Homo sapiens
  misc_RNA (1)...(19): siRNA sense strand
cgacagggcagcagaagga

SEQ ID NO: 782754 - RNA, 19 nt, Homo sapiens
  misc_RNA (1)...(19): siRNA sense strand
gacacuaacacaacaagaa

SEQ ID NO: 782755 - RNA, 19 nt, Homo sapiens
  misc_RNA (1)...(19): siRNA sense strand
gagcccgacugguucgaaa

SEQ ID NO: 782756 - RNA, 19 nt, Homo sapiens
  misc_RNA (1)...(19): siRNA sense strand
gcaagaagcaacaagaaaa

SEQ ID NO: 782757 - RNA, 19 nt, Homo sapiens
  misc_RNA (1)...(19): siRNA sense strand
gcaacaugcaccaguuuau

SEQ ID NO: 782758 - RNA, 19 nt, Homo sapiens
  misc_RNA (1)...(19): siRNA sense strand
gaaugggucauccagaaga

SEQ ID NO: 782759 - RNA, 19 nt, Homo sapiens
  misc_RNA (1)...(19): siRNA sense strand
caacuucggcuuccguuuc

SEQ ID NO: 782760 - RNA, 19 nt, Homo sapiens
  misc_RNA (1)...(19): siRNA sense strand
cuuccaagcuccucucuuc

SEQ ID NO: 782761 - RNA, 19 nt, Homo sapiens
  misc_RNA (1)...(19): siRNA sense strand
ugacuucugccuaaaggua

SEQ ID NO: 782762 - RNA, 19 nt, Homo sapiens
  misc_RNA (1)...(19): siRNA sense strand
gagccagucuuggagaaau

SEQ ID NO: 782763 - RNA, 19 nt, Homo sapiens
  misc_RNA (1)...(19): siRNA sense strand
gagaagggcagagagaaug

SEQ ID NO: 782764 - RNA, 19 nt, Homo sapiens
  misc_RNA (1)...(19): siRNA sense strand
gcaguucguucccuuccau

SEQ ID NO: 782765 - RNA, 19 nt, Homo sapiens
  misc_RNA (1)...(19): siRNA sense strand
cagcuacacugaugaacuc

SEQ ID NO: 782766 - RNA, 19 nt, Homo sapiens
  misc_RNA (1)...(19): siRNA sense strand
ccugugaccuguuguuaca

SEQ ID NO: 782767 - RNA, 19 nt, Homo sapiens
  misc_RNA (1)...(19): siRNA sense strand
ucgcgacgcucuucacugu

SEQ ID NO: 782768 - RNA, 19 nt, Homo sapiens
  misc_RNA (1)...(19): siRNA sense strand
cggcuuccguuucuucuau

SEQ ID NO: 782769 - RNA, 19 nt, Homo sapiens
  misc_RNA (1)...(19): siRNA sense strand
uaccacccuuucuucuuua

SEQ ID NO: 782770 - RNA, 19 nt, Homo sapiens
  misc_RNA (1)...(19): siRNA sense strand
acaagaagaacuacaaaca

SEQ ID NO: 782771 - RNA, 19 nt, Homo sapiens
  misc_RNA (1)...(19): siRNA sense strand
guagagaagggcagagaga

SEQ ID NO: 782772 - RNA, 19 nt, Homo sapiens
  misc_RNA (1)...(19): siRNA sense strand
cugcagcacucccaagaga

SEQ ID NO: 782773 - RNA, 19 nt, Homo sapiens
  misc_RNA (1)...(19): siRNA sense strand
acacuaacacaacaagaaa

SEQ ID NO: 782774 - RNA, 19 nt, Homo sapiens
  misc_RNA (1)...(19): siRNA sense strand
gcagcacucccaagagaga

SEQ ID NO: 782775 - RNA, 19 nt, Homo sapiens
  misc_RNA (1)...(19): siRNA sense strand
gagcaaacuacagagauga

SEQ ID NO: 782776 - RNA, 19 nt, Homo sapiens
  misc_RNA (1)...(19): siRNA sense strand
gagcguguccuccucuuca

SEQ ID NO: 782777 - RNA, 19 nt, Homo sapiens
  misc_RNA (1)...(19): siRNA sense strand
cgaaggucuuucucugcua

SEQ ID NO: 782778 - RNA, 19 nt, Homo sapiens
  misc_RNA (1)...(19): siRNA sense strand
gcagagagaaugggucauc

SEQ ID NO: 782779 - RNA, 19 nt, Homo sapiens
  misc_RNA (1)...(19): siRNA sense strand
gggagccagucuuggagaa

SEQ ID NO: 782780 - RNA, 19 nt, Homo sapiens
  misc_RNA (1)...(19): siRNA sense strand
guuccaaagguaugaagua

SEQ ID NO: 782781 - RNA, 19 nt, Homo sapiens
  misc_RNA (1)...(19): siRNA sense strand
ucucugcuauuccaguaaa

SEQ ID NO: 782782 - RNA, 19 nt, Homo sapiens
  misc_RNA (1)...(19): siRNA sense strand
aaagauggccagaaucaca

SEQ ID NO: 782783 - RNA, 19 nt, Homo sapiens
  misc_RNA (1)...(19): siRNA sense strand
ccucggaaccugaacauca

SEQ ID NO: 782784 - RNA, 19 nt, Homo sapiens
  misc_RNA (1)...(19): siRNA sense strand
cggauuauuucguaaaggu

SEQ ID NO: 782785 - RNA, 19 nt, Homo sapiens
  misc_RNA (1)...(19): siRNA sense strand
ucuucuaucuucacuacaa

SEQ ID NO: 782786 - RNA, 19 nt, Homo sapiens
  misc_RNA (1)...(19): siRNA sense strand
ggaagccucggaaccugaa

SEQ ID NO: 782787 - RNA, 19 nt, Homo sapiens
  misc_RNA (1)...(19): siRNA sense strand
gguagaggcggcuguucuu

SEQ ID NO: 782788 - RNA, 19 nt, Homo sapiens
  misc_RNA (1)...(19): siRNA sense strand
ccacgcaccgcacaacuuc

SEQ ID NO: 782789 - RNA, 19 nt, Homo sapiens
  misc_RNA (1)...(19): siRNA sense strand
cccuauacgucgccauuug

SEQ ID NO: 782790 - RNA, 19 nt, Homo sapiens
  misc_RNA (1)...(19): siRNA sense strand
aaccuuuccugaauaugaa

SEQ ID NO: 782791 - RNA, 19 nt, Homo sapiens
  misc_RNA (1)...(19): siRNA sense strand
guaagcaggagcaaacuac

SEQ ID NO: 782792 - RNA, 19 nt, Homo sapiens
  misc_RNA (1)...(19): siRNA sense strand
caauuaccacccuuucuuc

SEQ ID NO: 782793 - RNA, 19 nt, Homo sapiens
  misc_RNA (1)...(19): siRNA sense strand
gagucccaguucaucauug

SEQ ID NO: 782794 - RNA, 19 nt, Homo sapiens
  misc_RNA (1)...(19): siRNA sense strand
guucaucauugugguuugu

SEQ ID NO: 782795 - RNA, 19 nt, Homo sapiens
  misc_RNA (1)...(19): siRNA sense strand
ucaagcgaaagaccuguaa

SEQ ID NO: 782796 - RNA, 19 nt, Homo sapiens
  misc_RNA (1)...(19): siRNA sense strand
gaccagcugccuccuucaa

SEQ ID NO: 782797 - RNA, 19 nt, Homo sapiens
  misc_RNA (1)...(19): siRNA sense strand
gggacucaggcaucuauga

SEQ ID NO: 782798 - RNA, 19 nt, Homo sapiens
  misc_RNA (1)...(19): siRNA sense strand
acgaggagcccgacugguu

SEQ ID NO: 782799 - RNA, 19 nt, Homo sapiens
  misc_RNA (1)...(19): siRNA sense strand
caagaagaacuacaaacac

SEQ ID NO: 782800 - RNA, 19 nt, Homo sapiens
  misc_RNA (1)...(19): siRNA sense strand
gauccacgagucccaguuc

SEQ ID NO: 782801 - RNA, 19 nt, Homo sapiens
  misc_RNA (1)...(19): siRNA sense strand
cgcaagaagcaacaagaaa

SEQ ID NO: 782802 - RNA, 19 nt, Homo sapiens
  misc_RNA (1)...(19): siRNA sense strand
gcugguggaugacacuaac

SEQ ID NO: 782803 - RNA, 19 nt, Homo sapiens
  misc_RNA (1)...(19): siRNA sense strand
ccgcaagaagcaacaagaa

SEQ ID NO: 782804 - RNA, 19 nt, Homo sapiens
  misc_RNA (1)...(19): siRNA sense strand
cgacggaccagacagaaac

SEQ ID NO: 782805 - RNA, 19 nt, Homo sapiens
  misc_RNA (1)...(19): siRNA sense strand
ccgagccugugaccuguug

SEQ ID NO: 782806 - RNA, 19 nt, Homo sapiens
  misc_RNA (1)...(19): siRNA sense strand
cuuguaaacccuucuggaa

SEQ ID NO: 782807 - RNA, 19 nt, Homo sapiens
  misc_RNA (1)...(19): siRNA sense strand
gcagcuacacugaugaacu

SEQ ID NO: 782808 - RNA, 19 nt, Homo sapiens
  misc_RNA (1)...(19): siRNA sense strand
ugccgcagcuacacugaug

SEQ ID NO: 782809 - RNA, 19 nt, Homo sapiens
  misc_RNA (1)...(19): siRNA sense strand
gcgggacucaggcaucuau

SEQ ID NO: 782810 - RNA, 19 nt, Homo sapiens
  misc_RNA (1)...(19): siRNA sense strand
agagugacuucugccuaaa

SEQ ID NO: 782811 - RNA, 19 nt, Homo sapiens
  misc_RNA (1)...(19): siRNA sense strand
aaucucaaccuuuccugaa

SEQ ID NO: 782812 - RNA, 19 nt, Homo sapiens
  misc_RNA (1)...(19): siRNA sense strand
gauucgggcuugguuuuaa

SEQ ID NO: 782813 - RNA, 19 nt, Homo sapiens
  misc_RNA (1)...(19): siRNA sense strand
gcagcagaaggaacuacuu

SEQ ID NO: 782814 - RNA, 19 nt, Homo sapiens
  misc_RNA (1)...(19): siRNA sense strand
guacagacucauggacaau

SEQ ID NO: 782815 - RNA, 19 nt, Homo sapiens
  misc_RNA (1)...(19): siRNA sense strand
uuucucugcuauuccagua

SEQ ID NO: 782816 - RNA, 19 nt, Homo sapiens
  misc_RNA (1)...(19): siRNA sense strand
acugugaugugccgcaaga

SEQ ID NO: 782817 - RNA, 19 nt, Homo sapiens
  misc_RNA (1)...(19): siRNA sense strand
aacaugcaccaguuuauug

SEQ ID NO: 782818 - RNA, 19 nt, Homo sapiens
  misc_RNA (1)...(19): siRNA sense strand
ggacucaggcaucuaugac

SEQ ID NO: 782819 - RNA, 19 nt, Homo sapiens
  misc_RNA (1)...(19): siRNA sense strand
ggagccagucuuggagaaa

SEQ ID NO: 782820 - RNA, 19 nt, Homo sapiens
  misc_RNA (1)...(19): siRNA sense strand
ccagcugccuccuucaaaa

SEQ ID NO: 782821 - RNA, 19 nt, Homo sapiens
  misc_RNA (1)...(19): siRNA sense strand
gagcugucucugccacuga

SEQ ID NO: 782822 - RNA, 19 nt, Homo sapiens
  misc_RNA (1)...(19): siRNA sense strand
aguacagacucauggacaa

SEQ ID NO: 782823 - RNA, 19 nt, Homo sapiens
  misc_RNA (1)...(19): siRNA sense strand
ccaaguacagacucaugga

SEQ ID NO: 782824 - RNA, 19 nt, Homo sapiens
  misc_RNA (1)...(19): siRNA sense strand
ccgucuacuuugauuauuc

SEQ ID NO: 782825 - RNA, 19 nt, Homo sapiens
  misc_RNA (1)...(19): siRNA sense strand
ggccagaaucacaugaaug

SEQ ID NO: 782826 - RNA, 19 nt, Homo sapiens
  misc_RNA (1)...(19): siRNA sense strand
guggaugacacuaacacaa

SEQ ID NO: 782827 - RNA, 19 nt, Homo sapiens
  misc_RNA (1)...(19): siRNA sense strand
gcaucuaugacucgucugu

SEQ ID NO: 782828 - RNA, 19 nt, Homo sapiens
  misc_RNA (1)...(19): siRNA sense strand
ggauuauuucguaaagguu

SEQ ID NO: 782829 - RNA, 19 nt, Homo sapiens
  misc_RNA (1)...(19): siRNA sense strand
acaugcaccaguuuauuga

SEQ ID NO: 782830 - RNA, 19 nt, Homo sapiens
  misc_RNA (1)...(19): siRNA sense strand
gagaaucacugcuggaaga

SEQ ID NO: 782831 - RNA, 19 nt, Homo sapiens
  misc_RNA (1)...(19): siRNA sense strand
gaugauggguuccuuauuc

SEQ ID NO: 782832 - RNA, 19 nt, Homo sapiens
  misc_RNA (1)...(19): siRNA sense strand
ggacgacacucccaugaug

SEQ ID NO: 782833 - RNA, 19 nt, Homo sapiens
  misc_RNA (1)...(19): siRNA sense strand
gacacaagauguacagaga

SEQ ID NO: 782834 - RNA, 19 nt, Homo sapiens
  misc_RNA (1)...(19): siRNA sense strand
gaucgcagcuuuccaucug

SEQ ID NO: 782835 - RNA, 19 nt, Homo sapiens
  misc_RNA (1)...(19): siRNA sense strand
gcagcgagaugaagagaca

SEQ ID NO: 782836 - RNA, 19 nt, Homo sapiens
  misc_RNA (1)...(19): siRNA sense strand
caucuucgacuucuugaua

SEQ ID NO: 782837 - RNA, 19 nt, Homo sapiens
  misc_RNA (1)...(19): siRNA sense strand
gugcugagguucucggauu

SEQ ID NO: 782838 - RNA, 19 nt, Homo sapiens
  misc_RNA (1)...(19): siRNA sense strand
ggcccaagcugacuacaga

SEQ ID NO: 782839 - RNA, 19 nt, Homo sapiens
  misc_RNA (1)...(19): siRNA sense strand
aaacagaucuacccguaca

SEQ ID NO: 782840 - RNA, 19 nt, Homo sapiens
  misc_RNA (1)...(19): siRNA sense strand
guaaaugucaccaaggaaa

SEQ ID NO: 782841 - RNA, 19 nt, Homo sapiens
  misc_RNA (1)...(19): siRNA sense strand
gaacaggcgacacaagaug

SEQ ID NO: 782842 - RNA, 19 nt, Homo sapiens
  misc_RNA (1)...(19): siRNA sense strand
gaaauccugcagaguguuu

SEQ ID NO: 782843 - RNA, 19 nt, Homo sapiens
  misc_RNA (1)...(19): siRNA sense strand
ucagcaaacuucugcaaga

SEQ ID NO: 782844 - RNA, 19 nt, Homo sapiens
  misc_RNA (1)...(19): siRNA sense strand
aggaggcgcugcgguauua

SEQ ID NO: 782845 - RNA, 19 nt, Homo sapiens
  misc_RNA (1)...(19): siRNA sense strand
ggacuucuucuacuucauu

SEQ ID NO: 782846 - RNA, 19 nt, Homo sapiens
  misc_RNA (1)...(19): siRNA sense strand
gcaaacuucugcaagacau

SEQ ID NO: 782847 - RNA, 19 nt, Homo sapiens
  misc_RNA (1)...(19): siRNA sense strand
gagagcagaugaaccuuac

SEQ ID NO: 782848 - RNA, 19 nt, Homo sapiens
  misc_RNA (1)...(19): siRNA sense strand
ggacaggauucuggacuuc

SEQ ID NO: 782849 - RNA, 19 nt, Homo sapiens
  misc_RNA (1)...(19): siRNA sense strand
ucccagugcugcaugauaa

SEQ ID NO: 782850 - RNA, 19 nt, Homo sapiens
  misc_RNA (1)...(19): siRNA sense strand
gccagcggcuccucaaugu

SEQ ID NO: 782851 - RNA, 19 nt, Homo sapiens
  misc_RNA (1)...(19): siRNA sense strand
uaguaaaugucaccaagga

SEQ ID NO: 782852 - RNA, 19 nt, Homo sapiens
  misc_RNA (1)...(19): siRNA sense strand
caagcugacuacagacuca

SEQ ID NO: 782853 - RNA, 19 nt, Homo sapiens
  misc_RNA (1)...(19): siRNA sense strand
uaugagauguucaccaagu

SEQ ID NO: 782854 - RNA, 19 nt, Homo sapiens
  misc_RNA (1)...(19): siRNA sense strand
gagacacaaugcugagauc

SEQ ID NO: 782855 - RNA, 19 nt, Homo sapiens
  misc_RNA (1)...(19): siRNA sense strand
gcucagcccuguccucacu

SEQ ID NO: 782856 - RNA, 19 nt, Homo sapiens
  misc_RNA (1)...(19): siRNA sense strand
gaucgaaggcuccaaacca

SEQ ID NO: 782857 - RNA, 19 nt, Homo sapiens
  misc_RNA (1)...(19): siRNA sense strand
ggaaggccauguucaaacc

SEQ ID NO: 782858 - RNA, 19 nt, Homo sapiens
  misc_RNA (1)...(19): siRNA sense strand
gcacccagauugugaaacc

SEQ ID NO: 782859 - RNA, 19 nt, Homo sapiens
  misc_RNA (1)...(19): siRNA sense strand
gggaggauaguaaauguca

SEQ ID NO: 782860 - RNA, 19 nt, Homo sapiens
  misc_RNA (1)...(19): siRNA sense strand
gcaccauuaugagauguuc

SEQ ID NO: 782861 - RNA, 19 nt, Homo sapiens
  misc_RNA (1)...(19): siRNA sense strand
uccuagaggucaccaagaa

SEQ ID NO: 782862 - RNA, 19 nt, Homo sapiens
  misc_RNA (1)...(19): siRNA sense strand
ccuacacacuggcaggaaa

SEQ ID NO: 782863 - RNA, 19 nt, Homo sapiens
  misc_RNA (1)...(19): siRNA sense strand
gacggaguaugcugucugu

SEQ ID NO: 782864 - RNA, 19 nt, Homo sapiens
  misc_RNA (1)...(19): siRNA sense strand
ggaacaggcgacacaagau

SEQ ID NO: 782865 - RNA, 19 nt, Homo sapiens
  misc_RNA (1)...(19): siRNA sense strand
agagagcagaugaaccuua

SEQ ID NO: 782866 - RNA, 19 nt, Homo sapiens
  misc_RNA (1)...(19): siRNA sense strand
auuaugagauguucaccaa

SEQ ID NO: 782867 - RNA, 19 nt, Homo sapiens
  misc_RNA (1)...(19): siRNA sense strand
gaggucaccaagaaugaaa

SEQ ID NO: 782868 - RNA, 19 nt, Homo sapiens
  misc_RNA (1)...(19): siRNA sense strand
acacucccaugaugaaauc

SEQ ID NO: 782869 - RNA, 19 nt, Homo sapiens
  misc_RNA (1)...(19): siRNA sense strand
ucaagcuggugcugagguu

SEQ ID NO: 782870 - RNA, 19 nt, Homo sapiens
  misc_RNA (1)...(19): siRNA sense strand
cgccaaguguccauacaug

SEQ ID NO: 782871 - RNA, 19 nt, Homo sapiens
  misc_RNA (1)...(19): siRNA sense strand
ccaguggacuucuucuacu

SEQ ID NO: 782872 - RNA, 19 nt, Homo sapiens
  misc_RNA (1)...(19): siRNA sense strand
agacaccaguggacuucuu

SEQ ID NO: 782873 - RNA, 19 nt, Homo sapiens
  misc_RNA (1)...(19): siRNA sense strand
ugagacagcagcgagauga

SEQ ID NO: 782874 - RNA, 19 nt, Homo sapiens
  misc_RNA (1)...(19): siRNA sense strand
gggaugauggguuccuuau

SEQ ID NO: 782875 - RNA, 19 nt, Homo sapiens
  misc_RNA (1)...(19): siRNA sense strand
gacagcagcgagaugaaga

SEQ ID NO: 782876 - RNA, 19 nt, Homo sapiens
  misc_RNA (1)...(19): siRNA sense strand
caguggacuucuucuacuu

SEQ ID NO: 782877 - RNA, 19 nt, Homo sapiens
  misc_RNA (1)...(19): siRNA sense strand
ggaugauggguuccuuauu

SEQ ID NO: 782878 - RNA, 19 nt, Homo sapiens
  misc_RNA (1)...(19): siRNA sense strand
gaccggcaccauuaugaga

SEQ ID NO: 782879 - RNA, 19 nt, Homo sapiens
  misc_RNA (1)...(19): siRNA sense strand
cagcggcuccucaauguca

SEQ ID NO: 782880 - RNA, 19 nt, Homo sapiens
  misc_RNA (1)...(19): siRNA sense strand
ucaauccccuuuacuguga

SEQ ID NO: 782881 - RNA, 19 nt, Homo sapiens
  misc_RNA (1)...(19): siRNA sense strand
ccaaguguccauacaugug

SEQ ID NO: 782882 - RNA, 19 nt, Homo sapiens
  misc_RNA (1)...(19): siRNA sense strand
uaaaugucaccaaggaaau

SEQ ID NO: 782883 - RNA, 19 nt, Homo sapiens
  misc_RNA (1)...(19): siRNA sense strand
ucauugacuuucagagaca

SEQ ID NO: 782884 - RNA, 19 nt, Homo sapiens
  misc_RNA (1)...(19): siRNA sense strand
gcgagaaucacugcuggaa

SEQ ID NO: 782885 - RNA, 19 nt, Homo sapiens
  misc_RNA (1)...(19): siRNA sense strand
caagacaugaggcacuuuc

SEQ ID NO: 782886 - RNA, 19 nt, Homo sapiens
  misc_RNA (1)...(19): siRNA sense strand
guacagagagcagaugaac

SEQ ID NO: 782887 - RNA, 19 nt, Homo sapiens
  misc_RNA (1)...(19): siRNA sense strand
gcacuuucccaccaucagu

SEQ ID NO: 782888 - RNA, 19 nt, Homo sapiens
  misc_RNA (1)...(19): siRNA sense strand
gacgacacucccaugauga

SEQ ID NO: 782889 - RNA, 19 nt, Homo sapiens
  misc_RNA (1)...(19): siRNA sense strand
gaucuacccguacaacaac

SEQ ID NO: 782890 - RNA, 19 nt, Homo sapiens
  misc_RNA (1)...(19): siRNA sense strand
cuagaggucaccaagaaug

SEQ ID NO: 782891 - RNA, 19 nt, Homo sapiens
  misc_RNA (1)...(19): siRNA sense strand
gcugauuacagucaagaug

SEQ ID NO: 782892 - RNA, 19 nt, Homo sapiens
  misc_RNA (1)...(19): siRNA sense strand
ggccaucuucgacuucuug

SEQ ID NO: 782893 - RNA, 19 nt, Homo sapiens
  misc_RNA (1)...(19): siRNA sense strand
uggaacaggcgacacaaga

SEQ ID NO: 782894 - RNA, 19 nt, Homo sapiens
  misc_RNA (1)...(19): siRNA sense strand
caguuccaccuggguauua

SEQ ID NO: 782895 - RNA, 19 nt, Homo sapiens
  misc_RNA (1)...(19): siRNA sense strand
gcgaugugaugcgagaauc

SEQ ID NO: 782896 - RNA, 19 nt, Homo sapiens
  misc_RNA (1)...(19): siRNA sense strand
guggacuucuucuacuuca

SEQ ID NO: 782897 - RNA, 19 nt, Homo sapiens
  misc_RNA (1)...(19): siRNA sense strand
gacuucuucuacuucauug

SEQ ID NO: 782898 - RNA, 19 nt, Homo sapiens
  misc_RNA (1)...(19): siRNA sense strand
gugacacagugaaacagau

SEQ ID NO: 782899 - RNA, 19 nt, Homo sapiens
  misc_RNA (1)...(19): siRNA sense strand
uagaggucaccaagaauga

SEQ ID NO: 782900 - RNA, 19 nt, Homo sapiens
  misc_RNA (1)...(19): siRNA sense strand
gcaagacaugaggcacuuu

SEQ ID NO: 782901 - RNA, 19 nt, Homo sapiens
  misc_RNA (1)...(19): siRNA sense strand
ugagaucgcagcuuuccau

SEQ ID NO: 782902 - RNA, 19 nt, Homo sapiens
  misc_RNA (1)...(19): siRNA sense strand
gggaaggccauguucaaac

SEQ ID NO: 782903 - RNA, 19 nt, Homo sapiens
  misc_RNA (1)...(19): siRNA sense strand
cagcaaacuucugcaagac

SEQ ID NO: 782904 - RNA, 19 nt, Homo sapiens
  misc_RNA (1)...(19): siRNA sense strand
cugauuacagucaagauga

SEQ ID NO: 782905 - RNA, 19 nt, Homo sapiens
  misc_RNA (1)...(19): siRNA sense strand
gcgggucgagcuccaaguu

SEQ ID NO: 782906 - RNA, 19 nt, Homo sapiens
  misc_RNA (1)...(19): siRNA sense strand
uggacaggauucuggacuu

SEQ ID NO: 782907 - RNA, 19 nt, Homo sapiens
  misc_RNA (1)...(19): siRNA sense strand
gacacucccaugaugaaau

SEQ ID NO: 782908 - RNA, 19 nt, Homo sapiens
  misc_RNA (1)...(19): siRNA sense strand
ucaucgacauggccaucuu

SEQ ID NO: 782909 - RNA, 19 nt, Homo sapiens
  misc_RNA (1)...(19): siRNA sense strand
caaguugcaggcccucuuc

SEQ ID NO: 782910 - RNA, 19 nt, Homo sapiens
  misc_RNA (1)...(19): siRNA sense strand
uuacagucaagaugagaaa

SEQ ID NO: 782911 - RNA, 19 nt, Homo sapiens
  misc_RNA (1)...(19): siRNA sense strand
gcuccaaaccauccuaagg

SEQ ID NO: 782912 - RNA, 19 nt, Homo sapiens
  misc_RNA (1)...(19): siRNA sense strand
aaacuucugcaagacauga

SEQ ID NO: 782913 - RNA, 19 nt, Homo sapiens
  misc_RNA (1)...(19): siRNA sense strand
gaaugaaauccugcagagu

SEQ ID NO: 782914 - RNA, 19 nt, Homo sapiens
  misc_RNA (1)...(19): siRNA sense strand
gagacagcagcgagaugaa

SEQ ID NO: 782915 - RNA, 19 nt, Homo sapiens
  misc_RNA (1)...(19): siRNA sense strand
gugcauaguggcccaugga

SEQ ID NO: 782916 - RNA, 19 nt, Homo sapiens
  misc_RNA (1)...(19): siRNA sense strand
augaaauccugcagagugu

SEQ ID NO: 782917 - RNA, 19 nt, Homo sapiens
  misc_RNA (1)...(19): siRNA sense strand
ggauaguaaaugucaccaa

SEQ ID NO: 782918 - RNA, 19 nt, Homo sapiens
  misc_RNA (1)...(19): siRNA sense strand
ugauuacagucaagaugag

SEQ ID NO: 782919 - RNA, 19 nt, Homo sapiens
  misc_RNA (1)...(19): siRNA sense strand
uggccaggcuaacuugaca

SEQ ID NO: 782920 - RNA, 19 nt, Homo sapiens
  misc_RNA (1)...(19): siRNA sense strand
agaucuacccguacaacaa

SEQ ID NO: 782921 - RNA, 19 nt, Homo sapiens
  misc_RNA (1)...(19): siRNA sense strand
cuucauugacuuucagaga

SEQ ID NO: 782922 - RNA, 19 nt, Homo sapiens
  misc_RNA (1)...(19): siRNA sense strand
gacugcacccagauuguga

SEQ ID NO: 782923 - RNA, 19 nt, Homo sapiens
  misc_RNA (1)...(19): siRNA sense strand
gaacaagggcuacuauuuc

SEQ ID NO: 782924 - RNA, 19 nt, Homo sapiens
  misc_RNA (1)...(19): siRNA sense strand
ccauggaccucccacuaua

SEQ ID NO: 782925 - RNA, 19 nt, Homo sapiens
  misc_RNA (1)...(19): siRNA sense strand
gcacugaaggcuacaacaa

SEQ ID NO: 782926 - RNA, 19 nt, Homo sapiens
  misc_RNA (1)...(19): siRNA sense strand
gcuacacgcugcugcucua

SEQ ID NO: 782927 - RNA, 19 nt, Homo sapiens
  misc_RNA (1)...(19): siRNA sense strand
agaacaagggcuacuauuu

SEQ ID NO: 782928 - RNA, 19 nt, Homo sapiens
  misc_RNA (1)...(19): siRNA sense strand
caacaacugggucuucaug

SEQ ID NO: 782929 - RNA, 19 nt, Homo sapiens
  misc_RNA (1)...(19): siRNA sense strand
aacaagggcuacuauuuca

SEQ ID NO: 782930 - RNA, 19 nt, Homo sapiens
  misc_RNA (1)...(19): siRNA sense strand
gagaacaagggcuacuauu

SEQ ID NO: 782931 - RNA, 19 nt, Homo sapiens
  misc_RNA (1)...(19): siRNA sense strand
acacgcugcugcucuaugg

SEQ ID NO: 782932 - RNA, 19 nt, Homo sapiens
  misc_RNA (1)...(19): siRNA sense strand
uacaacaacugggucuuca

SEQ ID NO: 782933 - RNA, 19 nt, Homo sapiens
  misc_RNA (1)...(19): siRNA sense strand
acaacugggucuucauguc

SEQ ID NO: 782934 - RNA, 19 nt, Homo sapiens
  misc_RNA (1)...(19): siRNA sense strand
caagggcuacuauuucaac

SEQ ID NO: 782935 - RNA, 19 nt, Homo sapiens
  misc_RNA (1)...(19): siRNA sense strand
agagaacaagggcuacuau

SEQ ID NO: 782936 - RNA, 19 nt, Homo sapiens
  misc_RNA (1)...(19): siRNA sense strand
uagagaacaagggcuacua

SEQ ID NO: 782937 - RNA, 19 nt, Homo sapiens
  misc_RNA (1)...(19): siRNA sense strand
cuacaacaacugggucuuc

SEQ ID NO: 782938 - RNA, 19 nt, Homo sapiens
  misc_RNA (1)...(19): siRNA sense strand
caagaacgcuucgcugaga

SEQ ID NO: 782939 - RNA, 19 nt, Homo sapiens
  misc_RNA (1)...(19): siRNA sense strand
ugacagcccugcccagaga

SEQ ID NO: 782940 - RNA, 19 nt, Homo sapiens
  misc_RNA (1)...(19): siRNA sense strand
ucagcaaacucuccaagug

SEQ ID NO: 782941 - RNA, 19 nt, Homo sapiens
  misc_RNA (1)...(19): siRNA sense strand
ccugugaccuggccgauga

SEQ ID NO: 782942 - RNA, 19 nt, Homo sapiens
  misc_RNA (1)...(19): siRNA sense strand
caccaggccugcauugaug

SEQ ID NO: 782943 - RNA, 19 nt, Homo sapiens
  misc_RNA (1)...(19): siRNA sense strand
gaauugcuccuucaugaca

SEQ ID NO: 782944 - RNA, 19 nt, Homo sapiens
  misc_RNA (1)...(19): siRNA sense strand
acauugaggugaugagguu

SEQ ID NO: 782945 - RNA, 19 nt, Homo sapiens
  misc_RNA (1)...(19): siRNA sense strand
gaacccagaacccucaaug

SEQ ID NO: 782946 - RNA, 19 nt, Homo sapiens
  misc_RNA (1)...(19): siRNA sense strand
aaagcucgcucccgucuca

SEQ ID NO: 782947 - RNA, 19 nt, Homo sapiens
  misc_RNA (1)...(19): siRNA sense strand
gcaccaggccugcauugau

SEQ ID NO: 782948 - RNA, 19 nt, Homo sapiens
  misc_RNA (1)...(19): siRNA sense strand
cagcaaacucuccaaguga

SEQ ID NO: 782949 - RNA, 19 nt, Homo sapiens
  misc_RNA (1)...(19): siRNA sense strand
ggaaguacugagccuguug

SEQ ID NO: 782950 - RNA, 19 nt, Homo sapiens
  misc_RNA (1)...(19): siRNA sense strand
ugaccuggccgaugaggaa

SEQ ID NO: 782951 - RNA, 19 nt, Homo sapiens
  misc_RNA (1)...(19): siRNA sense strand
ggagguggugcgcuucuug

SEQ ID NO: 782952 - RNA, 19 nt, Homo sapiens
  misc_RNA (1)...(19): siRNA sense strand
caagcgggcagaagaggaa

SEQ ID NO: 782953 - RNA, 19 nt, Homo sapiens
  misc_RNA (1)...(19): siRNA sense strand
ggagcccucuguccugucu

SEQ ID NO: 782954 - RNA, 19 nt, Homo sapiens
  misc_RNA (1)...(19): siRNA sense strand
cagccaagcgggcagaaga

SEQ ID NO: 782955 - RNA, 19 nt, Homo sapiens
  misc_RNA (1)...(19): siRNA sense strand
gagucggaaucccagagaa

SEQ ID NO: 782956 - RNA, 19 nt, Homo sapiens
  misc_RNA (1)...(19): siRNA sense strand
gggaugaggagucggaauc

SEQ ID NO: 782957 - RNA, 19 nt, Homo sapiens
  misc_RNA (1)...(19): siRNA sense strand
uccuguggcuaccuagaua

SEQ ID NO: 782958 - RNA, 19 nt, Homo sapiens
  misc_RNA (1)...(19): siRNA sense strand
uccuggaacuggagagauu

SEQ ID NO: 782959 - RNA, 19 nt, Homo sapiens
  misc_RNA (1)...(19): siRNA sense strand
cccagaaccugagccagaa

SEQ ID NO: 782960 - RNA, 19 nt, Homo sapiens
  misc_RNA (1)...(19): siRNA sense strand
agauuucccuccaggacuu

SEQ ID NO: 782961 - RNA, 19 nt, Homo sapiens
  misc_RNA (1)...(19): siRNA sense strand
ggagucggaaucccagaga

SEQ ID NO: 782962 - RNA, 19 nt, Homo sapiens
  misc_RNA (1)...(19): siRNA sense strand
ggaggaccuucggaaccaa

SEQ ID NO: 782963 - RNA, 19 nt, Homo sapiens
  misc_RNA (1)...(19): siRNA sense strand
acgaggugcuggcugaaug

SEQ ID NO: 782964 - RNA, 19 nt, Homo sapiens
  misc_RNA (1)...(19): siRNA sense strand
gagcagucgcgagaagauu

SEQ ID NO: 782965 - RNA, 19 nt, Homo sapiens
  misc_RNA (1)...(19): siRNA sense strand
gggcuacauugaggugaug

SEQ ID NO: 782966 - RNA, 19 nt, Homo sapiens
  misc_RNA (1)...(19): siRNA sense strand
ccuggccgaugaggaagua

SEQ ID NO: 782967 - RNA, 19 nt, Homo sapiens
  misc_RNA (1)...(19): siRNA sense strand
gcuccgucuugccagaauu

SEQ ID NO: 782968 - RNA, 19 nt, Homo sapiens
  misc_RNA (1)...(19): siRNA sense strand
ccaccaacgccgacgguau

SEQ ID NO: 782969 - RNA, 19 nt, Homo sapiens
  misc_RNA (1)...(19): siRNA sense strand
ugaugagguugcuccuuca

SEQ ID NO: 782970 - RNA, 19 nt, Homo sapiens
  misc_RNA (1)...(19): siRNA sense strand
ccagacggaggcuuuagga

SEQ ID NO: 782971 - RNA, 19 nt, Homo sapiens
  misc_RNA (1)...(19): siRNA sense strand
ucgccucccuccaggauuc

SEQ ID NO: 782972 - RNA, 19 nt, Homo sapiens
  misc_RNA (1)...(19): siRNA sense strand
gcuuuggccuccugaagac

SEQ ID NO: 782973 - RNA, 19 nt, Homo sapiens
  misc_RNA (1)...(19): siRNA sense strand
gaugagaaugcagcguuga

SEQ ID NO: 782974 - RNA, 19 nt, Homo sapiens
  misc_RNA (1)...(19): siRNA sense strand
caccaacgccgacgguauc

SEQ ID NO: 782975 - RNA, 19 nt, Homo sapiens
  misc_RNA (1)...(19): siRNA sense strand
gaggaccuucggaaccaaa

SEQ ID NO: 782976 - RNA, 19 nt, Homo sapiens
  misc_RNA (1)...(19): siRNA sense strand
acaaccagcgccucaagga

SEQ ID NO: 782977 - RNA, 19 nt, Homo sapiens
  misc_RNA (1)...(19): siRNA sense strand
gcagucgcgagaagauuuc

SEQ ID NO: 782978 - RNA, 19 nt, Homo sapiens
  misc_RNA (1)...(19): siRNA sense strand
agagucccgugcagcuuga

SEQ ID NO: 782979 - RNA, 19 nt, Homo sapiens
  misc_RNA (1)...(19): siRNA sense strand
gauccgcgucaucagcaaa

SEQ ID NO: 782980 - RNA, 19 nt, Homo sapiens
  misc_RNA (1)...(19): siRNA sense strand
caaagguacuugauacaua

SEQ ID NO: 782981 - RNA, 19 nt, Homo sapiens
  misc_RNA (1)...(19): siRNA sense strand
caaaugaccuccaaacaau

SEQ ID NO: 782982 - RNA, 19 nt, Homo sapiens
  misc_RNA (1)...(19): siRNA sense strand
gaaaucaagugcaugcaaa

SEQ ID NO: 782983 - RNA, 19 nt, Homo sapiens
  misc_RNA (1)...(19): siRNA sense strand
gaagaauucuguucagguu

SEQ ID NO: 782984 - RNA, 19 nt, Homo sapiens
  misc_RNA (1)...(19): siRNA sense strand
caaauaaugugaucccaaa

SEQ ID NO: 782985 - RNA, 19 nt, Homo sapiens
  misc_RNA (1)...(19): siRNA sense strand
caacacagcuggagcacaa

SEQ ID NO: 782986 - RNA, 19 nt, Homo sapiens
  misc_RNA (1)...(19): siRNA sense strand
cagaacaccucaagcauaa

SEQ ID NO: 782987 - RNA, 19 nt, Homo sapiens
  misc_RNA (1)...(19): siRNA sense strand
agagucaccuuccaaauua

SEQ ID NO: 782988 - RNA, 19 nt, Homo sapiens
  misc_RNA (1)...(19): siRNA sense strand
cuacaaagcuccagaaugg

SEQ ID NO: 782989 - RNA, 19 nt, Homo sapiens
  misc_RNA (1)...(19): siRNA sense strand
gagcacaagucacaaaugu

SEQ ID NO: 782990 - RNA, 19 nt, Homo sapiens
  misc_RNA (1)...(19): siRNA sense strand
gaacaacuacaacaacaaa

SEQ ID NO: 782991 - RNA, 19 nt, Homo sapiens
  misc_RNA (1)...(19): siRNA sense strand
cuaaauaccuguuccuuuc

SEQ ID NO: 782992 - RNA, 19 nt, Homo sapiens
  misc_RNA (1)...(19): siRNA sense strand
gcaaagagaaggaucauuc

SEQ ID NO: 782993 - RNA, 19 nt, Homo sapiens
  misc_RNA (1)...(19): siRNA sense strand
gaacaggaaugacauacag

SEQ ID NO: 782994 - RNA, 19 nt, Homo sapiens
  misc_RNA (1)...(19): siRNA sense strand
acaacaagcuucaguucua

SEQ ID NO: 782995 - RNA, 19 nt, Homo sapiens
  misc_RNA (1)...(19): siRNA sense strand
ucacaaauguaccaaguug

SEQ ID NO: 782996 - RNA, 19 nt, Homo sapiens
  misc_RNA (1)...(19): siRNA sense strand
gagcagaagucacaacaag

SEQ ID NO: 782997 - RNA, 19 nt, Homo sapiens
  misc_RNA (1)...(19): siRNA sense strand
aagcauaacccaccaauuu

SEQ ID NO: 782998 - RNA, 19 nt, Homo sapiens
  misc_RNA (1)...(19): siRNA sense strand
caaacugagucuugccaua

SEQ ID NO: 782999 - RNA, 19 nt, Homo sapiens
  misc_RNA (1)...(19): siRNA sense strand
caacaaugaucagcaaaga

SEQ ID NO: 783000 - RNA, 19 nt, Homo sapiens
  misc_RNA (1)...(19): siRNA sense strand
ggaccaacaucuccaguuc

SEQ ID NO: 783001 - RNA, 19 nt, Homo sapiens
  misc_RNA (1)...(19): siRNA sense strand
caucaauucuucaguauca

SEQ ID NO: 783002 - RNA, 19 nt, Homo sapiens
  misc_RNA (1)...(19): siRNA sense strand
cuaaugaguuguccuguga

SEQ ID NO: 783003 - RNA, 19 nt, Homo sapiens
  misc_RNA (1)...(19): siRNA sense strand
gcacacagcaccaccagaa

SEQ ID NO: 783004 - RNA, 19 nt, Homo sapiens
  misc_RNA (1)...(19): siRNA sense strand
aaacaaagagcaagagauu

SEQ ID NO: 783005 - RNA, 19 nt, Homo sapiens
  misc_RNA (1)...(19): siRNA sense strand
guaccaaguugaaaugaau

SEQ ID NO: 783006 - RNA, 19 nt, Homo sapiens
  misc_RNA (1)...(19): siRNA sense strand
ggaauaaaacgcacaguua

SEQ ID NO: 783007 - RNA, 19 nt, Homo sapiens
  misc_RNA (1)...(19): siRNA sense strand
aaacagaccauuuaccaaa

SEQ ID NO: 783008 - RNA, 19 nt, Homo sapiens
  misc_RNA (1)...(19): siRNA sense strand
gaauggugcuuacuucaag

SEQ ID NO: 783009 - RNA, 19 nt, Homo sapiens
  misc_RNA (1)...(19): siRNA sense strand
agaaagaaauccaggugaa

SEQ ID NO: 783010 - RNA, 19 nt, Homo sapiens
  misc_RNA (1)...(19): siRNA sense strand
guagguaagugccagaaau

SEQ ID NO: 783011 - RNA, 19 nt, Homo sapiens
  misc_RNA (1)...(19): siRNA sense strand
gaaaagacaccaaccaaaa

SEQ ID NO: 783012 - RNA, 19 nt, Homo sapiens
  misc_RNA (1)...(19): siRNA sense strand
gaggaaguacagaauauaa

SEQ ID NO: 783013 - RNA, 19 nt, Homo sapiens
  misc_RNA (1)...(19): siRNA sense strand
caagggcagucccaaggua

SEQ ID NO: 783014 - RNA, 19 nt, Homo sapiens
  misc_RNA (1)...(19): siRNA sense strand
caggauggauugaauugaa

SEQ ID NO: 783015 - RNA, 19 nt, Homo sapiens
  misc_RNA (1)...(19): siRNA sense strand
caacacagcacuaucugaa

SEQ ID NO: 783016 - RNA, 19 nt, Homo sapiens
  misc_RNA (1)...(19): siRNA sense strand
gaaagaaauccaggugaaa

SEQ ID NO: 783017 - RNA, 19 nt, Homo sapiens
  misc_RNA (1)...(19): siRNA sense strand
caagcggaaucccaucuaa

SEQ ID NO: 783018 - RNA, 19 nt, Homo sapiens
  misc_RNA (1)...(19): siRNA sense strand
ugaaagcagucaaccaaau

SEQ ID NO: 783019 - RNA, 19 nt, Homo sapiens
  misc_RNA (1)...(19): siRNA sense strand
cagaugcacaggccaauua

SEQ ID NO: 783020 - RNA, 19 nt, Homo sapiens
  misc_RNA (1)...(19): siRNA sense strand
aaauacagguuucuuguuc

SEQ ID NO: 783021 - RNA, 19 nt, Homo sapiens
  misc_RNA (1)...(19): siRNA sense strand
agacuaaaguggaagaaug

SEQ ID NO: 783022 - RNA, 19 nt, Homo sapiens
  misc_RNA (1)...(19): siRNA sense strand
gagcagauucccaaacuga

SEQ ID NO: 783023 - RNA, 19 nt, Homo sapiens
  misc_RNA (1)...(19): siRNA sense strand
gaaaggccucagaauaauu

SEQ ID NO: 783024 - RNA, 19 nt, Homo sapiens
  misc_RNA (1)...(19): siRNA sense strand
gcucugaacgguauuuaaa

SEQ ID NO: 783025 - RNA, 19 nt, Homo sapiens
  misc_RNA (1)...(19): siRNA sense strand
gauaagaaagaaucuguga

SEQ ID NO: 783026 - RNA, 19 nt, Homo sapiens
  misc_RNA (1)...(19): siRNA sense strand
gaaagcagucaaccaaaug

SEQ ID NO: 783027 - RNA, 19 nt, Homo sapiens
  misc_RNA (1)...(19): siRNA sense strand
ucagaaaccagaacaacua

SEQ ID NO: 783028 - RNA, 19 nt, Homo sapiens
  misc_RNA (1)...(19): siRNA sense strand
caacauaagccucauaaac

SEQ ID NO: 783029 - RNA, 19 nt, Homo sapiens
  misc_RNA (1)...(19): siRNA sense strand
caacaucuccaguuccaaa

SEQ ID NO: 783030 - RNA, 19 nt, Homo sapiens
  misc_RNA (1)...(19): siRNA sense strand
gcuagcgucuggugaagaa

SEQ ID NO: 783031 - RNA, 19 nt, Homo sapiens
  misc_RNA (1)...(19): siRNA sense strand
cccaaucucuccaaucaaa

SEQ ID NO: 783032 - RNA, 19 nt, Homo sapiens
  misc_RNA (1)...(19): siRNA sense strand
gguggcaucucuuacagaa

SEQ ID NO: 783033 - RNA, 19 nt, Homo sapiens
  misc_RNA (1)...(19): siRNA sense strand
gcucuaagguggcaucucu

SEQ ID NO: 783034 - RNA, 19 nt, Homo sapiens
  misc_RNA (1)...(19): siRNA sense strand
gaaaccagaacaacuacaa

SEQ ID NO: 783035 - RNA, 19 nt, Homo sapiens
  misc_RNA (1)...(19): siRNA sense strand
cagcaaagguacuugauac

SEQ ID NO: 783036 - RNA, 19 nt, Homo sapiens
  misc_RNA (1)...(19): siRNA sense strand
gagagcucauccagaagua

SEQ ID NO: 783037 - RNA, 19 nt, Homo sapiens
  misc_RNA (1)...(19): siRNA sense strand
gaauaaagaggaaauacuc

SEQ ID NO: 783038 - RNA, 19 nt, Homo sapiens
  misc_RNA (1)...(19): siRNA sense strand
gauaaugccaguaaacuag

SEQ ID NO: 783039 - RNA, 19 nt, Homo sapiens
  misc_RNA (1)...(19): siRNA sense strand
uggcguuuauccagaauua

SEQ ID NO: 783040 - RNA, 19 nt, Homo sapiens
  misc_RNA (1)...(19): siRNA sense strand
ggauagaaccaaccauguu

SEQ ID NO: 783041 - RNA, 19 nt, Homo sapiens
  misc_RNA (1)...(19): siRNA sense strand
gagaauaaagaacagacua

SEQ ID NO: 783042 - RNA, 19 nt, Homo sapiens
  misc_RNA (1)...(19): siRNA sense strand
gcacaagucacaaauguac

SEQ ID NO: 783043 - RNA, 19 nt, Homo sapiens
  misc_RNA (1)...(19): siRNA sense strand
ucaaaugaccuccaaacaa

SEQ ID NO: 783044 - RNA, 19 nt, Homo sapiens
  misc_RNA (1)...(19): siRNA sense strand
ucagaacaccucaagcaua

SEQ ID NO: 783045 - RNA, 19 nt, Homo sapiens
  misc_RNA (1)...(19): siRNA sense strand
ugaaaggccucagaauaau

SEQ ID NO: 783046 - RNA, 19 nt, Homo sapiens
  misc_RNA (1)...(19): siRNA sense strand
gaaauugaaacaagaccaa

SEQ ID NO: 783047 - RNA, 19 nt, Homo sapiens
  misc_RNA (1)...(19): siRNA sense strand
ugagacacauggcguuuau

SEQ ID NO: 783048 - RNA, 19 nt, Homo sapiens
  misc_RNA (1)...(19): siRNA sense strand
ucaacaagcugcgcaacuu

SEQ ID NO: 783049 - RNA, 19 nt, Homo sapiens
  misc_RNA (1)...(19): siRNA sense strand
gcuaaauaccuguuccuuu

SEQ ID NO: 783050 - RNA, 19 nt, Homo sapiens
  misc_RNA (1)...(19): siRNA sense strand
cuaauuaccaugacaagaa

SEQ ID NO: 783051 - RNA, 19 nt, Homo sapiens
  misc_RNA (1)...(19): siRNA sense strand
cgauuugagugauaagaaa

SEQ ID NO: 783052 - RNA, 19 nt, Homo sapiens
  misc_RNA (1)...(19): siRNA sense strand
gaaaaccacaucucacaua

SEQ ID NO: 783053 - RNA, 19 nt, Homo sapiens
  misc_RNA (1)...(19): siRNA sense strand
gguaagugccagaaaugua

SEQ ID NO: 783054 - RNA, 19 nt, Homo sapiens
  misc_RNA (1)...(19): siRNA sense strand
ggauacaccugucaagacu

SEQ ID NO: 783055 - RNA, 19 nt, Homo sapiens
  misc_RNA (1)...(19): siRNA sense strand
cugcuucuguucucaauaa

SEQ ID NO: 783056 - RNA, 19 nt, Homo sapiens
  misc_RNA (1)...(19): siRNA sense strand
ggaggaaguacagaauaua

SEQ ID NO: 783057 - RNA, 19 nt, Homo sapiens
  misc_RNA (1)...(19): siRNA sense strand
ugaaacagcaauugaauca

SEQ ID NO: 783058 - RNA, 19 nt, Homo sapiens
  misc_RNA (1)...(19): siRNA sense strand
ccaaucaaaugaccuccaa

SEQ ID NO: 783059 - RNA, 19 nt, Homo sapiens
  misc_RNA (1)...(19): siRNA sense strand
gagcaaacacgagaucuug

SEQ ID NO: 783060 - RNA, 19 nt, Homo sapiens
  misc_RNA (1)...(19): siRNA sense strand
guggagagcuacaggacaa

SEQ ID NO: 783061 - RNA, 19 nt, Homo sapiens
  misc_RNA (1)...(19): siRNA sense strand
cagaacaacuacaacaaca

SEQ ID NO: 783062 - RNA, 19 nt, Homo sapiens
  misc_RNA (1)...(19): siRNA sense strand
acucugagcugccuccaaa

SEQ ID NO: 783063 - RNA, 19 nt, Homo sapiens
  misc_RNA (1)...(19): siRNA sense strand
aaccacaucucacauaaau

SEQ ID NO: 783064 - RNA, 19 nt, Homo sapiens
  misc_RNA (1)...(19): siRNA sense strand
ccaguaaacuagcugcaau

SEQ ID NO: 783065 - RNA, 19 nt, Homo sapiens
  misc_RNA (1)...(19): siRNA sense strand
ucacugccaucaauucuuc

SEQ ID NO: 783066 - RNA, 19 nt, Homo sapiens
  misc_RNA (1)...(19): siRNA sense strand
aaaccaggauggauugaau

SEQ ID NO: 783067 - RNA, 19 nt, Homo sapiens
  misc_RNA (1)...(19): siRNA sense strand
caaccaaaguaacacaaca

SEQ ID NO: 783068 - RNA, 19 nt, Homo sapiens
  misc_RNA (1)...(19): siRNA sense strand
aagcaaagcucaguguuca

SEQ ID NO: 783069 - RNA, 19 nt, Homo sapiens
  misc_RNA (1)...(19): siRNA sense strand
gaaaguagaggguauucca

SEQ ID NO: 783070 - RNA, 19 nt, Homo sapiens
  misc_RNA (1)...(19): siRNA sense strand
ccaagaaaaugcaguuaaa

SEQ ID NO: 783071 - RNA, 19 nt, Homo sapiens
  misc_RNA (1)...(19): siRNA sense strand
ccagaaauguacugagaca

SEQ ID NO: 783072 - RNA, 19 nt, Homo sapiens
  misc_RNA (1)...(19): siRNA sense strand
caaaagagcaucauugaga

SEQ ID NO: 783073 - RNA, 19 nt, Homo sapiens
  misc_RNA (1)...(19): siRNA sense strand
aggaaauacuccagacuuu

SEQ ID NO: 783074 - RNA, 19 nt, Homo sapiens
  misc_RNA (1)...(19): siRNA sense strand
acacaaccaucccagaguu

SEQ ID NO: 783075 - RNA, 19 nt, Homo sapiens
  misc_RNA (1)...(19): siRNA sense strand
gcagauucccaaacugaaa

SEQ ID NO: 783076 - RNA, 19 nt, Homo sapiens
  misc_RNA (1)...(19): siRNA sense strand
gaggguauuccaaguguuu

SEQ ID NO: 783077 - RNA, 19 nt, Homo sapiens
  misc_RNA (1)...(19): siRNA sense strand
gccagcaguugaugagaaa

SEQ ID NO: 783078 - RNA, 19 nt, Homo sapiens
  misc_RNA (1)...(19): siRNA sense strand
aauaugauuucccaucuug

SEQ ID NO: 783079 - RNA, 19 nt, Homo sapiens
  misc_RNA (1)...(19): siRNA sense strand
agauaugucuggucaacaa

SEQ ID NO: 783080 - RNA, 19 nt, Homo sapiens
  misc_RNA (1)...(19): siRNA sense strand
ugaggaaguucaugaauua

SEQ ID NO: 783081 - RNA, 19 nt, Homo sapiens
  misc_RNA (1)...(19): siRNA sense strand
gaauggaaaucuugucaga

SEQ ID NO: 783082 - RNA, 19 nt, Homo sapiens
  misc_RNA (1)...(19): siRNA sense strand
guaacaaucuagagaagaa

SEQ ID NO: 783083 - RNA, 19 nt, Homo sapiens
  misc_RNA (1)...(19): siRNA sense strand
uuacacaaccuauccauua

SEQ ID NO: 783084 - RNA, 19 nt, Homo sapiens
  misc_RNA (1)...(19): siRNA sense strand
gcaguuagcauuucuuguu

SEQ ID NO: 783085 - RNA, 19 nt, Homo sapiens
  misc_RNA (1)...(19): siRNA sense strand
gaaaagaccccagcaguua

SEQ ID NO: 783086 - RNA, 19 nt, Homo sapiens
  misc_RNA (1)...(19): siRNA sense strand
caaacaaccugaaucaucu

SEQ ID NO: 783087 - RNA, 19 nt, Homo sapiens
  misc_RNA (1)...(19): siRNA sense strand
cagagaaccugaccauaug

SEQ ID NO: 783088 - RNA, 19 nt, Homo sapiens
  misc_RNA (1)...(19): siRNA sense strand
gugaagauccaacaucaua

SEQ ID NO: 783089 - RNA, 19 nt, Homo sapiens
  misc_RNA (1)...(19): siRNA sense strand
gcgcugaccuucauguuca

SEQ ID NO: 783090 - RNA, 19 nt, Homo sapiens
  misc_RNA (1)...(19): siRNA sense strand
caaccuauccauuacuuaa

SEQ ID NO: 783091 - RNA, 19 nt, Homo sapiens
  misc_RNA (1)...(19): siRNA sense strand
guaaugguuuguauacuuc

SEQ ID NO: 783092 - RNA, 19 nt, Homo sapiens
  misc_RNA (1)...(19): siRNA sense strand
ggaaguucaugaauuacau

SEQ ID NO: 783093 - RNA, 19 nt, Homo sapiens
  misc_RNA (1)...(19): siRNA sense strand
gaacuuaguaacaaucuag

SEQ ID NO: 783094 - RNA, 19 nt, Homo sapiens
  misc_RNA (1)...(19): siRNA sense strand
gcagaaucauugccacugu

SEQ ID NO: 783095 - RNA, 19 nt, Homo sapiens
  misc_RNA (1)...(19): siRNA sense strand
caaccugaaucaucuuugu

SEQ ID NO: 783096 - RNA, 19 nt, Homo sapiens
  misc_RNA (1)...(19): siRNA sense strand
aaacaaacaaccugaauca

SEQ ID NO: 783097 - RNA, 19 nt, Homo sapiens
  misc_RNA (1)...(19): siRNA sense strand
uaauaguacucaugcauca

SEQ ID NO: 783098 - RNA, 19 nt, Homo sapiens
  misc_RNA (1)...(19): siRNA sense strand
gcuggaagcagaaucauug

SEQ ID NO: 783099 - RNA, 19 nt, Homo sapiens
  misc_RNA (1)...(19): siRNA sense strand
ugaaggaguugaggaaguu

SEQ ID NO: 783100 - RNA, 19 nt, Homo sapiens
  misc_RNA (1)...(19): siRNA sense strand
guacucaugcaucaguuua

SEQ ID NO: 783101 - RNA, 19 nt, Homo sapiens
  misc_RNA (1)...(19): siRNA sense strand
agauagggcuggacaacuu

SEQ ID NO: 783102 - RNA, 19 nt, Homo sapiens
  misc_RNA (1)...(19): siRNA sense strand
caaguguaguuccguguga

SEQ ID NO: 783103 - RNA, 19 nt, Homo sapiens
  misc_RNA (1)...(19): siRNA sense strand
gaaguacaagugaauggaa

SEQ ID NO: 783104 - RNA, 19 nt, Homo sapiens
  misc_RNA (1)...(19): siRNA sense strand
caucccugcuguugugaua

SEQ ID NO: 783105 - RNA, 19 nt, Homo sapiens
  misc_RNA (1)...(19): siRNA sense strand
ucuacaaacuguuccuaaa

SEQ ID NO: 783106 - RNA, 19 nt, Homo sapiens
  misc_RNA (1)...(19): siRNA sense strand
gcucuuauucuucuacaaa

SEQ ID NO: 783107 - RNA, 19 nt, Homo sapiens
  misc_RNA (1)...(19): siRNA sense strand
guaaaugccuuagucuuuu

SEQ ID NO: 783108 - RNA, 19 nt, Homo sapiens
  misc_RNA (1)...(19): siRNA sense strand
caguuagcauuucuuguuu

SEQ ID NO: 783109 - RNA, 19 nt, Homo sapiens
  misc_RNA (1)...(19): siRNA sense strand
uuacauguuuggcaacuug

SEQ ID NO: 783110 - RNA, 19 nt, Homo sapiens
  misc_RNA (1)...(19): siRNA sense strand
gauagggcuggacaacuua

SEQ ID NO: 783111 - RNA, 19 nt, Homo sapiens
  misc_RNA (1)...(19): siRNA sense strand
gcaauguugugggacacua

SEQ ID NO: 783112 - RNA, 19 nt, Homo sapiens
  misc_RNA (1)...(19): siRNA sense strand
cauugccacuguucacaua

SEQ ID NO: 783113 - RNA, 19 nt, Homo sapiens
  misc_RNA (1)...(19): siRNA sense strand
gaagauccaacaucauaca

SEQ ID NO: 783114 - RNA, 19 nt, Homo sapiens
  misc_RNA (1)...(19): siRNA sense strand
gauccgagccgagguaaug

SEQ ID NO: 783115 - RNA, 19 nt, Homo sapiens
  misc_RNA (1)...(19): siRNA sense strand
gcugggugcuauauuuaga

SEQ ID NO: 783116 - RNA, 19 nt, Homo sapiens
  misc_RNA (1)...(19): siRNA sense strand
uugaggaaguucaugaauu

SEQ ID NO: 783117 - RNA, 19 nt, Homo sapiens
  misc_RNA (1)...(19): siRNA sense strand
acaagugaauggaaaucuu

SEQ ID NO: 783118 - RNA, 19 nt, Homo sapiens
  misc_RNA (1)...(19): siRNA sense strand
gcagaacccagugugcuuu

SEQ ID NO: 783119 - RNA, 19 nt, Homo sapiens
  misc_RNA (1)...(19): siRNA sense strand
aguaaaugccuuagucuuu

SEQ ID NO: 783120 - RNA, 19 nt, Homo sapiens
  misc_RNA (1)...(19): siRNA sense strand
ggagguggcuaaaaccauu

SEQ ID NO: 783121 - RNA, 19 nt, Homo sapiens
  misc_RNA (1)...(19): siRNA sense strand
auggaaaucuugucagaga

SEQ ID NO: 783122 - RNA, 19 nt, Homo sapiens
  misc_RNA (1)...(19): siRNA sense strand
acaaacaaccugaaucauc

SEQ ID NO: 783123 - RNA, 19 nt, Homo sapiens
  misc_RNA (1)...(19): siRNA sense strand
gaacccagugugcuuugaa

SEQ ID NO: 783124 - RNA, 19 nt, Homo sapiens
  misc_RNA (1)...(19): siRNA sense strand
auauggaacuggaagaaga

SEQ ID NO: 783125 - RNA, 19 nt, Homo sapiens
  misc_RNA (1)...(19): siRNA sense strand
cagaaucauugccacuguu

SEQ ID NO: 783126 - RNA, 19 nt, Homo sapiens
  misc_RNA (1)...(19): siRNA sense strand
aaacaugccaaacaaacaa

SEQ ID NO: 783127 - RNA, 19 nt, Homo sapiens
  misc_RNA (1)...(19): siRNA sense strand
caggaggacuaaagcugaa

SEQ ID NO: 783128 - RNA, 19 nt, Homo sapiens
  misc_RNA (1)...(19): siRNA sense strand
cuugcugggugcuauauuu

SEQ ID NO: 783129 - RNA, 19 nt, Homo sapiens
  misc_RNA (1)...(19): siRNA sense strand
gacuaaagcugaaaacauc

SEQ ID NO: 783130 - RNA, 19 nt, Homo sapiens
  misc_RNA (1)...(19): siRNA sense strand
ggaauucacgcuacuacca

SEQ ID NO: 783131 - RNA, 19 nt, Homo sapiens
  misc_RNA (1)...(19): siRNA sense strand
uuggaaagguuguucugaa

SEQ ID NO: 783132 - RNA, 19 nt, Homo sapiens
  misc_RNA (1)...(19): siRNA sense strand
aaagaacuucgaaauguug

SEQ ID NO: 783133 - RNA, 19 nt, Homo sapiens
  misc_RNA (1)...(19): siRNA sense strand
cacaaccuauccauuacuu

SEQ ID NO: 783134 - RNA, 19 nt, Homo sapiens
  misc_RNA (1)...(19): siRNA sense strand
ggagaugccuuggguucag

SEQ ID NO: 783135 - RNA, 19 nt, Homo sapiens
  misc_RNA (1)...(19): siRNA sense strand
guuagcauuucuuguuuag

SEQ ID NO: 783136 - RNA, 19 nt, Homo sapiens
  misc_RNA (1)...(19): siRNA sense strand
gaagauagggcuggacaac

SEQ ID NO: 783137 - RNA, 19 nt, Homo sapiens
  misc_RNA (1)...(19): siRNA sense strand
ccaaacaaacaaccugaau

SEQ ID NO: 783138 - RNA, 19 nt, Homo sapiens
  misc_RNA (1)...(19): siRNA sense strand
ggaaguacaagugaaugga

SEQ ID NO: 783139 - RNA, 19 nt, Homo sapiens
  misc_RNA (1)...(19): siRNA sense strand
caaacaaacaaccugaauc

SEQ ID NO: 783140 - RNA, 19 nt, Homo sapiens
  misc_RNA (1)...(19): siRNA sense strand
aguguaggcucuaaaucaa

SEQ ID NO: 783141 - RNA, 19 nt, Homo sapiens
  misc_RNA (1)...(19): siRNA sense strand
guucagugauuguaguagu

SEQ ID NO: 783142 - RNA, 19 nt, Homo sapiens
  misc_RNA (1)...(19): siRNA sense strand
ugccuuggguucagugauu

SEQ ID NO: 783143 - RNA, 19 nt, Homo sapiens
  misc_RNA (1)...(19): siRNA sense strand
gaguugaggaaguucauga

SEQ ID NO: 783144 - RNA, 19 nt, Homo sapiens
  misc_RNA (1)...(19): siRNA sense strand
aguaguaaaugccuuaguc

SEQ ID NO: 783145 - RNA, 19 nt, Homo sapiens
  misc_RNA (1)...(19): siRNA sense strand
aaucugcucuuauucuucu

SEQ ID NO: 783146 - RNA, 19 nt, Homo sapiens
  misc_RNA (1)...(19): siRNA sense strand
aaguacaagugaauggaaa

SEQ ID NO: 783147 - RNA, 19 nt, Homo sapiens
  misc_RNA (1)...(19): siRNA sense strand
gcuguugugauagagauua

SEQ ID NO: 783148 - RNA, 19 nt, Homo sapiens
  misc_RNA (1)...(19): siRNA sense strand
gccugaauuugcuagugua

SEQ ID NO: 783149 - RNA, 19 nt, Homo sapiens
  misc_RNA (1)...(19): siRNA sense strand
ucgaaauguugaaggaguu

SEQ ID NO: 783150 - RNA, 19 nt, Homo sapiens
  misc_RNA (1)...(19): siRNA sense strand
uggaaagguuguucugaag

SEQ ID NO: 783151 - RNA, 19 nt, Homo sapiens
  misc_RNA (1)...(19): siRNA sense strand
uaguguaggcucuaaauca

SEQ ID NO: 783152 - RNA, 19 nt, Homo sapiens
  misc_RNA (1)...(19): siRNA sense strand
guauacuucuuuacacaac

SEQ ID NO: 783153 - RNA, 19 nt, Homo sapiens
  misc_RNA (1)...(19): siRNA sense strand
gcuaguguaggcucuaaau

SEQ ID NO: 783154 - RNA, 19 nt, Homo sapiens
  misc_RNA (1)...(19): siRNA sense strand
gugauacaguggaaguaca

SEQ ID NO: 783155 - RNA, 19 nt, Homo sapiens
  misc_RNA (1)...(19): siRNA sense strand
uguaguaguaaaugccuua

SEQ ID NO: 783156 - RNA, 19 nt, Homo sapiens
  misc_RNA (1)...(19): siRNA sense strand
ggaaaucuugucagagaac

SEQ ID NO: 783157 - RNA, 19 nt, Homo sapiens
  misc_RNA (1)...(19): siRNA sense strand
ggugcuauauuuagaucca

SEQ ID NO: 783158 - RNA, 19 nt, Homo sapiens
  misc_RNA (1)...(19): siRNA sense strand
gguccuugcugggugcuau

SEQ ID NO: 783159 - RNA, 19 nt, Homo sapiens
  misc_RNA (1)...(19): siRNA sense strand
uaguaacaaucuagagaag

SEQ ID NO: 783160 - RNA, 19 nt, Homo sapiens
  misc_RNA (1)...(19): siRNA sense strand
uguaggcucuaaaucaagu

SEQ ID NO: 783161 - RNA, 19 nt, Homo sapiens
  misc_RNA (1)...(19): siRNA sense strand
gaauucacgcuacuaccau

SEQ ID NO: 783162 - RNA, 19 nt, Homo sapiens
  misc_RNA (1)...(19): siRNA sense strand
uucagugauuguaguagua

SEQ ID NO: 783163 - RNA, 19 nt, Homo sapiens
  misc_RNA (1)...(19): siRNA sense strand
ggacuaaagcugaaaacau

SEQ ID NO: 783164 - RNA, 19 nt, Homo sapiens
  misc_RNA (1)...(19): siRNA sense strand
gugaauggaaaucuuguca

SEQ ID NO: 783165 - RNA, 19 nt, Homo sapiens
  misc_RNA (1)...(19): siRNA sense strand
uggaaaucuugucagagaa

SEQ ID NO: 783166 - RNA, 19 nt, Homo sapiens
  misc_RNA (1)...(19): siRNA sense strand
aagaagcccaggaggacua

SEQ ID NO: 783167 - RNA, 19 nt, Homo sapiens
  misc_RNA (1)...(19): siRNA sense strand
cagcaguuagcauuucuug

SEQ ID NO: 783168 - RNA, 19 nt, Homo sapiens
  misc_RNA (1)...(19): siRNA sense strand
ccagaaaaccccagaagug

SEQ ID NO: 783169 - RNA, 19 nt, Homo sapiens
  misc_RNA (1)...(19): siRNA sense strand
ggcucuaaaucaaguguag

SEQ ID NO: 783170 - RNA, 19 nt, Homo sapiens
  misc_RNA (1)...(19): siRNA sense strand
caacuccaacgggcugaaa

SEQ ID NO: 783171 - RNA, 19 nt, Homo sapiens
  misc_RNA (1)...(19): siRNA sense strand
uacacaaccuauccauuac

SEQ ID NO: 783172 - RNA, 19 nt, Homo sapiens
  misc_RNA (1)...(19): siRNA sense strand
agauccaacucuuuguguu

SEQ ID NO: 783173 - RNA, 19 nt, Homo sapiens
  misc_RNA (1)...(19): siRNA sense strand
gagaugccuuggguucagu

SEQ ID NO: 783174 - RNA, 19 nt, Homo sapiens
  misc_RNA (1)...(19): siRNA sense strand
caguggaaguacaagugaa

SEQ ID NO: 783175 - RNA, 19 nt, Homo sapiens
  misc_RNA (1)...(19): siRNA sense strand
ggaacuggaagaagauagg

SEQ ID NO: 783176 - RNA, 19 nt, Homo sapiens
  misc_RNA (1)...(19): siRNA sense strand
gagaaccugaccauaugga

SEQ ID NO: 783177 - RNA, 19 nt, Homo sapiens
  misc_RNA (1)...(19): siRNA sense strand
acucaugcaucaguuuaug

SEQ ID NO: 783178 - RNA, 19 nt, Homo sapiens
  misc_RNA (1)...(19): siRNA sense strand
ucacggaauucacgcuacu

SEQ ID NO: 783179 - RNA, 19 nt, Homo sapiens
  misc_RNA (1)...(19): siRNA sense strand
guguuguaaugguuuguau

SEQ ID NO: 783180 - RNA, 19 nt, Homo sapiens
  misc_RNA (1)...(19): siRNA sense strand
gaacaacgcggacuucauc

SEQ ID NO: 783181 - RNA, 19 nt, Homo sapiens
  misc_RNA (1)...(19): siRNA sense strand
gggcaaaggugaccagaag

SEQ ID NO: 783182 - RNA, 19 nt, Homo sapiens
  misc_RNA (1)...(19): siRNA sense strand
ggacagcucggccgucauu

SEQ ID NO: 783183 - RNA, 19 nt, Homo sapiens
  misc_RNA (1)...(19): siRNA sense strand
caucaucccuguggagauu

SEQ ID NO: 783184 - RNA, 19 nt, Homo sapiens
  misc_RNA (1)...(19): siRNA sense strand
caaguacgcagacccagua

SEQ ID NO: 783185 - RNA, 19 nt, Homo sapiens
  misc_RNA (1)...(19): siRNA sense strand
caauucaccugccuccuau

SEQ ID NO: 783186 - RNA, 19 nt, Homo sapiens
  misc_RNA (1)...(19): siRNA sense strand
uagcugaccugcuggacaa

SEQ ID NO: 783187 - RNA, 19 nt, Homo sapiens
  misc_RNA (1)...(19): siRNA sense strand
cugcuagccucgccaagua

SEQ ID NO: 783188 - RNA, 19 nt, Homo sapiens
  misc_RNA (1)...(19): siRNA sense strand
gcucggccgucauuacuca

SEQ ID NO: 783189 - RNA, 19 nt, Homo sapiens
  misc_RNA (1)...(19): siRNA sense strand
gaccagaagucagcagcuu

SEQ ID NO: 783190 - RNA, 19 nt, Homo sapiens
  misc_RNA (1)...(19): siRNA sense strand
gcgaaugggcgagcucuuu

SEQ ID NO: 783191 - RNA, 19 nt, Homo sapiens
  misc_RNA (1)...(19): siRNA sense strand
gcccaggacucagacaaga

SEQ ID NO: 783192 - RNA, 19 nt, Homo sapiens
  misc_RNA (1)...(19): siRNA sense strand
gcaaaggugaccagaaguc

SEQ ID NO: 783193 - RNA, 19 nt, Homo sapiens
  misc_RNA (1)...(19): siRNA sense strand
ugggcgagcucuuugaaug

SEQ ID NO: 783194 - RNA, 19 nt, Homo sapiens
  misc_RNA (1)...(19): siRNA sense strand
acaauucaccugccuccua

SEQ ID NO: 783195 - RNA, 19 nt, Homo sapiens
  misc_RNA (1)...(19): siRNA sense strand
uuacucagaucagcaagga

SEQ ID NO: 783196 - RNA, 19 nt, Homo sapiens
  misc_RNA (1)...(19): siRNA sense strand
gaaugggcgagcucuuuga

SEQ ID NO: 783197 - RNA, 19 nt, Homo sapiens
  misc_RNA (1)...(19): siRNA sense strand
ucaccugccuccuaugucu

SEQ ID NO: 783198 - RNA, 19 nt, Homo sapiens
  misc_RNA (1)...(19): siRNA sense strand
caacgcggacuucaucauc

SEQ ID NO: 783199 - RNA, 19 nt, Homo sapiens
  misc_RNA (1)...(19): siRNA sense strand
cgaaugggcgagcucuuug

SEQ ID NO: 783200 - RNA, 19 nt, Homo sapiens
  misc_RNA (1)...(19): siRNA sense strand
ccaaggcccaggacucaga

SEQ ID NO: 783201 - RNA, 19 nt, Homo sapiens
  misc_RNA (1)...(19): siRNA sense strand
ggcgagcucuuugaaugug

SEQ ID NO: 783202 - RNA, 19 nt, Homo sapiens
  misc_RNA (1)...(19): siRNA sense strand
caccaggucuacguguuga

SEQ ID NO: 783203 - RNA, 19 nt, Homo sapiens
  misc_RNA (1)...(19): siRNA sense strand
ccaccaggucuacguguug

SEQ ID NO: 783204 - RNA, 19 nt, Homo sapiens
  misc_RNA (1)...(19): siRNA sense strand
gguuugacaacaugaguga

SEQ ID NO: 783205 - RNA, 19 nt, Homo sapiens
  misc_RNA (1)...(19): siRNA sense strand
ugugugcuguucacugcua

SEQ ID NO: 783206 - RNA, 19 nt, Homo sapiens
  misc_RNA (1)...(19): siRNA sense strand
ccucgugguuugacaacau

SEQ ID NO: 783207 - RNA, 19 nt, Homo sapiens
  misc_RNA (1)...(19): siRNA sense strand
ucacucuucugcugugucu

SEQ ID NO: 783208 - RNA, 19 nt, Homo sapiens
  misc_RNA (1)...(19): siRNA sense strand
gugcucauccuggacaauu

SEQ ID NO: 783209 - RNA, 19 nt, Homo sapiens
  misc_RNA (1)...(19): siRNA sense strand
gggcgagcucuuugaaugu

SEQ ID NO: 783210 - RNA, 19 nt, Homo sapiens
  misc_RNA (1)...(19): siRNA sense strand
guacgcagacccaguagcu

SEQ ID NO: 783211 - RNA, 19 nt, Homo sapiens
  misc_RNA (1)...(19): siRNA sense strand
gcucauccuggacaauuca

SEQ ID NO: 783212 - RNA, 19 nt, Homo sapiens
  misc_RNA (1)...(19): siRNA sense strand
ccaggacucagacaagauc

SEQ ID NO: 783213 - RNA, 19 nt, Homo sapiens
  misc_RNA (1)...(19): siRNA sense strand
caagaucugcguggucauc

SEQ ID NO: 783214 - RNA, 19 nt, Homo sapiens
  misc_RNA (1)...(19): siRNA sense strand
gaacaacgcggacuucauc

SEQ ID NO: 783215 - RNA, 19 nt, Homo sapiens
  misc_RNA (1)...(19): siRNA sense strand
gggcaaaggugaccagaag

SEQ ID NO: 783216 - RNA, 19 nt, Homo sapiens
  misc_RNA (1)...(19): siRNA sense strand
ggacagcucggccgucauu

SEQ ID NO: 783217 - RNA, 19 nt, Homo sapiens
  misc_RNA (1)...(19): siRNA sense strand
caucaucccuguggagauu

SEQ ID NO: 783218 - RNA, 19 nt, Homo sapiens
  misc_RNA (1)...(19): siRNA sense strand
caaguacgcagacccagua

SEQ ID NO: 783219 - RNA, 19 nt, Homo sapiens
  misc_RNA (1)...(19): siRNA sense strand
caauucaccugccuccuau

SEQ ID NO: 783220 - RNA, 19 nt, Homo sapiens
  misc_RNA (1)...(19): siRNA sense strand
uagcugaccugcuggacaa

SEQ ID NO: 783221 - RNA, 19 nt, Homo sapiens
  misc_RNA (1)...(19): siRNA sense strand
cugcuagccucgccaagua

SEQ ID NO: 783222 - RNA, 19 nt, Homo sapiens
  misc_RNA (1)...(19): siRNA sense strand
gcucggccgucauuacuca

SEQ ID NO: 783223 - RNA, 19 nt, Homo sapiens
  misc_RNA (1)...(19): siRNA sense strand
gaccagaagucagcagcuu

SEQ ID NO: 783224 - RNA, 19 nt, Homo sapiens
  misc_RNA (1)...(19): siRNA sense strand
gcgaaugggcgagcucuuu

SEQ ID NO: 783225 - RNA, 19 nt, Homo sapiens
  misc_RNA (1)...(19): siRNA sense strand
gcccaggacucagacaaga

SEQ ID NO: 783226 - RNA, 19 nt, Homo sapiens
  misc_RNA (1)...(19): siRNA sense strand
gcaaaggugaccagaaguc

SEQ ID NO: 783227 - RNA, 19 nt, Homo sapiens
  misc_RNA (1)...(19): siRNA sense strand
ugggcgagcucuuugaaug

SEQ ID NO: 783228 - RNA, 19 nt, Homo sapiens
  misc_RNA (1)...(19): siRNA sense strand
acaauucaccugccuccua

SEQ ID NO: 783229 - RNA, 19 nt, Homo sapiens
  misc_RNA (1)...(19): siRNA sense strand
uuacucagaucagcaagga

SEQ ID NO: 783230 - RNA, 19 nt, Homo sapiens
  misc_RNA (1)...(19): siRNA sense strand
gaaugggcgagcucuuuga

SEQ ID NO: 783231 - RNA, 19 nt, Homo sapiens
  misc_RNA (1)...(19): siRNA sense strand
ucaccugccuccuaugucu

SEQ ID NO: 783232 - RNA, 19 nt, Homo sapiens
  misc_RNA (1)...(19): siRNA sense strand
caacgcggacuucaucauc

SEQ ID NO: 783233 - RNA, 19 nt, Homo sapiens
  misc_RNA (1)...(19): siRNA sense strand
cgaaugggcgagcucuuug

SEQ ID NO: 783234 - RNA, 19 nt, Homo sapiens
  misc_RNA (1)...(19): siRNA sense strand
ccaaggcccaggacucaga

SEQ ID NO: 783235 - RNA, 19 nt, Homo sapiens
  misc_RNA (1)...(19): siRNA sense strand
ggcgagcucuuugaaugug

SEQ ID NO: 783236 - RNA, 19 nt, Homo sapiens
  misc_RNA (1)...(19): siRNA sense strand
caccaggucuacguguuga

SEQ ID NO: 783237 - RNA, 19 nt, Homo sapiens
  misc_RNA (1)...(19): siRNA sense strand
ccaccaggucuacguguug

SEQ ID NO: 783238 - RNA, 19 nt, Homo sapiens
  misc_RNA (1)...(19): siRNA sense strand
gguuugacaacaugaguga

SEQ ID NO: 783239 - RNA, 19 nt, Homo sapiens
  misc_RNA (1)...(19): siRNA sense strand
ugugugcuguucacugcua

SEQ ID NO: 783240 - RNA, 19 nt, Homo sapiens
  misc_RNA (1)...(19): siRNA sense strand
ccucgugguuugacaacau

SEQ ID NO: 783241 - RNA, 19 nt, Homo sapiens
  misc_RNA (1)...(19): siRNA sense strand
ucacucuucugcugugucu

SEQ ID NO: 783242 - RNA, 19 nt, Homo sapiens
  misc_RNA (1)...(19): siRNA sense strand
gugcucauccuggacaauu

SEQ ID NO: 783243 - RNA, 19 nt, Homo sapiens
  misc_RNA (1)...(19): siRNA sense strand
gggcgagcucuuugaaugu

SEQ ID NO: 783244 - RNA, 19 nt, Homo sapiens
  misc_RNA (1)...(19): siRNA sense strand
guacgcagacccaguagcu

SEQ ID NO: 783245 - RNA, 19 nt, Homo sapiens
  misc_RNA (1)...(19): siRNA sense strand
gcucauccuggacaauuca

SEQ ID NO: 783246 - RNA, 19 nt, Homo sapiens
  misc_RNA (1)...(19): siRNA sense strand
ccaggacucagacaagauc

SEQ ID NO: 783247 - RNA, 19 nt, Homo sapiens
  misc_RNA (1)...(19): siRNA sense strand
caagaucugcguggucauc

SEQ ID NO: 783248 - RNA, 19 nt, Homo sapiens
  misc_RNA (1)...(19): siRNA sense strand
gaaagugggugcagagaau

SEQ ID NO: 783249 - RNA, 19 nt, Homo sapiens
  misc_RNA (1)...(19): siRNA sense strand
gagcggaaccucacuguua

SEQ ID NO: 783250 - RNA, 19 nt, Homo sapiens
  misc_RNA (1)...(19): siRNA sense strand
ggaaagcucugcaggacuu

SEQ ID NO: 783251 - RNA, 19 nt, Homo sapiens
  misc_RNA (1)...(19): siRNA sense strand
gaagaucuccuaccgauau

SEQ ID NO: 783252 - RNA, 19 nt, Homo sapiens
  misc_RNA (1)...(19): siRNA sense strand
caugaaagcugaccugaug

SEQ ID NO: 783253 - RNA, 19 nt, Homo sapiens
  misc_RNA (1)...(19): siRNA sense strand
gacaagaacugcauucaca

SEQ ID NO: 783254 - RNA, 19 nt, Homo sapiens
  misc_RNA (1)...(19): siRNA sense strand
gaucaaagcuagagugacu

SEQ ID NO: 783255 - RNA, 19 nt, Homo sapiens
  misc_RNA (1)...(19): siRNA sense strand
gaaccucacuguuaacuac

SEQ ID NO: 783256 - RNA, 19 nt, Homo sapiens
  misc_RNA (1)...(19): siRNA sense strand
uaaacaagaggcuguauuu

SEQ ID NO: 783257 - RNA, 19 nt, Homo sapiens
  misc_RNA (1)...(19): siRNA sense strand
gauaggacaauuucuguaa

SEQ ID NO: 783258 - RNA, 19 nt, Homo sapiens
  misc_RNA (1)...(19): siRNA sense strand
gcaaugccaucuucaccuu

SEQ ID NO: 783259 - RNA, 19 nt, Homo sapiens
  misc_RNA (1)...(19): siRNA sense strand
gaacugcauucacacagau

SEQ ID NO: 783260 - RNA, 19 nt, Homo sapiens
  misc_RNA (1)...(19): siRNA sense strand
gaaguaugauggcuacaca

SEQ ID NO: 783261 - RNA, 19 nt, Homo sapiens
  misc_RNA (1)...(19): siRNA sense strand
ggagagacccaagugauuu

SEQ ID NO: 783262 - RNA, 19 nt, Homo sapiens
  misc_RNA (1)...(19): siRNA sense strand
ccaaugagcccaccagaug

SEQ ID NO: 783263 - RNA, 19 nt, Homo sapiens
  misc_RNA (1)...(19): siRNA sense strand
aagcugaccugaugccuuu

SEQ ID NO: 783264 - RNA, 19 nt, Homo sapiens
  misc_RNA (1)...(19): siRNA sense strand
gaucauguacuuaucagaa

SEQ ID NO: 783265 - RNA, 19 nt, Homo sapiens
  misc_RNA (1)...(19): siRNA sense strand
gaagaucauguacuuauca

SEQ ID NO: 783266 - RNA, 19 nt, Homo sapiens
  misc_RNA (1)...(19): siRNA sense strand
agacccaagugauuucaua

SEQ ID NO: 783267 - RNA, 19 nt, Homo sapiens
  misc_RNA (1)...(19): siRNA sense strand
gauuccaucugguguagaa

SEQ ID NO: 783268 - RNA, 19 nt, Homo sapiens
  misc_RNA (1)...(19): siRNA sense strand
cccaagugauuucauauga

SEQ ID NO: 783269 - RNA, 19 nt, Homo sapiens
  misc_RNA (1)...(19): siRNA sense strand
cagaagaucauguacuuau

SEQ ID NO: 783270 - RNA, 19 nt, Homo sapiens
  misc_RNA (1)...(19): siRNA sense strand
ccugaugccuuuccuguau

SEQ ID NO: 783271 - RNA, 19 nt, Homo sapiens
  misc_RNA (1)...(19): siRNA sense strand
ggguggauguggauaaaga

SEQ ID NO: 783272 - RNA, 19 nt, Homo sapiens
  misc_RNA (1)...(19): siRNA sense strand
ccaaacaauuguccucauc

SEQ ID NO: 783273 - RNA, 19 nt, Homo sapiens
  misc_RNA (1)...(19): siRNA sense strand
caaauacuccagugaagug

SEQ ID NO: 783274 - RNA, 19 nt, Homo sapiens
  misc_RNA (1)...(19): siRNA sense strand
acaagaggcuguauuugag

SEQ ID NO: 783275 - RNA, 19 nt, Homo sapiens
  misc_RNA (1)...(19): siRNA sense strand
gauuaaaggccuaccugaa

SEQ ID NO: 783276 - RNA, 19 nt, Homo sapiens
  misc_RNA (1)...(19): siRNA sense strand
aaucaaacaccaacaaaga

SEQ ID NO: 783277 - RNA, 19 nt, Homo sapiens
  misc_RNA (1)...(19): siRNA sense strand
ggagguacccaaauguguu

SEQ ID NO: 783278 - RNA, 19 nt, Homo sapiens
  misc_RNA (1)...(19): siRNA sense strand
cacaggagguacccaaaug

SEQ ID NO: 783279 - RNA, 19 nt, Homo sapiens
  misc_RNA (1)...(19): siRNA sense strand
ggaaagugggugcagagaa

SEQ ID NO: 783280 - RNA, 19 nt, Homo sapiens
  misc_RNA (1)...(19): siRNA sense strand
uaaagaaacucugcaacac

SEQ ID NO: 783281 - RNA, 19 nt, Homo sapiens
  misc_RNA (1)...(19): siRNA sense strand
aaacaccaacaaagaagua

SEQ ID NO: 783282 - RNA, 19 nt, Homo sapiens
  misc_RNA (1)...(19): siRNA sense strand
ggugggugcuggugccaaa

SEQ ID NO: 783283 - RNA, 19 nt, Homo sapiens
  misc_RNA (1)...(19): siRNA sense strand
ggauguggauaaagaaacu

SEQ ID NO: 783284 - RNA, 19 nt, Homo sapiens
  misc_RNA (1)...(19): siRNA sense strand
aacaagaggcuguauuuga

SEQ ID NO: 783285 - RNA, 19 nt, Homo sapiens
  misc_RNA (1)...(19): siRNA sense strand
aagagcgccuuuccaugua

SEQ ID NO: 783286 - RNA, 19 nt, Homo sapiens
  misc_RNA (1)...(19): siRNA sense strand
caaguuguuucaucuaggu

SEQ ID NO: 783287 - RNA, 19 nt, Homo sapiens
  misc_RNA (1)...(19): siRNA sense strand
guuaagaaguaugcagaug

SEQ ID NO: 783288 - RNA, 19 nt, Homo sapiens
  misc_RNA (1)...(19): siRNA sense strand
gagguacccaaauguguuu

SEQ ID NO: 783289 - RNA, 19 nt, Homo sapiens
  misc_RNA (1)...(19): siRNA sense strand
ggauaaagaaacucugcaa

SEQ ID NO: 783290 - RNA, 19 nt, Homo sapiens
  misc_RNA (1)...(19): siRNA sense strand
cucagaagaucauguacuu

SEQ ID NO: 783291 - RNA, 19 nt, Homo sapiens
  misc_RNA (1)...(19): siRNA sense strand
cagaugcccugcaggagau

SEQ ID NO: 783292 - RNA, 19 nt, Homo sapiens
  misc_RNA (1)...(19): siRNA sense strand
gcuggacuaugagaagauu

SEQ ID NO: 783293 - RNA, 19 nt, Homo sapiens
  misc_RNA (1)...(19): siRNA sense strand
gaaucaaacaccaacaaag

SEQ ID NO: 783294 - RNA, 19 nt, Homo sapiens
  misc_RNA (1)...(19): siRNA sense strand
aaacaauuguccucaucug

SEQ ID NO: 783295 - RNA, 19 nt, Homo sapiens
  misc_RNA (1)...(19): siRNA sense strand
uuucaacacuucucuugga

SEQ ID NO: 783296 - RNA, 19 nt, Homo sapiens
  misc_RNA (1)...(19): siRNA sense strand
uccuaccgauaucuuauua

SEQ ID NO: 783297 - RNA, 19 nt, Homo sapiens
  misc_RNA (1)...(19): siRNA sense strand
guagaauggaucaaagcua

SEQ ID NO: 783298 - RNA, 19 nt, Homo sapiens
  misc_RNA (1)...(19): siRNA sense strand
gguguagaauggaucaaag

SEQ ID NO: 783299 - RNA, 19 nt, Homo sapiens
  misc_RNA (1)...(19): siRNA sense strand
agaacugcauucacacaga

SEQ ID NO: 783300 - RNA, 19 nt, Homo sapiens
  misc_RNA (1)...(19): siRNA sense strand
caucuucaccuucccaaau

SEQ ID NO: 783301 - RNA, 19 nt, Homo sapiens
  misc_RNA (1)...(19): siRNA sense strand
aagcuagagugacugaguu

SEQ ID NO: 783302 - RNA, 19 nt, Homo sapiens
  misc_RNA (1)...(19): siRNA sense strand
cuagaaaccuuccccuuug

SEQ ID NO: 783303 - RNA, 19 nt, Homo sapiens
  misc_RNA (1)...(19): siRNA sense strand
uugcugaguuugacuacaa

SEQ ID NO: 783304 - RNA, 19 nt, Homo sapiens
  misc_RNA (1)...(19): siRNA sense strand
caccaacaaagaaguauga

SEQ ID NO: 783305 - RNA, 19 nt, Homo sapiens
  misc_RNA (1)...(19): siRNA sense strand
ccagugagagacauuucua

SEQ ID NO: 783306 - RNA, 19 nt, Homo sapiens
  misc_RNA (1)...(19): siRNA sense strand
gauccaaggccaauaucau

SEQ ID NO: 783307 - RNA, 19 nt, Homo sapiens
  misc_RNA (1)...(19): siRNA sense strand
uauuauugcucucggaauc

SEQ ID NO: 783308 - RNA, 19 nt, Homo sapiens
  misc_RNA (1)...(19): siRNA sense strand
guagagaagacauggaaag

SEQ ID NO: 783309 - RNA, 19 nt, Homo sapiens
  misc_RNA (1)...(19): siRNA sense strand
agcggaaccucacuguuaa

SEQ ID NO: 783310 - RNA, 19 nt, Homo sapiens
  misc_RNA (1)...(19): siRNA sense strand
acacagaugacgacgagaa

SEQ ID NO: 783311 - RNA, 19 nt, Homo sapiens
  misc_RNA (1)...(19): siRNA sense strand
cagcguuucugcgcaaguu

SEQ ID NO: 783312 - RNA, 19 nt, Homo sapiens
  misc_RNA (1)...(19): siRNA sense strand
cuacaaccgugugauucuu

SEQ ID NO: 783313 - RNA, 19 nt, Homo sapiens
  misc_RNA (1)...(19): siRNA sense strand
caccagauguccucaagac

SEQ ID NO: 783314 - RNA, 19 nt, Homo sapiens
  misc_RNA (1)...(19): siRNA sense strand
cagcuggacuaugagaaga

SEQ ID NO: 783315 - RNA, 19 nt, Homo sapiens
  misc_RNA (1)...(19): siRNA sense strand
ggaaccucacuguuaacua

SEQ ID NO: 783316 - RNA, 19 nt, Homo sapiens
  misc_RNA (1)...(19): siRNA sense strand
caugucacaccuccaauga

SEQ ID NO: 783317 - RNA, 19 nt, Homo sapiens
  misc_RNA (1)...(19): siRNA sense strand
gagagacccaagugauuuc

SEQ ID NO: 783318 - RNA, 19 nt, Homo sapiens
  misc_RNA (1)...(19): siRNA sense strand
gaguugaacccagacaaga

SEQ ID NO: 783319 - RNA, 19 nt, Homo sapiens
  misc_RNA (1)...(19): siRNA sense strand
auaaagaaacucugcaaca

SEQ ID NO: 783320 - RNA, 19 nt, Homo sapiens
  misc_RNA (1)...(19): siRNA sense strand
caagaggcuguauuugaga

SEQ ID NO: 783321 - RNA, 19 nt, Homo sapiens
  misc_RNA (1)...(19): siRNA sense strand
agaagaucauguacuuauc

SEQ ID NO: 783322 - RNA, 19 nt, Homo sapiens
  misc_RNA (1)...(19): siRNA sense strand
ggacuaugagaagauuaaa

SEQ ID NO: 783323 - RNA, 19 nt, Homo sapiens
  misc_RNA (1)...(19): siRNA sense strand
ucaaagcuagagugacuga

SEQ ID NO: 783324 - RNA, 19 nt, Homo sapiens
  misc_RNA (1)...(19): siRNA sense strand
gcgcaaguuguuucaucua

SEQ ID NO: 783325 - RNA, 19 nt, Homo sapiens
  misc_RNA (1)...(19): siRNA sense strand
aaagaaacucugcaacaca

SEQ ID NO: 783326 - RNA, 19 nt, Homo sapiens
  misc_RNA (1)...(19): siRNA sense strand
caaaauagggucgaauuau

SEQ ID NO: 783327 - RNA, 19 nt, Homo sapiens
  misc_RNA (1)...(19): siRNA sense strand
ccaaaauagggucgaauua

SEQ ID NO: 783328 - RNA, 19 nt, Homo sapiens
  misc_RNA (1)...(19): siRNA sense strand
gccaaacaauuguccucau

SEQ ID NO: 783329 - RNA, 19 nt, Homo sapiens
  misc_RNA (1)...(19): siRNA sense strand
agaaucaaacaccaacaaa

SEQ ID NO: 783330 - RNA, 19 nt, Homo sapiens
  misc_RNA (1)...(19): siRNA sense strand
aagaggcuguauuugagaa

SEQ ID NO: 783331 - RNA, 19 nt, Homo sapiens
  misc_RNA (1)...(19): siRNA sense strand
aaacaagaggcuguauuug

SEQ ID NO: 783332 - RNA, 19 nt, Homo sapiens
  misc_RNA (1)...(19): siRNA sense strand
ucagaagaucauguacuua

SEQ ID NO: 783333 - RNA, 19 nt, Homo sapiens
  misc_RNA (1)...(19): siRNA sense strand
caagaacugcauucacaca

SEQ ID NO: 783334 - RNA, 19 nt, Homo sapiens
  misc_RNA (1)...(19): siRNA sense strand
gugcuggugccaaacaauu

SEQ ID NO: 783335 - RNA, 19 nt, Homo sapiens
  misc_RNA (1)...(19): siRNA sense strand
ugugauucuugcugaguuu

SEQ ID NO: 783336 - RNA, 19 nt, Homo sapiens
  misc_RNA (1)...(19): siRNA sense strand
caucugguguagaauggau

SEQ ID NO: 783337 - RNA, 19 nt, Homo sapiens
  misc_RNA (1)...(19): siRNA sense strand
gcaagugugauuccaucug

SEQ ID NO: 783338 - RNA, 19 nt, Homo sapiens
  misc_RNA (1)...(19): siRNA sense strand
accgauaucuuauuauugc

SEQ ID NO: 783339 - RNA, 19 nt, Homo sapiens
  misc_RNA (1)...(19): siRNA sense strand
ugaugccuuuccuguauug

SEQ ID NO: 783340 - RNA, 19 nt, Homo sapiens
  misc_RNA (1)...(19): siRNA sense strand
agguuucgcucaucccaaa

SEQ ID NO: 783341 - RNA, 19 nt, Homo sapiens
  misc_RNA (1)...(19): siRNA sense strand
gaucuccuaccgauaucuu

SEQ ID NO: 783342 - RNA, 19 nt, Homo sapiens
  misc_RNA (1)...(19): siRNA sense strand
gaagaaucaaacaccaaca

SEQ ID NO: 783343 - RNA, 19 nt, Homo sapiens
  misc_RNA (1)...(19): siRNA sense strand
gauaaacaagaggcuguau

SEQ ID NO: 783344 - RNA, 19 nt, Homo sapiens
  misc_RNA (1)...(19): siRNA sense strand
ugaaguccgagccgauaaa

SEQ ID NO: 783345 - RNA, 19 nt, Homo sapiens
  misc_RNA (1)...(19): siRNA sense strand
agucaggaauacuugauag

SEQ ID NO: 783346 - RNA, 19 nt, Homo sapiens
  misc_RNA (1)...(19): siRNA sense strand
gugugauucuugcugaguu

SEQ ID NO: 783347 - RNA, 19 nt, Homo sapiens
  misc_RNA (1)...(19): siRNA sense strand
ucaaacaccaacaaagaag

SEQ ID NO: 783348 - RNA, 19 nt, Homo sapiens
  misc_RNA (1)...(19): siRNA sense strand
gagauggccugcugacugu

SEQ ID NO: 783349 - RNA, 19 nt, Homo sapiens
  misc_RNA (1)...(19): siRNA sense strand
ccacguauguccgcagcua

SEQ ID NO: 783350 - RNA, 19 nt, Homo sapiens
  misc_RNA (1)...(19): siRNA sense strand
gugcggagaccaaggauga

SEQ ID NO: 783351 - RNA, 19 nt, Homo sapiens
  misc_RNA (1)...(19): siRNA sense strand
gcuggaagcggaacugguu

SEQ ID NO: 783352 - RNA, 19 nt, Homo sapiens
  misc_RNA (1)...(19): siRNA sense strand
caaggaugaugcccuagca

SEQ ID NO: 783353 - RNA, 19 nt, Homo sapiens
  misc_RNA (1)...(19): siRNA sense strand
gcuccaaggucaggugugu

SEQ ID NO: 783354 - RNA, 19 nt, Homo sapiens
  misc_RNA (1)...(19): siRNA sense strand
ugacuccgcucuggaaagu

SEQ ID NO: 783355 - RNA, 19 nt, Homo sapiens
  misc_RNA (1)...(19): siRNA sense strand
ggaggaccgugugcucauc

SEQ ID NO: 783356 - RNA, 19 nt, Homo sapiens
  misc_RNA (1)...(19): siRNA sense strand
gcccguaccaagacuacua

SEQ ID NO: 783357 - RNA, 19 nt, Homo sapiens
  misc_RNA (1)...(19): siRNA sense strand
gcucauccacuucaauguc

SEQ ID NO: 783358 - RNA, 19 nt, Homo sapiens
  misc_RNA (1)...(19): siRNA sense strand
gauggccugcugacuguga

SEQ ID NO: 783359 - RNA, 19 nt, Homo sapiens
  misc_RNA (1)...(19): siRNA sense strand
gcacacgaggccacguaug

SEQ ID NO: 783360 - RNA, 19 nt, Homo sapiens
  misc_RNA (1)...(19): siRNA sense strand
ggaucugggugcgcgucua

SEQ ID NO: 783361 - RNA, 19 nt, Homo sapiens
  misc_RNA (1)...(19): siRNA sense strand
gcccagagugccaugaugu

SEQ ID NO: 783362 - RNA, 19 nt, Homo sapiens
  misc_RNA (1)...(19): siRNA sense strand
gugcucauccacuucaaug

SEQ ID NO: 783363 - RNA, 19 nt, Homo sapiens
  misc_RNA (1)...(19): siRNA sense strand
ggcccagagugccaugaug

SEQ ID NO: 783364 - RNA, 19 nt, Homo sapiens
  misc_RNA (1)...(19): siRNA sense strand
auaaagaucggcccagagu

SEQ ID NO: 783365 - RNA, 19 nt, Homo sapiens
  misc_RNA (1)...(19): siRNA sense strand
cacacgaggccacguaugu

SEQ ID NO: 783366 - RNA, 19 nt, Homo sapiens
  misc_RNA (1)...(19): siRNA sense strand
gaaugaagguguacaucua

SEQ ID NO: 783367 - RNA, 19 nt, Homo sapiens
  misc_RNA (1)...(19): siRNA sense strand
ggaagcagaugugcacgua

SEQ ID NO: 783368 - RNA, 19 nt, Homo sapiens
  misc_RNA (1)...(19): siRNA sense strand
gaaaguuaccgaaagauug

SEQ ID NO: 783369 - RNA, 19 nt, Homo sapiens
  misc_RNA (1)...(19): siRNA sense strand
gcagacacauugggaagaa

SEQ ID NO: 783370 - RNA, 19 nt, Homo sapiens
  misc_RNA (1)...(19): siRNA sense strand
aaagaccacugcacucaaa

SEQ ID NO: 783371 - RNA, 19 nt, Homo sapiens
  misc_RNA (1)...(19): siRNA sense strand
ggaauggaguggaugaucu

SEQ ID NO: 783372 - RNA, 19 nt, Homo sapiens
  misc_RNA (1)...(19): siRNA sense strand
cagaugaugagaagacuua

SEQ ID NO: 783373 - RNA, 19 nt, Homo sapiens
  misc_RNA (1)...(19): siRNA sense strand
gcagaguucuuugcagaug

SEQ ID NO: 783374 - RNA, 19 nt, Homo sapiens
  misc_RNA (1)...(19): siRNA sense strand
caagauuggacacaaagua

SEQ ID NO: 783375 - RNA, 19 nt, Homo sapiens
  misc_RNA (1)...(19): siRNA sense strand
gagauauucuugagcuugu

SEQ ID NO: 783376 - RNA, 19 nt, Homo sapiens
  misc_RNA (1)...(19): siRNA sense strand
ggagggagauauucuugag

SEQ ID NO: 783377 - RNA, 19 nt, Homo sapiens
  misc_RNA (1)...(19): siRNA sense strand
gacacaaaguagagaguga

SEQ ID NO: 783378 - RNA, 19 nt, Homo sapiens
  misc_RNA (1)...(19): siRNA sense strand
ggagagaggccggaaugaa

SEQ ID NO: 783379 - RNA, 19 nt, Homo sapiens
  misc_RNA (1)...(19): siRNA sense strand
ggccagugcugcugaggaa

SEQ ID NO: 783380 - RNA, 19 nt, Homo sapiens
  misc_RNA (1)...(19): siRNA sense strand
ucacuuugauaccaagauu

SEQ ID NO: 783381 - RNA, 19 nt, Homo sapiens
  misc_RNA (1)...(19): siRNA sense strand
aagaguaucugcagacaca

SEQ ID NO: 783382 - RNA, 19 nt, Homo sapiens
  misc_RNA (1)...(19): siRNA sense strand
gcuuguugauggucacuuu

SEQ ID NO: 783383 - RNA, 19 nt, Homo sapiens
  misc_RNA (1)...(19): siRNA sense strand
aaguagagagugaaaguua

SEQ ID NO: 783384 - RNA, 19 nt, Homo sapiens
  misc_RNA (1)...(19): siRNA sense strand
caaaguagagagugaaagu

SEQ ID NO: 783385 - RNA, 19 nt, Homo sapiens
  misc_RNA (1)...(19): siRNA sense strand
gaaagaccacugcacucaa

SEQ ID NO: 783386 - RNA, 19 nt, Homo sapiens
  misc_RNA (1)...(19): siRNA sense strand
gagagaggccggaaugaag

SEQ ID NO: 783387 - RNA, 19 nt, Homo sapiens
  misc_RNA (1)...(19): siRNA sense strand
gagugaaaguuaccgaaag

SEQ ID NO: 783388 - RNA, 19 nt, Homo sapiens
  misc_RNA (1)...(19): siRNA sense strand
ggaaugaagguguacaucu

SEQ ID NO: 783389 - RNA, 19 nt, Homo sapiens
  misc_RNA (1)...(19): siRNA sense strand
agaguucuuugcagaugua

SEQ ID NO: 783390 - RNA, 19 nt, Homo sapiens
  misc_RNA (1)...(19): siRNA sense strand
uaaagaguaucugcagaca

SEQ ID NO: 783391 - RNA, 19 nt, Homo sapiens
  misc_RNA (1)...(19): siRNA sense strand
ugaaaguuaccgaaagauu

SEQ ID NO: 783392 - RNA, 19 nt, Homo sapiens
  misc_RNA (1)...(19): siRNA sense strand
gaugauccaggccguggua

SEQ ID NO: 783393 - RNA, 19 nt, Homo sapiens
  misc_RNA (1)...(19): siRNA sense strand
cgaaagaccacugcacuca

SEQ ID NO: 783394 - RNA, 19 nt, Homo sapiens
  misc_RNA (1)...(19): siRNA sense strand
agugaaaguuaccgaaaga

SEQ ID NO: 783395 - RNA, 19 nt, Homo sapiens
  misc_RNA (1)...(19): siRNA sense strand
caacgcaggauuaacagau

SEQ ID NO: 783396 - RNA, 19 nt, Homo sapiens
  misc_RNA (1)...(19): siRNA sense strand
agaugucccuggaucgaaa

SEQ ID NO: 783397 - RNA, 19 nt, Homo sapiens
  misc_RNA (1)...(19): siRNA sense strand
aaagauugcagacagcauu

SEQ ID NO: 783398 - RNA, 19 nt, Homo sapiens
  misc_RNA (1)...(19): siRNA sense strand
guugauggucacuuugaua

SEQ ID NO: 783399 - RNA, 19 nt, Homo sapiens
  misc_RNA (1)...(19): siRNA sense strand
uaacagaugaugagaagac

SEQ ID NO: 783400 - RNA, 19 nt, Homo sapiens
  misc_RNA (1)...(19): siRNA sense strand
cgaagaaaauguuaaagag

SEQ ID NO: 783401 - RNA, 19 nt, Homo sapiens
  misc_RNA (1)...(19): siRNA sense strand
ugaggaaacaggcugaaga

SEQ ID NO: 783402 - RNA, 19 nt, Homo sapiens
  misc_RNA (1)...(19): siRNA sense strand
uggaguggaugaucugcaa

SEQ ID NO: 783403 - RNA, 19 nt, Homo sapiens
  misc_RNA (1)...(19): siRNA sense strand
gaugagaagacuuacuaca

SEQ ID NO: 783404 - RNA, 19 nt, Homo sapiens
  misc_RNA (1)...(19): siRNA sense strand
guucuuugcagauguaguu

SEQ ID NO: 783405 - RNA, 19 nt, Homo sapiens
  misc_RNA (1)...(19): siRNA sense strand
gugcucaaccaacaacauu

SEQ ID NO: 783406 - RNA, 19 nt, Homo sapiens
  misc_RNA (1)...(19): siRNA sense strand
gauuaacagaugaugagaa

SEQ ID NO: 783407 - RNA, 19 nt, Homo sapiens
  misc_RNA (1)...(19): siRNA sense strand
uccaggccgugguagauaa

SEQ ID NO: 783408 - RNA, 19 nt, Homo sapiens
  misc_RNA (1)...(19): siRNA sense strand
ccuguuagauaucgaaggu

SEQ ID NO: 783409 - RNA, 19 nt, Homo sapiens
  misc_RNA (1)...(19): siRNA sense strand
cagcaggaugucagucuuu

SEQ ID NO: 783410 - RNA, 19 nt, Homo sapiens
  misc_RNA (1)...(19): siRNA sense strand
aaacuguuauucgggcauu

SEQ ID NO: 783411 - RNA, 19 nt, Homo sapiens
  misc_RNA (1)...(19): siRNA sense strand
gaggaaacaggcugaagag

SEQ ID NO: 783412 - RNA, 19 nt, Homo sapiens
  misc_RNA (1)...(19): siRNA sense strand
gaguaucugcagacacauu

SEQ ID NO: 783413 - RNA, 19 nt, Homo sapiens
  misc_RNA (1)...(19): siRNA sense strand
ccagcaggaugucagucuu

SEQ ID NO: 783414 - RNA, 19 nt, Homo sapiens
  misc_RNA (1)...(19): siRNA sense strand
auuaacagaugaugagaag

SEQ ID NO: 783415 - RNA, 19 nt, Homo sapiens
  misc_RNA (1)...(19): siRNA sense strand
ccacaaccccgauugcuuu

SEQ ID NO: 783416 - RNA, 19 nt, Homo sapiens
  misc_RNA (1)...(19): siRNA sense strand
cgauugcuuucgugaagga

SEQ ID NO: 783417 - RNA, 19 nt, Homo sapiens
  misc_RNA (1)...(19): siRNA sense strand
gcgcaugaaagcagaguuc

SEQ ID NO: 783418 - RNA, 19 nt, Homo sapiens
  misc_RNA (1)...(19): siRNA sense strand
gcagaugucccuggaucga

SEQ ID NO: 783419 - RNA, 19 nt, Homo sapiens
  misc_RNA (1)...(19): siRNA sense strand
aaugugugcuggcagaugu

SEQ ID NO: 783420 - RNA, 19 nt, Homo sapiens
  misc_RNA (1)...(19): siRNA sense strand
gaauggaguggaugaucug

SEQ ID NO: 783421 - RNA, 19 nt, Homo sapiens
  misc_RNA (1)...(19): siRNA sense strand
gcaugaaagcagaguucuu

SEQ ID NO: 783422 - RNA, 19 nt, Homo sapiens
  misc_RNA (1)...(19): siRNA sense strand
accgugauccuguuagaua

SEQ ID NO: 783423 - RNA, 19 nt, Homo sapiens
  misc_RNA (1)...(19): siRNA sense strand
gauccaggccgugguagau

SEQ ID NO: 783424 - RNA, 19 nt, Homo sapiens
  misc_RNA (1)...(19): siRNA sense strand
ccaggcaacgcaggauuaa

SEQ ID NO: 783425 - RNA, 19 nt, Homo sapiens
  misc_RNA (1)...(19): siRNA sense strand
gauauucuugagcuuguug

SEQ ID NO: 783426 - RNA, 19 nt, Homo sapiens
  misc_RNA (1)...(19): siRNA sense strand
gggagauauucuugagcuu

SEQ ID NO: 783427 - RNA, 19 nt, Homo sapiens
  misc_RNA (1)...(19): siRNA sense strand
gaacuauaccugccuuccu

SEQ ID NO: 783428 - RNA, 19 nt, Homo sapiens
  misc_RNA (1)...(19): siRNA sense strand
cagaguucuuugcagaugu

SEQ ID NO: 783429 - RNA, 19 nt, Homo sapiens
  misc_RNA (1)...(19): siRNA sense strand
acgcaggauuaacagauga

SEQ ID NO: 783430 - RNA, 19 nt, Homo sapiens
  misc_RNA (1)...(19): siRNA sense strand
gcaacgcaggauuaacaga

SEQ ID NO: 783431 - RNA, 19 nt, Homo sapiens
  misc_RNA (1)...(19): siRNA sense strand
gaccaggcaacgcaggauu

SEQ ID NO: 783432 - RNA, 19 nt, Homo sapiens
  misc_RNA (1)...(19): siRNA sense strand
ccgugauccuguuagauau

SEQ ID NO: 783433 - RNA, 19 nt, Homo sapiens
  misc_RNA (1)...(19): siRNA sense strand
agagugaaaguuaccgaaa

SEQ ID NO: 783434 - RNA, 19 nt, Homo sapiens
  misc_RNA (1)...(19): siRNA sense strand
guggagagaggccggaaug

SEQ ID NO: 783435 - RNA, 19 nt, Homo sapiens
  misc_RNA (1)...(19): siRNA sense strand
gaaagauugcagacagcau

SEQ ID NO: 783436 - RNA, 19 nt, Homo sapiens
  misc_RNA (1)...(19): siRNA sense strand
augaugagaagacuuacua

SEQ ID NO: 783437 - RNA, 19 nt, Homo sapiens
  misc_RNA (1)...(19): siRNA sense strand
ggauggggcuguuccuauc

SEQ ID NO: 783438 - RNA, 19 nt, Homo sapiens
  misc_RNA (1)...(19): siRNA sense strand
aggcaacgcaggauuaaca

SEQ ID NO: 783439 - RNA, 19 nt, Homo sapiens
  misc_RNA (1)...(19): siRNA sense strand
cccgauugcuuucgugaag

SEQ ID NO: 783440 - RNA, 19 nt, Homo sapiens
  misc_RNA (1)...(19): siRNA sense strand
ugaagguguacaucuauuc

SEQ ID NO: 783441 - RNA, 19 nt, Homo sapiens
  misc_RNA (1)...(19): siRNA sense strand
gauccuguuagauaucgaa

SEQ ID NO: 783442 - RNA, 19 nt, Homo sapiens
  misc_RNA (1)...(19): siRNA sense strand
gcucaaccaacaacauuuu

SEQ ID NO: 783443 - RNA, 19 nt, Homo sapiens
  misc_RNA (1)...(19): siRNA sense strand
gauaucgaagguaccacaa

SEQ ID NO: 783444 - RNA, 19 nt, Homo sapiens
  misc_RNA (1)...(19): siRNA sense strand
augaagguguacaucuauu

SEQ ID NO: 783445 - RNA, 19 nt, Homo sapiens
  misc_RNA (1)...(19): siRNA sense strand
cacaaaguagagagugaaa

SEQ ID NO: 783446 - RNA, 19 nt, Homo sapiens
  misc_RNA (1)...(19): siRNA sense strand
guaaugaacuugcuacuua

SEQ ID NO: 783447 - RNA, 19 nt, Homo sapiens
  misc_RNA (1)...(19): siRNA sense strand
gcagggaugugaccuaugu

SEQ ID NO: 783448 - RNA, 19 nt, Homo sapiens
  misc_RNA (1)...(19): siRNA sense strand
gaugugaccuauguaauga

SEQ ID NO: 783449 - RNA, 19 nt, Homo sapiens
  misc_RNA (1)...(19): siRNA sense strand
ugaaggagaucucuagaac

SEQ ID NO: 783450 - RNA, 19 nt, Homo sapiens
  misc_RNA (1)...(19): siRNA sense strand
ggaugugaccuauguaaug

SEQ ID NO: 783451 - RNA, 19 nt, Homo sapiens
  misc_RNA (1)...(19): siRNA sense strand
gaaagaugauaagaugaag

SEQ ID NO: 783452 - RNA, 19 nt, Homo sapiens
  misc_RNA (1)...(19): siRNA sense strand
ccucaaagaaagaugauaa

SEQ ID NO: 783453 - RNA, 19 nt, Homo sapiens
  misc_RNA (1)...(19): siRNA sense strand
ugaccuauguaaugaacuu

SEQ ID NO: 783454 - RNA, 19 nt, Homo sapiens
  misc_RNA (1)...(19): siRNA sense strand
guuaguggauucacaagca

SEQ ID NO: 783455 - RNA, 19 nt, Homo sapiens
  misc_RNA (1)...(19): siRNA sense strand
aaggagaucucuagaacca

SEQ ID NO: 783456 - RNA, 19 nt, Homo sapiens
  misc_RNA (1)...(19): siRNA sense strand
aaccuguacuccucaaaga

SEQ ID NO: 783457 - RNA, 19 nt, Homo sapiens
  misc_RNA (1)...(19): siRNA sense strand
augauaagaugaaggagau

SEQ ID NO: 783458 - RNA, 19 nt, Homo sapiens
  misc_RNA (1)...(19): siRNA sense strand
ccuguacuccucaaagaaa

SEQ ID NO: 783459 - RNA, 19 nt, Homo sapiens
  misc_RNA (1)...(19): siRNA sense strand
gcucuguguuaguggauuc

SEQ ID NO: 783460 - RNA, 19 nt, Homo sapiens
  misc_RNA (1)...(19): siRNA sense strand
uaacaaugaauacgucucu

SEQ ID NO: 783461 - RNA, 19 nt, Homo sapiens
  misc_RNA (1)...(19): siRNA sense strand
caucaucaucuucuucaau

SEQ ID NO: 783462 - RNA, 19 nt, Homo sapiens
  misc_RNA (1)...(19): siRNA sense strand
gaugaaggagaucucuaga

SEQ ID NO: 783463 - RNA, 19 nt, Homo sapiens
  misc_RNA (1)...(19): siRNA sense strand
guggguguaugcagacuca

SEQ ID NO: 783464 - RNA, 19 nt, Homo sapiens
  misc_RNA (1)...(19): siRNA sense strand
acaaugaauacgucucuug

SEQ ID NO: 783465 - RNA, 19 nt, Homo sapiens
  misc_RNA (1)...(19): siRNA sense strand
ugaacuugcuacuuauugc

SEQ ID NO: 783466 - RNA, 19 nt, Homo sapiens
  misc_RNA (1)...(19): siRNA sense strand
cuuauugccucaucaucau

SEQ ID NO: 783467 - RNA, 19 nt, Homo sapiens
  misc_RNA (1)...(19): siRNA sense strand
aagaugauaagaugaagga

SEQ ID NO: 783468 - RNA, 19 nt, Homo sapiens
  misc_RNA (1)...(19): siRNA sense strand
caaccuguacuccucaaag

SEQ ID NO: 783469 - RNA, 19 nt, Homo sapiens
  misc_RNA (1)...(19): siRNA sense strand
gcuacuuauugccucauca

SEQ ID NO: 783470 - RNA, 19 nt, Homo sapiens
  misc_RNA (1)...(19): siRNA sense strand
caucuucuucaaugacaaa

SEQ ID NO: 783471 - RNA, 19 nt, Homo sapiens
  misc_RNA (1)...(19): siRNA sense strand
aucaucaucuucuucaaug

SEQ ID NO: 783472 - RNA, 19 nt, Homo sapiens
  misc_RNA (1)...(19): siRNA sense strand
gggaugugaccuauguaau

SEQ ID NO: 783473 - RNA, 19 nt, Homo sapiens
  misc_RNA (1)...(19): siRNA sense strand
uuaguggauucacaagcaa

SEQ ID NO: 783474 - RNA, 19 nt, Homo sapiens
  misc_RNA (1)...(19): siRNA sense strand
uugcagggaugugaccuau

SEQ ID NO: 783475 - RNA, 19 nt, Homo sapiens
  misc_RNA (1)...(19): siRNA sense strand
gaucaaaguugucaugaau

SEQ ID NO: 783476 - RNA, 19 nt, Homo sapiens
  misc_RNA (1)...(19): siRNA sense strand
guuacaaacuccauuacua

SEQ ID NO: 783477 - RNA, 19 nt, Homo sapiens
  misc_RNA (1)...(19): siRNA sense strand
ccaaggaggaggaguauaa

SEQ ID NO: 783478 - RNA, 19 nt, Homo sapiens
  misc_RNA (1)...(19): siRNA sense strand
cgacuggacuccuauguuc

SEQ ID NO: 783479 - RNA, 19 nt, Homo sapiens
  misc_RNA (1)...(19): siRNA sense strand
ggaucaaaguugucaugaa

SEQ ID NO: 783480 - RNA, 19 nt, Homo sapiens
  misc_RNA (1)...(19): siRNA sense strand
gccaaacugugcaaaguga

SEQ ID NO: 783481 - RNA, 19 nt, Homo sapiens
  misc_RNA (1)...(19): siRNA sense strand
ccacugggaucaaaguugu

SEQ ID NO: 783482 - RNA, 19 nt, Homo sapiens
  misc_RNA (1)...(19): siRNA sense strand
caaacuagccguuacaaac

SEQ ID NO: 783483 - RNA, 19 nt, Homo sapiens
  misc_RNA (1)...(19): siRNA sense strand
ucaaaguugucaugaauac

SEQ ID NO: 783484 - RNA, 19 nt, Homo sapiens
  misc_RNA (1)...(19): siRNA sense strand
gggccaaacugugcaaagu

SEQ ID NO: 783485 - RNA, 19 nt, Homo sapiens
  misc_RNA (1)...(19): siRNA sense strand
ccacaaccuguaccuguuu

SEQ ID NO: 783486 - RNA, 19 nt, Homo sapiens
  misc_RNA (1)...(19): siRNA sense strand
gcgaauggcaccgcaagaa

SEQ ID NO: 783487 - RNA, 19 nt, Homo sapiens
  misc_RNA (1)...(19): siRNA sense strand
ucuauccgcucguuuguca

SEQ ID NO: 783488 - RNA, 19 nt, Homo sapiens
  misc_RNA (1)...(19): siRNA sense strand
ggaggaguauaagcugaug

SEQ ID NO: 783489 - RNA, 19 nt, Homo sapiens
  misc_RNA (1)...(19): siRNA sense strand
gcucccgacuggacuccua

SEQ ID NO: 783490 - RNA, 19 nt, Homo sapiens
  misc_RNA (1)...(19): siRNA sense strand
caagaagcaagcagggauu

SEQ ID NO: 783491 - RNA, 19 nt, Homo sapiens
  misc_RNA (1)...(19): siRNA sense strand
gccguuacaaacuccauua

SEQ ID NO: 783492 - RNA, 19 nt, Homo sapiens
  misc_RNA (1)...(19): siRNA sense strand
ugaccggaauggagugugu

SEQ ID NO: 783493 - RNA, 19 nt, Homo sapiens
  misc_RNA (1)...(19): siRNA sense strand
ccaaacuagccguuacaaa

SEQ ID NO: 783494 - RNA, 19 nt, Homo sapiens
  misc_RNA (1)...(19): siRNA sense strand
uuccuggccuuccaaacua

SEQ ID NO: 783495 - RNA, 19 nt, Homo sapiens
  misc_RNA (1)...(19): siRNA sense strand
guaccuguuugaccggaau

SEQ ID NO: 783496 - RNA, 19 nt, Homo sapiens
  misc_RNA (1)...(19): siRNA sense strand
acgggaugcucuucucuau

SEQ ID NO: 783497 - RNA, 19 nt, Homo sapiens
  misc_RNA (1)...(19): siRNA sense strand
aaaguugucaugaauacug

SEQ ID NO: 783498 - RNA, 19 nt, Homo sapiens
  misc_RNA (1)...(19): siRNA sense strand
aaacuagccguuacaaacu

SEQ ID NO: 783499 - RNA, 19 nt, Homo sapiens
  misc_RNA (1)...(19): siRNA sense strand
uuacaaacuccauuacuac

SEQ ID NO: 783500 - RNA, 19 nt, Homo sapiens
  misc_RNA (1)...(19): siRNA sense strand
uccacaaccuguaccuguu

SEQ ID NO: 783501 - RNA, 19 nt, Homo sapiens
  misc_RNA (1)...(19): siRNA sense strand
gagcugguggugaagaauc

SEQ ID NO: 783502 - RNA, 19 nt, Homo sapiens
  misc_RNA (1)...(19): siRNA sense strand
cacaaccuguaccuguuug

SEQ ID NO: 783503 - RNA, 19 nt, Homo sapiens
  misc_RNA (1)...(19): siRNA sense strand
aggaguauaagcugaugua

SEQ ID NO: 783504 - RNA, 19 nt, Homo sapiens
  misc_RNA (1)...(19): siRNA sense strand
gggaucaaaguugucauga

SEQ ID NO: 783505 - RNA, 19 nt, Homo sapiens
  misc_RNA (1)...(19): siRNA sense strand
gcucguuugucagcaagau

SEQ ID NO: 783506 - RNA, 19 nt, Homo sapiens
  misc_RNA (1)...(19): siRNA sense strand
ugucugcacuacagcgaau

SEQ ID NO: 783507 - RNA, 19 nt, Homo sapiens
  misc_RNA (1)...(19): siRNA sense strand
ggccaaacugugcaaagug

SEQ ID NO: 783508 - RNA, 19 nt, Homo sapiens
  misc_RNA (1)...(19): siRNA sense strand
uggagcugguggugaagaa

SEQ ID NO: 783509 - RNA, 19 nt, Homo sapiens
  misc_RNA (1)...(19): siRNA sense strand
cgaauggcaccgcaagaag

SEQ ID NO: 783510 - RNA, 19 nt, Homo sapiens
  misc_RNA (1)...(19): siRNA sense strand
aaguugucaugaauacuga

SEQ ID NO: 783511 - RNA, 19 nt, Homo sapiens
  misc_RNA (1)...(19): siRNA sense strand
gaagacauuuggaaacuaa

SEQ ID NO: 783512 - RNA, 19 nt, Homo sapiens
  misc_RNA (1)...(19): siRNA sense strand
uaaaccagcuucauuagua

SEQ ID NO: 783513 - RNA, 19 nt, Homo sapiens
  misc_RNA (1)...(19): siRNA sense strand
gcagaaacaugaaauugaa

SEQ ID NO: 783514 - RNA, 19 nt, Homo sapiens
  misc_RNA (1)...(19): siRNA sense strand
ucagaagguuggaauauua

SEQ ID NO: 783515 - RNA, 19 nt, Homo sapiens
  misc_RNA (1)...(19): siRNA sense strand
guacagcuaucaaacagua

SEQ ID NO: 783516 - RNA, 19 nt, Homo sapiens
  misc_RNA (1)...(19): siRNA sense strand
ggaucuagcugcugacauu

SEQ ID NO: 783517 - RNA, 19 nt, Homo sapiens
  misc_RNA (1)...(19): siRNA sense strand
gcacacagcacuucuucua

SEQ ID NO: 783518 - RNA, 19 nt, Homo sapiens
  misc_RNA (1)...(19): siRNA sense strand
gaaguuaauuugucaaugc

SEQ ID NO: 783519 - RNA, 19 nt, Homo sapiens
  misc_RNA (1)...(19): siRNA sense strand
gaaguggaaucuuucuguu

SEQ ID NO: 783520 - RNA, 19 nt, Homo sapiens
  misc_RNA (1)...(19): siRNA sense strand
gaagcugucaccuuaauaa

SEQ ID NO: 783521 - RNA, 19 nt, Homo sapiens
  misc_RNA (1)...(19): siRNA sense strand
acacagcacuucuucuaaa

SEQ ID NO: 783522 - RNA, 19 nt, Homo sapiens
  misc_RNA (1)...(19): siRNA sense strand
ucgacuaucugauuguuua

SEQ ID NO: 783523 - RNA, 19 nt, Homo sapiens
  misc_RNA (1)...(19): siRNA sense strand
gaaacaaggaagucuuaaa

SEQ ID NO: 783524 - RNA, 19 nt, Homo sapiens
  misc_RNA (1)...(19): siRNA sense strand
gcgcuacucuguuaaaaua

SEQ ID NO: 783525 - RNA, 19 nt, Homo sapiens
  misc_RNA (1)...(19): siRNA sense strand
gaacuucgucgugaacuuu

SEQ ID NO: 783526 - RNA, 19 nt, Homo sapiens
  misc_RNA (1)...(19): siRNA sense strand
uaugagagccugauugauu

SEQ ID NO: 783527 - RNA, 19 nt, Homo sapiens
  misc_RNA (1)...(19): siRNA sense strand
ggccucaucuguagaagaa

SEQ ID NO: 783528 - RNA, 19 nt, Homo sapiens
  misc_RNA (1)...(19): siRNA sense strand
uaaugaaagugcuacagaa

SEQ ID NO: 783529 - RNA, 19 nt, Homo sapiens
  misc_RNA (1)...(19): siRNA sense strand
caagcaacaucucgauuca

SEQ ID NO: 783530 - RNA, 19 nt, Homo sapiens
  misc_RNA (1)...(19): siRNA sense strand
gacaauaaugcuuggguua

SEQ ID NO: 783531 - RNA, 19 nt, Homo sapiens
  misc_RNA (1)...(19): siRNA sense strand
gagaauugcuuaucaaacc

SEQ ID NO: 783532 - RNA, 19 nt, Homo sapiens
  misc_RNA (1)...(19): siRNA sense strand
cgaauccgacuuagcaaua

SEQ ID NO: 783533 - RNA, 19 nt, Homo sapiens
  misc_RNA (1)...(19): siRNA sense strand
uaucaaaccuugugcaaaa

SEQ ID NO: 783534 - RNA, 19 nt, Homo sapiens
  misc_RNA (1)...(19): siRNA sense strand
cauaugcgaauccgacuua

SEQ ID NO: 783535 - RNA, 19 nt, Homo sapiens
  misc_RNA (1)...(19): siRNA sense strand
caauaaugcuuggguuaga

SEQ ID NO: 783536 - RNA, 19 nt, Homo sapiens
  misc_RNA (1)...(19): siRNA sense strand
gaucagaagguuggaauau

SEQ ID NO: 783537 - RNA, 19 nt, Homo sapiens
  misc_RNA (1)...(19): siRNA sense strand
gaauccgacuuagcaauau

SEQ ID NO: 783538 - RNA, 19 nt, Homo sapiens
  misc_RNA (1)...(19): siRNA sense strand
ccauggaucuguugcugaa

SEQ ID NO: 783539 - RNA, 19 nt, Homo sapiens
  misc_RNA (1)...(19): siRNA sense strand
uggagaggcucauacuauu

SEQ ID NO: 783540 - RNA, 19 nt, Homo sapiens
  misc_RNA (1)...(19): siRNA sense strand
guuggaauauuacaaagug

SEQ ID NO: 783541 - RNA, 19 nt, Homo sapiens
  misc_RNA (1)...(19): siRNA sense strand
gagguaaaguucuuguaag

SEQ ID NO: 783542 - RNA, 19 nt, Homo sapiens
  misc_RNA (1)...(19): siRNA sense strand
cgagguaaaguucuuguaa

SEQ ID NO: 783543 - RNA, 19 nt, Homo sapiens
  misc_RNA (1)...(19): siRNA sense strand
gcaguacaaaucaucaauu

SEQ ID NO: 783544 - RNA, 19 nt, Homo sapiens
  misc_RNA (1)...(19): siRNA sense strand
cgaagacauuuggaaacua

SEQ ID NO: 783545 - RNA, 19 nt, Homo sapiens
  misc_RNA (1)...(19): siRNA sense strand
acagaagcaucauacaaug

SEQ ID NO: 783546 - RNA, 19 nt, Homo sapiens
  misc_RNA (1)...(19): siRNA sense strand
cuaguaagcuucgaagaca

SEQ ID NO: 783547 - RNA, 19 nt, Homo sapiens
  misc_RNA (1)...(19): siRNA sense strand
uauuaaagcucgaccacau

SEQ ID NO: 783548 - RNA, 19 nt, Homo sapiens
  misc_RNA (1)...(19): siRNA sense strand
aauaaugccuacaucucua

SEQ ID NO: 783549 - RNA, 19 nt, Homo sapiens
  misc_RNA (1)...(19): siRNA sense strand
gauacucaaugucuauucu

SEQ ID NO: 783550 - RNA, 19 nt, Homo sapiens
  misc_RNA (1)...(19): siRNA sense strand
uguuaaaccagcuucauua

SEQ ID NO: 783551 - RNA, 19 nt, Homo sapiens
  misc_RNA (1)...(19): siRNA sense strand
ggagaggcucauacuauug

SEQ ID NO: 783552 - RNA, 19 nt, Homo sapiens
  misc_RNA (1)...(19): siRNA sense strand
gagccugauugauuuaaca

SEQ ID NO: 783553 - RNA, 19 nt, Homo sapiens
  misc_RNA (1)...(19): siRNA sense strand
guggagaggcucauacuau

SEQ ID NO: 783554 - RNA, 19 nt, Homo sapiens
  misc_RNA (1)...(19): siRNA sense strand
acaaugcaccugugugaaa

SEQ ID NO: 783555 - RNA, 19 nt, Homo sapiens
  misc_RNA (1)...(19): siRNA sense strand
cagcacuucuucuaaauac

SEQ ID NO: 783556 - RNA, 19 nt, Homo sapiens
  misc_RNA (1)...(19): siRNA sense strand
gcaguacagcuaucaaaca

SEQ ID NO: 783557 - RNA, 19 nt, Homo sapiens
  misc_RNA (1)...(19): siRNA sense strand
aguagucacugccuauuau

SEQ ID NO: 783558 - RNA, 19 nt, Homo sapiens
  misc_RNA (1)...(19): siRNA sense strand
augagagccugauugauuu

SEQ ID NO: 783559 - RNA, 19 nt, Homo sapiens
  misc_RNA (1)...(19): siRNA sense strand
guagugaugcggauguuug

SEQ ID NO: 783560 - RNA, 19 nt, Homo sapiens
  misc_RNA (1)...(19): siRNA sense strand
aguggaaucuuucuguuau

SEQ ID NO: 783561 - RNA, 19 nt, Homo sapiens
  misc_RNA (1)...(19): siRNA sense strand
gaaagcaccaguagucacu

SEQ ID NO: 783562 - RNA, 19 nt, Homo sapiens
  misc_RNA (1)...(19): siRNA sense strand
aaauagagaugcaccucau

SEQ ID NO: 783563 - RNA, 19 nt, Homo sapiens
  misc_RNA (1)...(19): siRNA sense strand
auaagucuauugaggaaga

SEQ ID NO: 783564 - RNA, 19 nt, Homo sapiens
  misc_RNA (1)...(19): siRNA sense strand
ugaugcggauguuugauga

SEQ ID NO: 783565 - RNA, 19 nt, Homo sapiens
  misc_RNA (1)...(19): siRNA sense strand
cuacaaugcaccuguguga

SEQ ID NO: 783566 - RNA, 19 nt, Homo sapiens
  misc_RNA (1)...(19): siRNA sense strand
cugcugacauugaagaaga

SEQ ID NO: 783567 - RNA, 19 nt, Homo sapiens
  misc_RNA (1)...(19): siRNA sense strand
cuacagaagcaucauacaa

SEQ ID NO: 783568 - RNA, 19 nt, Homo sapiens
  misc_RNA (1)...(19): siRNA sense strand
ccucaucuguagaagaaga

SEQ ID NO: 783569 - RNA, 19 nt, Homo sapiens
  misc_RNA (1)...(19): siRNA sense strand
aaauucaucuuggcugcua

SEQ ID NO: 783570 - RNA, 19 nt, Homo sapiens
  misc_RNA (1)...(19): siRNA sense strand
gaagguuggaauauuacaa

SEQ ID NO: 783571 - RNA, 19 nt, Homo sapiens
  misc_RNA (1)...(19): siRNA sense strand
caaacucauugcccaugga

SEQ ID NO: 783572 - RNA, 19 nt, Homo sapiens
  misc_RNA (1)...(19): siRNA sense strand
guugauguuuguagugaug

SEQ ID NO: 783573 - RNA, 19 nt, Homo sapiens
  misc_RNA (1)...(19): siRNA sense strand
gaccuacuccugugugaau

SEQ ID NO: 783574 - RNA, 19 nt, Homo sapiens
  misc_RNA (1)...(19): siRNA sense strand
gaaaauuugcgauggguuu

SEQ ID NO: 783575 - RNA, 19 nt, Homo sapiens
  misc_RNA (1)...(19): siRNA sense strand
aaacaaggaagucuuaaac

SEQ ID NO: 783576 - RNA, 19 nt, Homo sapiens
  misc_RNA (1)...(19): siRNA sense strand
cugaaacaaggaagucuua

SEQ ID NO: 783577 - RNA, 19 nt, Homo sapiens
  misc_RNA (1)...(19): siRNA sense strand
guagucacugccuauuaua

SEQ ID NO: 783578 - RNA, 19 nt, Homo sapiens
  misc_RNA (1)...(19): siRNA sense strand
uuacuuacuucggaaauag

SEQ ID NO: 783579 - RNA, 19 nt, Homo sapiens
  misc_RNA (1)...(19): siRNA sense strand
ggacuaugagagccugauu

SEQ ID NO: 783580 - RNA, 19 nt, Homo sapiens
  misc_RNA (1)...(19): siRNA sense strand
gauauuugcagugccauug

SEQ ID NO: 783581 - RNA, 19 nt, Homo sapiens
  misc_RNA (1)...(19): siRNA sense strand
gaccaggcaguacaaauca

SEQ ID NO: 783582 - RNA, 19 nt, Homo sapiens
  misc_RNA (1)...(19): siRNA sense strand
gcugucaccuuaauaaaau

SEQ ID NO: 783583 - RNA, 19 nt, Homo sapiens
  misc_RNA (1)...(19): siRNA sense strand
uacagaagcaucauacaau

SEQ ID NO: 783584 - RNA, 19 nt, Homo sapiens
  misc_RNA (1)...(19): siRNA sense strand
uuaagcggauaugugauaa

SEQ ID NO: 783585 - RNA, 19 nt, Homo sapiens
  misc_RNA (1)...(19): siRNA sense strand
uaacaucugauucucaagu

SEQ ID NO: 783586 - RNA, 19 nt, Homo sapiens
  misc_RNA (1)...(19): siRNA sense strand
uuugcgcgcuacucuguua

SEQ ID NO: 783587 - RNA, 19 nt, Homo sapiens
  misc_RNA (1)...(19): siRNA sense strand
cuuuguauccugucuuaua

SEQ ID NO: 783588 - RNA, 19 nt, Homo sapiens
  misc_RNA (1)...(19): siRNA sense strand
ugcuaccggugaagaaaua

SEQ ID NO: 783589 - RNA, 19 nt, Homo sapiens
  misc_RNA (1)...(19): siRNA sense strand
gcauauaaagacaaagaca

SEQ ID NO: 783590 - RNA, 19 nt, Homo sapiens
  misc_RNA (1)...(19): siRNA sense strand
ucaggaauacccaagcauu

SEQ ID NO: 783591 - RNA, 19 nt, Homo sapiens
  misc_RNA (1)...(19): siRNA sense strand
aaaccagcuucauuaguag

SEQ ID NO: 783592 - RNA, 19 nt, Homo sapiens
  misc_RNA (1)...(19): siRNA sense strand
cacagcacuucuucuaaau

SEQ ID NO: 783593 - RNA, 19 nt, Homo sapiens
  misc_RNA (1)...(19): siRNA sense strand
ucaagcaacaucucgauuc

SEQ ID NO: 783594 - RNA, 19 nt, Homo sapiens
  misc_RNA (1)...(19): siRNA sense strand
gagaggcucauacuauugg

SEQ ID NO: 783595 - RNA, 19 nt, Homo sapiens
  misc_RNA (1)...(19): siRNA sense strand
aauaaugcuuggguuagaa

SEQ ID NO: 783596 - RNA, 19 nt, Homo sapiens
  misc_RNA (1)...(19): siRNA sense strand
aaagugaagauaagcaguu

SEQ ID NO: 783597 - RNA, 19 nt, Homo sapiens
  misc_RNA (1)...(19): siRNA sense strand
guguugauguuuguaguga

SEQ ID NO: 783598 - RNA, 19 nt, Homo sapiens
  misc_RNA (1)...(19): siRNA sense strand
gaaacaugaaauugaaugg

SEQ ID NO: 783599 - RNA, 19 nt, Homo sapiens
  misc_RNA (1)...(19): siRNA sense strand
caggaauacccaagcauug

SEQ ID NO: 783600 - RNA, 19 nt, Homo sapiens
  misc_RNA (1)...(19): siRNA sense strand
caguacagcuaucaaacag

SEQ ID NO: 783601 - RNA, 19 nt, Homo sapiens
  misc_RNA (1)...(19): siRNA sense strand
ccugauugauuuaacaucu

SEQ ID NO: 783602 - RNA, 19 nt, Homo sapiens
  misc_RNA (1)...(19): siRNA sense strand
ugagagccugauugauuua

SEQ ID NO: 783603 - RNA, 19 nt, Homo sapiens
  misc_RNA (1)...(19): siRNA sense strand
gcacuucuucuaaauacag

SEQ ID NO: 783604 - RNA, 19 nt, Homo sapiens
  misc_RNA (1)...(19): siRNA sense strand
ucuagcugcugacauugaa

SEQ ID NO: 783605 - RNA, 19 nt, Homo sapiens
  misc_RNA (1)...(19): siRNA sense strand
acuguugcacgucgaauua

SEQ ID NO: 783606 - RNA, 19 nt, Homo sapiens
  misc_RNA (1)...(19): siRNA sense strand
gauugcuccucuucuuugu

SEQ ID NO: 783607 - RNA, 19 nt, Homo sapiens
  misc_RNA (1)...(19): siRNA sense strand
aaguggaaucuuucuguua

SEQ ID NO: 783608 - RNA, 19 nt, Homo sapiens
  misc_RNA (1)...(19): siRNA sense strand
cgacuuagcaauauuacac

SEQ ID NO: 783609 - RNA, 19 nt, Homo sapiens
  misc_RNA (1)...(19): siRNA sense strand
uggaaucuuucuguuauca

SEQ ID NO: 783610 - RNA, 19 nt, Homo sapiens
  misc_RNA (1)...(19): siRNA sense strand
uuuccagggucaaauuuau

SEQ ID NO: 783611 - RNA, 19 nt, Homo sapiens
  misc_RNA (1)...(19): siRNA sense strand
gcacaaacccagcugcuuu

SEQ ID NO: 783612 - RNA, 19 nt, Homo sapiens
  misc_RNA (1)...(19): siRNA sense strand
gcaagaguuucgucccauu

SEQ ID NO: 783613 - RNA, 19 nt, Homo sapiens
  misc_RNA (1)...(19): siRNA sense strand
guacccaaauggaauguug

SEQ ID NO: 783614 - RNA, 19 nt, Homo sapiens
  misc_RNA (1)...(19): siRNA sense strand
gcaauguacccaaauggaa

SEQ ID NO: 783615 - RNA, 19 nt, Homo sapiens
  misc_RNA (1)...(19): siRNA sense strand
gcugcaauguacccaaaug

SEQ ID NO: 783616 - RNA, 19 nt, Homo sapiens
  misc_RNA (1)...(19): siRNA sense strand
caagaguuucgucccauuu

SEQ ID NO: 783617 - RNA, 19 nt, Homo sapiens
  misc_RNA (1)...(19): siRNA sense strand
uccaauggcugcaauguac

SEQ ID NO: 783618 - RNA, 19 nt, Homo sapiens
  misc_RNA (1)...(19): siRNA sense strand
gagccucccuggcacaaac

SEQ ID NO: 783619 - RNA, 19 nt, Homo sapiens
  misc_RNA (1)...(19): siRNA sense strand
caauguacccaaauggaau

SEQ ID NO: 783620 - RNA, 19 nt, Homo sapiens
  misc_RNA (1)...(19): siRNA sense strand
uggcugcaauguacccaaa

SEQ ID NO: 783621 - RNA, 19 nt, Homo sapiens
  misc_RNA (1)...(19): siRNA sense strand
guccaauggcugcaaugua

SEQ ID NO: 783622 - RNA, 19 nt, Homo sapiens
  misc_RNA (1)...(19): siRNA sense strand
gcccugcaggcaagaguuu

SEQ ID NO: 783623 - RNA, 19 nt, Homo sapiens
  misc_RNA (1)...(19): siRNA sense strand
ggaacaagaugaaguauaa

SEQ ID NO: 783624 - RNA, 19 nt, Homo sapiens
  misc_RNA (1)...(19): siRNA sense strand
gaccaagaguucccgauuu

SEQ ID NO: 783625 - RNA, 19 nt, Homo sapiens
  misc_RNA (1)...(19): siRNA sense strand
gaggauauaugccaaugga

SEQ ID NO: 783626 - RNA, 19 nt, Homo sapiens
  misc_RNA (1)...(19): siRNA sense strand
agucugaaguucucauuua

SEQ ID NO: 783627 - RNA, 19 nt, Homo sapiens
  misc_RNA (1)...(19): siRNA sense strand
ggaaagcauugaggacuug

SEQ ID NO: 783628 - RNA, 19 nt, Homo sapiens
  misc_RNA (1)...(19): siRNA sense strand
ugaguuggcuucauuacga

SEQ ID NO: 783629 - RNA, 19 nt, Homo sapiens
  misc_RNA (1)...(19): siRNA sense strand
gggaaagcauugaggacuu

SEQ ID NO: 783630 - RNA, 19 nt, Homo sapiens
  misc_RNA (1)...(19): siRNA sense strand
caauaacccagauuuguug

SEQ ID NO: 783631 - RNA, 19 nt, Homo sapiens
  misc_RNA (1)...(19): siRNA sense strand
gcacagugaagauggagaa

SEQ ID NO: 783632 - RNA, 19 nt, Homo sapiens
  misc_RNA (1)...(19): siRNA sense strand
ugacucugcucauuacaau

SEQ ID NO: 783633 - RNA, 19 nt, Homo sapiens
  misc_RNA (1)...(19): siRNA sense strand
ucaauaacccagauuuguu

SEQ ID NO: 783634 - RNA, 19 nt, Homo sapiens
  misc_RNA (1)...(19): siRNA sense strand
uaacccagauuuguugaug

SEQ ID NO: 783635 - RNA, 19 nt, Homo sapiens
  misc_RNA (1)...(19): siRNA sense strand
gaaaugcugggcucacuca

SEQ ID NO: 783636 - RNA, 19 nt, Homo sapiens
  misc_RNA (1)...(19): siRNA sense strand
caaggagucugaaguucuc

SEQ ID NO: 783637 - RNA, 19 nt, Homo sapiens
  misc_RNA (1)...(19): siRNA sense strand
ucucuaguauguucuguga

SEQ ID NO: 783638 - RNA, 19 nt, Homo sapiens
  misc_RNA (1)...(19): siRNA sense strand
ggcaagaaguuuugaaaga

SEQ ID NO: 783639 - RNA, 19 nt, Homo sapiens
  misc_RNA (1)...(19): siRNA sense strand
cuaacuauuuguccaagga

SEQ ID NO: 783640 - RNA, 19 nt, Homo sapiens
  misc_RNA (1)...(19): siRNA sense strand
gcaagaaguuuugaaagau

SEQ ID NO: 783641 - RNA, 19 nt, Homo sapiens
  misc_RNA (1)...(19): siRNA sense strand
cacgugccgucucuuaauu

SEQ ID NO: 783642 - RNA, 19 nt, Homo sapiens
  misc_RNA (1)...(19): siRNA sense strand
gagauucacagugcauuga

SEQ ID NO: 783643 - RNA, 19 nt, Homo sapiens
  misc_RNA (1)...(19): siRNA sense strand
gagagagaaacauaacaga

SEQ ID NO: 783644 - RNA, 19 nt, Homo sapiens
  misc_RNA (1)...(19): siRNA sense strand
ggucaauaacccagauuug

SEQ ID NO: 783645 - RNA, 19 nt, Homo sapiens
  misc_RNA (1)...(19): siRNA sense strand
uaacagaggcagugauggu

SEQ ID NO: 783646 - RNA, 19 nt, Homo sapiens
  misc_RNA (1)...(19): siRNA sense strand
gauauaugccaauggaaca

SEQ ID NO: 783647 - RNA, 19 nt, Homo sapiens
  misc_RNA (1)...(19): siRNA sense strand
cgugccgucucuuaauuaa

SEQ ID NO: 783648 - RNA, 19 nt, Homo sapiens
  misc_RNA (1)...(19): siRNA sense strand
gcucuacauugauccuugu

SEQ ID NO: 783649 - RNA, 19 nt, Homo sapiens
  misc_RNA (1)...(19): siRNA sense strand
cauaacagaggcagugaug

SEQ ID NO: 783650 - RNA, 19 nt, Homo sapiens
  misc_RNA (1)...(19): siRNA sense strand
acagagaccuuuuaaucaa

SEQ ID NO: 783651 - RNA, 19 nt, Homo sapiens
  misc_RNA (1)...(19): siRNA sense strand
ccacagagaccuuuuaauc

SEQ ID NO: 783652 - RNA, 19 nt, Homo sapiens
  misc_RNA (1)...(19): siRNA sense strand
cagaggcagugaugguuuc

SEQ ID NO: 783653 - RNA, 19 nt, Homo sapiens
  misc_RNA (1)...(19): siRNA sense strand
gucugaaguucucauuuau

SEQ ID NO: 783654 - RNA, 19 nt, Homo sapiens
  misc_RNA (1)...(19): siRNA sense strand
gccaauggaacaagaugaa

SEQ ID NO: 783655 - RNA, 19 nt, Homo sapiens
  misc_RNA (1)...(19): siRNA sense strand
caagaaguuuugaaagaug

SEQ ID NO: 783656 - RNA, 19 nt, Homo sapiens
  misc_RNA (1)...(19): siRNA sense strand
uuacgagagagaaacauaa

SEQ ID NO: 783657 - RNA, 19 nt, Homo sapiens
  misc_RNA (1)...(19): siRNA sense strand
gacuguacauaccucucua

SEQ ID NO: 783658 - RNA, 19 nt, Homo sapiens
  misc_RNA (1)...(19): siRNA sense strand
aauggaacaagaugaagua

SEQ ID NO: 783659 - RNA, 19 nt, Homo sapiens
  misc_RNA (1)...(19): siRNA sense strand
augcugggcucacucagaa

SEQ ID NO: 783660 - RNA, 19 nt, Homo sapiens
  misc_RNA (1)...(19): siRNA sense strand
ucugugacucugcucauua

SEQ ID NO: 783661 - RNA, 19 nt, Homo sapiens
  misc_RNA (1)...(19): siRNA sense strand
aggcagugaugguuucaga

SEQ ID NO: 783662 - RNA, 19 nt, Homo sapiens
  misc_RNA (1)...(19): siRNA sense strand
ugaccaagaguucccgauu

SEQ ID NO: 783663 - RNA, 19 nt, Homo sapiens
  misc_RNA (1)...(19): siRNA sense strand
ggagucugaaguucucauu

SEQ ID NO: 783664 - RNA, 19 nt, Homo sapiens
  misc_RNA (1)...(19): siRNA sense strand
cugaaguucucauuuaugc

SEQ ID NO: 783665 - RNA, 19 nt, Homo sapiens
  misc_RNA (1)...(19): siRNA sense strand
uggaacaagaugaaguaua

SEQ ID NO: 783666 - RNA, 19 nt, Homo sapiens
  misc_RNA (1)...(19): siRNA sense strand
cuugugcuuuggauaauga

SEQ ID NO: 783667 - RNA, 19 nt, Homo sapiens
  misc_RNA (1)...(19): siRNA sense strand
gucaauaacccagauuugu

SEQ ID NO: 783668 - RNA, 19 nt, Homo sapiens
  misc_RNA (1)...(19): siRNA sense strand
gauggagaagccucgauug

SEQ ID NO: 783669 - RNA, 19 nt, Homo sapiens
  misc_RNA (1)...(19): siRNA sense strand
acccagauuuguugauguu

SEQ ID NO: 783670 - RNA, 19 nt, Homo sapiens
  misc_RNA (1)...(19): siRNA sense strand
ccagauuuguugauguuuu

SEQ ID NO: 783671 - RNA, 19 nt, Homo sapiens
  misc_RNA (1)...(19): siRNA sense strand
guccaaggagucugaaguu

SEQ ID NO: 783672 - RNA, 19 nt, Homo sapiens
  misc_RNA (1)...(19): siRNA sense strand
ucuaguauguucugugacu

SEQ ID NO: 783673 - RNA, 19 nt, Homo sapiens
  misc_RNA (1)...(19): siRNA sense strand
aagaugguuuccacagaga

SEQ ID NO: 783674 - RNA, 19 nt, Homo sapiens
  misc_RNA (1)...(19): siRNA sense strand
ccaaggagucugaaguucu

SEQ ID NO: 783675 - RNA, 19 nt, Homo sapiens
  misc_RNA (1)...(19): siRNA sense strand
ugccgucucuuaauuaaac

SEQ ID NO: 783676 - RNA, 19 nt, Homo sapiens
  misc_RNA (1)...(19): siRNA sense strand
ggauaaugaggauauaugc

SEQ ID NO: 783677 - RNA, 19 nt, Homo sapiens
  misc_RNA (1)...(19): siRNA sense strand
gagucugaaguucucauuu

SEQ ID NO: 783678 - RNA, 19 nt, Homo sapiens
  misc_RNA (1)...(19): siRNA sense strand
acaauccugugcucuacau

SEQ ID NO: 783679 - RNA, 19 nt, Homo sapiens
  misc_RNA (1)...(19): siRNA sense strand
caauggaacaagaugaagu

SEQ ID NO: 783680 - RNA, 19 nt, Homo sapiens
  misc_RNA (1)...(19): siRNA sense strand
caagaguucccgauuuuga

SEQ ID NO: 783681 - RNA, 19 nt, Homo sapiens
  misc_RNA (1)...(19): siRNA sense strand
ccugugcucuacauugauc

SEQ ID NO: 783682 - RNA, 19 nt, Homo sapiens
  misc_RNA (1)...(19): siRNA sense strand
uuacaauccugugcucuac

SEQ ID NO: 783683 - RNA, 19 nt, Homo sapiens
  misc_RNA (1)...(19): siRNA sense strand
uguacauaccucucuagua

SEQ ID NO: 783684 - RNA, 19 nt, Homo sapiens
  misc_RNA (1)...(19): siRNA sense strand
cgagagagaaacauaacag

SEQ ID NO: 783685 - RNA, 19 nt, Homo sapiens
  misc_RNA (1)...(19): siRNA sense strand
cagagaccuuuuaaucaaa

SEQ ID NO: 783686 - RNA, 19 nt, Homo sapiens
  misc_RNA (1)...(19): siRNA sense strand
uagaggccccuaacuauuu

SEQ ID NO: 783687 - RNA, 19 nt, Homo sapiens
  misc_RNA (1)...(19): siRNA sense strand
acagaggcagugaugguuu

SEQ ID NO: 783688 - RNA, 19 nt, Homo sapiens
  misc_RNA (1)...(19): siRNA sense strand
acacgugccgucucuuaau

SEQ ID NO: 783689 - RNA, 19 nt, Homo sapiens
  misc_RNA (1)...(19): siRNA sense strand
auccugugcucuacauuga

SEQ ID NO: 783690 - RNA, 19 nt, Homo sapiens
  misc_RNA (1)...(19): siRNA sense strand
cgagauucacagugcauug

SEQ ID NO: 783691 - RNA, 19 nt, Homo sapiens
  misc_RNA (1)...(19): siRNA sense strand
uggauaaugaggauauaug

SEQ ID NO: 783692 - RNA, 19 nt, Homo sapiens
  misc_RNA (1)...(19): siRNA sense strand
gcacagaggugaugguaga

SEQ ID NO: 783693 - RNA, 19 nt, Homo sapiens
  misc_RNA (1)...(19): siRNA sense strand
gggaacagcuugauuucua

SEQ ID NO: 783694 - RNA, 19 nt, Homo sapiens
  misc_RNA (1)...(19): siRNA sense strand
gaagaugauuuaccaguga

SEQ ID NO: 783695 - RNA, 19 nt, Homo sapiens
  misc_RNA (1)...(19): siRNA sense strand
ggaaugagcccuaccagaa

SEQ ID NO: 783696 - RNA, 19 nt, Homo sapiens
  misc_RNA (1)...(19): siRNA sense strand
gccaagaacuuccagauug

SEQ ID NO: 783697 - RNA, 19 nt, Homo sapiens
  misc_RNA (1)...(19): siRNA sense strand
gaacaacuacgaugacuug

SEQ ID NO: 783698 - RNA, 19 nt, Homo sapiens
  misc_RNA (1)...(19): siRNA sense strand
ggaaccaaauuuaagauug

SEQ ID NO: 783699 - RNA, 19 nt, Homo sapiens
  misc_RNA (1)...(19): siRNA sense strand
gagaacagcccaccuugua

SEQ ID NO: 783700 - RNA, 19 nt, Homo sapiens
  misc_RNA (1)...(19): siRNA sense strand
ugacugggcugccaagaaa

SEQ ID NO: 783701 - RNA, 19 nt, Homo sapiens
  misc_RNA (1)...(19): siRNA sense strand
ggagacaucagcuuaauga

SEQ ID NO: 783702 - RNA, 19 nt, Homo sapiens
  misc_RNA (1)...(19): siRNA sense strand
caacugaagucaaagaagu

SEQ ID NO: 783703 - RNA, 19 nt, Homo sapiens
  misc_RNA (1)...(19): siRNA sense strand
caaauuacguguggcauau

SEQ ID NO: 783704 - RNA, 19 nt, Homo sapiens
  misc_RNA (1)...(19): siRNA sense strand
gacaucagcuuaaugaaca

SEQ ID NO: 783705 - RNA, 19 nt, Homo sapiens
  misc_RNA (1)...(19): siRNA sense strand
gaacaugggccugugcuuu

SEQ ID NO: 783706 - RNA, 19 nt, Homo sapiens
  misc_RNA (1)...(19): siRNA sense strand
ccaagaacuuccagauuga

SEQ ID NO: 783707 - RNA, 19 nt, Homo sapiens
  misc_RNA (1)...(19): siRNA sense strand
gcccagagguccgacaaua

SEQ ID NO: 783708 - RNA, 19 nt, Homo sapiens
  misc_RNA (1)...(19): siRNA sense strand
gcucaggucacgucuaaua

SEQ ID NO: 783709 - RNA, 19 nt, Homo sapiens
  misc_RNA (1)...(19): siRNA sense strand
caaagaaguugaauaagac

SEQ ID NO: 783710 - RNA, 19 nt, Homo sapiens
  misc_RNA (1)...(19): siRNA sense strand
caacuacgaugacuugucu

SEQ ID NO: 783711 - RNA, 19 nt, Homo sapiens
  misc_RNA (1)...(19): siRNA sense strand
gaaggaggcuaggacuuug

SEQ ID NO: 783712 - RNA, 19 nt, Homo sapiens
  misc_RNA (1)...(19): siRNA sense strand
ggagagaguuuccuuuuga

SEQ ID NO: 783713 - RNA, 19 nt, Homo sapiens
  misc_RNA (1)...(19): siRNA sense strand
ggagagagaagaagaaagu

SEQ ID NO: 783714 - RNA, 19 nt, Homo sapiens
  misc_RNA (1)...(19): siRNA sense strand
gaaugagcccuaccagaaa

SEQ ID NO: 783715 - RNA, 19 nt, Homo sapiens
  misc_RNA (1)...(19): siRNA sense strand
ggacuuugagugacuuuaa

SEQ ID NO: 783716 - RNA, 19 nt, Homo sapiens
  misc_RNA (1)...(19): siRNA sense strand
caagaaaucucccaaaauc

SEQ ID NO: 783717 - RNA, 19 nt, Homo sapiens
  misc_RNA (1)...(19): siRNA sense strand
gaacaacaugagagacuuu

SEQ ID NO: 783718 - RNA, 19 nt, Homo sapiens
  misc_RNA (1)...(19): siRNA sense strand
ccacagaggauaaauuuca

SEQ ID NO: 783719 - RNA, 19 nt, Homo sapiens
  misc_RNA (1)...(19): siRNA sense strand
caaccucggugcaguaauc

SEQ ID NO: 783720 - RNA, 19 nt, Homo sapiens
  misc_RNA (1)...(19): siRNA sense strand
ggaacucaagcacuuauuu

SEQ ID NO: 783721 - RNA, 19 nt, Homo sapiens
  misc_RNA (1)...(19): siRNA sense strand
gcaggagacgcuacuauga

SEQ ID NO: 783722 - RNA, 19 nt, Homo sapiens
  misc_RNA (1)...(19): siRNA sense strand
agaagaaagugaagaguca

SEQ ID NO: 783723 - RNA, 19 nt, Homo sapiens
  misc_RNA (1)...(19): siRNA sense strand
ugagagacuuugucagcua

SEQ ID NO: 783724 - RNA, 19 nt, Homo sapiens
  misc_RNA (1)...(19): siRNA sense strand
gaugaaaucuaugggaaca

SEQ ID NO: 783725 - RNA, 19 nt, Homo sapiens
  misc_RNA (1)...(19): siRNA sense strand
caacgcaguuugcacaaca

SEQ ID NO: 783726 - RNA, 19 nt, Homo sapiens
  misc_RNA (1)...(19): siRNA sense strand
gggcgcaggugagugauuu

SEQ ID NO: 783727 - RNA, 19 nt, Homo sapiens
  misc_RNA (1)...(19): siRNA sense strand
gaaagugaagagucagaaa

SEQ ID NO: 783728 - RNA, 19 nt, Homo sapiens
  misc_RNA (1)...(19): siRNA sense strand
gaaaggacagcacagacuu

SEQ ID NO: 783729 - RNA, 19 nt, Homo sapiens
  misc_RNA (1)...(19): siRNA sense strand
gaacucaagcacuuauuuc

SEQ ID NO: 783730 - RNA, 19 nt, Homo sapiens
  misc_RNA (1)...(19): siRNA sense strand
acauugagcugagugauga

SEQ ID NO: 783731 - RNA, 19 nt, Homo sapiens
  misc_RNA (1)...(19): siRNA sense strand
gagagaagaagaaagugaa

SEQ ID NO: 783732 - RNA, 19 nt, Homo sapiens
  misc_RNA (1)...(19): siRNA sense strand
ggacagccgagcagaagaa

SEQ ID NO: 783733 - RNA, 19 nt, Homo sapiens
  misc_RNA (1)...(19): siRNA sense strand
uaauuuaccugucuucaac

SEQ ID NO: 783734 - RNA, 19 nt, Homo sapiens
  misc_RNA (1)...(19): siRNA sense strand
ccauuuaucucccagaagu

SEQ ID NO: 783735 - RNA, 19 nt, Homo sapiens
  misc_RNA (1)...(19): siRNA sense strand
gaccauuuaucucccagaa

SEQ ID NO: 783736 - RNA, 19 nt, Homo sapiens
  misc_RNA (1)...(19): siRNA sense strand
ggagugccauauccaggaa

SEQ ID NO: 783737 - RNA, 19 nt, Homo sapiens
  misc_RNA (1)...(19): siRNA sense strand
cuccagagcuagcaaauca

SEQ ID NO: 783738 - RNA, 19 nt, Homo sapiens
  misc_RNA (1)...(19): siRNA sense strand
cgcggcagaugaccauuua

SEQ ID NO: 783739 - RNA, 19 nt, Homo sapiens
  misc_RNA (1)...(19): siRNA sense strand
gagcgagccugagcuguuc

SEQ ID NO: 783740 - RNA, 19 nt, Homo sapiens
  misc_RNA (1)...(19): siRNA sense strand
ugauggaacucaagcacuu

SEQ ID NO: 783741 - RNA, 19 nt, Homo sapiens
  misc_RNA (1)...(19): siRNA sense strand
gugcguacauucuagacuu

SEQ ID NO: 783742 - RNA, 19 nt, Homo sapiens
  misc_RNA (1)...(19): siRNA sense strand
gaauaagacaaacgaguuc

SEQ ID NO: 783743 - RNA, 19 nt, Homo sapiens
  misc_RNA (1)...(19): siRNA sense strand
ugaauaagacaaacgaguu

SEQ ID NO: 783744 - RNA, 19 nt, Homo sapiens
  misc_RNA (1)...(19): siRNA sense strand
aagaccaacugaagucaaa

SEQ ID NO: 783745 - RNA, 19 nt, Homo sapiens
  misc_RNA (1)...(19): siRNA sense strand
cucaagcacuuauuuccua

SEQ ID NO: 783746 - RNA, 19 nt, Homo sapiens
  misc_RNA (1)...(19): siRNA sense strand
ucaaauuacguguggcaua

SEQ ID NO: 783747 - RNA, 19 nt, Homo sapiens
  misc_RNA (1)...(19): siRNA sense strand
ggacaaagacacuggucau

SEQ ID NO: 783748 - RNA, 19 nt, Homo sapiens
  misc_RNA (1)...(19): siRNA sense strand
ugacucagcgccucaaaug

SEQ ID NO: 783749 - RNA, 19 nt, Homo sapiens
  misc_RNA (1)...(19): siRNA sense strand
ugacuuuaauucccuaauc

SEQ ID NO: 783750 - RNA, 19 nt, Homo sapiens
  misc_RNA (1)...(19): siRNA sense strand
ggaacagcuugauuucuac

SEQ ID NO: 783751 - RNA, 19 nt, Homo sapiens
  misc_RNA (1)...(19): siRNA sense strand
uagcaaaccagaugaaauc

SEQ ID NO: 783752 - RNA, 19 nt, Homo sapiens
  misc_RNA (1)...(19): siRNA sense strand
gcaggugauugucauggau

SEQ ID NO: 783753 - RNA, 19 nt, Homo sapiens
  misc_RNA (1)...(19): siRNA sense strand
gguagagacugcagacaac

SEQ ID NO: 783754 - RNA, 19 nt, Homo sapiens
  misc_RNA (1)...(19): siRNA sense strand
cacccagccucuccuauug

SEQ ID NO: 783755 - RNA, 19 nt, Homo sapiens
  misc_RNA (1)...(19): siRNA sense strand
caucuggugucccugagaa

SEQ ID NO: 783756 - RNA, 19 nt, Homo sapiens
  misc_RNA (1)...(19): siRNA sense strand
gugaagaugaagaugauuu

SEQ ID NO: 783757 - RNA, 19 nt, Homo sapiens
  misc_RNA (1)...(19): siRNA sense strand
cauccgaaaucaacuugga

SEQ ID NO: 783758 - RNA, 19 nt, Homo sapiens
  misc_RNA (1)...(19): siRNA sense strand
ggccaucacugagggcaaa

SEQ ID NO: 783759 - RNA, 19 nt, Homo sapiens
  misc_RNA (1)...(19): siRNA sense strand
guggaugugugcuugaaga

SEQ ID NO: 783760 - RNA, 19 nt, Homo sapiens
  misc_RNA (1)...(19): siRNA sense strand
uugcucaggucacgucuaa

SEQ ID NO: 783761 - RNA, 19 nt, Homo sapiens
  misc_RNA (1)...(19): siRNA sense strand
uaugggaacagcuugauuu

SEQ ID NO: 783762 - RNA, 19 nt, Homo sapiens
  misc_RNA (1)...(19): siRNA sense strand
cagugaagaugaagaugau

SEQ ID NO: 783763 - RNA, 19 nt, Homo sapiens
  misc_RNA (1)...(19): siRNA sense strand
agaaggaggcuaggacuuu

SEQ ID NO: 783764 - RNA, 19 nt, Homo sapiens
  misc_RNA (1)...(19): siRNA sense strand
caagaaaggacagcacaga

SEQ ID NO: 783765 - RNA, 19 nt, Homo sapiens
  misc_RNA (1)...(19): siRNA sense strand
ggcagucgcugggauggaa

SEQ ID NO: 783766 - RNA, 19 nt, Homo sapiens
  misc_RNA (1)...(19): siRNA sense strand
gccaagaaaucucccaaaa

SEQ ID NO: 783767 - RNA, 19 nt, Homo sapiens
  misc_RNA (1)...(19): siRNA sense strand
gauagcaaaccagaugaaa

SEQ ID NO: 783768 - RNA, 19 nt, Homo sapiens
  misc_RNA (1)...(19): siRNA sense strand
agagugccauggucaaguu

SEQ ID NO: 783769 - RNA, 19 nt, Homo sapiens
  misc_RNA (1)...(19): siRNA sense strand
ggccagaguucgucaucau

SEQ ID NO: 783770 - RNA, 19 nt, Homo sapiens
  misc_RNA (1)...(19): siRNA sense strand
ccacccagccucuccuauu

SEQ ID NO: 783771 - RNA, 19 nt, Homo sapiens
  misc_RNA (1)...(19): siRNA sense strand
agacacuggucauccgaaa

SEQ ID NO: 783772 - RNA, 19 nt, Homo sapiens
  misc_RNA (1)...(19): siRNA sense strand
gaaguugaauaagacaaac

SEQ ID NO: 783773 - RNA, 19 nt, Homo sapiens
  misc_RNA (1)...(19): siRNA sense strand
gaaagaccaacugaaguca

SEQ ID NO: 783774 - RNA, 19 nt, Homo sapiens
  misc_RNA (1)...(19): siRNA sense strand
ucggugcaguaaucuauaa

SEQ ID NO: 783775 - RNA, 19 nt, Homo sapiens
  misc_RNA (1)...(19): siRNA sense strand
ggccugugcuuugcaguga

SEQ ID NO: 783776 - RNA, 19 nt, Homo sapiens
  misc_RNA (1)...(19): siRNA sense strand
ucagcuuaaugaacaacua

SEQ ID NO: 783777 - RNA, 19 nt, Homo sapiens
  misc_RNA (1)...(19): siRNA sense strand
gauggaacucaagcacuua

SEQ ID NO: 783778 - RNA, 19 nt, Homo sapiens
  misc_RNA (1)...(19): siRNA sense strand
agaugaagaugauuuacca

SEQ ID NO: 783779 - RNA, 19 nt, Homo sapiens
  misc_RNA (1)...(19): siRNA sense strand
gcaguaaucuauaaaacca

SEQ ID NO: 783780 - RNA, 19 nt, Homo sapiens
  misc_RNA (1)...(19): siRNA sense strand
gggaaccaaauuuaagauu

SEQ ID NO: 783781 - RNA, 19 nt, Homo sapiens
  misc_RNA (1)...(19): siRNA sense strand
ucacucagcacaacuaucu

SEQ ID NO: 783782 - RNA, 19 nt, Homo sapiens
  misc_RNA (1)...(19): siRNA sense strand
acagauagcaaaccagaug

SEQ ID NO: 783783 - RNA, 19 nt, Homo sapiens
  misc_RNA (1)...(19): siRNA sense strand
cgaacaacaugagagacuu

SEQ ID NO: 783784 - RNA, 19 nt, Homo sapiens
  misc_RNA (1)...(19): siRNA sense strand
ggucaaguucuacaauguu

SEQ ID NO: 783785 - RNA, 19 nt, Homo sapiens
  misc_RNA (1)...(19): siRNA sense strand
uaaugaacaacuacgauga

SEQ ID NO: 783786 - RNA, 19 nt, Homo sapiens
  misc_RNA (1)...(19): siRNA sense strand
aaaccagccuccugcaucu

SEQ ID NO: 783787 - RNA, 19 nt, Homo sapiens
  misc_RNA (1)...(19): siRNA sense strand
gacuuuaauucccuaaucu

SEQ ID NO: 783788 - RNA, 19 nt, Homo sapiens
  misc_RNA (1)...(19): siRNA sense strand
gacuuugagugacuuuaau

SEQ ID NO: 783789 - RNA, 19 nt, Homo sapiens
  misc_RNA (1)...(19): siRNA sense strand
cacagaggauaaauuucaa

SEQ ID NO: 783790 - RNA, 19 nt, Homo sapiens
  misc_RNA (1)...(19): siRNA sense strand
ucagugaagaugaagauga

SEQ ID NO: 783791 - RNA, 19 nt, Homo sapiens
  misc_RNA (1)...(19): siRNA sense strand
ucaagcacuuauuuccuau

SEQ ID NO: 783792 - RNA, 19 nt, Homo sapiens
  misc_RNA (1)...(19): siRNA sense strand
ggaccaguauguuaaagaa

SEQ ID NO: 783793 - RNA, 19 nt, Homo sapiens
  misc_RNA (1)...(19): siRNA sense strand
agacuggacuucaugagua

SEQ ID NO: 783794 - RNA, 19 nt, Homo sapiens
  misc_RNA (1)...(19): siRNA sense strand
ggaggaagauccaugugau

SEQ ID NO: 783795 - RNA, 19 nt, Homo sapiens
  misc_RNA (1)...(19): siRNA sense strand
ggacucagauuacagaaaa

SEQ ID NO: 783796 - RNA, 19 nt, Homo sapiens
  misc_RNA (1)...(19): siRNA sense strand
gagcaaaguuuucauguau

SEQ ID NO: 783797 - RNA, 19 nt, Homo sapiens
  misc_RNA (1)...(19): siRNA sense strand
gcaagagccugucagaacu

SEQ ID NO: 783798 - RNA, 19 nt, Homo sapiens
  misc_RNA (1)...(19): siRNA sense strand
caaugggaccaguauguua

SEQ ID NO: 783799 - RNA, 19 nt, Homo sapiens
  misc_RNA (1)...(19): siRNA sense strand
uaacccggguggccaaauu

SEQ ID NO: 783800 - RNA, 19 nt, Homo sapiens
  misc_RNA (1)...(19): siRNA sense strand
ugucagaacuaccucaaga

SEQ ID NO: 783801 - RNA, 19 nt, Homo sapiens
  misc_RNA (1)...(19): siRNA sense strand
agaacucuaugaacaagaa

SEQ ID NO: 783802 - RNA, 19 nt, Homo sapiens
  misc_RNA (1)...(19): siRNA sense strand
guuccuaacuucuugaaag

SEQ ID NO: 783803 - RNA, 19 nt, Homo sapiens
  misc_RNA (1)...(19): siRNA sense strand
ggagcaaaguuuucaugua

SEQ ID NO: 783804 - RNA, 19 nt, Homo sapiens
  misc_RNA (1)...(19): siRNA sense strand
ggcgagaccuggacaugga

SEQ ID NO: 783805 - RNA, 19 nt, Homo sapiens
  misc_RNA (1)...(19): siRNA sense strand
ggacugcucaccaacucua

SEQ ID NO: 783806 - RNA, 19 nt, Homo sapiens
  misc_RNA (1)...(19): siRNA sense strand
uggcagacaucuauaugga

SEQ ID NO: 783807 - RNA, 19 nt, Homo sapiens
  misc_RNA (1)...(19): siRNA sense strand
gaagugaaguacccuuuuc

SEQ ID NO: 783808 - RNA, 19 nt, Homo sapiens
  misc_RNA (1)...(19): siRNA sense strand
ucagaacuaccucaagaaa

SEQ ID NO: 783809 - RNA, 19 nt, Homo sapiens
  misc_RNA (1)...(19): siRNA sense strand
gacuggacuucaugaguau

SEQ ID NO: 783810 - RNA, 19 nt, Homo sapiens
  misc_RNA (1)...(19): siRNA sense strand
ccaagaauggaguuccuaa

SEQ ID NO: 783811 - RNA, 19 nt, Homo sapiens
  misc_RNA (1)...(19): siRNA sense strand
gggaggaagauccauguga

SEQ ID NO: 783812 - RNA, 19 nt, Homo sapiens
  misc_RNA (1)...(19): siRNA sense strand
gaggacugcucaccaacuc

SEQ ID NO: 783813 - RNA, 19 nt, Homo sapiens
  misc_RNA (1)...(19): siRNA sense strand
ggcaagagccugucagaac

SEQ ID NO: 783814 - RNA, 19 nt, Homo sapiens
  misc_RNA (1)...(19): siRNA sense strand
guggagaccucgggcauca

SEQ ID NO: 783815 - RNA, 19 nt, Homo sapiens
  misc_RNA (1)...(19): siRNA sense strand
aagcagagccuggcgauug

SEQ ID NO: 783816 - RNA, 19 nt, Homo sapiens
  misc_RNA (1)...(19): siRNA sense strand
cguccuggcucauuaacug

SEQ ID NO: 783817 - RNA, 19 nt, Homo sapiens
  misc_RNA (1)...(19): siRNA sense strand
caagagccugucagaacua

SEQ ID NO: 783818 - RNA, 19 nt, Homo sapiens
  misc_RNA (1)...(19): siRNA sense strand
aaagaacucuaugaacaag

SEQ ID NO: 783819 - RNA, 19 nt, Homo sapiens
  misc_RNA (1)...(19): siRNA sense strand
ugauccgggugaagcaaua

SEQ ID NO: 783820 - RNA, 19 nt, Homo sapiens
  misc_RNA (1)...(19): siRNA sense strand
gggaagugaaguacccuuu

SEQ ID NO: 783821 - RNA, 19 nt, Homo sapiens
  misc_RNA (1)...(19): siRNA sense strand
caacucuacuggcagacau

SEQ ID NO: 783822 - RNA, 19 nt, Homo sapiens
  misc_RNA (1)...(19): siRNA sense strand
gccuggcgauugagaguga

SEQ ID NO: 783823 - RNA, 19 nt, Homo sapiens
  misc_RNA (1)...(19): siRNA sense strand
uauauggacucagauuaca

SEQ ID NO: 783824 - RNA, 19 nt, Homo sapiens
  misc_RNA (1)...(19): siRNA sense strand
gaaaacaaugggaccagua

SEQ ID NO: 783825 - RNA, 19 nt, Homo sapiens
  misc_RNA (1)...(19): siRNA sense strand
ggacaagaagacuggacuu

SEQ ID NO: 783826 - RNA, 19 nt, Homo sapiens
  misc_RNA (1)...(19): siRNA sense strand
ucuauauggacucagauua

SEQ ID NO: 783827 - RNA, 19 nt, Homo sapiens
  misc_RNA (1)...(19): siRNA sense strand
agacaucuauauggacuca

SEQ ID NO: 783828 - RNA, 19 nt, Homo sapiens
  misc_RNA (1)...(19): siRNA sense strand
acaucuauauggacucaga

SEQ ID NO: 783829 - RNA, 19 nt, Homo sapiens
  misc_RNA (1)...(19): siRNA sense strand
aaugggaccaguauguuaa

SEQ ID NO: 783830 - RNA, 19 nt, Homo sapiens
  misc_RNA (1)...(19): siRNA sense strand
ggacuucaugaguauaaag

SEQ ID NO: 783831 - RNA, 19 nt, Homo sapiens
  misc_RNA (1)...(19): siRNA sense strand
auuccguccuggcucauua

SEQ ID NO: 783832 - RNA, 19 nt, Homo sapiens
  misc_RNA (1)...(19): siRNA sense strand
agcagagccuggcgauuga

SEQ ID NO: 783833 - RNA, 19 nt, Homo sapiens
  misc_RNA (1)...(19): siRNA sense strand
cuggaggacugcucaccaa

SEQ ID NO: 783834 - RNA, 19 nt, Homo sapiens
  misc_RNA (1)...(19): siRNA sense strand
gggaccaguauguuaaaga

SEQ ID NO: 783835 - RNA, 19 nt, Homo sapiens
  misc_RNA (1)...(19): siRNA sense strand
guuaaagaacucuaugaac

SEQ ID NO: 783836 - RNA, 19 nt, Homo sapiens
  misc_RNA (1)...(19): siRNA sense strand
ggaagugaaguacccuuuu

SEQ ID NO: 783837 - RNA, 19 nt, Homo sapiens
  misc_RNA (1)...(19): siRNA sense strand
cuucaugaguauaaagucu

SEQ ID NO: 783838 - RNA, 19 nt, Homo sapiens
  misc_RNA (1)...(19): siRNA sense strand
gacauggaagggaggaaga

SEQ ID NO: 783839 - RNA, 19 nt, Homo sapiens
  misc_RNA (1)...(19): siRNA sense strand
uauggacucagauuacaga

SEQ ID NO: 783840 - RNA, 19 nt, Homo sapiens
  misc_RNA (1)...(19): siRNA sense strand
ccucgggcaucagcaucua

SEQ ID NO: 783841 - RNA, 19 nt, Homo sapiens
  misc_RNA (1)...(19): siRNA sense strand
cuacuggcagacaucuaua

SEQ ID NO: 783842 - RNA, 19 nt, Homo sapiens
  misc_RNA (1)...(19): siRNA sense strand
caagaaugcaacggagaga

SEQ ID NO: 783843 - RNA, 19 nt, Homo sapiens
  misc_RNA (1)...(19): siRNA sense strand
acaaugggaccaguauguu

SEQ ID NO: 783844 - RNA, 19 nt, Homo sapiens
  misc_RNA (1)...(19): siRNA sense strand
cuauauggacucagauuac

SEQ ID NO: 783845 - RNA, 19 nt, Homo sapiens
  misc_RNA (1)...(19): siRNA sense strand
cgacuggcagcuccuagug

SEQ ID NO: 783846 - RNA, 19 nt, Homo sapiens
  misc_RNA (1)...(19): siRNA sense strand
gaacugaaaucccauauuc

SEQ ID NO: 783847 - RNA, 19 nt, Homo sapiens
  misc_RNA (1)...(19): siRNA sense strand
gaagaaaucucugaaacga

SEQ ID NO: 783848 - RNA, 19 nt, Homo sapiens
  misc_RNA (1)...(19): siRNA sense strand
gaaaggaccugaauucacu

SEQ ID NO: 783849 - RNA, 19 nt, Homo sapiens
  misc_RNA (1)...(19): siRNA sense strand
gcaagauguuucucuauug

SEQ ID NO: 783850 - RNA, 19 nt, Homo sapiens
  misc_RNA (1)...(19): siRNA sense strand
caacagaagagaagaaauc

SEQ ID NO: 783851 - RNA, 19 nt, Homo sapiens
  misc_RNA (1)...(19): siRNA sense strand
uuagaaagauugcugaaca

SEQ ID NO: 783852 - RNA, 19 nt, Homo sapiens
  misc_RNA (1)...(19): siRNA sense strand
agaugaagcaugucuguua

SEQ ID NO: 783853 - RNA, 19 nt, Homo sapiens
  misc_RNA (1)...(19): siRNA sense strand
gaccugaauucacuagaga

SEQ ID NO: 783854 - RNA, 19 nt, Homo sapiens
  misc_RNA (1)...(19): siRNA sense strand
ggaggaggaugacgacuac

SEQ ID NO: 783855 - RNA, 19 nt, Homo sapiens
  misc_RNA (1)...(19): siRNA sense strand
gaacaucuggcaagaacga

SEQ ID NO: 783856 - RNA, 19 nt, Homo sapiens
  misc_RNA (1)...(19): siRNA sense strand
gugcagacccugucccuuu

SEQ ID NO: 783857 - RNA, 19 nt, Homo sapiens
  misc_RNA (1)...(19): siRNA sense strand
cuagagaauuugaaucugu

SEQ ID NO: 783858 - RNA, 19 nt, Homo sapiens
  misc_RNA (1)...(19): siRNA sense strand
ggaccugaauucacuagag

SEQ ID NO: 783859 - RNA, 19 nt, Homo sapiens
  misc_RNA (1)...(19): siRNA sense strand
ugaagcaugucuguuacua

SEQ ID NO: 783860 - RNA, 19 nt, Homo sapiens
  misc_RNA (1)...(19): siRNA sense strand
caagauguuucucuauugg

SEQ ID NO: 783861 - RNA, 19 nt, Homo sapiens
  misc_RNA (1)...(19): siRNA sense strand
gcaaagccaaaucaaauag

SEQ ID NO: 783862 - RNA, 19 nt, Homo sapiens
  misc_RNA (1)...(19): siRNA sense strand
gcaagaacgaaguguguau

SEQ ID NO: 783863 - RNA, 19 nt, Homo sapiens
  misc_RNA (1)...(19): siRNA sense strand
ugcaagauguuucucuauu

SEQ ID NO: 783864 - RNA, 19 nt, Homo sapiens
  misc_RNA (1)...(19): siRNA sense strand
gaguauacccagaaucaga

SEQ ID NO: 783865 - RNA, 19 nt, Homo sapiens
  misc_RNA (1)...(19): siRNA sense strand
gaugaagcaugucuguuac

SEQ ID NO: 783866 - RNA, 19 nt, Homo sapiens
  misc_RNA (1)...(19): siRNA sense strand
ccgcaaagccaaaucaaau

SEQ ID NO: 783867 - RNA, 19 nt, Homo sapiens
  misc_RNA (1)...(19): siRNA sense strand
ggauguugguggaguauac

SEQ ID NO: 783868 - RNA, 19 nt, Homo sapiens
  misc_RNA (1)...(19): siRNA sense strand
agucggcgcuggagaagaa

SEQ ID NO: 783869 - RNA, 19 nt, Homo sapiens
  misc_RNA (1)...(19): siRNA sense strand
aacaguagaugaagcaugu

SEQ ID NO: 783870 - RNA, 19 nt, Homo sapiens
  misc_RNA (1)...(19): siRNA sense strand
acagaagcuugcacgagua

SEQ ID NO: 783871 - RNA, 19 nt, Homo sapiens
  misc_RNA (1)...(19): siRNA sense strand
ggaacugaaaucccauauu

SEQ ID NO: 783872 - RNA, 19 nt, Homo sapiens
  misc_RNA (1)...(19): siRNA sense strand
ccagcuggcucggauguug

SEQ ID NO: 783873 - RNA, 19 nt, Homo sapiens
  misc_RNA (1)...(19): siRNA sense strand
cuagaggaauacaaacaga

SEQ ID NO: 783874 - RNA, 19 nt, Homo sapiens
  misc_RNA (1)...(19): siRNA sense strand
ggaaaggaccugaauucac

SEQ ID NO: 783875 - RNA, 19 nt, Homo sapiens
  misc_RNA (1)...(19): siRNA sense strand
caaagcaacagaagagaag

SEQ ID NO: 783876 - RNA, 19 nt, Homo sapiens
  misc_RNA (1)...(19): siRNA sense strand
ccaaagcaacagaagagaa

SEQ ID NO: 783877 - RNA, 19 nt, Homo sapiens
  misc_RNA (1)...(19): siRNA sense strand
agaggcagcugaacgucuu

SEQ ID NO: 783878 - RNA, 19 nt, Homo sapiens
  misc_RNA (1)...(19): siRNA sense strand
cgcaaagccaaaucaaaua

SEQ ID NO: 783879 - RNA, 19 nt, Homo sapiens
  misc_RNA (1)...(19): siRNA sense strand
agacaaagaggcagcugaa

SEQ ID NO: 783880 - RNA, 19 nt, Homo sapiens
  misc_RNA (1)...(19): siRNA sense strand
gagcuugccagaccucuca

SEQ ID NO: 783881 - RNA, 19 nt, Homo sapiens
  misc_RNA (1)...(19): siRNA sense strand
uaacccagguccgcaagga

SEQ ID NO: 783882 - RNA, 19 nt, Homo sapiens
  misc_RNA (1)...(19): siRNA sense strand
uagaaagauugcugaacau

SEQ ID NO: 783883 - RNA, 19 nt, Homo sapiens
  misc_RNA (1)...(19): siRNA sense strand
caaagaggcagcugaacgu

SEQ ID NO: 783884 - RNA, 19 nt, Homo sapiens
  misc_RNA (1)...(19): siRNA sense strand
caaagccaaaucaaauaga

SEQ ID NO: 783885 - RNA, 19 nt, Homo sapiens
  misc_RNA (1)...(19): siRNA sense strand
ccaaaacaguaaaaggaaa

SEQ ID NO: 783886 - RNA, 19 nt, Homo sapiens
  misc_RNA (1)...(19): siRNA sense strand
agauguuucucuauuggaa

SEQ ID NO: 783887 - RNA, 19 nt, Homo sapiens
  misc_RNA (1)...(19): siRNA sense strand
aaggaaaggaccugaauuc

SEQ ID NO: 783888 - RNA, 19 nt, Homo sapiens
  misc_RNA (1)...(19): siRNA sense strand
guagaugaagcaugucugu

SEQ ID NO: 783889 - RNA, 19 nt, Homo sapiens
  misc_RNA (1)...(19): siRNA sense strand
ggaagugcaagauguuucu

SEQ ID NO: 783890 - RNA, 19 nt, Homo sapiens
  misc_RNA (1)...(19): siRNA sense strand
aaacgaacuuuucagcaaa

SEQ ID NO: 783891 - RNA, 19 nt, Homo sapiens
  misc_RNA (1)...(19): siRNA sense strand
cagaagcuugcacgaguaa

SEQ ID NO: 783892 - RNA, 19 nt, Homo sapiens
  misc_RNA (1)...(19): siRNA sense strand
cccaggaagugcaagaugu

SEQ ID NO: 783893 - RNA, 19 nt, Homo sapiens
  misc_RNA (1)...(19): siRNA sense strand
gaggaacuaaucaaagcuu

SEQ ID NO: 783894 - RNA, 19 nt, Homo sapiens
  misc_RNA (1)...(19): siRNA sense strand
gguggaguauacccagaau

SEQ ID NO: 783895 - RNA, 19 nt, Homo sapiens
  misc_RNA (1)...(19): siRNA sense strand
gcagaugaaggcuguaaaa

SEQ ID NO: 783896 - RNA, 19 nt, Homo sapiens
  misc_RNA (1)...(19): siRNA sense strand
uggaguauacccagaauca

SEQ ID NO: 783897 - RNA, 19 nt, Homo sapiens
  misc_RNA (1)...(19): siRNA sense strand
gaagcaugucuguuacuag

SEQ ID NO: 783898 - RNA, 19 nt, Homo sapiens
  misc_RNA (1)...(19): siRNA sense strand
ccaggaagugcaagauguu

SEQ ID NO: 783899 - RNA, 19 nt, Homo sapiens
  misc_RNA (1)...(19): siRNA sense strand
cugaacaucuggcaagaac

SEQ ID NO: 783900 - RNA, 19 nt, Homo sapiens
  misc_RNA (1)...(19): siRNA sense strand
agugcaagauguuucucua

SEQ ID NO: 783901 - RNA, 19 nt, Homo sapiens
  misc_RNA (1)...(19): siRNA sense strand
ugacugaggaacuaaucaa

SEQ ID NO: 783902 - RNA, 19 nt, Homo sapiens
  misc_RNA (1)...(19): siRNA sense strand
aaaggaaaggaccugaauu

SEQ ID NO: 783903 - RNA, 19 nt, Homo sapiens
  misc_RNA (1)...(19): siRNA sense strand
ggaauacaaacagaagcuu

SEQ ID NO: 783904 - RNA, 19 nt, Homo sapiens
  misc_RNA (1)...(19): siRNA sense strand
caagaacgaaguguguaug

SEQ ID NO: 783905 - RNA, 19 nt, Homo sapiens
  misc_RNA (1)...(19): siRNA sense strand
guauuuagcgaaugauguc

SEQ ID NO: 783906 - RNA, 19 nt, Homo sapiens
  misc_RNA (1)...(19): siRNA sense strand
aggaacuaaucaaagcuuu

SEQ ID NO: 783907 - RNA, 19 nt, Homo sapiens
  misc_RNA (1)...(19): siRNA sense strand
gacugaggaacuaaucaaa

SEQ ID NO: 783908 - RNA, 19 nt, Homo sapiens
  misc_RNA (1)...(19): siRNA sense strand
ucucggagcugagcaacuc

SEQ ID NO: 783909 - RNA, 19 nt, Homo sapiens
  misc_RNA (1)...(19): siRNA sense strand
gaacuuuucagcaaauuca

SEQ ID NO: 783910 - RNA, 19 nt, Homo sapiens
  misc_RNA (1)...(19): siRNA sense strand
ugcagacccugucccuuug

SEQ ID NO: 783911 - RNA, 19 nt, Homo sapiens
  misc_RNA (1)...(19): siRNA sense strand
gcaacagaagagaagaaau

SEQ ID NO: 783912 - RNA, 19 nt, Homo sapiens
  misc_RNA (1)...(19): siRNA sense strand
ggcaagaacgaagugugua

SEQ ID NO: 783913 - RNA, 19 nt, Homo sapiens
  misc_RNA (1)...(19): siRNA sense strand
cugaggaacuaaucaaagc

SEQ ID NO: 783914 - RNA, 19 nt, Homo sapiens
  misc_RNA (1)...(19): siRNA sense strand
cagaaucagaaagauguuu

SEQ ID NO: 783915 - RNA, 19 nt, Homo sapiens
  misc_RNA (1)...(19): siRNA sense strand
gugcaagauguuucucuau

SEQ ID NO: 783916 - RNA, 19 nt, Homo sapiens
  misc_RNA (1)...(19): siRNA sense strand
uagaggaauacaaacagaa

SEQ ID NO: 783917 - RNA, 19 nt, Homo sapiens
  misc_RNA (1)...(19): siRNA sense strand
aaucccauauucagagcuu

SEQ ID NO: 783918 - RNA, 19 nt, Homo sapiens
  misc_RNA (1)...(19): siRNA sense strand
cccagaaucagaaagaugu

SEQ ID NO: 783919 - RNA, 19 nt, Homo sapiens
  misc_RNA (1)...(19): siRNA sense strand
cacuagagaauuugaaucu

SEQ ID NO: 783920 - RNA, 19 nt, Homo sapiens
  misc_RNA (1)...(19): siRNA sense strand
gguccgcaaggaacugaaa

SEQ ID NO: 783921 - RNA, 19 nt, Homo sapiens
  misc_RNA (1)...(19): siRNA sense strand
ggaagaccuuuauguauua

SEQ ID NO: 783922 - RNA, 19 nt, Homo sapiens
  misc_RNA (1)...(19): siRNA sense strand
gggaagaccuuuauguauu

SEQ ID NO: 783923 - RNA, 19 nt, Homo sapiens
  misc_RNA (1)...(19): siRNA sense strand
gaaaagcguucacuuguua

SEQ ID NO: 783924 - RNA, 19 nt, Homo sapiens
  misc_RNA (1)...(19): siRNA sense strand
gagaaacccugucagugua

SEQ ID NO: 783925 - RNA, 19 nt, Homo sapiens
  misc_RNA (1)...(19): siRNA sense strand
ccaaagcccuccuaugaaa

SEQ ID NO: 783926 - RNA, 19 nt, Homo sapiens
  misc_RNA (1)...(19): siRNA sense strand
gagaaacccuaugaaugua

SEQ ID NO: 783927 - RNA, 19 nt, Homo sapiens
  misc_RNA (1)...(19): siRNA sense strand
guacgaauguaaucaaugu

SEQ ID NO: 783928 - RNA, 19 nt, Homo sapiens
  misc_RNA (1)...(19): siRNA sense strand
gagaagcccuuugagugua

SEQ ID NO: 783929 - RNA, 19 nt, Homo sapiens
  misc_RNA (1)...(19): siRNA sense strand
guagagaaacccuguaauu

SEQ ID NO: 783930 - RNA, 19 nt, Homo sapiens
  misc_RNA (1)...(19): siRNA sense strand
gggagacucugugaaagua

SEQ ID NO: 783931 - RNA, 19 nt, Homo sapiens
  misc_RNA (1)...(19): siRNA sense strand
ggagagagaccguaugaau

SEQ ID NO: 783932 - RNA, 19 nt, Homo sapiens
  misc_RNA (1)...(19): siRNA sense strand
gaaaaucauucagcuguua

SEQ ID NO: 783933 - RNA, 19 nt, Homo sapiens
  misc_RNA (1)...(19): siRNA sense strand
gagagaaaccguaugaaug

SEQ ID NO: 783934 - RNA, 19 nt, Homo sapiens
  misc_RNA (1)...(19): siRNA sense strand
ggucaaacccuacgaaugu

SEQ ID NO: 783935 - RNA, 19 nt, Homo sapiens
  misc_RNA (1)...(19): siRNA sense strand
gagagaaacccuaugaaug

SEQ ID NO: 783936 - RNA, 19 nt, Homo sapiens
  misc_RNA (1)...(19): siRNA sense strand
gaacaugucagaacacaca

SEQ ID NO: 783937 - RNA, 19 nt, Homo sapiens
  misc_RNA (1)...(19): siRNA sense strand
gugaagcccuaucaaugua

SEQ ID NO: 783938 - RNA, 19 nt, Homo sapiens
  misc_RNA (1)...(19): siRNA sense strand
ggacagagaccguguaagg

SEQ ID NO: 783939 - RNA, 19 nt, Homo sapiens
  misc_RNA (1)...(19): siRNA sense strand
gagagaaaccguacgaaug

SEQ ID NO: 783940 - RNA, 19 nt, Homo sapiens
  misc_RNA (1)...(19): siRNA sense strand
gagaaacccuaugagugua

SEQ ID NO: 783941 - RNA, 19 nt, Homo sapiens
  misc_RNA (1)...(19): siRNA sense strand
ggagagaaaccguaugaau

SEQ ID NO: 783942 - RNA, 19 nt, Homo sapiens
  misc_RNA (1)...(19): siRNA sense strand
gggaaagccuacaguuguu

SEQ ID NO: 783943 - RNA, 19 nt, Homo sapiens
  misc_RNA (1)...(19): siRNA sense strand
ggagagaaacccuaugaau

SEQ ID NO: 783944 - RNA, 19 nt, Homo sapiens
  misc_RNA (1)...(19): siRNA sense strand
gagaaaccguaugaaugua

SEQ ID NO: 783945 - RNA, 19 nt, Homo sapiens
  misc_RNA (1)...(19): siRNA sense strand
gagaaaccguacgaaugua

SEQ ID NO: 783946 - RNA, 19 nt, Homo sapiens
  misc_RNA (1)...(19): siRNA sense strand
gaagcccuaucaauguaaa

SEQ ID NO: 783947 - RNA, 19 nt, Homo sapiens
  misc_RNA (1)...(19): siRNA sense strand
ggagagaagcccuaugugu

SEQ ID NO: 783948 - RNA, 19 nt, Homo sapiens
  misc_RNA (1)...(19): siRNA sense strand
ggaugucccacuuacuuua

SEQ ID NO: 783949 - RNA, 19 nt, Homo sapiens
  misc_RNA (1)...(19): siRNA sense strand
gcaaagccuucgagaaucg

SEQ ID NO: 783950 - RNA, 19 nt, Homo sapiens
  misc_RNA (1)...(19): siRNA sense strand
gaacacacacuggagagaa
